United States Patent Application Publication US 2011/0183924 A1 - sequence listing, part 272

SEQ ID NO: 807047 - protein, 331 aa, Homo sapiens
  misc_feature (5)..(5): Xaa can be any naturally occurring amino acid
  misc_feature (34)..(34): Xaa can be any naturally occurring amino acid
SDFCXSKGLRTLYPFGFRFPVFVSYFTNSGTRYXLRLEVLERLLPRTPPPPPPLMESEMLQSPLLGLGEEDEADLTDWNLPLAFMKKRHCEKIEGSKSLAQSWRMKDRMKTVSVALVLCLNVGVDPPDVVKTTPCARLECWIDPLSMGPQKALETIGANLQKQYENWQPRARYKQSLDPTVDEVKKLCTSLRRNAKEERVLFHYNGHGVPRPTVNGEVWVFNKNYTQYIPLSIYDLQTWMGSPSIFVYDCSNAGLIVKSFKQFALQREQELEVAAINPNHPLAQMPLPPSMKNCIQLAACEATELLPMIPDLPADLFTSCLTTPIKIALRW

SEQ ID NO: 807048 - protein, 433 aa, Homo sapiens
  misc_feature (5)..(5): Xaa can be any naturally occurring amino acid
  misc_feature (34)..(34): Xaa can be any naturally occurring amino acid
SDFCXSKGLRTLYPFGFRFPVFVSYFTNSGTRQXLRLEVLERLLPRTPPPPPPLMESEMLQSPLLGLGEEDEADLTDWNLPLAFMKKRHCEKIEGSKSLAQSWRMKDRMKTVSVALVLCLNVGVDPPDVVKTTPCARLECWIDPLSMGPQKALETIGANLQKQYENWQPRARYKQSLDPTVDEVKKLCTSLRRNAKEERVLFHYNGHGVPRPTVNGEVWVFNKNYTQYIPLSIYDLQTWMGSPSIFVYDCSNAGLIVKSFKQFALQREQELEVAAINPNHPLAQMPLPPSMKNCIQLAACEATELLPMIPDLPADLFTSCLTTPIKIALRWFCMQKCVSLVPGVTLDLIEKIPGRLNDRRTPLGELNWIFTAITDTIAWNVLPRDLFQKLFRQDLLVASLFRNFLLAERIMRSYNCTPVSSPRLPPTYMHAMW

SEQ ID NO: 807049 - protein, 294 aa, Homo sapiens
  misc_feature (5)..(5): Xaa can be any naturally occurring amino acid
  misc_feature (34)..(34): Xaa can be any naturally occurring amino acid
SDFCXSKGLRTLYPFGFRFPVFVSYFTNSGTRQXLRLEVLERLLPRTPPPPPPLMESEMLQSPLLGLGEEDEADLTDWNLPLAFMKKRHCEKIEGSKSLAQSWRMKDRMKTVSVALVLCLNVGVDPPDVVKTTPCARLECWIDPLSMGPQKALETIGANLQKQYENWQPRARYKQSLDPTVDEVKKLCTSLRRNAKEERVLFHYNGHGVPRPTVNGEVWVFNKNYTQYIPLSIYDLQTWMGSPSIFVYDCSNAGLIVKSFKQFALQREQELESCNQPKITLLLKTQTSVTVGRA

SEQ ID NO: 807050 - protein, 403 aa, Homo sapiens
MASQPPPPPKPWETRRIPGAGPGPGPGPTFQSADLGPTLMTRPGQPALTRVPPPILPRPSQQTGSSSVNTFRPAYSSFSSGYGAYGNSFYGGYSPYSYGYNGLGYNRLRVDDLPPSRFVQQAEESSRGAFQSIESIVHAFASVSMMMDATFSAVYNSFRAVLDVANHFSRLKIHFTKVFSAFALVRTIRYLYRRLQRMLGLRRGSENEDLWAESEGTVACLGAEDRAATSAKSWPIFLFFAVILGGPYLIWKLLSTHSDEVTDSINWASGEDDHVVARAEYDFAAVSEEEISFRAGDMLNLALKEQQPKVRGWLLASLDGQTTGLIPANYVKILGKRKGRKTVESSKVSKQQQSFTNPTLTKGATVADSLDEQEAAFESVFVETNKVPVAPDSIGKDGEKQDL

SEQ ID NO: 807051 - protein, 75 aa, Homo sapiens
  misc_feature (7)..(7): Xaa can be any naturally occurring amino acid
  misc_feature (17)..(17): Xaa can be any naturally occurring amino acid
RARRRLXGIPGCDMLNXALKNNNPKCVVGFWLALMAKQQDLYLRIMSKFLAKEKVGKRWNQVKFPSSNNLLPTQH

SEQ ID NO: 807052 - protein, 118 aa, Homo sapiens
LIWLIDSINWASGEDDHVVARAEYDFAAVSEEEISFRAGDMLNLALKEQQPKVRGWLLASLDGQTTGLIPANYVKILGKRKGRKTVESSKVSKQQQSYKSLFTKPLYYVSYKVAHRFA

SEQ ID NO: 807053 - protein, 403 aa, Homo sapiens; identical to SEQ ID NO: 807050

SEQ ID NO: 807054 - protein, 734 aa, Homo sapiens
MRPAVLGSPDRAPPEDEGPVMVKLEDSEEEGEAALWDPGPEAARLRFRCFHYEEATGPQEALAQLRELCRQWLRPEVRSKEQMLELLVLEQFLGALPPEIQARVQGQRPGSPEEAAALVDGLRREPGGPRRWVTVQVQGQEVLSEKMEPSSFQPLPETEPPTPEPGPKTPPRTMQESPLGLQVKEESEVTEDSDFLESGPLAATQESVPTLLPEEAQRCGTVLDQIFPHSKTGPEGPSWREHPRALWHEEAGGIFSPGFALQLGSISAGPGSVSPHLHVPWDLGMAGLSGQIQSPSREGGFAHALLLPSDLRSEQDPTDEDPCRGVGPALITTRWRSPRGRSRGRPSTGGGVVRGGRCDVCGKVFSQRSNLLRHQKIHTGERPFVCSECGRSFSRSSHLLRHQLTHTEERPFVCGDCGQGFVRSARLEEHRRVHTGEQPFRCAECGQSFRQRSNLLQHQRIHGDPPGPGAKPPAPPGAPEPPGPFPCSECRESFARRAVLLEHQAVHTGDKSFGCVECGERFGRRSVLLQHRRVHSGERPFACAECGQSFRQRSNLTQHRRIHTGERPFACAECGKAFRQRPTLTQHLRVHTGEKPFACPECGQRFSQRLKLTRHQRTHTGEKPYHCGECGLGFTQVSRLTEHQRIHTGERPFACPECGQSFRQHANLTQHRRIHTGERPYACPECGKAFRQRPTLTQHLRTHRREKPFACQDCGRRFHQSTKLIQHQRVHSAE

SEQ ID NO: 807055 - protein, 734 aa, Homo sapiens; identical to SEQ ID NO: 807054

SEQ ID NO: 807056 - protein, 121 aa, Homo sapiens
ASSYFFTRGRHWPQIPDLVPSMRPAVLGSPDRAPPEDEGPVMVKLEDSEEEGEAALWDPGPEAARLRFRCFHYEEATGPQEALAQLRELCRQWLRPEVRSKEQMLELLCTPVWAMGVRPSL

SEQ ID NO: 807057 - protein, 485 aa, Homo sapiens
MNGPLVYAGFALQLGSISAGPGSVSPHLHVPWDLGMAGLSGQIQSPSREGGFAHALLLPSDLRSEQDPTDEDPCRGVGPALITTRWRSPRGRSRGRPSTGGGVVRGGRCDVCGKVFSQRSNLLRHQKIHTGERPFVCSECGRSFSRSSHLLRHQLTHTEERPFVCGDCGQGFVRSARLEEHRRVHTGEQPFRCAECGQSFRQRSNLLQHQRIHGDPPGPGAKPPAPPGAPEPPGPFPCSECRESFARRAVLLEHQAVHTGDKSFGCVECGERFGRRSVLLQHRRVHSGERPFACAECGQSFRQRSNLTQHRRIHTGERPFACAECGKAFRQRPTLTQHLRVHTGEKPFACPECGQRFSQRLKLTRHQRTHTGEKPYHCGECGLGFTQVSRLTEHQRIHTGERPFACPECGQSFRQHANLTQHRRIHTGERPYACPECGKAFRQRPTLTQHLRTHRREKPFACQDCGRRFHQSTKLIQHQRVHSAE

SEQ ID NO: 807058 - protein, 471 aa, Homo sapiens
MNGPLVYAGFALQLGSISAGPGSVSPHLHVPWDLGMAGLSGQIQSPSREGGFAHALLLPSDLRSEQDPTDEDPCRGVGPALITTRWRSPRGRSRGRPSTGGGVVRGGRCDVCGKVFSQRSNLLRHQKIHTGERPFVCSECGRSFSRSSHLLRHQLTHTEERPFVCGDCGQGFVRSARLEEHRRVHTGEQPFRCAECGQSFRQRSNLLQHQRIHGDPPGPGAKPPAPPGAPEPPGPFPCSECRESFARRAVLLEHQAVHTGDKSFGCVECGERFGRRSVLLQHRRVHSGERPFACAECGQSFRQRSNLTQHRRIHTGERPFACAECGKAFRQRPTLTQHLRVHTGEKPFACPECGQRFSQRLKLTRHQRTHTGEKPYHCGECGLGFTQVSRLTEHQRIHTGERPFACPECGQSFRQHANLTQHRRIHTGERPYACPECGKAFRQRPTLTQHLRTHRHQSTKLIQHQRVHSAE

SEQ ID NO: 807059 - protein, 328 aa, Homo sapiens
MNGPLVYAGFALQLGSISAGPGSVSPHLHVPWDLGMAGLSGQIQSPSREGGFAHALLLPSDLRSEQDPTDEDPCRGVGPALITTRWRSPRGRSRGRPSTGGGVVRGGRCDVCGKVFSQRSNLLRHQKIHTGERPFVCSECGRSFSRSSHLLRHQLTHTEERPFVCGDCGQGFVRSARLEEHRRVHTGEKPFACPECGQRFSQRLKLTRHQRTHTGEKPYHCGECGLGFTQVSRLTEHQRIHTGERPFACPECGQSFRQHANLTQHRRIHTGERPYACPECGKAFRQRPTLTQHLRTHRREKPFACQDCGRRFHQSTKLIQHQRVHSAE

SEQ ID NO: 807060 - protein, 485 aa, Homo sapiens; identical to SEQ ID NO: 807057

SEQ ID NO: 807061 - protein, 485 aa, Homo sapiens; identical to SEQ ID NO: 807057

SEQ ID NO: 807062 - protein, 718 aa, Homo sapiens
MRPAVLGSPDRAPPEDEGPVMVKLEDSEEEGEAALWDPGPEAARLRFRCFHYEEATGPQEALAQLRELCRQWLRPEVRSKEQMLELLVLEQFLGALPPEIQARVQGQRPGSPEEAAALVDGLRREPGGPRRWVTVQVQGQEVLSEKMEPSSFQPLPETEPPTPEPGPKTPPRTMQESPLGLQVKEESEVTEDSDFLESGPLAATQESVPTLLPEEAQRCGTVLDQIFPHSKTGPEGPSWREHPRALWHEEAGGIFSPGFALQLGSISAGPGSVSPHLHVPWDLGMAGLSGQIQSPSREGGFAHALLLPSDLRSEQDPTDEDPCRGVGPALITTRWRSPRGRCDVCGKVFSQRSNLLRHQKIHTGERPFVCSECGRSFSRSSHLLRHQLTHTEERPFVCGDCGQGFVRSARLEEHRRVHTGEQPFRCAECGQSFRQRSNLLQHQRIHGDPPGPGAKPPAPPGAPEPPGPFPCSECRESFARRAVLLEHQAVHTGDKSFGCVECGERFGRRSVLLQHRRVHSGERPFACAECGQSFRQRSNLTQHRRIHTGERPFACAECGKAFRQRPTLTQHLRVHTGEKPFACPECGQRFSQRLKLTRHQRTHTGEKPYHCGECGLGFTQVSRLTEHQRIHTGERPFACPECGQSFRQHANLTQHRRIHTGERPYACPECGKAFRQRPTLTQHLRTHRREKPFACQDCGRRFHQSTKLIQHQRVHSAE

SEQ ID NO: 807063 - protein, 775 aa, Homo sapiens
MILRCHPLHKRRFLPKAAAAEGTARGGRGRHWPQIPDLVPSMRPAVLGSPDRAPPEDEGPVMVKLEDSEEEGEAALWDPGPEAARLRFRCFHYEEATGPQEALAQLRELCRQWLRPEVRSKEQMLELLVLEQFLGALPPEIQARVQGQRPGSPEEAAALVDGLRREPGGPRRWVTVQVQGQEVLSEKMEPSSFQPLPETEPPTPEPGPKTPPRTMQESPLGLQVKEESEVTEDSDFLESGPLAATQESVPTLLPEEAQRCGTVLDQIFPHSKTGPEGPSWREHPRALWHEEAGGIFSPGFALQLGSISAGPGSVSPHLHVPWDLGMAGLSGQIQSPSREGGFAHALLLPSDLRSEQDPTDEDPCRGVGPALITTRWRSPRGRSRGRPSTGGGVVRGGRCDVCGKVFSQRSNLLRHQKIHTGERPFVCSECGRSFSRSSHLLRHQLTHTEERPFVCGDCGQGFVRSARLEEHRRVHTGEQPFRCAECGQSFRQRSNLLQHQRIHGDPPGPGAKPPAPPGAPEPPGPFPCSECRESFARRAVLLEHQAVHTGDKSFGCVECGERFGRRSVLLQHRRVHSGERPFACAECGQSFRQRSNLTQHRRIHTGERPFACAECGKAFRQRPTLTQHLRVHTGEKPFACPECGQRFSQRLKLTRHQRTHTGEKPYHCGECGLGFTQVSRLTEHQRIHTGERPFACPECGQSFRQHANLTQHRRIHTGERPYACPECGKAFRQRPTLTQHLRTHRREKPFACQDCGRRFHQSTKLIQHQRVHSAE

SEQ ID NO: 807064 - protein, 259 aa, Homo sapiens
MRPAVLGSPDRAPPEDEGPVMVKLEDSEEEGEAALWDPGPEAARLRFRCFHYEEATGPQEALAQLRELCRQWLRPEVRSKEQMLELLVLEQFLGALPPEIQARVQGQRPGSPEEAAALVDGLRREPGGPRRWVTVQVQGQEVLSEKMEPSSFQPLPETEPPTPEPGPKTPPRTMQESPLGLQVKEESEVTEDSDFLESGPLAATQESVPTLLPEEAQRCGTVLDQIFPHSKTGPEGPSWREHPRALWHEEAGGIFSPGK

SEQ ID NO: 807065 - protein, 211 aa, Homo sapiens
PQIPDLVPSMRPAVLGSPDRAPPEDEGPVMVKLEDSEEEGEAALWDPGPEAARLRFRCFHYEEATGPQEALAQLRELCRQWLRPEVRSKEQMLELLVLEQFLGALPPEIQARVQGQRPGSPEEAAALVDGLRREPGGPRRWVSECPRVGFRTGASSSSASPWAAPRFARHTFSLVVQKWPPATETLCKAAQGRGIPGPDSPAHSCITCSHV

SEQ ID NO: 807066 - protein, 111 aa, Homo sapiens
TCGTQRGSCSWAGLGLGSMSLRVGARAKRNPWVSGDPGGPDQCSLVVGADAWAHQRAGRAEVQVRAVDPGGGWDDRRVVLAVKRVLEAQERVGEAGGPGPGVCRPSSCPAA

SEQ ID NO: 807067 - protein, 189 aa, Homo sapiens
MRDCLSLKPRPLFPTQFFFILLLIFIAEVAAAVVALVYTTMAEHFLTLLVVPAIKKDYGSQEDFTQVWNTTMKGLKCCGFTNYTDFEDSPYFKENSAFPPFCCNDNVTNTANETCTKQKAHDQKVEVAQSELYDIRIMHPGWGAVEWGPAGPDGPFLSDSKVLCLNGQEWKAARVGGESGKTSRKDQRR

SEQ ID NO: 807068 - protein, 241 aa, Homo sapiens
MQCFSFIKTMMILFNLLIFLCGAALLAVGIWVSIDGASFLKIFGPLSSSAMQFVNVGYFLIAAGVVVFALGFLGCYGAKTESKCALVTFFFILLLIFIAEVAAAVVALVYTTMAEHFLTLLVVPAIKKDYGSQEDFTQVWNTTMKGLKCCGFTNYTDFEDSPYFKENSAFPPFCCNDNVTNTANETCTKQKAHDQKVEGCFNQLLYDIRTNAVTVGGVAAGIGGLELAAMIVSMYLYCNLQ

SEQ ID NO: 807069 - protein, 241 aa, Homo sapiens; identical to SEQ ID NO: 807068

SEQ ID NO: 807070 - protein, 241 aa, Homo sapiens; identical to SEQ ID NO: 807068

SEQ ID NO: 807071 - protein, 241 aa, Homo sapiens; identical to SEQ ID NO: 807068

SEQ ID NO: 807072 - protein, 241 aa, Homo sapiens; identical to SEQ ID NO: 807068

SEQ ID NO: 807073 - protein, 241 aa, Homo sapiens; identical to SEQ ID NO: 807068

SEQ ID NO: 807074 - protein, 191 aa, Homo sapiens [sequence omitted]

SEQ ID NO: 807075 - protein, 226 aa, Homo sapiens
MVIFLCGAALLAVGIWVSIDGASFLKIFGPLSSSAMQFVNVGYFLIAAGVVVFALGFLGCYGAKTESKCALVTFFFILLLIFIAEVAAAVVALVYTTMAEHFLTLLVVPAIKKDYGSQEDFTQVWNTTMKGLKCCGFTNYTDFEDSPYFKENSAFPPFCCNDNVTNTANETCTKQKAHDQKVEGCFNQLLYDIRTNAVTVGGVAAGIGGLELAAMIVSMYLYCNLQ

SEQ ID NO: 807076 - protein, 226 aa, Homo sapiens [sequence omitted]

SEQ ID NO: 807077 - protein, 291 aa, Homo sapiens
MGPQLCGAALLAVGIWVSIDGASFLKIFGPLSSSAMQFVNVGYFLIAAGVVVFALGFLGCYGAKTESKCALVTVCETQLHRLMTKSPLALDTRPWDSQTLLWTPLGSGFCLTFPGGGLGQGGHEGLSLPKTRPLFPTQFFFILLLIFIAEVAAAVVALVYTTMAEHFLTLLVVPAIKKDYGSQEDFTQVWNTTMKGLKCCGFTNYTDFEDSPYFKENSAFPPFCCNDNVTNTANETCTKQKAHDQKVEGCFNQLLYDIRTNAVTVGGVAAGIGGLELAAMIVSMYLYCNLQ

SEQ ID NO: 807078 - protein, 169 aa, Homo sapiens [sequence omitted]

SEQ ID NO: 807079 - protein, 164 aa, Homo sapiens
MQCFSFIKTMMILFNLLIFLCGAALLAVGIWVSIDGASFLKIFGPLSSSAMQFVNVGYFLIAAGVVVFALGFLGCYGAKTESKCALVTVCETQLHRLMTKSPLALDTRPWDSQTLLWTPLGSGFCLTFPGGGLGQGGHEGLSLPKTQTPVPHSVLLHPPPHLHC

SEQ ID NO: 807080 - protein, 183 aa, Homo sapiens
MQCFSFIKTMMILFNLLIFLCGAALLAVGIWVSIDGASFLKIFGPLSSSAMQFVNVGYFLIAAGVVVFALGFLGCYGAKTESKCALVTFFFILLLIFIAEVAAAVVALVYTTMAEHFLTLLVVPAIKKDYGSQEDFTQVWNTTMKGVRLAGGGFRVERKKQGPTSTLILSPAQVLWLHQLYGF

SEQ ID NO: 807081 - protein, 148 aa, Homo sapiens
MQCFSFIKTMMILFNLLIFLCGAALLAVGIWVSIDGASFLKIFGPLSSSAMQFVNVGYFLIAAGVVVFALGFLGCYGAKTESKCALVTFFFILLLIFIAEVAAAVVALVYTTMAEHFLTLLVVPAIKKDYGSQEDFTQVWNTTMKGGF

SEQ ID NO: 807082 - protein, 156 aa, Homo sapiens
MQCFSFIKTMMILFNLLIFLCGAALLAVGIWVSIDGASFLKIFGPLSSSAMQFVNVGYFLIAAGVVVFALGFLGCYGAKTESKCALVTFFFILLLIFIAEVAAAVVALVYTTMVRHWDGGREEDWAKPWEWAVACEWAPSVPAPKHWPASPRLSTS

SEQ ID NO: 807083 - protein, 243 aa, Homo sapiens
MQCFSFIKTMMILFNLLIFLCGAALLAVGIWVSIDGASFLKIFGPLSSSAMQFVNVGYFLIAAGVVVFALGFLGCYGAKTESKCALVTFFFILLLIFIAEVAAAVVALVYTTMAEHFLTLLVVPAIKKDYGSQEDFTQVWNTTMKGLKCCGFTNYTDFEDSPYFKENSAFPPFCCNDNVTNTANETCTKQKAHDQKVEGCFNQLLYDIRTNAVTVGGVAAGIGGLELAAMIVSMYLLPIPPVY

SEQ ID NO: 807084 - protein, 241 aa, Homo sapiens; identical to SEQ ID NO: 807068

SEQ ID NO: 807085 - protein, 149 aa, Homo sapiens
MGPQLCGAALLAVGIWVSIDGASFLKIFGPLSSSAMQFVNVGYFLIAAGVVVFALGFLGCYGAKTESKCALVTVCETQLHRLMTKSPLALDTRPWDSQTLLWTPLGSGFCLTFPGGGLGQGGHEGLSLPKTQTPVPHSVLLHPPPHLHC

SEQ ID NO: 807086 - protein, 110 aa, Homo sapiens
GRLLLLNSRSSRLRGLKCCGFTNYTDFEDSPYFKENSAFPPFCCNDNVTNTANETCTKQKAHDQKVEGCFNQLLYDIRTNAVTVGGVAAGIGGLELAAMIVSMYLYCNLQ

SEQ ID NO: 807087 - protein, 258 aa, Homo sapiens
MQCFSFIKTMMILFNLLIFLCGAALLAVGIWVSIDGASFLKIFGPLSSSAMQFVNVGYFLIAAGVVVFALGFLGCYGAKTESKCALVTFFFILLLIFIAEVAAAVVALVYTTMAEHFLTLLVVPAIKKDYGSQEDFTQVWNTTMKGLKCCGFTNYTDFEDSPYFKENSAFPPFCCNDNVTNTANETCTKQKAHDQKVEGCFNQLLYDIRTNAVTVGGVAAGIGGLEFFSNSARRPPLPESLYSTPIRRDHVFLQPSPP

SEQ ID NO: 807088 - protein, 210 aa, Homo sapiens
MQCFSFIKTMMILFNLLIFLCGAALLAVGIWVSIDGASFLKIFGPLSSSAMQFVNVGYFLIAAGVVVFALGFLGCYGAKTESKCALVTFFFILLLIFIAEVAAAVVALVYTTMAEHFLTLLVVPAIKKDYGSQEDFTQVWNTTMKGLKCCGFTNYTDFEDSPYFKENSAFPPFCCNDNVTNTAMYSQEVLTSHDLVSTRVCFKSADVCQA

SEQ ID NO: 807089 - protein, 311 aa, Homo sapiens
MGPQLCGAALLAVGIWVSIDGASFLKIFGPLSSSAMQFVNVGYFLIAAGVVVFALGFLGCYGAKTESKCALVTVCETQLHRLMTKSPLALDTRPWDSQTLLWTPLGSGFCLTFPGGGLGQGGHEGLSLPKTRPLFPTQFFFILLLIFIAEVAAAVVALVYTTMAEHFLTLLVVPAIKKDYGSQEDFTQVWNTTMKGLKCCGFTNYTDFEDSPYFKENSAFPPFCCNDNVTNTANETCTKQKAHDQKVEVAQSELYDIRIMHPGWGAVEWGPAGPDGPFLSDSKVLCLNGQEWKAARVGGESGKTSRKDQRR

SEQ ID NO: 807090 - protein, 140 aa, Homo sapiens
ASPLRAALGLRSLVCALVRPPVLSTRAWPPDDAGAARAGRGSLRSLLPSAGPLRRSPQFPARTRSGPPNLRPKSGGGSGGKKMKNEIAAVVFFFTRLVRKHDKLKKEAVERFAEKLTLILQEKYKNHWYPEKPSKGQAYR

SEQ ID NO: 807091 - protein, 378 aa, Homo sapiens
ASPLRAALGLRSLVCALVRPPVLSTRAWPPDDAGAARAGRGSLRSLLPSAGPLRRSPQFPARTRSGPPNLRPKSGGGSGGKKMKNEIAAVVFFFTRLVRKHDKLKKEAVERFAEKLTLILQEKYKNHWYPEKPSKGQAYRCIRVNKFQRVDPDVLKACENSCILYSDLGLPKELTLWVDPCEVCCRRDGVSPCWPDCSQTPDLVIRPPWPPKALDYRREPLRPASSFLIMYGEKNNAFIVASFENKDENKDEISRKVTRALDKVTSDYHSGSSSSDEETSKEMEVKPSSVTAAASPVYQISELIFPPLPMWHPLPRKKPGMYRGNGHQNHYPPPVPFGYPNQGRKNKPYRPIPVTWVPPPGMHCDRNHWINPHMLAPH

SEQ ID NO: 807092 - protein, 334 aa, Homo sapiens
ASPLRAALGLRSLVCALVRPPVLSTRAWPPDDAGAARAGRGSLRSLLPSAGPLRRSPQFPARTRSGPPNLRPKSGGGSGGKKMKNEIAAVVFFFTRLVRKHDKLKKEAVERFAEKLTLILQEKYKNHWYPEKPSKGQAYRCIRVNKFQRVDPDVLKACENSCILYSDLGLPKELTLWVDPCEVCCRYGEKNNAFIVASFENKDENKDEISRKVTRALDKVTSDYHSGSSSSDEETSKEMEVKPSSVTAAASPVYQISELIFPPLPMWHPLPRKKPGMYRGNGHQNHYPPPVPFGYPNQGRKNKPYRPIPVTWVPPPGMHCDRNHWINPHMLAPH

SEQ ID NO: 807093 - protein, 334 aa, Homo sapiens; identical to SEQ ID NO: 807092

SEQ ID NO: 807094 - protein, 762 aa, Homo sapiens
MIGIKVIVHIYMNVIYFPLHLFVVYSRAYTSLVLVGCTNLCAVLFARCLDDHLVSLRMSGSRKEFDVKQILKIRWRWFGHQASSPNSTVDSQQGEFWNRGQTGANGGRKFLDPCSLQLPLASIGYRRSSQLDFQNSPSWPMASTSEVPAFEFTAEDCGGAHWLDRPEVDDGTSEEENESDSSSCRTSNSSQTLSSCHTMEPCTSDEFFQALNHAEQTFKKMENYLRHKQLCDVILVAGDRRIPAHRLVLSSVSDYFAAMFTNDVREARQEEIKMEGVEPNSLWSLIQYAYTGRLELKEDNIECLLSTACLLQLSQVVEACCKFLMKQLHPSNCLGIRSFADAQGCTDLHKVAHNYTMEHFMEVIRNQEFVLLPASEIAKLLASDDMNIPNEETILNALLTWVRHDLEQRRKDLSKLLAYIRLPLLAPQFLADMENNVLFRDDIECQKLIMEAMKYHLLPERRPMLQSPRTKPRKSTVGTLFAVGGMDSTKGATSIEKYDLRTNMWTPVANMNGRRLQFGVAVLDDKLYVVGGRDGLKTLNTVECYNPKTKTWSVMPPMSTHRHGLGVAVLEGPMYAVGGHDGWSYLNTVERWDPQARQWNFVATMSTPRSTVGVAVLSGKLYAVGGRDGSSCLKSVECFDPHTNKWTLCAQMSKRRGGVGVTTWNGLLYAIGGHDAPASNLTSRLSDCVERYDPKTDMWTAVASMSISRDAVGVCLLGDKLYAVGGYDGQAYLNTVEAYDPQTNEWTQVWHSCFIITLTLFF

SEQ ID NO: 807095 - protein, 190 aa, Homo sapiens
MNVIYFPLHLFVVYSRAYTSLVLVGCTNLCAVLFARCLDDHLVSLRMSGSRKEFDVKQILKIRWRWFGHQASSPNSTVDSQQGEFWNRGQTGANGGRKFLDPCSLQLPLASIGYRRSSQLDFQNSPSWPMASTSEVPAFEFTAEDCGGAHWLDRPEVDDGTSEEENESDSSSCRLIIFLLLEKGCGGMAL

SEQ ID NO: 807096 - protein, 755 aa, Homo sapiens [sequence omitted]

SEQ ID NO: 807097 - protein, 589 aa, Homo sapiens
GRLRSPTRTSNSSQTLSSCHTMEPCTSDEFFQALNHAEQTFKKMENYLRHKQLCDVILVAGDRRIPAHRLVLSSVSDYFAAMFTNDVREARQEEIKMEGVEPNSLWSLIQYAYTGRLELKEDNIECLLSTACLLQLSQVVEACCKFLMKQLHPSNCLGIRSFADAQGCTDLHKVAHNYTMEHFMEVIRNQEFVLLPASEIAKLLASDDMNIPNEETILNALLTWVRHDLEQRRKDLSKLLAYIRLPLLAPQFLADMENNVLFRDDIECQKLIMEAMKYHLLPERRPMLQSPRTKPRKSTVGTLFAVGGMDSTKGATSIEKYDLRTNMWTPVANMNGRRLQFGVAVLDDKLYVVGGRDGLKTLNTVECYNPKTKTWSVMPPMSTHRHGLGVAVLEGPMYAVGGHDGWSYLNTVERWDPQARQWNFVATMSTPRSTVGVAVLSGKLYAVGGRDGSSCLKSVECFDPHTNKWTLCAQMSKRRGGVGVTTWNGLLYAIGGHDAPASNLTSRLSDCVERYDPKTDMWTAVASMSISRDAVGVCLLGDKLYAVGGYDGQAYLNTVEAYDPQTNEWTQVAPLCLGRAGACVVTVKL

SEQ ID NO: 807098 - protein, 755 aa, Homo sapiens [sequence omitted]

SEQ ID NO: 807099 - protein, 757 aa, Homo sapiens [sequence omitted]

SEQ ID NO: 807100 - protein, 757 aa, Homo sapiens [sequence omitted]

SEQ ID NO: 807101 - protein, 770 aa, Homo sapiens
MNVIYFPLHLFVVYSRAYTSLVLVGCTNLCAVLFARCLDDHLVSLRMSGSRKEFDVKQILKIRWRWFGHQASSPNSTVDSQQGEFWNRGQTGANGGRKFLDPCSLQLPLASIGYRRSSQLDFQNSPSWPMASTSEVPAFEFTAEDCGGAHWLDRPEVDDGTSEEENESDSSSCRTSNSSQTLSSCHTMEPCTSDEFFQALNHAEQTFKKMENYLRHKQLCDVILVAGDRRIPAHRLVLSSVSDYFAAMFTNDVREARQEEIKMEGVEPNSLWSLIQYAYTGRLELKEDNIECLLSTACLLQLSQVVEACCKFLMKQLHPSNCLGIRSFADAQGCTDLHKVAHNYTMEHFMEVIRNQEFVLLPASEIAKLLASDDMNIPNEETILNALLTWVRHDLEQRRKDLSKLLAYIRLPLLAPQFLADMENNVLFRDDIECQKLIMEAMKYHLLPERRPMLQSPRTKPRKSTVGTLFAVGGMDSTKGATSIEKYDLRTNMWTPVANMNGRRLQFGVAVLDDKLYVVGGRDGLKTLNTVECYNPKTKTWSVMPPMSTHRHGLGVAVLEGPMYAVGGHDGWSYLNTVERWDPQARQWNFVATMSTPRSTVGVAVLSGKLYAVGGRDGSSCLKSVECFDPHTNKWTLCAQMSKRRGGVGVTTWNGLLYAIGGHDAPASNLTSRLSDCVERYDPKTDMWTAVASMSISRDAVGVCLLGDKLYAVGGYDGQAYLNTVEAYDPQTNEWTQVFSHTFEDSKDHLVAIKQTIWRQNSLSEEFRSH

SEQ ID NO: 807102 - protein, 755 aa, Homo sapiens [sequence omitted]

SEQ ID NO: 807103 - protein, 755 aa, Homo sapiens [sequence omitted]

SEQ ID NO: 807104 - protein, 755 aa, Homo sapiens [sequence omitted]

SEQ ID NO: 807105 - protein, 755 aa, Homo sapiens [sequence omitted]

SEQ ID NO: 807106 - protein, 694 aa, Homo sapiens
MNVIYFPLHLFVVYSRAYTSLVLVGCTNLCAVLFARCLDDHLVSLRMSGSRKEFDVKQILKIRWRWFGHQASSPNSTVDSQQGEFWNRGQTGANGGRKFLDPCSLQLPLASIGYRRSSQLDFQNSPSWPMASTSEVPAFEFTAEDCGGAHWLDRPEVDDGTSEEENESDSSSCRTSNSSQTLSSCHTMEPCTSDEFFQALNHAEQTFKKMENYLRHKQLCDVILVAGDRRIPAHRLVLSSVSDYFAAMFTNDVREARQEEIKMEGVEPNSLWSLIQYAYTGRLELKEDNIECLLSTACLLQLSQVVEACCKFLMKQLHPSNCLGIRSFADAQGCTDLHKVAHNYTMEHFMEVIRNQEFVLLPASEIAKLLASDDMNIPNEETILNALLTWVRHDLEQRRKDLSKLLAYIRLPLLAPQFLADMENNVLFRDDIECQKLIMEAMKYHLLPERRPMLQSPRTKPRKSTVGTLFAVGGMDSTKGATSIEKYDLRTNMWTPVANMNGRRLQFGVAVLDDKLYVVGGRDGLKTLNTVECYNPKTKTWSVMPPMSTHRHGLGVAVLEGPMYAVGGHDGWSYLNTVERWDPQARQWNFVATMSTPRSTVGVAVLSGKLYAVGGRDGSSCLKSVECFDPHTNKWTLCAQMSKRRGGVGVTTWNGLLYAIGGHDAPASNLTSRLSDCVESAKRIMIPKQTCGLQ

SEQ ID NO: 807107 - protein, 491 aa, Homo sapiens
MNVIYFPLHLFVVYSRAYTSLVLVGCTNLCAVLFARCLDDHLVSLRMSGSRKEFDVKQILKIRWRWFGHQASSPNSTVDSQQGEFWNRGQTGANGGRKFLDPCSLQLPLASIGYRRSSQLDFQNSPSWPMASTSEVPAFEFTAEDCGGAHWLDRPEVDDGTSEEENESDSSSCRTSNSSQTLSSCHTMEPCTSDEFFQALNHAEQTFKKMENYLRHKQLCDVILVAGDRRIPAHRLVLSSVSDYFAAMFTNDVREARQEEIKMEGVEPNSLWSLIQYAYTGRLELKEDNIECLLSTACLLQLSQVVEACCKFLMKQLHPSNCLGIRSFADAQGCTDLHKVAHNYTMEHFMEVIRNQEFVLLPASEIAKLLASDDMNIPNEETILNALLTWVRHDLEQRRKDLSKLLAYIRLPLLAPQFLADMENNVLFRDDIECQKLIMEAMKYHLLPERRPMLQSPRTKPRKSTVGTLFAVGGMDSTKEQALEAQFRGAL

SEQ ID NO: 807108 - protein, 1054 aa, Homo sapiens
MGEIEGTYRVLQTAGMRLGAQTPVGVSTLEPGQTLLPRMQEKHLHLRVKLLDNTMEIFDIEPKCDGQVLLTQVWKRLNLVECDYFGMEFQNTQSYWIWLEPMKPIIRQIRRPKNVVLRLAVKFFPPDPGQLQEEYTRYLFALQLKRDLLEERLTCADTTAALLTSHLLQSEIGDYDETLDREHLKVNEYLPGQQHCLEKILEFHQKHVGQTPAESDFQVLEIARKLEMYGIRFHMASDREGTKIQLAVSHMGVLVFQGTTKINTFNWSKVRKLSFKRKRFLIKLHPEVHGPYQDTLEFLLGSRDECKNFWKICVEYHTFFRLLDQPKPKAKAVFFSRGSSFRYSGRTQKQLVDYFKDSGMKRIPYERRHSKTHTSVRALTADLPKQSISFPEGLRTPASPSSANAFYSLSPSTLVPSGLPEFKDSSSSLTDPQVSYVKSPAAERRSGAVAGGPDTPSAQPLGPPALQPGPGLSTKSPQPSPSSRKSPLSLSPAFQVPLGPAEQGSSPLLSPVLSDAGGAGMDCEEPRHKRVPADEAYFIVKEILATERTYLKDLEVITVWFRSAVVKEDAMPATLMTLLFSNIDPIYEFHRGFLREVEQRLALWEGPSKAHTKGSHQRIGDILLRNMRQLKEFTSYFQRHDEVLTELEKATKRCKKLEAVYKEFELQKVCYLPLNTFLLKPIQRLLHYRLLLRRLCGHYSPGHHDYADCHDALKAITEVTTTLQHILIRLENLQKLTELQRDLVGIENLIAPGREFIREGCLHKLTKKGLQQRMFFLFSDMLLYTSKGVAGTSHFRIRGLLPLQGMLVEESDNEWSVPHCFTIYAAQKTIVVAASTRLEKEKWMLDLNSAIQAAKSGGDTAPALPGRTVCTRPPRSPNEVSLEQESEDDARGVRSSLEGHGQHRANTTMHVCWYRNTSVSRADHSAAVENQLSGYLLRKFKNSHGWQKLWVVFTNFCLFFYKTHQDDYPLASLPLLGYSVSIPREADGIHKDYVFKLQFKSHVYFFRAESKYTFERWMEVIQGASSSAGRAPSIVQDGPQPSSGLEGMVRGKEE

SEQ ID NO: 807109 - protein, 122 aa, Homo sapiens
MGEIEGTYRVLQTAGMRLGAQTPVGVSTLEPGQTLLPRMQEKHLHLRVKLLDNTMEIFDIEPKCDGQVLLTQVWKRLNLVECDYFGMEFQNTQSYWIWLEPMKPIIRQIRNRVSLFVAQAGV

SEQ ID NO: 807110 - protein, 849 aa, Homo sapiens
VHLSSQLLRRLRQENPLEPGRQSCSEPRSRHCTPAWAQSKILSQKKTLLIFNFGIPYRVICFLNVLSLVQYFILELINLCVLFLGPYQDTLEFLLGSRDECKNFWKICVEYHTFFRLLDQPKPKAKAVFFSRGSSFRYSGRTQKQLVDYFKDSGMKRIPYERRHSKTHTSVRALTADLPKQSISFPEGLRTPASPSSANAFYSLSPSTLVPSGLPEFKDSSSSLTDPQVSYVKSPAAERRSGAVAGGPDTPSAQPLGPPALQPGPGLSTKSPQPSPSSRKSPLSLSPAFQVPLGPAEQGSSPLLSPVLSDAGGAGMDCEEPRHKRVPADEAYFIVKEILATERTYLKDLEVITVWFRSAVVKEDAMPATLMTLLFSNIDPIYEFHRGFLREVEQRLALWEGPSKAHTKGSHQRIGDILLRNMRQLKEFTSYFQRHDEVLTELEKATKRCKKLEAVYKEFELQKVCYLPLNTFLLKPIQRLLHYRLLLRRLCGHYSPGHHDYADCHDALKAITEVTTTLQHILIRLENLQKLTELQRDLVGIENLIAPGREFIREGCLHKLTKKGLQQRMFFLFSDMLLYTSKGVAGTSHFRIRGLLPLQGMLVEESDNEWSVPHCFTIYAAQKTIVVAASTRLEKEKWMLDLNSAIQAAKSGGDTAPALPGRTVCTRPPRSPNEVSLEQESEDDARGVRSSLEGHGQHRANTTMHVCWYRNTSVSRADHSAAVENQLSGYLLRKFKNSHGWQKLWVVFTNFCLFFYKTHQDDYPLASLPLLGYSVSIPREADGIHKDYVFKLQFKSHVYFFRAESKYTFERWMEVIQGASSSAGRAPSIVQDGPQPSSGLEGMVRGKEE

SEQ ID NO: 807111 - protein, 686 aa, Homo sapiens
MHTTDPDRRSVLQWLAKQSISFPEGLRTPASPSSANAFYSLSPSTLVPSGLPEFKDSSSSLTDPQVSYVKSPAAERRSGAVAGGPDTPSAQPLGPPALQPGPGLSTKSPQPSPSSRKSPLSLSPAFQVPLGPAEQGSSPLLSPVLSDAGGAGMDCEEPRHKRVPADEAYFIVKEILATERTYLKDLEVITVWFRSAVVKEDAMPATLMTLLFSNIDPIYEFHRGFLREVEQRLALWEGPSKAHTKGSHQRIGDILLRNMRQLKEFTSYFQRHDEVLTELEKATKRCKKLEAVYKEFELQKVCYLPLNTFLLKPIQRLLHYRLLLRRLCGHYSPGHHDYADCHDALKAITEVTTTLQHILIRLENLQKLTELQRDLVGIENLIAPGREFIREGCLHKLTKKGLQQRMFFLFSDMLLYTSKGVAGTSHFRIRGLLPLQGMLVEESDNEWSVPHCFTIYAAQKTIVVAASTRLEKEKWMLDLNSAIQAAKSGGDTAPALPGRTVCTRPPRSPNEVSLEQESEDDARGVRSSLEGHGQHRANTTMHVCWYRNTSVSRADHSAAVENQLSGYLLRKFKNSHGWQKLWVVFTNFCLFFYKTHQDDYPLASLPLLGYSVSIPREADGIHKDYVFKLQFKSHVYFFRAESKYTFERWMEVIQGASSSAGRAPSIVQDGPQPSSGLEGMVRGKEE

SEQ ID NO: 807112 - protein, 538 aa, Homo sapiens
CVLLRYCVSSSPQRVPADEAYFIVKEILATERTYLKDLEVITVWFRSAVVKEDAMPATLMTLLFSNIDPIYEFHRGFLREVEQRLALWEGPSKAHTKGSHQRIGDILLRNMRQLKEFTSYFQRHDEVLTELEKATKRCKKLEAVYKEFELQKVCYLPLNTFLLKPIQRLLHYRLLLRRLCGHYSPGHHDYADCHDALKAITEVTTTLQHILIRLENLQKLTELQRDLVGIENLIAPGREFIREGCLHKLTKKGLQQRMFFLFSDMLLYTSKGVAGTSHFRIRGLLPLQGMLVEESDNEWSVPHCFTIYAAQKTIVVAASTRLEKEKWMLDLNSAIQAAKSGGDTAPALPGRTVCTRPPRSPNEVSLEQESEDDARGVRSSLEGHGQHRANTTMHVCWYRNTSVSRADHSAAVENQLSGYLLRKFKNSHGWQKLWVVFTNFCLFFYKTHQDDYPLASLPLLGYSVSIPREADGIHKDYVFKLQFKSHVYFFRAESKYTFERWMEVIQGASSSAGRAPSIVQDGPQPSSGLEGMVRGKEE

SEQ ID NO: 807113 - protein, 1130 aa, Homo sapiens
MGEIEGTYRVLQTAGMRLGAQTPVGVSTLEPGQTLLPRMQEKHLHLRVKLLDNTMEIFDIEPKCDGQVLLTQVWKRLNLVECDYFGMEFQNTQSYWIWLEPMKPIIRQIRRPKNVVLRLAVKFFPPDPGQLQEEYTRYLFALQLKRDLLEERLTCADTTAALLTSHLLQSEIGDYDETLDREHLKVNEYLPGQQHCLEKILEFHQKHVGQTPAESDFQVLEIARKLEMYGIRFHMASDREGTKIQLAVSHMGVLVFQGTTKINTFNWSKVRKLSFKRKRFLIKLHPEVHGPYQDTLEFLLGSRDECKNFWKICVEYHTFFRLLDQPKPKAKAVFFSRGSSFRYSGRTQKQLVDYFKDSGMKRIPYERRHSKTHTSVRALTADLPKQSISFPEGLRTPASPSSANAFYSLSPSTLVPSGLPEFKDSSSSLTDPQVSYVKSPAAERRSGAVAGGPDTPSAQPLGPPALQPGPGLSTKSPQPSPSSRKSPLSLSPAFQVPLGPAEQGSSPLLSPVLSDAGGAGMDCEEPRHKRVPADEAYFIVKEILATERTYLKDLEVITVWFRSAVVKEDAMPATLMTLLFSNIDPIYEFHRGFLREVEQRLALWEGPSKAHTKGSHQRIGDILLRNMRQLKEFTSYFQRHDEVLTELEKATKRCKKLEAVYKEFELQKVCYLPLNTFLLKPIQRLLHYRLLLRRLCGHYSPGHHDYADCHDALKAITEVTTTLQHILIRLENLQKLTELQRDLVGIENLIAPGREFIREGCLHKLTKKGLQQRMFFLFSDMLLYTSKGVAGTSHFRIRGLLPLQGMLVEESDNEWSVPHCFTIYAAQKTIVVAASTRLEKEKWMLDLNSAIQAAKSGGDTAPALPGRTVCTRPPRSPNEVSLEQESEDDARGVRSSLEGHGQHRANTTMHVCWYRNTSVSRADHSAAVENQLSGYLLRKFKNSHGWQKLWVVFTNFCLFFYKTHQVDGGDPGGQQLSREGPKHRAGWPPTLLRAGGDGQGEGGMTLNLPRFGHNYKEQQDTEVTSVLRLLNRWEVAVVSLDPHWHQQCGWASCNIWEGLHPPTQDLVHASSYLGPWEKCASLERGAAQATAPRPLAQRRRQGLSSALGIGPKPGHTLPLSPEQGPCRGLA

SEQ ID NO: 807114 - protein, 127 aa, Homo sapiens [sequence omitted]

SEQ ID NO: 807115 - protein, 118 aa, Homo sapiens
AGTEPRIHGWQKLWVVFTNFCLFFYKTHQDDYPLASLPLLGYSVSIPREADGIHKDYVFKLQFKSHVYFFRAESKYTFERWMEVIQGASSSAGRAPSIVQDGPQPSSGLEGMVRGKEE

SEQ ID NO: 807116 - protein, 1044 aa, Homo sapiens
MGEIEGTYRVLQTAGMRLGAQTPVGVSTLEPGQTLLPRMQEKHLHLRVKLLDNTMEIFDIEPKCDGQVLLTQVWKRLNLVECDYFGMEFQNTQSYWIWLEPMKPIIRQIRRPKNVVLRLAVKFFPPDPGQLQEEYTRYLFALQLKRDLLEERLTCADTTAALLTSHLLQSEIGDYDETLDREHLKVNEYLPGQQHCLEKILEFHQKHVGQTPAESDFQVLEIARKLEMYGIRFHMASDREGTKIQLAVSHMGVLVFQGTTKINTFNWSKVRKLSFKRKRFLIKLHPEVHGPYQDTLEFLLGSRDECKNFWKICVEYHTFFRLLDQPKPKAKAVFFSRGSSFRYSGRTQKQLVDYFKDSGMKRIPYERRHSKTHTSVRALTADLPKQSISFPEGLRTPASPSSANAFYSLSPSTLVPSGLPEFKDSSSSLTDPQVSYVKSPAAERRSGAVAGGPDTPSAQPLGPPALQPGPGLSTKSPQPSPSSRKSPLSLSPAFQVPLGPAEQGSSPLLSPVLSDAGGAGMDCEEPRHKRVPADEAYFIVKEILATERTYLKDLEVITVWFRSAVVKEDAMPATLMTLLFSNIDPIYEFHRGFLREVEQRLALWEGPSKAHTKGSHQRIGDILLRNMRQLKEFTSYFQRHDEVLTELEKATKRCKKLEAVYKEFELQKVCYLPLNTFLLKPIQRLLHYRLLLRRLCGHYSPGHHDYADCHDALKAITEVTTTLQHILIRLENLQKLTELQRDLVGIENLIAPGREFIREGCLHKLTKKGLQQRMFFLFSDMLLYTSKGVAGTSHFRIRGLLPLQGMLVEESDNEWSVPHCFTIYAAQKTIVVAASTRLEKEKWMLDLNSAIQAAKSGGDTAPALPGRTVCTRPPRSPNEVSLEQESEDDARGVRSSLEGHGQHRANTTMHVCWYRNTSVSRADHSAAVENQLSGYLLRKFKNSHGWQKLWVVFTNFCLFFYKTHQDDYPLASLPLLGYSVSIPREADGIHKDYVFKLQFKSHVYFFRAESKYTFERWMEVIQGASSSAGRAPSIVQDGPQPSSG

SEQ ID NO: 807117 - protein, 638 aa, Homo sapiens
MGEIEGTYRVLQTAGMRLGAQTPVGVSTLEPGQTLLPRMQEKHLHLRVKLLDNTMEIFDIEPKCDGQVLLTQVWKRLNLVECDYFGMEFQNTQSYWIWLEPMKPIIRQIRRPKNVVLRLAVKFFPPDPGQLQEEYTRYLFALQLKRDLLEERLTCADTTAALLTSHLLQSEIGDYDETLDREHLKVNEYLPGQQHCLEKILEFHQKHVGQTPAESDFQVLEIARKLEMYGIRFHMASDREGTKIQLAVSHMGVLVFQGTTKINTFNWSKVRKLSFKRKRFLIKLHPEVHGPYQDTLEFLLGSRDECKNFWKICVEYHTFFRLLDQPKPKAKAVFFSRGSSFRYSGRTQKQLVDYFKDSGMKRIPYERRHSKTHTSVRALTADLPKQSISFPEGLRTPASPSSANAFYSLSPSTLVPSGLPEFKDSSSSLTDPQVSYVKSPAAERRSGAVAGGPDTPSAQPLGPPALQPGPGLSTKSPQPSPSSRKSPLSLSPAFQVPLGPAEQGSSPLLSPVLSDAGGAGMDCEEPRHKRVPADEAYFIVKEILATERTYLKDLEVITVWFRSAVVKEDAMPATLMTLLFSNIDPIYEFHRGFLREVEQRLALWEGPSKAHTKGSHQRIGDILLRNMRQLKAAHEFTT

SEQ ID NO: 807118 - protein, 604 aa, Homo sapiens
MGEIEGTYRVLQTAGMRLGAQTPVGVSTLEPGQTLLPRMQEKHLHLRVKLLDNTMEIFDIEPKCDGQVLLTQVWKRLNLVECDYFGMEFQNTQSYWIWLEPMKPIIRQIRRPKNVVLRLAVKFFPPDPGQLQEEYTRYLFALQLKRDLLEERLTCADTTAALLTSHLLQSEIGDYDETLDREHLKVNEYLPGQQHCLEKILEFHQKHVGQTPAESDFQVLEIARKLEMYGIRFHMASDREGTKIQLAVSHMGVLVFQGTTKINTFNWSKVRKLSFKRKRFLIKLHPEVHGPYQDTLEFLLGSRDECKNFWKICVEYHTFFRLLDQPKPKAKAVFFSRGSSFRYSGRTQKQLVDYFKDSGMKRIPYERRHSKTHTSVRALTADLPKQSISFPEGLRTPASPSSANAFYSLSPSTLVPSGLPEFKDSSSSLTDPQVSYVKSPAAERRSGAVAGGPDTPSAQPLGPPALQPGPGLSTKSPQPSPSSRKSPLSLSPAFQVPLGPAEQGSSPLLSPVLSDAGGAGMDCEEPRHKRVPADEAYFIVKEILATERTYLKDLEVITVWFRSAVVKEDAMPATLMTLLFSNIDPIYEFHRGFLREVEQRLALW

SEQ ID NO: 807119 - protein, 520 aa, Homo sapiens
MGEIEGTYRVLQTAGMRLGAQTPVGVSTLEPGQTLLPRMQEKHLHLRVKLLDNTMEIFDIEPKCDGQVLLTQVWKRLNLVECDYFGMEFQNTQSYWIWLEPMKPIIRQIRRPKNVVLRLAVKFFPPDPGQLQEEYTRYLFALQLKRDLLEERLTCADTTAALLTSHLLQSEIGDYDETLDREHLKVNEYLPGQQHCLEKILEFHQKHVGQTPAESDFQVLEIARKLEMYGIRFHMASDREGTKIQLAVSHMGVLVFQGTTKINTFNWSKVRKLSFKRKRFLIKLHPEVHGPYQDTLEFLLGSRDECKNFWKICVEYHTFFRLLDQPKPKAKAVFFSRGSSFRYSGRTQKQLVDYFKDSGMKRIPYERRHSKTHTSVRALTADLPKQSISFPEGLRTPASPSSANAFYSLSPSTLVPSGLPEFKDSSSSLTDPQVSYVKSPAAERRSGAVAGGPDTPSAQPLGPPALQPGPGVGFCHVVSSCGSVCAGGQSFSALDLDTGRAGRELSAACKNDNGGDDFTT

SEQ ID NO: 807120 - protein, 265 aa, Homo sapiens
MGEIEGTYRVLQTAGMRLGAQTPVGVSTLEPGQTLLPRMQEKHLHLRVKLLDNTMEIFDIEPKCDGQVLLTQVWKRLNLVECDYFGMEFQNTQSYWIWLEPMKPIIRQIRRPKNVVLRLAVKFFPPDPGQLQEEYTRYLFALQLKRDLLEERLTCADTTAALLTSHLLQSEIGDYDETLDREHLKVNEYLPGQQHCLEKILEFHQKHVGQTPAESDFQVLEIARKLEMYGIRFHMASDREGTKIQLAVSHMGVLVFQVGQWGREG

SEQ ID NO: 807121 - protein, 79 aa, Homo sapiens
FFHLILVSYKKNIQGKELTELKLLSAGILYSPVISHSTWLIERMNKPDIHRKVTMSVEWLTEACWQLTLAQTHVNKTSV

SEQ ID NO: 807122 - protein, 79 aa, Homo sapiens
RPGKMVEDGAEELEDLVHFSVSELPSRGYGVMEEIRRQGKLCDVTLKELCCSLIISPKGGITQTLQPHCLRLSSGSATC

SEQ ID NO: 807123 - protein, 79 aa, Homo sapiens; identical to SEQ ID NO: 807122

SEQ ID NO: 807124 - protein, 117 aa, Homo sapiens
MVGEVWRFSLLYADFHLIPLNGTTSLSSVVPWLPRSRGSCSSCLKSKPPVFCSCLSGEGDQYFLISALLLAHNFRGNWYLQWFHFGGDSSVACHPQYSVSSKSVTTHVSSFLLLKFC

SEQ ID NO: 807125 - protein, 428 aa, Homo sapiens
MATSWGTVFFMLVVSCVCSAVSHRNQQTWFEGIFLSSMCPINVSASTLYGIMFDAGSTGTRIHVYTFVQKMPGQLPILEGEVFDSVKPGLSAFVDQPKQGAETVQGLLEVAKDSIPRSHWKKTPVVLKATAGLRLLPEHKAKALLFEVKEIFRKSPFLVPKGSVSIMDGSDEGILAWVTVNFLTGQLHGHRQETVGTLDLGGASTQITFLPQFEKTLEQTPRGYLTSFEMFNSTYKLYTHSYLGFGLKAARLATLGALETEGTDGHTFRSACLPRWLEAEWIFGGVKYQYGGNQEGEVGFEPCYAEVLRVVRGKLHQPEEVQRGSFYAFSYYYDRAVDTDMIDYEKGGILKVEDFERKAREVCDNLENFTSGSPFLCMDLSYITALLKDGFGFADSTVLQLTKKVNNIETGWALGATFHLLQSLGISH

SEQ ID NO: 807126 - protein, 428 aa, Homo sapiens; identical to SEQ ID NO: 807125

SEQ ID NO: 807127 - protein, 428 aa, Homo sapiens; identical to SEQ ID NO: 807125

SEQ ID NO: 807128 - protein, 428 aa, Homo sapiens; identical to SEQ ID NO: 807125

SEQ ID NO: 807129 - protein, 236 aa, Homo sapiens
MATSWGTVFFMLVVSCVCSAVSHRNQQTWFEGIFLSSMCPINVSASTLYGIMFDAGSTGTRIHVYTFVQKMPGQLPILEGEVFDSVKPGLSAFVDQPKQGAETVQGLLEVAKDSIPRSHWKKTPVVLKATAGLRLLPEHKAKALLFEVKEIFRKSPFLVPKGSVSIMDGSDEGILAWVTVNFLTGQLHGHRQETVGTLDLGGASTQITFLPQFELLGIWIESCKTSNPGSPGDRRD

SEQ ID NO: 807130 - protein, 166 aa, Homo sapiens
FLLFPHCLQQPASESVPFPQRRSHLTPVHLCLAGEVGFEPCYAEVLRVVRGKLHQPEEVQRGSFYAFSYYYDRAVDTDMIDYEKGGILKVEDFERKAREVCDNLENFTSGSPFLCMDLSYITALLKDGFGFADSTVLQLTKKVNNIETGWALGATFHLLQSLGISH

SEQ ID NO: 807131 - protein, 519 aa, Homo sapiens
MATSWGTVFFMLVVSCVCSAVSHRNQQTWFEGIFLSSMCPINVSASTLYGIMFDAGSTGTRIHVYTFVQKMPGQLPILEGEVFDSVKPGLSAFVDQPKQGAETVQGLLEVAKDSIPRSHWKKTPVVLKATAGLRLLPEHKAKALLFEVKEIFRKSPFLVPKGSVSIMDGSDEGILAWVTVNFLTGQLHGHRQETVGTLDLGGASTQITFLPQFEKTLEQTPRGYLTSFEMFNSTYKLYTHSYLGFGLKAARLATLGALETEGTDGHTFRSACLPRWLEAEWIFGGVKYQYGGNQEGEVGFEPCYAEVLRVVRGKLHQPEEVQRGSFYAFSYYYDRAVDTDMIDYEKGGILKVEDFERKAREVCDNLENFTSGSPFLCMDLSYITALLKDGFGFADSTVLQAAVLRRWAKLEISPKPMLTPCPASGWTLWAASLRIKQSSGVTSGSKVRREWPCSVIVLPNERHPRPDVLSSMSQPKRKQNSAFGIHPGYAWGQLASRDLSGLQKADSILQHGTSCVDEV

SEQ ID NO: 807132 - protein, 962 aa, Homo sapiens
MLEGGSLSSAEYEARVRARRDFQRLQRRDSDGDRQVWFLQRRFHKDILLNPVLALSFCPDLSSKPGHLGTATRELLFLLDSSSVAHKDAIVLAVKSLPPQTLINLAVFGTLVQPLFPESRPCSDDAVQLICESIETLQVPSGPPDVLAALDWAVGQPQHRAYPRQLFLLTAASPMAATTHRTLELMRWHRGTARCFSFGLGPTCHQLLQGLSALSRGQAYFLRPGQRLQPMLVQALRKALEPALSDISVDWFVPDTVEALLTPREIPALYPGDQLLGYCSLFRVDGFRSRPPGGQEPGWQSSGGSVFPSPEEAPSAASPGTEPTGTSEPLGTGTVSAELSSPWAARDSEQSTDALTDPVTDPGPNPSDTAIWRRIFQSSYIREQYVLTHCSASPEPGPGSTGSSESPGSQGPGSPEGSAPLEPPSQQGCRSLAWGEPAGSRSCPLPAPTPAPFKVGALSTEVLGRQHRAALAGRSLSSPPGRANQVPGRPRKPSLGAILDGPSPEPGQQLGQGLDDSGNLLSPAPMDWDMLMEPPFLFTAVPPSGELAPPAVPPQAPRCHVVIRGLCGEQPMCWEVGVGLETLWGPGDGSQPPSPPVREAAWDQALHRLTAASVVRDNEQLALRGGAETTADRGHARRCWLRALQTSKVSSAPSCFTCPVAVDATTREVLPGALQVCSSEPAEPPGTPPASHSHLDAAPLPTVVYSKGLQRGSPAGAWDSDQNGNSKRALGDPATPTEGPRRPPPRPPCRLSMGRRHKLCSPDPGQANNSEGSDHDYLPLVRLQEAPGSFRLDAPFCAAVRISQERLCRASPFAVHRASLSPTSASLPWALLGPGVGQGDSATASCSPSPSSGSEGPGQVDSGRGSDTEASEGAEGLGGTDLRGRTWATAVALAWLEHRCAAAFDEWELTAAKADCWLRAQHLPDGLDLAALKAAARGLFLLLRHWDQNLQLHLLCYSPANV

SEQ ID NO: 807133 - protein, 229 aa, Homo sapiens
MWPCPLCSPRWPRQARRGPPGLRGSVTTGWAYGDSLRPSLGFSGSSAGEGALAGYPGMGRVRKGWGQSAGGFRGLHSGPVTLLMLPSSPTSCFGVGSLQEEGLAWEELAAPRDVFSGPARCPAPYTFSFEMLVTGPCLLAGLESPSHALRADAPPHASSAATICVTLAEGHHCDRALEILLHPSEPHQPHLMLEGGSLSSAEYEARVRARRDFQRLQRRDSDGDRQVPP

SEQ ID NO: 807134 - protein, 275 aa, Homo sapiens
MLEGGSLSSAEYEARVRARRDFQRLQRRDSDGDRQVWFLQRRFHKDILLNPVLALSFCPDLSSKPGHLGTATRELLFLLDSSSVAHKDAIVLAVKSLPPQTLINLAVFGTLVQPLFPESRPCSDDAVQLICESIETLQVPSGPPDVLAALDWAVGQPQHRAYPRQLFLLTAASPMAATTHRTLELMRWHRGTARCFSFGLGPTCHQLLQGLSALSRGQAYFLRPGQRLQPMLVHGRGTPGPGSMNFWAAWADCAGLSPGVHPPGARGGSGGTAPQ

SEQ ID NO: 807135 - protein, 210 aa, Homo sapiens [sequence omitted]

SEQ ID NO: 807136 - protein, 380 aa, Homo sapiens
SGVRAGGRRGRQQQRRNVSLSSQFAHTMAAPAQQTTQPGGGKRKGKAQYVLAKRARRCDAGGPRQLEPGLQGILITCNMNERKCVEEAYSLLNEYGDDMYGPEKFTDKDQQPSGSEGEDDDAEAALKKEVGDIKASTEMRLRRFQSVESGANNVVFIRTLGIEPEKLVHHILQDMYKTKKKKTRVILRMLPISGTCKAFLEDMKKYAETFLEPWFKAPNKGTFQIVYKSRNNSHVNREEVIRELAGIVCTLNSENKVDLTNPQYTVVVEIIKAVCCLSVVKDYMLFRKYNLQEVVKSPKDPSQLNSKQGNGKEAKLESADKSDQNNTAEGKNNQQVPENTEELGQTKPTSNPQVVNEGGAKPELASQATEGSKSNENDFS

SEQ ID NO: 807137 - protein, 380 aa, Homo sapiens; identical to SEQ ID NO: 807136

SEQ ID NO: 807138 - protein, 206 aa, Homo sapiens
MYKTKKKKTRVILRMLPISGTCKAFLEDMKKYAETFLEPWFKAPNKGTFQIVYKSRNNSHVNREEVIRELAGIVCTLNSENKVDLTNPQYTVVVEIIKAVCCLSVVKDYMLFRKYNLQEVVKSPKDPSQLNSKQGNGKEAKLESADKSDQNNTAEGKNNQQVPENTEELGQTKPTSNPQVVNEGGAKPELASQATEGSKSNENDFS

SEQ ID NO: 807139 - protein, 380 aa, Homo sapiens; identical to SEQ ID NO: 807136

SEQ ID NO: 807140 - protein, 67 aa, Homo sapiens
RPPTTTKFAAASTINWKTQVTQLAICLQSIQLCGTKLFLLCESCYFYGKILIIQFVFKLSFIFICIW

SEQ ID NO: 807141 - protein, 302 aa, Homo sapiens
MRHLGAFLFLLGVLGALTEMCEIPEMDSHLVEKLGQHLLPWMDRLSLEHLNPSIYVGLRLSSLQAGTKEDLYLHSLKLGYQQCLLGSAFSEDDGDCQGKPSMGQLALYLLALRANCEFVRGHKGDRLVSQLKWFLEDEKRAIGHDHKGHPHTSYYQYGLGILALCLHQKRVHDSVVDKLLYAVEPFHQGHHSVDTAAMAGLGIHLSEALKLQPWSETTDHHGHQNSARGDLEGPDPRGPLWECLQHPIGITVPHDFPHAWGRTGNSMSQGEGCFAGQSAGWSLPECSHDFPAAARSEPQDLH

SEQ ID NO: 807142 - protein, 275 aa, Homo sapiens
MRHLGAFLFLLGVLGALTEMCEIPEMDSHLVEKLGQHLLPWMDRLSLEHLNPSIYVGLRLSSLQAGTKEDLYLHSLKLGYQQCLLGSAFSEDDGDCQGKPSMGQLALYLLALRANWHDHKGHPHTSYYQYGLGILALCLHQKRVHDSVVDKLLYAVEPFHQGHHSVDTAAMAGLGIHLSEALKLQPWSETTDHHGHQNSARGDLEGPDPRGPLWECLQHPIGITVPHDFPHAWGRTGNSMSQGEGCFAGQSAGWSLPECSHDFPAAARSEPQDLH

SEQ ID NO: 807143 - protein, 302 aa, Homo sapiens; identical to SEQ ID NO: 807141

SEQ ID NO: 807144 - protein, 302 aa, Homo sapiens; identical to SEQ ID NO: 807141

SEQ ID NO: 807145 - protein, 302 aa, Homo sapiens; identical to SEQ ID NO: 807141

SEQ ID NO: 807146 - protein, 48 aa, Homo sapiens
MTRTERGPRALTFSNFISSSSWTISSRLLSCRADILCSSSSFLCLSKT

SEQ ID NO: 807147 - protein, 292 aa, Homo sapiens
MAQPQLYLPEPFKIAYRKVGQCRRFQQLKKKNGSFKRKGIERWHRAVSTNLLKQNVLVPKEESSSDSDMGFHESQQNQKSNLKTKVKTAFGRMLSYKYRSKPACASQEGSTDHKEALLSNTQSLLPRIVKEFSSPKLFTAKMRKLSENATIQLDVVEAETEEITQGNTLLRARRTTKRLSVTSLPSGLQKGPYSPKKRPHFPALKKKKRGMENILRKSDLTVGKLQMQVDDLIETVTDKSMKLLAQRHAELQQCEFLGDEILQSSKQFQRISKRTMRKYKLKNMTTKGPGDS

SEQ ID NO: 807148 - protein, 298 aa, Homo sapiens
MAQPQLYLPEPFKIAYRKVGQCRRFQQLKKKNGSFKRKGIERWHRAVSTNLLKQNVLVPKEESSSDSDMGFHESQQNQKSNLKTKVKTAFGRMLSYKYRSKPACASQEGSTDHKEALLSNTQSLLPRIVKEFSSPKLFTAKMRKLSENATIQLDVVEAETEEITQGNTLLRARRTTKRLSVTSLPSGLQKGPYSPKKRPHFPALKKKKRGMENILRKSDLTVGKLQMQVDDLIETVTDKSMKLLAQRHAELQQCWPWWLTPVISALWEAERVDHLMSGVQNQPGQHGETLSLLKIQKL

SEQ ID NO: 807149 - protein, 534 aa, Homo sapiens
MIWYILIIGILLPQSLAHPGFFTSIGQMTDLIHTEKDLVTSLKDYIKAEEDKLEQIKKWAEKLDRLTSTATKDPEGFVGHPVNAFKLMKRLNTEWSELENLVLKDMSDGFISNLTIQRQYFPNDEDQVGAAKALLRLQDTYNLDTDTISKGNLPGVKHKSFLTAEDCFELGKVAYTEADYYHTELWMEQALRQLDEGEISTIDKVSVLDYLSYAVYQQGDLDKALLLTKKLLELDPEHQRANGNLKYFEYIMAKEKDVNKSASDDQSDQKTTPKKKGVAVDYLPERQKYEMLCRGEGIKMTPRRQKKLFCRYHDGNRNPKFILAPAKQEDEWDKPRIIRFHDIISDAEIEIVKDLAKPRLRRATISNPITGDLETVHYRISKSAWLSGYENPVVSRINMRIQDLTGLDVSTAEELQVANYGVGGQYEPHFDFARKDEPDAFKELGTGNRIATWLFYMSDVSAGGATVFPEVGASVWPKKGTAVFWYNLFASGEGDYSTRHAACPVLVGNKWVSNKWLHERGQEFRRPCTLSELE

SEQ ID NO: 807150 - protein, 365 aa, Homo sapiens
MIWYILIIGILLPQSLAHPGFFTSIGQMTDLIHTEKDLVTSLKDYIKAEEDKLEQIKKWAEKLDRLTSTATKDPEGFVGHPVNAFKLMKRLNTEWSELENLVLKDMSDGFISNLTIQRQYFPNDEDQVGAAKALLRLQDTYNLDTDTISKGNLPGVKHKSFLTAEDCFELGKVAYTEADYYHTELWMEQALRQLDEGEISTIDKVSVLDYLSYAVYQQGDLDKALLLTKKLLELDPEHQRANGNLKYFEYIMAKEKDVNKSASDDQSDQKTTPKKKGVAVDYLPERQKYEMLCRGEGIKMTPRRQKKLFCRYHDGNRNPKFILAPAKQEDEWDKPRIIRFHDIISDAEIEIVKDLAKPRCLALWL

SEQ ID NO: 807151 - protein, 516 aa, Homo sapiens
MIWYILIIGILLPQSLAHPGFFTSIGQMTDLIHTEKDLVTSLKDYIKAEEDKLEQIKKWAEKLDRLTSTATSLNTEWSELENLVLKDMSDGFISNLTIQRQYFPNDEDQVGAAKALLRLQDTYNLDTDTISKGNLPGVKHKSFLTAEDCFELGKVAYTEADYYHTELWMEQALRQLDEGEISTIDKVSVLDYLSYAVYQQGDLDKALLLTKKLLELDPEHQRANGNLKYFEYIMAKEKDVNKSASDDQSDQKTTPKKKGVAVDYLPERQKYEMLCRGEGIKMTPRRQKKLFCRYHDGNRNPKFILAPAKQEDEWDKPRIIRFHDIISDAEIEIVKDLAKPRLRRATISNPITGDLETVHYRISKSAWLSGYENPVVSRINMRIQDLTGLDVSTAEELQVANYGVGGQYEPHFDFARKDEPDAFKELGTGNRIATWLFYMSDVSAGGATVFPEVGASVWPKKGTAVFWYNLFASGEGDYSTRHAACPVLVGNKWVSNKWLHERGQEFRRPCTLSELE

SEQ ID NO: 807152 - protein, 341 aa, Homo sapiens
MIWYILIIGILLPQSLAHPGFFTSIGQMTDLIHTEKDLVTSLKDYIKAEEDKLEQIKKWAEKLDRLTSTATKDPEGFVGHPVNAFKLMKRLNTEWSELENLVLKDMSDGFISNLTIQRQYFPNDEDQVGAAKALLRLQDTYNLDTDTISKGNLPGVKHKSFLTAEDCFELGKVAYTEADYYHTELWMEQALRQLDEGEISTIDKVSVLDYLSYAVYQQGDLDKALLLTKKLLELDPEHQRANGNLKYFEYIMAKEKDVNKSASDDQSDQKTTPKKKGVAVDYLPERQPLGDRKNSFAATMMETVILNLFWLQLNRRMNGTSLVLFASMILFLMQKLKSSKT

SEQ ID NO: 807153 - protein, 341 aa, Homo sapiens; identical to SEQ ID NO: 807152

SEQ ID NO: 807154 - protein, 217 aa, Homo sapiens
SSSVPCYSTKQEDEWDKPRIIRFHDIISDAEIEIVKDLAKPRLRRATISNPITGDLETVHYRISKSAWLSGYENPVVSRINMRIQDLTGLDVSTAEELQVANYGVGGQYEPHFDFARKDEPDAFKELGTGNRIATWLFYMSDVSAGGATVFPEVGASVWPKKGTAVFWYNLFASGEGDYSTRHAACPVLVGNKWVSNKWLHERGQEFRRPCTLSELE

SEQ ID NO: 807155 - protein, 534 aa, Homo sapiens; identical to SEQ ID NO: 807149

SEQ ID NO: 807156 - protein, 534 aa, Homo sapiens; identical to SEQ ID NO: 807149

SEQ ID NO: 807157 - protein, 534 aa, Homo sapiens; identical to SEQ ID NO: 807149

SEQ ID NO: 807158 - protein, 522 aa, Homo sapiens
MIWYILIIGILLPQSLAHPGFFTSIGQMTDLIHTEKDLVTSLKDYIKAEEDKLEQIKKWAEKLDRLTSTATKDPEGFVGHPVNAFKLMKRLNTEWSELENLVLKDMSDGFISNLTIQRQYFPNDEDQVGAAKALLRLQDTYNLDTDTISKGNLPGVKHKSFLTAEDCFELGKVAYTEADYYHTELWMEQALRQLDEGEISTIDKVSVLDYLSYAVYQQGDLDKALLLTKKLLELDPEHQRANGNLKYFEYIMAKEKDVNKSASDDQSDQKTTPKKKGVAVDYLPERQKYEMLCRGEGIKMTPRRQKKLFCRYHDGNRNPKFILAPAKQEDEWDKPRIIRFHDIISDAEIEIVKDLAKPRLRRATISNPITGDLETVHYRISKSAWLSGYENPVVSRINMRIQDLTGLDVSTAEELQVANYGVGGQYEPHFDFARKDEPDAFKELGTGNRIATWLFYMSDVSAGGATVFPEVGASVWPKKGTAVFWYNLFASGEGDYSTRHAACPVLVGNKWGKYFIYSAKIM

SEQ ID NO: 807159 - protein, 383 aa, Homo sapiens
MIWYILIIGILLPQSLAHPGFFTSIGQMTDLIHTEKDLVTSLKDYIKAEEDKLEQIKKWAEKLDRLTSTATKDPEGFVGHPVNAFKLMKRLNTEWSELENLVLKDMSDGFISNLTIQRQYFPNDEDQVGAAKALLRLQDTYNLDTDTISKGNLPGVKHKSFLTAEDCFELGKVAYTEADYYHTELWMEQALRQLDEGEISTIDKVSVLDYLSYAVYQQGDLDKALLLTKKLLELDPEHQRANGNLKYFEYIMAKEKDVNKSASDDQSDQKTTPKKKGVAVDYLPERQKYEMLCRGEGIKMTPRRQKKLFCRYHDGNRNPKFILAPAKQEDEWDKPRIIRFHDIISDAEIEIVKDLAKPRLRRATISNPITGDLETVHYRISKS

SEQ ID NO: 807160 - protein, 74 aa, Homo sapiens
VSDSPGQFYFCAELAASCWENVSGGVTPRNKVHLLLKSQAIRTTNNMMKGHSEPHPRRKPEVLVRPKRWDEEFH

SEQ ID NO: 807161 - protein, 710 aa, Homo sapiens
METRESEDLEKTRRKSASDQWNTDNEPAKVKPELLPEKEETSQADQDIQDKEPHCHIPIKRNSIFNRSIRRKSKAKARDNPERNASCLADSQDNGKSVNEPLTLNIPWSRTPPCRTAMQTDPGAQEMSESSSTPGNGATPEEWPALADSPTTLTEALRMIHPIPADSWRNLIEQIGLLYQEYRDKSTLQEIETRRQQDAEIEDNTNGSPASEDTPEEEEEEEEEEEPASPPERKTLPQICLLSNPHSRFNLWQDLPEIRSSGVLEILQPEEIKLQEAMFELVTSEASYYKSLNLLVSHFMENERIRKILHPSEAHILFSNVLDVLAVSERFLLELEHRMEENIVISDVCDIVYRYAADHFSVYITYVSNQTYQERTYKQLLQEKAAFRELIAQLELDPKCRGLPFSSFLILPFQRITRLKLLVQNILKRVEERSERECTALDAHKELEMVVKACNEGVRKMSRTEQMISIQKKMEFKIKSVPIISHSRWLLKQGELQQMSGPKTSRTLRTKKLFHEIYLFLFNDLLVICRQIPGDKYQVFDSAPRGLLRVEELEDQGQTLANVFILRLLENADDREATYMLKASSQSEMKRWMTSLAPNRRTKFVSFTSRLLDCPQVQCVHPYVAQQPDELTLELADILNILDKTDDGWIFGERLHDQERGWFPSSMTEEILNPKIRSQNLKECFRVHKMDDPQRSQNKDRRKLGSRNRQ

SEQ ID NO: 807162 - protein, 598 aa, Homo sapiens
SESDARDSAAGHLPGSESSSTPGNGATPEEWPALADSPTTLTEALRMIHPIPADSWRNLIEQIGLLYQEYRDKSTLQEIETRRQQDAEIEDNTNGSPASEDTPEEEEEEEEEEEPASPPERKTLPQICLLSNPHSRFNLWQDLPEIRSSGVLEILQPEEIKLQEAMFELVTSEASYYKSLNLLVSHFMENERIRKILHPSEAHILFSNVLDVLAVSERFLLELEHRMEENIVISDVCDIVYRYAADHFSVYITYVSNQTYQERTYKQLLQEKAAFRELIAQLELDPKCRGLPFSSFLILPFQRITRLKLLVQNILKRVEERSERECTALDAHKELEMVVKACNEGVRKMSRTEQMISIQKKMEFKIKSVPIISHSRWLLKQGELQQMSGPKTSRTLRTKKLFHEIYLFLFNDLLVICRQIPGDKYQVFDSAPRGLLRVEELEDQGQTLANVFILRLLENADDREATYMLKASSQSEMKRWMTSLAPNRRTKFVSFTSRLLDCPQVQCVHPYVAQQPDELTLELADILNILDKTDDGWIFGERLHDQERGWFPSSMTEEILNPKIRSQNLKECFRVHKMDDPQRSQNKDRRKLGSRNRQ

SEQ ID NO: 807163 - protein, 594 aa, Homo sapiens
VAFRGGTPARTDESSSTPGNGATPEEWPALADSPTTLTEALRMIHPIPADSWRNLIEQIGLLYQEYRDKSTLQEIETRRQQDAEIEDNTNGSPASEDTPEEEEEEEEEEEPASPPERKTLPQICLLSNPHSRFNLWQDLPEIRSSGVLEILQPEEIKLQEAMFELVTSEASYYKSLNLLVSHFMENERIRKILHPSEAHILFSNVLDVLAVSERFLLELEHRMEENIVISDVCDIVYRYAADHFSVYITYVSNQTYQERTYKQLLQEKAAFRELIAQLELDPKCRGLPFSSFLILPFQRITRLKLLVQNILKRVEERSERECTALDAHKELEMVVKACNEGVRKMSRTEQMISIQKKMEFKIKSVPIISHSRWLLKQGELQQMSGPKTSRTLRTKKLFHEIYLFLFNDLLVICRQIPGDKYQVFDSAPRGLLRVEELEDQGQTLANVFILRLLENADDREATYMLKASSQSEMKRWMTSLAPNRRTKFVSFTSRLLDCPQVQCVHPYVAQQPDELTLELADILNILDKTDDGWIFGERLHDQERGWFPSSMTEEILNPKIRSQNLKECFRVHKMDDPQRSQNKDRRKLGSRNRQ

SEQ ID NO: 807164 - protein, 296 aa, Homo sapiens
PLVQRPQDCKNILKRVEERSERECTALDAHKELEMVVKACNEGVRKMSRTEQMISIQKKMEFKIKSVPIISHSRWLLKQGELQQMSGPKTSRTLRTKKLFHEIYLFLFNDLLVICRQIPGDKYQVFDSAPRGLLRVEELEDQGQTLANVFILRLLENADDREATYMLKASSQSEMKRWMTSLAPNRRTKFVSFTSRLLDCPQVQCVHPYVAQQPDELTLELADILNILDKTDDGWIFGERLHDQERGWFPSSMTEEILNPKIRSQNLKECFRVHKMDDPQRSQNKDRRKLGSRNRQ

SEQ ID NO: 807165 - protein, 335 aa, Homo sapiens
METRESEDLEKTRRKSASDQWNTDNEPAKVKPELLPEKEETSQADQDIQDKEPHCHIPIKRNSIFNRSIRRKSKAKARDNPERNASCLADSQDNGKSVNEPLTLNIPWSRTPPCRTAMQTDPGAQEMSESSSTPGNGATPEEWPALADSPTTLTEALRMIHPIPADSWRNLIEQIGLLYQEYRDKSTLQEIETRRQQDAEIEDNTNGSPASEDTPEEEEEEEEEEEPASPPERKTLPQICLLSNPHSRFNLWQDLPEIRSSGVLEILQPEEIKLQEVTGAEGRGLPHSTPGWPSLLGVRLPLGGEVPWLVHQRNRWQGCPSRTCRKINMVSQAAR

SEQ ID NO: 807166 - protein, 127 aa, Homo sapiens
VRLASSRLCARPSLASRGESLLKNNQPLSSSLSGSESSSTPGNGATPEEWPALADSPTTLTEALRMIHPIPADSWRNLIEQIGGCLRSNRVLFGKRGSLEDSEGPPAHGMPLCFIRRTASDMGKESF

SEQ ID NO: 807167 - protein, 106 aa, Homo sapiens
MCPCLLSLNCPQVQCVHPYVAQQPDELTLELADILNILDKTDDGWIFGERLHDQERGWFPSSMTEEILNPKIRSQNLKECFRVHKMDDPQRSQNKDRRKLGSRNRQ

SEQ ID NO: 807168 - protein, 128 aa, Homo sapiens
METRESEDLEKTRRKSASDQWNTDNEPAKVKPELLPEKEETSQADQDIQDKEPHCHIPIKRNSIFNRSIRRKSKAKARDNPERNASCLADSQDNGKSVNEPLTLNIPWSRTPPCRTAMQTDPGAQEMR

SEQ ID NO: 807169 - protein, 87 aa, Homo sapiens
GFDSLEGTKRHFREDGGAQVRSGTCFRGADPAMTVRGSLPPNGGSRSPGLLANVRGAEYFYPSGTGVGGLEFSPQEQGSLGKGQPAL

SEQ ID NO: 807170 - protein, 446 aa, Homo sapiens [sequence omitted]

SEQ ID NO: 807171 - protein, 446 aa, Homo sapiens [sequence omitted]

SEQ ID NO: 807172 - protein, 487 aa, Homo sapiens
MNVTPEVKSRGMKFAEEQLLKHGWTQGKGLGRKENGITQALRVTLKQDTHGVGHDPAKEFTNHWWNELFNKTAANLVVETGQDGVQIRSLSKETTRYNHPKPNLLYQKFVKWDPVTSLAVAYLDCPDPQQELRSSGSVDPAICEGSSNRAWEMATLTSGGEKPNKDLESCSDDDNQGSKSPKILTDEMLLQACEGRTAHKAARLGITMKAKLARLEAQEQAFLARLKGQDPGAPQLQSESKPPKKKKKKRRQKEEEEATASERNDADEKHPEHAEQNIRKSKKKKRRHQEGKVSDEREGTTKGNEKEDAAGTSGLGELNSREQTNQSLRKGKKKKRWHHEEEKMGVLEEGGKGKEAAGSVRTEEVESRAYADPCSRRKKRQQQEEEDLNLEDRGEETVLGGGTREAESRACSDGRSRKSKKKRQQHQEEEDILDVRDEKDSGAREAESRAHTGSSSRGKRKRQQHPKKERAGVSTVQKAKKKQKKRD

SEQ ID NO: 807173 - protein, 401 aa, Homo sapiens
MNVTPEVKSRGMKFAEEQLLKHGWTQGKGLGRKENGITQALRVTLKQDTHGVGHDPAKEFTNHWWNELFNKTAANLVVETGQDGVQIRSLSKETTRYNHPKPNLLYQKFVKMATLTSGGEKPNKDLESCSDDDNQGSKSPKILTDEMLLQACEGRTAHKAARLGITMKAKLARLEAQEQAFLARLKGQDPGAPQLQSESKPPKKKKKKRRQKEEEEATASERNDADEKHPEHAEQNIRKSKKKKRRHQEGKVSDEREGTTKGNEKEDAAGTSGLGELNSREQTNQSLRKGKKKKRWHHEEEKMGVLEEGGKGKEAAGSVRTEEVESRAYADPCSRRKKRQQQEEEDLNLEDRGEETVLGGGTREAESRACSDGRSRKSKKKRQQHQEEEDILDVRDEKDSG

SEQ ID NO: 807174 - protein, 523 aa, Homo sapiens
MNVTPEVKSRGMKFAEEQLLKHGWTQGKGLGRKENGITQALRVTLKQDTHGVGHDPAKEFTNHWWNELFNKTAANLVVETGQDGVQIRSLSKETTRYNHPKPNLLYQKFVKMATLTSGGEKPNKDLESCSDDDNQGSKSPKILTDEMLLQACEGRTAHKYVVVSSLSSLFSPPLTMACATSWFFLPQGNDSYYLPIYCLKIGSSPLLPSTNFPCRLKDEAHFPRYPRFDLDPVCFRAARLGITMKAKLARLEAQEQAFLARLKGQDPGAPQLQSESKPPKKKKKKRRQKEEEEATASERNDADEKHPEHAEQNIRKSKKKKRRHQEGKVSDEREGTTKGNEKEDAAGTSGLGELNSREQTNQSLRKGKKKKRWHHEEEKMGVLEEGGKGKEAAGSVRTEEVESRAYADPCSRRKKRQQQEEEDLNLEDRGEETVLGGGTREAESRACSDGRSRKSKKKRQQHQEEEDILDVRDEKDSGAREAESRAHTGSSSRGKRKRQQHPKKERAGVSTVQKAKKKQKKRD

SEQ ID NO: 807175 - protein, 373 aa, Homo sapiens
MNVTPEVKSRGMKFAEEQLLKHGWTQGKGLGRKENGITQALRVTLKQDTHGVGHDPAKEFTNHWWNELFNKTAANLVVETGQDGVQIRSLSKETTRYNHPKPNLLYQKFVKMATLTSGGEKPNKDLESCSDDDNQGSKSPKILTDEMLLQACEGRTAHKAARLGITMKAKLARLEAQEQAFLARLKGQDPGAPQLQSESKPPKKKKKKRRQKEEEEATASERNDADEKHPEHAEQNIRKSKKKKRRHQEGKVSDEREGTTKGNEKEDAAGTSGLGELNSREQTNQSLRKGKKKKRWHHEEEKMGVLEEGGKGKEAAGSVRTEEVESRAYADPCSRRKKRQQQEEEDLNLEDRGEETVLGGGTREAKDLARQRA

SEQ ID NO: 807176 - protein, 360 aa, Homo sapiens
MNVTPEVKSRGMKFAEEQLLKHGWTQGKGLGRKENGITQALRVTLKQDTHGVGHDPAKEFTNHWWNELFNKTAANLVVETGQDGVQIRSLSKETTRYNHPKPNLLYQKFVKMATLTSGGEKPNKDLESCSDDDNQGSKSPKILTDEMLLQACEGRTAHKAARLGITMKAKLARLEAQEQAFLARLKGQDPGAPQLQSESKPPKKKKKKRRQKEEEEATASERNDADEKHPEHAEQNIRKSKKKKRRHQEGKVSDEREGTTKGNEKEDAAGTSGLGELNSREQTNQSLRKGKKKKRWHHEEEKMGVLEEGGKGKEAAGSVRTEEVESRAYADPCSRRKKRRRWMQSAAWDAVSGVGCSRVP

SEQ ID NO: 807177 - protein, 280 aa, Homo sapiens [sequence omitted]

SEQ ID NO: 807178 - protein, 197 aa, Homo sapiens
RPSSYLPEGTTKGNEKEDAAGTSGLGELNSREQTNQSLRKGKKKKRWHHEEEKMGVLEEGGKGKEAAGSVRTEEVESRAYADPCSRRKKRQQQEEEDLNLEDRGEETVLGGGTREAESRACSDGRSRKSKKKRQQHQEEEDILDVRDEKDSGAREAESRAHTGSSSRGKRKRQQHPKKERAGVSTVQKAKKKQKKRD

SEQ ID NO: 807179 - protein, 446 aa, Homo sapiens [sequence omitted]

SEQ ID NO: 807180 - protein, 446 aa, Homo sapiens [sequence omitted]

SEQ ID NO: 807181 - protein, 475 aa, Homo sapiens
WFRQPRRNKTAFPGRWRRTSQVRHMFPRSGPSNDEVKSRGMKFAEEQLLKHGWTQGKGLGRKENGITQALRVTLKQDTHGVGHDPAKEFTNHWWNELFNKTAANLVVETGQDGVQIRSLSKETTRYNHPKPNLLYQKFVKMATLTSGGEKPNKDLESCSDDDNQGSKSPKILTDEMLLQACEGRTAHKAARLGITMKAKLARLEAQEQAFLARLKGQDPGAPQLQSESKPPKKKKKKRRQKEEEEATASERNDADEKHPEHAEQNIRKSKKKKRRHQEGKVSDEREGTTKGNEKEDAAGTSGLGELNSREQTNQSLRKGKKKKRWHHEEEKMGVLEEGGKGKEAAGSVRTEEVESRAYADPCSRRKKRQQQEEEDLNLEDRGEETVLGGGTREAESRACSDGRSRKSKKKRQQHQEEEDILDVRDEKDSGAREAESRAHTGSSSRGKRKRQQHPKKERAGVSTVQKAKKKQKKRD

SEQ ID NO: 807182 - protein, 335 aa, Homo sapiens
MATLTSGGEKPNKDLESCSDDDNQGSKSPKILTDEMLLQACEGRTAHKAARLGITMKAKLARLEAQEQAFLARLKGQDPGAPQLQSESKPPKKKKKKRRQKEEEEATASERNDADEKHPEHAEQNIRKSKKKKRRHQEGKVSDEREGTTKGNEKEDAAGTSGLGELNSREQTNQSLRKGKKKKRWHHEEEKMGVLEEGGKGKEAAGSVRTEEVESRAYADPCSRRKKRQQQEEEDLNLEDRGEETVLGGGTREAESRACSDGRSRKSKKKRQQHQEEEDILDVRDEKDSGAREAESRAHTGSSSRGKRKRQQHPKKERAGVSTVQKAKKKQKKRD

SEQ ID NO: 807183 - protein, 485 aa, Homo sapiens
MNVTPEVKSRGMKFAEEQLLKHGWTQGKGLGRKENGITQALRVTLKQDTHGVGHDPAKEFTNHWWNELFNKTAANLVVETGQDGVQIRSLSKETTRYNHPKPNLLYQKFVKMATLTSGGEKPNKDLESCSDDDNQGSKSPKIDLKKCQVLNKNSVLKECFRRRRGQAFPPGLFVTADLPYSLTDEMLLQACEGRTAHKAARLGITMKAKLARLEAQEQAFLARLKGQDPGAPQLQSESKPPKKKKKKRRQKEEEEATASERNDADEKHPEHAEQNIRKSKKKKRRHQEGKVSDEREGTTKGNEKEDAAGTSGLGELNSREQTNQSLRKGKKKKRWHHEEEKMGVLEEGGKGKEAAGSVRTEEVESRAYADPCSRRKKRQQQEEEDLNLEDRGEETVLGGGTREAESRACSDGRSRKSKKKRQQHQEEEDILDVRDEKDSGAREAESRAHTGSSSRGKRKRQQHPKKERAGVSTVQKAKKKQKKRD

SEQ ID NO: 807184 - protein, 320 aa, Homo sapiens
ILFARRRQKGSKSPKILTDEMLLQACEGRTAHKAARLGITMKAKLARLEAQEQAFLARLKGQDPGAPQLQSESKPPKKKKKKRRQKEEEEATASERNDADEKHPEHAEQNIRKSKKKKRRHQEGKVSDEREGTTKGNEKEDAAGTSGLGELNSREQTNQSLRKGKKKKRWHHEEEKMGVLEEGGKGKEAAGSVRTEEVESRAYADPCSRRKKRQQQEEEDLNLEDRGEETVLGGGTREAESRACSDGRSRKSKKKRQQHQEEEDILDVRDEKDSGAREAESRAHTGSSSRGKRKRQQHPKKERAGVSTVQKAKKKQKKRD

SEQ ID NO: 807185 - protein, 244 aa, Homo sapiens
MKKLMVVLSLIAAAWAEEQNKLVHGGPCDKTSHPYQAALYTSGHLLCGGVLIHPLWVLTAAHCKKPNLQVFLGKHNLRQRESSQEQSSVVRAVIHPDYDAASHDQDIMLLRLARPAKLSELIQPLPLERDCSANTTSCHILGWGKTADGDFPDTIQCAYIHLVSREECEHAYPGQITQNMLCAGDEKYGKDSCQGDSGGPLVCGDHLRGLVSWGNIPCGSKEKPGVYTNVCRYTNWIQKTIQAK

SEQ ID NO: 807186 - protein, 137 aa, Homo sapiens
MLLRLARPAKLSELIQPLPLERDCSANTTSCHILGWGKTADGDFPDTIQCAYIHLVSREECEHAYPGQITQNMLCAGDEKYGKDSCQGDSGGPLVCGDHLRGLVSWGNIPCGSKEKPGVYTNVCRYTNWIQKTIQAK

SEQ ID NO: 807187 - protein, 270 aa, Homo sapiens
MELLDQLFLPRVKNPRRPGGLQQERHKKLMVSAESEKCCTWAEEQNKLVHGGPCDKTSHPYQAALYTSGHLLCGGVLIHPLWVLTAAHCKKPNLQVFLGKHNLRQRESSQEQSSVVRAVIHPDYDAASHDQDIMLLRLARPAKLSELIQPLPLERDCSANTTSCHILGWGKTADGDFPDTIQCAYIHLVSREECEHAYPGQITQNMLCAGDEKYGKDSCQGDSGGPLVCGDHLRGLVSWGNIPCGSKEKPGVYTNVCRYTNWIQKTIQAK

SEQ ID NO: 807188 - protein, 225 aa, Homo sapiens
MKKLMVVLSLIAAAWAEEQNKLVHGGPCDKTSHPYQAALYTSGHLLCGGVLIHPLWVLTAAHCKKPNLQVFLGKHNLRQRESSQEQSSVVRAVIHPDYDAASHDQDIMLLRLARPAKLSELIQPLPLERDCSANTTSCHILGWGKTADGDFPDTIQCAYIHLVSREECEHAYPGQITQNMLCAGDEKYGKDSCQSPGQPPHTLTHSREAQVGGEPAATSISPLVY

SEQ ID NO: 807189 - protein, 325 aa, Homo sapiens
ADKARLFLGPFPIAPGPAPQPGAGAGASVVTHAVAVSPAGWLALSWGHRGRQAAHRGTYGQLFLPPTQESPEARRPAAGAAMKKLMVVLSLIAAAWAEEQNKLVHGGPCDKTSHPYQAALYTSGHLLCGGVLIHPLWVLTAAHCKKPNLQVFLGKHNLRQRESSQEQSSVVRAVIHPDYDAASHDQDIMLLRLARPAKLSELIQPLPLERDCSANTTSCHILGWGKTADGDFPDTIQCAYIHLVSREECEHAYPGQITQNMLCAGDEKYGKDSCQGDSGGPLVCGDHLRGLVSWGNIPCGSKEKPGVYTNVCRYTNWIQKTIQAK

SEQ ID NO: 807190 - protein, 303 aa, Homo sapiens
  misc_feature (4)..(4): Xaa can be any naturally occurring amino acid
CRTXVRHATHAVAVSPAGWLALSWGHRGRQAAHRGTYGQLFLPPTQESPEARRPAAGAAMKKLMVVLSLIAAAWAEEQNKLVHGGPCDKTSHPYQAALYTSGHLLCGGVLIHPLWVLTAAHCKKPNLQVFLGKHNLRQRESSQEQSSVVRAVIHPDYDAASHDQDIMLLRLARPAKLSELIQPLPLERDCSANTTSCHILGWGKTADGDFPDTIQCAYIHLVSREECEHAYPGQITQNMLCAGDEKYGKDSCQGDSGGPLVCGDHLRGLVSWGNIPCGSKEKPGVYTNVCRYTNWIQKTIQAK

SEQ ID NO: 807191 - protein, 325 aa, Homo sapiens; identical to SEQ ID NO: 807189

SEQ ID NO: 807192 - protein, 115 aa, Homo sapiens
HPAPSPGEGLLSQHHQLPHPGLGQDSRWSVVGGWWGAGYWLLGEVCQRMGSGKIGEGPWEDGLMVRTNGTGFQWEKGQGGGRVNLGAGPVSEQPMENVDQWVNSMGEMEHKMKVQ

SEQ ID NO: 807193 - protein, 198 aa, Homo sapiens
MTLRCLEPSGNGGEGTRSQWGTAGSAEEPSPQAARLAKALRELGQTGWYWGSMTVNEAKEKLKEAPEGTFLIRDSSHSDYLLTISVKTSAGPTNLRIEYQDGKFRLDSIICVKSKLKQFDSVVHLIDYYVQMCKDKRTGPEAPRNGTVHLYLTKPLYTSAPSLQHLCRLTINKCTGAIWGLPLPTRLKDYLEEYKFQV

SEQ ID NO: 807194 - protein, 198 aa, Homo sapiens; identical to SEQ ID NO: 807193

SEQ ID NO: 807195 - protein, 198 aa, Homo sapiens; identical to SEQ ID NO: 807193

SEQ ID NO: 807196 - protein, 198 aa, Homo sapiens; identical to SEQ ID NO: 807193

SEQ ID NO: 807197 - protein, 198 aa, Homo sapiens; identical to SEQ ID NO: 807193

SEQ ID NO: 807198 - protein, 198 aa, Homo sapiens; identical to SEQ ID NO: 807193

SEQ ID NO: 807199 - protein, 153 aa, Homo sapiens
EAAWCGGGGGGRGRGRGKSAALVVCIFRSARDRPLGPGLASEPREGCALGPIPRQRPRRREPPQPSWSGSDRRGTPNPARAGTRKRGEGSEEPPGRRCGSSRTSAPRVGASGPRSALGRRTKFVWVLLPGGPRAAPGVRPECQFGESLLFFPF

SEQ ID NO: 807200 - protein, 198 aa, Homo sapiens; identical to SEQ ID NO: 807193

SEQ ID NO: 807201 - protein, 204 aa, Homo sapiens
MTLRCLEPSGNGGEGTRSQWGTAGSAEEPSPQAARLAKALRELGQTGWYWGSMTVNEAKEKLKEAPEGTFLIRDSSHSDYLLTISVKTSAGPTNLRIEYQDGKFRLDSIICVKSKLKQFDSVVHLIDYYVQMCKDKRTGPEAPRNGTVHLYLTKPLYTSAPSLQHLCRLTINKCTGAIWGLPLPTRLKDYLEEYKFQPAVFYPG

SEQ ID NO: 807202 - protein, 198 aa, Homo sapiens; identical to SEQ ID NO: 807193

SEQ ID NO: 807203 - protein, 725 aa, Homo sapiens
MSQAEVHHGAWVMAESPPDIQFEAALGRPWVLLRPRRDRQPFYNRPTLGLPEDWKKLEHLLMPGVAFDTYKYNLTESSPQTSEVDSAFISTSETRRLTLHRLNDLIVSKDKITTISLKDLELPLFAIPELGNTSFHKIEKVFQLAKQKRLVLQPERSRRKQKTEPRVDWSFQSKVPCKVGTGRQNNRKVTDWLTSGYSRLLFCKDYSRGNLIIMLIETSLLGKLGCYLSPDFSEGQITTYFQFGKNLSLSDSILIKLDFWGLVQDLQSKTMTFYNFYLTGGKLEDLNSSHSDFKSHGFLTLLFIFSISLQMLLTSDACSQHVPQYCLLVTCEVIFHHVVNTEEGYDLLIMMHLNNDAIIGTLISEVMQDLPKSKLSSLEESLTSEFTPFLPFFFFGDGVSLLLPRLECNGMISAHCNLCLPGSSDSLASASRVAGITGACHHAQLIFVFFVETAFHHVGQASLKLLTSGDSPVSASQSAGITGVAITPGHSSLLLISFRCLSSATITHKLFPITPFLSLEVNFINDVSIIIAILRCRTNNPKLSVAENNKDFYIYYTSVIITREALLATQNQADEAAAAPPQTAGLGAELMGKENQRISEWCLNALSLLLLTDWPELCKIVPPNHKGARKHSSPLCQEGEKTEMFGERHGVTTTYDHAIYILLPSFFLPSLANLTSRKLYRTCIASLIPFLFRLCLPKVFQVLQNSVSPSCKPKGKISSLEVKYT

SEQ ID NO: 807204 - protein, 198 aa, Homo sapiens; identical to SEQ ID NO: 807193

SEQ ID NO: 807205 - protein, 198 aa, Homo sapiens; identical to SEQ ID NO: 807193

SEQ ID NO: 807206 - protein, 198 aa, Homo sapiens; identical to SEQ ID NO: 807193

SEQ ID NO: 807207 - protein, 198 aa, Homo sapiens; identical to SEQ ID NO: 807193

SEQ ID NO: 807208 - protein, 198 aa, Homo sapiens; identical to SEQ ID NO: 807193

SEQ ID NO: 807209 - protein, 103 aa, Homo sapiens
MTLRCLEPSGNGGEGTRSQWGTAGSAEEPSPQAARLAKALRELGQTGWYWGSMTVNEAKEKLKEAPEGTFLIRDSSHSDYLLTISVKTSAGPTNLRIEYQDGK

SEQ ID NO: 807210 - protein, 203 aa, Homo sapiens
MAHVSSETQDVSPKDELTASEASTRSPLCEHTFPGDSDLRSMIEEHAFQVLSQGSLLESPSYTVCVSEPDKDDDFLSLNFPRKLWKIVESDQFKSISWDENGTCIVINEELFKKEILETKAPYRIFQTDAIKSFVRQLNLYGFSKIQQNFQRSAFLATFLSEEKESSVLSKIRFTKMKLSRSSTYENRYLCCNLHLKDESNYS

SEQ ID NO: 807211 - protein, 212 aa, Homo sapiens
MAHVSSETQDVSPKDELTASEASTRSPLCEHTFPGDSDLRSMIEEHAFQVLSQGSLLESPSYTVCVSEPDKDDDFLSLNFPRKLWKIVESDQFKSISWDENGTCIVINEELFKKEILETKAPYRIFQTDAIKSFVRQLNLYGFSKIQQNFQRSAFLATFLSEEKESSVLSKLKFYYNPNFKRGYPQLLVRVKRRIGVKNASPISTLFNEDFN

SEQ ID NO: 807212 - protein, 136 aa, Homo sapiens
SVGIKCDARVLSEDEEDVDFDIIHNANDTFTVKYVPPAAGRYTIKVLFASQVRGGAWEEMGGVGLDSLWPLVCMSHLLFGVLLVLLFLRWSLTLSPKLECSGVILAHCNLCLPGSSDPPTSASQVAGDYRLIPPPS

SEQ ID NO: 807213 - protein, 345 aa, Homo sapiens
MSSYQKELEKYRDIDEDEILRTLSPEELEQLDCELQEMDPENMLLPAGLRQRDQTKKSPTGPLDREALLQYLEQQALEVKERDDLVPFTGEKKGKPYIQPKREIPAEEQITLEPELEEALAHATDAEMCDIAAILDMYTLMSNKQYYDALCSGEICNTEGISSVVQPDKYKPVPDEPPNPTNIEEILKRVRSNDKELEEVNLNNIQDIPIPMLSELCEAMKANTYVRSFSLVATRSGDPIANAVADMLRENRSLQSLNIESNFISSTGLMAVLKAVRENATLTELRVDNQRQWPGDAVEMEMATVLEQCPSIVRFGYHFTQQGPRARAAQAMTRNNELRRQQKKR

SEQ ID NO: 807214 - protein, 309 aa, Homo sapiens
MSSYQKELEKYRDIDEDEILRTLSPEELEQLDCELQEMDPENMLLPAGLRQRDQTKKSPTGPLDREALLQYLEQQALEVKERDDLVPFTGEKKGKPYIQPKREIPAEEQITLEPELEEALAHATDAEMCDIAAILDMYTLMSNKQYYDALCSGEICNTEGISSVVQPDKYKPVPDEPPNPTNIEEILKRVRSNDKELEEVNLNNIQAVADMLRENRSLQSLNIESNFISSTGLMAVLKAVRENATLTELRVDNQRQWPGDAVEMEMATVLEQCPSIVRFGYHFTQQGPRARAAQAMTRNNELRRQQKKR

SEQ ID NO: 807215 - protein, 303 aa, Homo sapiens
MLLPAGLRQRDQTKKSPTGPLDREALLQYLEQQALEVKERDDLVPFTGEKKGKPYIQPKREIPAEEQITLEPELEEALAHATDAEMCDIAAILDMYTLMSNKQYYDALCSGEICNTEGISSVVQPDKYKPVPDEPPNPTNIEEILKRVRSNDKELEEVNLNNIQDIPIPMLSELCEAMKANTYVRSFSLVATRSGDPIANAVADMLRENRSLQSLNIESNFISSTGLMAVLKAVRENATLTELRVDNQRQWPGDAVEMEMATVLEQCPSIVRFGYHFTQQGPRARAAQAMTRNNELRRQQKKR

SEQ ID NO: 807216 - protein, 269 aa, Homo sapiens
MSSYQKELEKYRDIDEDEILRTLSPEELEQLDCELQEMDPENMLLPAGLRQRDQTKKSPTGPLDREALLQYLEQQALEVKERDDLVPFTGEKKGKPYIQPKREIPAEEQITLEPELEEALAHATDAEMCDIAAILDMYTLMSNKQYYDALCSGEICNTEGISSVVQPDKYKPVPDEPPNPTNIEEILKRVRSNDKELEEVNLNNIQAVADMLRENRSLQSLNIESNFISSTGLMAVLKAVRENATLTELRVDNQVASKRRDNTAFPFTN

SEQ ID NO: 807217 - protein, 111 aa, Homo sapiens
MGPSVSASVRRGGRCVPSLAGLRLGLNGVRSARQLPSALPSRASLLPATRPAGARGVTSQAVARLHAEYRQGAGARAVVLPDAAAEDVLDLPQDFQVPDEEIILLTGYRMH

SEQ ID NO: 807218 - protein, 301 aa, Homo sapiens
MAKSLLKTASLSGRTKLLHQTGLSLYSTSHGFYEEEVKKTLQQFPGGSIDLQKEDNGIGILTLNNPSRMNAFSGVMMLQLLEKVIELENWTEGKGLIVRGAKNTFSSGSDLNAVKSLGTPEDGMAVCMFMQNTLTRFMRLPLISVALVQGWALGGGAEFTTACDFRLMTPESKIRFVHKEMGIIPSWGGTTRLVEIIGSRQALKVLSGALKLDSKNALNIGMVEEVLQSSDETKSLEEAQEWLKQFIQGPPEVIRALKKSVCSGRELYLEEALQNERDLLGTVWGGPANLEAIAKKGKFNK

SEQ ID NO: 807219 - protein, 307 aa, Homo sapiens
MALKQEMAKSLLKTASLSGRTKLLHQTGLSLYSTSHGFYEEEVKKTLQQFPGGSIDLQKEDNGIGILTLNNPSRMNAFSGVMMLQLLEKVIELENWTEGKGLIVRGAKNTFSSGSDLNAVKSLGTPEDGMAVCMFMQNTLTRFMRLPLISVALVQGWALGGGAEFTTACDFRLMTPESKIRFVHKEMGIIPSWGGTTRLVEIIGSRQALKVLSGALKLDSKNALNIGMVEEVLQSSDETKSLEEAQEWLKQFIQGPPEVIRALKKSVCSGRELYLEEALQNERDLLGTVWGGPANLEAIAKKGKFNK

SEQ ID NO: 807220 - protein, 301 aa, Homo sapiens; identical to SEQ ID NO: 807218

SEQ ID NO: 807221 - protein, 145 aa, Homo sapiens
MAKSLLKTASLSGRTKLLHQTGLSLYSTSHGFYEEEVKKTLQQFPGGSIDLQKEDNGIGILTLNNPSRMNAFSGVMMLQLLEKVIELENWTEGKGLIVRGAKNTFSSGSDLNAVKSLGTPETSFNKCCAGSRLGIGWRSRIYYSM

SEQ ID NO: 807222 - protein, 319 aa, Homo sapiens
PWPATDPFQLLPESFAEEMAKSLLKTASLSGRTKLLHQTGLSLYSTSHGFYEEEVKKTLQQFPGGSIDLQKEDNGIGILTLNNPSRMNAFSGVMMLQLLEKVIELENWTEGKGLIVRGAKNTFSSGSDLNAVKSLGTPEDGMAVCMFMQNTLTRFMRLPLISVALVQGWALGGGAEFTTACDFRLMTPESKIRFVHKEMGIIPSWGGTTRLVEIIGSRQALKVLSGALKLDSKNALNIGMVEEVLQSSDETKSLEEAQEWLKQFIQGPPEVIRALKKSVCSGRELYLEEALQNERDLLGTVWGGPANLEAIAKKGKFNK

SEQ ID NO: 807223 - protein, 320 aa, Homo sapiens
MVLPEIRMEKEVTTVACEEMAKSLLKTASLSGRTKLLHQTGLSLYSTSHGFYEEEVKKTLQQFPGGSIDLQKEDNGIGILTLNNPSRMNAFSGVMMLQLLEKVIELENWTEGKGLIVRGAKNTFSSGSDLNAVKSLGTPEDGMAVCMFMQNTLTRFMRLPLISVALVQGWALGGGAEFTTACDFRLMTPESKIRFVHKEMGIIPSWGGTTRLVEIIGSRQALKVLSGALKLDSKNALNIGMVEEVLQSSDETKSLEEAQEWLKQFIQGPPEVIRALKKSVCSGRELYLEEALQNERDLLGTVWGGPANLEAIAKKGKFNK

SEQ ID NO: 807224 - protein, 160 aa, Homo sapiens
LRTLSSFLPESFAEEMAKSLLKTASLSGRTKLLHQTGLSLYSTSHGFYEEEVKKTLQQFPGGSIDLQKEDNGIGILTLNNPSRMNAFSGVMMLQLLEKVIELENWTEGKGLIVRGAKNTFSSGSDLNAVKSLGTPETSFNKCCAGSRLGIGWRSRIYYSM

SEQ ID NO: 807225 - protein, 225 aa, Homo sapiens [sequence omitted]

SEQ ID NO: 807226 - protein, 357 aa, Homo sapiens
MTKALHENRENVVTVVCACCDRYGTAPTIGAAWATNTWLNKLLFDMTRPSRGLGKAHHIIVHIRYTVLSTLYSYIPREFYEETEVKRHTSEVSLVSSPLTVHQGIGQMGHWSIAYSDDNTTVAMQLPFSGVMMLQLLEKVIELENWTEGKGLIVRGAKNTFSSGSDLNAVKSLGTPEDGMAVCMFMQNTLTRFMRLPLISVALVQGWALGGGAEFTTACDFRLMTPESKIRFVHKEMGIIPSWGGTTRLVEIIGSRQALKVLSGALKLDSKNALNIGMVEEVLQSSDETKSLEEAQEWLKQFIQGPPEVIRALKKSVCSGRELYLEEALQNERDLLGTVWGGPANLEAIAKKGKFNK

SEQ ID NO: 807227 - protein, 134 aa, Homo sapiens
MTPESKIRFVHKEMGIIPSWGGTTRLVEIIGSRQALKVLSGALKLDSKNALNIGMVEEVLQSSDETKSLEEAQEWLKQFIQGPPEVIRALKKSVCSGRELYLEEALQNERDLLGTVWGGPANLEAIAKKGKFNK

SEQ ID NO: 807228 - protein, 134 aa, Homo sapiens; identical to SEQ ID NO: 807227

SEQ ID NO: 807229 - protein, 277 aa, Homo sapiens
MAKSLLKTASLSGRTKLLHQTGLSLYSTSHGFYEEEVKKTLQQFPGGSIDLQKEDNGIGILTLNNPSRMNAFSGVMMLQLLEKVIELENWTEGKGLIVRGAKNTFSSGSDLNAVKSLGTPEDGMAVCMFMQNTLTRFMRLPLISVALVQGWALGGGAEFTTACDFRLMTPESKIRFVHKEMGIIPSWGGTTRLVEIIGSRQALKVLSGALKLDSKNALNIGMVEEVLQSSDETKSLEEAQEWLKQFIQGPPEVIRALKKSVCSRNSLGWACKFRGYC

SEQ ID NO: 807230 - protein, 277 aa, Homo sapiens; identical to SEQ ID NO: 807229

SEQ ID NO: 807231 - protein, 139 aa, Homo sapiens
MAKSLLKTASLSGRTKLLHQTGLSLYSTSHGFYEEEVKKTLQQFPGGSIDLQKEDNGIGILTLNNPSRMNAFSGVMMLQLLEKVIELENWTEGKGLIVRGAKNTFSSGSDLNAVKSLGTPEDGMAVCMFMQNTLTRFMR

SEQ ID NO: 807232 - protein, 169 aa, Homo sapiens
MAKSLLKTASLSGRTKLLHQTGLSLYSTSHGFYEEEVKKTLQQFPGGSIDLQKEDNGIGILTLNNPSRMNAFSGVMMLQLLEKVIELENWTEGKGLIVRGAKNTFSSGSDLNAVKSLGTPEDGMAVCMFMQNTLTRFMRLPLISVALVQGWALGGGAEFTTACDFSFRH

SEQ ID NO: 807233 - protein, 139 aa, Homo sapiens; identical to SEQ ID NO: 807231

SEQ ID NO: 807234 - protein, 145 aa, Homo sapiens; identical to SEQ ID NO: 807221

SEQ ID NO: 807235 - protein, 121 aa, Homo sapiens
MMLQLLEKVIELENWTEGKGLIVRGAKNTFSSGSDLNAVKSLGTPEDGMAVCMFMQNTLTRFMRLPLISVAPAQPGPDPHQPKQEEVPLSTCAGCCVPGLRRRPAPAPSPQAFFLIQINVS

SEQ ID NO: 807236 - protein, 139 aa, Homo sapiens; identical to SEQ ID NO: 807231

SEQ ID NO: 807237 - protein, 301 aa, Homo sapiens; identical to SEQ ID NO: 807218

SEQ ID NO: 807238 - protein, 137 aa, Homo sapiens
MAKSLLKTASLSGRTKLLHQTGLSLYSTSHGFYEEEVKKTLQQFPGGSIDLQKEDNGIGILTLNNPSRMNAFSGVMMLQLLEKVIELENWTEGKGLIVRGAKNRWNGRMHVHAKHLNKIYEVKKQRGKILLGLSRYV

SEQ ID NO: 807239 - protein, 139 aa, Homo sapiens; identical to SEQ ID NO: 807231

SEQ ID NO: 807240 - protein, 341 aa, Homo sapiens
MAKSLLKTASLSGRTKLLHQTGLSLYSTSHGFYEEEVKKTLQQFPGGSIDLQKEDNGIGILTLNNPSRMNAFSGVMMLQLLEKVIELENWTEGKGLIVRGAKNTFSSGSDLNAVKSLGTPEESCRWNTEFLYTLHPVSPFINILYSYGWNGRMHVHAKHLNKIYEVKKQRGKILLGLSRLPLISVALVQGWALGGGAEFTTACDFRLMTPESKIRFVHKEMGIIPSWGGTTRLVEIIGSRQALKVLSGALKLDSKNALNIGMVEEVLQSSDETKSLEEAQEWLKQFIQGPPEVIRALKKSVCSGRELYLEEALQNERDLLGTVWGGPANLEAIAKKGKFNK

SEQ ID NO: 807241 - protein, 301 aa, Homo sapiens; identical to SEQ ID NO: 807218

SEQ ID NO: 807242 - protein, 607 aa, Homo sapiens
MDNLSDTLKKLKITAVDKTEDSLEGCLDCLLQALAQNNTETSEKIQASGILQLFASLLTPQSSCKAKVANIIAEVAKNEFMRIPCVDAGLISPLVQLLNSKDQEVLLQTGRALGNICYDSHEGRSAVDQAGGAQIVIDHLRSLCSITDPANEKLLTVFCGMLMNYSNENDSLQAQLINMGVIPTLVKLLGIHCQNAALTEMCLVAFGNLAELESSKEQFASTNIAEELVKLFKKQIEHDKREMIFEVLAPLAENDAIKLQLVEAGLVECLLEIVQQKVDSDKEDDITELKTGSDLMVLLLLGDESMQKLFEGGKGSVFQRVLSWIPSNNHQLQLAGALAIANFARNDANCIHMVDNGIVEKLMDLLDRHVEDGNVTVQHAALSALRNLAIPVINKAKMLSAGVTEAVLKFLKSEMPPVQFKLLGTLRMLIDAQAEAAEQLGKNVKLVERLVEWCEAKDHAGVMGESNRLLSALIRHSKSKDVIKTIVQSGGIKHLVTMATSEHVIMQNEALVALALIAALELGTAEKDLESAKLVQILHRLLADERSAPEIKYNSMVLICALMGSECLHKEVQDLAFLDVVSKLRSHENKSVAQQASLTEQRLTVES

SEQ ID NO: 807243 - protein, 607 aa, Homo sapiens; identical to SEQ ID NO: 807242

SEQ ID NO: 807244 - protein, 558 aa, Homo sapiens
MDNLSDTLKKLKITAVDKTEDSLEGCLDCLLQALAQNNTETSEKIQASGILQLFASLLTPQSSCKAKVANIIAEVAKNEFMRIPCVDAGLISPLVQLLNSKDQEVLLQTGRALGNICYDSHSLQAQLINMGVIPTLVKLLGIHCQNAALTEMCLVAFGNLAELESSKEQFASTNIAEELVKLFKKQIEHDKREMIFEVLAPLAENDAIKLQLVEAGLVECLLEIVQQKVDSDKEDDITELKTGSDLMVLLLLGDESMQKLFEGGKGSVFQRVLSWIPSNNHQLQLAGALAIANFARNDANCIHMVDNGIVEKLMDLLDRHVEDGNVTVQHAALSALRNLAIPVINKAKMLSAGVTEAVLKFLKSEMPPVQFKLLGTLRMLIDAQAEAAEQLGKNVKLVERLVEWCEAKDHAGVMGESNRLLSALIRHSKSKDVIKTIVQSGGIKHLVTMATSEHVIMQNEALVALALIAALELGTAEKDLESAKLVQILHRLLADERSAPEIKYNSMVLICALMGSECLHKEVQDLAFLDVVSKLRSHENKSVAQQASLTEQRLTVES

SEQ ID NO: 807245 - protein, 565 aa, Homo sapiens
MDNLSDTLKKLKITAVDKTEDSLEGCLDCLLQALAQNNTETSEKIQASGILQLFASLLTPQSSCKAKVANIIAEVAKNEFMRIPCVDAGLISPLVQLLNSKDQEVLLQTGRALGNICYDSHEGRSAVDQAGGAQIVIDHLRSLCSITDPANEKLLTVFCGMLMNYSNENDSLQAQLINMGVIPTLVKLLGIHCQNAALTEMCLVAFGNLAELDAIKLQLVEAGLVECLLEIVQQKVDSDKEDDITELKTGSDLMVLLLLGDESMQKLFEGGKGSVFQRVLSWIPSNNHQLQLAGALAIANFARNDANCIHMVDNGIVEKLMDLLDRHVEDGNVTVQHAALSALRNLAIPVINKAKMLSAGVTEAVLKFLKSEMPPVQFKLLGTLRMLIDAQAEAAEQLGKNVKLVERLVEWCEAKDHAGVMGESNRLLSALIRHSKSKDVIKTIVQSGGIKHLVTMATSEHVIMQNEALVALALIAALELGTAEKDLESAKLVQILHRLLADERSAPEIKYNSMVLICALMGSECLHKEVQDLAFLDVVSKLRSHENKSVAQQASLTEQRLTVES

SEQ ID NO: 807246 - protein, 607 aa, Homo sapiens; identical to SEQ ID NO: 807242

SEQ ID NO: 807247 - protein, 515 aa, Homo sapiens
MDNLSDTLKKLKITAVDKTEDSLEGCLDCLLQALAQNNTETSEKIQASGILQLFASLLTPQSSCKAKVANIIAEVAKNEFMRIPCVDAGLISPLVQLLNSKDQEVLLQTGRALGNICYDSQSSKEQFASTNIAEELVKLFKKQIEHDKREMIFEVLAPLAENDAIKLQLVEAGLVECLLEIVQQKVDSDKEDDITELKTGSDLMVLLLLGDESMQKLFEGGKGSVFQRVLSWIPSNNHQLQLAGALAIANFARNDANCIHMVDNGIVEKLMDLLDRHVEDGNVTVQHAALSALRNLAIPVINKAKMLSAGVTEAVLKFLKSEMPPVQFKLLGTLRMLIDAQAEAAEQLGKNVKLVERLVEWCEAKDHAGVMGESNRLLSALIRHSKSKDVIKTIVQSGGIKHLVTMATSEHVIMQNEALVALALIAALELGTAEKDLESAKLVQILHRLLADERSAPEIKYNSMVLICALMGSECLHKEVQDLAFLDVVSKLRSHENKSVAQQASLTEQRLTVES

SEQ ID NO: 807248 - protein, 258 aa, Homo sapiens
MDNLSDTLKKLKITAVDKTEDSLEGCLDCLLQALAQNNTETSEKIQASGILQLFASLLTPQSSCKAKVANIIAEVAKNEFMRIPCVDAGLISPLVQLLNSKDQEVLLQTGRALGNICYDSHEGRSAVDQAGGAQIVIDHLRSLCSITDPANEKLLTVFCGMLMNYSNENDSLQAQLINMGVIPTLVKLLGIHCQNAALTEMCLVAFGNLAELESSKEQFASTNIAEELVKLFKKQIEHDKREMIFEVLAPLAENGKQD

SEQ ID NO: 807249 - protein, 224 aa, Homo sapiens
MDNLSDTLKKLKITAVDKTEDSLEGCLDCLLQALAQNNTETSEKIQASGILQLFASLLTPQSSCKAKVANIIAEVAKNEFMRIPCVDAGLISPLVQLLNSKDQEVLLQTGRALGNICYDSHEGRSAVDQAGGAQIVIDHLRSLCSITDPANEKLLTVFCGMLMNYSNENDSLQAQLINMGVIPTLVKLLGIHCQNAALTEMCLVAFGNLAELGKLETKNAAGSV

SEQ ID NO: 807250 - protein, 215 aa, Homo sapiens [sequence omitted]

SEQ ID NO: 807251 - protein, 141 aa, Homo sapiens
MDNLSDTLKKLKITAVDKTEDSLEGCLDCLLQALAQNNTETSEKIQASGILQLFASLLTPQSSCKAKVANIIAEVAKNEFMRIPCVDAGLISPLVQLLNSKDQEVLLQTGRALGNICYDSQSCKALHLCISLSKYPNRLLI

SEQ ID NO: 807252 - protein, 173 aa, Homo sapiens
MDNLSDTLKKLKITAVDKTEDSLEGCLDCLLQALAQNNTETSEKIQASGILQLFASLLTPQSSCKAKVANIIAEVAKNEFMRIPCVDAGLISPLVQLLNSKDQEVLLQTGRALGNICYDSHEGRSAVDQAGGAQIVIDHLRSLCSITDPANEKLLTVFCGMLMNYSNENGKQN

SEQ ID NO: 807253 - protein, 179 aa, Homo sapiens
LSHSRSDALGHILPQLGKDWTHQGITSLYHKIQLNGYKFLYCSARAIGMADLTKGYLQGEVIEKKPEVFKVACLSDIQQLFLPHGQPFYAAFGNRPNDVFAYRQVGLPESRIFTVNPRGELIQELIKNHKSTYERLGEVVELLFPPVARGPSTDLANPEYSNFCYWREPLPAVDLDTLD

SEQ ID NO: 807254 - protein, 184 aa, Homo sapiens
MAEVVLGVHEVSSETNRCSSTASSVCTRGRADLPGEALSWLSSPANVARRSSRLCTRSSSMVPKPPTPHPPMSNLRQHPLAPPSVPLSVSRPSSSPSTPPSSMAAESLVSSSPAGAPGPLWVSVTACRALSRPSIRALIKASCPQQLPLPDTLRPCSWLPSCDSSWRRASSRPSRLWCSLRLAA

SEQ ID NO: 807255 - protein, 159 aa, Homo sapiens
ESLSSPCGRQCGGIPEPAIPSGFFPTLAPFPAVVLATPGEVIEKKPEVFKVACLSDIQQLFLPHGQPFYAAFGNRPNDVFAYRQVGLPESRIFTVNPRGELIQELIKNHKSTYERLGEVVELLFPPVARGPSTDLANPEYSNFCYWREPLPAVDLDTLD

SEQ ID NO: 807256 - protein, 159 aa, Homo sapiens; identical to SEQ ID NO: 807255

SEQ ID NO: 807257 - protein, 159 aa, Homo sapiens; identical to SEQ ID NO: 807255

SEQ ID NO: 807258 - protein, 139 aa, Homo sapiens
LPKGPILLSPSSLFSALHREVIEKKPEVFKVACLSDIQQLFLPHGQPFYAAFGNRPNDVFAYRQVGLPESRIFTVNPRGELIQELIKNHKSTYERLGEVVELLFPPVARGPSTDLANPEYSNFCYWREPLPAVDLDTLD

SEQ ID NO: 807259 - protein, 134 aa, Homo sapiens
MAPQALSGPQWLSGQAVQARGQQAQPPARTLHLCHPLVKVSHCVLKFLGCVLAAAQPTGHLGHTSLELLQLPTQVQDLPVASLKPGALAADLLLDGLDFGFHLAFPLIQGRVGSQEGIRVLADRVTEACERLAH

SEQ ID NO: 807260 - protein, 53 aa, Homo sapiens
MGPSCLPQDVFAYRQVGLPESRIFTVNPRGELIQELIKNHKSTVRLNPAMFPM

SEQ ID NO: 807261 - protein, 730 aa, Homo sapiens [sequence omitted]

SEQ ID NO: 807262 - protein, 2218 aa, Homo sapiens
  misc_feature (5)..(5): Xaa can be any naturally occurring amino acid
QAGTXRDVMDLEKKLSSERPSSDGEGVVENGITTCNGKEQVKRKKSSKSEAKGTVSKVTGKKITKIISLGKKKPSTDEQTSSAEEDVPTCGYLNVLSNSRWRERWCRVKDNKLIFHKDRTDLKTHIVSIPLRGCEVIPGLDSKHPLTFRLLRNGQEVAVLEASSSEDMGRWIGILLAETGSSTDPEALHYDYIDVEMSASVIQTAKQTFCFMNRRVISANPYLGGTSNGYAHPSGTALHYDDVPCINGSLKGKKPPVASNGVTGKGKTLSSQPKKADPAAVVKRTGSNAAQYKYGKNRVEADAKRLQTKEEELLKRKEALRNRLAQLRKERKDLRAAIEVNAGMKGVGDCPGCMFVLETGDFILLCPKDLLLTKAVILFSKSGLSHSVSWGLETLLVTPRQVPVWSNMRRAGRGQGQTHTLLTEAGEVLGDLFRLLALTTEIVWRMAPVSAGRSRFWSPGRRDQLDFSTEGSPQGSVIFRSPDKGRSSPSFVEKGQARARQHLSWDASGKRPGYMEYRHQRGTEVTETEFAARVAALGQARAIPAGGSWRSAPEPGVAPLTYAWPALPARCLDYGRLLLRLRLYWPGLGRGLQMPQSPGRSREEAVAFPWLAARGGADAHPAGGYQLQPCWTLCLNDLMKGNAFGFRGGKAGVGRAGQADPIGGPGCGLQSEADPTGGGCAREWDGAWSLMRQKKHFSRVPSLQDSEDAGGPGVLLALKKRTSPAGHHRPRPGHKSVHLLGLVFSSAQWVHLRSLQQTSNKISECALKKCVPCPVEMQAELLFIASGANKMTEGSAELRGGQGSHSKKVAALGTVEFEGPRFKMRTLRPRARSSWPSSESASPLSWSESSTAAAKGNGRRRTLIPERTAEFKFHNEDLKSGELDLRRFVEVLLGDQVPSLLFGEPVPAAGVTAFLGIPGRKPQAILEEKLKQLEEECRQKEAERVSLELELTEVKESLKKALAGGVTLGLAIEPKSGTSSPQSPVFRHRTLENSPISSCDTSDTEGPVPVNSAAVLKKSQAAPGSSPCRRACAAEGQGMGIEERDLGDSSTTPASETAHPLACILICVTAGSSAQSGLSCTTPEAPRLSSEASACPPGPLVFFSTVKWRLYKRCKTLVPNFVKKQKKVMERCLKGCYQAKRHLSNQIGHCFHRFQPSPGLRMDGSMSPQMKTWIRQGRAWIPGCPGHECGWPWALGSPCTPTRRARGIRSPDVDFVSVAYPLHVPVPLVIRGKGMRKSRCETFFTFYYYFLDRCFCHQDMKSCHSSYLFFKNVFLLCVTLRSRSFQRFLILLINYLCCFCQVAEGFNTSLTVHPPPPWASIPSPYIHVGAGRCFSHQEPLGAGAGSSPLYRTFTAAWGQGSPLKGKQVPEFVPSWNYNTLEQEAGIPGPPAPPLPPACQVKPPNVLVGLAVLPLLSRVGASRASFPAFLLAFCAIFLGEFGCQGIKEKNRVHSLSWYLPPGFKNQINFLVSRRLLSGILQYGKMQSLMTKEVTPERLRRQIHGDQSQVATAPSPSIEYRGAILGVSLPSVHCPECPFSHRGRDGGKTLTDSLGFPQTYFQSASCVVHGTLQLGFMFKVGRLSLQGPRWITEAESGLPCIRKSFTTRIGSCLSPPELELIAKPSAGNGFGFLSHQPAFLSPLMHVPPGLVREAHHTSIRDASFPLGHPGRSGGDATRLRAVRCIAIEEPSLQWSLPTIAGRLPTIAGSWAHFISHKMNFLYREKSLLLHRFLLPSGQIVSLVDALGPLCLAACFAKENCVRFWWLVREGGDGQPEVTVLAQHRWAAASWQVKCEQHAKCHVGLSQSPTSFLTRQGGPGALAGTCPTAQLIGARLPACIFCCKNPEFVIHIHNPKPFKAEANVNEPHRGPWSLSKWVPWRGLTVGSFHGGYSLEISHSIKVYKHLLQNKLFMCICSINIVFNLYLYILDTREPSCQNSDSDVILFPSQNMPQEQAPLASVAAASVSDFINEARLRARGPTGRPGSPEKPDFFAMSLVLSRWSCSQGLATCTTVPTAMRGMWWPRDGAGRRTGQVRGPTPAGLRAPSILTLSHSVTLQGSAPGSILLSVISLQPPFIYFYNVKPLTNFFIETTIRFEGSLCPPDLGTGMGHGSLFPESAGNWGKAHLSARLVALSLGFQSPRQLQGNQCGSAESPQAPDLPQEHGPLSMGPSLRPSLGAGGRRLTSWVSPISPLCAYALALPGLTFPCILLIPELLLAISK

SEQ ID NO: 807263 - protein, 121 aa, Homo sapiens
MHPGLGTGMGHGSLFPESAGNWGKAHLSARLVALSLGFQSPRQLQGNQCGSAESPQAPDLPQEHGPLSMGPSLRPSLGAGGRRLTSWVSPISPLCAYALALPGLTFPCILLIPELLLAISK

SEQ ID NO: 807264 - protein, 513 aa, Homo sapiens
  misc_feature (5)..(5): Xaa can be any naturally occurring amino acid
QAGTXRDVMDLEKKLSSERPSSDGEGVVENGITTCNGKEQVKRKKSSKSEAKGTVSKVTGKKITKIISLGKKKPSTDEQTSSAEEDVPTCGYLNVLSNSRWRERWCRVKDNKLIFHKDRTDLKTHIVSIPLRGCEVIPGLDSKHPLTFRLLRNGQEVAVLEASSSEDMGRWIGILLAETGSSTDPEALHYDYIDVEMSASVIQTAKQTFCFMNRRVISANPYLGGTSNGYAHPSGTALHYDDVPCINGSLKGKKPPVASNGVTGKGKTLSSQPKKADPAAVVKRTGSNAAQYKYGKNRVEADAKRLQTKEEELLKRKEALRNRLAQLRKERKDLRAAIEVNAGMKGVGDCPGCMFVLETGDFILLCPKDLLLTKAVILFSKSGLSHSVSWGLETLLVTPRQVPVWSNMRRAGRGQGQTHTLLTEAGEVLGDLFRLLALTTEIVWRMAPVSAGRSRFWSPGRRDQLDFSTEGSPQGSVIFRSPDKGRSSPSFVEKGQARARQHLSWDASGKRPG

SEQ ID NO: 807265 - protein, 513 aa, Homo sapiens; identical to SEQ ID NO: 807264
  misc_feature (5)..(5): Xaa can be any naturally occurring amino acid

SEQ ID NO: 807266 - protein, 122 aa, Homo sapiens
  misc_feature (5)..(5): Xaa can be any naturally occurring amino acid
QAGTXRDVMDLEKKLSSERPSSDGEGVVENGITTCNGKEQVKRKKSSKSEAKGTVSKVTGKKITKIISLGKKKPSTDEQTSSAEEDVPTCGKTALPGDEQRAPKWVSFSPAVVSVPSSSKAR

SEQ ID NO: 807267 - protein, 2218 aa, Homo sapiens; identical to SEQ ID NO: 807262
  misc_feature (5)..(5): Xaa can be any naturally occurring amino acid

SEQ ID NO: 807268 - protein, 165 aa, Homo sapiens
MSQATKRKHVVKEVLGEHIVPSDQQQIVRVLRTPGNNLHEVETAQGQRFLVSMPSKYRKNIWIKRGDFLIVDPIEEGEKVKAEISFVLCKDHVRSLQKEGFWPEAFSEVAEKHNNRNRQTQPELPAEPQLSGEESSSEDDSDLFVNTNRRQYHESEEESEEEEAA

SEQ ID NO: 807269 - protein, 165 aa, Homo sapiens; identical to SEQ ID NO: 807268

SEQ ID NO: 807270 - protein, 165 aa, Homo sapiens; identical to SEQ ID NO: 807268

SEQ ID NO: 807271 - protein, 165 aa, Homo sapiens; identical to SEQ ID NO: 807268

SEQ ID NO: 807272 - protein, 113 aa, Homo sapiens
MPSKYRKNIWIKRGDFLIVDPIEEGEKVKAEISFVLCKDHVRSLQKEGFWPEAFSEVAEKHNNRNRQTQPELPAEPQLSGEESSSEDDSDLFVNTNRRQYHESEEESEEEEAA

SEQ ID NO: 807273 - protein, 165 aa, Homo sapiens; identical to SEQ ID NO: 807268

SEQ ID NO: 807274 - protein, 165 aa, Homo sapiens; identical to SEQ ID NO: 807268

SEQ ID NO: 807275 - protein, 165 aa, Homo sapiens; identical to SEQ ID NO: 807268

SEQ ID NO: 807276 - protein, 176 aa, Homo sapiens
MSQATKRKHVVKEVLGEHIVPSDQQQIVRVLRTPGNNLHEVETAQGQRFLVSMPSKYRKNIWIKRGDFLIVDPIEEGEKVKAEISFVLCKDHVRSLQKEGFWPEAFSEVAEKHNNRNRQIHQNPSEPQVSGEDPDQKSSDLSYTTGDDLKGLGIQEGGGIRPFLSEAGLGGTRAFP

SEQ ID NO: 807277 - protein, 149 aa, Homo sapiens
METSSRELQAAEYLEKHQIKEVVSYLTSALLFFRPEKPKEYLISLLERLRIAKVTGVAFPFFMDNSNIVAMFEMMDSSGRGTISFVQYKEALKTLGLCTEDEDLQDDGHKITLDKFKEEVNKRMKEICEKTKGKDSESYQTAAGLLLLH

SEQ ID NO: 807278 - protein, 131 aa, Homo sapiens
METSSRELQAAEYLEKHQIKEVVSYLTSALLFFRPEKPKEYLISLLERLRIAKVTGVAFPFFMDNSNIVAMFEMMDSSGRGTISFVQYKEALKTLGLCTEDEDLQDDGHKITLDKFKEEVNKRMKEIWSAF

SEQ ID NO: 807279 - protein, 959 aa, Homo sapiens [sequence omitted]

SEQ ID NO: 807280 - protein, 440 aa, Homo sapiens
VSRRAHTGTLDPPESRLVCSGRRLTQRRAVGSAGHLAGVGGGPLSCPSFHSATTVATPWGGDVGHHGLGSKRLLQHRKPKLGSGEVATPERVPPEIYNRMDPRAQTPVPGKGPFGREELLRRKLIHDGCLLWKTATGRFKDVLVLLMTDVLVFLQEKDQKYIFPTLDKPSVVSLQNLIVRDIANQEKGMFLISAAPPEMYEVHTASRDDRSTWIRVIQQSVRTCPSREDFPLIETEDEAYLRRIKMELQQKDRALVELLREKVGLFAEMTHFQAEEDGGSGMALPTLPRGLFRSESLESPRGERLLQDAIREVEGLKDLLVGPGVELLLTPREPALPLEPDSGGNTSPGVTANGEARTFNGSIELCRADSDSSQRDRNGNQLRSPQEEALQRLVNLYGLLHGLQAAVAQQDTLMEARFPEGPERREKLCRANSPQAMPCT

SEQ ID NO: 807281 - protein, 1029 aa, Homo sapiens
GRGESDFLSPRPTRAGRTPPPAFPQQYRTPGSAPRPPWSPRPIMSRIESLTRARIDRSRELASKTREKEKMKEAKDARYTNGHLFTTISVSGMTMCYACNKSITAKEALICPTCNVTIHNRCKDTLANCTKVKQKQQKAALLKNNTALQSVSLRSKTTIRERPSSAIYPSDSFRQSLLGSRRGRSSLSLAKSVSTTNIAGHFNDESPLGLRRILSQSTDSLNMRNRTLSVESLIDEAEVIYSELMSDFEMDEKDFAADSWSLAVDSSFLQQHKKEVMKQQDVIYELIQTELHHVRTLKIMTRLFRTGMLEELHLEPGVVQGLFPCVDELSDIHTRFLSQLLERRRQALCPGSTRNFVIHRLGDLLISQFSGPSAEQMCKTYSEFCSRHSKALKLYKELYARDKRFQQFIRKVTRPAVLKRHGVQECILLVTQRITKYPLLISRILQHSHGIEEERQDLTTALGLVKELLSNVDEGIYQLEKGARLQEIYNRMDPRAQTPVPGKGPFGREELLRRKLIHDGCLLWKTATGRFKDVLVLLMTDVLVFLQEKDQKYIFPTLDKPSVVSLQNLIVRDIANQEKGMFLISAAPPEMYEVHTASRDDRSTWIRVIQQSVRTCPSREDFPLIETEDEAYLRRIKMELQQKDRALVELLREKVGLFAEMTHFQAEEDGGSGMALPTLPRGLFRSESLESPRGERLLQDAIREVEGLKDLLVGPGVELLLTPREPALPLEPDSGGNTSPGVTANGEARTFNGSIELCRADSDSSQRDRNGNQLRSPQEEALQRLVNLYGLLHGLQAAVAQQDTLMEARFPEGPERREKLCRANSRDGEAGRAGAAPVAPEKQATELALLQRQHALLQEELRRCRRLGEERATEAGSLEARLRESEQARALLEREAEEARRQLAALGQTEPLPAEAPWARRPVDPRRRSLPAGDALYLSFNPPQPSRGTDRLDLPVTTRSVHRNFEDRERQELGSPEERLQDSSDPDTGSEEEGSSRLSPPHSPRDFTRMQDIPEETESRDGEAVASES

SEQ ID NO: 807282 - protein, 1029 aa, Homo sapiens; identical to SEQ ID NO: 807281

SEQ ID NO: 807283 - protein, 1024 aa, Homo sapiens
MKEAKDARYTNGHLFTTISVSGMTMCYACNKSITAKEALICPTCNVTIHNRCKDTLANCTKVKQKQQKAALLKNNTALQSVSLRSKTTIRERPSSAIYPSDSFRQSLLGSRRGRSSLSLAKSVSTTNIAGHFNDESPLGLRRILSQSTDSLNMRNRTLSVESLIDEAEVIYSELMSDFEMDEKDFAADSWSLAVDSSFLQQHKKEVMKQQDVIYELIQTELHHVRTLKIMTRLFRTGMLEELHLEPGVVQGLFPCVDELSDIHTRFLSQLLERRRQALCPGSTRNFVIHRLGDLLISQFSGPSAEQMCKTYSEFCSRHSKALKLYKELYARDKRFQQFIRKVTRPAVLKRHGVQECILLVTQRITKYPLLISRILQHSHGEEAGPGEGHWETATWGEERLGMTTGRVGSGVKPWAASKGGIKTRWELGCERNWLSRSPCQPPVPGIEEERQDLTTALGLVKELLSNVDEGIYQLEKGARLQEIYNRMDPRAQTPVPGKGPFGREELLRRKLIHDGCLLWKTATGRFKDVLVLLMTDVLVFLQEKDQKYIFPTLDKPSVVSLQNLIVRDIANQEKGMFLISAAPPEMYEVHTASRDDRSTWIRVIQQSVRTCPSREDFPLIETEDEAYLRRIKMELQQKDRALVELLREKVGLFAEMTHFQAEEDGGSGMALPTLPRGLFRSESLESPRGERLLQDAIREVEGLKDLLVGPGVELLLTPREPALPLEPDSGGNTSPGVTANGEARTFNGSIELCRADSDSSQRDRNGNQLRSPQEEALQRLVNLYGLLHGLQAAVAQQDTLMEARFPEGPERREKLCRANSRDGEAGRAGAAPVAPEKQATELALLQRQHALLQEELRRCRRLGEERATEAGSLEARLRESEQARALLEREAEEARRQLAALGQTEPLPAEAPWARRPVDPRRRSLPAGDALYLSFNPPQPSRGTDRLDLPVTTRSVHRNFEDRERQELGSPEERLQDSSDPDTGSEEEGSSRLSPPHSPRDFTRMQDIPEETESRDGEAVASES

SEQ ID NO: 807284 - protein, 875 aa, Homo sapiens
NYSAELRNASAVMKNQVARFNDLRFVGRSGRGKSFTLTITVFTNPTQVATYHRAIKVTVDGPREPRREMRNRTLSVESLIDEAEVIYSELMSDFEMDEKDFAADSWSLAVDSSFLQQHKKEVMKQQDVIYELIQTELHHVRTLKIMTRLFRTGMLEELHLEPGVVQGLFPCVDELSDIHTRFLSQLLERRRQALCPGSTRNFVIHRLGDLLISQFSGPSAEQMCKTYSEFCSRHSKALKLYKELYARDKRFQQFIRKVTRPAVLKRHGVQECILLVTQRITKYPLLISRILQHSHGIEEERQDLTTALGLVKELLSNVDEGIYQLEKGARLQEIYNRMDPRAQTPVPGKGPFGREELLRRKLIHDGCLLWKTATGRFKDVLVLLMTDVLVFLQEKDQKYIFPTLDKPSVVSLQNLIVRDIANQEKGMFLISAAPPEMYEVHTASRDDRSTWIRVIQQSVRTCPSREDFPLIETEDEAYLRRIKMELQQKDRALVELLREKVGLFAEMTHFQAEEDGGSGMALPTLPRGLFRSESLESPRGERLLQDAIREVEGLKDLLVGPGVELLLTPREPALPLEPDSGGNTSPGVTANGEARTFNGSIELCRADSDSSQRDRNGNQLRSPQEEALQRLVNLYGLLHGLQAAVAQQDTLMEARFPEGPERREKLCRANSRDGEAGRAGAAPVAPEKQATELALLQRQHALLQEELRRCRRLGEERATEAGSLEARLRESEQARALLEREAEEARRQLAALGQTEPLPAEAPWARRPVDPRRRSLPAGDALYLSFNPPQPSRGTDRLDLPVTTRSVHRNFEDRERQELGSPEERLQDSSDPDTGSEEEGSSRLSPPHSPRDFTRMQDIPEETESRDGEAVASES

SEQ ID NO: 807285 - protein, 807 aa, Homo sapiens
MRNRTLSVESLIDEAEVIYSELMSDFEMDEKDFAADSWSLAVDSSFLQQHKKEVMKQQDVIYELIQTELHHVRTLKIMTRLFRTGMLEELHLEPGVVQGLFPCVDELSDIHTRFLSQLLERRRQALCPGSTRNFVIHRLGDLLISQFSGPSAEQMCKTYSEFCSRHSKALKLYKELYARDKRFQQFIRKVTRPAVLKRHGVQECILLVTQRITKYPLLISRILQHSHGIEEERQDLTTALGLVKELLSNVDEGIYQLEKGARLQEIYNRMDPRAQTPVPGKGPFGREELLRRKLIHDGCLLWKTATGRFKDVLVLLMTDVLVFLQEKDQKYIFPTLDKPSVVSLQNLIVRDIANQEKGMFLISAAPPEMYEVHTASRDDRSTWIRVIQQSVRTCPSREDFPLIETEDEAYLRRIKMELQQKDRALVELLREKVGLFAEMTHFQAEEDGGSGMALPTLPRGLFRSESLESPRGERLLQDAIREVEGLKDLLVGPGVELLLTPREPALPLEPDSGGNTSPGVTANGEARTFNGSIELCRADSDSSQRDRNGNQLRSPQEEALQRLVNLYGLLHGLQAAVAQQDTLMEARFPEGPERREKLCRANSRDGEAGRAGAAPVAPEKQATELALLQRQHALLQEELRRCRRLGEERATEAGSLEARLRESEQARALLEREAEEARRQLAALGQTEPLPAEAPWARRPVDPRRRSLPAGDALYLSFNPPQPSRGTDRLDLPVTTRSVHRNFEDRERQELGSPEERLQDSSDPDTGSEEEGSSRLSPPHSPRDFTRMQDIPEETESRDGEAVASES

SEQ ID NO: 807286 - protein, 807 aa, Homo sapiens
NDGPQLTVESLIDEAEVIYSELMSDFEMDEKDFAADSWSLAVDSSFLQQHKKEVMKQQDVIYELIQTELHHVRTLKIMTRLFRTGMLEELHLEPGVVQGLFPCVDELSDIHTRFLSQLLERRRQALCPGSTRNFVIHRLGDLLISQFSGPSAEQMCKTYSEFCSRHSKALKLYKELYARDKRFQQFIRKVTRPAVLKRHGVQECILLVTQRITKYPLLISRILQHSHGIEEERQDLTTALGLVKELLSNVDEGIYQLEKGARLQEIYNRMDPRAQTPVPGKGPFGREELLRRKLIHDGCLLWKTATGRFKDVLVLLMTDVLVFLQEKDQKYIFPTLDKPSVVSLQNLIVRDIANQEKGMFLISAAPPEMYEVHTASRDDRSTWIRVIQQSVRTCPSREDFPLIETEDEAYLRRIKMELQQKDRALVELLREKVGLFAEMTHFQAEEDGGSGMALPTLPRGLFRSESLESPRGERLLQDAIREVEGLKDLLVGPGVELLLTPREPALPLEPDSGGNTSPGVTANGEARTFNGSIELCRADSDSSQRDRNGNQLRSPQEEALQRLVNLYGLLHGLQAAVAQQDTLMEARFPEGPERREKLCRANSRDGEAGRAGAAPVAPEKQATELALLQRQHALLQEELRRCRRLGEERATEAGSLEARLRESEQARALLEREAEEARRQLAALGQTEPLPAEAPWARRPVDPRRRSLPAGDALYLSFNPPQPSRGTDRLDLPVTTRSVHRNFEDRERQELGSPEERLQDSSDPDTGSEEEGSSRLSPPHSPRDFTRMQDIPEETESRDGEAVASES

SEQ ID NO: 807287 - protein, 566 aa, Homo sapiens
MKEAKDARYTNGHLFTTISVSGMTMCYACNKSITAKEALICPTCNVTIHNRCKDTLANCTKVKQKQQKAALLKNNTALQSVSLRSKTTIRERPSSAIYPSDSFRQSLLGSRRGRSSLSLAKSVSTTNIAGHFNDESPLGLRRILSQSTDSLNMRNRTLSVESLIDEAEVIYSELMSDFEMDEKDFAADSWSLAVDSSFLQQHKKEVMKQQDVIYELIQTELHHVRTLKIMTRLFRTGMLEELHLEPGVVQGLFPCVDELSDIHTRFLSQLLERRRQALCPGSTRNFVIHRLGDLLISQFSGPSAEQMCKTYSEFCSRHSKALKLYKELYARDKRFQQFIRKVTRPAVLKRHGVQECILLVTQRITKYPLLISRILQHSHGIEEERQDLTTALGLVKELLSNVDEGIYQLEKGARLQEIYNRMDPRAQTPVPGKGPFGREELLRRKLIHDGCLLWKTATGRFKDVLVLLMTDVLVFLQEKDQKYIFPTLDKPSVVSLQNLIVRDIANQEKGMFLISAAPPEMYEVHTASRDDRSTWIRVIQQSVRTGVAAEGPGTGGAAAREGRAVC

SEQ ID NO: 807288 - protein, 1029 aa, Homo sapiens; identical to SEQ ID NO: 807281

SEQ ID NO: 807289 - protein, 1029 aa, Homo sapiens; identical to SEQ ID NO: 807281

SEQ ID NO: 807290 - protein, 969 aa, Homo sapiens
MKEAKDARYTNGHLFTTISVSGMTMCYACNKSITAKEALICPTCNVTIHNRCKDTLANCTKVKQKQQKAALLKNNTALQSVSLRSKTTIRERPSSAIYPSDSFRQSLLGSRRGRSSLSLAKSVSTTNIAGHFNDESPLGLRRILSQSTDSLNMRNRTLSVESLIDEAEVIYSELMSDFEMDEKDFAADSWSLAVDSSFLQQHKKEVMKQQDVIYELIQTELHHVRTLKIMTRLFRTGMLEELHLEPGVVQGLFPCVDELSDIHTRFLSQLLERRRQALCPGSTRNFVIHRLGDLLISQFSGPSAEQMCKTYSEFCSRHSKALKLYKELYARDKRFQQFIRKVTRPAVLKRHGVQECILLVTQRITKYPLLISRILQHSHGIEEERQDLTTALGLVKELLSNVDEGIYQLEKGARLQEIYNRMDPRAQTPVPGKGPFGREELLRRKLIHDGCLLWKTATGRFKDVLVLLMTDVLVFLQEKDQKYIFPTLDKPSVVSLQNLIVRDIANQEKGMFLISAAPPEMYEVHTASRDDRSTWIRVIQQSVRTCPSREDFPLIETEDEAYLRRIKMELQQKDRALVELLREKVGLFAEMTHFQAEEDGGSGMALPTLPRGLFRSESLESPRGERLLQDAIREVEGLKDLLVGPGVELLLTPREPALPLEPDSGGNTSPGVTANGEARTFNGSIELCRADSDSSQRDRNGNQLRSPQEEALQRLVNLYGLLHGLQAAVAQQDTLMEARFPEGPERREKLCRANSRDGEAGRAGAAPVAPEKQATELALLQRQHALLQEELRRCRRLGEERATEAGSLEARLRESEQARALLEREAEEARRQLAALGQTEPLPAEAPWARRPVDPRRRSLPAGDALYLSFNPPQPSRGTDRLDLPVTTRSVHRNFEDRERQELGSPEERLQDSSDPDTGSEEEGSSRLSPPHSPRGETLAETWTRDFTRMQDIPEETESRDGEAVASES

SEQ ID NO: 807291 - protein, 765 aa, Homo sapiens
MKEAKDARYTNGHLFTTISVSGMTMCYACNKSITAKEALICPTCNVTIHNRCKDTLANCTKVKQKQQKAALLKNNTALQSVSLRSKTTIRERPSSAIYPSDSFRQSLLGSRRGRSSLSLAKSVSTTNIAGHFNDESPLGLRRILSQSTDSLNMRNRTLSVESLIDEAEVIYSELMSDFEMDEKDFAADSWSLAVDSSFLQQHKKEVMKQQDVIYELIQTELHHVRTLKIMTRLFRTGMLEELHLEPGVVQGLFPCVDELSDIHTRFLSQLLERRRQALCPGSTRNFVIHRLGDLLISQFSGPSAEQMCKTYSEFCSRHSKALKLYKELYARDKRFQQFIRKVTRPAVLKRHGVQECILLVTQRITKYPLLISRILQHSHGIEEERQDLTTALGLVKELLSNVDEGIYQLEKGARLQEIYNRMDPRAQTPVPGKGPFGREELLRRKLIHDGCLLWKTATGRFKDVLVLLMTDVLVFLQEKDQKYIFPTLDKPSVVSLQNLIVRDIANQEKGMFLISAAPPEMYEVHTASRDDRSTWIRVIQQSVRTCPSREDFPLIETEDEAYLRRIKMELQQKDRALVELLREKVGLFAEMTHFQAEEDGGSGMALPTLPRGLFRSESLESPRGERLLQDAIREVEGLKDLLVGPGVELLLTPREPALPLEPDSGGNTSPGVTANGEARTFNGSIELCRADSDSSQRDRNGNQLRSPQEEALQRLVNLYGLLHGLQAAVAQQDKEIWTESPDRWQLPTRSIRTNHAGLINCLIRK

SEQ ID NO: 807292 - protein, 535 aa, Homo sapiens
MKEAKDARYTNGHLFTTISVSGMTMCYACNKSITAKEALICPTCNVTIHNRCKDTLANCTKVKQKQQKAALLKNNTALQSVSLRSKTTIRERPSSAIYPSDSFRQSLLGSRRGRSSLSLAKSVSTTNIAGHFNDESPLGLRRILSQSTDSLNMRNRTLSVESLIDEAEVIYSELMSDFEMDEKDFAADSWSLAVDSSFLQQHKKEVMKQQDVIYELIQTELHHVRTLKIMTRLFRTGMLEELHLEPGVVQGLFPCVDELSDIHTRFLSQLLERRRQALCPGSTRNFVIHRLGDLLISQFSGPSAEQMCKTYSEFCSRHSKALKLYKELYARDKRFQQFIRKVTRPAVLKRHGVQECILLVTQRITKYPLLISRILQHSHGIEEERQDLTTALGLVKELLSNVDEGIYQLEKGARLQEIYNRMDPRAQTPVPGKGPFGREELLRRKLIHDGCLLWKTATGRFKDVLVLLMTDVLVFLQEKDQKYIFPTLVRHSFFTFLSTDKCFSLFLLSCPSPRELWSPPESNSYNCYYYRNNKK

SEQ ID NO: 807293 - protein, 381 aa, Homo sapiens
MKEAKDARYTNGHLFTTISVSGMTMCYACNKSITAKEALICPTCNVTIHNRCKDTLANCTKVKQKQQKAALLKNNTALQSVSLRSKTTIRERPSSAIYPSDSFRQSLLGSRRGRSSLSLAKSVSTTNIAGHFNDESPLGLRRILSQSTDSLNMRNRTLSVESLIDEAEVIYSELMSDFEMDEKDFAADSWSLAVDSSFLQQHKKEVMKQQDVIYELIQTELHHVRTLKIMTRLFRTGMLEELHLEPGVVQGLFPCVDELSDIHTRFLSQLLERRRQALCPGSTRNFVIHRLGDLLISQFSGPSAEQMCKTYSEFCSRHSKALKLYKELYARDKRFQQFIRKVTRPAVLKRHGVQECILLVTQRITKYPLLISRILQHSHGE

SEQ ID NO: 807294 - protein, 994 aa, Homo sapiens
LGSAHAGMCCCCGCCPLLAHLEQGSLRERTREKEKMKEAKDARYTNGHLFTTISVSGMTMCYACNKSITAKEALICPTCNVTIHNRCKDTLANCTKVKQKQQKAALLKNNTALQSVSLRSKTTIRERPSSAIYPSDSFRQSLLGSRRGRSSLSLAKSVSTTNIAGHFNDESPLGLRRILSQSTDSLNMRNRTLSVESLIDEAEVIYSELMSDFEMDEKDFAADSWSLAVDSSFLQQHKKEVMKQQDVIYELIQTELHHVRTLKIMTRLFRTGMLEELHLEPGVVQGLFPCVDELSDIHTRFLSQLLERRRQALCPGSTRNFVIHRLGDLLISQFSGPSAEQMCKTYSEFCSRHSKALKLYKELYARDKRFQQFIRKVTRPAVLKRHGVQECILLVTQRITKYPLLISRILQHSHGIEEERQDLTTALGLVKELLSNVDEGIYQLEKGARLQEIYNRMDPRAQTPVPGKGPFGREELLRRKLIHDGCLLWKTATGRFKDVLVLLMTDVLVFLQEKDQKYIFPTLDKPSVVSLQNLIVRDIANQEKGMFLISAAPPEMYEVHTASRDDRSTWIRVIQQSVRTCPSREDFPLIETEDEAYLRRIKMELQQKDRALVELLREKVGLFAEMTHFQAEEDGGSGMALPTLPRGLFRSESLESPRGERLLQDAIREVEGLKDLLVGPGVELLLTPREPALPLEPDSGGNTSPGVTANGEARTFNGSIELCRADSDSSQRDRNGNQLRSPQEEALQRLVNLYGLLHGLQAAVAQQDTLMEARFPEGPERREKLCRANSRDGEAGRAGAAPVAPEKQATELALLQRQHALLQEELRRCRRLGEERATEAGSLEARLRESEQARALLEREAEEARRQLAALGQTEPLPAEAPWARRPVDPRRRSLPAGDALYLSFNPPQPSRGTDRLDLPVTTRSVHRNFEDRERQELGSPEERLQDSSDPDTGSEEEGSSRLSPPHSPRDFTRMQDIPEETESRDGEAVASES

SEQ ID NO: 807295 - protein, 118 aa, Homo sapiens
MGEPQGGELLPSAKQNLQSSHYSVPDLLFFLPTVHSPAEALTAWIYLSLLALSIETLRTERGRNWGAPKSGCKTAVTLTLAARRKVAAVCLRPTVHEVRPWRRHGPEVECSLGTCELV

SEQ ID NO: 807296 - protein, 959 aa, Homo sapiens [sequence omitted]

SEQ ID NO: 807297 - protein, 825 aa, Homo sapiens
ICITDRCRILSQSTDSLNMRNRTLSVESLIDEAEVIYSELMSDFEMDEKDFAADSWSLAVDSSFLQQHKKEVMKQQDVIYELIQTELHHVRTLKIMTRLFRTGMLEELHLEPGVVQGLFPCVDELSDIHTRFLSQLLERRRQALCPGSTRNFVIHRLGDLLISQFSGPSAEQMCKTYSEFCSRHSKALKLYKELYARDKRFQQFIRKVTRPAVLKRHGVQECILLVTQRITKYPLLISRILQHSHGIEEERQDLTTALGLVKELLSNVDEGIYQLEKGARLQEIYNRMDPRAQTPVPGKGPFGREELLRRKLIHDGCLLWKTATGRFKDVLVLLMTDVLVFLQEKDQKYIFPTLDKPSVVSLQNLIVRDIANQEKGMFLISAAPPEMYEVHTASRDDRSTWIRVIQQSVRTCPSREDFPLIETEDEAYLRRIKMELQQKDRALVELLREKVGLFAEMTHFQAEEDGGSGMALPTLPRGLFRSESLESPRGERLLQDAIREVEGLKDLLVGPGVELLLTPREPALPLEPDSGGNTSPGVTANGEARTFNGSIELCRADSDSSQRDRNGNQLRSPQEEALQRLVNLYGLLHGLQAAVAQQDTLMEARFPEGPERREKLCRANSRDGEAGRAGAAPVAPEKQATELALLQRQHALLQEELRRCRRLGEERATEAGSLEARLRESEQARALLEREAEEARRQLAALGQTEPLPAEAPWARRPVDPRRRSLPAGDALYLSFNPPQPSRGTDRLDLPVTTRSVHRNFEDRERQELGSPEERLQDSSDPDTGSEEEGSSRLSPPHSPRDFTRMQDIPEETESRDGEAVASES

SEQ ID NO: 807298 - protein, 842 aa, Homo sapiens
SYKLLLHWHILLEHFNDESPLGLRRILSQSTDSLNMRNRTLSVESLIDEAEVIYSELMSDFEMDEKDFAADSWSLAVDSSFLQQHKKEVMKQQDVIYELIQTELHHVRTLKIMTRLFRTGMLEELHLEPGVVQGLFPCVDELSDIHTRFLSQLLERRRQALCPGSTRNFVIHRLGDLLISQFSGPSAEQMCKTYSEFCSRHSKALKLYKELYARDKRFQQFIRKVTRPAVLKRHGVQECILLVTQRITKYPLLISRILQHSHGIEEERQDLTTALGLVKELLSNVDEGIYQLEKGARLQEIYNRMDPRAQTPVPGKGPFGREELLRRKLIHDGCLLWKTATGRFKDVLVLLMTDVLVFLQEKDQKYIFPTLDKPSVVSLQNLIVRDIANQEKGMFLISAAPPEMYEVHTASRDDRSTWIRVIQQSVRTCPSREDFPLIETEDEAYLRRIKMELQQKDRALVELLREKVGLFAEMTHFQAEEDGGSGMALPTLPRGLFRSESLESPRGERLLQDAIREVEGLKDLLVGPGVELLLTPREPALPLEPDSGGNTSPGVTANGEARTFNGSIELCRADSDSSQRDRNGNQLRSPQEEALQRLVNLYGLLHGLQAAVAQQDTLMEARFPEGPERREKLCRANSRDGEAGRAGAAPVAPEKQATELALLQRQHALLQEELRRCRRLGEERATEAGSLEARLRESEQARALLEREAEEARRQLAALGQTEPLPAEAPWARRPVDPRRRSLPAGDALYLSFNPPQPSRGTDRLDLPVTTRSVHRNFEDRERQELGSPEERLQDSSDPDTGSEEEGSSRLSPPHSPRDFTRMQDIPEETESRDGEAVASES

SEQ ID NO: 807299 - protein, 1105 aa, Homo sapiens
MKEAKDARYTNGHLFTTISVSGMTMCYACNKSITAKEALICPTCNVTIHNRCKDTLANCTKVKQKQQKAALLKNNTALQSVSLRSKTTIRERPSSAIYPSDSFRQSLLGSRRGRSSLSLAKSVSTTNIAGHFNDESPLGLRRILSQSTDSLNMRNRTLSVESLIDEAEVIYSELMSDFEMDEKDFAADSWSLAVDSSFLQQHKKEVMKQQDVIYELIQTELHHVRTLKIMTRLFRTGMLEELHLEPGVVQGLFPCVDELSDIHTRFLSQLLERRRQALCPGSTRNFVIHRLGDLLISQFSGPSAEQMCKTYSEFCSRHSKALKLYKELYARDKRFQQFIRKVTRPAVLKRHGVQECILLVTQRITKYPLLISRILQHSHGIEEERQDLTTALGLVKELLSNVDEGIYQLEKGARLQEIYNRMDPRAQTPVPGKGPFGREELLRRKLIHDGCLLWKTATGRFKDVLVLLMTDVLVFLQEKDQKYIFPTLVRHSFFTFLSTDKCFSLFLLSCPSPESSGVPQSQTAIIVTITVIIKNKSSSQVLLLCTGTFTPVGKDYFRPHFIDDESKASSQLNNLSRVAHISKSLLAGTSAWLFNWYCKMTLQSFQSLSRRIEGLNMPRDRIPRLNPSFSPDWQDKPSVVSLQNLIVRDIANQEKGMFLISAAPPEMYEVHTASRDDRSTWIRVIQQSVRTCPSREDFPLIETEDEAYLRRIKMELQQKDRALVELLREKVGLFAEMTHFQAEEDGGSGMALPTLPRGLFRSESLESPRGERLLQDAIREVEGLKDLLVGPGVELLLTPREPALPLEPDSGGNTSPGVTANGEARTFNGSIELCRADSDSSQRDRNGNQLRSPQEEALQRLVNLYGLLHGLQAAVAQQDTLMEARFPEGPERREKLCRANSRDGEAGRAGAAPVAPEKQATELALLQRQHALLQEELRRCRRLGEERATEAGSLEARLRESEQARALLEREAEEARRQLAALGQTEPLPAEAPWARRPVDPRRRSLPAGDALYLSFNPPQPSRGTDRLDLPVTTRSVHRNFEDRERQELGSPEERLQDSSDPDTGSEEEGSSRLSPPHSPRDFTRMQDIPEETESRDGEAVASES

SEQ ID NO: 807300 - protein, 1029 aa, Homo sapiens; identical to SEQ ID NO: 807281

SEQ ID NO: 807301 - protein, 1029 aa, Homo sapiens; identical to SEQ ID NO: 807281

SEQ ID NO: 807302 - protein, 959 aa, Homo sapiens [sequence omitted]

SEQ ID NO: 807303 - protein, 446 aa, Homo sapiens
MKEAKDARYTNGHLFTTISVSGMTMCYACNKSITAKEALICPTCNVTIHNRCKDTLANCTKVKQKQQKAALLKNNTALQSVSLRSKTTIRERPSSAIYPSDSFRQSLLGSRRGRSSLSLAKSVSTTNIAGHFNDESPLGLRRILSQSTDSLNMRNRTLSVESLIDEAEVIYSELMSDFEMDEKDFAADSWSLAVDSSFLQQHKKEVMKQQDVIYELIQTELHHVRTLKIMTRLFRTGMLEELHLEPGVVQGLFPCVDELSDIHTRFLSQLLERRRQALCPGSTRNFVIHRLGDLLISQFSGPSAEQMCKTYSEFCSRHSKALKLYKELYARDKRFQQFIRKVTRPAVLKRHGVQECILLVTQRITKYPLLISRILQHSHGIEEERQDLTTALGLVKELLSNVDEGIYQLEKGARLQEIYNRMDPRTEAQTHPDIDRCTGVLQERPK

SEQ ID NO: 807304 - protein, 129 aa, Homo sapiens
MRNRTLSVESLIDEAEVIYSELMSDFEMDEKDFAADSWSLAVDSSFLQQHKKEVMKQQDVIYELIQTELHHVRTLKIMTRLFRTGMLEELHLEPGVVQGLFPCVDELSDIHTRFLSSSSSSRDPLDHLS

SEQ ID NO: 807305 - protein, 481 aa, Homo sapiens
SKWTSGSRRSWLSRGGGEISPTGMITKTHKVDLGLPEKKKKKKVVKEPETRYSVLNNDDYFADVSPLRATSPSKSVAHGQAPEMPLVKKKKKKKKGVSTLCEEHVEPETTLPARRTEKSPSLRKQVFGHLEFLSGEKKNKKSPLAMSHASGVKTSPDPRQGEEETRVGKKLKKHKKEKKGAQDPTAFSVQDPWFCEAREARDVGDTCSVGKKDEEQAALGQKRKRKSPREHNGKVKKKKKIHQEGDALPGHSKPSRSMESSPRKGSKKKPVKVEAPEYIPISDDPKASAKKKMKSKKKVEQPVIEEPALKRKKKKKRKESGVAGDPWKEETDTDLEVVLEKKGNMDEAHIDQVRRKALQEEIDRESGKTEASETRKWTGTQFGQWDTAGFENEDQKLKFLRLMGGFKNLSPSFSRPASTIARPNMALGKKAADSLQQNLQRDYDRAMSWKYSRGAGLGFSTAPNKIFYIDRNASKSVKLED

SEQ ID NO: 807306 - protein, 458 aa, Homo sapiens
MITKTHKVDLGLPEKKKKKKVVKEPETRYSVLNNDDYFADVSPLRATSPSKSVAHGQAPEMPLVKKKKKKKKGVSTLCEEHVEPETTLPARRTEKSPSLRKQVFGHLEFLSGEKKNKKSPLAMSHASGVKTSPDPRQGEEETRVGKKLKKHKKEKKGAQDPTAFSVQDPWFCEAREARDVGDTCSVGKKDEEQAALGQKRKRKSPREHNGKVKKKKKIHQEGDALPGHSKPSRSMESSPRKGSKKKPVKVEAPEYIPISDDPKASAKKKMKSKKKVEQPVIEEPALKRKKKKKRKESGVAGDPWKEETDTDLEVVLEKKGNMDEAHIDQVRRKALQEEIDRESGKTEASETRKWTGTQFGQWDTAGFENEDQKLKFLRLMGGFKNLSPSFSRPASTIARPNMALGKKAADSLQQNLQRDYDRAMSWKYSRGAGLGFSTAPNKIFYIDRNASKSVKLED

SEQ ID NO: 807307 - protein, 481 aa, Homo sapiens; identical to SEQ ID NO: 807305

SEQ ID NO: 807308 - protein, 271 aa, Homo sapiens
MCPQTTQSCSQKRKRKSPREHNGKVKKKKKIHQEGDALPGHSKPSRSMESSPRKGSKKKPVKVEAPEYIPISDDPKASAKKKMKSKKKVEQPVIEEPALKRKKKKKRKESGVAGDPWKEETDTDLEVVLEKKGNMDEAHIDQVRRKALQEEIDRESGKTEASETRKWTGTQFGQWDTAGFENEDQKLKFLRLMGGFKNLSPSFSRPASTIARPNMALGKKAADSLQQNLQRDYDRAMSWKYSRGAGLGFSTAPNKIFYIDRNASKSVKLED

SEQ ID NO: 807309 - protein, 168 aa, Homo sapiens
MGITTVFLIGLSLGLTEYPLLSLLALCLVHSSHLICWALPDEGGGQGKERALNSRKIATFFLSSQGTQFGQWDTAGFENEDQKLKFLRLMGGFKNLSPSFSRPASTIARPNMALGKKAADSLQQNLQRDYDRAMSWKYSRGAGLGFSTAPNKIFYIDRNASKSVKLED

SEQ ID NO: 807310 - protein, 107 aa, Homo sapiens
MITKTHKVDLGLPEKKKKKKVVKEPETRYSVLNNDDYFADVSPLRATSPSKSVAHGQAPEMPLVKKKKKKKKGVSTLCEEHVEPVPFVQPPRQHDCKAQHGPRQEGG

SEQ ID NO: 807311 - protein, 402 aa, Homo sapiens
SKWTSGSRRSWLSRGGGEISPTGMITKTHKVDLGLPEKKKKKKVVKEPETRYSVLNNDDYFADVSPLRATSPSKSVAHGQAPEMPLVKKKKKKKKGVSTLCEEHVEPETTLPARRTEKSPSLRKQVFGHLEFLSGEKKNKKSPLAMSHASGVKTSPDPRQGEEETRVGKKLKKHKKEKKGAQDPTAFSVQDPWFCEAREARDVGDTCSVGKKDEEQAALGQKRKRKSPREHNGKVKKKKKIHQEGDALPGHSKPSRSMESSPRKGSKKKPVKVEAPEYIPISDDPKASAKKKMKSKKKVEQPVIEEPALKRKKKKKRKESGVAGDPWKEETDTDLEVVLEKKGNMDEAHIDQVRRKALQEEIDRESGKTEASETRKWTVSLGLGLCEEVARSASRRFPSPPA

SEQ ID NO: 807312 - protein, 101 aa, Homo sapiens
ETVSLLLPRLVPGLQQALQAVSLALNPDPQALARSIVGQVCATRTYLGHFPQDVNLSCLSFLDSTLRYIMGEAVESPRGSVLDLSECLLGTSSFDGETNPS

SEQ ID NO: 807313 - protein, 243 aa, Homo sapiens
MSSGTELLWPGAALLVLLGVAASLCVRCSRPGAKRSEKIYQQRSLREDQQSFTGSRTYSLVGQAWPGPLADMAPTRKDKLLQFYPSLEDPASSRYQNFSKGSRHGSEEAYIDPIAMEYYNWGRFSKPPEDDDANSYENVLICKQKTTETGAQQEGIGGLCRGDLSLSLALKTGPTSGLCPSASPEEDEESEDYQNSASIHQWRESRKVMGQLQREASPGPVGSPDEEDGEPDYVNGEVAATEA

SEQ ID NO: 807314 - protein, 243 aa, Homo sapiens; identical to SEQ ID NO: 807313

SEQ ID NO: 807315 - protein, 243 aa, Homo sapiens; identical to SEQ ID NO: 807313

SEQ ID NO: 807316 - protein, 243 aa, Homo sapiens; identical to SEQ ID NO: 807313

SEQ ID NO: 807317 - protein, 243 aa, Homo sapiens; identical to SEQ ID NO: 807313

SEQ ID NO: 807318 - protein, 243 aa, Homo sapiens; identical to SEQ ID NO: 807313

SEQ ID NO: 807319 - protein, 111 aa, Homo sapiens
MSSGTELLWPGAALLVLLGVAASLCVRCSRPGAKRSEKIYQQRSLREDQQSFTGSRTYSLVGQAWPGPLADMAPTRKDKLLQFYPSLEDPASSRYQNFSKGSRHGSEEAYI

SEQ ID NO: 807320 - protein, 243 aa, Homo sapiens; identical to SEQ ID NO: 807313

SEQ ID NO: 807321 - protein, 316 aa, Homo sapiens
FILRYAVYYSFVFCLLFALSVVCVLLRSAVVYVSVALHLSSLHCCSLSSVSLSSVFFVIVFLFRLLLFVVRVCSSVCFSLSVFALLRSSLVSFSFVVCLLSLFVVFSSLSAPLCSSVLFLLPHLSLRRSSYALFLSALSPLSVSSFALVLFGAVVSSSLFLLLFSPSFVFLSVGFIAVLCVVFRFSLRCVLVLFVSLLFVCVCVVGVMCSGVGSDWLRAVVVLCVVFWAWCAMLVRCLVCVFVLFVDASSVRCGVVLCLVFLVLCLFRLFVVFSARLGRECGAVCGAVGFGLVLDAACACCFVSRRVAVVRVSVSL

SEQ ID NO: 807322 - protein, 415 aa, Homo sapiens
MGTTARAALVLTYLAVASAASEGGFTATGQRQLRPEHFQEVGYAAPPSPPLSRSLPMDHPDSSQHGPPFEGQSQVQPPPSQEATPLQQEKLLPAQLPAEKEVGPPLPQEAVPLQKELPSLQHPNEQKEGTPAPFGDQSHPEPESWNAAQHCQQDRSQGGWGHRLDGFPPGRPSPDNLNQICLPNRQHVVYGPWNLPQSSYSHLTRQGETLNFLEIGYSRCCHCRSHTNRLECAKLVWEDTLDKYCDREYAVKTHHHLCCRHPPSPTRDECFARRAPYPNYDRDILTIDISRVTPNLMGHLCGNQRVLTKHKHIPGLIHNMTARCCDLPFPEQACCAEEEKLTFINDLCGPRRNIWRDPALCCYLSPGDEQVNCFNINYLRNVALVSGDTENAKGQGEQGSTGGTNISSTSEPKEE

SEQ ID NO: 807323 - protein, 132 aa, Homo sapiens
CLQPVPVSYVGGTLSSLAARVCIKCLACTRARERTTPSAGTLGGSLGGSLGGSSGGTWSGSLRGTSGGSSGGPSCGSVGGTITPVHGRLVVWEDTLDKYCDREYAVKTHHHLCPHEPRERHWSSHPKSPDGQ

SEQ ID NO: 807324 - protein, 540 aa, Homo sapiens
MGTTARAALVLTYLAVASAASEGGFTATGQRQLRPEHFQEVGYAAPPSPPLSRSLPMDHPDSSQHGPPFEGQSQVQPPPSQEATPLQQEKLLPAQLPAEKEVGPPLPQEAVPLQKELPSLQHPNEQKEGTPAPFGDQSHPEPESWNAAQHCQQDRSQGGWGHRLDGFPPGRPSPDNLNQICLPNRQHVVYGPWNLPQSSYSHLTRQGETLNFLEIGYSRCCHCRSHTNRLECAKLVWEEAMSRFCEAEFSVKTRPHWCCTRQGEARFSCFQEEAPQPHYQLRACPSHQPDISSGLELPFPPGVPTLDNIKNICHLRRFRSVPRNLPATDPLQRELLALIQLEREFQRCCRQGNNHTCTWKAWEDTLDKYCDREYAVKTHHHLCCRHPPSPTRDECFARRAPYPNYDRDILTIDISRVTPNLMGHLCGNQRVLTKHKHIPGLIHNMTARCCDLPFPEQACCAEEEKLTFINDLCGPRRNIWRDPALCCYLSPGDEQVNCFNINYLRNVALVSGDTENAKGQGEQGSTGGTNISSTSEPKEE

SEQ ID NO: 807325 - protein, 540 aa, Homo sapiens; identical to SEQ ID NO: 807324

SEQ ID NO: 807326 - protein, 540 aa, Homo sapiens; identical to SEQ ID NO: 807324

SEQ ID NO: 807327 - protein, 540 aa, Homo sapiens; identical to SEQ ID NO: 807324

SEQ ID NO: 807328 - protein, 563 aa, Homo sapiens
PRNVCPLGRKGPTSECPVVSCPRMGTTARAALVLTYLAVASAASEGGFTATGQRQLRPEHFQEVGYAAPPSPPLSRSLPMDHPDSSQHGPPFEGQSQVQPPPSQEATPLQQEKLLPAQLPAEKEVGPPLPQEAVPLQKELPSLQHPNEQKEGTPAPFGDQSHPEPESWNAAQHCQQDRSQGGWGHRLDGFPPGRPSPDNLNQICLPNRQHVVYGPWNLPQSSYSHLTRQGETLNFLEIGYSRCCHCRSHTNRLECAKLVWEEAMSRFCEAEFSVKTRPHWCCTRQGEARFSCFQEEAPQPHYQLRACPSHQPDISSGLELPFPPGVPTLDNIKNICHLRRFRSVPRNLPATDPLQRELLALIQLEREFQRCCRQGNNHTCTWKAWEDTLDKYCDREYAVKTHHHLCCRHPPSPTRDECFARRAPYPNYDRDILTIDISRVTPNLMGHLCGNQRVLTKHKHIPGLIHNMTARCCDLPFPEQACCAEEEKLTFINDLCGPRRNIWRDPALCCYLSPGDEQVNCFNINYLRNVALVSGDTENAKGQGEQGSTGGTNISSTSEPKEE

SEQ ID NO: 807329 - protein, 714 aa, Homo sapiens
MGTTARAALVLTYLAVASAASEGGFTATGQRQLRPEHFQEVGYAAPPSPPLSRSLPMDHPDSSQHGPPFEGQSQVQPPPSQEATPLQQEKLLPAQLPAEKEVGPPLPQEAVPLQKELPSLQHPNEQKEGTPAPFGDQSHPEPESWNAAQHCQQDRSQGGWGHRLDGFPPGRPSPDNLNQICLPNRQHVVYGPWNLPQSSYSHLTRQGETLNFLEIGYSRCCHCRSHTNRLECAKLVWEEAMSRFCEAEFSVKTRPHWCCTRQGEARFSCFQEEAPQPHYQLRACPSHQPDISSGLELPFPPGVPTLDNIKNICHLRRFRSVPRNLPATDPLQRELLALIQLEREFQRCCRQGNNHTCTWKAVSGRPSLPESLFACLPIFDLLILPVHPSMYPPCCECVHPFICLWLSVHPLCLSPEFVHLELRTTLLASSTHDPHTHLSTIHPSVQLWPHLTFSIHCSSSSPGTSLEPHPGFHPSTFPSPHINSCLLTLYFFAIPFGPLGLGAPHLVARDDKGSRWSGEKGPSVQLLTSLSLVHSWEDTLDKYCDREYAVKTHHHLCCRHPPSPTRDECFARRAPYPNYDRDILTIDISRVTPNLMGHLCGNQRVLTKHKHIPGLIHNMTARCCDLPFPEQACCAEEEKLTFINDLCGPRRNIWRDPALCCYLSPGDEQVNCFNINYLRNVALVSGDTENAKGQGEQGSTGGTNISSTSEPKEE

SEQ ID NO: 807330 - protein, 568 aa, Homo sapiens
MGTTARAALVLTYLAVASAASEGGFTATGQRQLRPEHFQEVGYAAPPSPPLSRSLPMDHPDSSQHGPPFEGQSQGGKEGRGPRPHSQPWLGERVGCSHIPPSMQPPPSQEATPLQQEKLLPAQLPAEKEVGPPLPQEAVPLQKELPSLQHPNEQKEGTPAPFGDQSHPEPESWNAAQHCQQDRSQGGWGHRLDGFPPGRPSPDNLNQICLPNRQHVVYGPWNLPQSSYSHLTRQGETLNFLEIGYSRCCHCRSHTNRLECAKLVWEEAMSRFCEAEFSVKTRPHWCCTRQGEARFSCFQEEAPQPHYQLRACPSHQPDISSGLELPFPPGVPTLDNIKNICHLRRFRSVPRNLPATDPLQRELLALIQLEREFQRCCRQGNNHTCTWKAWEDTLDKYCDREYAVKTHHHLCCRHPPSPTRDECFARRAPYPNYDRDILTIDISRVTPNLMGHLCGNQRVLTKHKHIPGLIHNMTARCCDLPFPEQACCAEEEKLTFINDLCGPRRNIWRDPALCCYLSPGDEQVNCFNINYLRNVALVSGDTENAKGQGEQGSTGGTNISSTSEPKEE

SEQ ID NO: 807331 - protein, 466 aa, Homo sapiens
MQPPPSQEATPLQQEKLLPAQLPAEKEVGPPLPQEAVPLQKELPSLQHPNEQKEGTPAPFGDQSHPEPESWNAAQHCQQDRSQGGWGHRLDGFPPGRPSPDNLNQICLPNRQHVVYGPWNLPQSSYSHLTRQGETLNFLEIGYSRCCHCRSHTNRLECAKLVWEEAMSRFCEAEFSVKTRPHWCCTRQGEARFSCFQEEAPQPHYQLRACPSHQPDISSGLELPFPPGVPTLDNIKNICHLRRFRSVPRNLPATDPLQRELLALIQLEREFQRCCRQGNNHTCTWKAWEDTLDKYCDREYAVKTHHHLCCRHPPSPTRDECFARRAPYPNYDRDILTIDISRVTPNLMGHLCGNQRVLTKHKHIPGLIHNMTARCCDLPFPEQACCAEEEKLTFINDLCGPRRNIWRDPALCCYLSPGDEQVNCFNINYLRNVALVSGDTENAKGQGEQGSTGGTNISSTSEPKEE

SEQ ID NO: 807332 - protein, 300 aa, Homo sapiens [sequence omitted]

SEQ ID NO: 807333 - protein, 365 aa, Homo sapiens
MGTTARAALVLTYLAVASAASEGGFTATGQRQLRPEHFQEVGYAAPPSPPLSRSLPMDHPDSSQHGPPFEGQSQVQPPPSQEATPLQQEKLLPAQLPAEKEVGPPLPQEAVPLQKELPSLQHPNEQKEGTPAPFGDQSHPEPESWNAAQHCQQDRSQGGWGHRLDGFPPGRPSPDNLNQICLPNRQHVVYGPWNLPQSSYSHLTRQGETLNFLEIGYSRCCHCRSHTNRLECAKLVWEEAMSRFCEAEFSVKTRPHWCCTRQGEARFSCFQEEAPQPHYQLRACPSHQPDISSGLELPFPPGVPTLDNIKNICHLRRFRSVPRNLPATDPLQRELLALIQLEREFQRCCRQGNNHTCTWKAWEIP

SEQ ID NO: 807334 - protein, 190 aa, Homo sapiens
QDSVDTQIMEGWEDTLDKYCDREYAVKTHHHLCCRHPPSPTRDECFARRAPYPNYDRDILTIDISRVTPNLMGHLCGNQRVLTKHKHIPGLIHNMTARCCDLPFPEQACCAEEEKLTFINDLCGPRRNIWRDPALCCYLSPGDEQVNCFNINYLRNVALVSGDTENAKGQGEQGSTGGTNISSTSEPKEE

SEQ ID NO: 807335 - protein, 209 aa, Homo sapiens
MGTTARAALVLTYLAVASAASEGGFTATGQRQLRPEHFQEVGYAAPPSPPLSRSLPMDHPDSSQHGPPFEGQSQVQPPPSQEATPLQQEKLLPAQLPAEKEVGPPLPQEAVPLQKELPSLQHPNEQKEGTPAPFGDQSHPEPESWNAAQHCQQDRSQGGWGHRLDGFPPGRPSPDNLGALAQEGTGVFRHTTDKHTLLSLLVFPSVPGP

SEQ ID NO: 807336 - protein, 266 aa, Homo sapiens
MPFNGEKQCVGEDQPSDSDSSRFSESMASLSDYECSRQSFASDSSSKSSSPASTSPPRVVTFDEVMATARNLSNLTLAHEIAVNENFQLKQEALPEKSLAGRVKHIVHQAFWDVLDSELNADPPEFEHAIKLFEEIREILLSFLTPGGNRLRNQICEVLDTDLIRQQAEHSAVDIQGLANYVISTMGKLCAPVRDNDIRELKATGNIVEVLRQIFHVLDLMQMDMANFTIMSLRPHLQRQLVEYERTKFQEILEETPRKAEVAGAS

SEQ ID NO: 807337 - protein, 314 aa, Homo sapiens
MPFNGEKQCVGEDQPSDSDSSRFSESMASLSDYECSRQSFASDSSSKSSSPASTSPPRVVTFDEVMATARNLSNLTLAHEIAVNENFQLKQEALPEKSLAGRVKHIVHQAFWDVLDSELNADPPEFEHAIKLFEEIREILLSFLTPGGNRLRNQICEVLDTDLIRQQAEHSAVDIQGLANYVISTMGKLCAPVRDNDIRELKATGNIVEVLRQIFHVLDLMQMDMANFTIMSLRPHLQRQLVEYERTKFQEILEETPSALDQTTEWIKESVNEELFSLSESALTPGAENTSKPSLSPTLVLNNSYLKLLQWDYQ

SEQ ID NO: 807338 - protein, 266 aa, Homo sapiens; identical to SEQ ID NO: 807336

SEQ ID NO: 807339 - protein, 147 aa, Homo sapiens
MPFNGEKQCVGEDQPSDSDSSRFSESMASLSDYECSRQSFASDSSSKSSSPASTSPPRVVTFDEVMATARNLSNLTLAHEIAVNENFQLKQEALPEKSLAGRVKHIVHQAFWDVLDSELNADPPEFEHAIKLFEEIREASCFVVCVS

SEQ ID NO: 807340 - protein, 274 aa, Homo sapiens
MPFNGEKQCVGEDQPSDSDSSRFSESMASLSDYECSRQSFASDSSSKSSSPASTSPPRVVTFDEVMATARNLSNLTLAHEIAVNENFQLKQEALPEKSLAGRVKHIVHQAFWDVLDSELNADPPEFEHAIKLFEEIREILLSFLTPGGNRLRNQICEVLDTDLIRQQAEHSAVDIQGLANYVISTMGKLCAPVRDNDIRELKATGNIVEVLRQIFHVLDLMQMDMANFTIMSLRPHLQRQLVEYERTKFQEILEETPRTVLSTIRFFIHSRYIY

SEQ ID NO: 807341 - protein, 266 aa, Homo sapiens; identical to SEQ ID NO: 807336

SEQ ID NO: 807342 - protein, 408 aa, Homo sapiens
QEERHKFRISPFIPQTHTASLPTSASSRNTGVPDHIEFTMNSLSEANTKFMFDLFQQFRKSKENNIFYSPISITSALGMVLLGAKDNTAQQISKVLHFDQVTENTTEKAATYHVDRSGNVHHQFQKLLTEFNKSTDAYELKIANKLFGEKTYQFLQEYLDAIKKFYQTSVESTDFANAPEESRKKINSWVESQTNEKIKNLFPDGTIGNDTTLVLVNAIYFKGQWENKFKKENTKEEKFWPNKDVQAKVLEIPYKGKDLSMIVLLPNEIDGLQKLEEKLTAEKLMEWTSLQNMRETCVDLHLPRFKMEESYDLKDTLRTMGMVNIFNGDADLSGMTWSHGLSVSKVLHKAFVEVTEEGVEAAAATAVVVVELSSPSTNEEFCCNHPFLFFIRQNKTNSILFYGRFSSP

SEQ ID NO: 807343 - protein, 386 aa, Homo sapiens
QEERHKFRISPFIPQTHTASLPTSASSRNTGVPDHIEFTMNSLSEANTKFMFDLFQQFRKSKENNIFYSPISITSALGMVLLGAKDNTAQQISKVLHFDQVTENTTEKAATYHEYLDAIKKFYQTSVESTDFANAPEESRKKINSWVESQTNEKIKNLFPDGTIGNDTTLVLVNAIYFKGQWENKFKKENTKEEKFWPNKNTYKSVQMMRQYNSFNFALLEDVQAKVLEIPYKGKDLSMIVLLPNEIDGLQKLEEKLTAEKLMEWTSLQNMRETCVDLHLPRFKMEESYDLKDTLRTMGMVNIFNGDADLSGMTWSHGLSVSKVLHKAFVEVTEEGVEAAAATAVVVVELSSPSTNEEFCCNHPFLFFIRQNKTNSILFYGRFSSP

SEQ ID NO: 807344 - protein, 69 aa, Homo sapiens
MDEFSSGDMSHVYAYLEICLLWVLLQLLCPSHINTQAFLMTNQMTLGNQVCSPASNFNMMRSYITFTPL

SEQ ID NO: 807345 - protein, 150 aa, Homo sapiens
MSAKDERAREILRGFKLNWMNLRDAETGKILWQGTEDLSVPGVEHEARVPKKILKCKAVSRELNFSSTEQMEKFRLEQKVYFKGQCLEEWFFEFGFVIPNSTNTWQSLIEAAPESQMMPASVLTGNVIIETKFFDDDLLVSTSRVRLFYV

SEQ ID NO: 807346 - protein, 150 aa, Homo sapiens; identical to SEQ ID NO: 807345

SEQ ID NO: 807347 - protein, 73 aa, Homo sapiens
RGKEKGSEAGAEGRERPVLVWPLRLLARGLQAGLRLHPRLLGTVCEAPPTRVRKPRAATAASCQPRTSGPGRS

SEQ ID NO: 807348 - protein, 111 aa, Homo sapiens
MSAKDERAREILRGFKLNWMNLRDAETGKILWQGTEDLSVPGVEHEARVPKKILKCKAVSRELNFSSTEQMEKFRLEQKVYFKGQCLEGILLPTCLKSGLRATRTKGNNTQ

SEQ ID NO: 807349 - protein, 150 aa, Homo sapiens; identical to SEQ ID NO: 807345

SEQ ID NO: 807350 - protein, 131 aa, Homo sapiens
MNLRDAETGKILWQGTEDLSVPGVEHEARVPKKILKCKAVSRELNFSSTEQMEKFRLEQKVYFKGQCLEEWFFEFGFVIPNSTNTWQSLIEAAPESQMMPASVLTGNVIIETKFFDDDLLVSTSRVRLFYV

SEQ ID NO: 807351 - protein, 73 aa, Homo sapiens; identical to SEQ ID NO: 807347

SEQ ID NO: 807352 - protein, 1196 aa, Homo sapiens [sequence omitted]

SEQ ID NO: 807353 - protein, 1080 aa, Homo sapiens
MCLKCKFLGPTPEQLIRKHRNSPSCVLTNTSGHSDAQEGKFFGFKFPGLRVLTYRKQSLPQEDPDVVVIDSSKHSDDSVAMKHFKSPTKESCSPSEADDTKALIQPSKCSPLVNISGPLDHSSPKRQWDRLYPDMLQSSSQLSHSRSRESLCSIRRASSVHDIEGFGVHPKNIFRDRHASEDNGRNVKGPFNHIKSSLLGSTSDSNLNKYSTINKIPQLTLNFSEVKTEKKNSSPPSSDKTIIAPKVKDRTHNVTEKVTQVLSLGADVLPEYKLQTPRINKFTILHYSPFKAVWDWLILLLVIYTAIFTPYSAAFLLNDREEQKRRECGYSCSPLNVVDLIVDIMFIIDILINFRTTYVNQNEEVVSDPAKIAIHYFKGWFLIDMVAAIPFDLLIFGSGSDETTTLIGLLKTARLLRLVRVARKLDRYSEYGAAVLMLSMCIFALNAHWLACIWYAIGNVERPYLTDKIGWLDSLGQQIGKRYNDSDSSSGPSIKDKYVTALYFTFSSLTSVGFGNVSPNTNSEKIFSICVMLIGSLMYASIFGNVSAIIQRLYSGTARYHMQMLRVKEFIRFHQIPNPLRQRLEEYFQHAWTYTNGIDMNMVLKGFPECLQADICLHLNQTLLQNCKAFRGASKGCLRALAMKFKTTHALQGDTLVHCGDVLTALYFLSRGSIEISKNDMVVAILGKNDIFGEMVHLYAKPGKSNADVRALTYCDLHKIQREDLLEVLDMYPEFSDHFLTNLELTFNLRHESAKADLLRSQSMNDSEGDNCKLRRRKLSFESEGEKENSTNDPEDSADTIRHYQSSKRHFEEKKSRSSSFISSIDDEQKPLFSGIVDSSPGIGKASGLDFEETVPTSGRMHIDKRSHSCKDITDMRSWERENAHPQPEDSSPSALQRAAWGISETESDLTYGEVEQRLDLLQEQLNRLESQMTTDIQTILQLLQKQTTVVPPAYSMVTAGSEYQRPIIQLMRTSQPEASIKTDRSFSPSSQCPEFLDLEKSKLKSKESLSSGVHLNTASEDNLTSLLKQDSDLSLELHLRQRKTYVHPIRHPSLPDSSLSTVGIVGLHRHVSDPGLPGK

SEQ ID NO: 807354 - protein, 270 aa, Homo sapiens
MCLKCKFLGPTPEQLIRKHRNSPSCVLTNTSGHSDAQEGKFFGFKFPGLRVLTYRKQSLPQEDPDVVVIDSSKHSDDSVAMKHFKSPTKESCSPSEADDTKALIQPSKCSPLVNISGPLDHSSPKRQWDRLYPDMLQSSSQLSHSRSRESLCSIRRASSVHDIEGFGVHPKNIFRDRHASEDNGRNVKGPFNHIKSSLLGSTSDSNLNKYSTINKIPQLTLNFSEVKTEKKNSSPPSSDKTIIAPKVKDRTHNVTEKVTQDLFIPTSRGP

SEQ ID NO: 807355 - protein, 68 aa, Homo sapiens
GTARYHMQMLRVKEFIRFHQIPNPLRQRLEEYFQHAWTYTNGIDMNMVCMSVFQNESAAGIIVIAKME

SEQ ID NO: 807356 - protein, 846 aa, Homo sapiens
MLFTVSCSKMSSIVDRDDSSIFDGLVEEDDKDKAKRVSRNKSEKKRRDQFNVLIKELGSMLPGNARKMDKSTVLQKSIDFLRKHKEITAQSDASEIRQDWKPTFLSNEEFTQLMLEALDGFFLAIMTDGSIIYVSESVTSLLEHLPSDLVDQSIFNFIPEGEHSEVYKILSTHLLESDSLTPEYLKSKNQLEFCCHMLRGTIDPKEPSTYEYVKFIGNFKSLNSVSSSAHNGFEGTIQRTHRPSYEDRVCFVATVRLATPQFIKEMCTVEEPNEEFTSRHSLEWKFLFLDHRAPPIIGYLPFEVLGTSGYDYYHVDDLENLAKCHEHLMQYGKGKSCYYRFLTKGQQWIWLQTHYYITYHQWNSRPEFIVCTHTVVSYAEVRAERRRELGIEESLPETAADKSQDSGSDNRINTVSLKEALERFDHSPTPSASSRSSRKSSHTAVSDPSSTPTKIPTDTSTPPRQHLPAHEKMVQRRSSFSSQSINSQSVGSSLTQPVMSQATNLPIPQGMSQFQFSAQLGAMQHLKDQLEQRTRMIEANIHRQQEELRKIQEQLQMVHGQGLQMFLQQSNPGLNFGSVQLSSGNSSNIQQLAPINMQGQVVPTNQIQSGMNTGHIGTTQHMIQQQTLQSTSTQSQQNVLSGHSQQTSLPSQTQSTLTAPLYNTMVISQPAAGSMVQIPSSMPQNSTQSAAVTTFTQDRQIRFSQGQQLVTKLVTAPVACGAVMVPSTMLMGQVVTAYPTFATQQQQSQTLSVTQQQQQQSSQEQQLTSVQQPSQAQLTQPPQQFLQTSRLLHGNPSTQLILSAAFPLQQSTFPQSHHQQHQSQQQQQLSRHRTDSLPDPSKVQPQ

SEQ ID NO: 807357 - protein, 846 aa, Homo sapiens; identical to SEQ ID NO: 807356

SEQ ID NO: 807358 - protein, 846 aa, Homo sapiens; identical to SEQ ID NO: 807356

SEQ ID NO: 807359 - protein, 818 aa, Homo sapiens
MHIFHFIRVSRNKSEKKRRDQFNVLIKELGSMLPGNARKMDKSTVLQKSIDFLRKHKEITAQSDASEIRQDWKPTFLSNEEFTQLMLEALDGFFLAIMTDGSIIYVSESVTSLLEHLPSDLVDQSIFNFIPEGEHSEVYKILSTHLLESDSLTPEYLKSKNQLEFCCHMLRGTIDPKEPSTYEYVKFIGNFKSLNSVSSSAHNGFEGTIQRTHRPSYEDRVCFVATVRLATPQFIKEMCTVEEPNEEFTSRHSLEWKFLFLDHRAPPIIGYLPFEVLGTSGYDYYHVDDLENLAKCHEHLMQYGKGKSCYYRFLTKGQQWIWLQTHYYITYHQWNSRPEFIVCTHTVVSYAEVRAERRRELGIEESLPETAADKSQDSGSDNRINTVSLKEALERFDHSPTPSASSRSSRKSSHTAVSDPSSTPTKIPTDTSTPPRQHLPAHEKMVQRRSSFSSQSINSQSVGSSLTQPVMSQATNLPIPQGMSQFQFSAQLGAMQHLKDQLEQRTRMIEANIHRQQEELRKIQEQLQMVHGQGLQMFLQQSNPGLNFGSVQLSSGNSSNIQQLAPINMQGQVVPTNQIQSGMNTGHIGTTQHMIQQQTLQSTSTQSQQNVLSGHSQQTSLPSQTQSTLTAPLYNTMVISQPAAGSMVQIPSSMPQNSTQSAAVTTFTQDRQIRFSQGQQLVTKLVTAPVACGAVMVPSTMLMGQVVTAYPTFATQQQQSQTLSVTQQQQQQSSQEQQLTSVQQPSQAQLTQPPQQFLQTSRLLHGNPSTQLILSAAFPLQQSTFPQSHHQQHQSQQQQQLSRHRTDSLPDPSKVQPQ

SEQ ID NO: 807360 - protein, 337 aa, Homo sapiens
MVLQFQFSAQLGAMQHLKDQLEQRTRMIEANIHRQQEELRKIQEQLQMVHGQGLQMFLQQSNPGLNFGSVQLSSGNSSNIQQLAPINMQGQVVPTNQIQSGMNTGHIGTTQHMIQQQTLQSTSTQSQQNVLSGHSQQTSLPSQTQSTLTAPLYNTMVISQPAAGSMVQIPSSMPQNSTQSAAVTTFTQDRQIRFSQGQQLVTKLVTAPVACGAVMVPSTMLMGQVVTAYPTFATQQQQSQTLSVTQQQQQQSSQEQQLTSVQQPSQAQLTQPPQQFLQTSRLLHGNPSTQLILSAAFPLQQSTFPQSHHQQHQSQQQQQLSRHRTDSLPDPSKVQPQ

SEQ ID NO: 807361 - protein, 374 aa, Homo sapiens [sequence omitted]

SEQ ID NO: 807362 - protein, 406 aa, Homo sapiens
MLFTVSCSKMSSIVDRDDSSIFDGLVEEDDKDKAKRVSRNKSEKKRRDQFNVLIKELGSMLPGNARKMDKSTVLQKSIDFLRKHKEITAQSDASEIRQDWKPTFLSNEEFTQLMLEALDGFFLAIMTDGSIIYVSESVTSLLEHLPSDLVDQSIFNFIPEGEHSEVYKILSTHLLESDSLTPEYLKSKNQLEFCCHMLRGTIDPKEPSTYEYVKFIGNFKSLNSVSSSAHNGFEGTIQRTHRPSYEDRVCFVATVRLATPQFIKEMCTVEEPNEEFTSRHSLEWKFLFLDHRAPPIIGYLPFEVLGTSGYDYYHVDDLENLAKCHEHLMQYGKGKSCYYRFLTKGQQWIWLQTHYYITYHQWNSRPEFIVCTHTVVSYAEVRAERRRELGIEESLPETAADKVCFL

SEQ ID NO: 807363 - protein, 530 aa, Homo sapiens
MLFTVSCSKMSSIVDRDDSSIFDGLVEEDDKDKAKRVSRNKSEKKRRDQFNVLIKELGSMLPGNARKMDKSTVLQKSIDFLRKHKEITAQSDASEIRQDWKPTFLSNEEFTQLMLEALDGFFLAIMTDGSIIYVSESVTSLLEHLPSDLVDQSIFNFIPEGEHSEVYKILSTHLLESDSLTPEYLKSKNQLEFCCHMLRGTIDPKEPSTYEYVKFIGNFKSLNSVSSSAHNGFEGTIQRTHRPSYEDRVCFVATVRLATPQFIKEMCTVEEPNEEFTSRHSLEWKFLFLDHRAPPIIGYLPFEVLGTSGYDYYHVDDLENLAKCHEHLMQYGKGKSCYYRFLTKGQQWIWLQTHYYITYHQWNSRPEFIVCTHTVVSYAEVRAERRRELGIEESLPETAADKSQDSGSDNRINTVSLKEALERFDHSPTPSASSRSSRKSSHTAVSDPSSTPTKIPTDTSTPPRQHLPAHEKMVQRRSSFSSQSINSQSVGSSLTQPVMSQATNLPIPQGMSQALQMPTVQIYELKNHYI

SEQ ID NO: 807364 - protein, 187 aa, Homo sapiens
MYLQVETRTSSRLHLKRAPGIRSWSLLVGILSIGLAAAYYSGDSLGWKLFYVTGCLFVAVQNLEDWEEAIFDKSTGKVVLKTFSLYKKLLTLFRAGHDQVVVLLHDVRDVSVEEEKVRYFGKGYMVVLRLATGFSHPLTQSAVMGHRSDVEAIAKLITSFLELHCLESPTELSQSSDSEAGDPASQS

SEQ ID NO: 807365 - protein, 231 aa, Homo sapiens
RLGSAPIPEVRAAPPPPVRVSLLRRGDRCALDPSSCREWCCPLGMYLQVETRTSSRLHLKRAPGIRSWSLLVGILSIGLAAAYYSGDSLGWKLFYVTGCLFVAVQNLEDWEEAIFDKSTGKVVLKTFSLYKKLLTLFRAGHDQVVVLLHDVRDVSVEEEKVRYFGKGYMVVLRLATGFSHPLTQSAVMGHRSDVEAIAKLITSFLELHCLESPTELSQSSDSEAGDPASQS

SEQ ID NO: 807366 - protein, 227 aa, Homo sapiens
LVVSPRDLWLSVARASALLRRGDRCALDPSSCREWCCPLGMYLQVETRTSSRLHLKRAPGIRSWSLLVGILSIGLAAAYYSGDSLGWKLFYVTGCLFVAVQNLEDWEEAIFDKSTGKVVLKTFSLYKKLLTLFRAGHDQVVVLLHDVRDVSVEEEKVRYFGKGYMVVLRLATGFSHPLTQSAVMGHRSDVEAIAKLITSFLELHCLESPTELSQSSDSEAGDPASQS

SEQ ID NO: 807367 - protein, 231 aa, Homo sapiens; identical to SEQ ID NO: 807365

SEQ ID NO: 807368 - protein, 215 aa, Homo sapiens
CRLYAPELWDDRCALDPSSCREWCCPLGMYLQVETRTSSRLHLKRAPGIRSWSLLVGILSIGLAAAYYSGDSLGWKLFYVTGCLFVAVQNLEDWEEAIFDKSTGKVVLKTFSLYKKLLTLFRAGHDQVVVLLHDVRDVSVEEEKVRYFGKGYMVVLRLATGFSHPLTQSAVMGHRSDVEAIAKLITSFLELHCLESPTELSQSSDSEAGDPASQS

SEQ ID NO: 807369 - protein, 187 aa, Homo sapiens; identical to SEQ ID NO: 807364

SEQ ID NO: 807370 - protein, 231 aa, Homo sapiens; identical to SEQ ID NO: 807365

SEQ ID NO: 807371 - protein, 174 aa, Homo sapiens
MYLQVETRTSSRLHLKRAPGIRSWSLLVGDSLGWKLFYVTGCLFVAVQNLEDWEEAIFDKSTGKVVLKTFSLYKKLLTLFRAGHDQVVVLLHDVRDVSVEEEKVRYFGKGYMVVLRLATGFSHPLTQSAVMGHRSDVEAIAKLITSFLELHCLESPTELSQSSDSEAGDPASQS

SEQ ID NO: 807372 - protein, 223 aa, Homo sapiens
MWKPSPSSSPASWSCTALRAPQSCLRAATVRPVTLQARADSPTVPEPVHRPQDPWHIPGVPEPVHRPQDPWHIPGVPEPVHRPQDPWHIPGVPEPVHRPQDPWHIPGVPEPVHRPQDPWPWLQLVPPAELAYCLLMLLLAHCMKQQARPGHPDFLHREAWACLSAAGGLASPGLLLWATARPRASGEAGPGRALVGADAACCPRHSVLSLVDIPSGQVLPQGQ

SEQ ID NO: 807373 - protein, 221 aa, Homo sapiens
MWKPSPSSSPASWSCTALRAPQSCLRAATVRPVTLQARADSPTVPEPVHRPQDPWHIPGVPEPVHRPQDPWHIPGVPEPVHRPQDPWHIPGVPEPVHRPQDRGTFRCAEPVTATDPWPWLQLVPPAELAYCLLMLLLAHCMKQQARPGHPDFLHREAWACLSAAGGLASPGLLLWATARPRASGEAGPGRALVGADAACCPRHSVLSLVDIPSGQVLPQGQ

SEQ ID NO: 807374 - protein, 231 aa, Homo sapiens; identical to SEQ ID NO: 807365

SEQ ID NO: 807375 - protein, 172 aa, Homo sapiens
MYLQVETRTSSRLHLKRAPGIRSWSLLVGILSIGLAAAYYSGDSLGWKLFYVTGCLFVAVQNLEDWEEAIFDKSTGKVVLKTFSLYKKLLTLFRAGHDQVVVLLHDVRDVSVEEEKVRYFGKGYMVVLRLATGFSHPLTQSAVMGHRRGLGFSWCLQPSWPIACSCCCLHTA

SEQ ID NO: 807376 - protein, 130 aa, Homo sapiens
MYLQVETRTSSRLHLKRAPGIRSWSLLVGILSIGLAAAYYSGDSLGWKLFYVTGCLFVAVQNLEDWEEAIFDKSTGKVVLKTFSLYKKLLTLFRAGHDQVVVLLHVVPDTASSPWWTSPAVRCFPKGSEG

SEQ ID NO: 807377 - protein, 119 aa, Homo sapiens
MYLQVETRTSSRLHLKRAPGIRSWSLLVGDSLGWKLFYVTGCLFVAVQNLEDWEETILTRQCSWSPECTQVLPGAVCTERAWPDALACELGTPGPCEPLGGRPRNGWVGQGTPLPHVWL

SEQ ID NO: 807378 - protein, 105 aa, Homo sapiens
MYLQVETRTSSRLHLKRAPGIRSWSLLVGILSIGLAAAYYSGDSLGWKLFYVTGCLFVAVQNLEDWEDKAGSGAGQSPGLFSSWVFCNGNERRRKGPGWPSASPS

SEQ ID NO: 807379 - protein, 101 aa, Homo sapiens
MSWSSQAGALCPSPDSLGWKLFYVTGCLFVAVQNLEDWEDKAGSGAGQSPGLFSSWVFCNGNERRRKGPGCLAPPRPEALVPAWRSPFIRTWPLHSSGTVL

SEQ ID NO: 807380 - protein, 228 aa, Homo sapiens
MLASKKAGLNWPRAGSRSLLRRGDRCALDPSSCREWCCPLGMYLQVETRTSSRLHLKRAPGIRSWSLLVGILSIGLAAAYYSGDSLGWKLFYVTGCLFVAVQNLEDWEEAIFDKSTGKVVLKTFSLYKKLLTLFRAGHDQVVVLLHDVRDVSVEEEKVRYFGKGYMVVLRLATGFSHPLTQSAVMGHRSDVEAIAKLITSFLELHCLESPTELSQSSDSEAGDPASQS

SEQ ID NO: 807381 - protein, 187 aa, Homo sapiens; identical to SEQ ID NO: 807364

SEQ ID NO: 807382 - protein, 187 aa, Homo sapiens; identical to SEQ ID NO: 807364

SEQ ID NO: 807383 - protein, 187 aa, Homo sapiens; identical to SEQ ID NO: 807364

SEQ ID NO: 807384 - protein, 223 aa, Homo sapiens; identical to SEQ ID NO: 807372

SEQ ID NO: 807385 - protein, 223 aa, Homo sapiens; identical to SEQ ID NO: 807372

SEQ ID NO: 807386 - protein, 221 aa, Homo sapiens; identical to SEQ ID NO: 807373

SEQ ID NO: 807387 - protein, 199 aa, Homo sapiens
MYLQVETRTSSRLHLKRAPGIRSWSLLVGILSIGLAAAYYSGDSLGWKLFYVTGCLFVAVQNLEDWEEAIFDKSTGKVVLKTFSLYKKLLTLFRAGHDQVVVLLHDVRDVSVEEEKVRYFGKGYMVVLRLATGFSHPLTQSAVMGHRLSPTQRPLPGGHPQRSGASPRAVRGEHPGPTWLCTLQPHCGSCPSPRTRLPC

SEQ ID NO: 807388 - protein, 223 aa, Homo sapiens; identical to SEQ ID NO: 807372

SEQ ID NO: 807389 - protein, 58 aa, Homo sapiens
MYLQVETRTSSRLHLKRAPGIRSWSLLVGGKALHVPPQNPRTGSLTFKKDENETKYFL

SEQ ID NO: 807390 - protein, 131 aa, Homo sapiens
GKHRPQLPGTPVIAAARSRPGNCPFSGVMMGSKMASASRVVQVVKPHTPLIRFPDRRDNPKPNVSEALRSAGLPSHSSVISQHSKGSKSPDLLMYQGPPDTAEIIKTLPQKYRRKLVSQEEMEFIQRGGPE

SEQ ID NO: 807391 - protein, 131 aa, Homo sapiens; identical to SEQ ID NO: 807390

SEQ ID NO: 807392 - protein, 131 aa, Homo sapiens; identical to SEQ ID NO: 807390

SEQ ID NO: 807393 - protein, 131 aa, Homo sapiens; identical to SEQ ID NO: 807390

SEQ ID NO: 807394 - protein, 115 aa, Homo sapiens
MVNDLVLWISSPNSKRRPGGESDAVREAISRMEFVRVIDYGSSQAGCPSELEYQDLRPVCEDGTLSLLDRAVRWVRRRGFEPCGNRAASWQVGPVPTAGIPRSSARTLLVLGVCG

SEQ ID NO: 807395 - protein, 131 aa, Homo sapiens; identical to SEQ ID NO: 807390

SEQ ID NO: 807396 - protein, 260 aa, Homo sapiens
GKHRPQLPGTPVIAAARSRPGNCPFSGVMMGSKMASASRVVQVVKPHTPLIRFPDRRDNPKPNVSEALRSAGLPSHSSVISQHSKGSKSPDLLMYQGPPDTAEIIKTLPQKYRRKLVSQEEMEFIQRCVCRGGPENHGGWPVGFGGVFHKFFSQKGGGKTPKNNETVFSFHDDGGGHNTTHQSQPSFFFSPRGGAGGRSHTSSSPPPRRIVLYKPINYLTPCRQRKQHNNAPPLTYTNDNAPNQHPPPFAFILHNDNQPP

SEQ ID NO: 807397 - protein, 131 aa, Homo sapiens; identical to SEQ ID NO: 807390

SEQ ID NO: 807398 - protein, 160 aa, Homo sapiens
  misc_feature (11)..(11): Xaa can be any naturally occurring amino acid
RRCVLGTITRXAVYVRIPENCKPLCSWASEVMPMASPQTLVLYLLVLAVTEAWGQEAVIPGCHLHPFNVTVRSDRQGTCQGSHVAQACVGHCESSAFPSRYSVLVASGYRHNITSVSQCCTISGLKKVKVQLQCVGSRREELEIFTARACQCDMCRLSRY

SEQ ID NO: 807399 - protein, 421 aa, Homo sapiens
MSALRRSGYGPSDGPSYGRYYGPGGGDVPVHPPPPLYPLRPEPPQPPISWRVRGGGPAETTWLGEGGGGDGYYPSGGAWPEPGRAGGSHQSLNSYTNGAYGPTYPPGPGANTASYSGAYYAPGYTQTSYSTEVPSTYRSSGNSPTPVSRWIYPQQDCQTEAPPLRGQVPGYPPSQNPGMTLPHYPYGDGNRSVPQSGPTVRPQEDAWASPGAYGMGGRYPWPSSAPSAPPGNLYMTESTSPWPSSGSPQSPPSPPVQQPKDSSYPYSQSDQSMNRHNFPCSVHQYESSGTVNNDDSDLLDSQVQYSAEPQLYGNATSDHPNNQDQSSSLPEECVPSDESTPPSIKKIIHVLEKVQYLEQEVEEFVGKKTDKAYWLLEEMLTKELLELDSVETGGQDSVRQARKEAVCKIQAILEKLEKKGL

SEQ ID NO: 807400 - protein, 457 aa, Homo sapiens
MSALRRSGYGPSDGPSYGRYYGPGGGDVPVHPPPPLYPLRPEPPQPPISWRVRGGGPAETTWLGEGGGGDGYYPSGGAWPEPGRAGGSHQEQPPYPSYNSNYWNSTARSRAPYPSTYPVRPELQGQSLNSYTNGAYGPTYPPGPGANTASYSGAYYAPGYTQTSYSTEVPSTYRSSGNSPTPVSRWIYPQQDCQTEAPPLRGQVPGYPPSQNPGMTLPHYPYGDGNRSVPQSGPTVRPQEDAWASPGAYGMGGRYPWPSSAPSAPPGNLYMTESTSPWPSSGSPQSPPSPPVQQPKDSSYPYSQSDQSMNRHNFPCSVHQYESSGTVNNDDSDLLDSQVQYSAEPQLYGNATSDHPNNQDQSSSLPEECVPSDESTPPSIKKIIHVLEKVQYLEQEVEEFVGKKTDKAYWLLEEMLTKELLELDSVETGGQDSVRQARKEAVCKIQAILEKLEKKGL

SEQ ID NO: 807401 - protein, 218 aa, Homo sapiens
MTLDLRPCTERLRGSPQFLKQLGLHPNWQFVDVYGMDPELLSMVPRPVCAVLLLFPITEKYEVFRTEEEEKIKSQGQDVTSSVYFMKQTISNACGTIGLIHAIANNKDKMHFESGSTLKKFLEESVSMSPEERARYLENYDAIRVTHETSAHEGQTEAPSIDEKVDLHFIALVHVDGHLYELDGRKPFPINHGETSDETLLEVTVTLVGPSSSIFCHL

SEQ ID NO: 807402 - protein, 71 aa, Homo sapiens
RLRGISDRLGGKRGSCRDSLIFPAHGRKPFPINHGETSDETLLEDAIEVCKKFMERDPDELRFNAIALSAA

SEQ ID NO: 807403 - protein, 294 aa, Homo sapiens
MTLDLRPCTERLRGSPGPSNSFWCLGAPPPGGVLGGPRSRRAWAEAAAVAKAAAVRAGGPGTAAMEGQRWLPLEANPEVTNQFLKQLGLHPNWQFVDVYGMDPELLSMVPRPVCAVLLLFPITEKYEVFRTEEEEKIKSQGQDVTSSVYFMKQTISNACGTIGLIHAIANNKDKMHFESGSTLKKFLEESVSMSPEERARYLENYDAIRVTHETSAHEGQTEAPSIDEKVDLHFIALVHVDGHLYELDGRKPFPINHGETSDETLLEDAIEVCKKFMERDPDELRFNAIALSAA

SEQ ID NO: 807404 - protein, 261 aa, Homo sapiens
MTLDLRPCTERLRGSPGPSNSFWCLGAPPPGGVLGGPRSRRAWAEAAAVAKAAAVRAGGPGTAAMEGQRWLPLEANPEVTNQFLKQLGLHPNWQFVDVYGMDPELLSMVPRPVCAVLLLFPITEKYEVFRTEEEEKIKSQGQDVTSSVYFMKQTISNACGTIGLIHAIANNKDKMHFESGSTLKKFLEESVSMSPEERARYLENYDAIRVTHETSAHEGQTEAPSIDEKVDLHFIALVHVDGHLYELGCHRSLQEVYGARP

SEQ ID NO: 807405 - protein, 260 aa, Homo sapiens
MTLDLRPCTERLRGSPGPSNSFWCLGAPPPGGVLGGPRSRRAWAEAAAVAKAAAVRAGGPGTAAMEGQRWLPLEANPEVTNQFLKQLGLHPNWQFVDVYGMDPELLSMVPRPVCAVLLLFPITEKYEVFRTEEEEKIKSQGQDVTSSVYFMKQTISNACGTIGLIHAIANNKDKMHFESGSTLKKFLEESVSMSPEERARYLENYDAIRVTHETSAHEGQTESSSPSSSQPHSSHCRTKASSLCHHASLPWVKRNHVGPA

SEQ ID NO: 807406 - protein, 294 aa, Homo sapiens; identical to SEQ ID NO: 807403

SEQ ID NO: 807407 - protein, 229 aa, Homo sapiens
MTLDLRPCTERLRGSPQFLKQLGLHPNWQFVDVYGMDPELLSMVPRPVCAVLLLFPITEKYEVFRTEEEEKIKSQGQDVTSSVYFMKQTISNACGTIGLIHAIANNKDKMHFESGSTLKKFLEESVSMSPEERARYLENYDAIRVTHETSAHEGQTEAPSIDEKVDLHFIALVHVDGHLYELDGRKPFPINHGETSDETLLEDAIEVCKKFMERDPDELRFNAIALSAA

SEQ ID NO: 807408 - protein, 294 aa, Homo sapiens; identical to SEQ ID NO: 807403

SEQ ID NO: 807409 - protein, 283 aa, Homo sapiens
MTLDLRPCTERLRGSPGPSNSFWCLGAPPPGGVLGGPRSRRAWAEAAAVAKAAAVRAGGPGTAAMEGQRWLPLEANPEVTNQFLKQLGLHPNWQFVDVYGMDPELLSMVPRPVCAVLLLFPITEKYEVFRTEEEEKIKSQGQDVTSSVYFMKQTISNACGTIGLIHAIANNKDKMHFESGSTLKKFLEESVSMSPEERARYLENYDAIRVTHETSAHEGQTEAPSIDEKVDLHFIALVHVDGHLYELDGRKPFPINHGETSDETLLEVTVTLVGPSSSIFCHL

SEQ ID NO: 807410 - protein, 325 aa, Homo sapiens
MEGLEENGGVVQVGELLPCKICGRTFFPVALKKHGPICQKTATKKRKTFDSSRQRAEGTDIPTVKPLKPRPEPPKKPSNWRRKHEEFIATIRAAKGLDQALKEGGKLPPPPPPSYDPDYIQCPYCQRRFNENAADRHINFCKEQAARISNKGKFSTDTKGKPTSRTQVYKPPALKKSNSPGTASSGSSRLPQPSGAGKTVVGVPSGKVSSSSSSLGNKLQTLSPSHKGIAAPHAGANVKPRNSTPPSLARNPAPGVLTNKRKTYTESYIARPDGDCASSLNGGNIKGIEGHSPGNLPKFCHECGTKYPVEWAKFCCECGIRRMIL

SEQ ID NO: 807411 - protein, 325 aa, Homo sapiens; identical to SEQ ID NO: 807410

SEQ ID NO: 807412 - protein, 151 aa, Homo sapiens
MRAGRLERARNSWGPWTPVAGRRGLVRCGGPRCARRAFRRAGGIGYRTVPDAVELTLPGCPASDGLQLGFPARSQILPLARRLHVSSYHFLILLDFLSALLVIPVSGQILFSLYWTLSIIVHGLNTNRPLCAAAPGCVSSLELLTFLGRFP

SEQ ID NO: 807413 - protein, 295 aa, Homo sapiens
MAFMRCHYLDLSDMESKRSSDIIDYSLRRTSEHVKPLKPRPEPPKKPSNWRRKHEEFIATIRAAKGLDQALKEGGKLPPPPPPSYDPDYIQCPYCQRRFNENAADRHINFCKEQAARISNKGKFSTDTKGKPTSRTQVYKPPALKKSNSPGTASSGSSRLPQPSGAGKTVVGVPSGKVSSSSSSLGNKLQTLSPSHKGIAAPHAGANVKPRNSTPPSLARNPAPGVLTNKRKTYTESYIARPDGDCASSLNGGNIKGIEGHSPGNLPKFCHECGTKYPVEWAKFCCECGIRRMIL

SEQ ID NO: 807414 - protein, 112 aa, Homo sapiens
IRGRVDQVYKPPALKKSNSPGTASSGSSRLPQPSGAGKTVVGVPSGKVSSSSSSLGNKLQTLSPSHKGIAAPHAGANVKPRNSTPPSLARNPAPGVLTNKRKSRRGREFSSS

SEQ ID NO: 807415 - protein, 94 aa, Homo sapiens [sequence omitted]

SEQ ID NO: 807416 - protein, 387 aa, Homo sapiens
RSTKKLNGMGDDGSPPAKKMITDIHANGKTINKVPTVKKEHLDDYGEAPVETDGEHVKRTCTSVPETLHLNPSLKHTLAQFHLSSQSSLGGPAAFSARHSQESMSPTVFLPLPSPQVLPGPLLIPSDSSTELTQTVLEGESISCFQVGGEKRLCLPQVLNSVLREFTLQQINTVCDELYIYCSRCTSDQLHILKVLGILPFNAPSCGLITLTDAQRLCNALLRPRTFPQNGSVLPAKSSLAQLKETGSAFEVEHECLGKCQGLFAPQFYVQPDAPCIQCLECCGMFAPQTFVMHSHRSPDKRTCHWGFESAKWHCYLHVNQKYLGTPEEKKLKIILEEMKEKFSMRSGKRNQSKTDAPSGMELQSWYPVIKQEGDHVSQTHSFLHPS

SEQ ID NO: 807417 - protein, 135 aa, Homo sapiens
MELAAAGTELRFGANQVGLGALEEGEESMEHKSKEQRLRLWVQGVVHEVTKEPWELKPLSLEPRLYVSKFWRVPPLRTTSLQALAALPGFLLPLLAVLTHDTRSESKQKSWGTEGGAQLKEEPLTKAHLKAQEKV

SEQ ID NO: 807418 - protein, 92 aa, Homo sapiens
GGGRRRGRKAAGRRKAGTGRDHRSPSPTQQPPGRERKKEPGRRAKRGERSREEIFTFPPHAHFEALLEAAVLALVAVVLVDGTVPVGTACVS

SEQ ID NO: 807419 - protein, 112 aa, Homo sapiens
ALRAGLAAGRSTLVRSPARRRGPGRGICALRRRRKDRGRALAPAEGHHSLRRPEGQSTGHAPGAFKKEARPDRGWRTLPEPQAHGPVPRGQLAPPRVGTADLLVMVPREYRD

SEQ ID NO: 807420 - protein, 93 aa, Homo sapiens
RPRPTPPPHRTYPRHEHETTARALKRSRRREGDRAREGERGERRREWETSDSERQGTAGTLDAQSAGPAALGPWTVRRGHQKRDSAKSCLTSR

SEQ ID NO: 807421 - protein, 153 aa, Homo sapiens
MHSASGGPLYAADGEEATGGSRGSLPSSLCPNKRANALPSSGQLKGETNTIKIDQKKRKKRKPFYVQILNRTPHTVRGRESRAEAAGGEREIGRGKENAERDEGSGRPATASARAPQAHWMPSPPAQPPSDPGPCVVGTRNETRPNPASPAGR

SEQ ID NO: 807422 - protein, 153 aa, Homo sapiens; identical to SEQ ID NO: 807421

SEQ ID NO: 807423 - protein, 153 aa, Homo sapiens; identical to SEQ ID NO: 807421

SEQ ID NO: 807424 - protein, 153 aa, Homo sapiens; identical to SEQ ID NO: 807421

SEQ ID NO: 807425 - protein, 247 aa, Homo sapiens
NGDTILEDLPIQSGDMLIIEEDQTRPRSSPAFTKRGASSYVRETLPVLTRTVVPADNSCLFTSVYYVVEGGVLNPACAPEMRRLIAQIVASDPDFYSEAILGKTNQEYCDWIKRDDTWGGAIEISILSKFYQCEICVVDTQTVRIDRFGEDAGYTKRVLLIYDGIHYDPLQRNFPDPDTPPLTIFSSNDDIVLVQALELADEARRRRQFTDVNRFTLRCMVCQKGLTGQAEAREHAKETGHTNFGEV

SEQ ID NO: 807426 - protein, 213 aa, Homo sapiens
NGDTILEDLPIQSGDMLIIEEDQTRPRSSPAFTKRGASSYVRETLPVLTRTVVPADNSCLFTSVYYVVEGGVLNPACAPEMRRLIAQIVASDPDFYSEAILGKTNQEYCDWIKRDDTWGGAIEISILSKFYQCEICVVDTQTVRIDRFGEDAGYTKRVLLIYDGIHYDPLQRNFPDPDTPPLTIFSSLRFKRREDERWTDGSSLGINFLYAAT

SEQ ID NO: 807427 - protein, 260 aa, Homo sapiens
AGMKSHRGDGEGQGPGPPPSRSQQLLGVLSAGLLKVVFVVFASLCAWYSGYLLAELIPDAPLSSAAYSIRSIGERPVLKAPVPKRQKCDHWTPCPSDTYAYRLLSGGGRSKYAKICFEDNLLMGEQLGNVARGINIAIVNYVTGNVTATRCFDMYEGDNSGPMTKFIQSAAPKSLLFMVTYDDGSTRLNNDAKNAIEALGSKEIRNMKFRSSWVFIAAKGLELPSEIQREKINHSDAKNNRYSGWPAEIQIEGCIPKERS

SEQ ID NO: 807428 - protein, 252 aa, Homo sapiens
RHDRCPPLAFLTQGLRWLRSPGSCRQGQEGSGTWKMRPLAGGLLKVVFVVFASLCAWYSGYLLAELIPDAPLSSAAYSIRSIGERPVLKAPVPKRQKCDHWTPCPSDTYAYRLLSGGGRSKYARGINIAIVNYVTGNVTATRCFDMYEGDNSGPMTKFIQSAAPKSLLFMVTYDDGSTRLNNDAKNAIEALGSKEIRNMKFRSSWVFIAAKGLELPSEIQREKINHSDAKNNRYSGWPAEIQIEGCIPKERS

SEQ ID NO: 807429 - protein, 260 aa, Homo sapiens; identical to SEQ ID NO: 807427

SEQ ID NO: 807430 - protein, 270 aa, Homo sapiens
RHDRCPPLAFLTQGLRWLRSPGSCRQGQEGSGTWKMRPLAGGLLKVVFVVFASLCAWYSGYLLAELIPDAPLSSAAYSIRSIGERPVLKAPVPKRQKCDHWTPCPSDTYAYRLLSGGGRSKYAKICFEDNLLMGEQLGNVARGINIAIVNYVTGNVTATRCFDMYEGDNSGPMTKFIQSAAPKSLLFMVTYDDGSTRLNNDAKNAIEALGSKEIRNMKFRSSWVFIAAKGLELPSEIQREKINHSDAKNNRYSGWPAEIQIEGCIPKERS

SEQ ID NO: 807431 - protein, 222 aa, Homo sapiens
RHDRCPPLAFLTQGLRWLRSPGSCRQGQEGSGTWKMRPLAGAPVPKRQKCDHWTPCPSDTYAYRLLSGGGRSKYAKICFEDNLLMGEQLGNVARGINIAIVNYVTGNVTATRCFDMYEGDNSGPMTKFIQSAAPKSLLFMVTYDDGSTRLNNDAKNAIEALGSKEIRNMKFRSSWVFIAAKGLELPSEIQREKINHSDAKNNRYSGWPAEIQIEGCIPKERS

SEQ ID NO: 807432 - protein, 107 aa, Homo sapiens
MSRSDNSGPMTKFIQSAAPKSLLFMVTYDDGSTRLNNDAKNAIEALGSKEIRNMKFRSSWVFIAAKGLELPSEIQREKINHSDAKNNRYSGWPAEIQIEGCIPKERS

SEQ ID NO: 807433 - protein, 431 aa, Homo sapiens
MRALLARLLLCVLVVSDSKGSNELHQVPSNCDCLNGGTCVSNKYFSNIHWCNCPKKFGGQHCEIDKSKTCYEGNGHFYRGKASTDTMGRPCLPWNSATVLQQTYHAHRSDALQLGLGKHNYCRNPDNRRRPWCYVQVGLKPLVQECMVHDCADGKKPSSPPEELKFQCGQKTLRPRFKIIGGEFTTIENQPWFAAIYRRHRGGSVTYVCGGSLISPCWVISATHCFIDYPKKEDYIVYLGRSRLNSNTQGEMKFEVENLILHKDYSADTLAHHNDIALLKIRSKEGRCAQPSRTIQTICLPSMYNDPQFGTSCEITGFGKENSTDYLYPEQLKMTVVKLISHRECQQPHYYGSEVTTKMLCAADPQWKTDSCQGDSGGPLVCSLQGRMTLTGIVSWGRGCALKDKPGVYTRVSHFLPWIRSHTKEENGLAL

SEQ ID NO: 807434 - protein, 431 aa, Homo sapiens; identical to SEQ ID NO: 807433

SEQ ID NO: 807435 - protein, 68 aa, Homo sapiens
PLSFSKRTMPTDLMLFSWAWGNIITAGEVGATRTKSPPYSFPETLLPSPSPRGLAIAQEKCGLWLSLP

SEQ ID NO: 807436 - protein, 93 aa, Homo sapiens
DRPSGQIGLMQTPPCFLHLADYLYPEQLKMTVVKLISHRECQQPHYYGSEVTTKMLCAADPQWKTDSCQVSVPSISLHLFHISPELLGLFQPA

SEQ ID NO: 807437 - protein, 431 aa, Homo sapiens; identical to SEQ ID NO: 807433

SEQ ID NO: 807438 - protein, 470 aa, Homo sapiens
YRAGAAGRSTVRRPQPRSPGQGPPVPAAPARALLPQPPSRRLAPRPRHHESPAGAPASLRPGRERLQTNCDCLNGGTCVSNKYFSNIHWCNCPKKFGGQHCEIDKSKTCYEGNGHFYRGKASTDTMGRPCLPWNSATVLQQTYHAHRSDALQLGLGKHNYCRNPDNRRRPWCYVQVGLKPLVQECMVHDCADGKKPSSPPEELKFQCGQKTLRPRFKIIGGEFTTIENQPWFAAIYRRHRGGSVTYVCGGSLISPCWVISATHCFIDYPKKEDYIVYLGRSRLNSNTQGEMKFEVENLILHKDYSADTLAHHNDIALLKIRSKEGRCAQPSRTIQTICLPSMYNDPQFGTSCEITGFGKENSTDYLYPEQLKMTVVKLISHRECQQPHYYGSEVTTKMLCAADPQWKTDSCQGDSGGPLVCSLQGRMTLTGIVSWGRGCALKDKPGVYTRVSHFLPWIRSHTKEENGLAL

SEQ ID NO: 807439 - protein, 307 aa, Homo sapiens
MLGTRQTLNYVQVGLKPLVQECMVHDCADGKKPSSPPEELKFQCGQKTLRPRFKIIGGEFTTIENQPWFAAIYRRHRGGSVTYVCGGSLISPCWVISATHCFIDYPKKEDYIVYLGRSRLNSNTQGEMKFEVENLILHKDYSADTLAHHNDIALLKIRSKEGRCAQPSRTIQTICLPSMYNDPQFGTSCEITGFGKENSTDYLYPEQLKMTVVKLISHRECQQPHYYGSEVTTKMLCAADPQWKTDSCQGDSGGPLVCSLQGRMTLTGIVSWGRGCALKDKPGVYTRVSHFLPWIRSHTKEENGLAL

SEQ ID NO: 807440 - protein, 139 aa, Homo sapiens
MTWKGGGGWMAAVTQGPGITWGSLLPSAVRQGEQKCKNTDVSIFLNWGVEGCLLTASKELTVEGPQCIPPLPESLSPLGPPGSQSSEETDPSCFNSCCCFSLWAGPGRGRAEQAPGGLQSQLDLAVSPAGSPADTGEVG

SEQ ID NO: 807441 - protein, 139 aa, Homo sapiens; identical to SEQ ID NO: 807440

SEQ ID NO: 807442 - protein, 139 aa, Homo sapiens; identical to SEQ ID NO: 807440

SEQ ID NO: 807443 - protein, 139 aa, Homo sapiens; identical to SEQ ID NO: 807440

SEQ ID NO: 807444 - protein, 139 aa, Homo sapiens; identical to SEQ ID NO: 807440

SEQ ID NO: 807445 - protein, 112 aa, Homo sapiens [sequence omitted]

SEQ ID NO: 807446 - protein, 92 aa, Homo sapiens
QRPDDEFSDFVIYEDDKRGGGGGGSGGIGYPYPRAPVFPGRGSYSNRGNYNRGGMPNRGNYNQNFRGRGNNRGYKNQSQGYNQWQQGGTELV

SEQ ID NO: 807447 - protein, 807 aa, Homo sapiens
MSSSPVNVKKLKVSELKEELKKRRLSDKGLKAELMERLQAALDDEEAGGRPAMEPGNGSLDLGGDSAGRSGAGLEQEAAAGGDEEEEEEEEEEEGISALDGDQMELGEENGAAGAADSGPMEEEEAASEDENGDDQGFQEGEDELGDEEEGAGDENGHGEQQPQPPATQQQQPQQQRGAAKEAAGKSSGPTSLFAVTVAPPGARQGQQQAGGDGKTEQKGGDKKRGVKRPREDHGRGYFEYIEENKYSRAKSPQPPVEEEDEHFDDTVVCLDTYNCDLHFKISRDRLSASSLTMESFAFLWAGGRASYGVSKGKVCFEMKVTEKIPVRHLYTKDIDIHEVRIGWSLTTSGMLLGEEEFSYGYSLKGIKTCNCETEDYGEKFDENDVITCFANFESDEVELSYAKNGQDLGVAFKISKEVLAGRPLFPHVLCHNCAVEFNFGQKEKPYFPIPEEYTFIQNVPLEDRVRGPKGPEEKKDCEVVMMIGLPGAGKTTWVTKHAAENPGKYNILGTNTIMDKMMVAGFKKQMADTGKLNTLLQRAPQCLGKFIEIAARKKRNFILDQTNVSAAAQRRKMCLFAGFQRKAVVVCPKDEDYKQRTQKKAEVEGKDLPEHAVLKMKGNFTLPEVAECFDEITYVELQKEEAQKLLEQYKEGRSKKALPPEKKQNTGSKKSNKNKSGKNQFNRGGGHRGRGGFNMRGGNFRGGAPGNRGGYNRRGNMPQRGGGGGGSGGIGYPYPRAPVFPGRGSYSNRGNYNRGGMPNRGNYNQNFRGRGNNRGYKNQSQGYNQWQQGQFWGQKPWSQHYHQGYY

SEQ ID NO: 807448 - protein, 203 aa, Homo sapiens
LFVPVVIIFEFLKKLKVSELKEELKKRRLSDKGLKAELMERLQAALDDEEAGGRPAMEPGNGSLDLGGDSAGRSGAGLEQEAAAGGDEEEEEEEEEEEGISALDGDQMELGEENGAAGAADSGPMEEEEAASEDENGDDQGFQEGEDELGDEEEGAGDENGHGEQQPQPPATQQQQPQQQRGAAKEAAGKSSGPTSLFAVTVA

SEQ ID NO: 807449 - protein, 807 aa, Homo sapiens; identical to SEQ ID NO: 807447

SEQ ID NO: 807450 - protein, 826 aa, Homo sapiens
MSSSPVNVKKLKVSELKEELKKRRLSDKGLKAELMERLQAALDDEEAGGRPAMEPGNGSLDLGGDSAGRSGAGLEQEAAAGGDEEEEEEEEEEEGISALDGDQMELGEENGAAGAADSGPMEEEEAASEDENGDDQGFQEGEDELGDEEEGAGDENGHGEQQPQPPATQQQQPQQQRGAAKEAAGKSSGPTSLFAVTVAPPGARQGQQQAGGKKKAEGGGGGGRPGAPAAGDGKTEQKGGDKKRGVKRPREDHGRGYFEYIEENKYSRAKSPQPPVEEEDEHFDDTVVCLDTYNCDLHFKISRDRLSASSLTMESFAFLWAGGRASYGVSKGKVCFEMKVTEKIPVRHLYTKDIDIHEVRIGWSLTTSGMLLGEEEFSYGYSLKGIKTCNCETEDYGEKFDENDVITCFANFESDEVELSYAKNGQDLGVAFKISKEVLAGRPLFPHVLCHNCAVEFNFGQKEKPYFPIPEEYTFIQNVPLEDRVRGPKGPEEKKDCEVVMMIGLPGAGKTTWVTKHAAENPGKYNILGTNTIMDKMMVAGFKKQMADTGKLNTLLQRAPQCLGKFIEIAARKKRNFILDQTNVSAAAQRRKMCLFAGFQRKAVVVCPKDEDYKQRTQKKAEVEGKDLPEHAVLKMKGNFTLPEVAECFDEITYVELQKEEAQKLLEQYKEGRSKKALPPEKKQNTGSKKSNKNKSGKNQFNRGGGHRGRGGFNMRGGNFRGGAPGNRGGYNRRGNMPQRGGGGGGSGGIGYPYPRAPVFPGRGSYSNRGNYNRGGMPNRGNYNQNFRGRGNNRGYKNQSQGYNQWQQGQFWGQKPWSQHYHQGYY

SEQ ID NO: 807451 - protein, 807 aa, Homo sapiens; identical to SEQ ID NO: 807447

SEQ ID NO: 807452 - protein, 836 aa, Homo sapiens
MSSSPVNVKKLKVSELKEELKKRRLSDKGLKAELMERLQAALDDEEAGGRPAMEPGNGSLDLGGDSAGRSGAGLEQEAAAGGDEEEEEEEEEEEGISALDGDQMELGEENGAAGAADSGPMEEEEAASEDENGDDQGFQEGEDELGDEEEGAGDENGHGEQQPQPPATQQQQPQQQRGAAKEAAGKSSGPTSLFAVTVAPPGARQGQQQAGGKKKAEGGGGGGRPGAPAAGRWGGGKKTPGDGKTEQKGGDKKRGVKRPREDHGRGYFEYIEENKYSRAKSPQPPVEEEDEHFDDTVVCLDTYNCDLHFKISRDRLSASSLTMESFAFLWAGGRASYGVSKGKVCFEMKVTEKIPVRHLYTKDIDIHEVRIGWSLTTSGMLLGEEEFSYGYSLKGIKTCNCETEDYGEKFDENDVITCFANFESDEVELSYAKNGQDLGVAFKISKEVLAGRPLFPHVLCHNCAVEFNFGQKEKPYFPIPEEYTFIQNVPLEDRVRGPKGPEEKKDCEVVMMIGLPGAGKTTWVTKHAAENPGKYNILGTNTIMDKMMVAGFKKQMADTGKLNTLLQRAPQCLGKFIEIAARKKRNFILDQTNVSAAAQRRKMCLFAGFQRKAVVVCPKDEDYKQRTQKKAEVEGKDLPEHAVLKMKGNFTLPEVAECFDEITYVELQKEEAQKLLEQYKEGRSKKALPPEKKQNTGSKKSNKNKSGKNQFNRGGGHRGRGGFNMRGGNFRGGAPGNRGGYNRRGNMPQRGGGGGGSGGIGYPYPRAPVFPGRGSYSNRGNYNRGGMPNRGNYNQNFRGRGNNRGYKNQSQGYNQWQQGQFWGQKPWSQHYHQGYY

SEQ ID NO: 807453 - protein, 807 aa, Homo sapiens; identical to SEQ ID NO: 807447

SEQ ID NO: 807454 - protein, 648 aa, Homo sapiens
MSSGTKRKARATRTGTGSSSLNRRRRSSNSPTSLFAVTVAPPGARQGQQQAGGDGKTEQKGGDKKRGVKRPREDHGRGYFEYIEENKYSRAKSPQPPVEEEDEHFDDTVVCLDTYNCDLHFKISRDRLSASSLTMESFAFLWAGGRASYGVSKGKVCFEMKVTEKIPVRHLYTKDIDIHEVRIGWSLTTSGMLLGEEEFSYGYSLKGIKTCNCETEDYGEKFDENDVITCFANFESDEVELSYAKNGQDLGVAFKISKEVLAGRPLFPHVLCHNCAVEFNFGQKEKPYFPIPEEYTFIQNVPLEDRVRGPKGPEEKKDCEVVMMIGLPGAGKTTWVTKHAAENPGKYNILGTNTIMDKMMVAGFKKQMADTGKLNTLLQRAPQCLGKFIEIAARKKRNFILDQTNVSAAAQRRKMCLFAGFQRKAVVVCPKDEDYKQRTQKKAEVEGKDLPEHAVLKMKGNFTLPEVAECFDEITYVELQKEEAQKLLEQYKEGRSKKALPPEKKQNTGSKKSNKNKSGKNQFNRGGGHRGRGGFNMRGGNFRGGAPGNRGGYNRRGNMPQRGGGGGGSGGIGYPYPRAPVFPGRGSYSNRGNYNRGGMPNRGNYNQNFRGRGNNRGYKNQSQGYNQWQQGQFWGQKPWSQHYHQGYY

SEQ ID NO: 807455 - protein, 876 aa, Homo sapiens
MSSSPVNVKKLKVSELKEELKKRRLSDKGLKAELMERLQAALDDEEAGGRPAMEPGNGSLDLGGDSAGRSGAGLEQEAAAGGDEEEEEEEEEEEGISALDGDQMELGEENGAAGAADSGPMEEEEAASEDENGDDQGFQEGEDELGDEEEGAGDENGHGEQQPQPPATQQQQPQRRRAGLGPSPSLRSLRDTRGLRAWAAQFFFGFLESSRRLAKLVMSLDCVTSANRIRSGLFFEFTFESSVKTSVKKQDKVELLWFSERKSVFLLFRGLAFMGLVCVLGDGKTEQKGGDKKRGVKRPREDHGRGYFEYIEENKYSRAKSPQPPVEEEDEHFDDTVVCLDTYNCDLHFKISRDRLSASSLTMESFAFLWAGGRASYGVSKGKVCFEMKVTEKIPVRHLYTKDIDIHEVRIGWSLTTSGMLLGEEEFSYGYSLKGIKTCNCETEDYGEKFDENDVITCFANFESDEVELSYAKNGQDLGVAFKISKEVLAGRPLFPHVLCHNCAVEFNFGQKEKPYFPIPEEYTFIQNVPLEDRVRGPKGPEEKKDCEVVMMIGLPGAGKTTWVTKHAAENPGKYNILGTNTIMDKMMVAGFKKQMADTGKLNTLLQRAPQCLGKFIEIAARKKRNFILDQTNVSAAAQRRKMCLFAGFQRKAVVVCPKDEDYKQRTQKKAEVEGKDLPEHAVLKMKGNFTLPEVAECFDEITYVELQKEEAQKLLEQYKEGRSKKALPPEKKQNTGSKKSNKNKSGKNQFNRGGGHRGRGGFNMRGGNFRGGAPGNRGGYNRRGNMPQRGGGGGGSGGIGYPYPRAPVFPGRGSYSNRGNYNRGGMPNRGNYNQNFRGRGNNRGYKNQSQGYNQWQQGQFWGQKPWSQHYHQGYY

SEQ ID NO: 807456 - protein, 807 aa, Homo sapiens; identical to SEQ ID NO: 807447

SEQ ID NO: 807457 - protein, 550 aa, Homo sapiens
MFTLDVKSNTVFDIITDNCDLHFKISRDRLSASSLTMESFAFLWAGGRASYGVSKGKVCFEMKVTEKIPVRHLYTKDIDIHEVRIGWSLTTSGMLLGEEEFSYGYSLKGIKTCNCETEDYGEKFDENDVITCFANFESDEVELSYAKNGQDLGVAFKISKEVLAGRPLFPHVLCHNCAVEFNFGQKEKPYFPIPEEYTFIQNVPLEDRVRGPKGPEEKKDCEVVMMIGLPGAGKTTWVTKHAAENPGKYNILGTNTIMDKMMVAGFKKQMADTGKLNTLLQRAPQCLGKFIEIAARKKRNFILDQTNVSAAAQRRKMCLFAGFQRKAVVVCPKDEDYKQRTQKKAEVEGKDLPEHAVLKMKGNFTLPEVAECFDEITYVELQKEEAQKLLEQYKEGRSKKALPPEKKQNTGSKKSNKNKSGKNQFNRGGGHRGRGGFNMRGGNFRGGAPGNRGGYNRRGNMPQRGGGGGGSGGIGYPYPRAPVFPGRGSYSNRGNYNRGGMPNRGNYNQNFRGRGNNRGYKNQSQGYNQWQQGQFWGQKPWSQHYHQGYY

SEQ ID NO: 807458 - protein, 807 aa, Homo sapiens; identical to SEQ ID NO: 807447

SEQ ID NO: 807459 - protein, 541 aa, Homo sapiens
LKMKGNFTLPGVAECFDEITYVELQKEEAQKLLEQYEGRASYGVSKGKVCFEMKVTEKIPVRHLYTKDIDIHEVRIGWSLTTSGMLLGEEEFSYGYSLKGIKTCNCETEDYGEKFDENDVITCFANFESDEVELSYAKNGQDLGVAFKISKEVLAGRPLFPHVLCHNCAVEFNFGQKEKPYFPIPEEYTFIQNVPLEDRVRGPKGPEEKKDCEVVMMIGLPGAGKTTWVTKHAAENPGKYNILGTNTIMDKMMVAGFKKQMADTGKLNTLLQRAPQCLGKFIEIAARKKRNFILDQTNVSAAAQRRKMCLFAGFQRKAVVVCPKDEDYKQRTQKKAEVEGKDLPEHAVLKMKGNFTLPEVAECFDEITYVELQKEEAQKLLEQYKEGRSKKALPPEKKQNTGSKKSNKNKSGKNQFNRGGGHRGRGGFNMRGGNFRGGAPGNRGGYNRRGNMPQRGGGGGGSGGIGYPYPRAPVFPGRGSYSNRGNYNRGGMPNRGNYNQNFRGRGNNRGYKNQSQGYNQWQQGQFWGQKPWSQHYHQGYY

SEQ ID NO: 807460 - protein, 807 aa, Homo sapiens; identical to SEQ ID NO: 807447

SEQ ID NO: 807461 - protein, 326 aa, Homo sapiens
MMIGLPGAGKTTWVTKHAAENPGKYNILGTNTIMDKMMVAGFKKQMADTGKLNTLLQRAPQCLGKFIEIAARKKRNFILDQTNVSAAAQRRKMCLFAGFQRKAVVVCPKDEDYKQRTQKKAEVEGKDLPEHAVLKMKGNFTLPEVAECFDEITYVELQKEEAQKLLEQYKEGRSKKALPPEKKQNTGSKKSNKNKSGKNQFNRGGGHRGRGGFNMRGGNFRGGAPGNRGGYNRRGNMPQRGGGGGGSGGIGYPYPRAPVFPGRGSYSNRGNYNRGGMPNRGNYNQNFRGRGNNRGYKNQSQGYNQWQQGQFWGQKPWSQHYHQGYY

SEQ ID NO: 807462 - protein, 807 aa, Homo sapiens; identical to SEQ ID NO: 807447

SEQ ID NO: 807463 - protein, 807 aa, Homo sapiens; identical to SEQ ID NO: 807447

SEQ ID NO: 807464 - protein, 234 aa, Homo sapiens
MCLFAGFQRKAVVVCPKDEDYKQRTQKKAEVEGKDLPEHAVLKMKGNFTLPEVAECFDEITYVELQKEEAQKLLEQYKEGRSKKALPPEKKQNTGSKKSNKNKSGKNQFNRGGGHRGRGGFNMRGGNFRGGAPGNRGGYNRRGNMPQRGGGGGGSGGIGYPYPRAPVFPGRGSYSNRGNYNRGGMPNRGNYNQNFRGRGNNRGYKNQSQGYNQWQQGQFWGQKPWSQHYHQGYY

SEQ ID NO: 807465 - protein, 807 aa, Homo sapiens; identical to SEQ ID NO: 807447

SEQ ID NO: 807466 - protein, 164 aa, Homo sapiens
RARSGDTYVGRSKKALPPEKKQNTGSKKSNKNKSGKNQFNRGGGHRGRGGFNMRGGNFRGGAPGNRGGYNRRGNMPQRGGGGGGSGGIGYPYPRAPVFPGRGSYSNRGNYNRGGMPNRGNYNQNFRGRGNNRGYKNQSQGYNQWQQGQFWGQKPWSQHYHQGYY

SEQ ID NO: 807467 - protein, 807 aa, Homo sapiens; identical to SEQ ID NO: 807447

SEQ ID NO: 807468 - protein, 807 aa, Homo sapiens; identical to SEQ ID NO: 807447

SEQ ID NO: 807469 - protein, 804 aa, Homo sapiens
MSSSPVNVKKLKVSELKEELKKRRLSDKGLKAELMERLQAALDDEEAGGRPAMEPGNGSLDLGGDSAGRSGAGLEQEAAAGGDEEEEEEEEEEEGISALDGDQMELGEENGAAGAADSGPMEEEEAASEDENGDDQGFQEGEDELGDEEEGAGDENGHGEQQPQPPATQQQQPQQQRGAAKEAAGKSSGPTSLFAVTVAPPGARQGQQQAGGDGKTEQKGGDKKRGVKRPREDHGRGYFEYIEENKYSRAKSPQPPVEEEDEHFDDTVVCLDTYNCDLHFKISRDRLSASSLTMESFAFLWAGGRASYGVSKGKVCFEMKVTEKIPVRHLYTKDIDIHEVRIGWSLTTSGMLLGEEEFSYGYSLKGIKTCNCETEDYGEKFDENDVITCFANFESDEVELSYAKNGQDLGVAFKISKEVLAGRPLFPHVLCHNCAVEFNFGQKEKPYFPIPEEYTFIQNVPLEDRVRGPKGPEEKKDCEVVMMIGLPGAGKTTWVTKHAAENPGKYNILGTNTIMDKMMVAGFKKQMADTGKLNTLLQRAPQCLGKFIEIAARKKRNFILDQTNVSAAAQRRKMCLFAGFQRKAVVVCPKDEDYKQRTQKKAEVEGKDLPEHAVLKMKGNFTLPEVAECFDEITYVELQKEEAQKLLEQYKEGRSKKALPPEKKQNTGSKKSNKNKSGKNQFNRGGGHRGRGGFNMRGGNFRGGAPGNRGGYNRRGNMPQRGGGGGGSGGIGYPYPRAPVFPGRGSYSNRGNYNRGGMPNRGNYNQNFRGRGNNRGYKNQSQGYNQWQQGVSNFLCALCTLIVF

SEQ ID NO: 807470 - protein, 792 aa, Homo sapiens
MSSSPVNVKKLKVSELKEELKKRRLSDKGLKAELMERLQAALDDEEAGGRPAMEPGNGSLDLGGDSAGRSGAGLEQEAAAGGDEEEEEEEEEEEGISALDGDQMELGEENGAAGAADSGPMEEEEAASEDENGDDQGFQEGEDELGDEEEGAGDENGHGEQQPQPPATQQQQPQQQRGAAKEAAGKSSGPTSLFAVTVAPPGARQGQQQAGGDGKTEQKGGDKKRGVKRPREDHGRGYFEYIEENKYSRAKSPQPPVEEEDEHFDDTVVCLDTYNCDLHFKISRDRLSASSLTMESFAFLWAGGRASYGVSKGKVCFEMKVTEKIPVRHLYTKDIDIHEVRIGWSLTTSGMLLGEEEFSYGYSLKGIKTCNCETEDYGEKFDENDVITCFANFESDEVELSYAKNGQDLGVAFKISKEVLAGRPLFPHVLCHNCAVEFNFGQKEKPYFPIPEEYTFIQNVPLEDRVRGPKGPEEKKDCEVVMMIGLPGAGKTTWVTKHAAENPGKYNILGTNTIMDKMMVAGFKKQMADTGKLNTLLQRAPQCLGKFIEIAARKKRNFILDQTNVSAAAQRRKMCLFAGFQRKAVVVCPKDEDYKQRTQKKAEVEGKDLPEHAVLKMKGNFTLPEVAECFDEITYVELQKEEAQKLLEQYKEGRSKKALPPEKKQNTGSKKSNKNKSGKNQFNRGGGHRGRGGFNMRGGNFRGGAPGNRGGYNRRGNMPQRGGGGGGSGGIGYPYPRAPVFPGRGSYSNRGNYNRGGMPNRGNYNQNFRGRGNNRGYKNQSQGYNQWQQGQF

SEQ ID NO: 807471 - protein, 800 aa, Homo sapiens
MSSSPVNVKKLKVSELKEELKKRRLSDKGLKAELMERLQAALDDEEAGGRPAMEPGNGSLDLGGDSAGRSGAGLEQEAAAGGDEEEEEEEEEEEGISALDGDQMELGEENGAAGAADSGPMEEEEAASEDENGDDQGFQEGEDELGDEEEGAGDENGHGEQQPQPPATQQQQPQQQRGAAKEAAGKSSGPTSLFAVTVAPPGARQGQQQAGGDGKTEQKGGDKKRGVKRPREDHGRGYFEYIEENKYSRAKSPQPPVEEEDEHFDDTVVCLDTYNCDLHFKISRDRLSASSLTMESFAFLWAGGRASYGVSKGKVCFEMKVTEKIPVRHLYTKDIDIHEVRIGWSLTTSGMLLGEEEFSYGYSLKGIKTCNCETEDYGEKFDENDVITCFANFESDEVELSYAKNGQDLGVAFKISKEVLAGRPLFPHVLCHNCAVEFNFGQKEKPYFPIPEEYTFIQNVPLEDRVRGPKGPEEKKDCEVVMMIGLPGAGKTTWVTKHAAENPGKYNILGTNTIMDKMMVAGFKKQMADTGKLNTLLQRAPQCLGKFIEIAARKKRNFILDQTNVSAAAQRRKMCLFAGFQRKAVVVCPKDEDYKQRTQKKAEVEGKDLPEHAVLKMKGNFTLPEVAECFDEITYVELQKEEAQKLLEQYKEGRSKKALPPEKKQNTGSKKSNKNKSGKNQFNRGGGHRGRGGFNMRGGNFRGGAPGNRGGYNRRGNMPQRGGGGGGSGGIGYPYPRAPVFPGRGSYSNRGNYNRGGMPNRGNYNQNFRGRGNNRGYKNQSQGYNQWQQGQFPRGPVPSS

SEQ ID NO: 807472 - protein, 112 aa, Homo sapiens [sequence omitted]

SEQ ID NO: 807473 - protein, 759 aa, Homo sapiens
MSSSPVNVKKLKVSELKEELKKRRLSDKGLKAELMERLQAALDDEEAGGRPAMEPGNGSLDLGGDSAGRSGAGLEQEAAAGGDEEEEEEEEEEEGISALDGDQMELGEENGAAGAADSGPMEEEEAASEDENGDDQGFQEGEDELGDEEEGAGDENGHGEQQPQPPATQQQQPQQQRGAAKEAAGKSSGPTSLFAVTVAPPGARQGQQQAGGDGKTEQKGGDKKRGVKRPREDHGRGYFEYIEENKYSRAKSPQPPVEEEDEHFDDTVVCLDTYNCDLHFKISRDRLSASSLTMESFAFLWAGGRASYGVSKGKVCFEMKVTEKIPVRHLYTKDIDIHEVRIGWSLTTSGMLLGEEEFSYGYSLKGIKTCNCETEDYGEKFDENDVITCFANFESDEVELSYAKNGQDLGVAFKISKEVLAGRPLFPHVLCHNCAVEFNFGQKEKPYFPIPEEYTFIQNVPLEDRVRGPKGPEEKKDCEVVMMIGLPGAGKTTWVTKHAAENPGKYNILGTNTIMDKMMVAGFKKQMADTGKLNTLLQRAPQCLGKFIEIAARKKRNFILDQTNVSAAAQRRKMCLFAGFQRKAVVVCPKDEDYKQRTQKKAEVEGKDLPEHAVLKMKGNFTLPEVAECFDEITYVELQKEEAQKLLEQYKEGRSKKALPPEKKQNTGSKKSNKNKSGKNQFNRGGGHRGRGGFNMRGGNFRGGAPGNRGGYNRRGNMPQRGGGGGGSGGIGYPYPRAPVFPGRGSYSNRLGGELLVNS

SEQ ID NO: 807474 - protein, 707 aa, Homo sapiens
MSSSPVNVKKLKVSELKEELKKRRLSDKGLKAELMERLQAALDDEEAGGRPAMEPGNGSLDLGGDSAGRSGAGLEQEAAAGGDEEEEEEEEEEEGISALDGDQMELGEENGAAGAADSGPMEEEEAASEDENGDDQGFQEGEDELGDEEEGAGDENGHGEQQPQPPATQQQQPQQQRGAAKEAAGKSSGPTSLFAVTVAPPGARQGQQQAGGDGKTEQKGGDKKRGVKRPREDHGRGYFEYIEENKYSRAKSPQPPVEEEDEHFDDTVVCLDTYNCDLHFKISRDRLSASSLTMESFAFLWAGGRASYGVSKGKVCFEMKVTEKIPVRHLYTKDIDIHEVRIGWSLTTSGMLLGEEEFSYGYSLKGIKTCNCETEDYGEKFDENDVITCFANFESDEVELSYAKNGQDLGVAFKISKEVLAGRPLFPHVLCHNCAVEFNFGQKEKPYFPIPEEYTFIQNVPLEDRVRGPKGPEEKKDCEVVMMIGLPGAGKTTWVTKHAAENPGKYNILGTNTIMDKMMVAGFKKQMADTGKLNTLLQRAPQCLGKFIEIAARKKRNFILDQTNVSAAAQRRKMCLFAGFQRKAVVVCPKDEDYKQRTQKKAEVEGKDLPEHAVLKMKGNFTLPEVAECFDEITYVELQKEEAQKLLEQYKEGRSKKALPPEKKQNTGSKKSNTPHVLTHKGELNIENTLTQGVGTPHTRACRWVGV

SEQ ID NO: 807475 - protein, 622 aa, Homo sapiens
MSSSPVNVKKLKVSELKEELKKRRLSDKGLKAELMERLQAALDDEEAGGRPAMEPGNGSLDLGGDSAGRSGAGLEQEAAAGGDEEEEEEEEEEEGISALDGDQMELGEENGAAGAADSGPMEEEEAASEDENGDDQGFQEGEDELGDEEEGAGDENGHGEQQPQPPATQQQQPQQQRGAAKEAAGKSSGPTSLFAVTVAPPGARQGQQQAGGDGKTEQKGGDKKRGVKRPREDHGRGYFEYIEENKYSRAKSPQPPVEEEDEHFDDTVVCLDTYNCDLHFKISRDRLSASSLTMESFAFLWAGGRASYGVSKGKVCFEMKVTEKIPVRHLYTKDIDIHEVRIGWSLTTSGMLLGEEEFSYGYSLKGIKTCNCETEDYGEKFDENDVITCFANFESDEVELSYAKNGQDLGVAFKISKEVLAGRPLFPHVLCHNCAVEFNFGQKEKPYFPIPEEYTFIQNVPLEDRVRGPKGPEEKKDCEVVMMIGLPGAGKTTWVTKHAAENPGKYNILGTNTIMDKMMVAGFKKQMADTGKLNTLLQRAPQCLGKFIEIAARKKRNFILDQTNVSAAAQRRKMCLFAGFQRKAVVVCPKDEDYKQRTQKKAEVEGKDLPEHAVLKMKGMEF

SEQ ID NO: 807476 - protein, 625 aa, Homo sapiens
MSSSPVNVKKLKVSELKEELKKRRLSDKGLKAELMERLQAALDDEEAGGRPAMEPGNGSLDLGGDSAGRSGAGLEQEAAAGGDEEEEEEEEEEEGISALDGDQMELGEENGAAGAADSGPMEEEEAASEDENGDDQGFQEGEDELGDEEEGAGDENGHGEQQPQPPATQQQQPQQQRGAAKEAAGKSSGPTSLFAVTVAPPGARQGQQQAGGDGKTEQKGGDKKRGVKRPREDHGRGYFEYIEENKYSRAKSPQPPVEEEDEHFDDTVVCLDTYNCDLHFKISRDRLSASSLTMESFAFLWAGGRASYGVSKGKVCFEMKVTEKIPVRHLYTKDIDIHEVRIGWSLTTSGMLLGEEEFSYGYSLKGIKTCNCETEDYGEKFDENDVITCFANFESDEVELSYAKNGQDLGVAFKISKEVLAGRPLFPHVLCHNCAVEFNFGQKEKPYFPIPEEYTFIQNVPLEDRVRGPKGPEEKKDCEVVMMIGLPGAGKTTWVTKHAAENPGKYNILGTNTIMDKMMVAGFKKQMADTGKLNTLLQRAPQCLGKFIEIAARKKRNFILDQTNVSAAAQRRKMCLFAGFQRKAVVVCPKDEDYKQRTQKKAEVEGKDLPEHAVLKMKGTVPSQR

SEQ ID NO: 807477 - protein, 546 aa, Homo sapiens
MSSSPVNVKKLKVSELKEELKKRRLSDKGLKAELMERLQAALDDEEAGGRPAMEPGNGSLDLGGDSAGRSGAGLEQEAAAGGDEEEEEEEEEEEGISALDGDQMELGEENGAAGAADSGPMEEEEAASEDENGDDQGFQEGEDELGDEEEGAGDENGHGEQQPQPPATQQQQPQQQRGAAKEAAGKSSGPTSLFAVTVAPPGARQGQQQAGGDGKTEQKGGDKKRGVKRPREDHGRGYFEYIEENKYSRAKSPQPPVEEEDEHFDDTVVCLDTYNCDLHFKISRDRLSASSLTMESFAFLWAGGRASYGVSKGKVCFEMKVTEKIPVRHLYTKDIDIHEVRIGWSLTTSGMLLGEEEFSYGYSLKGIKTCNCETEDYGEKFDENDVITCFANFESDEVELSYAKNGQDLGVAFKISKEVLAGRPLFPHVLCHNCAVEFNFGQKEKPYFPIPEEYTFIQNVPLEDRVRGPKGPEEKKDCEVVMMIGLPGAGKTTWVTKHAAENPGKYNILGTNTIMDKMMVAGFKKQMADTGKLNTLLQNCKLLQLL

SEQ ID NO: 807478 - protein, 536 aa, Homo sapiens
MSSSPVNVKKLKVSELKEELKKRRLSDKGLKAELMERLQAALDDEEAGGRPAMEPGNGSLDLGGDSAGRSGAGLEQEAAAGGDEEEEEEEEEEEGISALDGDQMELGEENGAAGAADSGPMEEEEAASEDENGDDQGFQEGEDELGDEEEGAGDENGHGEQQPQPPATQQQQPQQQRGAAKEAAGKSSGPTSLFAVTVAPPGARQGQQQAGGDGKTEQKGGDKKRGVKRPREDHGRGYFEYIEENKYSRAKSPQPPVEEEDEHFDDTVVCLDTYNCDLHFKISRDRLSASSLTMESFAFLWAGGRASYGVSKGKVCFEMKVTEKIPVRHLYTKDIDIHEVRIGWSLTTSGMLLGEEEFSYGYSLKGIKTCNCETEDYGEKFDENDVITCFANFESDEVELSYAKNGQDLGVAFKISKEVLAGRPLFPHVLCHNCAVEFNFGQKEKPYFPIPEEYTFIQNVPLEDRVRGPKGPEEKKDCEVVMMIGLPGAGKTTWVTKHAAENPGKYNILGTNTIMDKMMVAGFKKKKKNWWEQRQQ

SEQ ID NO: 807479 - protein, 503 aa, Homo sapiens
MSSSPVNVKKLKVSELKEELKKRRLSDKGLKAELMERLQAALDDEEAGGRPAMEPGNGSLDLGGDSAGRSGAGLEQEAAAGGDEEEEEEEEEEEGISALDGDQMELGEENGAAGAADSGPMEEEEAASEDENGDDQGFQEGEDELGDEEEGAGDENGHGEQQPQPPATQQQQPQQQRGAAKEAAGKSSGPTSLFAVTVAPPGARQGQQQAGGDGKTEQKGGDKKRGVKRPREDHGRGYFEYIEENKYSRAKSPQPPVEEEDEHFDDTVVCLDTYNCDLHFKISRDRLSASSLTMESFAFLWAGGRASYGVSKGKVCFEMKVTEKIPVRHLYTKDIDIHEVRIGWSLTTSGMLLGEEEFSYGYSLKGIKTCNCETEDYGEKFDENDVITCFANFESDEVELSYAKNGQDLGVAFKISKEVLAGRPLFPHVLCHNCAVEFNFGQKEKPYFPIPEEYTFIQNVPLEDRVRGPKGPEEKKDCEVVMMIGLPGAGKTTWVTKHAAEGG

SEQ ID NO: 807480 - protein, 275 aa, Homo sapiens [sequence omitted]

SEQ ID NO: 807481 - protein, 171 aa, Homo sapiens
EIELGTGDTYVGRSKKALPPEKKQNTGSKKSNKNKSGKNQFNRGGGHRGRGGFNMRGGNFRGGAPGNRGGYNRRGNMPQRGGGGGGSGGIGYPYPRAPVFPGRGSYSNRGNYNRGGMPNRGNYNQNFRGRSKRGGEGQTWVAPITDHLEPALIISWPQKPRPPLLPLLPVL

SEQ ID NO: 807482 - protein, 102 aa, Homo sapiens [sequence omitted]

SEQ ID NO: 807483 - protein, 826 aa, Homo sapiens; identical to SEQ ID NO: 807450

SEQ ID NO: 807484 - protein, 807 aa, Homo sapiens; identical to SEQ ID NO: 807447

SEQ ID NO: 807485 - protein, 807 aa, Homo sapiens; identical to SEQ ID NO: 807447

SEQ ID NO: 807486 - protein, 286 aa, Homo sapiens
MSSSPVNVKKLKVSELKEELKKRRLSDKGLKAELMERLQAALDDEEAGGRPAMEPGNGSLDLGGDSAGRSGAGLEQEAAAGGDEEEEEEEEEEEGISALDGDQMELGEENGAAGAADSGPMEEEEAASEDENGDDQGFQEGEDELGDEEEGAGDENGHGEQQPQPPATQQQQPQQQRGAAKEAAGKSSGPTSLFAVTVAPPGARQGQQQAGGDGKTEQKGGDKKRGVKRPREDHGRGYFEYIEENKYSRAKSPQPPVEEEDEHFDDTVVCLDTCEVKLFLPNYEMR

SEQ ID NO: 807487 - protein, 807 aa, Homo sapiens; identical to SEQ ID NO: 807447

SEQ ID NO: 807488 - protein, 807 aa, Homo sapiens; identical to SEQ ID NO: 807447

SEQ ID NO: 807489 - protein, 603 aa, Homo sapiens
MGLVCVLGDGKTEQKGGDKKRGVKRPREDHGRGYFEYIEENKYSRAKSPQPPVEEEDEHFDDTVVCLDTYNCDLHFKISRDRLSASSLTMESFAFLWAGGRASYGVSKGKVCFEMKVTEKIPVRHLYTKDIDIHEVRIGWSLTTSGMLLGEEEFSYGYSLKGIKTCNCETEDYGEKFDENDVITCFANFESDEVELSYAKNGQDLGVAFKISKEVLAGRPLFPHVLCHNCAVEFNFGQKEKPYFPIPEEYTFIQNVPLEDRVRGPKGPEEKKDCEVVMMIGLPGAGKTTWVTKHAAENPGKYNILGTNTIMDKMMVAGFKKQMADTGKLNTLLQRAPQCLGKFIEIAARKKRNFILDQTNVSAAAQRRKMCLFAGFQRKAVVVCPKDEDYKQRTQKKAEVEGKDLPEHAVLKMKGNFTLPEVAECFDEITYVELQKEEAQKLLEQYKEGRSKKALPPEKKQNTGSKKSNKNKSGKNQFNRGGGHRGRGGFNMRGGNFRGGAPGNRGGYNRRGNMPQRGGGGGGSGGIGYPYPRAPVFPGRGSYSNRGNYNRGGMPNRGNYNQNFRGRGNNRGYKNQSQGYNQWQQGQFWGQKPWSQHYHQGYY

SEQ ID NO: 807490 - protein, 558 aa, Homo sapiens
FDGDSPCREEEDEHFDDTVVCLDTYNCDLHFKISRDRLSASSLTMESFAFLWAGGRASYGVSKGKVCFEMKVTEKIPVRHLYTKDIDIHEVRIGWSLTTSGMLLGEEEFSYGYSLKGIKTCNCETEDYGEKFDENDVITCFANFESDEVELSYAKNGQDLGVAFKISKEVLAGRPLFPHVLCHNCAVEFNFGQKEKPYFPIPEEYTFIQNVPLEDRVRGPKGPEEKKDCEVVMMIGLPGAGKTTWVTKHAAENPGKYNILGTNTIMDKMMVAGFKKQMADTGKLNTLLQRAPQCLGKFIEIAARKKRNFILDQTNVSAAAQRRKMCLFAGFQRKAVVVCPKDEDYKQRTQKKAEVEGKDLPEHAVLKMKGNFTLPEVAECFDEITYVELQKEEAQKLLEQYKEGRSKKALPPEKKQNTGSKKSNKNKSGKNQFNRGGGHRGRGGFNMRGGNFRGGAPGNRGGYNRRGNMPQRGGGGGGSGGIGYPYPRAPVFPGRGSYSNRGNYNRGGMPNRGNYNQNFRGRGNNRGYKNQSQGYNQWQQGQFWGQKPWSQHYHQGYY

SEQ ID NO: 807491 - protein, 807 aa, Homo sapiens; identical to SEQ ID NO: 807447

SEQ ID NO: 807492 - protein, 464 aa, Homo sapiens
MEKAVDEVGFGEEEFSYGYSLKGIKTCNCETEDYGEKFDENDVITCFANFESDEVELSYAKNGQDLGVAFKISKEVLAGRPLFPHVLCHNCAVEFNFGQKEKPYFPIPEEYTFIQNVPLEDRVRGPKGPEEKKDCEVVMMIGLPGAGKTTWVTKHAAENPGKYNILGTNTIMDKMMVAGFKKQMADTGKLNTLLQRAPQCLGKFIEIAARKKRNFILDQTNVSAAAQRRKMCLFAGFQRKAVVVCPKDEDYKQRTQKKAEVEGKDLPEHAVLKMKGNFTLPEVAECFDEITYVELQKEEAQKLLEQYKEGRSKKALPPEKKQNTGSKKSNKNKSGKNQFNRGGGHRGRGGFNMRGGNFRGGAPGNRGGYNRRGNMPQRGGGGGGSGGIGYPYPRAPVFPGRGSYSNRGNYNRGGMPNRGNYNQNFRGRGNNRGYKNQSQGYNQWQQGQFWGQKPWSQHYHQGYY

SEQ ID NO: 807493 - protein, 807 aa, Homo sapiens; identical to SEQ ID NO: 807447

SEQ ID NO: 807494 - protein, 654 aa, Homo sapiens
MSSSPVNVKKLKVSELKEELKKRRLSDKGLKAELMERLQAALDDEEAGGRPAMEPGNGSLDLGGDSAGRSGAGLEQEAAAGGDEEEEEEEEEEEGISALDGDQMELGEENGAAGAADSGPMEEEEAASEDENGDDQGFQEGEDELGDEEEGAGDENGHGEQQPQPPATQQQQPQQQRGAAKEAAGKSSGPTSLFAVTVAPPGARQGQQQAGGDGKTEQKGGDKKRGVKRPREDHGRGYFEYIEENKYSRAKSPQPPVEEEDEHFDDTVVCLDTYNCDLHFKISRDRLSASSLTMESFAFLWAGGRASYGVSKGKVCFEMKVTEKIPVRHLYTKDIDIHEVRIGWSLTTSGMLLGEEEFSYGYSLKGIKTCNCETEDYGEKFDENDVITCFANFESDEVELSYAKNGQDLGVAFKISKEVLAGRPLFPHVLCHNCAVEFNFGQKEKPYFPIPEEYTFIQNVPLEDRVRGPKGPEEKKDCEVVMMIGLPGAGKTTWVTKHAAENPGKYNILGTNTIMDKMMVAGFKKQMADTGKLNTLLQRAPQCLGKFIEIAARKKRNFILDQTNVSAAAQRRKMCLFAGFQRKAVVVCPKDEDYKQRTQKKAEVEGKDLPEHAVLKMKGNFTLPEVAECFDEITYVELQKEEAQKLLEQYKEEK

SEQ ID NO: 807495 - protein, 345 aa, Homo sapiens
RIDLAQLIQQKRDQTVIVVMMIGLPGAGKTTWVTKHAAENPGKYNILGTNTIMDKMMVAGFKKQMADTGKLNTLLQRAPQCLGKFIEIAARKKRNFILDQTNVSAAAQRRKMCLFAGFQRKAVVVCPKDEDYKQRTQKKAEVEGKDLPEHAVLKMKGNFTLPEVAECFDEITYVELQKEEAQKLLEQYKEGRSKKALPPEKKQNTGSKKSNKNKSGKNQFNRGGGHRGRGGFNMRGGNFRGGAPGNRGGYNRRGNMPQRGGGGGGSGGIGYPYPRAPVFPGRGSYSNRGNYNRGGMPNRGNYNQNFRGRGNNRGYKNQSQGYNQWQQGQFWGQKPWSQHYHQGYY

SEQ ID NO: 807496 - protein, 807 aa, Homo sapiens; identical to SEQ ID NO: 807447

SEQ ID NO: 807497 - protein, 166 aa, Homo sapiens
EIELGTGDTYVGRSKKALPPEKKQNTGSKKSNKNKSGKNQFNRGGGHRGRGGFNMRGGNFRGGAPGNRGGYNRRGNMPQRGGGGGGSGGIGYPYPRAPVFPGRGSYSNRGNYNRGGMPNRGNYNQNFRGRGNNRGYKNQSQGYNQWQQGQFWGQKPWSQHYHQGYY

SEQ ID NO: 807498 - protein, 800 aa, Homo sapiens
MSSSPVNVKKLKVSELKEELKKRRLSDKGLKAELMERLQAALDDEEAGGRPAMEPGNGSLDLGGDSAGRSGAGLEQEAAAGGDEEEEEEEEEEEGISALDGDQMELGEENGAAGAADSGPMEEEEAASEDENGDDQGFQEGEDELGDEEEGAGDENGHGEQQPQPPATQQQQPQQQRGAAKEAAGKSSGPTSLFAVTVAPPGARQGQQQAGGDGKTEQKGGDKKRGVKRPREDHGRGYFEYIEENKYSRAKSPQPPVEEEDEHFDDTVVCLDTYNCDLHFKISRDRLSASSLTMESFAFLWAGGRASYGVSKGKVCFEMKVTEKIPVRHLYTKDIDIHEVRIGWSLTTSGMLLGEEEFSYGYSLKGIKTCNCETEDYGEKFDENDVITCFANFESDEVELSYAKNGQDLGVAFKISKEVLAGRPLFPHVLCHNCAVEFNFGQKEKPYFPIPEEYTFIQNVPLEDRVRGPKGPEEKKDCEVVMMIGLPGAGKTTWVTKHAAENPGKYNILGTNTIMDKMMVAGFKKQMADTGKLNTLLQRAPQCLGKFIEIAARKKRNFILDQTNVSAAAQRRKMCLFAGFQRKAVVVCPKDEDYKQRTQKKAEVEGKDLPEHAVLKMKGNFTLPEVAECFDEITYVELQKEEAQKLLEQYKEGRSKKALPPEKKQNTGSKKSNKNKSGKNQFNRGGGHRGRGGFNMRGGNFRGGAPGNRGGYNRRGNMPQRGGGGGGSGGIGYPYPRAPVFPGRGSYSNRGNYNRGGMPNRGNYNQNFRGRGNNRGYKNQSQGYNQWQQGHSVDWSHIIR

SEQ ID NO: 807499 - protein, 800 aa, Homo sapiens
MSSSPVNVKKLKVSELKEELKKRRLSDKGLKAELMERLQAALDDEEAGGRPAMEPGNGSLDLGGDSAGRSGAGLEQEAAAGGDEEEEEEEEEEEGISALDGDQMELGEENGAAGAADSGPMEEEEAASEDENGDDQGFQEGEDELGDEEEGAGDENGHGEQQPQPPATQQQQPQQQRGAAKEAAGKSSGPTSLFAVTVAPPGARQGQQQAGGDGKTEQKGGDKKRGVKRPREDHGRGYFEYIEENKYSRAKSPQPPVEEEDEHFDDTVVCLDTYNCDLHFKISRDRLSASSLTMESFAFLWAGGRASYGVSKGKVCFEMKVTEKIPVRHLYTKDIDIHEVRIGWSLTTSGMLLGEEEFSYGYSLKGIKTCNCETEDYGEKFDENDVITCFANFESDEVELSYAKNGQDLGVAFKISKEVLAGRPLFPHVLCHNCAVEFNFGQKEKPYFPIPEEYTFIQNVPLEDRVRGPKGPEEKKDCEVVMMIGLPGAGKTTWVTKHAAENPGKYNILGTNTIMDKMMVAGFKKQMADTGKLNTLLQRAPQCLGKFIEIAARKKRNFILDQTNVSAAAQRRKMCLFAGFQRKAVVVCPKDEDYKQRTQKKAEVEGKDLPEHAVLKMKGNFTLPEVAECFDEITYVELQKEEAQKLLEQYKEGRSKKALPPEKKQNTGSKKSNKNKSGKNQFNRGGGHRGRGGFNMRGGNFRGGAPGNRGGYNRRGNMPQRGGGGGGSGGIGYPYPRAPVFPGRGSYSNRGNYNRGGMPNRGNYNQNFRGRGNNRGYKNQSQGYNQWQQGMEVVWLRCCR

SEQ ID NO: 807500 - protein, 83 aa, Homo sapiens
FEPRYPLSLSNPRAPVFPGRGSYSNRGNYNRGGMPNRGNYNQNFRGRGNNRGYKNQSQGYNQWQQGQFWGQKPWSQHYHQGYY

SEQ ID NO: 807501 - protein, 732 aa, Homo sapiens
MSSSPVNVKKLKVSELKEELKKRRLSDKGLKAELMERLQAALDDEEAGGRPAMEPGNGSLDLGGDSAGRSGAGLEQEAAAGGDEEEEEEEEEEEGISALDGDQMELGEENGAAGAADSGPMEEEEAASEDENGDDQGFQEGEDELGDEEEGAGDENGHGEQQPQPPATQQQQPQQQRGAAKEAAGKSSGPTSLFAVTVAPPGARQGQQQAGGDGKTEQKGGDKKRGVKRPREDHGRGYFEYIEENKYSRAKSPQPPVEEEDEHFDDTVVCLDTYNCDLHFKISRDRLSASSLTMESFAFLWAGGRASYGVSKGKVCFEMKVTEKIPVRHLYTKDIDIHEVRIGWSLTTSGMLLGEEEFSYGYSLKGIKTCNCETEDYGEKFDENDVITCFANFESDEVELSYAKNGQDLGVAFKISKEVLAGRPLFPHVLCHNCAVEFNFGQKEKPYFPIPEEYTFIQNVPLEDRVRGPKGPEEKKDCEVVMMIGLPGAGKTTWVTKHAAENPGKYNILGTNTIMDKMMVAGFKKQMADTGKLNTLLQRAPQCLGKFIEIAARKKRNFILDQTNVSAAAQRRKMCLFAGFQRKAVVVCPKDEDYKQRTQKKAEVEGKDLPEHAVLKMKGNFTLPEVAECFDEITYVELQKEEAQKLLEQYKEGRSKKALPPEKKQNTGSKKSNKNKSGKNQFNRGGGHRGRGGFNMRGGNFRGGAPGNRGGYNRRGNMPQRGGGGGKLNHSF

SEQ ID NO: 807502 - protein, 634 aa, Homo sapiens
MSSSPVNVKKLKVSELKEELKKRRLSDKGLKAELMERLQAALDDEEAGGRPAMEPGNGSLDLGGDSAGRSGAGLEQEAAAGGDEEEEEEEEEEEGISALDGDQMELGEENGAAGAADSGPMEEEEAASEDENGDDQGFQEGEDELGDEEEGAGDENGHGEQQPQPPATQQQQPQQQRGAAKEAAGKSSGPTSLFAVTVAPPGARQGQQQAGGDGKTEQKGGDKKRGVKRPREDHGRGYFEYIEENKYSRAKSPQPPVEEEDEHFDDTVVCLDTYNCDLHFKISRDRLSASSLTMESFAFLWAGGRASYGVSKGKVCFEMKVTEKIPVRHLYTKDIDIHEVRIGWSLTTSGMLLGEEEFSYGYSLKGIKTCNCETEDYGEKFDENDVITCFANFESDEVELSYAKNGQDLGVAFKISKEVLAGRPLFPHVLCHNCAVEFNFGQKEKPYFPIPEEYTFIQNVPLEDRVRGPKGPEEKKDCEVVMMIGLPGAGKTTWVTKHAAENPGKYNILGTNTIMDKMMVAGFKKQMADTGKLNTLLQRAPQCLGKFIEIAARKKRNFILDQTNVSAAAQRRKMCLFAGFQRKAVVVCPKDEDYKQRTQKKAEVEGKDLPEHAVLKMKGNFTLPEVPQVSFRQS

SEQ ID NO: 807503 - protein, 632 aa, Homo sapiens
MSSSPVNVKKLKVSELKEELKKRRLSDKGLKAELMERLQAALDDEEAGGRPAMEPGNGSLDLGGDSAGRSGAGLEQEAAAGGDEEEEEEEEEEEGISALDGDQMELGEENGAAGAADSGPMEEEEAASEDENGDDQGFQEGEDELGDEEEGAGDENGHGEQQPQPPATQQQQPQQQRGAAKEAAGKSSGPTSLFAVTVAPPGARQGQQQAGGDGKTEQKGGDKKRGVKRPREDHGRGYFEYIEENKYSRAKSPQPPVEEEDEHFDDTVVCLDTYNCDLHFKISRDRLSASSLTMESFAFLWAGGRASYGVSKGKVCFEMKVTEKIPVRHLYTKDIDIHEVRIGWSLTTSGMLLGEEEFSYGYSLKGIKTCNCETEDYGEKFDENDVITCFANFESDEVELSYAKNGQDLGVAFKISKEVLAGRPLFPHVLCHNCAVEFNFGQKEKPYFPIPEEYTFIQNVPLEDRVRGPKGPEEKKDCEVVMMIGLPGAGKTTWVTKHAAENPGKYNILGTNTIMDKMMVAGFKKQMADTGKLNTLLQRAPQCLGKFIEIAARKKRNFILDQTNVSAAAQRRKMCLFAGFQRKAVVVCPKDEDYKQRTQKKAEVEGKDLPEHAVLKMKGNFTLYSSFLLLVC

SEQ ID NO: 807504 - protein, 526 aa, Homo sapiens
MSSSPVNVKKLKVSELKEELKKRRLSDKGLKAELMERLQAALDDEEAGGRPAMEPGNGSLDLGGDSAGRSGAGLEQEAAAGGDEEEEEEEEEEEGISALDGDQMELGEENGAAGAADSGPMEEEEAASEDENGDDQGFQEGEDELGDEEEGAGDENGHGEQQPQPPATQQQQPQQQRGAAKEAAGKSSGPTSLFAVTVAPPGARQGQQQAGGDGKTEQKGGDKKRGVKRPREDHGRGYFEYIEENKYSRAKSPQPPVEEEDEHFDDTVVCLDTYNCDLHFKISRDRLSASSLTMESFAFLWAGGRASYGVSKGKVCFEMKVTEKIPVRHLYTKDIDIHEVRIGWSLTTSGMLLGEEEFSYGYSLKGIKTCNCETEDYGEKFDENDVITCFANFESDEVELSYAKNGQDLGVAFKISKEVLAGRPLFPHVLCHNCAVEFNFGQKEKPYFPIPEEYTFIQNVPLEDRVRGPKGPEEKKDCEVVMMIGLPGAGKTTWVTKHAAENPGKYNILGTNTIMDKMMVSKMFRA

SEQ ID NO: 807505 - protein, 530 aa, Homo sapiens
MSSSPVNVKKLKVSELKEELKKRRLSDKGLKAELMERLQAALDDEEAGGRPAMEPGNGSLDLGGDSAGRSGAGLEQEAAAGGDEEEEEEEEEEEGISALDGDQMELGEENGAAGAADSGPMEEEEAASEDENGDDQGFQEGEDELGDEEEGAGDENGHGEQQPQPPATQQQQPQQQRGAAKEAAGKSSGPTSLFAVTVAPPGARQGQQQAGGDGKTEQKGGDKKRGVKRPREDHGRGYFEYIEENKYSRAKSPQPPVEEEDEHFDDTVVCLDTYNCDLHFKISRDRLSASSLTMESFAFLWAGGRASYGVSKGKVCFEMKVTEKIPVRHLYTKDIDIHEVRIGWSLTTSGMLLGEEEFSYGYSLKGIKTCNCETEDYGEKFDENDVITCFANFESDEVELSYAKNGQDLGVAFKISKEVLAGRPLFPHVLCHNCAVEFNFGQKEKPYFPIPEEYTFIQNVPLEDRVRGPKGPEEKKDCEVVMMIGLPGAGKTTWVTKHAAVSAICFLKPATIILSIIVFVPRMLYFPGCR

SEQ ID NO: 807506 - protein, 69 aa, Homo sapiens
NRGGYNRRGNMPQRGGGGGGSGGIGYPYPRAPVFPGRGSYSNRGNYNRGGMPNRGNYNQVMIQDPWKHD

SEQ ID NO: 807507 - protein, 133 aa, Homo sapiens
MNYMPGTASLIEDIDKKHLVLLRDGRTLIGFLRSIDQFANLVLHQTVERIHVGKKYGDIPRGIFVVRGENVVLLGEIDLEKESDTPLQQVSIEEILEEQRVEQQTKLEAEKLKVQALKDRGLSIPRADTLDEY

SEQ ID NO: 807508 - protein, 109 aa, Homo sapiens
MEFPLTYLTGTGKGCPPTVRLPRLFLGAHTCYRKWVRVIWRSFRQPPAAESRGRSAGLGRDSGLGPTEAATAVGGKRFWTRWPPAAVHCSIISVQNELYAWHRQPHRGH

SEQ ID NO: 807509 - protein, 133 aa, Homo sapiens; identical to SEQ ID NO: 807507

SEQ ID NO: 807510 - protein, 134 aa, Homo sapiens
MNYMPGTASLIEDIDKKHLVLLRDGRTLIGFLRSIDQFANLVLHQTVERIHVGKKYGDIPRGIFVVRGENVVLLGEIDLEKESDTPLQQVSIEEILEEQRVEQQTKLEAEKLKVQALKDRGLSIPRGGAGPPIP

SEQ ID NO: 807511 - protein, 109 aa, Homo sapiens; identical to SEQ ID NO: 807508

SEQ ID NO: 807512 - protein, 133 aa, Homo sapiens; identical to SEQ ID NO: 807507

SEQ ID NO: 807513 - protein, 133 aa, Homo sapiens; identical to SEQ ID NO: 807507

SEQ ID NO: 807514 - protein, 133 aa, Homo sapiens; identical to SEQ ID NO: 807507

SEQ ID NO: 807515 - protein, 120 aa, Homo sapiens
MRPGSSPRAPECGAPALPRPQLDRLPARPAPSRGRGAPSLRWPAKEVGPRPQIPATCEPGKVCGASAGRRDAARPSRPRSSRVTFSTRRQPGPQRGRWGLRGGPESVRGLPHLGLRVSRL

SEQ ID NO: 807516 - protein, 118 aa, Homo sapiens
MRPGSSPRAPECGAPALPRPQLDRLPARPAPSRGRGAPSLRWPAKEVGPRPQIPATCEPGKVCGASAGRRDAARPSRPRSSRVTFSTRRQPGPQRGRWGLRGGPESVRGLPHLGLREH

SEQ ID NO: 807517 - protein, 130 aa, Homo sapiens
MRPGSSPRAPECGAPALPRPQLDRLPARPAPSRGRGAPSLRWPAKEVGPRPQIPATCEPGKVCGASAGRRDAARPSRPRSSRVTFSTRRQPGPQRGRWGLRGGPESVRGLPHLGLRISGTPLGIFSSWSL

SEQ ID NO: 807518 - protein, 130 aa, Homo sapiens; identical to SEQ ID NO: 807517

SEQ ID NO: 807519 - protein, 130 aa, Homo sapiens; identical to SEQ ID NO: 807517

SEQ ID NO: 807520 - protein, 130 aa, Homo sapiens; identical to SEQ ID NO: 807517

SEQ ID NO: 807521 - protein, 172 aa, Homo sapiens
MRPGSSPRAPECGAPALPRPQLDRLPARPAPSRGRGAPSLRWPAKEVGPRPQIPATCEPGKVCGASAGRRDAARPSRPRSSRVTFSTRRQPGPQRGRWGLRGGPESVRGLPHLGLRHQTCWHHLLVGPCGQGTLHETTSAVLESCCRRRKREEDNTTQEGISTSGHNGSSSC

SEQ ID NO: 807522 - protein, 172 aa, Homo sapiens; identical to SEQ ID NO: 807521

SEQ ID NO: 807523 - protein, 286 aa, Homo sapiens
MEPITKISHIPASRWALSCSLCKECTGTCIQCSMPSCVTAFHVTCAFDHGLEMRTILADNDEVKFKSFCQEHSDGGPRNEPTSEPTEPSQAGEDLEKVTLRKQRLQQLEEDFYELVEPAEVAERLDLAEALVDFIYQYWKLKRKANANQPLLTPKTDEVDNLAQQEQDVLYRRLKLFTHLRQDLERVRNLCYMVTRRERTKHAICKLQEQIFHLQMKLIEQDLCRGRRLPHLPPPPPCALSCGAGSQGGCVFGSWWGYVRGAKGHWPPLLPFTIQLVGPDGGLQGS

SEQ ID NO: 807524 - protein, 235 aa, Homo sapiens
MEPITKISHIPASRWALSCSLCKECTGTCIQCSMPSCVTAFHVTCAFDHGLEMRTILADNDEVKFKSFCQEHSDGGPRNEPTSEPTEPSQAGEDLEKVTLRKQRLQQLEEDFYELVEPAEVAERLDLAEALVDFIYQYWKLKRKANANQPLLTPKTDEVDNLAQQEQDVLYRRLKLFTHLRQDLERVRNLCYMVTRRERTKHAICKLQEQIFHLQMKLIEQDLCRRAMLVGILLE

SEQ ID NO: 807525 - protein, 361 aa, Homo sapiens
MAWQGWPAAWQWVAGCWLLLVLVLVLLVSPRGCRARRGLRGLLMAHSQRLLFRIGYSLYTRTWLGYLFYRQQLRRARNRYPKGHSKTQPRLFNGVKVLPIPVLSDNYSYLIIDTQAQLAVAVDPSDPRAVQASIEKEGVTLVAILCTHKHWDHSGGNRDLSRRHRDCRVYGSPQDGIPYLTHPLCHQDVVSVGRLQIRALATPGHTQGHLVYLLDGEPYKGPSCLFSGDLLFLSGCGRTFEGNAETMLSSLDTVLGLGDDTLLWPGHEYAEENLGFAGVVEPENLARERKMQWVQRQRLERKGTCPSTLGEERSYNPFLRTHCLALQEALGPGPGPTGDDDYSRAQLLEELRRLKDMHKSK

SEQ ID NO: 807526 - protein, 389 aa, Homo sapiens
WDLNMAAVVAATALKGRGARNARVLRGILAGATANKASHNRTRALQSHSSPEGKEEPEPLSPELEYIPRKRGKNPMKAVGLAWYSLYTRTWLGYLFYRQQLRRARNRYPKGHSKTQPRLFNGVKVLPIPVLSDNYSYLIIDTQAQLAVAVDPSDPRAVQASIEKEGVTLVAILCTHKHWDHSGGNRDLSRRHRDCRVYGSPQDGIPYLTHPLCHQDVVSVGRLQIRALATPGHTQGHLVYLLDGEPYKGPSCLFSGDLLFLSGCGRTFEGNAETMLSSLDTVLGLGDDTLLWPGHEYAEENLGFAGVVEPENLARERKMQWVQRQRLERKGTCPSTLGEERSYNPFLRTHCLALQEALGPGPGPTGDDDYSRAQLLEELRRLKDMHKSK

SEQ ID NO: 807527 - protein, 361 aa, Homo sapiens; identical to SEQ ID NO: 807525

SEQ ID NO: 807528 - protein, 361 aa, Homo sapiens; identical to SEQ ID NO: 807525

SEQ ID NO: 807529 - protein, 217 aa, Homo sapiens
MSLLSCRDHSGGNRDLSRRHRDCRVYGSPQDGIPYLTHPLCHQDVVSVGRLQIRALATPGHTQGHLVYLLDGEPYKGPSCLFSGDLLFLSGCGRTFEGNAETMLSSLDTVLGLGDDTLLWPGHEYAEENLGFAGVVEPENLARERKMQWVQRQRLERKGTCPSTLGEERSYNPFLRTHCLALQEALGPGPGPTGDDDYSRAQLLEELRRLKDMHKSK

SEQ ID NO: 807530 - protein, 361 aa, Homo sapiens; identical to SEQ ID NO: 807525

SEQ ID NO: 807531 - protein, 510 aa, Homo sapiens
MAADSDDGAVSAPAASDGGVSKSTTSGEELVVQVPVVDVQSNNFKEMWPSLLLAIKTANFVAVDTELSGLGDRKSLLNQCIEERYKAVCHAARTRSILSLGLACFKRQPDKGEHSYLAQVFNLTLLCMEEYVIEPKSVQFLIQHGFNFNQQYAQGIPYHKGNDKGDESQSQSVRTLFLELIRARRPLVLHNGLIDLVFLYQNFYAHLPESLGTFTADLCEMFPAGIYDTKYAAEFHARFVASYLEYAFRKCERENGKQRAAGSPHLTLEFCNYPSSMRDHIDYRCCLPPATHRPHPTSICDNFSAYGWCPLGPQCPQSHDIDLIIDTDEAAAEDKRRRRRRREKRKRALLNLPGTQTSGEAKDGPPKKQVCGDSIKPEETEQEVAADETRNLPHSKQGNKNDLEMGIKAARPEIADRATSEVPGSQASPNPVPGDGLHRAGFDAFMTGYVMAYVEVSQGPQPCSSGPWLPECHNKVYLSGKAVPLTVAKSQFSRSSKAHNQKMKLTWGSS

SEQ ID NO: 807532 - protein, 546 aa, Homo sapiens
MAADSDDGAVSAPAASDGGVSKSTTSGEELVVQVPVVDVQSNNFKEMWPSLLLAIKTANFVAVDTELSGLGDRKSLLNQCIEERYKAVCHAARTRSILSLGLACFKRQPDKGEHSYLAQVFNLTLLCMEEYVIEPKSVQFLIQHGFNFNQQYAQGIPYHKGNDKGDESQSQSVRTLFLELIRARRPLVLHNGLIDLVFLYQNFYAHLPESLGTFTADLCEMFPAGIYDTKYAAEFHARFVASYLEYAFRKWQCFGAEDSAVNKTDHKTLLLWSLYAEWTITLLRCCSERENGKQRAAGSPHLTLEFCNYPSSMRDHIDYRCCLPPATHRPHPTSICDNFSAYGWCPLGPQCPQSHDIDLIIDTDEAAAEDKRRRRRRREKRKRALLNLPGTQTSGEAKDGPPKKQVCGDSIKPEETEQEVAADETRNLPHSKQGNKNDLEMGIKAARPEIADRATSEVPGSQASPNPVPGDGLHRAGFDAFMTGYVMAYVEVSQGPQPCSSGPWLPECHNKVYLSGKAVPLTVAKSQFSRSSKAHNQKMKLTWGSS

SEQ ID NO: 807533 - protein, 90 aa, Homo sapiens
MAADSDDGAVSAPAASDGGVSKSTTSGEELVVQVPVVDVQSNNFKEMWPFNASGPFKPGGVEWPGEWPFYKHWVGKGKLQSKGGWPFNAS

SEQ ID NO: 807534 - protein, 510 aa, Homo sapiens; identical to SEQ ID NO: 807531

SEQ ID NO: 807535 - protein, 500 aa, Homo sapiens
MWPSLLLAIKTANFVAVDTELSGLGDRKSLLNQCIEERYKAVCHAARTRSILSLGLACFKRQPDKGEHSYLAQVFNLTLLCMEEYVIEPKSVQFLIQHGFNFNQQYAQGIPYHKGNDKGDESQSQSVRTLFLELIRARRPLVLHNGLIDLVFLYQNFYAHLPESLGTFTADLCEMFPAGIYDTKYAAEFHARFVASYLEYAFRKWQCFGAEDSAVNKTDHKTLLLWSLYAEWTITLLRCCSERENGKQRAAGSPHLTLEFCNYPSSMRDHIDYRCCLPPATHRPHPTSICDNFSAYGWCPLGPQCPQSHDIDLIIDTDEAAAEDKRRRRRRREKRKRALLNLPGTQTSGEAKDGPPKKQVCGDSIKPEETEQEVAADETRNLPHSKQGNKNDLEMGIKAARPEIADRATSEVPGSQASPNPVPGDGLHRAGFDAFMTGYVMAYVEVSQGPQPCSSGPWLPECHNKVYLSGKAVPLTVAKSQFSRSSKAHNQKMKLTWGSS

SEQ ID NO: 807536 - protein, 552 aa, Homo sapiens
MAADSDDGAVSAPAASDGERLPRGGVSKSTTSGEELVVQVPVVDVQSNNFKEMWPSLLLAIKTANFVAVDTELSGLGDRKSLLNQCIEERYKAVCHAARTRSILSLGLACFKRQPDKGEHSYLAQVFNLTLLCMEEYVIEPKSVQFLIQHGFNFNQQYAQGIPYHKGNDKGDESQSQSVRTLFLELIRARRPLVLHNGLIDLVFLYQNFYAHLPESLGTFTADLCEMFPAGIYDTKYAAEFHARFVASYLEYAFRKWQCFGAEDSAVNKTDHKTLLLWSLYAEWTITLLRCCSERENGKQRAAGSPHLTLEFCNYPSSMRDHIDYRCCLPPATHRPHPTSICDNFSAYGWCPLGPQCPQSHDIDLIIDTDEAAAEDKRRRRRRREKRKRALLNLPGTQTSGEAKDGPPKKQVCGDSIKPEETEQEVAADETRNLPHSKQGNKNDLEMGIKAARPEIADRATSEVPGSQASPNPVPGDGLHRAGFDAFMTGYVMAYVEVSQGPQPCSSGPWLPECHNKVYLSGKAVPLTVAKSQFSRSSKAHNQKMKLTWGSS

SEQ ID NO: 807537 - protein, 396 aa, Homo sapiens
MLGFLSARQTGLEDPLRLRRAESTRRVLGLELNKDRDVERIHGGGINTLDIEPVEGRYMLSGGSDGVIVLYDLENSSRQSYYTCKAVCSIGRDHPDVHRYSVETVQWYPHDTGMFTSSSFDKTLKVWDTNTLQTADVFNFEETVYSHHMSPVSTKHCLVAVGTRGPKVQLCDLKSGSCSHILQGHRQEILAVSWSPRYDYILATASADSRVKLWDVRRASGCLITLDQHNGKKSQAVESANTAHNGKVNGLCFTSDGLHLLTVGTDNRMRLWNSSNGENTLVNYGKVCNNSKKGLKFTVSCGCSSEFVFVPYGSTIAVYTVYSGEQITMLKGHYKTVDCCVFQSNFQELYSGSRDCNILAWVPSLYEPVPDDDETTTKSQLNPAFEDAWSSSDEEG

SEQ ID NO: 807538 - protein, 205 aa, Homo sapiens
MLGFLSARQTGLEDPLRLRRAESTRRVLGLELNKDRDVERIHGGGINTLDIEPVEGRYMLSGGSDGVIVLYDLENSSRQSYYTCKAVCSIGRDHPDVHRYSVETVQWYPHDTGMFTSSSFDKTLKVWDTNTLQTADVFNFEETVYSHHMSPVSTKHCLVAVGTRGPKVQLCDLKSGSCSHILQGIFILFQTATTLSKRFNKKKRY

SEQ ID NO: 807539 - protein, 330 aa, Homo sapiens
MLGFLSARQTGLEDPLRLRRAESTRRVLGLELNKDRDVERIHGGGINTLDIEPVEGRYMLSGGSDGVIVLYDLENSSRQSYYTCKAVCSIGRDHPDVHRYSVETVQWYPHDTGMFTSSSFDKTLKVWDTNTLQTADVFNFEETVYSHHMSPVSTKHCLVAVGTRGPKVQLCDLKSGSCSHILQGHRQEILAVSWSPRYDYILATASADSRVKLWDVRRASGCLITLDQHNGKKSQAVESANTAHNGKVNGLCFTSDGLHLLTVGTDNRMRLWNSSNGENTLELYSGSRDCNILAWVPSLYEPVPDDDETTTKSQLNPAFEDAWSSSDEEG

SEQ ID NO: 807540 - protein, 433 aa, Homo sapiens
TVGLLALSSVMATSSAPAGVRTRYAGVFVRTPNGFGGPSSPSESRVNTEFTDNSVLKSLCGQRVLGLELNKDRDVERIHGGGINTLDIEPVEGRYMLSGGSDGVIVLYDLENSSRQSYYTCKAVCSIGRDHPDVHRYSVETVQWYPHDTGMFTSSSFDKTLKVWDTNTLQTADVFNFEETVYSHHMSPVSTKHCLVAVGTRGPKVQLCDLKSGSCSHILQGHRQEILAVSWSPRYDYILATASADSRVKLWDVRRASGCLITLDQHNGKKSQAVESANTAHNGKVNGLCFTSDGLHLLTVGTDNRMRLWNSSNGENTLVNYGKVCNNSKKGLKFTVSCGCSSEFVFVPYGSTIAVYTVYSGEQITMLKGHYKTVDCCVFQSNFQELYSGSRDCNILAWVPSLYEPVPDDDETTTKSQLNPAFEDAWSSSDEEG

SEQ ID NO: 807541 - protein, 338 aa, Homo sapiens
MLSGGSDGVIVLYDLENSSRQSYYTCKAVCSIGRDHPDVHRYSVETVQWYPHDTGMFTSSSFDKTLKVWDTNTLQTADVFNFEETVYSHHMSPVSTKHCLVAVGTRGPKVQLCDLKSGSCSHILQGHRQEILAVSWSPRYDYILATASADSRVKLWDVRRASGCLITLDQHNGKKSQAVESANTAHNGKVNGLCFTSDGLHLLTVGTDNRMRLWNSSNGENTLVNYGKVCNNSKKGLKFTVSCGCSSEFVFVPYGSTIAVYTVYSGEQITMLKGHYKTVDCCVFQSNFQELYSGSRDCNILAWVPSLYEPVPDDDETTTKSQLNPAFEDAWSSSDEEG

SEQ ID NO: 807542 - protein, 500 aa, Homo sapiens
MLGFLSARQTGLEDPLRLRRAESTRRVLGLELNKDRDVERIHGGGINTLDIEPVEGRYMLSGGSDGVIVLYDLENSSRQSYYTCKAVCSIGRDHPDVHRYSVETVQWYPHDTGMFTSSSFDKTLKVWDTNTLQTESRSVTHAGVQWPVAQISAHCNLPVLSSSNSPASASRVSGTTGVCHHAWLIFVFLVETGFRHVGQAGLELLTSVDPPTSASQSVGITGVSHHARPIYCVVTIKTADVFNFEETVYSHHMSPVSTKHCLVAVGTRGPKVQLCDLKSGSCSHILQGHRQEILAVSWSPRYDYILATASADSRVKLWDVRRASGCLITLDQHNGKKSQAVESANTAHNGKVNGLCFTSDGLHLLTVGTDNRMRLWNSSNGENTLVNYGKVCNNSKKGLKFTVSCGCSSEFVFVPYGSTIAVYTVYSGEQITMLKGHYKTVDCCVFQSNFQELYSGSRDCNILAWVPSLYEPVPDDDETTTKSQLNPAFEDAWSSSDEEG

SEQ ID NO: 807543 - protein, 159 aa, Homo sapiens
MLGFLSARQTGLEDPLRLRRAESTRRVLGLELNKDRDVERIHGGGINTLDIEPVEGRYMLSGGSDGVIVLYDLENSSRQSYYTCKAVCSIGRDHPDVHRYSVETVQWYPHDTGMFTSSSFDKTLKVWDTNTLQTESRSVTHAGVQWPVAQSQLTATSPS

SEQ ID NO: 807544 - protein, 174 aa, Homo sapiens
MLGFLSARQTGLEDPLRLRRAESTRRVLGLELNKDRDVERIHGGGINTLDIEPVEGRYMLSGGSDGVIVLYDLENSSRQSYYTCKAVCSIGRDHPDVHRYSVETVQWYPHDTGMFTSSSFDKTLKVWDTNTLQTESRSVTHAGVAVSQDRATAHQPGQQSDSISKKKKKRIMFL

SEQ ID NO: 807545 - protein, 166 aa, Homo sapiens
MLSGGSDGVIVLYDLENSSRQSYYTCKAVCSIGRDHPDVHRYSVETVQWYPHDTGMFTSSSFDKTLKVWDTNTLQTADVFNFEETVYSHHMSPVSTKHCLVAVGTRGPKVQLCDLKSGSCSHILQGHRQEILAVSWSPRYDYILATASAGQQSNIMGMFPRASGSV

SEQ ID NO: 807546 - protein, 358 aa, Homo sapiens [sequence omitted]

SEQ ID NO: 807547 - protein, 338 aa, Homo sapiens; identical to SEQ ID NO: 807541

SEQ ID NO: 807548 - protein, 365 aa, Homo sapiens
MLGFLSARQTGLEDPLRLRRAESTRRVLGLELNKDRDVERIHGGGINTLDIEPVEGRYMLSGGSDGVIVLYDLENSSRQSYYTCKAVCSIGRDHPDVHRYSVETVQWYPHDTGMFTSSSFDKTLKVWDTNTLQTADVFNFEETVYSHHMSPVSTKHCLVAVSWSPRYDYILATASADSRVKLWDVRRASGCLITLDQHNGKKSQAVESANTAHNGKVNGLCFTSDGLHLLTVGTDNRMRLWNSSNGENTLVNYGKVCNNSKKGLKFTVSCGCSSEFVFVPYGSTIAVYTVYSGEQITMLKGHYKTVDCCVFQSNFQELYSGSRDCNILAWVPSLYEPVPDDDETTTKSQLNPAFEDAWSSSDEEG

SEQ ID NO: 807549 - protein, 173 aa, Homo sapiens
MLGFLSARQTGLEDPLRLRRAESTRSMLSGGSDGVIVLYDLENSSRQSYYTCKAVCSIGRDHPDVHRYSVETVQWYPHDTGMFTSSSFDKTLKVWDTNTLQTADVFNFEETVYSHHMSPVSTKHCLVAVGTRGPKVQLCDLKSGSCSHILQGIFILFQTATTLSKRFNKKKRY

SEQ ID NO: 807550 - protein, 145 aa, Homo sapiens
LLSAPSHSQLINESVDEADMENAGHPSADTPTATNYFLQYISSSLENSTNSADASSNKFVFGQNMSERVLSPPKLNEVSSDANRENAAAESGSESSSQEATPEKESLAESAAAYTKATARKCLLEKVEVITGEEFCHLGILKSQL

SEQ ID NO: 807551 - protein, 499 aa, Homo sapiens
MADLANEEKPAIAPPVFVFQKDKGQKRSAGGSSPEGGEDSDREDGNYCPPVKRERTSSLTQFPPSQSEERSSGFRLKPPTLIHGQAPSAGLPSQKPKEQQRSVLRPAVLQAPQPKALSQTVPSSGTNGVSLPADCTGAVPAASPDTAAWRSPSEAADEVCALEEKEPQKNESSNASEEEACEKKDPATQQAFVFGQNLRDRVKLINESVDEADMENAGHPSADTPTATNYFLQYISSSLENSTNSADASSNKFVFGQNMSERVLSPPKLNEVSSDANRENAAAESGSESSSQEATPEKESLAESAAAYTKATARKCLLEKVEVITGEEAESNVLQMQCKLFVFDKTSQSWVERGRGLLRLNDMASTDDGTLQSRLVMRTQGSLRLILNTKLWAQMQIDKASEKSIRITAMDTEDQGVKVFLISASSKDTGQLYAALHHRILALRSRVEQEQEAKMPAPEPGAAPSNEEDDSDDDDVLAPSGATAAGAGDEGDGQTTGST

SEQ ID NO: 807552 - protein, 470 aa, Homo sapiens
MADLANEEKPAIAPPVFVFQKDKGQKRSAGGSSPEGGEDSDREDGNYCPPVKRERTSSLTQFPPSQSEERSSGFRLKPPTLIHGQAPSAGLPSQKPKEQQRSVLRPAVLQAPQPKALSQTVPSSGTNGVSLPADCTGAVPAASPDTAAWRSPSEAADEVCALEEKEPQKNESSNASEEEACEKKDPATQQAFVFGQNLRDRVKLINESVDEADMENAGHPSADTPTATNYFLQYISSSLENSTNSADASSNKFVFGQNMSERVLSPPKLNEVSSDANRENAAAESGSESSSQEATPEKESLAESAAAYTKATARKCLLEKVEERGRGLLRLNDMASTDDGTLQSRLVMRTQGSLRLILNTKLWAQMQIDKASEKSIRITAMDTEDQGVKVFLISASSKDTGQLYAALHHRILALRSRVEQEQEAKMPAPEPGAAPSNEEDDSDDDDVLAPSGATAAGAGDEGDGQTTGST

SEQ ID NO: 807553 - protein, 375 aa, Homo sapiens
MADLANEEKPAIAPPVFVFQKDKGQKRSAGGSSPEGGEDSDREDGNYCPPVKRERTSSLTQFPPSQSEERSSGFRLKPPTLIHGQAPSAGLPSQKPKEQQRSVLRPAVLQAPQPKALSQTVPSSGTNGVSLPADCTGAVPAASPDTAAWRSPSEAADEVCALEEKEPQKNESSNASEEEACEKKDPATQQAFVFGQNLRDRVKLINESVDEADMENAGHPSADTPTATNYFLQYISSSLENSTNSADASSNKFVFGQNMSERVLSPPKLNEVSSDANRENAAAESGSESSSQEATPEKESLAESAAAYTKATARKCLLEKVEVITGEEAESNVLQMQCKLFVFDKTSQSWVERGRGLLRLNDMASTDDGQTTGST

SEQ ID NO: 807554 - protein, 592 aa, Homo sapiens
  misc_feature (19)..(19): Xaa can be any naturally occurring amino acid
PRTPGPSMSVHYEPPGNLXAVSAGIRDRLANEEKPAIAPPVFVFQKDKGQKSPAEQKNLSDSGEEPRGEAEAPHHGTGHPESAGEHALEPPAPAGASASTPPPPAPEAQLPPFPRELAGRSAGGSILQGGEDSDREDGNYCPPVKRERTSSLTQFPPSQSEERSSGFRLKPPTLIHGQAPSAGLPSQKPKEQQRSVLRPAVLQAPQPKALSQTVPSSGTNGVSLPADCTGAVPAASPDTAAWRSPSEAADEVCALEEKEPQKNESSNASEEEACEKKDPATQQAFVFGQNLRDRVKLINESVDEADMENAGHPSADTPTATNYFLQYISSSLENSTNSADASSNKFVFGQNMSERVLSPPKLNEVSSDANRENAAAESGSESSSQEATPEKESLAESAAAYTKATARKCLLEKVEVITGEEAESNVLQMQCKLFVFDKTSQSWVERGRGLLRLNDMASTDDGTLQSRLVMRTQGSLRLILNTKLWAQMQIDKASEKSIRITAMDTEDQGVKVFLISASSKDTGQLYAALHHRILALRSRVEQEQEAKMPAPEPGAAPSNEEDDSDDDDVLAPSGATAAGAGDEGDGQTTGST

SEQ ID NO: 807555 - protein, 286 aa, Homo sapiens
MENAGHPSADTPTATNYFLQYISSSLENSTNSADASSNKFVFGQNMSERVLSPPKLNEVSSDANRENAAAESGSESSSQEATPEKESLAESAAAYTKATARKCLLEKVEVITGEEAESNVLQMQCKLFVFDKTSQSWVERGRGLLRLNDMASTDDGTLQSRLVMRTQGSLRLILNTKLWAQMQIDKASEKSIRITAMDTEDQGVKVFLISASSKDTGQLYAALHHRILALRSRVEQEQEAKMPAPEPGAAPSNEEDDSDDDDVLAPSGATAAGAGDEGDGQTTGST

SEQ ID NO: 807556 - protein, 198 aa, Homo sapiens [sequence omitted]

SEQ ID NO: 807557 - protein, 198 aa, Homo sapiens [sequence omitted]

SEQ ID NO: 807558 - protein, 285 aa, Homo sapiens
  misc_feature (236)..(236): Xaa can be any naturally occurring amino acid
MADLANEEKPAIAPPVFVFQKDKGQKSPAEQKNLSDSGEEPRGEAEAPHHGTGHPESAGEHALEPPAPAGASASTPPPPAPEAQLPPFPRELAGRSAGGSSPEGGEDSDREDGNYCPPVKRERTSSLTQFPPSQSEERSSGFRLKPPTLIHGQAPSAGLPSQKPKEQQRSVLRPAVLQAPQPKALSQTVPSSGTNGVSLPADCTGAVPAASPDTAAWRSPSEAADEVCALERKSPXKNESSNASYTYLSLGFYFDRDDVALEGVSHFFRELAEEKREGYERLLKM

SEQ ID NO: 807559 - protein, 217 aa, Homo sapiens
  misc_feature (168)..(168): Xaa can be any naturally occurring amino acid
MADLANEEKPAIAPPVFVFQKDKGQKRSAGGSSPEGGEDSDREDGNYCPPVKRERTSSLTQFPPSQSEERSSGFRLKPPTLIHGQAPSAGLPSQKPKEQQRSVLRPAVLQAPQPKALSQTVPSSGTNGVSLPADCTGAVPAASPDTAAWRSPSEAADEVCALERKSPXKNESSNASYTYLSLGFYFDRDDVALEGVSHFFRELAEEKREGYERLLKM

SEQ ID NO: 807560 - protein, 567 aa, Homo sapiens
MADLANEEKPAIAPPVFVFQKDKGQKSPAEQKNLSDSGEEPRGEAEAPHHGTGHPESAGEHALEPPAPAGASASTPPPPAPEAQLPPFPRELAGRSAGGSSPEGGEDSDREDGNYCPPVKRERTSSLTQFPPSQSEERSSGFRLKPPTLIHGQAPSAGLPSQKPKEQQRSVLRPAVLQAPQPKALSQTVPSSGTNGVSLPADCTGAVPAASPDTAAWRSPSEAADEVCALEEKEPQKNESSNASEEEACEKKDPATQQAFVFGQNLRDRVKLINESVDEADMENAGHPSADTPTATNYFLQYISSSLENSTNSADASSNKFVFGQNMSERVLSPPKLNEVSSDANRENAAAESGSESSSQEATPEKESLAESAAAYTKATARKCLLEKVEVITGEEAESNVLQMQCKLFVFDKTSQSWVERGRGLLRLNDMASTDDGTLQSRLVMRTQGSLRLILNTKLWAQMQIDKASEKSIRITAMDTEDQGVKVFLISASSKDTGQLYAALHHRILALRSRVEQEQEAKMPAPEPGAAPSNEEDDSDDDDVLAPSGATAAGAGDEGDGQTTGST

SEQ ID NO: 807561 - protein, 429 aa, Homo sapiens
MENAGHPSADTPTATNYFLQYISSRCVSRCQRPAWHGDAGGREGFCQRGVCGPRARLRPRIQVALRPLSLIPHSGHNLGWARVVGLVLGFTGRLRQDQSSVGLSRGPWRLQPSPWSVPSVLWTSCPEQNRRGQRRLRRPLILGLGTWGKDLIMSLTDMAGGKATHGPAAPPGVSEESVSRLGDGRVEQVEGGFPHAVGPLHQGELRVNVFNGKGGVWLPASDTPPRAQWRRPLHCALCVSVCSMGTHTFAWPRSHVTPTLIAHLLFSLENSTNSADASSNKFVFGQNMSERVLSPPKLNEVSSDANRENAAAESGSESSSQEATPEKESLAESAAAYTKATARKCLLEKVEVITGEEAESNVLQMQCKLFVFDKTSQSWVERGRGLLRLNDMASTDDGTLQSRLGELPTAGAVAGSPWGGLGTMQFQRE

SEQ ID NO: 807562 - protein, 184 aa, Homo sapiens
FSSFSVDSDREDGNYCPPVKRERTSSLTQFPPSQSEERSSGFRLKPPTLIHGQAPSAGLPSQKPKEQQRSVLRPAVLQAPQPKALSQTVPSSGTNGVSLPADCTGAVPAASPDTAAWRSPSEAADEVCALEEKEPQKNESSNASEEEACEKKDPATQQAFVFGQNLRDRVKLINESVDEADDFK

SEQ ID NO: 807563 - protein, 499 aa, Homo sapiens; identical to SEQ ID NO: 807551

SEQ ID NO: 807564 - protein, 398 aa, Homo sapiens
MADLANEEKPAIAPPVFVFQKDKGQKRSAGGSSPEGGEDSDREDGNYCPPVKRERTSSLTQFPPSQSEERSSGFRLKPPTLIHGQAPSAGLPSQKPKEQQRSVLRPAVLQAPQPKALSQTVPSSGTNGVSLPADCTGAVPAASPDTAAWRSPSEAADEVCALEEKEPQKNESSNASEEEACEKKDPATQQAFVFGQNLRDRVKLINESVDEADMENAGHPSADTPTATNYFLQYISSSLENSTNSADASSNKFVFGQNMSERVLSPPKLNEVSSDANRENAAAESGSESSSQEATPEKESLAESAAAYTKATARKCLLEKVEVITGEEAESNVLQMQCKLFVFDKTSQSWVLLRHPHPSHPAVGPCLCGEQPALCPCPGLPNYRPGTPAQLGGLLVRV

SEQ ID NO: 807565 - protein, 286 aa, Homo sapiens; identical to SEQ ID NO: 807555

SEQ ID NO: 807566 - protein, 212 aa, Homo sapiens
  misc_feature (15)..(16): Xaa can be any naturally occurring amino acid
MTDKLTDCILSLAPXXGPTRQLVLVTKGTGRRPGAHSGREPGCTPGCCFVRLSTRPPAPTPPAASRCGAGNHTPHWAGHSLDPHVLFKSRLGNCLNVVWDTRPHHIDERTNKNISSLPSFELKWHIKTCHGFSLGLETSFLHPACRQPLGPARAPGFSATHTLPTLLWGPAFVGSSQPSAPAQGSPTIGLGPPPSLGGCSYECRHWAHWTCC

SEQ ID NO: 807567 - protein, 195 aa, Homo sapiens
MADLANEEKPAIAPPVFVFQKDKGQKRSAGGSSPEGGEDSDREDGNYCPPVKRERTSSLTQFPPSQSEERSSGFRLKPPTLIHGQAPSAGLPSQKPKEQQRSVLRPAVLQAPQPKALSQTVPSSGTNGVSLPADCTGAVPAASPDTAAWRSPSEAADEVCALEEKEPQKNESSNASEEEACEKKDPATVYVAYLL

SEQ ID NO: 807568 - protein, 464 aa, Homo sapiens
MDFQHRPGGKTGSGGVASSSESNRDRRERLRQLALETIDINKDPYFMKNHLGSYECKLCLTLHNNEGSYLAHTQGKKHQTNLARRAAKEAKEAPAQPAPEKVKVEVKKFVKIGRPGYKVTKQRDSEMGQQSLLFQIDYPEIAEGIMPRHRFMSAYEQRIEPPDRRWQYLLMAAEPYETIAFKVPSREIDKAEGKFWTHWNRETKQFFLQFHFKMEKPPAPPSLPAGPPGVKRPPPPLMNGLPPRPPLPESLPPPPPGGLPLPPMPPTGPAPSGPPGPPQLPPPAPGVHPPAPVVHPPASGVHPPAPGVHPPAPGVHPPAPGVHPPTSGVHPPAPGVHPPAPGVHPPAPGVHPPAPGVHPPAPGVHPPPSAGVHPQAPGVHPAAPAVHPQAPGVHPPAPGMHPQAPGVHPQPPGVHPSAPGVHPQPPGVHPSNPGVHPPTPMPPMLRPPLPSEGPGNIPPPPPTN

SEQ ID NO: 807569 - protein, 560 aa, Homo sapiens
MRDLPLTSLALVLSALGALLGTEALRAEEPAVGTSGLIFREDLDWPPGSPQEPLCLVALGGDSNGSSSPLRVVGALSAYEQAFLGAVQRARWGPRDLATFGVCNTGDRQAALPSLRRLGAWLRDPGGQRLVVLHLEEVTWEPTPSLRFQEPPPGGAGPPELALLVLYPGPGPEVTVTRAGLPGAQSLCPSRDTRYLVLAVDRPAGAWRGSGLALTLQPRGEDSRLSTARLQALLFGDDHRCFTRMTPALLLLPRSEPAPLPAHGQLDTVPFPPPRPSAELEESPPSADPFLETLTRLVRALRVPPARASAPRLALDPDALAGFPQGLVNLSDPAALERLLDGEEPLLLLLRPTAATTGDPAPLHDPTSAPWATALARRVAAELQAAAAELRSLPGLPPATAPLLARLLALCPGGPGGLGDPLRALLLLKALQGLRVEWRGRDPRGPGRAQRSAGATAADGPCALRELSVDLRAERSVLIPETYQANNCQGVCGWPQSDRNPRYGNHVVLLLKMQARGAALARPPCCVPTAYAGKLLISLSEERISAHHVPNMVATECGCR

SEQ ID NO: 807570 - protein, 464 aa, Homo sapiens; identical to SEQ ID NO: 807568

SEQ ID NO: 807571 - protein, 464 aa, Homo sapiens; identical to SEQ ID NO: 807568

SEQ ID NO: 807572 - protein, 464 aa, Homo sapiens; identical to SEQ ID NO: 807568

SEQ ID NO: 807573 - protein, 464 aa, Homo sapiens; identical to SEQ ID NO: 807568

SEQ ID NO: 807574 - protein, 464 aa, Homo sapiens; identical to SEQ ID NO: 807568

SEQ ID NO: 807575 - protein, 356 aa, Homo sapiens
  misc_feature (332)..(332): Xaa can be any naturally occurring amino acid
  misc_feature (334)..(334): Xaa can be any naturally occurring amino acid
MDFQHRPGGKTGSGGVASSSESNRDRRERLRQLALETIDINKDPYFMKNHLGSYECKLCLTLHNNEGSYLAHTQGKKHQTNLARRAAKEAKEAPAQPAPEKVKVEVKKFVKIGRPGYKVTKQRDSEMGQQSLLFQIDYPEIAEGIMPRHRFMSAYEQRIEPPDRRWQYLLMAAEPYETIAFKVPSREIDKAEGKFWTHWNRETKQFFLQFHFKMEKPPAPPSLPAGPPGVKRPPPPLMNGLPPRPPLPESLPPPPPGGLPLPPMPPTGPAPSGPPGPPQLPPPAPGVHPPAPVVHPPASGVHPPAPGVHPPAPGVHPPAPGVHPPTSGVHPXLXSPQPRVNTTRSHHSLRSHNPGH

SEQ ID NO: 807576 - protein, 238 aa, Homo sapiens
MDFQHRPGGKTGSGGVASSSESNRDRRERLRQLALETIDINKDPYFMKNHLGSYECKLCLTLHNNEGSYLAHTQGKKHQTNLARRAAKEAKEAPAQPAPEKVKVEVKKFVKIGRPGYKVTKQRDSEMGQQSLLFQIDYPEIAEGIMPRHRFMSAYEQRIEPPDRRWQYLLMAAEPYETIAFKVPSREIDKAEGKFWTHWNRETKQFFLQFHFKMEKPPAPPSLPAGPPGVKRPPPPAH

SEQ ID NO: 807577 - protein, 464 aa, Homo sapiens; identical to SEQ ID NO: 807568

SEQ ID NO: 807578 - protein, 464 aa, Homo sapiens; identical to SEQ ID NO: 807568

SEQ ID NO: 807579 - protein, 418 aa, Homo sapiens
MKNHLGSYECKLCLTLHNNEGSYLAHTQGKKHQTNLARRAAKEAKEAPAQPAPEKVKVEVKKFVKIGRPGYKVTKQRDSEMGQQSLLFQIDYPEIAEGIMPRHRFMSAYEQRIEPPDRRWQYLLMAAEPYETIAFKVPSREIDKAEGKFWTHWNRETKQFFLQFHFKMEKPPAPPSLPAGPPGVKRPPPPLMNGLPPRPPLPESLPPPPPGGLPLPPMPPTGPAPSGPPGPPQLPPPAPGVHPPAPVVHPPASGVHPPAPGVHPPAPGVHPPAPGVHPPTSGVHPPAPGVHPPAPGVHPPAPGVHPPAPGVHPPAPGVHPPPSAGVHPQAPGVHPAAPAVHPQAPGVHPPAPGMHPQAPGVHPQPPGVHPSAPGVHPQPPGVHPSNPGVHPPTPMPPMLRPPLPSEGPGNIPPPPPTN

SEQ ID NO: 807580 - protein, 436 aa, Homo sapiens
MDFQHRPGGKTGSGGVASSSESNRDRRERLRQLALETIDINKTRYFMKKHQTNLARRAAKEAKEAPAQPAPEKVKVEVKKFVKIGRPGYKVTKQRDSEMGQQSLLFQIDYPEIAEGIMPRHRFMSAYEQRIEPPDRRWQYLLMAAEPYETIAFKVPSREIDKAEGKFWTHWNRETKQFFLQFHFKMEKPPAPPSLPAGPPGVKRPPPPLMNGLPPRPPLPESLPPPPPGGLPLPPMPPTGPAPSGPPGPPQLPPPAPGVHPPAPVVHPPASGVHPPAPGVHPPAPGVHPPAPGVHPPTSGVHPPAPGVHPPAPGVHPPAPGVHPPAPGVHPPAPGVHPPPSAGVHPQAPGVHPAAPAVHPQAPGVHPPAPGMHPQAPGVHPQPPGVHPSAPGVHPQPPGVHPSNPGVHPPTPMPPMLRPPLPSEGPGNIPPPPPTN

SEQ ID NO: 807581 - protein, 338 aa, Homo sapiens
MGQQSLLFQIDYPEIAEGIMPRHRFMSAYEQRIEPPDRRWQYLLMAAEPYETIAFKVPSREIDKAEGKFWTHWNRETKQFFLQFHFKMEKPPAPPSLPAGPPGVKRPPPPLMNGLPPRPPLPESLPPPPPGGLPLPPMPPTGPAPSGPPGPPQLPPPAPGVHPPAPVVHPPASGVHPPAPGVHPPAPGVHPPAPGVHPPTSGVHPPAPGVHPPAPGVHPPAPGVHPPAPGVHPPAPGVHPPPSAGVHPQAPGVHPAAPAVHPQAPGVHPPAPGMHPQAPGVHPQPPGVHPSAPGVHPQPPGVHPSNPGVHPPTPMPPMLRPPLPSEGPGNIPPPPPTN

SEQ ID NO: 807582 - protein, 169 aa, Homo sapiens
MDFHYPRQLQGSTPRPQWCIPLHLGSIPQLLASTPQLLASIPQPLGSTHQPLGSTPQLLESTLQPPGFTHQPPESTHQPLGFTHQPQGSILPHQRGFTPRPRGCTQQPPPFTLRPQGCTHQPQGCTLRPRGSTPNLPGSIRRLLGSTLSLREFTPQILGCTPQLPCPQC

SEQ ID NO: 807583 - protein, 512 aa, Homo sapiens
MRDLPLTSLALVLSALGALLGTEALRAEEPAVGTSGLIFREDLDWPPGSPQEPLCLVALGGDSNGSSSPLRVVGALSAYEQAFLGAVQRARWGPRDLATFGVCNTGDRQAALPSLRRLGAWLRDPGGQRLVVLHLEEEPLPLPRHPLPGVSGGPPCGGLARLRAGLDPAAPRRGLPAEYRPAAGTAVRRRPPLLHTDDPGPAPAAAVRARAAACARQLDTVPFPPPRPSAELEESPPSADPFLETLTRLVRALRVPPARASAPRLALDPDALAGFPQGLVNLSDPAALERLLDGEEPLLLLLRPTAATTGDPAPLHDPTSAPWATALARRVAAELQAAAAELRSLPGLPPATAPLLARLLALCPGGPGGLGDPLRALLLLKALQGLRVEWRGRDPRGPGRAQRSAGATAADGPCALRELSVDLRAERSVLIPETYQANNCQGVCGWPQSDRNPRYGNHVVLLLKMQARGAALARPPCCVPTAYAGKLLISLSEERISAHHVPNMVATECGCR

SEQ ID NO: 807584 - protein, 185 aa, Homo sapiens
MDFQHRPGGKTGSGGVASSSESNRDRRERLRQLALETIDINKDPYFMKNHLGSYECKLCLTLHNNEGSYLAHTQGKKHQTNLARRAAKEAKEAPAQPAPEKVKVEVKKFVKIGRPGYKAPNSHAPNAEAPTSLRRPREHTSPSPNQLRSCSLPQQAQRQVLLPFPTERRLLFCTAPRSLNSLPQP

SEQ ID NO: 807585 - protein, 65 aa, Homo sapiens
MAQASPAVPAAVTWEPTPSLRFQEPPPGGAGPPELALLVLYPGPGPEVTVTRAGLPGAQVPGSCM

SEQ ID NO: 807586 - protein, 69 aa, Homo sapiens
WRIRHEGEAPGVHPQPPGVHPSAPGVHPQPPGVHPSNPGVHPPTPMPPMLRPPLPSEGPGNIPPPPPTN

SEQ ID NO: 807587 - protein, 279 aa, Homo sapiens
MDFQHRPGGKTGSGGVASSSESNRDRRERLRQLALETIDINKDPYFMKNHLGSYECKLCLTLHNNEGSYLAHTQGKKHQTNLARRAAKEAKEAPAQPAPEKVKVEVKKFVKIGRPGYKVTKQRDSEMGQQSLLFQIDYPEIAEGIMPRHRFMSAYEQRIEPPDRRWQYLLMAAEPYETIAFKVPSREIDKAEGKFWTHWNRETKQFFLQFHFKMEKPPAPPSLPAGPPGVKRPPPPLMNGLPPRPPLPESLPPPQVRCHSKGRASARDHIDDSNHGEYI

SEQ ID NO: 807588 - protein, 222 aa, Homo sapiens
MDFQHRPGGKTGSGGVASSSESNRDRRERLRQLALETIDINKDPYFMKNHLGSYECKLCLTLHNNEGSYLAHTQGKKHQTNLARRAAKEAKEAPAQPAPEKVKVEVKKFVKIGRPGYKVTKQRDSEMGQQSLLFQIDYPEIAEGIMPRHRFMSAYEQRIEPPDRRWQYLLMAAEPYETIAFKVRAERSTRAERASCHTGPGTSVFLRPKESPPTGPGGRKSC

SEQ ID NO: 807589 - protein, 464 aa, Homo sapiens; identical to SEQ ID NO: 807568

SEQ ID NO: 807590 - protein, 464 aa, Homo sapiens; identical to SEQ ID NO: 807568

SEQ ID NO: 807591 - protein, 358 aa, Homo sapiens
MDFQHRPGGKTGSGGVASSSESNRDRRERLRQLALETIDINKDPYFMKNHLGSYECKLCLTLHNNEGSYLAHTQGKKHQTNLARRAAKEAKEAPAQPAPEKVKVEVKKFVKIGRPGYKVTKQRDSEMGQQSLLFQIDYPEIAEGIMPRHRFMSAYEQRIEPPDRRWQYLLMAAEPYETIAFKVPSREIDKAEGKFWTHWNRETKQFFLQFHFKMEKPPAPPSLPAGPPGVKRPPPPLMNGLPPRPPLPESLPPPPPGGLPLPPMPPTGPAPSGPPGPPQLPPPAPGVHPPAPGMHPQAPGVHPQPPGVHPSAPGVHPQPPGVHPSNPGVHPPTPMPPMLRPPLPSEGPGNIPPPPPTN

SEQ ID NO: 807592 - protein, 323 aa, Homo sapiens
  misc_feature (250)..(250): Xaa can be any naturally occurring amino acid
  misc_feature (252)..(252): Xaa can be any naturally occurring amino acid
  misc_feature (256)..(256): Xaa can be any naturally occurring amino acid
  misc_feature (259)..(259): Xaa can be any naturally occurring amino acid
  misc_feature (262)..(262): Xaa can be any naturally occurring amino acid
  misc_feature (264)..(265): Xaa can be any naturally occurring amino acid
  misc_feature (270)..(270): Xaa can be any naturally occurring amino acid
  misc_feature (273)..(275): Xaa can be any naturally occurring amino acid
  misc_feature (283)..(284): Xaa can be any naturally occurring amino acid
  misc_feature (286)..(286): Xaa can be any naturally occurring amino acid
  misc_feature (288)..(289): Xaa can be any naturally occurring amino acid
  misc_feature (293)..(293): Xaa can be any naturally occurring amino acid
  misc_feature (295)..(295): Xaa can be any naturally occurring amino acid
  misc_feature (297)..(298): Xaa can be any naturally occurring amino acid
  misc_feature (303)..(303): Xaa can be any naturally occurring amino acid
  misc_feature (322)..(322): Xaa can be any naturally occurring amino acid
MDFQHRPGGKTGSGGVASSSESNRDRRERLRQLALETIDINKDPYFMKNHLGSYECKLCLTLHNNEGSYLAHTQGKKHQTNLARRAAKEAKEAPAQPAPEKVKVEVKKFVKIGRPGYKVTKQRDSEMGQQSLLFQIDYPEIAEGIMPRHRFMSAYEQRIEPPDRRWQYLLMAAEPYETIAFKVPSREIDKAEGKFWTHWNRETKQFFLQFHFKMEKPPAPPSLPAGPPGVKRPPPPLMNGLPPRPLFLNXFXFPPXSSXHHXPXXLPLRXPDXXXPPTQGHPXXYXPXXGSSXSXSXXSASSXPVSTTLVTQSESLTPGYTXG

SEQ ID NO: 807593 - protein, 464 aa, Homo sapiens; identical to SEQ ID NO: 807568

SEQ ID NO: 807594 - protein, 464 aa, Homo sapiens; identical to SEQ ID NO: 807568

SEQ ID NO: 807595 - protein, 490 aa, Homo sapiens
MDFQHRPGGKTGSGGVASSSESNRDRRERLRQLALETIDINKDPYFMKNHLGSYECKLCLTLHNNEGSYLAHTQGKKHQTNLARRAAKEAKEAPAQPAPEKVKVEVKKFVKIGRPGYKVTKQRDSEMGQQSLLFQVRSGTWAWGAAKGTQEAALPPAVSLQIDYPEIAEGIMPRHRFMSAYEQRIEPPDRRWQYLLMAAEPYETIAFKVPSREIDKAEGKFWTHWNRETKQFFLQFHFKMEKPPAPPSLPAGPPGVKRPPPPLMNGLPPRPPLPESLPPPPPGGLPLPPMPPTGPAPSGPPGPPQLPPPAPGVHPPAPVVHPPASGVHPPAPGVHPPAPGVHPPAPGVHPPTSGVHPPAPGVHPPAPGVHPPAPGVHPPAPGVHPPAPGVHPPPSAGVHPQAPGVHPAAPAVHPQAPGVHPPAPGMHPQAPGVHPQPPGVHPSAPGVHPQPPGVHPSNPGVHPPTPMPPMLRPPLPSEGPGNIPPPPPTN

SEQ ID NO: 807596 - protein, 386 aa, Homo sapiens
CVCVCVYIYFFFFRWSLALLPRLECSGAISAHCKPRLPGSLTKQRDSEMGQQSLLFQIDYPEIAEGIMPRHRFMSAYEQRIEPPDRRWQYLLMAAEPYETIAFKVPSREIDKAEGKFWTHWNRETKQFFLQFHFKMEKPPAPPSLPAGPPGVKRPPPPLMNGLPPRPPLPESLPPPPPGGLPLPPMPPTGPAPSGPPGPPQLPPPAPGVHPPAPVVHPPASGVHPPAPGVHPPAPGVHPPAPGVHPPTSGVHPPAPGVHPPAPGVHPPAPGVHPPAPGVHPPAPGVHPPPSAGVHPQAPGVHPAAPAVHPQAPGVHPPAPGMHPQAPGVHPQPPGVHPSAPGVHPQPPGVHPSNPGVHPPTPMPPMLRPPLPSEGPGNIPPPPPTN

SEQ ID NO: 807597 - protein, 192 aa, Homo sapiens
  misc_feature (177)..(177): Xaa can be any naturally occurring amino acid
MDFQHRPGGKTGSGGVASSSESNRDRRERLRQLALETIDINKDPYFMKNHLGSYECKLCLTLHNNEGSYLAHTQGKKHQTNLARRAAKEAKEAPAQPAPEKVKVEVKKFVKIGRPGYKVTKQRDSEMGQQSLLFQIDYPEIAEGIMPRHRFMSAYEQRIEPPGPGRLGNEPLASNWXPARRPPLPGGTPILA

SEQ ID NO: 807598 - protein, 316 aa, Homo sapiens [sequence omitted]

SEQ ID NO: 807599 - protein, 41 aa, Homo sapiens
MDFQHRPGGKTGSGGVASSSESNRDRRERLRQLALETIDIN

SEQ ID NO: 807600 - protein, 155 aa, Homo sapiens
SARYRGRVVGTAPGPLPGQGSPGPAASAWISDPETRGDPGGPWGMWRGSDLRPRPVSLTGLTLVVVAAQGPQVHSVKLCFGLGGPCLLFPIFRPLLLHPRRPRLHPGTRGVAVEPHALRVVHVAHGEEAGIRAAGPGHGGVEIPQGVEAWEQGGG

SEQ ID NO: 807601 - protein, 111 aa, Homo sapiens [sequence omitted]

SEQ ID NO: 807602 - protein, 264 aa, Homo sapiens
MAEREEDDELRKPGCSYGPQNPCLPSAAAVAAHPVCLTSITEIWQGGRQPKPARTGACCVGQSHRGIVDDLEIQRAYTPISPANAEGYFEVLIKCYQMGLMSRYVESWRVGDTAFWRGPFGDFFYKPNQYGELLLLAAGTGLAPMVPILQSITDNENDETFVTLVGCFKTFESIYLKTFLQEQARFWNVRTFFVLSQESSSEQLPWSYQEKTHFGHLGQDLIKELVSCCRRKPFALVCGSAEFTKDIARCLLCAGLTEDSYFLF

SEQ ID NO: 807603 - protein, 162 aa, Homo sapiens
MAEREEDDDTEEAWMQLRPTEPLPSQCCGSGCSPCVFDLYHRDLARWEAAQASKDRSLLRGPESQSCPSKLNPETFVAFCIIAMDRLTKDTYRVRFALPGNSQLGLRPGQHLILRGIVDDLEIQRAYTPISPANAEGYFEVLIKMKKLKLKKMTSFVSRPLG

SEQ ID NO: 807604 - protein, 264 aa, Homo sapiens; identical to SEQ ID NO: 807602

SEQ ID NO: 807605 - protein, 120 aa, Homo sapiens
MAEREEDDDTEEAWMQLRPTEPLPSQCCGSGCSPCVFDLYHRDLARWEAAQASKDRSLLRGPESQSCPSKLNPETFVAFCIIAMDRLTKDTYRVRFALPGNSQLGLRPGQHLILRLVSNS

SEQ ID NO: 807606 - protein, 459 aa, Homo sapiens
AGTEARSAAHGGAQCRGRAGGSAVGGRPWTGMADRRRAWNTEDDLPVYLARPGSAAQTPRQKYGGMFAAVEGAYENKTIDFDAYSVGRRGSAHTPRSAGRPDAVGLPGPGGSEDTASDVSEPSGSAVSSPGERDERPPTLRIRRPAPRDLPLGRDNGQSDRLLIKGGRIINDDQSLYADVYLEDGLIKQIGENLIVPGGVKTIEANGRMVIPGGIDVNTYLQKPSQGMTAADDFFQGTRAALVGGTTMIIDHVVPEPGSSLLTSFEKWHEAADTKSCCDYSLHVDITSWYDGVREELEVLVQDKGVNSFQVYMAYKDVYQMSDSQLYEAFTFLKGLGAVILVHAENGDLIAQEQKRILEMGITGPEGHALSRPEELEAEAVFRAITIAGRINCPVYITKVMSKSAADIIALARKKGPSFGKPLRQLGRWPIMAKLAGWGRDSFLDRLPPIALLAGFGLA

SEQ ID NO: 807607 - protein, 717 aa, Homo sapiens
AGTEARSAAHGGAQCRGRAGGSAVGGRPWTGMADRRRAWNTEDDLPVYLARPGSAAQTPRQKYGGMFAAVEGAYENKTIDFDAYSVGLRGSAHTPRSAGRPDAVGLPGPGGSEDTASDVSEPSGSAVSSPGERDERPPTLRIRRPAPRDLPLGRDNGQSDRLLIKGGRIINDDQSLYADVYLEDGLIKQIGENLIVPGGVKTIEANGRMVIPGGIDVNTYLQKPSQGMTAADDFFQGTRAALVGGTTMIIDHVVPEPGSSLLTSFEKWHEAADTKSCCDYSLHVDITSWYDGVREELEVLVQDKGVNSFQVYMAYKDVYQMSDSQLYEAFTFLKGLGAVILVHAENGDLIAQEQKRILEMGITGPEGHALSRPEELEAEAVFRAITIAGRINCPVYITKVMSKSAADIIALARKKGPLVFGEPIAASLGTDGTHYWSKNWAKAAAFVTSPPLSPDPTTPDYLTSLLACGDLQVTGSGHCPYSTAQKAVGKDNFTLIPEGVNGIEERMTVVWDKAVATGKMDENQFVAVTSTNAAKIFNLYPRKGRIAVGSDADVVIWDPDKLKTITAKSHKSAVEYNIFEGMECHGSPLVVISQGKIVFEDGNINVNKGMGRFIPRKAFPEHLYQRVKIRNKVFGLQGVSRGMYDGPVYEVPATPKYATPAPSAKSSPSKHQPPPIRNLHQSNFSLSGAQIDDNNPRRTGHRIVAPPGGRSNITSLG

SEQ ID NO: 807608 - protein, 570 aa, Homo sapiens
MQKMNNEVVDKSDRLLIKGGRIINDDQSLYADVYLEDGLIKQIGENLIVPGGVKTIEANGRMVIPGGIDVNTYLQKPSQGMTAADDFFQGTRAALVGGTTMIIDHVVPEPGSSLLTSFEKWHEAADTKSCCDYSLHVDITSWYDGVREELEVLVQDKGVNSFQVYMAYKDVYQMSDSQLYEAFTFLKGLGAVILVHAENGDLIAQEQKRILEMGITGPEGHALSRPEELEAEAVFRAITIAGRINCPVYITKVMSKSAADIIALARKKGPLVFGEPIAASLGTDGTHYWSKNWAKAAAFVTSPPLSPDPTTPDYLTSLLACGDLQVTGSGHCPYSTAQKAVGKDNFTLIPEGVNGIEERMTVVWDKAVATGKMDENQFVAVTSTNAAKIFNLYPRKGRIAVGSDADVVIWDPDKLKTITAKSHKSAVEYNIFEGMECHGSPLVVISQGKIVFEDGNINVNKGMGRFIPRKAFPEHLYQRVKIRNKVFGLQGVSRGMYDGPVYEVPATPKYATPAPSAKSSPSKHQPPPIRNLHQSNFSLSGAQIDDNNPRRTGHRIVAPPGGRSNITSLG

SEQ ID NO: 807609 - protein, 569 aa, Homo sapiens
LGEPGVNGRGSDRLLIKGGRIINDDQSLYADVYLEDGLIKQIGENLIVPGGVKTIEANGRMVIPGGIDVNTYLQKPSQGMTAADDFFQGTRAALVGGTTMIIDHVVPEPGSSLLTSFEKWHEAADTKSCCDYSLHVDITSWYDGVREELEVLVQDKGVNSFQVYMAYKDVYQMSDSQLYEAFTFLKGLGAVILVHAENGDLIAQEQKRILEMGITGPEGHALSRPEELEAEAVFRAITIAGRINCPVYITKVMSKSAADIIALARKKGPLVFGEPIAASLGTDGTHYWSKNWAKAAAFVTSPPLSPDPTTPDYLTSLLACGDLQVTGSGHCPYSTAQKAVGKDNFTLIPEGVNGIEERMTVVWDKAVATGKMDENQFVAVTSTNAAKIFNLYPRKGRIAVGSDADVVIWDPDKLKTITAKSHKSAVEYNIFEGMECHGSPLVVISQGKIVFEDGNINVNKGMGRFIPRKAFPEHLYQRVKIRNKVFGLQGVSRGMYDGPVYEVPATPKYATPAPSAKSSPSKHQPPPIRNLHQSNFSLSGAQIDDNNPRRTGHRIVAPPGGRSNITSLG

SEQ ID NO: 807610 - protein, 688 aa, Homo sapiens
MGREALPGSSREGRIRLRSAPPGGAVCSPLLPPSPLPPPSPALLADPGGAGSRSGGGRAEQPGQPRVGIHGRRASVRVSIPPGPLSARPLGAGPRAPVPVRQPRRSAAGPRAPEGAMSYQGKKSIPHITSDRLLIKGGRIINDDQSLYADVYLEDGLIKQIGENLIVPGGVKTIEANGRMVIPGGIDVNTYLQKPSQGMTAADDFFQGTRAALVGGTTMIIDHVVPEPGSSLLTSFEKWHEAADTKSCCDYSLHVDITSWYDGVREELEVLVQDKGVNSFQVYMAYKDVYQMSDSQLYEAFTFLKGLGAVILVHAENGDLIAQEQKRILEMGITGPEGHALSRPEELEAEAVFRAITIAGRINCPVYITKVMSKSAADIIALARKKGPLVFGEPIAASLGTDGTHYWSKNWAKAAAFVTSPPLSPDPTTPDYLTSLLACGDLQVTGSGHCPYSTAQKAVGKDNFTLIPEGVNGIEERMTVVWDKAVATGKMDENQFVAVTSTNAAKIFNLYPRKGRIAVGSDADVVIWDPDKLKTITAKSHKSAVEYNIFEGMECHGSPLVVISQGKIVFEDGNINVNKGMGRFIPRKAFPEHLYQRVKIRNKVFGLQGVSRGMYDGPVYEVPATPKYATPAPSAKSSPSKHQPPPIRNLHQSNFSLSGAQIDDNNPRRTGHRIVAPPGGRSNITSLG

SEQ ID NO: 807611 - protein, 688 aa, Homo sapiens; identical to SEQ ID NO: 807610

SEQ ID NO: 807612 - protein, 688 aa, Homo sapiens; identical to SEQ ID NO: 807610

SEQ ID NO: 807613 - protein, 688 aa, Homo sapiens; identical to SEQ ID NO: 807610

SEQ ID NO: 807614 - protein, 430 aa, Homo sapiens
IGREALPGSSREGRIRLRSAPPGGAVCSPLLPPSPLPPPSPALLADPGGAGSRSGGGRAEQPGQPRVGIHGRRASVRVSIPPGPLSARPLGAGPRAPVPVRQPRRSAAGPRAPEGAMSYQGKKSIPHITSDRLLIKGGRIINDDQSLYADVYLEDGLIKQIGENLIVPGGVKTIEANGRMVIPGGIDVNTYLQKPSQGMTAADDFFQGTRAALVGGTTMIIDHVVPEPGSSLLTSFEKWHEAADTKSCCDYSLHVDITSWYDGVREELEVLVQDKGVNSFQVYMAYKDVYQMSDSQLYEAFTFLKGLGAVILVHAENGDLIAQEQKRILEMGITGPEGHALSRPEELEAEAVFRAITIAGRINCPVYITKVMSKSAADIIALARKKGPSFGKPLRQLGRWPIMAKLAGWGRDSFLDRLPPIALLAGFGLA

SEQ ID NO: 807615 - protein, 688 aa, Homo sapiens; identical to SEQ ID NO: 807610

SEQ ID NO: 807616 - protein, 251 aa, Homo sapiens
AGTEARSAAHGGAQCRGRAGGSAVGGRPWTGMADRRRAWNTEDDLPVYLARPGSAAQTPRQKYGGMFAAVEGAYENKTIDFDAYSVGRRGSAHTPRSAGRPDAVGLPGPGGSEDTASDVSEPSGSAVSSPGERDERPPTLRIRRPAPRDLPLGRDNGQSDRLLIKGGRIINDDQSLYADVYLEDGLIKQIGENLIVPGGVKTIEANGRMVIPGGIDVNTYLQKPSQGMTAADDFFQGTRAALVGGTTMISE

SEQ ID NO: 807617 - protein, 627 aa, Homo sapiens
RSEGKRFLVRAERGESGFAPRRREELSAAPSSRPRLSLLLLPPSSPIRAVLAAGAAAGGPSSRGSRAWASTGAEPPSVSLSLPGLCQRARWERGRERRFQSDSPAGQRPGRGRQRGPCRTRARRASRTSRVTDSSSKVDGSSTMTNPFMLTSTWRMDLSIDHVVPEPGSSLLTSFEKWHEAADTKSCCDYSLHVDITSWYDGVREELEVLVQDKGVNSFQVYMAYKDVYQMSDSQLYEAFTFLKGLGAVILVHAENGDLIAQEQKRILEMGITGPEGHALSRPEELEAEAVFRAITIAGRINCPVYITKVMSKSAADIIALARKKGPLVFGEPIAASLGTDGTHYWSKNWAKAAAFVTSPPLSPDPTTPDYLTSLLACGDLQVTGSGHCPYSTAQKAVGKDNFTLIPEGVNGIEERMTVVWDKAVATGKMDENQFVAVTSTNAAKIFNLYPRKGRIAVGSDADVVIWDPDKLKTITAKSHKSAVEYNIFEGMECHGSPLVVISQGKIVFEDGNINVNKGMGRFIPRKAFPEHLYQRVKIRNKVFGLQGVSRGMYDGPVYEVPATPKYATPAPSAKSSPSKHQPPPIRNLHQSNFSLSGAQIDDNNPRRTGHRIVAPPGGRSNITSLG

SEQ ID NO: 807618 - protein, 694 aa, Homo sapiens
IGREALPGSSREGRIRLRSAPPGGAVCSPLLPPSPLPPPSPALLADPGGAGSRSGGGRAEQPGQPRVGIHGRRASVRVSIPPGPLSARPLGAGPRAPVPVRQPRRSAAGPRAPEGAMSYQGKKSIPHITSDRLLIKGGRIINDDQSLYADVYLEDGLIKQIGENLIVPGGVKTIEANGRMVIPGGIDVNTYLQKPSQGMTAADDFFQGTRAALVGGTTMIIDHVVPEPGSSLLTSFEKWHEAADTKSCCDYSLHVDITSWYDGVREELEVLVQDKGVNSFQVYMAYKDVYQMSDSQLYEAFTFLKGLGAVILVHAENGDLIAQEQKRILEMGITGPEGHALSRPEELEAEAVFRAITIAGRINCPVYITKVMSKSAADIIALARKKGPLVFGEPIAASLGTDGTHYWSKNWAKAAAFVTSPPLSPDPTTPDYLTSLLACGDLQVTGSGHCPYSTAQKAVGKDNFTLIPEGVNGIEERMTVVWDKAVATGKMDENQFVAVTSTNAAKIFNLYPRKGRIAVGSDADVVIWDPDKLKTITAKSHKSAVEYNIFEGMECHGSPLVVISQGKIVFEDGNINVNKGMGRFIPRKAFPEHLYQRVKIRNKVFGLQGVSRGMYDGPVYEVPATPKYATPAPSAKSSPSKHQPPPIRNLHQSNFSLSALPEPAAPENRTIALRLQSFFPSESSSAVGLWSWNT

SEQ ID NO: 807619 - protein, 241 aa, Homo sapiens
AGTEARSAAHGGAQCRGRAGGSAVGGRPWTGMADRRRAWNTEDDLPVYLARPGSAAQTPRQKYGGMFAAVEGAYENKTIDFDAYSVGRRGSAHTPRSAGRPDAVGLPGPGGSEDTASDVSEPSGSAVSSPGERDERPPTLRIRRPAPRDLPLGRDNGQSDRLLIKGGRIINDDQSLYADVYLEDGLIKQIGENLIVPGGVKTIEANGRMVIPGGIDVNTYLQKPSQGMTAVTETRCRDLKP

SEQ ID NO: 807620 - protein, 220 aa, Homo sapiens
GPEPLDLGSQLLHLAAGLLAGARLQLLQPPSLLLRLRQPLLQLQVVSHQLLLAAALQALGVEAFPSSAPGRVASAFCASMAADGVSSGPAQPPLSSPLGSGSGDSYCSSPGHRQPQQDLHPLSGSPSAVSGAGNHQSHDAQGVFGGSPGHQRSKEREEEEGWIRQPVLGGGTFPSLPSLKPTFLHSANLVTLSPSTFWNHLFTKRPVYCLSPNLPQVNSW

SEQ ID NO: 807621 - protein, 265 aa, Homo sapiens
LGEAGVNGRGITEAHTVVADALAKAVAENFFVETLQPQLLHVSEQSILTSTALLTAMLRQLRSPALLREAVAFLLGTDRQPEAPGDNPHTLYAHLIGHCDHLSDEISITTLRLFEELLQKPHEGIIHSLVLRNLEGRPYVAWGSPEPESYEDTLDLEEDPYFTDSFLDSGFQTPAKPRLAPATSYDGKTAVTEIVNSFLCLVPEEAKTSAFLEETGYDTYVHDAYGLCHGWGPGSLWGGFAPTLVPCDGAFSGAPRVVRCRSGTS

SEQ ID NO: 807622 - protein, 685 aa, Homo sapiens
MLDILVYEEQQQAAAGEAGPCLEYLLQHKILETLCTLGKAEYPPGMRQQVFQFFSKVLAQVQHPLLHYLSVHRPVQKLLRLGGTASGSVTEKEEVQFTTVLCSKIQQDPELLAYILEGKKIVGRKKACGEPTALPKDTTSHGDKDCSHDGAPARPQLDGESCGAQALNSHMPAETEELDGGTTESNLITSLLGLCQSKKSRVALKAQENLLLLVSMASPAAATYLVQSSACCPAIVRHLCQLYRSMPVFLDPADIATLEGISWRLPSAPSDEASFPGKEALAAFLGWFDYCDHLITEAHTVVADALAKAVAENFFVETLQPQLLHVSEQSILTSTALLTAMLRQLRSPALLREAVAFLLGTDRQPEAPGDNPHTLYAHLIGHCDHLSDEISITTLRLFEELLQKPHEGIIHSLVLRNLEGRPYVAWGSPEPESYEDTLDLEEDPYFTDSFLDSGFQTPAKPRLAPATSYDGKTAVTEIVNSFLCLVPEEAKTSAFLEETGYDTYVHDAYGLFQECSSRVASWGWPLTPTPLDPHEPERPFFEGHFLRVLFDRMSRILDQPYSLNLQVTSVLSRLALFPHPHIHEYLLDPYISLAPGCRSLFSVLVRVIGDLMQRIQRVPQFPGKLLLVRKQLTGQAPGEQLDHQTLLQGVVVLEEFCKELAAIAFVKFPPHDPRQNVSPAPEGQV

SEQ ID NO: 807623 - protein, 685 aa, Homo sapiens; identical to SEQ ID NO: 807622

SEQ ID NO: 807624 - protein, 619 aa, Homo sapiens
AEAEIRYPGGTQAASPPAPGRRPAGSPPCGPSGGPWEVVPTRSGLISPSFQGKKIVGRKKACGEPTALPKDTTSHGDKDCSHDGAPARPQLDGESCGAQALNSHMPAETEELDGGTTESNLITSLLGLCQSKKSRVALKAQENLLLLVSMASPAAATYLVQSSACCPAIVRHLCQLYRSMPVFLDPADIATLEGISWRLPSAPSDEASFPGKEALAAFLGWFDYCDHLITEAHTVVADALAKAVAENFFVETLQPQLLHVSEQSILTSTALLTAMLRQLRSPALLREAVAFLLGTDRQPEAPGDNPHTLYAHLIGHCDHLSDEISITTLRLFEELLQKPHEGIIHSLVLRNLEGRPYVAWGSPEPESYEDTLDLEEDPYFTDSFLDSGFQTPAKPRLAPATSYDGKTAVTEIVNSFLCLVPEEAKTSAFLEETGYDTYVHDAYGLFQECSSRVASWGWPLTPTPLDPHEPERPFFEGHFLRVLFDRMSRILDQPYSLNLQVTSVLSRLALFPHPHIHEYLLDPYISLAPGCRSLFSVLVRVIGDLMQRIQRVPQFPGKLLLVRKQLTGQAPGEQLDHQTLLQGVVVLEEFCKELAAIAFVKFPPHDPRQNVSPAPEGQV

SEQ ID NO: 807625 - protein, 915 aa, Homo sapiens
ALPPPLSPGSRGPGAIMLSRLGALLQEAVGAREPSIDLLQAFVEHWKGITHYYIESTDESTPAKKTDIPWRLKQMLDILVYEEQQQAAAGEAGPCLEYLLQHKILETLCTLGKAEYPPGMRQQVFQFFSKVLAQVQHPLLHYLSVHRPVQKLLRLGGTASGSVTEKEEVQFTTVLCSKIQQDPELLAYILEGKKIVGRKKACGEPTALPKDTTSHGDKDCSHDGAPARPQLDGESCGAQALNSHMPAETEELDGGTTESNLITSLLGLCQSKKSRVALKAQENLLLLVSMASPAAATYLVQSSACCPAIVRHLCQLYRSMPVFLDPADIATLEGISWRLPSAPSDEASFPGKEALAAFLGWFDYCDHLITEAHTVVADALAKAVAENFFVETLQPQLLHVSEQSILTSTALLTAMLRQLRSPALLREAVAFLLGTDRQPEAPGDNPHTLYAHLIGHCDHLSDEISITTLRLFEELLQKPHEGIIHSLVLRNLEGRPYVAWGSPEPESYEDTLDLEEDPYFTDSFLDSGFQTPAKPRLAPATSYDGKTAVTEIVNSVGSKLGSLNHLSFILFYFIFGDRVSLRHPGWSAVVQSRLTATSTSRVPDPSDSCASASRVPGITDMHHHTQLIFIVLVETGFPHVGQAGLELLTSGDPPTSASQSAGITDMSHRACPEFYSLATALGSSQGGRWGPTSRGEQGEPGAPPHRLLSLSFLCLVPEEAKTSAFLEETGYDTYVHDAYGLFQECSSRVASWGWPLTPTPLDPHEPERPFFEGHFLRVLFDRMSRILDQPYSLNLQVTSVLSRLALFPHPHIHEYLLDPYISLAPGCRSLFSVLVRVIGDLMQRIQRVPQFPGKLLLVRKQLTGQAPGEQLDHQTLLQGVVVLEEFCKELAAIAFVKFPPHDPRQNVSPAPEGQV

SEQ ID NO: 807626 - protein, 112 aa, Homo sapiens
WRIRHEGGLPPPPRALPPPLSPGCRSLFSVLVRVIGDLMQRIQRVPQFPGKLLLVRKQLTGQAPGEQLDHQTLLQGVVVLEEFCKELAAIAFVKFPPHDPRQNVSPAPEGQV

SEQ ID NO: 807627 - protein, 759 aa, Homo sapiens
ALPPPLSPGSRGPGAIMLSRLGALLQEAVGAREPSIDLLQAFVEHWKGITHYYIESTDESTPAKKTDIPWRLKQMLDILVYEEQQQAAAGEAGPCLEYLLQHKILETLCTLGKAEYPPGMRQQVFQFFSKVLAQVQHPLLHYLSVHRPVQKLLRLGGTASGSVTEKEEVQFTTVLCSKIQQDPELLAYILEGKKIVGRKKACGEPTALPKDTTSHGDKDCSHDGAPARPQLDGESCGAQALNSHMPAETEELDGGTTESNLITSLLGLCQSKKSRVALKAQENLLLLVSMASPAAATYLVQSSACCPAIVRHLCQLYRSMPVFLDPADIATLEGISWRLPSAPSDEASFPGKEALAAFLGWFDYCDHLITEAHTVVADALAKAVAENFFVETLQPQLLHVSEQSILTSTALLTAMLRQLRSPALLREAVAFLLGTDRQPEAPGDNPHTLYAHLIGHCDHLSDEISITTLRLFEELLQKPHEGIIHSLVLRNLEGRPYVAWGSPEPESYEDTLDLEEDPYFTDSFLDSGFQTPAKPRLAPATSYDGKTAVTEIVNSFLCLVPEEAKTSAFLEETGYDTYVHDAYGLFQECSSRVASWGWPLTPTPLDPHEPERPFFEGHFLRVLFDRMSRILDQPYSLNLQVTSVLSRLALFPHPHIHEYLLDPYISLAPGCRSLFSVLVRVIGDLMQRIQRVPQFPGKLLLVRKQLTGQAPGEQLDHQTLLQGVVVLEEFCKELAAIAFVKFPPHDPRQNVSPAPEGQV

SEQ ID NO: 807628 - protein, 759 aa, Homo sapiens; identical to SEQ ID NO: 807627

SEQ ID NO: 807629 - protein, 759 aa, Homo sapiens; identical to SEQ ID NO: 807627

SEQ ID NO: 807630 - protein, 754 aa, Homo sapiens
ALPPPLSPGSRGPGAIMLSRLGALLQEAVGAREPSIDLLQAFVEHWKGITHYYIESTDESTPAKKTDIPWRLKQMLDILVYEEQQQAAAGEAGPCLEYLLQHKILETLCTLGKAEYPPGMRQQVFQFFSKVLAQVQHPLLHYLSVHRPVQKLLRLGGTASGSVTEKEEVQFTTVLCSKIQQDPELLAYILEGKKIVGRKKACGEPTALPKDTTSHGDKDCSHDGAPARPQLDGESCGAQALNSHMPAETEELDGGTTESNLITSLLGLCQSKKSRVALKAQENLLLLVSMASPAAATYLVQSSACCPAIVRHLCQLYRSMPVFLDPADIATLEGISWRLPSAPSDEASFPGKEALAAFLGWFDYCDHLITEAHTVVADALAKAVAENFFVETLQPQLLHVSEQSILTSTALLTAMLRQLRSPALLREAVAFLLGTDRQPEAPGDNPHTLYAHLIGHCDHLSDEISITTLRLFEELLQKPHEGIIHSLVLRNLEGRPYVAWGSPEPESYEDTLDLEEDPYFTDSFLDSGFQTPAKPRLAPATSYDGKTAVTEIVNSFLCLVPEEAKTSAFLEETGYDTYVHDAYGLFQECSSRVASWGWPLTPTPLDPHEPERPFFEGHFLRVLFDRMSRILDQPYSLNLQVTSVLSRLALFPHPHIHEYLLDPYISLAPGCRSLFSVLVRVIGDLMQRIQRVPQFPGKLLLVRKQLTGQAPGEQLDHQTLLQGVVVLEEFCKELAAIAFVKFPPHDPPGSGFRT

SEQ ID NO: 807631 - protein, 412 aa, Homo sapiens
ALPPPLSPGSRGPGAIMLSRLGALLQEAVGAREPSIDLLQAFVEHWKGITHYYIESTDESTPAKKTDIPWRLKQMLDILVYEEQQQAAAGEAGPCLEYLLQHKILETLCTLGKAEYPPGMRQQVFQFFSKVLAQVQHPLLHYLSVHRPVQKLLRLGGTASGSVTEKEEVQFTTVLCSKIQQDPELLAYILEGKKIVGRKKACGEPTALPKDTTSHGDKDCSHDGAPARPQLDGESCGAQALNSHMPAETEELDGGTTESNLITSLLGLCQSKKSRVALKAQENLLLLVSMASPAAATYLVQSSACCPAIVRHLCQLYRSMPVFLDPADIATLEGISWRLPSAPSDEASFPGKEALAAFLGWFDYCDHLITEAHTVVADALAKAVAENFFVEAAVNCYRETARLLGGRARHCL

SEQ ID NO: 807632 - protein, 268 aa, Homo sapiens
KAPCGVFNSARPEPESYEDTLDLEEDPYFTDSFLDSGFQTPAKPRLAPATSYDGKTAVTEIVNSFLCLVPEEAKTSAFLEETGYDTYVHDAYGLFQECSSRVASWGWPLTPTPLDPHEPERPFFEGHFLRVLFDRMSRILDQPYSLNLQVTSVLSRLALFPHPHIHEYLLDPYISLAPGCRSLFSVLVRVIGDLMQRIQRVPQFPGKLLLVRKQLTGQAPGEQLDHQTLLQGVVVLEEFCKELAAIAFVKFPPHDPRQNVSPAPEGQV

SEQ ID NO: 807633 - protein, 759 aa, Homo sapiens; identical to SEQ ID NO: 807627

SEQ ID NO: 807634 - protein, 685 aa, Homo sapiens; identical to SEQ ID NO: 807622

SEQ ID NO: 807635 - protein, 820 aa, Homo sapiens
AAAAAFAREPGAGRHHAEPARGAAAGSRGGDNSRTLLGCRTPFPSPRDVGSAGPAGPSPHEGASPALTCCRPSWSTGRASRTTTSRAQVRPGPPQPRDPGGSGEEGVCRVSPFRCPGKDESTPAKKTDIPWRLKQMLDILVYEEQQQAAAGEAGPCLEYLLQHKILETLCTLGKAEYPPGMRQQVFQFFSKVLAQVQHPLLHYLSVHRPVQKLLRLGGTASGSVTEKEEVQFTTVLCSKIQQDPELLAYILEGKKIVGRKKACGEPTALPKDTTSHGDKDCSHDGAPARPQLDGESCGAQALNSHMPAETEELDGGTTESNLITSLLGLCQSKKSRVALKAQENLLLLVSMASPAAATYLVQSSACCPAIVRHLCQLYRSMPVFLDPADIATLEGISWRLPSAPSDEASFPGKEALAAFLGWFDYCDHLITEAHTVVADALAKAVAENFFVETLQPQLLHVSEQSILTSTALLTAMLRQLRSPALLREAVAFLLGTDRQPEAPGDNPHTLYAHLIGHCDHLSDEISITTLRLFEELLQKPHEGIIHSLVLRNLEGRPYVAWGSPEPESYEDTLDLEEDPYFTDSFLDSGFQTPAKPRLAPATSYDGKTAVTEIVNSFLCLVPEEAKTSAFLEETGYDTYVHDAYGLFQECSSRVASWGWPLTPTPLDPHEPERPFFEGHFLRVLFDRMSRILDQPYSLNLQVTSVLSRLALFPHPHIHEYLLDPYISLAPGCRSLFSVLVRVIGDLMQRIQRVPQFPGKLLLVRKQLTGQAPGEQLDHQTLLQGVVVLEEFCKELAAIAFVKFPPHDPRQNVSPAPEGQV

SEQ ID NO: 807636 - protein, 774 aa, Homo sapiens
MLSRLGALLQEAVGATTQDLVGVQDALPVTPGRGKCRPCRSKSPRRREPSIDLLQAFVEHWKGITHYYIESTDESTPAKKTDIPWRLKQMLDILVYEEQQQAAAGEAGPCLEYLLQHKILETLCTLGKAEYPPGMRQQVFQFFSKVLAQVQHPLLHYLSVHRPVQKLLRLGGTASGSVTEKEEVQFTTVLCSKIQQDPELLAYILEGKKIVGRKKACGEPTALPKDTTSHGDKDCSHDGAPARPQLDGESCGAQALNSHMPAETEELDGGTTESNLITSLLGLCQSKKSRVALKAQENLLLLVSMASPAAATYLVQSSACCPAIVRHLCQLYRSMPVFLDPADIATLEGISWRLPSAPSDEASFPGKEALAAFLGWFDYCDHLITEAHTVVADALAKAVAENFFVETLQPQLLHVSEQSILTSTALLTAMLRQLRSPALLREAVAFLLGTDRQPEAPGDNPHTLYAHLIGHCDHLSDEISITTLRLFEELLQKPHEGIIHSLVLRNLEGRPYVAWGSPEPESYEDTLDLEEDPYFTDSFLDSGFQTPAKPRLAPATSYDGKTAVTEIVNSFLCLVPEEAKTSAFLEETGYDTYVHDAYGLFQECSSRVASWGWPLTPTPLDPHEPERPFFEGHFLRVLFDRMSRILDQPYSLNLQVTSVLSRLALFPHPHIHEYLLDPYISLAPGCRSLFSVLVRVIGDLMQRIQRVPQFPGKLLLVRKQLTGQAPGEQLDHQTLLQGVVVLEEFCKELAAIAFVKFPPHDPRQNVSPAPEGQV

SEQ ID NO: 807637 - protein, 728 aa, Homo sapiens
ALPPPLSPGSRGPGAIMLSRLGALLQEAVGAREPSIDLLQAFVEHWKGITHYYIESTDESTPAKKTDIPWRLKQMLDILVYEEQQQAAAGEAGPCLEYLLQHKILETLCTLGKAEYPPGMRQQVFQFFSKVLAQVQHPLLHYLSVHRPVQKLLRLGGTASGSVTEKEEVQFTTVLCSKIQQDPELLAYILEGKKIVGRKKACGEPTALPKDTTSHGDKDCSHDGAPARPQLDGESCGAQALNSHMPAETEELDGGTTESNLITSLLGLCQSKKSRVALKAQENLLLLVSMASPAAATYLVQSSACCPAIVRHLCQLYRSMPVFLDPADIATLEGISWRLPSAPSDEASFPGKEALAAFLGWFDYCDHLITEAHTVVADALAKAVAENFFVETLQPQLLHVSEQSILTSTALLTAMLRQLRSPALLREAVAFLLGTDRQPEAPGDNPHTLYAHLIGHCDHLSDEISITTLRLFEELLQKPHEGIIHSLVLRNLEGRPYVAWGSPEPESYEDTLDLEEDPYFTDSFLDSGFQTPAKPRLAPATSYDGKTAVTEIVNSQECSSRVASWGWPLTPTPLDPHEPERPFFEGHFLRVLFDRMSRILDQPYSLNLQVTSVLSRLALFPHPHIHEYLLDPYISLAPGCRSLFSVLVRVIGDLMQRIQRVPQFPGKLLLVRKQLTGQAPGEQLDHQTLLQGVVVLEEFCKELAAIAFVKFPPHDPRQNVSPAPEGQV

SEQ ID NO: 807638 - protein, 759 aa, Homo sapiens; identical to SEQ ID NO: 807627

SEQ ID NO: 807639 - protein, 91 aa, Homo sapiens
RAVYEYPSCSDLCAFDTPDWVSGNGHARCQGAKQMAFQAARSLGPSWRSLGDSQVSTQTPDPHVLCAWPLLYWPFVARAKPVTQLQGQDGE

SEQ ID NO: 807640 - protein, 759 aa, Homo sapiens; identical to SEQ ID NO: 807627

SEQ ID NO: 807641 - protein, 131 aa, Homo sapiens
MLDILVYEEQQQAAAGEAGPCLEYLLQHKILETLCTLGKAEVGGPLRAGPGRGGRPLRAWPGRGGRPLCAGPGRGGRPSECWARLRWAVGSGQPGAPWIPGLSAYALPSPDTESGSSGERSKQDGHCGCLT

SEQ ID NO: 807642 - protein, 78 aa, Homo sapiens
LGTRRRDSYALLHREHRCGLALPSPGTLEGAGRKECAECHHSGVLGKVTCPVVQNWSRVHGDREPDRQKTQSPGPLHS

SEQ ID NO: 807643 - protein, 439 aa, Homo sapiens
MLTGVTDGIFCCLLGTPPNAVGPLESVESSDGYTFVEVKPGRVLRVKHAGPAPAAAPPPPSSASSDAAQGDLSGLVRCQRRITVYRNGRLLVENLGRAPRADLLHGQNGSGEPPAALEVELADPAGSDGRLAPGSAGSGSGSGSGGRRRRARRPKRTIHIDCEKRITSCKGAQADVVLFFIHGVGGSLAIWKEQLDFFVRLGYEVVAPDLAGHGASSAPQVAAAYTFYALAEDMRAIFKRYAKKRNVLIGHSYGVSFCTFLAHEYPDLVHKVIMINGGGPTALEPSFCSIFNMPTCVLHCLSPCLAWSFLKAGFARQGAKEKQLLKEGNAFNVSSFVLRAMMSGQYWPEGDEVYHAELTVPVLLVHGMHDKFVPVEEDQRMAEILLLAFLKLIDEGSHMVMLECPETVNTLLHEFLLWEPEPSPKALPEPLPAPPEDKK

SEQ ID NO: 807644 - protein, 439 aa, Homo sapiens; identical to SEQ ID NO: 807643

SEQ ID NO: 807645 - protein, 439 aa, Homo sapiens; identical to SEQ ID NO: 807643

SEQ ID NO: 807646 - protein, 439 aa, Homo sapiens; identical to SEQ ID NO: 807643

SEQ ID NO: 807647 - protein, 489 aa, Homo sapiens
MLTGVTDGIFCCLLGTPPNAVGPLESVESSDGYTFVEVKPGARRCLRGWKAIAPRGKPPVETAANGPPCDHLGPRPALPKEGTAFLPGPNKHRPITFPNSCESLGNASPRGGTRSSRGPFGGPRRCSGGRESPVYRNGRLLVENLGRAPRADLLHGQNGSGEPPAALEVELADPAGSDGRLAPGSAGSGSGSGSGGRRRRARRPKRTIHIDCEKRITSCKGAQADVVLFFIHGVGGSLAIWKEQLDFFVRLGYEVVAPDLAGHGASSAPQVAAAYTFYALAEDMRAIFKRYAKKRNVLIGHSYGVSFCTFLAHEYPDLVHKVIMINGGGPTALEPSFCSIFNMPTCVLHCLSPCLAWSFLKAGFARQGAKEKQLLKEGNAFNVSSFVLRAMMSGQYWPEGDEVYHAELTVPVLLVHGMHDKFVPVEEDQRMAEILLLAFLKLIDEGSHMVMLECPETVNTLLHEFLLWEPEPSPKALPEPLPAPPEDKK

SEQ ID NO: 807648 - protein, 225 aa, Homo sapiens
KGPAVSAAAGCPCADRQGQVPARVDAPGLTPRHHVNGASRRTLASPPGTPPPRLVHKVIMINGGGPTALEPSFCSIFNMPTCVLHCLSPCLAWSFLKAGFARQGAKEKQLLKEGNAFNVSSFVLRAMMSGQYWPEGDEVYHAELTVPVLLVHGMHDKFVPVEEDQRMAEILLLAFLKLIDEGSHMVMLECPETVNTLLHEFLLWEPEPSPKALPEPLPAPPEDKK

SEQ ID NO: 807649 - protein, 420 aa, Homo sapiens
ETSSSVHEQVADSGAQAVAFQSGGESSIVWNSQLKTLLAIGGWNFGTAPFTAMVSTPENRQTFITSVIKFLRQYEFDGLDFDWEYPGSRGSPPQDKHLFTVLVQEMREAFEQEAKQINKPRLMVTAAVAAGISNIQSGYEIPQLSQYLDYIHVMTYDLHGSWEGYTGENSPLYKYPTDTGSNAYLNVDYVMNYWKDNGAPAEKLIVGFPTYGHNFILSNPSNTGIGAPTSGAGPAGPYAKESGIWAYYEICTFLKNGATQGWDAPQEVPYAYQGNVWVGYDNVKSFDIKAQWLKHNKFGGAMVWAIDLDDFTGTFCNQGKFPLISTLKKALGLQSASCTAPAQPIEPITAAPSGSGNGSGSSSSGGSSGGSGFCAGRANGLYPVANNRNAFWHCVNGVTYQQNCQAGLVFDTSCDCCNWA

SEQ ID NO: 807650 - protein, 315 aa, Homo sapiens
MREAFEQEAKQINKPRLMVTAAVAAGISNIQSGYEIPQLSQYLDYIHVMTYDLHGSWEGYTGENSPLYKYPTDTGSNAYLNVDYVMNYWKDNGAPAEKLIVGFPTYGHNFILSNPSNTGIGAPTSGAGPAGPYAKESGIWAYYEICTFLKNGATQGWDAPQEVPYAYQGNVWVGYDNVKSFDIKAQWLKHNKFGGAMVWAIDLDDFTGTFCNQGKFPLISTLKKALGLQSASCTAPAQPIEPITAAPSGSGNGSGSSSSGGSSGGSGFCAGRANGLYPVANNRNAFWHCVNGVTYQQNCQAGLVFDTSCDCCNWA

SEQ ID NO: 807651 - protein, 476 aa, Homo sapiens
MTKLILLTGLVLILNLQLGSAYQLTCYFTNWAQYRPGLGRFMPDNIDPCLCTHLIYAFAGRQNNEITTIEWNDVTLYQAFNGLKNKNSQLKTLLAIGGWNFGTAPFTAMVSTPENRQTFITSVIKFLRQYEFDGLDFDWEYPGSRGSPPQDKHLFTVLVQEMREAFEQEAKQINKPRLMVTAAVAAGISNIQSGYEIPQLSQYLDYIHVMTYDLHGSWEGYTGENSPLYKYPTDTGSNAYLNVDYVMNYWKDNGAPAEKLIVGFPTYGHNFILSNPSNTGIGAPTSGAGPAGPYAKESGIWAYYEICTFLKNGATQGWDAPQEVPYAYQGNVWVGYDNVKSFDIKAQWLKHNKFGGAMVWAIDLDDFTGTFCNQGKFPLISTLKKALGLQSASCTAPAQPIEPITAAPSGSGNGSGSSSSGGSSGGSGFCAGRANGLYPVANNRNAFWHCVNGVTYQQNCQAGLVFDTSCDCCNWA

SEQ ID NO: 807652 - protein, 368 aa, Homo sapiens
MVSTPENRQTFITSVIKFLRQYEFDGLDFDWEYPGSRGSPPQDKHLFTVLVQEMREAFEQEAKQINKPRLMVTAAVAAGISNIQSGYEIPQLSQYLDYIHVMTYDLHGSWEGYTGENSPLYKYPTDTGSNAYLNVDYVMNYWKDNGAPAEKLIVGFPTYGHNFILSNPSNTGIGAPTSGAGPAGPYAKESGIWAYYEICTFLKNGATQGWDAPQEVPYAYQGNVWVGYDNVKSFDIKAQWLKHNKFGGAMVWAIDLDDFTGTFCNQGKFPLISTLKKALGLQSASCTAPAQPIEPITAAPSGSGNGSGSSSSGGSSGGSGFCAGRANGLYPVANNRNAFWHCVNGVTYQQNCQAGLVFDTSCDCCNWA

SEQ ID NO: 807653 - protein, 780 aa, Homo sapiens
MTAAAASNWGLITNIVNSIVGVSVLTMPFCFKQCGIVLGALLLVFCSWMTHQSCMFLVKSASLSKRRTYAGLAFHAYGKAGKMLVETSMIGLMLGTCIAFYVVIGDLGSNFFARLFGFQVGGTFRMFLLFAVSLCIVLPLSLQRNMMASIQSFSAMALLFYTVFMFVIVLSSLKHGLFSGQWLRRVSYVRWEGVFRCIPIFGMSFACQSQVLPTYDSLDEPSVKTMSSIFASSLNVVTTFYVMVGFFGYVSFTEATAGNVLMHFPSNLVTEMLRVGFMMSVAVGFPMMILPCRQALSTLLCEQQQKDGTFAAGGYMPPLRFKALTLSVVFGTMVGGILIPNVETILGLTGATMGSLICFICPALIYKKIHKNALSSQVVLWVGLGVLVVSTVTTLSVSEEVPEDLAEEAPGGRLGEAEGLMKVEAARLSAQDPVVAVAEDGREKPKLPKEREELEQAQIKGPVDVPGREDGKEAPEEAQLDRPGQGIAVPVGEAHRHEPPVPHDKVVVDEGQDREVPEENKPPSRHAGGKAPGVQGQMAPPLPDSEREKQEPEQGEVGKRPGQAQALEEAGDLPEDPQKVPEADGQPAVQPAKEDLGPGDRGLHPRPQAVLSEQQNGLAVGGGEKAKGGPPPGNAAGDTGQPAEDSDHGGKPPLPAEKPAPGPGLPPEPREQRDVERAGGNQAASQLEGKASALQPPASGPGSGSPLPQPWGDAQVILGSPARPPFSFQPPAEQTPRRAFCSLPISSLLSGNLLSALLPFKHLRHRHMACDYRFISLAPL

SEQ ID NO: 807654 - protein, 780 aa, Homo sapiens; identical to SEQ ID NO: 807653

SEQ ID NO: 807655 - protein, 678 aa, Homo sapiens
MTAAAASNWGLITNIVNSIVGVSVLTMPFCFKQCGIVLGALLLVFCSWMTHQSCMFLVKSASLSKRRTYAGLAFHAYGKAGKMLVETSMIGLMLGTCIAFYVVIGDLGSNFFARLFGFQVGGTFRMFLLFAVSLCIVLPLSLQRNMMASIQSFSAMALLFYTVFMFVIVLSSLKHGLFSGQWLRRVSYVRWEGVFRCIPIFGMSFACQSQVLPTYDSLDEPSVKTMSSIFASSLNVVTTFYVMVGFFGYVSFTEATAGNVLMHFPSNLVTEMLRVGFMMSVAVGFPMMILPCRQALSTLLCEQQQKDGTFAAGGYMPPLRFKALTLSVVFGTMVGGILIPNVETILGLTGATMGSLICFICPALIYKKIHKNALSSQVVLWVGLGVLVVSTVTTLSVSEEVPEDLAEEAPGGRLGEAEGLMKVEAARLSAQDPVVAVAEDGREKPKLPKEREELEQAQIKGPVDVPGREDGKEAPEEAQLDRPGQGIAVPVGEAHRHEPPVPHDKVVVDEGQDREVPEENKPPSRHAGGKAPGVQGQMAPPLPDSEREKQEPEQGEVGKRPGLPPEPREQRDVERAGGNQAASQLEGKASALQPPASGPGSGSPLPQPWGDAQVILGSPARPPFSFQPPAEQTPRRAFCSLPISSLLSGNLLSALLPFKHLRHRHMACDYRFISLAPL

SEQ ID NO: 807656 - protein, 760 aa, Homo sapiens
MTAAAASNWGLITNIVNSIVGVSVLTMPFCFKQCGIVLGALLLVFCSWMTHQSCMFLVKSASLSKRRTYAGLAFHAYGKAGKMLVETSMIGLMLGTCIAFYVVIGDLGSNFFARLFGFQVGGTFRMFLLFAVSLCIVLPLSLQRNMMASIQSFSAMALLFYTVFMFVIVLSSLKHGLFSGQWLRRVSYVRWEGVFRCIPIFGMSFACQSQVLPTYDSLDEPSVKTMSSIFASSLNVVTTFYVMVGFFGYVSFTEATAGNVLMHFPSNLVTEMLRVGFMMSVAVGFPMMILPCRQALSTLLCEQQQKDGTFAAGGYMPPLRFKALTLSVVFGTMVGGILIPNVETILGLTGATMGSLICFICPALIYKKIHKNALSSQVVLWVGLGVLVVSTVTTLSVSEEVPEDLAEEAPGGRLGEAEGLMKVEAARLSAQDPVVAVAEDGREKPKLPKEREELEQAQIKGPVDVPGREDGKEAPEEAQLDRPGQGIAVPVGEAHRHEPPVPHDKVVVDEGQDREVPEENKPPSRHAGGKAPGVQGQMAPPLPDSEREKQEPEQGEVGKRPGQAQALEEAGDLPEDPQKVPEADGQPAVQPAKEDLGPGDRGLHPRPQAVLSEQQNGLAVGGGEKAKGGPPPGNAAGDTGQPAEDSDHGGKPPLPAEKPAPGPGLPPEPREQRDVERAGGNQAASQLEGKASALQPPASGPGSGSPLPQPWGDAQVILGSPARPPFSFQPPAEQTPRRAFCSLPISSLLSGNRFISLAPL

SEQ ID NO: 807657 - protein, 378 aa, Homo sapiens
MTAAAASNWGLITNIVNSIVGVSVLTMPFCFKQCGIVLGALLLVFCSWMTHQSCMFLVKSASLSKRRTYAGLAFHAYGKAGKMLVETSMIGLMLGTCIAFYVVIGDLGSNFFARLFGFQVGGTFRMFLLFAVSLCIVLPLSLQRNMMASIQSFSAMALLFYTVFMFVIVLSSLKHGLFSGQWLRRVSYVRWEGVFRCIPIFGMSFACQSQVLPTYDSLDEPSVKTMSSIFASSLNVVTTFYVMVGFFGYVSFTEATAGNVLMHFPSNLVTEMLRVGFMMSVAVGFPMMILPCRQALSTLLCEQQQKDGTFAAGGYMPPLRFKALTLSVVFGTMVGGILIPNGKAGGLPCCRGVGPGASASTKTCTVTRPAQRPSSLVS

SEQ ID NO: 807658 - protein, 510 aa, Homo sapiens
MCLVCLAEPFQALLSRRVVEEISHFKTFCFSFVQQKDGTFAAGGYMPPLRFKALTLSVVFGTMVGGILIPNVETILGLTGATMGSLICFICPALIYKKIHKNALSSQVVLWVGLGVLVVSTVTTLSVSEEVPEDLAEEAPGGRLGEAEGLMKVEAARLSAQDPVVAVAEDGREKPKLPKEREELEQAQIKGPVDVPGREDGKEAPEEAQLDRPGQGIAVPVGEAHRHEPPVPHDKVVVDEGQDREVPEENKPPSRHAGGKAPGVQGQMAPPLPDSEREKQEPEQGEVGKRPGQAQALEEAGDLPEDPQKVPEADGQPAVQPAKEDLGPGDRGLHPRPQAVLSEQQNGLAVGGGEKAKGGPPPGNAAGDTGQPAEDSDHGGKPPLPAEKPAPGPGLPPEPREQRDVERAGGNQAASQLEGKASALQPPASGPGSGSPLPQPWGDAQVILGSPARPPFSFQPPAEQTPRRAFCSLPISSLLSGNLLSALLPFKHLRHRHMACDYRFISLAPL

SEQ ID NO: 807659 - protein, 143 aa, Homo sapiens
MTAAAASNWGLITNIVNSIVGVSVLTMPFCFKQCGIVLGALLLVFCSWMTHQSCMFLVKSASLSKRRTYAGLGPHKLPLLNSDQDSRPHRAGADLLSLCLSWTPDAFLRSCLQRALLFSPTRNSMEEAPQAWAVAGVQWLLSQ

SEQ ID NO: 807660 - protein, 780 aa, Homo sapiens; identical to SEQ ID NO: 807653

SEQ ID NO: 807661 - protein, 836 aa, Homo sapiens
MSPAPTGAPGTCVDSVSRWLVVAGSSHKAVDDRTGRRPEDLLRLARGRYVSTLLQLMTAAAASNWGLITNIVNSIVGVSVLTMPFCFKQCGIVLGALLLVFCSWMTHQSCMFLVKSASLSKRRTYAGLAFHAYGKAGKMLVETSMIGLMLGTCIAFYVVIGDLGSNFFARLFGFQVGGTFRMFLLFAVSLCIVLPLSLQRNMMASIQSFSAMALLFYTVFMFVIVLSSLKHGLFSGQWLRRVSYVRWEGVFRCIPIFGMSFACQSQVLPTYDSLDEPSVKTMSSIFASSLNVVTTFYVMVGFFGYVSFTEATAGNVLMHFPSNLVTEMLRVGFMMSVAVGFPMMILPCRQALSTLLCEQQQKDGTFAAGGYMPPLRFKALTLSVVFGTMVGGILIPNVETILGLTGATMGSLICFICPALIYKKIHKNALSSQVVLWVGLGVLVVSTVTTLSVSEEVPEDLAEEAPGGRLGEAEGLMKVEAARLSAQDPVVAVAEDGREKPKLPKEREELEQAQIKGPVDVPGREDGKEAPEEAQLDRPGQGIAVPVGEAHRHEPPVPHDKVVVDEGQDREVPEENKPPSRHAGGKAPGVQGQMAPPLPDSEREKQEPEQGEVGKRPGQAQALEEAGDLPEDPQKVPEADGQPAVQPAKEDLGPGDRGLHPRPQAVLSEQQNGLAVGGGEKAKGGPPPGNAAGDTGQPAEDSDHGGKPPLPAEKPAPGPGLPPEPREQRDVERAGGNQAASQLEGKASALQPPASGPGSGSPLPQPWGDAQVILGSPARPPFSFQPPAEQTPRRAFCSLPISSLLSGNLLSALLPFKHLRHRHMACDYRFISLAPL

SEQ ID NO: 807662 - protein, 743 aa, Homo sapiens
MTAAAASNWGLITNIVNSIVGVSVLTMPFCFKQCGIVLGALLLVFCSWMTHQSCMFLVKSASLSKRRTYAGLAFHAYGKAGKMLVETSMIGLMLGTCIAFYVVIGDLGSNFFARLFGFQVGGTFRMFLLFAVSLCIVLPLSLQRNMMASIQSFSAMALLFYTVFMFVIVLSSLKHGLFSGQWLRRVSYVRWEGVFRCIPIFGMSFACQSQVLPTYDSLDEPSVKTMSSIFASSLNVVTTFYVMVGFFGYVSFTEATAGNVLMHFPSNLVTEMLRVGFMMSVAVGFPMMILPCRQALSTLLCEQQWRPSWASQELTMGSLICFICPALIYKKIHKNALSSQVVLWVGLGVLVVSTVTTLSVSEEVPEDLAEEAPGGRLGEAEGLMKVEAARLSAQDPVVAVAEDGREKPKLPKEREELEQAQIKGPVDVPGREDGKEAPEEAQLDRPGQGIAVPVGEAHRHEPPVPHDKVVVDEGQDREVPEENKPPSRHAGGKAPGVQGQMAPPLPDSEREKQEPEQGEVGKRPGQAQALEEAGDLPEDPQKVPEADGQPAVQPAKEDLGPGDRGLHPRPQAVLSEQQNGLAVGGGEKAKGGPPPGNAAGDTGQPAEDSDHGGKPPLPAEKPAPGPGLPPEPREQRDVERAGGNQAASQLEGKASALQPPASGPGSGSPLPQPWGDAQVILGSPARPPFSFQPPAEQTPRRAFCSLPISSLLSGNLLSALLPFKHLRHRHMACDYRFISLAPL

SEQ ID NO: 807663 - protein, 616 aa, Homo sapiens
MTAAAASNWGLITNIVNSIVGVSVLTMPFCFKQCGIVLGALLLVFQVLPTYDSLDEPSVKTMSSIFASSLNVVTTFYVMVGFFGYVSFTEATAGNVLMHFPSNLVTEMLRVGFMMSVAVGFPMMILPCRQALSTLLCEQQQKDGTFAAGGYMPPLRFKALTLSVVFGTMVGGILIPNVETILGLTGATMGSLICFICPALIYKKIHKNALSSQVVLWVGLGVLVVSTVTTLSVSEEVPEDLAEEAPGGRLGEAEGLMKVEAARLSAQDPVVAVAEDGREKPKLPKEREELEQAQIKGPVDVPGREDGKEAPEEAQLDRPGQGIAVPVGEAHRHEPPVPHDKVVVDEGQDREVPEENKPPSRHAGGKAPGVQGQMAPPLPDSEREKQEPEQGEVGKRPGQAQALEEAGDLPEDPQKVPEADGQPAVQPAKEDLGPGDRGLHPRPQAVLSEQQNGLAVGGGEKAKGGPPPGNAAGDTGQPAEDSDHGGKPPLPAEKPAPGPGLPPEPREQRDVERAGGNQAASQLEGKASALQPPASGPGSGSPLPQPWGDAQVILGSPARPPFSFQPPAEQTPRRAFCSLPISSLLSGNLLSALLPFKHLRHRHMACDYRFISLAPL

SEQ ID NO: 807664 - protein, 108 aa, Homo sapiens
MCLVCLAEPFQALLSRRVVEEISHFKTFCFSFVQQKDGTFAAGGYMPPLRFKALTLSVVFGTMVGGILIPNGKAGGLPCCRGVGPGASASTKTCTVTRPAQRPSSLVS

SEQ ID NO: 807665 - protein, 472 aa, Homo sapiens [sequence omitted]

SEQ ID NO: 807666 - protein, 472 aa, Homo sapiens [sequence omitted]

SEQ ID NO: 807667 - protein, 312 aa, Homo sapiens
DSEDPQVSREREFVGTLYIQESGEEQEFAQDPRKVRDCRLSTQHEESADEQKGSEAEGLKGDIISVIIANKPEASLERQCVNLENEKGTKPPLQEAGSKKGRESVPTKPTPGERRYICAECGKAFSNSSNLTKHRRTHTGEKPYVCTKCGKAFSHSSNLTLHYRTHLVDRPYDCKCGKAFGQSSDLLKHQRMHTEEAPYQCKDCGKAFSGKGSLIRHYRIHTGEKPYQCNECGKSFSQHAGLSSHQRLHTGEKPYKCKECGKAFNHSSNFNKHHRIHTGEKPYWCHHCGKTFCSKSNLSKHQRVHTGEGEAP

SEQ ID NO: 807668 - protein, 385 aa, Homo sapiens
MTKVLGMAPVLGPRPPQEQVGPLMVKVEEKEEKGKYLPSLEMFRQRFRQFGYHDTPGPREALSQLRVLCCEWLRPEIHTKEQILELLVLEQFLTILPQELQAWVQEHCPESAEEAVTLLEDLERELDEPGHQVSTPPNEQKPVWEKISSSGTAKESPSSMQPQPLETSHKYESWGPLYIQESGEEQEFAQDPRKVRGEHTLGRNLTCAPSVGKLSATAQTSPSTTEHTWWTGPMTVSVEKLLGRAQTFLNIRECTQKRRHISAKIVARLSAGKAASFVTIGSTLGRSLISVTNVGRASVSMRASAPTRDSTPERSHISVRSVGKPSTTAPTSINTTESTPGKSPTGVITVERPSVASPIFPNISESTLEREKHRNFQALLLLSLF

SEQ ID NO: 807669 - protein, 472 aa, Homo sapiens [sequence omitted]

SEQ ID NO: 807670 - protein, 295 aa, Homo sapiens
METAAAVVKLERLEAALTRALRRLQPGSVAPGNGEEVISFATVTDSTSAYSSLLTFHLSTPRSHHLYHARLWLHVLPTLPGTLCLRIFRWGPRRRRQGSRTLLAEHHITNLGWHTLTLPSSGLRGEKSGVLKLQLDCRPLEGNSTVTGQPRRLLDTAGHQQPFLELKIRANEPGAGRARRRTPTCEPATPLCCRRDHYVDFQELGWRDWILQPEGYQLNYCSGQCPPHLAGSPGIAASFHSAVFSLLKANNPWPASTSCCVPTARRPLSLLYLDHNGNVVKTDVPDMVVEACGCS

SEQ ID NO: 807671 - protein, 350 aa, Homo sapiens
MRLPDVQLWLVLLWALVRAQGTGSVCPSCGGSKLAPQAERALVLELAKQQILDGLHLTSRPRITHPPPQAALTRALRRLQPGSVAPGNGEEVISFATVTDSTSAYSSLLTFHLSTPRSHHLYHARLWLHVLPTLPGTLCLRIFRWGPRRRRQGSRTLLAEHHITNLGWHTLTLPSSGLRGEKSGVLKLQLDCRPLEGNSTVTGQPRRLLDTAGHQQPFLELKIRANEPGAGRARRRTPTCEPATPLCCRRDHYVDFQELGWRDWILQPEGYQLNYCSGQCPPHLAGSPGIAASFHSAVFSLLKANNPWPASTSCCVPTARRPLSLLYLDHNGNVVKTDVPDMVVEACGCS

SEQ ID NO: 807672 - protein, 217 aa, Homo sapiens
PQVAATLNNLAVLYGKRGRYREAEPLCQRALEIREKVLGADHPDVAKQLNNLALLCQNQGKFEDVERHYARALSIYEALGGPHDPNVAKTKNNLASAYLKQNKYQQAEELYKEILHKEDLPAPLGAPNTGTAGDAEQALRRSSSLSKIRESIRRGSEKLVSRLRGEAAAGAAGMKRAMSLNTLNVDAPRAPGTQFPSWHLDKAPRTLSASTQDLSPH

SEQ ID NO: 807673 - protein, 445 aa, Homo sapiens
MMEESGIETTPPGTPPPNPAGLAATAMSSTPVPLAATSSFSSPNVSSMESFPPLAYSTPQPPLPPVRPSAPLPFVPPPAVPSVPPLVTSMPPPVSPSTAAAFGNPPVSHFPPSTSAPNTLLPAPPSGPPISGFSVGSTYDITRGHAGRAPQTPLMPSFSAPSGTGLLPTPITQQASLTSLAQGTGTTSAITFPEEQEDPRITRGQDEASAGGIWGFIKGVAGNPMVKSVLDKTKHSVESMITTLDPGMAPYIKSGGELDIVVTSNKEVKVAAVRDAFQEVFGLAVVVGEAGQSNIAPQPVGYAAGLKGAQERIDSLRRTGVIHEKQTAVSVENFIAELLPDKWFDIGCLVVEDPVHGIHLETFTQATPVPLEFVQQAQSLTPQDYNLRWSGLLVTVGEVLEKSLLNVSRTDWHMAFTGMSRRQMIYSAARAIAGMYKQRLPPRTV

SEQ ID NO: 807674 - protein, 445 aa, Homo sapiens; identical to SEQ ID NO: 807673

SEQ ID NO: 807675 - protein, 445 aa, Homo sapiens; identical to SEQ ID NO: 807673

SEQ ID NO: 807676 - protein, 445 aa, Homo sapiens; identical to SEQ ID NO: 807673

SEQ ID NO: 807677 - protein, 445 aa, Homo sapiens; identical to SEQ ID NO: 807673

SEQ ID NO: 807678 - protein, 662 aa, Homo sapiens
MLLCPAQKTVFRLQLTTAAQCLWVYLRDKQVVVFLAYPTRAPGRNNGVTSLHWPDPTLSLSWTQEAYTEYLRSIHYISQVLLEEVETTKEAGETVPPDTSKMLKLAQQCLERAQSTAAKLGKTRLKPTMPAAAPIPQPAGRHRRVYSDEGGKLSPFLPPEIFQKLQGAESQSCKKELTPLEEASLQNQKLKAAYEARMARLDPSQAMQKTSLTLSLQRQMMENLVIAKAREETLQRKMEERRLRLQEAANRRFCSQVALTPEEREQRALYAAILEYEQDHDWPKHWKAKLKRNPGDLSLVTSLVSHLLSLPDHPIAQLLRRLQCSVYSALYPAVSRAAAPAPGCCPPTPNPGSRRLRPSQSLHCMLSPPEPSAAPRPQDSPPTPPLQTRPVGSPSPLGDTASGLPDKDSSFEDLEQFLGTSERQGRGRGVQPEPQLQQLKTAVEEIHNAVDRLLSLTLLAFEGLNTAASKDRCLACIEEPFFSPLWPLLLALYRSVHRAREAALSRSMELYRNAPPTAIGIPTKLLPQNPEAKGATGYPYCAAAQELGLLVLESCPQKKLECIVRTLRIICVCAEDYCPTPEATPQAGPRPSLQLAIGADDLLPILSFVVLRSGLPQLVSECAALEEFIHEGYLIGEEGYCLTSLQSALSYVELLPRGGLAK

SEQ ID NO: 807679 - protein, 631 aa, Homo sapiens
MAAAAGDGTVKPLQSAMKLANGAIELDTGNRPREAYTEYLRSIHYISQVLLEEVETTKEAGETVPPDTSKMLKLAQQCLERAQSTAAKLGKTRLKPTMPAAAPIPQPAGRHRRVYSDEGGKLSPFLPPEIFQKLQGAESQSCKKELTPLEEASLQNQKLKAAYEARMARLDPSQAMQKTSLTLSLQRQMMENLVIAKAREETLQRKMEERRLRLQEAANRRFCSQVALTPEEREQRALYAAILEYEQDHDWPKHWKAKLKRNPGDLSLVTSLVSHLLSLPDHPIAQLLRRLQCSVYSALYPAVSRAAAPAPGCCPPTPNPGSRRLRPSQSLHCMLSPPEPSAAPRPQDSPPTPPLQTRPVGSPSPLGDTASGLPDKDSSFEDLEQFLGTSERQGRGRGVQPEPQLQQLKTAVEEIHNAVDRLLSLTLLAFEGLNTAASKDRCLACIEEPFFSPLWPLLLALYRSVHRAREAALSRSMELYRNAPPTAIGIPTKLLPQNPEAKGATGYPYCAAAQELGLLVLESCPQKKLECIVRTLRIICVCAEDYCPTPEATPQAGPRPSLQLAIGADDLLPILSFVVLRSGLPQLVSECAALEEFIHEGYLIGEEGYCLTSLQSALSYVELLPRGGLAK

SEQ ID NO: 807680 - protein, 830 aa, Homo sapiens
GVVWLRCGLSRGWRLRCCLCSVGVVVQLLRVGRASCCSWCCASVASSVCLTVSPSVAARGCGSLGRSPAPSAVSRALVLSPGVVRSGVGVGGFGGGVLCLPPAVDDVVVSVGLSPRGAARAAPRRRPAFPPPVSALPRGQWACLPFPLPHFISAVSNSGRADCDQPSCPSPRSWGNCAPRHLQDAETSTAVSGEGPVDGRQAWWVSCSRRLSWGIPQARISSVGCGPPLDPWFTHGWKTRLKPTMPAAAPIPQPAGRHRRVYSDEGGKLSPFLPPEIFQKLQGAESQSCKNSWPQSNPGEMRETPLVSRHHWASWGLDSSLSHFQRADATGGGLPGDSPSPRGGPWDVPASPGVGRGWEPRARSDPTLGPLTLHPAPEKDGGAPAAAPGGRQQVGLLPAPGAAAGRAWPRHPPRAFLPRRFCSQVALTPEEREQRALYAAILEYEQDHDWPKHWKAKLKRNPGDLSLVTSLVSHLLSLPDHPIAQLLRRLQCSVYSALYPAVSRAAAPAPGCCPPTPNPGSRRLRPSQSLHCMLSPPEPSAAPRPQDSPPTPPLQTRPVGSPSPLGDTASGLPDKDSSFEDLEQFLGTSERQGRGRGVQPEPQLQQLKTAVEEIHNAVDRLLSLTLLAFEGLNTAASKDRCLACIEEPFFSPLWPLLLALYRSVHRAREAALSRSMELYRNAPPTAIGIPTKLLPQNPEAKGATGYPYCAAAQELGLLVLESCPQKKLECIVRTLRIICVCAEDYCPTPEATPQAGPRPSLQLAIGADDLLPILSFVVLRSGLPQLVSECAALEEFIHEGYLIGEEGYCLTSLQSALSYVELLPRGGLAK

SEQ ID NO: 807681 - protein, 585 aa, Homo sapiens
MVAQRCSMPSYGKAGLWGHSRWEMGEAIPSARPCLCKTATSQRRKTRLKPTMPAAAPIPQPAGRHRRVYSDEGGKLSPFLPPEIFQKLQGAESQSCKKELTPLEEASLQNQKLKAAYEARMARLDPSQAMQKTSLTLSLQRQMMENLVIAKAREETLQRKMEERRLRLQEAANRRFCSQVALTPEEREQRALYAAILEYEQDHDWPKHWKAKLKRNPGDLSLVTSLVSHLLSLPDHPIAQLLRRLQCSVYSALYPAVSRAAAPAPGCCPPTPNPGSRRLRPSQSLHCMLSPPEPSAAPRPQDSPPTPPLQTRPVGSPSPLGDTASGLPDKDSSFEDLEQFLGTSERQGRGRGVQPEPQLQQLKTAVEEIHNAVDRLLSLTLLAFEGLNTAASKDRCLACIEEPFFSPLWPLLLALYRSVHRAREAALSRSMELYRNAPPTAIGIPTKLLPQNPEAKGATGYPYCAAAQELGLLVLESCPQKKLECIVRTLRIICVCAEDYCPTPEATPQAGPRPSLQLAIGADDLLPILSFVVLRSGLPQLVSECAALEEFIHEGYLIGEEGYCLTSLQSALSYVELLPRGGLAK

SEQ ID NO: 807682 - protein, 70 aa, Homo sapiens
MAAAAGDGTVKPLQSAMKLANGAIELDTGNRPRVRRGGGGAWPLRVAPGGTPARGGRGRGRLGLETWERA

SEQ ID NO: 807683 - protein, 465 aa, Homo sapiens
MARLDPSQAMQKTSLTLSLQRQMMENLVIAKAREETLQRKMEERRLRLQEAANRRFCSQVALTPEEREQRALYAAILEYEQDHDWPKHWKAKLKRNPGDLSLVTSLVSHLLSLPDHPIAQLLRRLQCSVYSALYPAVSRAAAPAPGCCPPTPNPGSRRLRPSQSLHCMLSPPEPSAAPRPQDSPPTPPLQTRPVGSPSPLGDTASGLPDKDSSFEDLEQFLGTSERQGRGRGVQPEPQLQQLKTAVEEIHNAVDRLLSLTLLAFEGLNTAASKDRCLACIEEPFFSPLWPLLLALYRSVHRAREAALSRSMELYRNAPPTAIGIPTKLLPQNPEAKGATGYPYCAAAQELGLLVLESCPQKKLECIVRTLRIICVCAEDYCPTPEATPQAGPRPSLQLAIGADDLLPILSFVVLRSGLPQLVSECAALEEFIHEGYLIGEEGYCLTSLQSALSYVELLPRGGLAK

SEQ ID NO: 807684 - protein, 465 aa, Homo sapiens; identical to SEQ ID NO: 807683

SEQ ID NO: 807685 - protein, 107 aa, Homo sapiens
MAGGYGVMGDDGSIDYTVHEAWNEATNVYLIVILVSFGLFMYAKRNKRRIMRIFSVPPTEETLSEPNFYDTISKIRLRQQLEMYSISRKYDYQQPQNQADSVQLSLE

SEQ ID NO: 807686 - protein, 107 aa, Homo sapiens; identical to SEQ ID NO: 807685

SEQ ID NO: 807687 - protein, 125 aa, Homo sapiens
VPPQARTAEQEAPGTRSPMAGGYGVMGDDGSIDYTVHEAWNEATNVYLIVILVSFGLFMYAKRNKRRIMRIFSVPPTEETLSEPNFYDTISKIRLRQQLEMYSISRKYDYQQPQNQADSVQLSLE

SEQ ID NO: 807688 - protein, 107 aa, Homo sapiens; identical to SEQ ID NO: 807685

SEQ ID NO: 807689 - protein, 104 aa, Homo sapiens
LSSYPRERVSHGYTVHEAWNEATNVYLIVILVSFGLFMYAKRNKRRIMRIFSVPPTEETLSEPNFYDTISKIRLRQQLEMYSISRKYDYQQPQNQADSVQLSLE

SEQ ID NO: 807690 - protein, 119 aa, Homo sapiens
PLFNHPFMPLLPMAGGYGVMGDDGSIDYTVHEAWNEATNVYLIVILVSFGLFMYAKRNKRRIMRIFSVPPTEETLSEPNFYDTISKIRLRQQLEMYSISRKYDYQQPQNQADSVQLSLE

SEQ ID NO: 807691 - protein, 70 aa, Homo sapiens
PWSLLTIHDDVSDRRYSEDEPGNFIVNKKPAGWVWWLTPVIPGLWEAKVGGSLGQEIETLLANTVKPRLY

SEQ ID NO: 807692 - protein, 125 aa, Homo sapiens; identical to SEQ ID NO: 807687

SEQ ID NO: 807693 - protein, 107 aa, Homo sapiens; identical to SEQ ID NO: 807685

SEQ ID NO: 807694 - protein, 137 aa, Homo sapiens
QEMTKAEGVQVRSVTVSRAPGPDSGVKSPGAEQRWPRAASGAGSVSGPASPLLPVPGGAASPGPAPRRPPRPGRGGKGGGRPPALGPVRSPKLRAPARSRRGAPRRRVELRVARFRKRTRASCGGPSAGAAGARREG

SEQ ID NO: 807695 - protein, 68 aa, Homo sapiens
QEMTKAEGVQVRSVTVSRAPGPDSGVKSPGAEQRWPRAASGAGSEQKENYEDIQCATYRGNFVRAQLL

SEQ ID NO: 807696 - protein, 107 aa, Homo sapiens; identical to SEQ ID NO: 807685

SEQ ID NO: 807697 - protein, 110 aa, Homo sapiens [sequence omitted]

SEQ ID NO: 807698 - protein, 106 aa, Homo sapiens
MLAVPVRLKVGSRKPEWGTNRLTSCPAKDPLDRRLQNLRDRERVPEPQRSLRPGVQEDSREHGQVPEVSDPQACGAGAGWRPGRLPGLSLAACLLLNQLGKLYLFP

SEQ ID NO: 807699 - protein, 88 aa, Homo sapiens
GLGCYRGSQRPPAPKGPWASEALIRAGLQDVSSPCPVEGRKPKTRVGDEQTYLLSRKRSTRSSSPKPERPRTGSRAAAFSQTWRSGRF

SEQ ID NO: 807700 - protein, 285 aa, Homo sapiens [sequence omitted]

SEQ ID NO: 807701 - protein, 285 aa, Homo sapiens [sequence omitted]

SEQ ID NO: 807702 - protein, 285 aa, Homo sapiens [sequence omitted]

SEQ ID NO: 807703 - protein, 330 aa, Homo sapiens
TTLLTGYGYEDPRGFNRRGLTRAAATAARGVTSSRRLLKDLEQKMMATPNQTACNAESPVALEEAKTSGAPGSPQTPPERHDSGGSLPLTPRMESHSEDEDLAGAVGGLGWNSRSPRTQSPGGCSAEAVLARKKHRRRPSKRKRHWRPYLELSWAEKQQRDERQSQRASRVREEMFAKGQPVAPYNTTQFLMNDRDPEEPNLDVPHGISHPGSSGESEAGDSDGRGRAHGEFQRKDFSETYERFHTESLQGRSKQELVRDYLELEKRLSQAEEETRRLQQLQACTGQQSCRQVEELAAEVQRLRTENQRLRQENQMWNREGCRCDEEPGT

SEQ ID NO: 807704 - protein, 285 aa, Homo sapiens [sequence omitted]

SEQ ID NO: 807705 - protein, 285 aa, Homo sapiens [sequence omitted]

SEQ ID NO: 807706 - protein, 285 aa, Homo sapiens [sequence omitted]

SEQ ID NO: 807707 - protein, 308 aa, Homo sapiens
LVLAGILGVTSSRRLLKDLEQKMMATPNQTACNAESPVALEEAKTSGAPGSPQTPPERHDSGGSLPLTPRMESHSEDEDLAGAVGGLGWNSRSPRTQSPGGCSAEAVLARKKHRRRPSKRKRHWRPYLELSWAEKQQRDERQSQRASRVREEMFAKGQPVAPYNTTQFLMNDRDPEEPNLDVPHGISHPGSSGESEAGDSDGRGRAHGEFQRKDFSETYERFHTESLQGRSKQELVRDYLELEKRLSQAEEETRRLQQLQACTGQQSCRQVEELAAEVQRLRTENQRLRQENQMWNREGCRCDEEPGT

SEQ ID NO: 807708 - protein, 524 aa, Homo sapiens
AQSLSHTHTHTHTHTHSLTLFCAVVKPTCPAGKLPERGTKEPGRGSGQAQQPTAVESGAQVRPHSRALRGPPNFLACRSGGFRAAQSLGLSSRAAQGHVAHAGRTLSRTRTLTETPALAGLSALPVSQLPVFAPLAAAAVAAEPLPPKELCLGATSGPGPVKCGGGGGGGGEGRGAPRFRCSAEELDYYLYGQQRMEIIPLNQHTSDPNNRCDMCADNRNGECPMHGPLHSLRRLVGTSSRCGRRAPAGAAGVAAGPASRGVPLHQYCARPGLRHLRGAEDPARHLDWTFPRRASAPREGAGRRREEHAASLGVNVPSTVMEAMCRQDALQPFNKSSKLAPTTQQRSVVFPQTPCSRNFSLLDKSGPIESGFNQINVKNQRVLASPTSTSQLHSEFSDWHLWKCGQCFKTFTQRILLQMHVCTQNPDRPYQCGHCSQSFSQPSELRNHVVTHSSDRPFKCGYCGRAFAGATTLNNHIRTHTGEKPFKCERCERSFTQATQLSRHQRMPNECKPITESPESIEVD

SEQ ID NO: 807709 - protein, 100 aa, Homo sapiens
MLKPGDPGGSAFLKVDPAYLQHWQQLFPHGGAGPLKGSGAAGLLSAPQPLQPPPPPPPPERAEPPPDSLRPRPASLSSASSTPASSSTSASSASSCAAAA

SEQ ID NO: 807710 - protein, 566 aa, Homo sapiens
AQSLSHTHTHTHTHTHSLTLFCAVVKPTCPAGKLPERGTKEPGRGSGQAQQPTAVESGAQVRPHSRALRGPPNFLACRSGGFRAAQSLGLSSRAAQGHVAHAGRTLSRTRTLTETPALAGLSALPVSQLPVFAPLAAAAVAAEPLPPKELCLGATSGPGPVKCGGGGGGGGEGRGAPRFRCSAEELDYYLYGQQRMEIIPLNQHTSDPNNRCDMCADNRNGECPMHGPLHSLRRLVGTSSAAAAAPPPELPEWLRDLPREVCLCTSTVPGLAYGICAAQRIQQGTWIGPFQGVLLPPEKVQAGAVRNTQHLWEIYDQDGTLQHFIDGGEPSKSSWMRYIRCARHCGEQNLTEFSTVNVPSTVMEAMCRQDALQPFNKSSKLAPTTQQRSVVFPQTPCSRNFSLLDKSGPIESGFNQINVKNQRVLASPTSTSQLHSEFSDWHLWKCGQCFKTFTQRILLQMHVCTQNPDRPYQCGHCSQSFSQPSELRNHVVTHSSDRPFKCGYCGRAFAGATTLNNHIRTHTGEKPFKCERCERSFTQATQLSRHQRMPNECKPITESPESIEVD

SEQ ID NO: 807711 - protein, 124 aa, Homo sapiens
ETPVLSWTLMGLFDSDVQVWNCQPFQMRPYQCGHCSQSFSQPSELRNHVVTHSSDRPFKCGYCGRAFAGATTLNNHIRTHTGEKPFKCERCERSFTQATQLSRHQRMPNECKPITESPESIEVD

SEQ ID NO: 807712 - protein, 405 aa, Homo sapiens
AQSLSHTHTHTHTHTHSLTLFCAVVKPTCPAGKLPERGTKEPGRGSGQAQQPTAVESGAQVRPHSRALRGPPNFLACRSGGFRAAQSLGLSSRAAQGHVAHAGRTLSRTRTLTETPALAGLSALPVSQLPVFAPLAAAAVAAEPLPPKELCLGATSGPGPVKCGGGGGGGGEGRGAPRFRCSAEELDYYLYGQQRMEIIPLNQHTSDPNNRCDMCADNRNGECPMHGPLHSLRRLVGTSSAAAAAPPPELPEWLRDLPREVCLCTSTVPGLAYGICAAQRIQQGTWIGPFQGVLLPPEKVQAGAVRNTQHLWEIYDQDGTLQHFIDGGEPSKSSWMRYIRCARHCGEQNLTVVQYSKCPFNGNGSHVQTRRPAALQQKQQTRPYHPAALRCFPPDSVQQELLSSG

SEQ ID NO: 807713 - protein, 111 aa, Homo sapiens
MFHGDPLYSPSFCCVSLAWPDTGCPSGDHGSRVRAFAESMLPSAPDASHFHVFHAHCSCTFYTVSSKQPGLDAGESGKGRKWFQFQNSKEKVEDLFCPVKIARTCKMYGAS

SEQ ID NO: 807714 - protein, 73 aa, Homo sapiens
LSHFTAREWRQPGWGGLKIWTQTVPLPTALPPLLPSRAGASGPCLGEMWTAPAARVRSHPERPPLNSHVSPFS

SEQ ID NO: 807715 - protein, 137 aa, Homo sapiens
PLPALPRQAGGSTQRRGPGSGQTWGKPVAAVPPGPRFPSSPAPVPAPPQAQSEAAPAGYGSRRAALQVHHDELWTVCWGSPTAALFRLPRRGADRAALVAAAAAVAAASAAPPGSPALGNRLHAGGPLPAPPPAPQG

SEQ ID NO: 807716 - protein, 194 aa, Homo sapiens
PLPALPRQAGGSTQRRGPGSGQTWGKPVAAVPPGPRFPSSPAPVPAPPQAQSEAAPAGYGSRRAALQVHHDELWTVCWGSPTAALFRLPRRGADRAALVAAAAAVAAASAAPPGSPALAQVVKGKRRSPFRSESGQYCPPRAGRKTGTPREPLPTKAQPPRHRWRPSTVCNTTTCCNRLLFTNFFFTYSQNSTN

SEQ ID NO: 807717 - protein, 114 aa, Homo sapiens
GPLGEDAVASVLDVNVVGTVRVLQDFLPDMKRPGSGRVLVTGSMGGLMGLPFNDVYCASKVRARRLMRESGGSAAALGGPVSQHPRLLNPQMGLGGLSSNNPLFKCSGYPQHKN

SEQ ID NO: 807718 - protein, 120 aa, Homo sapiens
GPLGEDAVASVLDVNVVGTVRVLQDFLPDMKRPGSGRVLVTGSMGGLMGLPFNDVYCASKVRARRLMRESGGSAAALGGPVSQHPRLLNPLNSDLEMPSTLSCGSRSGLCPAYICCVPGT

SEQ ID NO: 807719 - protein, 121 aa, Homo sapiens
LALATQILTGCDEVLEMLQQVTTALINSDIADREQRLKGLEQVTKATMLGHLLPVLLTSLMHPNLQTLIMADALMPQLVQLVLYTSQTALLLKTQCPVFAEVGCSPCGAPDQKCRLFPDER

SEQ ID NO: 807720 - protein, 165 aa, Homo sapiens
MNNRKEDMEITSHYRHLLRELNEQRQHGVLCDVCVVVEGKVFKAHKNVLLGSSRYFKTLYCQVQKTSEQATVTHLDIVTAQGFKAIIDFMYSAHLALTSRNVIEVMSAASFLQMTDIVQACHDFIKAALDISIKSDASDELAEFEIGASSSSSTEALISAVMAGR

SEQ ID NO: 807721 - protein, 98 aa, Homo sapiens
MSHGGPQIGLPSIAVSISNCSPHVTLWSTLDALMERSRMCWVQKAGQFLLTRDLKDIFSRSACVKVWSMGHLHQSHLSCVLKLQIPRSHPRLTESEYL

SEQ ID NO: 807722 - protein, 139 aa, Homo sapiens
MIFMGLKLGWEQMGHELGIWGWGESTPPRPGRLKGPLWHWAGAEASRKVTGVQDMMDQEEKTEEGSGPCAEAGSPDQEGFFNLLSHVQGDRMEGQRCSLQAGPGQTTKSLCERPRRERPHPRDGQPHGHAGQYPGPPHG

SEQ ID NO: 807723 - protein, 160 aa, Homo sapiens
MLANTEHTRNFRSCFCCVSCRLEGTAPAAPIQNEVSDLRCEAGSPDQEGFFNLLSHVQGDRMEGQRCSLQAGPGQTTKSQSDPTPEMDSLMDMLASTQGRRMDDQRVTVSSLPGFQPVGSKDGAQKRAGTLSPQPLLTPQDPTALGFRRNSSPQPPTQAP

SEQ ID NO: 807724 - protein, 135 aa, Homo sapiens
MDQEEKTEEGSGPCAEAGSPDQEGFFNLLSHVQGDRMEGQRCSLQAGPGQTTKSQSDPTPEMDSLMDMLASTQGRRMDDQRVTVSSLPGFQPVGSKDGAQKRAGTLSPQPLLTPQDPTALGFRRNSSPQPPTQAP

SEQ ID NO: 807725 - protein, 86 aa, Homo sapiens
ARSRWRCTPRRHAHRWEFRHTLPGLRAKQDRRAIIPPSSPGGSVPARYTAPTRCHRAATVWAWDLDPLAFCTSGFRGSSSSSSRLG

SEQ ID NO: 807726 - protein, 191 aa, Homo sapiens
MANNSPALTGNSQPQHQAAAAAAQQQQQCGGGGATKPAVSGKQGNVLPLWGNEKTMNLNPMILTNILSSPYFKVQLYELKTYHEVVDEIYFKVTHVEPWEKGSRKTAGQTGMCGGVRGVGTGGIVSTAFCLLYKLFTLKLTRKQVMGLITHTDSPYIRALGFMYIRYTQPPTDLWDWFESFLDDEEVCQQG

SEQ ID NO: 807727 - protein, 546 aa, Homo sapiens
MANNSPALTGNSQPQHQAAAAAAQQQQQCGGGGATKPAVSGKQGNVLPLWGNEKTMNLNPMILTNILSSPYFKVQLYELKTYHEVVDEIYFKVTHVEPWEKGSRKTAGQTGMCGGVRGVGTGGIVSTAFCLLYKLFTLKLTRKQVMGLITHTDSPYIRALGFMYIRYTQPPTDLWDWFESFLDDEEDLDVKAGGGCVMTIGEMLRSFLTKLEWFSTLFPRIPVPVQKNIDQQIKTRPRKIKKDGKEGAEEIDRHVERRRSRSPRRSLSPRRSPRRSRSRSHHREGHGSSSFDRELEREKERQRLEREAKEREKERRRSRSIDRGLERRRSRSRERHRSRSRSRDRKGDRRDRDREREKENERGRRRDRDYDKERGNEREKERERSRERSKEQRSRGEVEEKKHKEDKDDRRHRDDKRDSKKEKKHSRSRSRERKHRSRSRSRNAGKRSRSRSKEKSSKHKNESKEKSNKRSRSGSQGRTDSVEKSKKREHSPSKEKSRKRSRSKERSHKRDHSDSKDQSDKHDRRRSQSIEQESQEKQHKNKDETV

SEQ ID NO: 807728 - protein, 267 aa, Homo sapiens
WSSLGVELLGVQAMRLSVNKERQRLEREAKEREKERRRSRSIDRGLERRRSRSRERHRSRSRSRDRKGDRRDRDREREKENERGRRRDRDYDKERGNEREKERERSRERSKEQRSRGEVEEKKHKEDKDDRRHRDDKRDSKKEKKHSRSRSRERKHRSRSRSRNAGKRSRSRSKEKSSKHKNESKEKSNKRSRSGSQGRTDSVEKSKKREHSPSKEKSRKRSRSKERSHKRDHSDSKDQSDKHDRRRSQSIEQESQEKQHKNKDETV

SEQ ID NO: 807729 - protein, 522 aa, Homo sapiens
MANNSPALTGNSQPQHQAAAAAAQQQQQCGGGGATKPAVSGKQGNVLPLWGNEKTMNLNPMILTNILSSPYFKVQLYELKTYHEVVDEIYFKVTHVEPWEKGSRKTAGQTGMCGGVRGVGTGGIVSTAFCLLYKLFTLKLTRKQVMGLITHTDSPYIRALGFMYIRYTQPPTDLWDWFESFLDDEEDLDVKAGGGCVMTIGEMLRSFLTKLEWFSTLFPRIPVPVQKNIDQQIKTRPRKIKKDGKEGAEEIDRHVERRRSRSPRRSLSPRRSPRRSRSRSHHREGHGSSSFDRELEREKERQRLEREAKEREKERRRSRSIDRGLERRRSRSRERHRSRSRSRDRKGDRRDRDREREKENERGRRRDRDYDKERGNEREKERERSRERSKEQRSRGEVEEKKHKEDKDDRRHRDDKRDSKKEKKHSRSRSRERKHRSRSRSRNAGKRSRSRSKEKSSKMGRKVLEEIDRHVEQQTFKVSKEISESTEVPKKVKKRSHHREGHGSSSFDRELEREKEKKCRAA

SEQ ID NO: 807730 - protein, 114 aa, Homo sapiens
  misc_feature (107)..(107): Xaa can be any naturally occurring amino acid
MANNSPALTGNSQPQHQAAAAAAQQQQQCGGGGATKPAVSGKQGNVLPLWGNEKTMNLNPMILTNILSSPYFKVQLYELKTYHEVVDEIYFKVTLREPWEKGSREMXYSILPGI

SEQ ID NO: 807731 - protein, 349 aa, Homo sapiens
MTIGEMLRSFLTKLEWFSTLFPRIPVPVQKNIDQQIKTRPRKIKKDGKEGAEEIDRHVERRRSRSPRRSLSPRRSPRRSRSRSHHREGHGSSSFDRELEREKERQRLEREAKEREKERRRSRSIDRGLERRRSRSRERHRSRSRSRDRKGDRRDRDREREKENERGRRRDRDYDKERGNEREKERERSRERSKEQRSRGEVEEKKHKEDKDDRRHRDDKRDSKKEKKHSRSRSRERKHRSRSRSRNAGKRSRSRSKEKSSKHKNESKEKSNKRSRSGSQGRTDSVEKSKKREHSPSKEKSRKRSRSKERSHKRDHSDSKDQSDKHDRRRSQSIEQESQEKQHKNKDETV

SEQ ID NO: 807732 - protein, 122 aa, Homo sapiens [sequence omitted]

SEQ ID NO: 807733 - protein, 194 aa, Homo sapiens
YPPSHFQGDESGKTLGAGRTTPWDTSAEAVSWCRKDFGREQRRQKSGLWTSYLKALRSFSPTGYVRSFFSNSSSKRAGVQWCSHGSLQLGTPGLKPSSGLNLLSSWDYRDGDEGPQKRCLYTPNQAPVGATCPGLKSQPPDAASLCQFLYLLGWTLRASPRLGSRVGVGWGWCVREDLYVALIVGSVSSAWGMG

SEQ ID NO: 807734 - protein, 112 aa, Homo sapiens
GWHRAQVHSRWLSGGGRFSHIEFVLVVDFCPRPHQFIVFFTFDPRARTPALPCPTSPTQRSTDPARGRGPPHTLVPGLSGTGLPGSASEAQKGHKEGWKKRTKRNCSSHPLP

SEQ ID NO: 807735 - protein, 613 aa, Homo sapiens
ADARPRRAAWPAALASAAALAWPGGNVDIEQLDPRGRTPLHLATTLGHLECARVLLAHGADVGRENRSGWTGGQPCSPQPHSRGLPSIIDLWLAEGSCPVTLPRPPPVLQEAAQDFYVEMKWEFTSWVPLVSKICPSDTYKVWKSGQNLRVDTTLLGFDHMTWQRGNRSFVFRGQDTSAVVMEIDHDRRVVYTETLALAGQDRELLLAAAQPTEEQVLSRLTAPVVTTQLDTKNISFERNKTGILGWRSEKTEMVNGYEAKVYGASNVELITRTRTEHLSEQHKGKVKGCKTPLQSFLGIAEQHGGPQNGTLITQTLSQANPTAITAEEYFNPNFELGNRDMGRPMELTTKTQKFKAKLWLCEEHPLSLCEQVAPIIDLMAVSNALFAKLRDFITLRLPPGFPVKIEIPIFHILNARITFGNLNGCDEPVPSVRGSPSSETPSPGSDSSSVSSSSSTTSCRGCEISPALFEAPRGYSMMGGQREAATRDDDDDLLQFAIQQSLLEAGSEYDQVTIWEALTNSKPGTHPMSYEGRRQDRSAPPTPQRQPAPPASVPSPRPSSGPGSGGHVFRSYDEQLRLAMELSAQEQEERRRRARQEEEELERILRLSLTEQ

SEQ ID NO: 807736 - protein, 613 aa, Homo sapiens; identical to SEQ ID NO: 807735

SEQ ID NO: 807737 - protein, 552 aa, Homo sapiens
ARPDLRLLFCVSMVYTGQGGGFGGEAALSSVPSPVPGHTDPKPHALSWSRPCRPDQSKPPPTSLPPVPLVSKICPSDTYKVWKSGQNLRVDTTLLGFDHMTWQRGNRSFVFRGQDTSAVVMEIDHDRRVVYTETLALAGQDRELLLAAAQPTEEQVLSRLTAPVVTTQLDTKNISFERNKTGILGWRSEKTEMVNGYEAKVYGASNVELITRTRTEHLSEQHKGKVKGCKTPLQSFLGIAEQHGGPQNGTLITQTLSQANPTAITAEEYFNPNFELGNRDMGRPMELTTKTQKFKAKLWLCEEHPLSLCEQVAPIIDLMAVSNALFAKLRDFITLRLPPGFPVKIEIPIFHILNARITFGNLNGCDEPVPSVRGSPSSETPSPGSDSSSVSSSSSTTSCRGCEISPALFEAPRGYSMMGGQREAATRDDDDDLLQFAIQQSLLEAGSEYDQVTIWEALTNSKPGTHPMSYEGRRQDRSAPPTPQRQPAPPASVPSPRPSSGPGSGGHVFRSYDEQLRLAMELSAQEQEERRRRARQEEEELERILRLSLTEQ

SEQ ID NO: 807738 - protein, 106 aa, Homo sapiens
MVPRRVGSILGWGKHQTQVDWTQRARPGPGATPTPSHQLLLASVVVHPTCPHTETDSKTLHPMVLTPGSPLPHLTHPEKHRPRQGQGPTAHPCPGPVWDWPSRLSQ

SEQ ID NO: 807739 - protein, 245 aa, Homo sapiens
  misc_feature (1)..(1): Xaa can be any naturally occurring amino acid
XSSARYEAWVSLVIFACSQAQQLEWVKSRYPGLYSRIQEFACRGQFVPVGGTWVEMDGNLPSGEAMVRQFLQGQNFFLQEFGKMCSEFWLPDTFGYSAQLPQIMHGCGIRRFLTQKLSWNLVNSFPHHTFFWEGLDGSRVLVHFPPGDSYGMQGSVEEVLKTVANNRDKGRANHSAFLFGFGDGGGGPTQTMLDRLKRLSNTDGLPGCSYLLPRQLFSALGSDSRAVCPLVGGASWGWPWGFPLS

SEQ ID NO: 807740 - protein, 463 aa, Homo sapiens
YKIKQIIIILFQIALAQRGDLSDVEEEEEEEMDVDEATGAVKKLDGVGGSPPKSKLLFSNTAAQKLRGMDEVYNLFYVNNNWYIFMRLHQILCLRLLRICSQAERQIEEENREREWEREVLGIKRDKSDSPAIQLRLKEPMDVDVEDYYPAFLDMVRSLLDGNIDSSQYEDSLREMFTIHAYIAFTMDKLIQSIVRQLQHIVSDEICVQVTDLYLAENNNGATGGQLNTQNSRSLLESTYQRKAEQLMSDENCFKLMFIQSQGQVQLTIELLDTEEENSDDPVEAERWSDYVERYMNSDTTSPELREHLAQKPVFLPRNLRRIRKCQRGREQQEKEGKEGNSKKTMENVDSLDKLECRFKLNSYKMVYVIKSEDYMYRRTALLRAHQSHERVSKRLHQRFQAWVDKWTKEHVPREMAAETSKWLMGEGLEGLVPCTTTCDTETLHFVSINKYRVKYGTVFKAP

SEQ ID NO: 807741 - protein, 463 aa, Homo sapiens; identical to SEQ ID NO: 807740

SEQ ID NO: 807742 - protein, 463 aa, Homo sapiens; identical to SEQ ID NO: 807740

SEQ ID NO: 807743 - protein, 463 aa, Homo sapiens; identical to SEQ ID NO: 807740

SEQ ID NO: 807744 - protein, 1117 aa, Homo sapiens
MASRDSTVLYGEIHFSIGIVNAMTVLPPQTPEFLVMCKSQQYTFSKACNRVSRSNLGVKLYHPAHNTLISVRYENTYFRVVWLHVEANTTFRVHRQLEPEVSRLLLLRLGLQQLRLPPVLPNGLSLCLETFESSNRQISHFILRFSLRPTISDNIGEPQKQFLASNSAQSSDSSWASESRRCSKKSCPGLGGALWTPEPLVSCRGAERERQGPSGKRSESPAMAAAPALKHWRTTLERVEKFVSPLYFTDCNLRGRCGPWSPAAGRPQPCASSFPSGEKPKLQPPGPRDKVPAAGRAGAGEEGVGNGLCRGAARQPSWRRIQGKCGPTGQLAPRRKRGGLQHVPTGPSHAGFLGPAALWLCSPASCTPERLPYQEAVQRDFRPAQVGDSFGPTWWTCWFRVELTIPEAWVGQEVHLCWESDGEGLVWRDGEPVQGLTKEGEKTSYVLTDRLGERDPRRLECNGTISAHCDRRLPGSSNSPASASLLAEIYSLTLYVEVACNGLLGAGKGSMIAAPDPEKMFQLSRAELAVFHRDVHMLLVDLELLLGIAKGLGKDNQRSFQALYTANQMVNVCDPAQPETFPVAQALASRFFGQHGGESQHTIHATGHCHIDTAWLWPFKETVRKCARSWVTALQLMERNPEFIFACSQAQQLEWVKSRYPGLYSRIQEFACRGQFVPVGGTWVEMDGNLPSGEAMVRQFLQGQNFFLQEFGKMCSEFWAAGTFGTSDSPPDLAGVGLGVFTRMGGLGSLPADFFGRPVSGLATPATKHSTRAVRTANERGPGTYGGAQAAHTTLFLLCCYSLVASLITTRLNTRQRTVKHTKKKTPEATNYDNKTTNKHRQGDETRPTKTGQTGSEDSSARTEGDEAEGQRELTEEAREATGRARGETGGDARTAEKNTREKSGLTDKKQKGERRRKDSRVDRETKQNNRAPQTTEGEQETSNEGGDAEGGRGRQTQAGRSARREAREEPEESRGSERAKQESKAGQARDRARQGSKKRRATGRQRQSTEATAAKQSRRSETQGKETKREAEQRRQERAAGHWREERETGAEKEQRGRGEREERTDEAGPGRTRGNRQKGEQKSRDTRAEERSTQARERGERAENRRRQAREKQEE

SEQ ID NO: 807745 - protein, 463 aa, Homo sapiens; identical to SEQ ID NO: 807740

SEQ ID NO: 807746 - protein, 312 aa, Homo sapiens
  misc_feature (301)..(301): Xaa can be any naturally occurring amino acid
YKIKQIIIILFQIALAQRGDLSDVEEEEEEEMDVDEATGAVKKLGGVGGSPPKSKLLFSNTAAQKLRGMDEVYNLFYVNNNWYIFMRLHQILCLRLLRICSQAERQIEEENREREWEREVLGIKRDKSDSPAIQLRLKEPMDVDVEDYYPAFLDMVRSLLDGNIDSSQYEDSLREMFTIHAYIAFTMDKLIQSIVRQLQHIVSDEICVQVTDLYLAENNNGATGGQLNTQNSRSLLESTYQRKAEQLMSDENCFKHSRGYDADKAADIIDGLRKNPSIAVPIVLKRLKMKEEEWREAQRGXNKVWREQNEKY

SEQ ID NO: 807747 - protein, 463 aa, Homo sapiens; identical to SEQ ID NO: 807740

SEQ ID NO: 807748 - protein, 463 aa, Homo sapiens; identical to SEQ ID NO: 807740

SEQ ID NO: 807749 - protein, 463 aa, Homo sapiens; identical to SEQ ID NO: 807740

SEQ ID NO: 807750 - protein, 463 aa, Homo sapiens; identical to SEQ ID NO: 807740

SEQ ID NO: 807751 - protein, 963 aa, Homo sapiens
MRRASKTVSSFQLGSKFRQQLGFREPPVFQEKLPGTGRRPLDAGTFGFLPWSGTVAPGAFRKEERGPAMAAAPALKHWRTTLERVEKFVSPLYFTDCNLRGRCGPWSPAAGRPQPCASSFPSGEKPKLQPPGPRDKVPAAGRAGAGEEGVGNGLCRGAARQPSWRRIQGKCGPTGQLAPRRKRGGLQHVPTGPSHAGFLGPAALWLCSPASCTPERLPYQEAVQRDFRPAQVGDSFGPTWWTCWFRVELTIPEAWVGQEVHLCWESDGEGLVWRDGEPVQGLTKEGEKTSYVLTDRLGERDPRRLECNGTISAHCDRRLPGSSNSPASASLLAEIYSLTLYVEVACNGLLGAGKGSMIAAPDPEKMFQLSRAELAVFHRDVHMLLVDLELLLGIAKGLGKDNQRSFQALYTANQMVNVCDPAQPETFPVAQALASRFFGQHGGESQHTIHATGHCHIDTAWLWPFKETVRKCARSWVTALQLMERNPEFIFACSQAQQLEWVKSRYPGLYSRIQEFACRGQFVPVGGTWVEMDGNLPSGEAMVRQFLQGQNFFLQEFGKMCSEFWAAGTFGTSDSPPDLAGVGLGVFTRMGGLGSLPADFFGRPVSGLATPATKHSTRAVRTANERGPGTYGGAQAAHTTLFLLCCYSLVASLITTRLNTRQRTVKHTKKKTPEATNYDNKTTNKHRQGDETRPTKTGQTGSEDSSARTEGDEAEGQRELTEEAREATGRARGETGGDARTAEKNTREKSGLTDKKQKGERRRKDSRVDRETKQNNRAPQTTEGEQETSNEGGDAEGGRGRQTQAGRSARREAREEPEESRGSERAKQESKAGQARDRARQGSKKRRATGRQRQSTEATAAKQSRRSETQGKETKREAEQRRQERAAGHWREERETGAEKEQRGRGEREERTDEAGPGRTRGNRQKGEQKSRDTRAEERSTQARERGERAENRRRQAREKQEE

SEQ ID NO: 807752 - protein, 392 aa, Homo sapiens
YKIKQIIIILFQIALAQRGDLSDVEEEEEEEMDVDEATGAVKKLGGVGGSPPKSKLLFSNTAAQKLRGMDEVYNLFYVNNNWYIFMRLHQILCLRLLRICSQAERQIEEENREREWEREVLGIKRDKSDSPAIQLRLKEPMDVDVEDYYPAFLDMVRSLLDGNIDSSQYEDSLREMFTIHAYIAFTMDKLIQSIVRQLQHIVSDEICVQVTDLYLAENNNGATGGQLNTQNSRSLLESTYQRKAEQLMSDENCFKLMFIQSQGQVQLTIELLDTEEENSDDPVEAERWSDYVERYMNSDTTSPELREHLAQKPVFLPRNLRRIRKCQRGREQQEKEGKEGNSKKTMENVDSLDKLECRFKLNSYKMVYVIKSEDYMYRRTALLRAHQVRTSN

SEQ ID NO: 807753 - protein, 131 aa, Homo sapiens
MLRPATTTWAASRHTLMALAGASRWQCMVRPVSTLPPRAVVTRDIFSMAAQEWEVLCLPCSHCCFHSTMSASSLYPFVARKNKSDKRYRRIPRPGMRRADMPTYTAVWGPKNNSDTCFYNFFNIYFYKQVT

SEQ ID NO: 807754 - protein, 90 aa, Homo sapiens
MPNQGYQLGQRHKTFLNCSLTVGGLKSTDTSDTSFLTSASVAQTNFNYRWASKKLNTLWLKGHTQKLLHQGGLDRGLEISGLPEAGDCPE

SEQ ID NO: 807755 - protein, 792 aa, Homo sapiens
MAAINPWASWGALTDQSWGMTAVDPWASWALCPQYPAWHVEGSLEEGRRATGLPAAQVQEPVTFKDVAVDFTQEEWGQLDLVQRTLYRDVMLETYGHLLSVGNQIAKPEVISLLEQGEEPWSVEQACPQRTCPEWVRNLESKALIPAQSIFEEEQSHGMKLERYIWDDPWFSRLEVLGCKDQLEMYHMNQSTAMRQMVFMQKQVLSQRSSEFCGLGAEFSQNLNFVPSQRVSQIEHFYKPDTHAQSWRCDSAIMYADKVTCENNDYDKTVYQSIQPIYPARIQTGDNLFKCTDAVKSFNHIIHFGDHKGIHTGEKLYEYKECHQIFNQSPSFNEHPRLHVGENQYNYKEYENIFYFSSFMEHQKIGTVEKAYKYNEWEKVFGYDSFLTQHTSTYTAEKPYDCNECGTSFIWSSYLIQHKKTHTGEKPYECDKCGKVFRNRSAFTKHERTHTGIKPYECNKCGKAFSWNSHLIVHKRIHTGEKPYVCNECGKSFNWNSHLIGHQRTHTGEKPFECTECGKSFSWSSHLIAHMRMHTGEKPFKCDECEKAFRDYSALSKHERTHSGAKPYKCTECGKSFSWSSHLIAHQRTHTGEKPYNCQECGKAFRERSALTKHEIIHSGIKPYECNKCGKSCSQMAHLVRHQRTHTGEKPYECNKCGKSFSQSCHLVAHRRIHTGEKPYKCNQCERSFNCSSHLIAHRRTHTGEKPYRCNECGKAFNESSSLIVHLRNHTGEKPYKCNHCEKAFCKNSSLIIHQRMHSGEKRFICSECGKAFSGHSALLQHQRNHSEEKLN

SEQ ID NO: 807756 - protein, 998 aa, Homo sapiens
GKLTGCVAGNPCSHKAWPLERDLGTSPDVLSRRASQRRVARIRFLILKRITAVTFSQSCERQMEGSLESAENSPSSSRETRYHEAPFCGWANRGPRGRDLPRPFCSGRRRWRRVVWDRDNKVHPAAGFDAGARKVPTPPRQGEAARPRNLSWRRRCPTPEVPAWNYSSQQTPRRLRSTPGKQPPLSAAEVGICCVPGQVPGQSVLGMAAINPWASWGALTDQSWGMTAVDPWASWALCPQYPAWHVEGSLEEGRRATGLPAAQVQEPVTFKDVAVDFTQEEWGQLDLVQRTLYRDVMLETYGHLLSVGNQIAKPEVISLLEQGEEPWSVEQACPQRTCPEWVRNLESKALIPAQSIFEEEQSHGMKLERYIWDDPWFSRLEVLGCKDQLEMYHMNQSTAMRQMVFMQKQVLSQRSSEFCGLGAEFSQNLNFVPSQRVSQIEHFYKPDTHAQSWRCDSAIMYADKVTCENNDYDKTVYQSIQPIYPARIQTGDNLFKCTDAVKSFNHIIHFGDHKGIHTGEKLYEYKECHQIFNQSPSFNEHPRLHVGENQYNYKEYENIFYFSSFMEHQKIGTVEKAYKYNEWEKVFGYDSFLTQHTSTYTAEKPYDCNECGTSFIWSSYLIQHKKTHTGEKPYECDKCGKVFRNRSAFTKHERTHTGIKPYECNKCGKAFSWNSHLIVHKRIHTGEKPYVCNECGKSFNWNSHLIGHQRTHTGEKPFECTECGKSFSWSSHLIAHMRMHTGEKPFKCDECEKAFRDYSALSKHERTHSGAKPYKCTECGKSFSWSSHLIAHQRTHTGEKPYNCQECGKAFRERSALTKHEIIHSGIKPYECNKCGKSCSQMAHLVRHQRTHTGEKPYECNKCGKSFSQSCHLVAHRRIHTGEKPYKCNQCERSFNCSSHLIAHRRTHTGEKPYRCNECGKAFNESSSLIVHLRNHTGEKPYKCNHCEKAFCKNSSLIIHQRMHSGEKRFICSECGKAFSGHSALLQHQRNHSEEKLN

SEQ ID NO: 807757 - protein, 360 aa, Homo sapiens
MDSSNCKVIAPLLSQRYRRMVTKDGHSTLQMDGAQRGLAYLRDAWGILMDMRWRWMMLVFSASFVVHWLVFAVLWYVLAEMNGDLELDHDAPPENHTICVKYITSFTAAFSFSLETQLTIGYGTMFPSGDCPSAIALLAIQMLLGLMLEAFITGAFVAKIARPKNRAFSIRFTDTAVVAHMDGKPNLIFQVANTRPSPLTSVRVSAVLYQERENGKLYQTSVDFHLDGISSDECPFFIFPLTYYHSITPSSPLATLLQHENPSHFELVVFLSAMQEGTGEICQRRTSYLPSEIMLHHCFASLLTRGSKGEYQIKMENFDKTVPEFPTPLVSKSPNRTDLDIHINGQSIDNFQISETGLTE

SEQ ID NO: 807758 - protein, 360 aa, Homo sapiens; identical to SEQ ID NO: 807757

SEQ ID NO: 807759 - protein, 180 aa, Homo sapiens [sequence omitted]

SEQ ID NO: 807760 - protein, 360 aa, Homo sapiens; identical to SEQ ID NO: 807757

SEQ ID NO: 807761 - protein, 876 aa, Homo sapiens
MVTKDGHSTLQMDGAQRGLAYLRDAWGILMDMRWRWMMLVFSASFVVHWLVFAVLWYVLAEMNGDLELDHDAPPENHTICVKYITSFTAAFSFSLETQLTIGYGTMFPSGDCPSAIALLAIQMLLGLMLEAFITGAFVAKIARPKNRAFSIRFTDTAVVAHMDGKPNLIFQVANTRPSPLTSVRVSAVLYQERENGKLYQTSVDFHLDGISSDECPFFIFPLTYYHSITPSSPLATLLQHENPSHFELVVFLSAMQEGTGEICQRRTSYLPSEIMLHHCFASLLTRGSKGEYQIKMENFDKTVPEFPTPLVSKSPNRTDLDIHINGQSIDNFQISETGLTESRLIHFLMYEIHPASYAATFSLLYLMFSFFNANYSSLHHGNHAYAYIRMAELTIHILENITLYITKFVPAEINVTQLDRHLYRNVAGEFIRMWYDTSNEGKMDSEDLTQLNSKKINHESLIFICKLKQQFSFKPSSLGGMTTSLYLVNILLRAGIFFKTTKIIHLVLYTMKLEYSITSLIFNNYRTKINEKNNKVQIYTYNLKAFEHDTRTHTYMFTYLWQKVIREAPAQMEPVGWYFALQGDAKFYFKTVLHNNQTVIHLNDFSNLSKNIPPPMYDSFDHIKHHDGSEFINTKIYLSLYRYKALLRYNLSEKGKKSTVDKAKDNYGNKAFSNSNSCFQLQIVFSINTKSVFIHQEEVGLDELYYFFLNLIVYKNYVSSVFYFIYAKMSPFPYVQFKMIICMIFISIKKRETVLKTKQKPKKSPYQVSNRFVAVLFCNFPYSGFCGKNERLTFPTGDDLRQESSLEINTSRVKASRCEEQGSAASHIFLLFDQKEKKIKKNSGGGLRLIIAEEYQEHRNLIIVNFCCLKILDIHS

SEQ ID NO: 807762 - protein, 495 aa, Homo sapiens
MDIKNSPSSLNSPSSYNCSQSILPLEHGSIYIPSSYVDSHHEYPAMTFYSPAVMNYSIPSNVTNLEGGPGRQTTSPNVLWPTPGHLSPLVVHRQLSHLYAEPQKSPWCEARSLEHTLPVNRETLKRKVSGNRCASPVTGPGSKRDAHFCAVCSDYASGYHYGVWSCEGCKAFFKRSIQGHNDYICPATNQCTIDKNRRKSCQACRLRKCYEVGMVKCGSRRERCGYRLVRRQRSADEQLHCAGKAKRSGGHAPRVRELLLDALSPEQLVLTLLEAEPPHVLISRPSAPFTEASMMMSLTKLADKELVHMISWAKKIPGFVELSLFDQVRLLESCWMEVLMMGLMWRSIDHPGKLIFAPDLVLDRDEGKCVEGILEIFDMLLATTSRFRELKLQHKEYLCVKAMILLNSSMYPLVTATQDADSSRKLAHLLNAVTDALVWVIAKSGISSQQQSMRLANLLMLLSHVRHARAEKASQTLTSFGMKMETLLPEATMEQ

SEQ ID NO: 807763 - protein, 495 aa, Homo sapiens; identical to SEQ ID NO: 807762

SEQ ID NO: 807764 - protein, 323 aa, Homo sapiens
MDIKNSPSSLNSPSSYNCSQSILPLEHGSIYIPSSYVDSHHEYPAMTFYSPAVMNYSIPSNVTNLEGGPGRQTTSPNVLWPTPGHLSPLVVHRQLSHLYAEPQKSPWCEARSLEHTLPVNRETLKRKVSGNRCASPVTGPGSKRDAHFCAVCSDYASGYHYGVWSCEGCKAFFKRSIQGHNDYICPATNQCTIDKNRRKSCQACRLRKCYEVGMVKCGSRRERCGYRLVRRQRSADEQLHCAGKAKRSGGHAPRVRELLLDALSPEQLVLTLLEAEPPHVLISRPSAPFTEASMMMSLTKLADKELVHMISWAKKIPGMRGNA

SEQ ID NO: 807765 - protein, 394 aa, Homo sapiens
MTFYSPAVMNYSIPSNVTNLEGGPGRQTTSPNVLWPTPGHLSPLVVHRQLSHLYAEPQKSPWCEARSLEHTLPVNRETLKRKVSGNRCASPVTGPGSKRDAHFCAVCSDYASGYHYGVWSCEGCKAFFKRSIQGHNDYICPATNQCTIDKNRRKSCQACRLRKCYEVGMVKCGSRRERCGYRLVRRQRSADEQLHCAGKAKRSGGHAPRVRELLLDALSPEQLVLTLLEAEPPHVLISRPSAPFTEASMMMSLTKLADKELVHMISWAKKIPGMYPLVTATQDADSSRKLAHLLNAVTDALVWVIAKSGISSQQQSMRLANLLMLLSHVRHASNKGMEHLLNMKCKNVVPVYDLLLEMLNAHVLRGCKSSITGSECSPAEDSKSKEGSQNPQSQ

SEQ ID NO: 807766 - protein, 330 aa, Homo sapiens
MTFYSPAVMNYSIPSNVTNLEGGPGRQTTSPNVLWPTPGHLSPLVVHRQLSHLYAEPQKSPWCEARSLEHTLPVNRETLKRKVSGNRCASPVTGPGSKRDAHFCAVCSDYASGYHYGVWSCEGCKAFFKRSIQGHNDYICPATNQCTIDKNRRKSCQACRLRKCYEVGMVKCGSRRERCGYRLVRRQRSADEQLHCAGKAKRSGGHAPRVRELLLDALSPEQLVLTLLEAEPPHVLISRPSAPFTEASMMMSLTKLADKELVHMISWAKKIPGFVELSLFDQVRLLESCWMEVLMMGLMWRSIDHPGKLIFAPDLVLDRYVPSGHSDPGC

SEQ ID NO: 807767 - protein, 530 aa, Homo sapiens
MDIKNSPSSLNSPSSYNCSQSILPLEHGSIYIPSSYVDSHHEYPAMTFYSPAVMNYSIPSNVTNLEGGPGRQTTSPNVLWPTPGHLSPLVVHRQLSHLYAEPQKSPWCEARSLEHTLPVNRETLKRKVSGNRCASPVTGPGSKRDAHFCAVCSDYASGYHYGVWSCEGCKAFFKRSIQGHNDYICPATNQCTIDKNRRKSCQACRLRKCYEVGMVKCGSRRERCGYRLVRRQRSADEQLHCAGKAKRSGGHAPRVRELLLDALSPEQLVLTLLEAEPPHVLISRPSAPFTEASMMMSLTKLADKELVHMISWAKKIPGFVELSLFDQVRLLESCWMEVLMMGLMWRSIDHPGKLIFAPDLVLDRDEGKCVEGILEIFDMLLATTSRFRELKLQHKEYLCVKAMILLNSSMYPLVTATQDADSSRKLAHLLNAVTDALVWVIAKSGISSQQQSMRLANLLMLLSHVRHASNKGMEHLLNMKCKNVVPVYDLLLEMLNAHVLRGCKSSITGSECSPAEDSKSKEGSQNPQSQ

SEQ ID NO: 807768 - protein, 513 aa, Homo sapiens
MDIKNSPSSLNSPSSYNCSQSILPLEHGSIYIPSSYVDSHHEYPAMTFYSPAVMNYSIPSNVTNLEGGPGRQTTSPNVLWPTPGHLSPLVVHRQLSHLYAEPQKSPWCEARSLEHTLPVNRETLKRKVSGNRCASPVTGPGSKRDAHFCAVCSDYASGYHYGVWSCEGCKAFFKRSIQGHNDYICPATNQCTIDKNRRKSCQACRLRKCYEVGMVKCGSRRERCGYRLVRRQRSADEQLHCAGKAKRSGGHAPRVRELLLDALSPEQLVLTLLEAEPPHVLISRPSAPFTEASMMMSLTKLADKELVHMISWAKKIPGFVELSLFDQVRLLESCWMEVLMMGLMWRSIDHPGKLIFAPDLVLDRDEGKCVEGILEIFDMLLATTSRFRELKLQHKEYLCVKAMILLNSSMYPLVTATQDADSSRKLAHLLNAVTDALVWVIAKSGISSQQQSMRLANLLMLLSHVRHASSLSLSWRLFMLREASCHGVRQTPGGAHVSVSRSRSFEACQQPRE

SEQ ID NO: 807769 - protein, 485 aa, Homo sapiens
MTFYSPAVMNYSIPSNVTNLEGGPGRQTTSPNVLWPTPGHLSPLVVHRQLSHLYAEPQKSPWCEARSLEHTLPVNRETLKRKVSGNRCASPVTGPGSKRDAHFCAVCSDYASGYHYGVWSCEGCKAFFKRSIQGHNDYICPATNQCTIDKNRRKSCQACRLRKCYEVGMVKCGSRRERCGYRLVRRQRSADEQLHCAGKAKRSGGHAPRVRELLLDALSPEQLVLTLLEAEPPHVLISRPSAPFTEASMMMSLTKLADKELVHMISWAKKIPGFVELSLFDQVRLLESCWMEVLMMGLMWRSIDHPGKLIFAPDLVLDRDEGKCVEGILEIFDMLLATTSRFRELKLQHKEYLCVKAMILLNSSMYPLVTATQDADSSRKLAHLLNAVTDALVWVIAKSGISSQQQSMRLANLLMLLSHVRHASNKGMEHLLNMKCKNVVPVYDLLLEMLNAHVLRGCKSSITGSECSPAEDSKSKEGSQNPQSQ

SEQ ID NO: 807770 - protein, 330 aa, Homo sapiens; identical to SEQ ID NO: 807766

SEQ ID NO: 807771 - protein, 449 aa, Homo sapiens
VVGPHKRRTVKMAAGLRKRGRSGSAAQAEGLCKQWLQRAWQERRLLLREPRYTLLVAACLCLAEVGITFWVIHRVAYTEIDWKAYMAEVEGVINGTYDYTQLQGDTGPLVYPAGFVYIFMGLYYATSRGTDIRMAQNIFAVLYLATLLLVFLIYHQTCKVPPFVFFFMCCASYRVHSIFVLRLFNDPVAMVLLFLSINLLLAQRWGWGCCFFSLAVSVKMNVLLFAPGLLFLLLTQFGFRGALPKLGICAGLQVVLGLPFLLENPSGYLSRSFDLGRQFLFHWTVNWRFLPEALFLHRAFHLALLTAHLTLLLLFALCRWHRTGESILSLLRDPSKRKVPPQPLTPNQIVSTLFTSNFIGICFSRSLHYQFYVWYFHTLPYLLWAMPARWLTHLLRLLVLGLIELSWNTYPSTSCSSAALHICHAVILLQLWLGPQPFPKSTQHSKKAH

SEQ ID NO: 807772 - protein, 448 aa, Homo sapiens
SNLRLGSEAGCWAGLRKRGRSGSAAQAEGLCKQWLQRAWQERRLLLREPRYTLLVAACLCLAEVGITFWVIHRVAYTEIDWKAYMAEVEGVINGTYDYTQLQGDTGPLVYPAGFVYIFMGLYYATSRGTDIRMAQNIFAVLYLATLLLVFLIYHQTCKVPPFVFFFMCCASYRVHSIFVLRLFNDPVAMVLLFLSINLLLAQRWGWGCCFFSLAVSVKMNVLLFAPGLLFLLLTQFGFRGALPKLGICAGLQVVLGLPFLLENPSGYLSRSFDLGRQFLFHWTVNWRFLPEALFLHRAFHLALLTAHLTLLLLFALCRWHRTGESILSLLRDPSKRKVPPQPLTPNQIVSTLFTSNFIGICFSRSLHYQFYVWYFHTLPYLLWAMPARWLTHLLRLLVLGLIELSWNTYPSTSCSSAALHICHAVILLQLWLGPQPFPKSTQHSKKAH

SEQ ID NO: 807773 - protein, 449 aa, Homo sapiens; identical to SEQ ID NO: 807771

SEQ ID NO: 807774 - protein, 449 aa, Homo sapiens; identical to SEQ ID NO: 807771

SEQ ID NO: 807775 - protein, 449 aa, Homo sapiens; identical to SEQ ID NO: 807771

SEQ ID NO: 807776 - protein, 390 aa, Homo sapiens
MFPAQAKENAGFSGCGGDTEIDWKAYMAEVEGVINGTYDYTQLQGDTGPLVYPAGFVYIFMGLYYATSRGTDIRMAQNIFAVLYLATLLLVFLIYHQTCKVPPFVFFFMCCASYRVHSIFVLRLFNDPVAMVLLFLSINLLLAQRWGWGCCFFSLAVSVKMNVLLFAPGLLFLLLTQFGFRGALPKLGICAGLQVVLGLPFLLENPSGYLSRSFDLGRQFLFHWTVNWRFLPEALFLHRAFHLALLTAHLTLLLLFALCRWHRTGESILSLLRDPSKRKVPPQPLTPNQIVSTLFTSNFIGICFSRSLHYQFYVWYFHTLPYLLWAMPARWLTHLLRLLVLGLIELSWNTYPSTSCSSAALHICHAVILLQLWLGPQPFPKSTQHSKKAH

SEQ ID NO: 807777 - protein, 390 aa, Homo sapiens; identical to SEQ ID NO: 807776

SEQ ID NO: 807778 - protein, 415 aa, Homo sapiens
SNLRLGSEAGCWAGLRKRGRSGSAAQAEGLCKQWLQRAWQERRLLLREPRYTLLVAACLCLAEVGITFWVIHRVALYPAGFVYIFMGLYYATSRGTDIRMAQNIFAVLYLATLLLVFLIYHQTCKVPPFVFFFMCCASYRVHSIFVLRLFNDPVAMVLLFLSINLLLAQRWGWGCCFFSLAVSVKMNVLLFAPGLLFLLLTQFGFRGALPKLGICAGLQVVLGLPFLLENPSGYLSRSFDLGRQFLFHWTVNWRFLPEALFLHRAFHLALLTAHLTLLLLFALCRWHRTGESILSLLRDPSKRKVPPQPLTPNQIVSTLFTSNFIGICFSRSLHYQFYVWYFHTLPYLLWAMPARWLTHLLRLLVLGLIELSWNTYPSTSCSSAALHICHAVILLQLWLGPQPFPKSTQHSKKAH

SEQ ID NO: 807779 - protein, 606 aa, Homo sapiens
SNLRLGSEAGCWAGLRKRGRSGSAAQAEGLCKQWLQRAWQERRLLLREPRYTLLVAACLCLAEVGITFWVIHRVAYTEIDWKAYMAEVEGVINGTYDYTQLQGDTGPLVYPAGFVYIFMGLYYATSRGTDIRMAQNIFAVLYLATLLLVFLIYHQTCKVPPFVFFFMCCASYRVHSIFVLRLFNDPVAMVLLFLSINLLLAQRWGWGCCFFRSTPLPFWSPLVFCISISSQFPAAEGVKEEPRQHGSLRAPQSESRIYRKFLPCHPPTYTHALFPSCLPPRQHSLLELVLHILNTQYMLIRISRHRDYVSASCLLQALPSNSCECRSHLGVCWRGGGGEVAVVMVGGMSLGVVCMALELISTFLSPAHPSLAVSVKMNVLLFAPGLLFLLLTQFGFRGALPKLGICAGLQVVLGLPFLLENPSGYLSRSFDLGRQFLFHWTVNWRFLPEALFLHRAFHLALLTAHLTLLLLFALCRWHRTGESILSLLRDPSKRKVPPQPLTPNQIVSTLFTSNFIGICFSRSLHYQFYVWYFHTLPYLLWAMPARWLTHLLRLLVLGLIELSWNTYPSTSCSSAALHICHAVILLQLWLGPQPFPKSTQHSKKAH

SEQ ID NO: 807780 - protein, 245 aa, Homo sapiens
TEQAGRLSSLAVSVKMNVLLFAPGLLFLLLTQFGFRGALPKLGICAGLQVVLGLPFLLENPSGYLSRSFDLGRQFLFHWTVNWRFLPEALFLHRAFHLALLTAHLTLLLLFALCRWHRTGESILSLLRDPSKRKVPPQPLTPNQIVSTLFTSNFIGICFSRSLHYQFYVWYFHTLPYLLWAMPARWLTHLLRLLVLGLIELSWNTYPSTSCSSAALHICHAVILLQLWLGPQPFPKSTQHSKKAH

SEQ ID NO: 807781 - protein, 367 aa, Homo sapiens
SNLRLGSEAWVLGWAAETRPVRFRGPGRGTLQAMAAARLARAAPAAAGAALHAAGGRLPLPGGDTEIDWKAYMAEVEGVINGTYDYTQLQGDTGPLVYPAGFVYIFMGLYYATSRGTDIRMAQNIFAVLYLATLLLVFLIYHQTCKVPPFVFFFMCCASYRVHSIFVLRLFNDPVAMVLLFLSINLLLAQRWGWGCCFFSLAVSVKMNVLLFAPGLLFLLLTQFGFRGALPKLGICAGLRTGESILSLLRDPSKRKVPPQPLTPNQIVSTLFTSNFIGICFSRSLHYQFYVWYFHTLPYLLWAMPARWLTHLLRLLVLGLIELSWNTYPSTSCSSAALHICHAVILLQLWLGPQPFPKSTQHSKKAH

SEQ ID NO: 807782 - protein, 265 aa, Homo sapiens
SNLRLGSEAGCWAGLRKRGRSGSAAQAEGLCKQWLQRAWQERRLLLREPRYTLLVAACLCLAEVGITFWVIHRVAYTEIDWKAYMAEVEGVINGTYDYTQLQGDTGPLVYPAGFVYIFMGLYYATSRGTDIRMAQNIFAVLYLATLLLVFLIYHQTCKVPPFVFFFMCCASYRVHSIFVLRLFNDPVAMVLLFLSINLLLAQRWGWGCCFFRLLVLGLIELSWNTYPSTSCSSAALHICHAVILLQLWLGPQPFPKSTQHSKKAH

SEQ ID NO: 807783 - protein, 449 aa, Homo sapiens; identical to SEQ ID NO: 807771

SEQ ID NO: 807784 - protein, 449 aa, Homo sapiens; identical to SEQ ID NO: 807771

SEQ ID NO: 807785 - protein, 449 aa, Homo sapiens; identical to SEQ ID NO: 807771

SEQ ID NO: 807786 - protein, 449 aa, Homo sapiens; identical to SEQ ID NO: 807771

SEQ ID NO: 807787 - protein, 436 aa, Homo sapiens
SNLRLGSEAWVLGWAAETRPVRFRGPGRGTLQAMAAARLARAAPAAAGAALHAAGGRLPLPGGDTEIDWKAYMAEVEGVINGTYDYTQLQGDTGPLVYPAGFVYIFMGLYYATSRGTDIRMAQNIFAVLYLATLLLVFLIYHQTCKVPPFVFFFMCCASYRVHSIFVLRLFNDPVAMVLLFLSINLLLAQRWGWGCCFFSLAVSVKMNVLLFAPGLLFLLLTQFGFRGALPKLGICAGLQVVLGLPFLLENPSGYLSRSFDLGRQFLFHWTVNWRFLPEALFLHRAFHLALLTAHLTLLLLFALCRWHRTGESILSLLRDPSKRKVPPQPLTPNQIVSTLFTSNFIGICFSRSLHYQFYVWYFHTLPYLLWAMPARWLTHLLRLLVLGLIELSWNTYPSTSCSSAALHICHAVILLQLWLGPQPFPKSTQHSKKAH

SEQ ID NO: 807788 - protein, 386 aa, Homo sapiens
VVGPHKRRTVKMAAGLRKRGRSGSAAQAEGLCKQWLQRAWQERRLLLREPRYTLLVAACLCLAEVGITFWVIHRVAYTEIDWKAYMAEVEGVINGTYDYTQLQGDTGPLVYPAGFVYIFMGLYYATSRGTDIRMAQNIFAVLYLATLLLVFLIYHQTCKVPPFVFFFMCCASYRVHSIFVLRLFNDPVAMVLLFLSINLLLAQRWGWGCCFFSLAVSVKMNVLLFAPGLLFLLLTQFGFRGALPKLGICAGLQVVLGLPFLLENPSGYLSRSFDLGRQFLFHWTVNWRFLPEALFLHRAFHLALLTAHLTLLLLFALCRWHRTGESILSLLRDPSKRKVPPQPLTPNQIVSTLFTILLLLLFLSTIETVLLAGLLAQGNLGPRATD

SEQ ID NO: 807789 - protein, 403 aa, Homo sapiens
SNLRLGSEAWVLGWAAETRPVRFRGPGRGTLQAMAAARLARAAPAAAGAALHAAGGRLPLPGGVYPAGFVYIFMGLYYATSRGTDIRMAQNIFAVLYLATLLLVFLIYHQTCKVPPFVFFFMCCASYRVHSIFVLRLFNDPVAMVLLFLSINLLLAQRWGWGCCFFSLAVSVKMNVLLFAPGLLFLLLTQFGFRGALPKLGICAGLQVVLGLPFLLENPSGYLSRSFDLGRQFLFHWTVNWRFLPEALFLHRAFHLALLTAHLTLLLLFALCRWHRTGESILSLLRDPSKRKVPPQPLTPNQIVSTLFTSNFIGICFSRSLHYQFYVWYFHTLPYLLWAMPARWLTHLLRLLVLGLIELSWNTYPSTSCSSAALHICHAVILLQLWLGPQPFPKSTQHSKKAH

SEQ ID NO: 807790 - protein, 594 aa, Homo sapiens
SNLRLGSEAWVLGWAAETRPVRFRGPGRGTLQAMAAARLARAAPAAAGAALHAAGGRLPLPGGDTEIDWKAYMAEVEGVINGTYDYTQLQGDTGPLVYPAGFVYIFMGLYYATSRGTDIRMAQNIFAVLYLATLLLVFLIYHQTCKVPPFVFFFMCCASYRVHSIFVLRLFNDPVAMVLLFLSINLLLAQRWGWGCCFFRSTPLPFWSPLVFCISISSQFPAAEGVKEYQDSMGHSGLHKASPGSIESFCPAIPQIHTCPLSILSSSQTAFLVGISPSHSKYSVYAHSHLVGIETMYLPPAYSRLFPPTVVSVGPILEFVGVAAGGGCCGDGGGYVFGCCVHGPGAESPPFLSPAHPSLAVSVKMNVLLFAPGLLFLLLTQFGFRGALPKLGICAGLQVVLGLPFLLENPSGYLSRSFDLGRQFLFHWTVNWRFLPEALFLHRAFHLALLTAHLTLLLLFALCRWHRTGESILSLLRDPSKRKVPPQPLTPNQIVSTLFTSNFIGICFSRSLHYQFYVWYFHTLPYLLWAMPARWLTHLLRLLVLGLIELSWNTYPSTSCSSAALHICHAVILLQLWLGPQPFPKSTQHSKKAH

SEQ ID NO: 807791 - protein, 655 aa, Homo sapiens
SNLRLGSEAGCWAGLRKRGRSGSAAQAEGLCKQWLQRAWQERRLLLREPRYTLLVAACLCLAEVGITFWVIHRVAYTEIDWKAYMAEVEGVINGTYDYTQLQGDTGPLVYPAGFVYIFMGLYYATSRGTDIRMAQNIFAVLYLATLLLVFLIYHQTCKVPPFVFFFMCCASYRVHSIFVLRLFNDPVAMVLLFLSINLLLAQRWGWGCCFFLEHIPFHILQLCCPAHMPCRHPAAALAGPAAFPQEHPTQQESPLKSTPFPQDLSLPSGPGVGWTLPFQINLAKSKKKKKKKKKKKKKKKKKKREGRARARDAEQRNNIKERERENERGESRGAKERGRDLTQAGTRRDEEDGDARTDDAEEKRGSARAHIAEKRRRDRKEETEGERKTEAGGGGKKNGGRARKQRGGAPNGGRDTPHKKRGGETAARARRGEEDKNKKHREERRGVRTTRSAGNASEARPPTSERRQTMQGTTQAKRGEEEKTAGKTPGRRSTPTGRRERKRKRTKARDRRDTDNKVGRGGTPRAKTLGAPHQRGEHRTKRTDEGTTERGHNKGGGRKRRRKKPTTEEGGGGRGRSRRAGGGKKKRGARRRGATQHKGQRNNEERSRDPQKEEERTPPNTKRTTRKPKQNSATPTTPPTPKNAEGERNAAAARE

SEQ ID NO: 807792 - protein, 79 aa, Homo sapiens
SNLRLGSEAWVLGWAAETRPVRFRGPGRGTLQAMAAARLARAAPAAAGAALHAAGGRLPLPGGGGHHLLGHSQGGIHRD

SEQ ID NO: 807793 - protein, 127 aa, Homo sapiens
MTTNLDLKVSMLSFISATCLLLCLNLFVAQVHWHTRDAMESDLLWTYYLNWCSDIFYMFAGIISLLNYLTSRSPACDENVTVIPTERSRLGVGPVTTVSPAKDEGPRSEMESLSVREKNLPKSGLWW

SEQ ID NO: 807794 - protein, 68 aa, Homo sapiens
VRELTAKMERREHLTLTFHSPEVPKIKGNRKYQRIISNIPGPSFSSLSLPYLLALAGSSALGSLIEEA

SEQ ID NO: 807795 - protein, 104 aa, Homo sapiens
MSALQESRRELMVQLEELMKLLKAQATGSPHTSPTHGGGRPMPMPVRSTSAGSTPTHCPQDSLSGVGGDVQEAFAQAEEGAEEEEEKMQNGKDRGKGSSAGLLV

SEQ ID NO: 807796 - protein, 623 aa, Homo sapiens
MIEESGNKRKTMAEKRQLFIEMRAQNFDVIRLSTYRTACKLRFVQKRCNLHLVDIWNMIEAFRDNGLNTLDHTTEISVSRLETVISSIYYQLNKRLPSTHQISVEQSISLLLNFMIAAYDSEGRGKLTVFSVKAMLATMCGGKMLDKLRYVFSQMSDSNGLMIFSKFDQFLKEVLKLPTAVFEGPSFGYTEHSVRTCFPQQRKIMLNMFLDTMMADPPPQCLVWLPLMHRLAHVENVFHPVECSYCRCESMMGFRYRCQQCHNYQLCQNCFWRGHAGGPHSNQHQMKEHSSWKSPAKKLSHAISKSLGCVPTREPPHPVFPEQPEKPLDLAHIVPPRPLTNMNDTMVSHMSSGVPTPTKRLQYSQDIPSHLADEHALIASYVARLQHCARVLDSPSRLDEEHRLIARYAARLAAEAGNVTRPPTDLSFNFDANKQQRQLIAELENKNREILQEIQRLRLEHEQASQPTPEKAQQNPTLLAELRLLRQRKDELEQRMSALQESRRELMVQLEELMKLLKERQAQATGSPHTSPTHGGGRPMPMPVRSTSAGSTPTHCPQDSLSGVGGDVQEAFAQGTRRNLRNDLLVAADSITNTMSSLVKELHSAEEGAEEEEEKMQNGKDRG

SEQ ID NO: 807797 - protein, 531 aa, Homo sapiens
MIEESGNKRKTMAEKRQLFIEMRAQNFDVIRLSTYRTACKLRFVQKRCNLHLVDIWNMIEAFRDNGLNTLDHTTEISVSRLETVISSIYYQLNKRLPSTHQISVEQSISLLLNFMIAAYDSEGRGKLTVFSVKAMLATMCGGKMLDKLRYVFSQMSDSNGLMIFSKFDQFLKEVLKLPTAVFEGPSFGYTEHSVRTCFPQQRKIMLNMFLDTMMADPPPQCLVWLPLMHRLAHVENVFHPVECSYCRCESMMGFRYRCQQCHNYQLCQNCFWRGHAGGPHSNQHQMKEHSSWKSPAKKLSHAISKSLGCVPTREPPHPVFPEQPEKPLDLAHIVPPRPLTNMNDTMVSHMSSGVPTPTKSVLDSPSRLDEEHRLIARYAARLAAEAGNVTRPPTDLSFNFDANKQQRQLIAELENKNREILQEIQRLRLEHEQASQPTPEKAQQNPTLLAELRLLRQRKDELEQRMSALQESRRELMVQLEELMKLLKERSRLRPQGHHIHRPPMEAAGQCPCQCAPRLPAPPPPTVRRTR

SEQ ID NO: 807798 - protein, 493 aa, Homo sapiens
ALIHWTIVSEGFNHVPDINMIEAFRDNGLNTLDHTTEISVSRLETVISSIYYQLNKRLPSTHQISVEQSISLLLNFMIAAYDSEGRGKLTVFSVKAMLATMCGGKMLDKLRYVFSQMSDSNGLMIFSKFDQFLKEVLKLPTAVFEGPSFGYTEHSVRTCFPQQRKIMLNMFLDTMMADPPPQCLVWLPLMHRLAHVENVFHPVECSYCRCESMMGFRYRCQQCHNYQLCQNCFWRGHAGGPHSNQHQMKEHSSWKSPAKKLSHAISKSLGCVPTREPPHPVFPEQPEKPLDLAHIVPPRPLTNMNDTMVSHMSSGVPTPTKSVLDSPSRLDEEHRLIARYAARLAAEAGNVTRPPTDLSFNFDANKQQRQLIAELENKNREILQEIQRLRLEHEQASQPTPEKAQQNPTLLAELRLLRQRKDELEQRMSALQESRRELMVQLEELMKLLKERSRLRPQGHHIHRPPMEAAGQCPCQCAPRLPAPPPPTVRRTR

SEQ ID NO: 807799 - protein, 327 aa, Homo sapiens
MLNMFLDTMMADPPPQCLVWLPLMHRLAHVENVFHPVECSYCRCESMMGFRYRCQQCHNYQLCQNCFWRGHAGGPHSNQHQMKEHSSWKSPAKKLSHAISKSLGCVPTREPPHPVFPEQPEKPLDLAHIVPPRPLTNMNDTMVSHMSSGVPTPTKSVLDSPSRLDEEHRLIARYAARLAAEAGNVTRPPTDLSFNFDANKQQRQLIAELENKNREILQEIQRLRLEHEQASQPTPEKAQQNPTLLAELRLLRQRKDELEQRMSALQESRRELMVQLEELMKLLKERSRLRPQGHHIHRPPMEAAGQCPCQCAPRLPAPPPPTVRRTR

SEQ ID NO: 807800 - protein, 280 aa, Homo sapiens
MGFRYRCQQCHNYQLCQNCFWRGHAGGPHSNQHQMKEHSSWKSPAKKLSHAISKSLGCVPTREPPHPVFPEQPEKPLDLAHIVPPRPLTNMNDTMVSHMSSGVPTPTKSVLDSPSRLDEEHRLIARYAARLAAEAGNVTRPPTDLSFNFDANKQQRQLIAELENKNREILQEIQRLRLEHEQASQPTPEKAQQNPTLLAELRLLRQRKDELEQRMSALQESRRELMVQLEELMKLLKERSRLRPQGHHIHRPPMEAAGQCPCQCAPRLPAPPPPTVRRTR

SEQ ID NO: 807801 - protein, 666 aa, Homo sapiens
MIEESGNKRKTMAEKRQLFIEMRAQNFDVIRLSTYRTACKLRFVQKRCNLHLVDIWNMIEAFRDNGLNTLDHTTEISVSRLETVISSIYYQLNKRLPSTHQISVEQSISLLLNFMIAAYDSEGRGKLTVFSVKAMLATMCGGKMLDKLRYVFSQMSDSNGLMIFSKFDQFLKEVLKLPTAVFEGPSFGYTEHSVRTCFPQQRKIMLNMFLDTMMADPPPQCLVWLPLMHRLAHVENVFHPVECSYCRCESMMGFRYRCQQCHNYQLCQNCFWRGHAGGPHSNQHQMKEHSSWKSPAKKLSHAISKSLGCVPTREPPHPVFPEQPEKPLDLAHIVPPRPLTNMNDTMVSHMSSGVPTPTKRLQYSQDIPSHLADEHALIASYVARLQHCARVLDSPSRLDEEHRLIARYAARLAAEAGNVTRPPTDLSFNFDANKQQRQLIAELENKNREILQEIQRLRLEHEQASQPTPEKAQQNPTLLAELRLLRQRKDELEQRMSALQESRRELMVQLEELMKLLKERQAQATGSPHTSPTHGGGRPMPMPVRSTSAGSTPTHCPQDSLSGVGGDVQEAFAQGTRRNLRNDLLVAADSITNTMSSFHRTPGPGLQAARRHSTRQGEGSQSRWEAGRGCVAQLVGLPLHSPACTSTFITPLRAWSHLRIRNSPGG

SEQ ID NO: 807802 - protein, 456 aa, Homo sapiens
MIEESGNKRKTMAEKRQLFIEMRAQNFDVIRLSTYRTACKLRFVQKRCNLHLVDIWNMIEAFRDNGLNTLDHTTEISVSRLETVISSIYYQLNKRLPSTHQISVEQSISLLLNFMIAAYDSEGRGKLTVFSVKAMLATMCGGKMLDKLRYVFSQMSDSNGLMIFSKFDQFLKEVLKLPTAVFEGPSFGYTEHSVRTCFPQQRKIMLNMFLDTMMADPPPQCLVWLPLMHRLAHVENVFHPVECSYCRCESMMGFRYRCQQCHNYQLCQNCFWRGHAGGPHSNQHQMKEHSSWKSPAKKLSHAISKSLGCVPTREPPHPVFPEQPEKPLDLAHIVPPRPLTNMNDTMVSHMSSGVPTPTKSVLDSPSRLDEEHRLIARYAARLAAEAGNVTRPPTDLSFNFDANKQQRQLIAELENKNREILQEIQRLRLEHEQASQPTPEKAQQNPTLLAELRLLR

SEQ ID NO: 807803 - protein, 318 aa, Homo sapiens
MIEESGNKRKTMAEKRQLFIEMRAQNFDVIRLSTYRTACKLRFVQKRCNLHLVDIWNMIEAFRDNGLNTLDHTTEISVSRLETVISSIYYQLNKRLPSTHQISVEQSISLLLNFMIAAYDSEGRGKLTVFSVKAMLATMCGGKMLDKLRYVFSQMSDSNGLMIFSKFDQFLKEVLKLPTAVFEGPSFGYTEHSVRTCFPQQRKIMLNMFLDTMMADPPPQCLVWLPLMHRLAHVENVFHPVECSYCRCESMMGFRYRCQQCHNYQLCQNCFWRGHAGGPHSNQHQMKEHSSWHQSCTGECIFCFHVWEDHCVLCDPVV

SEQ ID NO: 807804 - protein, 221 aa, Homo sapiens [sequence omitted]

SEQ ID NO: 807805 - protein, 193 aa, Homo sapiens
MIEESGNKRKTMAEKRQLFIEMRAQNFDVIRLSTYRTACKLRFVQKRCNLHLVDIWNMIEAFRDNGLNTLDHTTEISVSRLETVISSIYYQLNKRLPSTHQISVEQSISLLLNFMIAAYDSEGRGKLTVFSVKAMLATMCGGKMLDKLRYVFSQMSDSNGLMIFSKFDHTRAALESASSASMCGKITVFSVTQ

SEQ ID NO: 807806 - protein, 109 aa, Homo sapiens
RVTGEARKPLGWVGQGSPFEIVWGMRRPGRDLSVLFLPMLPQVSRGAGHRGSSGEYKESSASPRPLPPSSASSLPLPSCSHRSLARAVLTGEDARAQLSLPFAHPSHVP

SEQ ID NO: 807807 - protein, 527 aa, Homo sapiens
MIEESGNKRKTMAEKRQLFIEMRAQNFDVIRLSTYRTACKLRFVQKRCNLHLVDIWNMIEAFRDNGLNTLDHTTEISVSRLETVISSIYYQLNKRLPSTHQISVEQSISLLLNFMIAAYDSEGRGKLTVFSVKAMLATMCGGKMLDKLRYVFSQMSDSNGLMIFSKFDQFLKEVLKLPTAVFEGPSFGYTEHSVRTCFPQQRKIMLNMFLDTMMADPPPQCLVWLPLMHRLAHVENVFHPVECSYCRCESMMGFRYRCQQCHNYQLCQNCFWRGHAGGPHSNQHQMKEHSSWKSPAKKLSHAISKSLGCVPTREPPHPVFPEQPEKPLDLAHIVPPRPLTNMNDTMVSHMSSGVPTPTKRLQYSQDIPSHLADEHALIASYVARLQHCARVLDSPSRLDEEHRLIARYAARLAAEAGNVTRPPTDLSFNFDANKQQRQLIAELENKNREILQEIQRLRLEHEQASQPTPEKAQQNPTLLAELRLLRQRKDELEQRMSALQESRRELMVQLEELMKLLKERRKSKSRQ

SEQ ID NO: 807808 - protein, 531 aa, Homo sapiens; identical to SEQ ID NO: 807797

SEQ ID NO: 807809 - protein, 561 aa, Homo sapiens
MIEESGNKRKTMAEKRQLFIEMRAQNFDVIRLSTYRTACKLRFVQKRCNLHLVDIWNMIEAFRDNGLNTLDHTTEISVSRLETVISSIYYQLNKRLPSTHQISVEQSISLLLNFMIAAYDSEGRGKLTVFSVKAMLATMCGGKMLDKLRYVFSQMSDSNGLMIFSKFDQFLKEVLKLPTAVFEGPSFGYTEHSVRTCFPQQRKIMLNMFLDTMMADPPPQCLVWLPLMHRLAHVENVFHPVECSYCRCESMMGFRYRCQQCHNYQLCQNCFWRGHAGGPHSNQHQMKEHSSWKSPAKKLSHAISKSLGCVPTREPPHPVFPEQPEKPLDLAHIVPPRPLTNMNDTMVSHMSSGVPTPTKRLQYSQDIPSHLADEHALIASYVARLQHCARVLDSPSRLDEEHRLIARYAARLAAEAGNVTRPPTDLSFNFDANKQQRQLIAELENKNREILQEIQRLRLEHEQASQPTPEKAQQNPTLLAELRLLRQRKDELEQRMSALQESRRELMVQLEELMKLLKERSRLRPQGHHIHRPPMEAAGQCPCQCAPRLPAPPPPTVRRTR

SEQ ID NO: 807810 - protein, 394 aa, Homo sapiens
MSSPLVLADKLRYVFSQMSDSNGLMIFSKFDQFLKEVLKLPTAVFEGPSFGYTEHSVRTCFPQQRKIMLNMFLDTMMADPPPQCLVWLPLMHRLAHVENVFHPVECSYCRCESMMGFRYRCQQCHNYQLCQNCFWRGHAGGPHSNQHQMKEHSSWKSPAKKLSHAISKSLGCVPTREPPHPVFPEQPEKPLDLAHIVPPRPLTNMNDTMVSHMSSGVPTPTKSVLDSPSRLDEEHRLIARYAARLAAEAGNVTRPPTDLSFNFDANKQQRQLIAELENKNREILQEIQRLRLEHEQASQPTPEKAQQNPTLLAELRLLRQRKDELEQRMSALQESRRELMVQLEELMKLLKERSRLRPQGHHIHRPPMEAAGQCPCQCAPRLPAPPPPTVRRTR

SEQ ID NO: 807811 - protein, 352 aa, Homo sapiens
MSYDYQLTEQPANYDLYKNDATRKIMLNMFLDTMMADPPPQCLVWLPLMHRLAHVENVFHPVECSYCRCESMMGFRYRCQQCHNYQLCQNCFWRGHAGGPHSNQHQMKEHSSWKSPAKKLSHAISKSLGCVPTREPPHPVFPEQPEKPLDLAHIVPPRPLTNMNDTMVSHMSSGVPTPTKSVLDSPSRLDEEHRLIARYAARLAAEAGNVTRPPTDLSFNFDANKQQRQLIAELENKNREILQEIQRLRLEHEQASQPTPEKAQQNPTLLAELRLLRQRKDELEQRMSALQESRRELMVQLEELMKLLKERSRLRPQGHHIHRPPMEAAGQCPCQCAPRLPAPPPPTVRRTR

SEQ ID NO: 807812 - protein, 190 aa, Homo sapiens
MNDTMVSHMSSGVPTPTKSVLDSPSRLDEEHRLIARYAARLAAEAGNVTRPPTDLSFNFDANKQQRQLIAELENKNREILQEIQRLRLEHEQASQPTPEKAQQNPTLLAELRLLRQRKDELEQRMSALQESRRELMVQLEELMKLLKERSRLRPQGHHIHRPPMEAAGQCPCQCAPRLPAPPPPTVRRTR

SEQ ID NO: 807813 - protein, 306 aa, Homo sapiens
MIEESGNKRKTMAEKRQLFIEMRAQNFDVIRLSTYRTACKLRFVQKRCNLHLVDIWNMIEAFRDNGLNTLDHTTEISVSRLETVISSIYYQLNKRLPSTHQISVEQSISLLLNFMIAAYDSEGRGKLTVFSVKAMLATMCGGKMLDKLRYVFSQMSDSNGLMIFSKFDQFLKEVLKLPTAVFEGPSFGYTEHSVRTCFPQQRKIMLNMFLDTMMADPPPQCLVWLPLMHRLAHVENVFHPVECSYCRCESMMGFRYRCQQCHNYQLCQNCFWRGHAGGPHSNQHQMKEHSSWLCFICVLSVNLFDQ

SEQ ID NO: 807814 - protein, 165 aa, Homo sapiens
MTFLLLRSICLHGCLGLATVVESMTLPCCHTWVGKVNKRVTGEARKPLGWVGQGSPFEIVWGMRRPGRDLSVLFLPMLPQVSRGAGHRGSSGTEDEEQAGADMAKARSSPRGTFLSIFPPHTWTRLAGCQTSLHPPGRGEPEPVGSGEGLRGTASGPPPAQPCMY

SEQ ID NO: 807815 - protein, 155 aa, Homo sapiens
MAEGEITTFTALTEKFNLPPGNYKKPKLLYCSNGGHFLRILPDGTVDGTRDRSDQHIQLQLSAESVGEVYIKSTETGQYLAMDTDGLLYGSQTPNEECLFLERLEENHYNTYISKKHAEKNWFVGLKKNGSCKRGPRTHYGQKAILFLPLPVSSD

SEQ ID NO: 807816 - protein, 155 aa, Homo sapiens; identical to SEQ ID NO: 807815

SEQ ID NO: 807817 - protein, 155 aa, Homo sapiens; identical to SEQ ID NO: 807815

SEQ ID NO: 807818 - protein, 155 aa, Homo sapiens; identical to SEQ ID NO: 807815

SEQ ID NO: 807819 - protein, 155 aa, Homo sapiens; identical to SEQ ID NO: 807815

SEQ ID NO: 807820 - protein, 155 aa, Homo sapiens; identical to SEQ ID NO: 807815

SEQ ID NO: 807821 - protein, 96 aa, Homo sapiens
RRAPPPPLLQQQLLCKVVAGARSGVPSLPPSHAMSQGSPGVPGPHMMYRQKEKEKESNATHCAWPLVSRGFGVLAQCFSNTEVLADHLGTWFEWRF

SEQ ID NO: 807822 - protein, 60 aa, Homo sapiens
MAEGEITTFTALTEKFNLPPGNYKKPKLLYCSNGGHFLRILPDGTVDGTRDRSDQHTDTK

SEQ ID NO: 807823 - protein, 468 aa, Homo sapiens
RPPAARSGSRPVLTARGPRPRGAGAMVRGRISRLSVRDVRFPTSLGGHGADAMHTDPDYSAAYVVIETDAEDGIKGCGITFTLGKGTEVVVCAVNALAHHVLNKDLKDIVGDFRGFYRQLTSDGQLRWIGPEKGVVHLATAAVLNAVWDLWAKQEGKPVWKLLVDMDPRMLVSCIDFRYITDVLTEEDALEILQKGQIGKKEREKQMLAQGYPAYTTSCAWLGYSDDTLKQLCAQALKDGWTRFKVKVGADLQDDMRRCQIIRDMIGPEKTLMMDANQRWDVPEAVEWMSKLAKFKPLWIEEPTSPDDILGHATISKALVPLGIGIATGEQCHNRVIFKQLLQAKALQFLQIDSCRLGSVNENLSVLLMAKKFEIPVCPHAGGVGLCELVQHLIIFDYISVSASLENRVCEYVDHLHEHFKYPVMIQRASYMPPKDPGYSTEMKEESVKKHQYPDGEVWKKLLPAQEN

SEQ ID NO: 807824 - protein, 361 aa, Homo sapiens
MQKMESRGVELPSLWEKALKLIGPEKGVVHLATAAVLNAVWDLWAKQEGKPVWKLLVDMDPRMLVSCIDFRYITDVLTEEDALEILQKGQIGKKEREKQMLAQGYPAYTTSCAWLGYSDDTLKQLCAQALKDGWTRFKVKVGADLQDDMRRCQIIRDMIGPEKTLMMDANQRWDVPEAVEWMSKLAKFKPLWIEEPTSPDDILGHATISKALVPLGIGIATGEQCHNRVIFKQLLQAKALQFLQIDSCRLGSVNENLSVLLMAKKFEIPVCPHAGGVGLCELVQHLIIFDYISVSASLENRVCEYVDHLHEHFKYPVMIQRASYMPPKDPGYSTEMKEESVKKHQYPDGEVWKKLLPAQEN

SEQ ID NO: 807825 - protein, 214 aa, Homo sapiens
RPPAARSGSRPVLTARGPRPRGAGAMVRGRISRLSVRDVRFPTSLGGHGADAMHTDPDYSAAYVVIETDAEDGIKGCGITFTLGKGTEVVVCAVNALAHHVLNKDLKDIVGDFRGFYRQLTSDGQLRWIGPEKGVVHLATAAVLNAVWDLWAKQEGKPVWKLLVDMDPRMLVSCIDFRYITDVLTEEDALGEFGSFLGYTMCTHSSGMLCFLKE

SEQ ID NO: 807826 - protein, 468 aa, Homo sapiens; identical to SEQ ID NO: 807823

SEQ ID NO: 807827 - protein, 400 aa, Homo sapiens
RPPAARSGSRPVLTARGPRPRGAGAMVRGRISRLSVRDVRFPTSLGGHGADAMHTDPDYSAAYVVIETDAEDGIKGCGITFTLGKGTEVVVCAVNALAHHVLNKDLKDIVGDFRGFYRQLTSDGQLRWIGPEKGVVHLATAAVLNAVWDLWAKQEGKPVWKLLVDMDPRMLVSCIDFRYITDVLTEEDALEILQKGQIGKKEREKQMLAQGYPAYTTSCAWLGYSDDTLKQLCAQALKDGWTRFKVKVGADLQDDMRRCQIIRDMIGPEKTLMMDANQRWDVPEAVEWMSKLAKFKPLWIEEPTSPDDILGHATISKALVPLGIGIATGEQVSDAPNRWMTSPWGQYTLTSDRGHSCVLGSITCCTLSWEIFIILETGSFYQSLESDIEKVCGYFSNLYD

SEQ ID NO: 807828 - protein, 468 aa, Homo sapiens; identical to SEQ ID NO: 807823

SEQ ID NO: 807829 - protein, 468 aa, Homo sapiens; identical to SEQ ID NO: 807823

SEQ ID NO: 807830 - protein, 504 aa, Homo sapiens
RPPAARSGSRPVLTARGPRPRGAGAMVRGRISRLSVRDVRFPTSLGGHGADAMVSADAMVSADAMVSADAMVSADAMVSADAMVSADAMHTDPDYSAAYVVIETDAEDGIKGCGITFTLGKGTEVVVCAVNALAHHVLNKDLKDIVGDFRGFYRQLTSDGQLRWIGPEKGVVHLATAAVLNAVWDLWAKQEGKPVWKLLVDMDPRMLVSCIDFRYITDVLTEEDALEILQKGQIGKKEREKQMLAQGYPAYTTSCAWLGYSDDTLKQLCAQALKDGWTRFKVKVGADLQDDMRRCQIIRDMIGPEKTLMMDANQRWDVPEAVEWMSKLAKFKPLWIEEPTSPDDILGHATISKALVPLGIGIATGEQCHNRVIFKQLLQAKALQFLQIDSCRLGSVNENLSVLLMAKKFEIPVCPHAGGVGLCELVQHLIIFDYISVSASLENRVCEYVDHLHEHFKYPVMIQRASYMPPKDPGYSTEMKEESVKKHQYPDGEVWKKLLPAQEN

SEQ ID NO: 807831 - protein, 303 aa, Homo sapiens
MDPRMLVSCIDFRYITDVLTEEDALEILQKGQIGKKEREKQMLAQGYPAYTTSCAWLGYSDDTLKQLCAQALKDGWTRFKVKVGADLQDDMRRCQIIRDMIGPEKTLMMDANQRWDVPEAVEWMSKLAKFKPLWIEEPTSPDDILGHATISKALVPLGIGIATGEQCHNRVIFKQLLQAKALQFLQIDSCRLGSVNENLSVLLMAKKFEIPVCPHAGGVGLCELVQHLIIFDYISVSASLENRVCEYVDHLHEHFKYPVMIQRASYMPPKDPGYSTEMKEESVKKHQYPDGEVWKKLLPAQEN

SEQ ID NO: 807832 - protein, 455 aa, Homo sapiens
RPPAARSGSRPVLTARGPRPRGAGAMVRGRISRLSVRDVRFPTSLGGHGADAMHTDPDYSAAYVVIETDAEDGIKGCGITFTLGKGTEVVVCAVNALAHHVLNKDLKDIVGDFRGFYRQLTSDGQLRWIGPEKGVVHLATAAVLNAVWDLWAKQEGKPVWKLLVDMDPRMLVSCIDFRYITDVLTEEDALEKQMLAQGYPAYTTSCAWLGYSDDTLKQLCAQALKDGWTRFKVKVGADLQDDMRRCQIIRDMIGPEKTLMMDANQRWDVPEAVEWMSKLAKFKPLWIEEPTSPDDILGHATISKALVPLGIGIATGEQCHNRVIFKQLLQAKALQFLQIDSCRLGSVNENLSVLLMAKKFEIPVCPHAGGVGLCELVQHLIIFDYISVSASLENRVCEYVDHLHEHFKYPVMIQRASYMPPKDPGYSTEMKEESVKKHQYPDGEVWKKLLPAQEN

SEQ ID NO: 807833 - protein, 480 aa, Homo sapiens
RPPAARSGSRPVLTARGPRPRGAGAMVRGRISRLSVRDVRFPTSLGGHGADAMVSADAMVSADAMVSADAMVSADAMVSADAMVSADAMVSADAMVSADAMVARHTDPDYSAAYVVIETDAEDGIKGCGITFTLGKGTEVVVCAVNALAHHVLNKDLKDIVGDFRGFYRQLTSDGQLRWDPRMLVSCIDFRYITDVLTEEDALEILRHVKFVKYEEKQMLAQGYPAYTTSCAWLGYSDDTLKQLCAQALKDGWTRFKVKVGADLQDDMRRCQIIRDMIGPEKTLMMDANQRWDVPEAVEWMSKLAKFKPLWIEEPTSPDDILGHATISKALVPLGIGIATGEQCHNRVIFKQLLQAKALQFLQIDSCRLGSVNENLSVLLMAKKFEIPVCPHAGGVGLCELVQHLIIFDYISVSASLENRVCEYVDHLHEHFKYPVMIQRASYMPPKDPGYSTEMKEESVKKHQYPDGEVWKKLLPAQEN

SEQ ID NO: 807834 - protein, 468 aa, Homo sapiens; identical to SEQ ID NO: 807823

SEQ ID NO: 807835 - protein, 213 aa, Homo sapiens
MRRCQIIRDMIGPEKTLMMDANQRWDVPEAVEWMSKLAKFKPLWIEEPTSPDDILGHATISKALVPLGIGIATGEQCHNRVIFKQLLQAKALQFLQIDSCRLGSVNENLSVLLMAKKFEIPVCPHAGGVGLCELVQHLIIFDYISVSASLENRVCEYVDHLHEHFKYPVMIQRASYMPPKDPGYSTEMKEESVKKHQYPDGEVWKKLLPAQEN

SEQ ID NO: 807836 - protein, 143 aa, Homo sapiens
GRLLLLNSRPRRLKQLLQAKALQFLQIDSCRLGSVNENLSVLLMAKKFEIPVCPHAGGVGLCELVQHLIIFDYISVSASLENRVCEYVDHLHEHFKYPVMIQRASYMPPKDPGYSTEMKEESVKKHQYPDGEVWKKLLPAQEN

SEQ ID NO: 807837 - protein, 394 aa, Homo sapiens
RPPAARSGSRPVLTARGPRPRGAGAMVRGRISRLSVRDVRFPTSLGGHGADAMHTDPDYSAAYVVIETDAEDGIKGCGITFTLGKGTEVVVCAVNALAHHVLNKDLKDIVGDFRGFYRQLTSDGQLRWIGPEKGVVHLATAAVLNAVWDLWAKQEGKPVWKLLVDMDPRMLVSCIDFRYITDVLTEEDALEILQKGQIGKKEREKQMLAQGYPAYTTSCAWLGYSDDTLKQLCAQALKDGWTRFKVKVGADLQDDMRRCQIIRDMIGPEKTLMMDANQRWDVPEAVEWMSKLAKFKPLWIEEPTSPDDILGHATISKVGKRLLLLWQLIFLFSFPECWGQILKFLHLFPLAFPVEVAEIIVMCDKYRGYRPDIPFSTSAYTLPLFLFVLDKVSC

SEQ ID NO: 807838 - protein, 181 aa, Homo sapiens
RPPAARSGSRPVLTARGPRPRGAGAMVRGRISRLSVRDVRFPTSLGGHGADAMHTDPDYSAAYVVIETDAEDGIKGCGITFTLGKGTEVVVCAVNALAHHVLNKDLKDIVGDFRGFYRQLTSDGQLRWIGPEKGVVHLGLAFFFFFFLVFLVEMRFHHIGQACLELLTSDHLPALASQSAG

SEQ ID NO: 807839 - protein, 309 aa, Homo sapiens
  misc_feature (205)..(205): Xaa can be any naturally occurring amino acid
  misc_feature (210)..(210): Xaa can be any naturally occurring amino acid
  misc_feature (220)..(221): Xaa can be any naturally occurring amino acid
  misc_feature (226)..(226): Xaa can be any naturally occurring amino acid
  misc_feature (231)..(231): Xaa can be any naturally occurring amino acid
  misc_feature (239)..(239): Xaa can be any naturally occurring amino acid
  misc_feature (248)..(248): Xaa can be any naturally occurring amino acid
  misc_feature (253)..(253): Xaa can be any naturally occurring amino acid
  misc_feature (255)..(256): Xaa can be any naturally occurring amino acid
  misc_feature (270)..(270): Xaa can be any naturally occurring amino acid
  misc_feature (273)..(273): Xaa can be any naturally occurring amino acid
  misc_feature (281)..(281): Xaa can be any naturally occurring amino acid
  misc_feature (287)..(287): Xaa can be any naturally occurring amino acid
RPPAARSGSRPVLTARGPRPRGAGAMVRGRISRLSVRDVRFPTSLGGHGADAMVSADAMVSADAMVSADAMVSADAMVSADAMVSADAMVSADAMVSADAMVSADAMVSADAMVSADAMVSADAMHTDPDYSAAYVVIETDAEDGIKGCGITFTLGKGTEVVVCAVNALAHHVLNKDLKDIVGDFRGFYKSRSTVQGTLTNGLVXETRAXCPMSDRGRSXXRGVRXIVAKXEENKPVWXDSLWTMAPXDDWYXEXXSGPSHSCPCTRGGXPRXPADRNHLXPQPTEXPMKAPRAPLLQPPLVRMAEGPS

SEQ ID NO: 807840 - protein, 403 aa, Homo sapiens
RPPAARSGSRPVLTARGPRPRGAGAMVRGRISRLSVRDVRFPTSLGGHGADAMHTDPDYSAAYVVIETDAEDGIKGCGITFTLGKGTEVVVCAVNALAHHVLNKDLKDIVGDFRGFYRQLTSDGQLRWIGPEKGVVHLATAAVLNAVWDLWAKQEGKPVWKLLVDMASSPPVTCQDPRMLVSCIDFRYITDVLTEEDALEILQKGQIGKKEREKQMLAQGYPAYTTSCAWLGYSDDTLKQLCAQALKDGWTRFKVKVGADLQDDMRRCQIIRDMIGPEKTLMMDANQRWDVPEAVEWMSKLAKFKPLWIEEPTSPDDILGHATISKVGKRLLLLWQLIFLFSFPECWGQILKFLHLFPLAFPVEVAEIIVMCDKYRGYRPDIPFSTSAYTLPLFLFVLDKVSC

SEQ ID NO: 807841 - protein, 167 aa, Homo sapiens
RPPAARSGSRPVLTARGPRPRGAGAMVRGRISRLSVRDVRFPTSLGGHGADAMHTDPDYSAAYVVIETDAEDGIKGCGITFTLGKGTEVVVCAVNALAHHVLNKDLKDIVGDFRGFYRQLTSDGQLRWIGPEKGVVHLATAAVLNAVWDLWAKQEGKPVWKLLVDMG

SEQ ID NO: 807842 - protein, 468 aa, Homo sapiens; identical to SEQ ID NO: 807823

SEQ ID NO: 807843 - protein, 299 aa, Homo sapiens
MLVSCIDFRYITDVLTEEDALEILQKGQIGKKEREKQMLAQGYPAYTTSCAWLGYSDDTLKQLCAQALKDGWTRFKVKVGADLQDDMRRCQIIRDMIGPEKTLMMDANQRWDVPEAVEWMSKLAKFKPLWIEEPTSPDDILGHATISKALVPLGIGIATGEQCHNRVIFKQLLQAKALQFLQIDSCRLGSVNENLSVLLMAKKFEIPVCPHAGGVGLCELVQHLIIFDYISVSASLENRVCEYVDHLHEHFKYPVMIQRASYMPPKDPGYSTEMKEESVKKHQYPDGEVWKKLLPAQEN

SEQ ID NO: 807844 - protein, 319 aa, Homo sapiens
RPPAARSGSRPVLTARGPRPRGAGAMVRGRISRLSVRDVRFPTSLGGHGADAMHTDPDYSAAYVVIETDAEDGIKGCGITFTLGKGTEVVVCAVNALAHHVLNKDLKDIVGDFRGFYRQLTSDGQLRWIGPEKGVVHLATAAVLNAVWDLWAKQEGKPVWKLLVDMDPRMLVSCIDFRYITDVLTEEDALEILQKGQIGKKEREKQMLAQGYPAYTTSCAWLGYSDDTLKQLCAQALKDGWTRFKVKVGADLQDDMRRCQIIRDMIGPEKTLMMDANQRWDVPEAVEWMSKLAKFKPLWIEEPTSPDDILGHATISKGV

SEQ ID NO: 807845 - protein, 393 aa, Homo sapiens
RPPAARSGSRPVLTARGPRPRGAGAMVRGRISRLSVRDVRFPTSLGGHGADAMIGPEKGVVHLATAAVLNAVWDLWAKQEGKPVWKLLVDMDPRMLVSCIDFRYITDVLTEEDALEILQKGQIGKKEREKQMLAQGYPAYTTSCAWLGYSDDTLKQLCAQALKDGWTRFKVKVGADLQDDMRRCQIIRDMIGPEKTLMMDANQRWDVPEAVEWMSKLAKFKPLWIEEPTSPDDILGHATISKALVPLGIGIATGEQCHNRVIFKQLLQAKALQFLQIDSCRLGSVNENLSVLLMAKKFEIPVCPHAGGVGLCELVQHLIIFDYISVSASLENRVCEYVDHLHEHFKYPVMIQRASYMPPKDPGYSTEMKEESVKKHQYPDGEVWKKLLPAQEN

SEQ ID NO: 807846 - protein, 392 aa, Homo sapiens
RPPAARSGSRPVLTARGPRPRGAGAMVRGRISRLSVRDVRFPTSLGGHGADAMHTDPDYSAAYVVIETDAEDGIKGCGITFTLGKGTEVDWSRKGRGAPGDSGRPKRGVGLVGQAGGKACLEVTCGHEKQMLAQGYPAYTTSCAWLGYSDDTLKQLCAQALKDGWTRFKVKVGADLQDDMRRCQIIRDMIGPEKTLMMDANQRWDVPEAVEWMSKLAKFKPLWIEEPTSPDDILGHATISKALVPLGIGIATGEQCHNRVIFKQLLQAKALQFLQIDSCRLGSVNENLSVLLMAKKFEIPVCPHAGGVGLCELVQHLIIFDYISVSASLENRVCEYVDHLHEHFKYPVMIQRASYMPPKDPGYSTEMKEESVKKHQYPDGEVWKKLLPAQEN

SEQ ID NO: 807847 - protein, 273 aa, Homo sapiens
MLTALCFHKKQMLAQGYPAYTTSCAWLGYSDDTLKQLCAQALKDGWTRFKVKVGADLQDDMRRCQIIRDMIGPEKTLMMDANQRWDVPEAVEWMSKLAKFKPLWIEEPTSPDDILGHATISKALVPLGIGIATGEQCHNRVIFKQLLQAKALQFLQIDSCRLGSVNENLSVLLMAKKFEIPVCPHAGGVGLCELVQHLIIFDYISVSASLENRVCEYVDHLHEHFKYPVMIQRASYMPPKDPGYSTEMKEESVKKHQYPDGEVWKKLLPAQEN

SEQ ID NO: 807848 - protein, 70 aa, Homo sapiens
GEGGAVHVGRSAAGAWAGTPQKEICRALVRNGAGGGSSAVLTFSSADTQSPPARMCSPGHPLPVLSLHMA

SEQ ID NO: 807849 - protein, 400 aa, Homo sapiens; identical to SEQ ID NO: 807827

SEQ ID NO: 807850 - protein, 236 aa, Homo sapiens
RPPAARSGSRPVLTARGPRPRGAGAMVRGRISRLSVRDVRFPTSLGGHGADAMHTDPDYSAAYVVIETDAEDGIKGCGITFTLGKGTEVVVCAVNALAHHVLNKDLKDIVGDFRGFYRQLTSDGQLRWIGPEKGVVHLATAAVLNAVWDLWAKQEGKPVWKLLVDMVSSIVNVTIVSVNEMDIIDEHFKYPVMIQRASYMPPKDPGYSTEMKEESVKKHQYPDGEVWKKLLPAQEN

SEQ ID NO: 807851 - protein, 218 aa, Homo sapiens
RPPAARSGSRPVLTARGPRPRGAGAMVRGRISRLSVRDVRFPTSLGGHGADAMVSADAMVSADAMVSADAMVSADAMVSADAMVSADAMVSADAMVSADAMVSADAMVSADAMVSADAMVSADAMHTDPDYSAAYVVIETDAEDGIKGCGITFTLGKGTEVVVCAVNALAHHVLNKDLKDIVGDFRGFYRQLTSDGQLRWIGPEKAVHLAPIGILYIN

SEQ ID NO: 807852 - protein, 226 aa, Homo sapiens
AAGFAPCWGFGGGGGAGARFLVTQAAGPRTHGAGRAGHLFGARGGGRRGREIRPDGPRGACADRHCQLLTPQVPPGPRGPRSGVACPARAAGPRDDGQWTDGARSSAHARQGGTFRPPGTGAPRPDAAVCEWARGDSPAGRTPEHEAVEEDAVGCADSRGTCQRLSQARRSQRGGRGASGSGREGSVTPQAVTPVPQPAPRSYRSPTADTPIPPLPNSRHPPQSHS

SEQ ID NO: 807853 - protein, 331 aa, Homo sapiens
MLSPERLALPDYEYLAQRHVLTYMEDAVCQLLENREDISQYGIARFFTEYFNSVCQGTHILFREFSFVQATPHNRVSFLRAFWRCFRTVGKNGDLLTMKEYHCLLQLLCPDFPLELTQKAARIVLMDDAMDCLMSFSDFLFAFQIQFYYSEFLDSVAAIYEDLLSGKNPNTVIVPTSSSGQHRQRPALGGAGTLEGVEASLFYQCLENLCDRHKYSCPPPALVKEALSNVQRLTFYGFLMALSKHRGINQALGALPDKGDLMHDPAMDEELERLLAQVPGLVNSVTASPEASCLPSRTPPRVGSPWRPLHHSRKVDGESDGSTEETDESET

SEQ ID NO: 807854 - protein, 95 aa, Homo sapiens
DQGEDPPDDSHPHRGWMGALHPAPRGGRPEGEVRRAQRGPRAEFGTSPNKVHLLTATPLRGRTRIATQGLAPSRVTPATQVPGGHNRCGLLENSQ

SEQ ID NO: 807855 - protein, 326 aa, Homo sapiens
MLSPERLALPDYEYLAQRHVLTYMEDAVCQLLENREDISQYGIARFFTEYFNSVCQGTHILFREFSFVQATPHNRVSFLRAFWRCFRTVGKNGDLLTMKEYHCLLQLLCPDFPLELTQKAARIVLMDDAMDCLMSFSDFLFAFQIQFYYSEFLDSVAAIYEDLLSGKNPNTVIVPTSSSGQHRQRPALGGAGTLEGVEASLFYQCLENLCDRHKYSCPPPALVKEALSNVQRLTFYGFLMALSKHRGINQALGALPDKGDLMHDPAMDEELERLVSVKWEDTAPLWGPDGSDTAVPHLGPTPLVCNIPHLPGKGLGASGGLRCPSL

SEQ ID NO: 807856 - protein, 331 aa, Homo sapiens; identical to SEQ ID NO: 807853

SEQ ID NO: 807857 - protein, 337 aa, Homo sapiens
MLSPERLALPDYEYLAQRHVLTYMEDAVCQLLENREDISQYGIARFFTEYFNSVCQGTHILFREFSFVQATPHNRVSFLRAFWRCFRTVGKNGDLLTMKEYHCLLQLLCPDFPLELTQKAARIVLMDDAMDCLMSFSDFLFAFQIQFYYSEFLDSVAAIYEDLLSGKNPNTVIVPTSSSGQHRQRPALGGAGTLEGVEASLFYQCLENLCDRHKYSCPPPALVKEALSNVQRLTFYGFLMALSKHRGINQALGALPDKGDLMHDPAMDEELERLLLPFFRLAQVPGLVNSVTASPEASCLPSRTPPRVGSPWRPLHHSRKVDGESDGSTEETDESET

SEQ ID NO: 807858 - protein, 328 aa, Homo sapiens
MGQGPDWPLKLQVNLGSGSRRAGALKPPRSKDAESGAPSPTGLRVSGFNSVCQGTHILFREFSFVQATPHNRVSFLRAFWRCFRTVGKNGDLLTMKEYHCLLQLLCPDFPLELTQKAARIVLMDDAMDCLMSFSDFLFAFQIQFYYSEFLDSVAAIYEDLLSGKNPNTVIVPTSSSGQHRQRPALGGAGTLEGVEASLFYQCLENLCDRHKYSCPPPALVKEALSNVQRLTFYGFLMALSKHRGINQALGALPDKGDLMHDPAMDEELERLLAQVPGLVNSVTASPEASCLPSRTPPRVGSPWRPLHHSRKVDGESDGSTEETDESET

SEQ ID NO: 807859 - protein, 306 aa, Homo sapiens
AGTGRSGGMDAESGAPSPTGLRVSGFNSVCQGTHILFREFSFVQATPHNRVSFLRAFWRCFRTVGKNGDLLTMKEYHCLLQLLCPDFPLELTQKAARIVLMDDAMDCLMSFSDFLFAFQIQFYYSEFLDSVAAIYEDLLSGKNPNTVIVPTSSSGQHRQRPALGGAGTLEGVEASLFYQCLENLCDRHKYSCPPPALVKEALSNVQRLTFYGFLMALSKHRGINQALGALPDKGDLMHDPAMDEELERLLAQVPGLVNSVTASPEASCLPSRTPPRVGSPWRPLHHSRKVDGESDGSTEETDESET

SEQ ID NO: 807860 - protein, 353 aa, Homo sapiens
MLSPERLALPDYEYLAQRHVLTYMEDAVCQLLENREDISQYGIARFFTEYALQKLDLLNCVTYFSGTSGSTCFNSVCQGTHILFREFSFVQATPHNRVSFLRAFWRCFRTVGKNGDLLTMKEYHCLLQLLCPDFPLELTQKAARIVLMDDAMDCLMSFSDFLFAFQIQFYYSEFLDSVAAIYEDLLSGKNPNTVIVPTSSSGQHRQRPALGGAGTLEGVEASLFYQCLENLCDRHKYSCPPPALVKEALSNVQRLTFYGFLMALSKHRGINQALGALPDKGDLMHDPAMDEELERLLAQVPGLVNSVTASPEASCLPSRTPPRVGSPWRPLHHSRKVDGESDGSTEETDESET

SEQ ID NO: 807861 - protein, 329 aa, Homo sapiens
SCHNSEASPAMWNSQRHVLTYMEDAVCQLLENREDISQYGIARFFTEYFNSVCQGTHILFREFSFVQATPHNRVSFLRAFWRCFRTVGKNGDLLTMKEYHCLLQLLCPDFPLELTQKAARIVLMDDAMDCLMSFSDFLFAFQIQFYYSEFLDSVAAIYEDLLSGKNPNTVIVPTSSSGQHRQRPALGGAGTLEGVEASLFYQCLENLCDRHKYSCPPPALVKEALSNVQRLTFYGFLMALSKHRGINQALGALPDKGDLMHDPAMDEELERLLAQVPGLVNSVTASPEASCLPSRTPPRVGSPWRPLHHSRKVDGESDGSTEETDESET

SEQ ID NO: 807862 - protein, 323 aa, Homo sapiens
MGQGPDWPLKLQVNLGSGSRRAGALKPPRSKDAESGAPSPTGLRVSGFNSVCQGTHILFREFSFVQATPHNRVSFLRAFWRCFRTVGKNGDLLTMKEYHCLLQLLCPDFPLELTQKAARIVLMDDAMDCLMSFSDFLFAFQIQFYYSEFLDSVAAIYEDLLSGKNPNTVIVPTSSSGQHRQRPALGGAGTLEGVEASLFYQCLENLCDRHKYSCPPPALVKEALSNVQRLTFYGFLMALSKHRGINQALGALPDKGDLMHDPAMDEELERLVSVKWEDTAPLWGPDGSDTAVPHLGPTPLVCNIPHLPGKGLGASGGLRCPSL

SEQ ID NO: 807863 - protein, 247 aa, Homo sapiens
MELPGSSLNNLLTMKEYHCLLQLLCPDFPLELTQKAARIVLMDDAMDCLMSFSDFLFAFQIQFYYSEFLDSVAAIYEDLLSGKNPNTVIVPTSSSGQHRQRPALGGAGTLEGVEASLFYQCLENLCDRHKYSCPPPALVKEALSNVQRLTFYGFLMALSKHRGINQALGALPDKGDLMHDPAMDEELERLLAQVPGLVNSVTASPEASCLPSRTPPRVGSPWRPLHHSRKVDGESDGSTEETDESET

SEQ ID NO: 807864 - protein, 253 aa, Homo sapiens
MLSPERLALPDYEYLDLLTMKEYHCLLQLLCPDFPLELTQKAARIVLMDDAMDCLMSFSDFLFAFQIQFYYSEFLDSVAAIYEDLLSGKNPNTVIVPTSSSGQHRQRPALGGAGTLEGVEASLFYQCLENLCDRHKYSCPPPALVKEALSNVQRLTFYGFLMALSKHRGINQALGALPDKGDLMHDPAMDEELERLLAQVPGLVNSVTASPEASCLPSRTPPRVGSPWRPLHHSRKVDGESDGSTEETDESET

SEQ ID NO: 807865 - protein, 251 aa, Homo sapiens
MQRPNVFLSISTSDLLTMKEYHCLLQLLCPDFPLELTQKAARIVLMDDAMDCLMSFSDFLFAFQIQFYYSEFLDSVAAIYEDLLSGKNPNTVIVPTSSSGQHRQRPALGGAGTLEGVEASLFYQCLENLCDRHKYSCPPPALVKEALSNVQRLTFYGFLMALSKHRGINQALGALPDKGDLMHDPAMDEELERLLAQVPGLVNSVTASPEASCLPSRTPPRVGSPWRPLHHSRKVDGESDGSTEETDESET

SEQ ID NO: 807866 - protein, 304 aa, Homo sapiens
AFCLLPQFRGLPSHVELFNSVCQGTHILFREFSFVQATPHNRVSFLRAFWRCFRTVGKNGDLLTMKEYHCLLQLLCPDFPLELTQKAARIVLMDDAMDCLMSFSDFLFAFQIQFYYSEFLDSVAAIYEDLLSGKNPNTVIVPTSSSGQHRQRPALGGAGTLEGVEASLFYQCLENLCDRHKYSCPPPALVKEALSNVQRLTFYGFLMALSKHRGINQALGALPDKGDLMHDPAMDEELERLLLPFFRLAQVPGLVNSVTASPEASCLPSRTPPRVGSPWRPLHHSRKVDGESDGSTEETDESET

SEQ ID NO: 807867 - protein, 118 aa, Homo sapiens
MEALLSVQEASRCPPGFFPSSGWPRSQAWSTRSQPVQRPVACLPGPLPGLALPGDLSIIPEKWMERVMAPLKRQTSRRLEESKGSCPQRPVPAPTQPLVCPPSLLSSTLLCCPLLLTR

SEQ ID NO: 807868 - protein, 303 aa, Homo sapiens
MLSPERLALPDYEYLAQRHVLTYMEDAVCQLLENREDISQYGIARFFTEYFNSVCQGTHILFREFSFVQATPHNRVSFLRAFWRCFRTVGKNGDLLTMKEYHCLLQLLCPDFPLELTQKAARIVLMDDAMDCLMSFSDFLFAFQIQFYYSEFLDSVAAIYEDLLSGKNPNTVIVPTSSSGQHRQRPALGGAGTLEGVEASLFYQCLENLCDRHKYSCPPPALVKEALSNVQRLTFYGFLMALSKHRGINQALGALPDKGDLMHDPAMDEELERLNSIKGENPNSHAGPCTIKGDTCDASTRRT

SEQ ID NO: 807869 - protein, 326 aa, Homo sapiens
MLSPERLALPDYEYLAQRHVLTYMEDAVCQLLENREDISQYGIARFFTEYFNSVCQGTHILFREFSFVQATPHNRVSFLRAFWRCFRTVGKNGDLLTMKEYHCLLQLLCPDFPLELTQKAARIVLMDDAMDCLMSFSDFLFAFQIQFYYSEFLDSVAAIYEDLLSGKNPNTVIVPTSSSGQHRQRPALGGAGTLEGVEASLFYQCLENLCDRHKYSCPPPALVKEALSNVQRLTFYGFLMALSKHRGINQALGALPDKGDLMHDPAMDEELERLVVRSKLHRTSRQHRAKEPGAFGFQRREKQEALERVSSASVPTPYHYRWEPRE

SEQ ID NO: 807870 - protein, 333 aa, Homo sapiens
MLSPERLALPDYEYLAQRHVLTYMEDAVCQLLENREDISQYGIARFFTEYFNSVCQGTHILFREFSFVQATPHNRVSFLRAFWRCFRTVGKNGDLLTMKEYHCLLQLLCPDFPLELTQKAARIVLMDDAMDCLMSFSDFLFAFQIQFYYSEFLDSVAAIYEDLLSGKNPNTVIVPTSSSGQHRQRPALGGAGTLEGVEASLFYQCLENLCDRHKYSCPPPALVKEALSNVQRLTFYGFLMALSKHRGINQALGKSELSSRQPLLPHNTGSSWPLLATRLQRGRGITISALTSQGRTQSQGAGIWRQNMALTHSHGRGQPSLPAALPQHETTSP

SEQ ID NO: 807871 - protein, 235 aa, Homo sapiens
MLSPERLALPDYEYLAQRHVLTYMEDAVCQLLENREDISQYGIARFFTEYFNSVCQGTHILFREFSFVQATPHNRVSFLRAFWRCFRTVGKNGDLLTMKEYHCLLQLLCPDFPLELTQKAARIVLMDDAMDCLMSFSDFLFAFQIQFYYSEFLDSVAAIYEDLLSGKNPNTVIVPTSSSGQHRQRPALGGAGTLEGVEASLFYQCLENLCDRHKYSSGHRQRIIGLQSVRDYVVL

SEQ ID NO: 807872 - protein, 238 aa, Homo sapiens
MLSPERLALPDYEYLAQRHVLTYMEDAVCQLLENREDISQYGIARFFTEYFNSVCQGTHILFREFSFVQATPHNRVSFLRAFWRCFRTVGKNGDLLTMKEYHCLLQLLCPDFPLELTQKAARIVLMDDAMDCLMSFSDFLFAFQIQFYYSGECSGAPSGSAQDPVSLSCPAALPICVPGTHVSLPHFLWGCASLRVANRMSSVQWWSQDSVCRADFLSLLKTLNTAVFSVSNATNQFK

SEQ ID NO: 807873 - protein, 227 aa, Homo sapiens
MLSPERLALPDYEYLAQRHVLTYMEDAVCQLLENREDISQYGIARFFTEYFNSVCQGTHILFREFSFVQATPHNRVSFLRAFWRCFRTVGKNGDLLTMKEYHCLLQLLCPDFPLELTQKAARIVLMDDAMDCLMSFSDFLFAFQIQFYYSGTALTLILTTALRESPFRDKLTEVVASHAAHKWWRPDLKADSKASVPNLAAILLPSRVSPLATDRAFGCTFSSTPQL

SEQ ID NO: 807874 - protein, 148 aa, Homo sapiens
MLSPERLALPDYEYLAQRHVLTYMEDAVCQLLENREDISQYGIARFFTEYFNSVCQGTHILFREFSFVQATPHNRVSFLRAFWRCFRTVGKNGDLLTMKEYHCLLQLLCPDFPLELTQKAARYVSWTLETNSALCGPLLPRETWSVYK

SEQ ID NO: 807875 - protein, 141 aa, Homo sapiens
MLSPERLALPDYEYLAQRHVLTYMEDAVCQLLENREDISQYGIARFFTEYFNSVCQGTHILFREFSFVQATPHNRVSFLRAFWRCFRTVGKNGGKSSQILFPSFLPSFLSSFLPSSLSLSFSLSFPLFLFQTFSFVPINIV

SEQ ID NO: 807876 - protein, 250 aa, Homo sapiens
MGQGPDWPLKLQVNLGSGSRRAGALKPPRSKDAESGAPSPTGLRVSGFNSVCQGTHILFREFSFVQATPHNRVSFLRAFWRCFRTVGKNGDLLTMKEYHCLLQLLCPDFPLELTQKAARIVLMDDAMDCLMSFSDFLFAFQIQFYYSEFLDSVAAIYEDLLSGAKRKKPPKNKQRVGLSVGPRKPGFRFPRGGGTKDKIPEANIRKPPWPPFGGAPGVAAVCLKPDPWGNDGPGLAPTRAGDPDHWHYSF

SEQ ID NO: 807877 - protein, 110 aa, Homo sapiens
MALSKHRGINQALGALPDKGDLMHDPAMDEELERLVGQVQGWSTRVTSSPEACCCFRTSGVVSWRPFHYRGKGCEDGWSLKEDGWDLGQAAQACCFTTWGPPFSLGRLAR

SEQ ID NO: 807878 - protein, 93 aa, Homo sapiens
LVPVGVVGWMLSPERLALPDYEYLGMLETITLLNVRYMKGHTSSALLVKWRGCQNRSAPWFSCPKVLQIDTSATCPHLHGGCSVPAARKQGRY

SEQ ID NO: 807879 - protein, 1445 aa, Homo sapiens
MRRLLEPCWWILFLKITSSVLHYVVCFPALTEGYVGALHENRHGSAVQIRRRKASGDPYWAYSGAYGPEHWVTSSVSCGGRHQSPIDILDQYARVGEEYQELQLDGFDNESSNKTWMKNTGKTVAILLKDDYFVSGAGLPGRFKAEKVEFHWGHSNGSAGSEHSINGRRFPVEMQIFFYNPDDFDSFQTAISENRIIGAMAIFFQVSPRDNSALDPIIHGLKGVVHHEKETFLDPFVLRDLLPASLGSYYRYTGSLTTPPCSEIVEWIVFRRPVPISYHQLEAFYSIFTTEQQDHVKSVEYLRNNFRPQQRLHDRVVSKSAVRDSWNHDMTDFLENPLGTEASKVCSSPPIHMKVQPLNQTALQVSWSQPETIYHPPIMNYMISYSWTKNEDEKEKTFTKDSDKDLKATISHVSPDSLYLFRVQAVCRNDMRSDFSQTMLFQANTTRIFQGTRIVKTGVPTASPASSADMAPISSGSSTWTSSGIPFSFVSMATGMGPSSSGSQATVASVVTSTLLAGLGFGGGGISSFPSTVWPTRLPTAASASKQAARPVLATTEALASPGPDGDSSPTKDGEGTEEGEKDEKSESEDGEREHEEDGEKDSEKKEKSGVTHAAEERNQTEPSPTPSSPNRTAEGGHQTIPGHEQDHTAVPTDQTGGRRDAGPGLDPDMVTSTQVPPTATEEQYAGSDPKRPEMPSKKPMSRGDRFSEDSRFITVNPAEKNTSGMISRPAPGRMEWIIPLIVVSALTFVCLILLIAVLVYWRGCNKIKSKGFPRRFREVPSSGERGEKGSRKCFQTAHFYVEDSSSPRVVPNESIPIIPIPDDMEAIPVKQFVKHIGELYSNNQHGFSEDFEEVQRCTADMNITAEHSNHPENKHKNRYINILAYDHSRVKLRPLPGKDSKHSDYINANYVDGYNKAKAYIATQGPLKSTFEDFWRMIWEQNTGIIVMITNLVEKGRRKCDQYWPTENSEEYGNIIVTLKSTKIHACYTVRRFSIRNTKVKKGQKGNPKGRQNERVVIQYHYTQWPDMGVPEYALPVLTFVRRSSAARMPETGPVLVHCSAGVGRTGTYIVIDSMLQQIKDKSTVNVLGFLKHIRTQRNYLVQTEEQYIFIHDALLEAILGKETEVSSNQLHSYVNSILIPGVGGKTRLEKQFKLVTQCNAKYVECFSAQKECNKEKNRNSSVVPSERARVGLAPLPGMKGTDYINASYIMGYYRSNEFIITQHPLPHTTKDFWRMIWDHNAQIIVMLPDNQSLAEDEFVYWPSREESMNCEAFTVTLISKDRLCLSNEEQIIIHDFILEATQDDYVLEVRHFQCPKWPNPDAPISSTFELINVIKEEALTRDGPTIVHDEYGAVSAGMLCALTTLSQQLENENAVDVFQVAKMINLMRPGVFTDIEQYQFIYKAMLSLVSTKENGNGPMTVDKNGAVLIADESDPAESMESLV

SEQ ID NO: 807880 - protein, 1445 aa, Homo sapiens; identical to SEQ ID NO: 807879

SEQ ID NO: 807881 - protein, 1416 aa, Homo sapiens
MRRLLEPCWWILFLKITSSVLHYVVCFPALTEGYVGALHENRHGSAVQIRRRKASGDPYWAYSGAYGPEHWVTSSVSCGGRHQSPIDILDQYARVGEEYQELQLDGFDNESSNKTWMKNTGKTVAILLKDDYFVSGAGLPGRFKAEKVEFHWGHSNGSAGSEHSINGRRFPVEMQIFFYNPDDFDSFQTAISENRIIGAMAIFFQVSPRDNSALDPIIHGLKGVVHHEKETFLDPFVLRDLLPASLGSYYRYTGSLTTPPCSEIVEWIVFRRPVPISYHQLEAFYSIFTTEQQDHVKSVEYLRNNFRPQQRLHDRVVSKSAVRDSWNHDMTDFLENPLGTEASKVCSSPPIHMKVQPLNQTALQVSWSQPETIYHPPIMNYMISYSWTKNEDEKEKTFTKDSDKDLKATISHVSPDSLYLFRVQAVCRNDMRSDFSQTMLFQANTTRIFQGTRIVKTGVPTASPASSADMAPISSGSSTWTSSGIPFSFVSMATGMGPSSSGSQATVASVVTSTLLAGLGFGGGGISSFPSTVWPTRLPTAASASKQAARPVLATTEALASPGPDGDSSPTKDGEGTEEGEKDEKSESEDGEREHEEDGEKDSEKKEKSGVTHAAEERNQTEPSPTPSSPNRTAEGGHQTIPGHEQDHTAVPTDQTGGRRDAGPGLDPDMVTSTQVPPTATEEQYAGSDPKRPEMPSKKPMSRGDRFSEDSRFITVNPAEKNTSGMISRPAPGRMEWIIPLIVVSALTFVCLILLIAVLVYWRKCFQTAHFYVEDSSSPRVVPNESIPIIPIPDDMEAIPVKQFVKHIGELYSNNQHGFSEDFEEVQRCTADMNITAEHSNHPENKHKNRYINILAYDHSRVKLRPLPGKDSKHSDYINANYVDGYNKAKAYIATQGPLKSTFEDFWRMIWEQNTGIIVMITNLVEKGRRKCDQYWPTENSEEYGNIIVTLKSTKIHACYTVRRFSIRNTKVKKGQKGNPKGRQNERVVIQYHYTQWPDMGVPEYALPVLTFVRRSSAARMPETGPVLVHCSAGVGRTGTYIVIDSMLQQIKDKSTVNVLGFLKHIRTQRNYLVQTEEQYIFIHDALLEAILGKETEVSSNQLHSYVNSILIPGVGGKTRLEKQFKLVTQCNAKYVECFSAQKECNKEKNRNSSVVPSERARVGLAPLPGMKGTDYINASYIMGYYRSNEFIITQHPLPHTTKDFWRMIWDHNAQIIVMLPDNQSLAEDEFVYWPSREESMNCEAFTVTLISKDRLCLSNEEQIIIHDFILEATQDDYVLEVRHFQCPKWPNPDAPISSTFELINVIKEEALTRDGPTIVHDEYGAVSAGMLCALTTLSQQLENENAVDVFQVAKMINLMRPGVFTDIEQYQFIYKAMLSLVSTKENGNGPMTVDKNGAVLIADESDPAESMESLV

SEQ ID NO: 807882 - protein, 621 aa, Homo sapiens
MEAIPVKQFVKHIGELYSNNQHGFSEDFEEVQRCTADMNITAEHSNHPENKHKNRYINILAYDHSRVKLRPLPGKDSKHSDYINANYVDGYNKAKAYIATQGPLKSTFEDFWRMIWEQNTGIIVMITNLVEKGRRKCDQYWPTENSEEYGNIIVTLKSTKIHACYTVRRFSIRNTKVKKGQKGNPKGRQNERVVIQYHYTQWPDMGVPEYALPVLTFVRRSSAARMPETGPVLVHCSAGVGRTGTYIVIDSMLQQIKDKSTVNVLGFLKHIRTQRNYLVQTEEQYIFIHDALLEAILGKETEVSSNQLHSYVNSILIPGVGGKTRLEKQFKLVTQCNAKYVECFSAQKECNKEKNRNSSVVPSERARVGLAPLPGMKGTDYINASYIMGYYRSNEFIITQHPLPHTTKDFWRMIWDHNAQIIVMLPDNQSLAEDEFVYWPSREESMNCEAFTVTLISKDRLCLSNEEQIIIHDFILEATQDDYVLEVRHFQCPKWPNPDAPISSTFELINVIKEEALTRDGPTIVHDEYGAVSAGMLCALTTLSQQLENENAVDVFQVAKMINLMRPGVFTDIEQYQFIYKAMLSLVSTKENGNGPMTVDKNGAVLIADESDPAESMESLV

SEQ ID NO: 807883 - protein, 1246 aa, Homo sapiens
MRRLLEPCWWILFLKITSSVLHYVVCFPALTEGYVGALHENRHGSAVQIRRRKASGDPYWAYSGAYGPEHWVTSSVSCGGRHQSPIDILDQYARVGEEYQELQLDGFDNESSNKTWMKNTGKTVAILLKDDYFVSGAGLPGRFKAEKVEFHWGHSNGSAGSEHSINGRRFPVEMQIFFYNPDDFDSFQTAISENRIIGAMAIFFQVSPRDNSALDPIIHGLKGVVHHEKETFLDPFVLRDLLPASLGSYYRYTGSLTTPPCSEIVEWIVFRRPVPISYHQLEAFYSIFTTEQQDHVKSVEYLRNNFRPQQRLHDRVVSKSAVRDSWNHDMTDFLENPLGTEASKVCSSPPIHMKVQPLNQTALQVSWSQPETIYHPPIMNYMISYSWTKNEDEKEKTFTKDSDKDLKATISHVSPDSLYLFRVQAVCRNDMRSDFSQTMLFQANTTRIFQGTRIVKTGVPTASPASSADMAPISSGSSTWTSSGIPFSFVSMATGMGPSSSGSQATVASVVTSTLLAGLGFGGGGISSFPSTVWPTRLPTAASASKQAARPVLATTEALASPGPDGDSSPTKDGEGTEEGEKDEKSESEDGEREHEEDGEKDSEKKEKSGVTHAAEERNQTEPSPTPSSPNRTAEGGHQTIPGHEQDHTAVPTDQTGGRRDAGPGLDPDMVTSTQVPPTATEEQYAGSDPKRPEMPSKKPMSRGDRFSEDSRFITVNPAEKNTSGMISRPAPGRMEWIIPLIVVSALTFVCLILLIAVLVYWRKCFQTAHFYVEDSSSPRVVPNESIPIIPIPDDMEAIPVKQFVKHIGELYSNNQHGFSEDFEEVQRCTADMNITAEHSNHPENKHKNRYINILAYDHSRVKLRPLPGKDSKHSDYINANYVDGYNKAKAYIATQGPLKSTFEDFWRMIWEQNTGIIVMITNLVEKGRRKCDQYWPTENSEEYGNIIVTLKSTKIHACYTVRRFSIRNTKVKKGQKGNPKGRQNERVVIQYHYTQWPDMGVPEYALPVLTFVRRSSAARMPETGPVLVHCSAGVGRTGTYIVIDSMLQQIKDKSTVNVLGFLKHIRTQRNYLVQTEEQYIFIHDALLEAILGKETEVSSNQLHSYVNSILIPGVGGKTRLEKQFKLVTQCNAKYVECFSAQKECNKEKNRNSSVVPSERARVGLAPLPGMKGTDYINASYIMGYYRSNEFIITQHPLPHTTKDFWRMIWDHNAQIIVMLPDNQSLAEDEFVSAAVFGKKGILYNA

SEQ ID NO: 807884 - protein, 177 aa, Homo sapiens
MFHVSFRYIFGLPPLILVLLPVASSDCDIEGKDGKQYESVLMVSIDQLLDSMKEIGSNCLNNEFNFFKRHICDANKEGMFLFRAARKLRQFLKMNSTGDFDLHLLKVSEGTTILLNCTGQVKGRKPAALGEAQPTKSLEENKSLKEQKKLNDLCFLKRLLQEIKTCWNKILMGTKEH

SEQ ID NO: 807885 - protein, 133 aa, Homo sapiens
MFHVSFRYIFGLPPLILVLLPVASSDCDIEGKDGKQYESVLMVSIDQLLDSMKEIGSNCLNNEFNFFKRHICDANKVKGRKPAALGEAQPTKSLEENKSLKEQKKLNDLCFLKRLLQEIKTCWNKILMGTKEH

SEQ ID NO: 807886 - protein, 126 aa, Homo sapiens
MKEIGSNCLNNEFNFFKRHICDANKEGMFLFRAARKLRQFLKMNSTGDFDLHLLKVSEGTTILLNCTGQVKGRKPAALGEAQPTKSLEENKSLKEQKKLNDLCFLKRLLQEIKTCWNKILMGTKEH

SEQ ID NO: 807887 - protein, 116 aa, Homo sapiens
MKEIGSNCLNNEFNFFKRHICDANKEGMFLFRAARKLRQFLKMNSTGDFDLHLLKVSEGTTILLNCTGQVKGRKPAALGEAQPTKSLSSGLQKQFTFYRSNGRHTHSFHCKLSFLH

SEQ ID NO: 807888 - protein, 106 aa, Homo sapiens
MKEIGSNCLNNEFNFFKRHICDANKEGMFLFRAARKLRQFLKMNSTGDFDLHLLKVSEGTTILLNCTGQVKGRKPAALGEAQPTKSLVELIIPSCMPPLLSSTSNS

SEQ ID NO: 807889 - protein, 827 aa, Homo sapiens
LQDGYFSHRPKEKVRTDSNNENSVPKDFENVDNSNFAPRTQKQKHQPELAKKPPSRQKELLKRKLEQQEKGKGHTFPGKGPGEVLPPGDRAAANSSHGKDVSRPPQARKTGGSSPETKYDQPPKCDISGKEAISALSRAKSKHCRQEIGETYCRHKLGLLMPEKVTRFCPLEGKANKNVQWDEDSVEYMPANPVRIAFVLVVHGRASRQLQRMFKAIYHKDHFYYIHVDKRSNYLHRQVLQVSRQYSNVRVTPWRMATIWGGASLLSTYLQSMRDLLEMTDWPWDFFINLSAADYPIRTNDQLVAFLSRYRDMNFLKSHGRDNARFIRKQGLDRLFLECDAHMWRLGDRRIPEGIAVDGGSDWFLLNRRFVEYVTFSTDDLVTKMKQFYSYTLLPAESFFHTVLENSPHCDTMVDNNLRITNWNRKLGCKCQYKHIVDWCGCSPNDFKPQDFHRFQQTARPTFFARKFEAVVNQEIIGQLDYYLYGNYPAGTPGLRSYWENVYDEPDGIHSLSDVTLTLYHSFARLGLRRAETSLHTDGENSCRYYPMGHPASVHLYFLADRFQGFLIKHHATNLAVSKLETLETWVMPKKVFKIASPPSDFGRLQFSEVGTDWDAKERLFRNFGGLLGPMDEPVGMQKWGKGPNVTVTVIWVDPVNVIAATYDILIESTAEFTHYKPPLNLPLRPGVWTVKILHHWVPVAETKFLVAPLTFSNRQPIKPEEALKLHNGPLRNAYMEQSFQSLNPVLSLPINPAQVEQARRNAASTGTALEGWLDSLVGGMWTAMDICATGPTACPVMQTCSQTAWSSFSPDPKSELGAVKPDGRLR

SEQ ID NO: 807890 - protein, 827 aa, Homo sapiens; identical to SEQ ID NO: 807889

SEQ ID NO: 807891 - protein, 374 aa, Homo sapiens
MVQQTARPTFFARKFEAVVNQEIIGQLDYYLYGNYPAGTPGLRSYWENVYDEPDGIHSLSDVTLTLYHSFARLGLRRAETSLHTDGENSCRYYPMGHPASVHLYFLADRFQGFLIKHHATNLAVSKLETLETWVMPKKVFKIASPPSDFGRLQFSEVGTDWDAKERLFRNFGGLLGPMDEPVGMQKWGKGPNVTVTVIWVDPVNVIAATYDILIESTAEFTHYKPPLNLPLRPGVWTVKILHHWVPVAETKFLVAPLTFSNRQPIKPEEALKLHNGPLRNAYMEQSFQSLNPVLSLPINPAQVEQARRNAASTGTALEGWLDSLVGGMWTAMDICATGPTACPVMQTCSQTAWSSFSPDPKSELGAVKPDGRLR

SEQ ID NO: 807892 - protein, 466 aa, Homo sapiens
LQDGYFSHRPKEKVRTDSNNENSVPKDFENVDNSNFAPRTQKQKHQPELAKKPPSRQKELLKRKLEQQEKGKGHTFPGKGPGEVLPPGDRAAANSSHGKDVSRPPQARKTGGSSPETKYDQPPKCDISGKEAISALSRAKSKHCRQEIGETYCRHKLGLLMPEKVTRFCPLEGKANKNVQWDEDSVEYMPANPVRIAFVLVVHGRASRQLQRMFKAIYHKDHFYYIHVDKRSNYLHRQVLQVSRQYSNVRVTPWRMATIWGGASLLSTYLQSMRDLLEMTDWPWDFFINLSAADYPIRTNDQLVAFLSRYRDMNFLKSHGRDNARFIRKQGLDRLFLECDAHMWRLGDRRIPEGIAVDGGSDWFLLNRRFVEYVTFSTDDLVTKMKQFYSYTLLPAESFFHTVLENSPHCDTMVDNNLRITNWNRKLGCKCQYKHIVDWCGCSPNDFKPQDFHRFQVRLSHGLPAS

SEQ ID NO: 807893 - protein, 107 aa, Homo sapiens
FSCCSELLLLLKSKLLWLKLTSARFPPKAQPSGRSPCPGYLLRYLFRTQGLCKCQFDKHCPDQPWVQTPALPFGSFFCFSWLGDSGASLESHGRGPFPMEAAALGEL

SEQ ID NO: 807894 - protein, 206 aa, Homo sapiens
APLFPRPSPRPFLFPAPRLFPGGGSGSGGPHSSERREEAASRMKCKPNQTRTYDPEGFKKRAACLCFRSEREDEVLLVSSSRYPDRWIVPGGGMEPEEEPGGAAVREVYEEAGVKGKLGRLLGVFEQNQDRKHRTYVYVLTVTELLEDWEDSVSIGRKREWFKVEDAIKVLQCHKPVHAEYLEKLKLGGSPTNGNSMAPSSPDSDP

SEQ ID NO: 807895 - protein, 352 aa, Homo sapiens [sequence omitted]

SEQ ID NO: 807896 - protein, 352 aa, Homo sapiens [sequence omitted]

SEQ ID NO: 807897 - protein, 182 aa, Homo sapiens
SWGRKSGLSRKLRAGFLPGFCRVSPCGSWVVETLVKMACAAARSPADQDRFICIYPAYLNNKKTIAEGRRIPISKAVENPTATEIQDVCSAVGLNVFLEKNKMYSREWNRDVQYRGRVRVQLKQEDGSLCLVQFPSRKSVMLYAAEMIPKLKTRTQKTGGADQSLQQGEGSKKGKGKKQEVT

SEQ ID NO: 807898 - protein, 182 aa, Homo sapiens; identical to SEQ ID NO: 807897

SEQ ID NO: 807899 - protein, 266 aa, Homo sapiens
SWGRKSGLSRKLRAGFLPGFCRVSPCGSWVVETLVKMACAAARSPADQDRFICIYPAYLNNKKTIAEGRRIPISKAVENPTATEIQDVCSAVGLNVFLEKNKMYSREWNRDVQYRGRVRVQLKQEDGSLCLVQFPSRKSVMLYAAEMIPKLKTRTQKTGGADQSLQQGEGSKTTNKQKSRDSRSLSRQLDVHQGAPSVDRDAAGLTSIGGRPPPPRVVLWGQAGPPSMADHAARYSTTGRPGDTGPPWLEWTSSTAARHGGAQPNM

SEQ ID NO: 807900 - protein, 149 aa, Homo sapiens
SWGRKSGLSRKLRAGFLPGFCRVSPCGSWVVETLVKMACAAARSPADQDRFICIYPAYLNNKKTIAEGRRIPISKAVENPTATEIQDVCSAVGLNVFLEKNKMYSREWNRDVQYRGRVRVQLKQEDGSLCLVQFPSHYTLSLTSGSVSQ

SEQ ID NO: 807901 - protein, 100 aa, Homo sapiens
SWGRKSGLSRKLRAGFLPGFCRVSPCGSWVVETLVKMACAAARSPADQDRFICIYPAYLNNKKTIAEGRRIPISKAVENPTATEIQDVCSAVGLNVFLEV

SEQ ID NO: 807902 - protein, 149 aa, Homo sapiens; identical to SEQ ID NO: 807900

SEQ ID NO: 807903 - protein, 140 aa, Homo sapiens
SWGRKSGLSRKLRAGFLPGFCRVSPCGSWVVETLVKMACAAARSPADQDRFICIYPAYLNNKKTIAEGRRIPISKAVENPTATEIQDVCSAVGLNVFLEKNKMYSREWNRDVQYRGRVRVQLKQEDGSLCLVQFPSRKLV

SEQ ID NO: 807904 - protein, 140 aa, Homo sapiens
FFFETGSCSVAQAGVQWHDHSSTQPQSAGLKQSSHFSLLSNWDYRHTPPRPANIFIFCRDGVSYVVQASLEFLGSSEPPILASQNVGNQIFCCIQGEQGGREREREREGDRGRQREREGDRGRQREREGKRQRETEGENT

SEQ ID NO: 807905 - protein, 603 aa, Homo sapiens
HPITTHYRARAAARAVCRSPEGEDGNEMVFCDKCNVCVHQACYGILKVPTGSWLCRTCALGVQPKCLLCPKRGGALKPTRSGTKWVHVSCALWIPEVSIGCPEKMEPITKISHIPASRWALSCSLCKECTGTCIQCSMPSCVTAFHVTCAFDHGLEMRTILADNDEVKFKSFCQEHSDGGPRNEPTSEPTEPSQAGEDLEKVTLRKQRLQQLEEDFYELVEPAEVAERLDLAEALVDFIYQYWKLKRKANANQPLLTPKTDEVDNLAQQEQDVLYRRLKLFTHLRQDLERVRNLCYMVTRRERTKHAICKLQEQIFHLQMKLIEQDLCRAGLSTSFPIDGTFFNSWLAQSVQITAENMAMSEWPLNNGHREDPAPGLLSEELLQDEETLLSFMRDPSLRPGDPARKARGRTRLPAKKKPPPPPPQDGPGSRTTPDKAPKKTWGQDAGSGKGGQGPPTRKPPRRTSSHLPSSPAAGDCPILATPESPPPLAPETPDEAASVAADSDVQVPGPAASPKPLGRLRPPRESKVTRRLPGARPDAGMGPPSAVAERPKVSLHFDTETDGYFSDGEMSDSDVEAEDGGVQRGPREAGAEEVVRMGVLAS

SEQ ID NO: 807906 - protein, 111 aa, Homo sapiens
MEEKRRKYSISSDNSDTTDSHATSTSASRCSKLPSSTKSGWPRQNEKKPSEVFRTDLITAMKIPDSYQLSPDDYYILADPWRQEWEKGVQVPAGAEAIPEPVVRMSQAAQA

SEQ ID NO: 807907 - protein, 791 aa, Homo sapiens
MEEKRRKYSISSDNSDTTDSHATSTSASRCSKLPSSTKSGWPRQNEKKPSEVFRTDLITAMKIPDSYQLSPDDYYILADPWRQEWEKGVQVPAGAEAIPEPVVRILPPLEGPPAQASPSSTMLGEGSQPDWPGGSRYDLDEIDAYWLELINSELKEMERPELDELTLERVLEELETLCHQNMARAIETQEGLGIEYDEDVVCDVCRSPEGEDGNEMVFCDKCNVCVHQACYGILKVPTGSWLCRTCALGVQPKCLLCPKRGGALKPTRSGTKWVHVSCALWIPEVSIGCPEKMEPITKISHIPASRWALSCSLCKECTGTCIQCSMPSCVTAFHVTCAFDHGLEMRTILADNDEVKFKSFCQEHSDGGPRNEPTSEPTEPSQAGEDLEKVTLRKQRLQQLEEDFYELVEPAEVAERLDLAEALVDFIYQYWKLKRKANANQPLLTPKTDEVDNLAQQEQDVLYRRLKLFTHLRQDLERVRNLCYMVTRRERTKHAICKLQEQIFHLQMKLIEQDLCRAGLSTSFPIDGTFFNSWLAQSVQITAENMAMSEWPLNNGHREDPAPGLLSEELLQDEETLLSFMRDPSLRPGDPARKARGRTRLPAKKKPPPPPPQDGPGSRTTPDKAPKKTWGQDAGSGKGGQGPPTRKPPRRTSSHLPSSPAAGDCPILATPESPPPLAPETPDEAASVAADSDVQVPGPAASPKPLGRLRPPRESKVTRRLPGARPDAGMGPPSAVAERPKVSLHFDTETDGYFSDGEMSDSDVEAEDGGVQRGPREAGAEEVVRMGVLAS

SEQ ID NO: 807908 - protein, 813 aa, Homo sapiens
MIISRYRLLFQSVARSGTCRNMMEEKRRKYSISSDNSDTTDSHATSTSASRCSKLPSSTKSGWPRQNEKKPSEVFRTDLITAMKIPDSYQLSPDDYYILADPWRQEWEKGVQVPAGAEAIPEPVVRILPPLEGPPAQASPSSTMLGEGSQPDWPGGSRYDLDEIDAYWLELINSELKEMERPELDELTLERVLEELETLCHQNMARAIETQEGLGIEYDEDVVCDVCRSPEGEDGNEMVFCDKCNVCVHQACYGILKVPTGSWLCRTCALGVQPKCLLCPKRGGALKPTRSGTKWVHVSCALWIPEVSIGCPEKMEPITKISHIPASRWALSCSLCKECTGTCIQCSMPSCVTAFHVTCAFDHGLEMRTILADNDEVKFKSFCQEHSDGGPRNEPTSEPTEPSQAGEDLEKVTLRKQRLQQLEEDFYELVEPAEVAERLDLAEALVDFIYQYWKLKRKANANQPLLTPKTDEVDNLAQQEQDVLYRRLKLFTHLRQDLERVRNLCYMVTRRERTKHAICKLQEQIFHLQMKLIEQDLCRAGLSTSFPIDGTFFNSWLAQSVQITAENMAMSEWPLNNGHREDPAPGLLSEELLQDEETLLSFMRDPSLRPGDPARKARGRTRLPAKKKPPPPPPQDGPGSRTTPDKAPKKTWGQDAGSGKGGQGPPTRKPPRRTSSHLPSSPAAGDCPILATPESPPPLAPETPDEAASVAADSDVQVPGPAASPKPLGRLRPPRESKVTRRLPGARPDAGMGPPSAVAERPKVSLHFDTETDGYFSDGEMSDSDVEAEDGGVQRGPREAGAEEVVRMGVLAS

SEQ ID NO: 807909 - protein, 760 aa, Homo sapiens
MLFYEDPSITGLEERKEASDVFRTDLITAMKIPDSYQLSPDDYYILADPWRQEWEKGVQVPAGAEAIPEPVVRILPPLEGPPAQASPSSTMLGEGSQPDWPGGSRYDLDEIDAYWLELINSELKEMERPELDELTLERVLEELETLCHQNMARAIETQEGLGIEYDEDVVCDVCRSPEGEDGNEMVFCDKCNVCVHQACYGILKVPTGSWLCRTCALGVQPKCLLCPKRGGALKPTRSGTKWVHVSCALWIPEVSIGCPEKMEPITKISHIPASRWALSCSLCKECTGTCIQCSMPSCVTAFHVTCAFDHGLEMRTILADNDEVKFKSFCQEHSDGGPRNEPTSEPTEPSQAGEDLEKVTLRKQRLQQLEEDFYELVEPAEVAERLDLAEALVDFIYQYWKLKRKANANQPLLTPKTDEVDNLAQQEQDVLYRRLKLFTHLRQDLERVRNLCYMVTRRERTKHAICKLQEQIFHLQMKLIEQDLCRAGLSTSFPIDGTFFNSWLAQSVQITAENMAMSEWPLNNGHREDPAPGLLSEELLQDEETLLSFMRDPSLRPGDPARKARGRTRLPAKKKPPPPPPQDGPGSRTTPDKAPKKTWGQDAGSGKGGQGPPTRKPPRRTSSHLPSSPAAGDCPILATPESPPPLAPETPDEAASVAADSDVQVPGPAASPKPLGRLRPPRESKVTRRLPGARPDAGMGPPSAVAERPKVSLHFDTETDGYFSDGEMSDSDVEAEDGGVQRGPREAGAEEVVRMGVLAS

SEQ ID NO: 807910 - protein, 834 aa, Homo sapiens
MEEKRRKYSISSDNSDTTDSHATSTSASRCSKLPSSTKSGWPRQNEKKPSEVFRTDLITAMKIPDSYQLSPDDYYILADPWRQEWEKGVQVPAGAEAIPEPVVRILPPLEGPPAQASPSSTMLGEGSQPDWPGGSRYDLDEIDAYWLELINSELKEMERPELDELTLERVLEELETLCHQNMARAIETQEGLGIEYDEDVVCDVCRSPEGEDGNEMVFCDKCNVCVHQACYGILKVPTGSWLCRTCALGVQPKCLLCPKRGGALKPTRSGTKWVHVSCALWIPEVSIGCPEKMEPITKISHIPASRWALSCSLCKECTGTCIQCSMPSCVTAFHVTCAFDHGLEMRTILADNDEVKFKSFCQEHSDGGPRNEPTSEPTEPSQAGEDLEKVTLRKQRLQQLEEDFYELVEPAEVAERLDLAEALVDFIYQYWKLKRKANANQPLLTPKTDEVDNLAQQEQDVLYRRLKLFTHLRQDLERVRNLCYMVTRRERTKHAICKLQEQIFHLQMKLIEQDLCRERSGRRAKGKKSDSKRKGCEGSKGSTEKKEKVKAGPDSVLGQLAGLSTSFPIDGTFFNSWLAQSVQITAENMAMSEWPLNNGHREDPAPGLLSEELLQDEETLLSFMRDPSLRPGDPARKARGRTRLPAKKKPPPPPPQDGPGSRTTPDKAPKKTWGQDAGSGKGGQGPPTRKPPRRTSSHLPSSPAAGDCPILATPESPPPLAPETPDEAASVAADSDVQVPGPAASPKPLGRLRPPRESKVTRRLPGARPDAGMGPPSAVAERPKVSLHFDTETDGYFSDGEMSDSDVEAEDGGVQRGPREAGAEEVVRMGVLAS

SEQ ID NO: 807911 - protein, 706 aa, Homo sapiens
MEEKRRKYSISSDNSDTTDSHATSTSASRCSKLPSSTKSGWPRQNEKKPSEVFRTDLITAMKIPDSYQLSPDDYYILADPWRQEWEKGVQVPAGAEAIPEPVVRILPPLEGPPAQASPSSTMLGEGSQPDWPGGSRYDLDEIDAYWLELINSELKEMERPELDELTLERVLEELETLCHQNMARAIETQEGLGIDVPCLPASQQFHVTCAFDHGLEMRTILADNDEVKFKSFCQEHSDGGPRNEPTSEPTEPSQAGEDLEKVTLRKQRLQQLEEDFYELVEPAEVAERLDLAEALVDFIYQYWKLKRKANANQPLLTPKTDEVDNLAQQEQDVLYRRLKLFTHLRQDLERVRNLCYMVTRRERTKHAICKLQEQIFHLQMKLIEQDLCRERSGRRAKGKKSDSKRKGCEGSKGSTEKKEKVKAGPDSVLGQLAGLSTSFPIDGTFFNSWLAQSVQITAENMAMSEWPLNNGHREDPAPGLLSEELLQDEETLLSFMRDPSLRPGDPARKARGRTRLPAKKKPPPPPPQDGPGSRTTPDKAPKKTWGQDAGSGKGGQGPPTRKPPRRTSSHLPSSPAAGDCPILATPESPPPLAPETPDEAASVAADSDVQVPGPAASPKPLGRLRPPRESKVTRRLPGARPDAGMGPPSAVAERPKVSLHFDTETDGYFSDGEMSDSDVEAEDGGVQRGPREAGAEEVVRMGVLAS

SEQ ID NO: 807912 - protein, 415 aa, Homo sapiens
LLVHKRVLVQYWKLKRKANANQPLLTPKTDEVDNLAQQEQDVLYRRLKLFTHLRQDLERVRNLCYMVTRRERTKHAICKLQEQIFHLQMKLIEQDLCRERSGRRAKGKKSDSKRKGCEGSKGSTEKKEKVKAGPDSVLGQLAGLSTSFPIDGTFFNSWLAQSVQITAENMAMSEWPLNNGHREDPAPGLLSEELLQDEETLLSFMRDPSLRPGDPARKARGRTRLPAKKKPPPPPPQDGPGSRTTPDKAPKKTWGQDAGSGKGGQGPPTRKPPRRTSSHLPSSPAAGDCPILATPESPPPLAPETPDEAASVAADSDVQVPGPAASPKPLGRLRPPRESKVTRRLPGARPDAGMGPPSAVAERPKVSLHFDTETDGYFSDGEMSDSDVEAEDGGVQRGPREAGAEEVVRMGVLAS

SEQ ID NO: 807913 - protein, 834 aa, Homo sapiens; identical to SEQ ID NO: 807910

SEQ ID NO: 807914 - protein, 246 aa, Homo sapiens
MAMSEWPLNNGHREDPAPGLLSEELLQDEETLLSFMRDPSLRPGDPARKARGRTRLPAKKKPPPPPPQDGPGSRTTPDKAPKKTWGQDAGSGKGGQGPPTRKPPRRTSSHLPSSPAAGDCPILATPESPPPLAPETPDEAASVAADSDVQVPGPAASPKPLGRLRPPRESKVTRRLPGARPDAGMGPPSAVAERPKVSLHFDTETDGYFSDGEMSDSDVEAEDGGVQRGPREAGAEEVVRMGVLAS

SEQ ID NO: 807915 - protein, 882 aa, Homo sapiens
MEEKRRKYSISSDNSDTTDSHATSTSASRCSKLPSSTKSGWPRQNEKKPSEVFRTDLITAMKIPDSYQLSPDDYYILADPWRQEWEKGVQVPAGAEAIPEPVVRILPPLEGPPAQASPSSTMLGEGSQPDWPGGSRYDLDEIDAYWLELINSELKEMERPELDELTLERVLEELETLCHQNMARAIETQEGLGIEYDEDVVCDVCRSPEGEDGNEMVFCDKCNVCVHQACYGILKVPTGSWLCRTCALGVQPKCLLCPKRGGALKPTRSGTKWVHVSCALWIPEVSIGCPEKMEPITKISHIPASRWALSCSLCKECTGTCIQCSMPSCVTAFHVTCAFDHGLEMRTILADNDEVKFKSFCQEHSDGGPRNEPTSEPTEPSQAGEDLEKVTLRKQRLQQLEEDFYELVEPAEVAERLDLAEALVDFIYQYWKLKRKANANQPLLTPKTDEVDNLAQQEQDVLYRRLKLFTHLRQDLERVRNLCYMVTRRERTKHAICKLQEQIFHLQMKLIEQDLCRERSGRRAKGKKSDSKRKGCEGSKGSTEKKEKVKAGPDSVLGQLGELRAMLACRHGRLDHHHACSSVCPAEGQLHRVGELRLKSGNQALACPAGLSTSFPIDGTFFNSWLAQSVQITAENMAMSEWPLNNGHREDPAPGLLSEELLQDEETLLSFMRDPSLRPGDPARKARGRTRLPAKKKPPPPPPQDGPGSRTTPDKAPKKTWGQDAGSGKGGQGPPTRKPPRRTSSHLPSSPAAGDCPILATPESPPPLAPETPDEAASVAADSDVQVPGPAASPKPLGRLRPPRESKVTRRLPGARPDAGMGPPSAVAERPKVSLHFDTETDGYFSDGEMSDSDVEAEDGGVQRGPREAGAEEVVRMGVLAS

SEQ ID NO: 807916 - protein, 145 aa, Homo sapiens
LPTGSDSEGEGATSLAPCLGLAGVLPRASAHIVGLWILALLHWLLLWTGLLLSLCPAEPRCLLGWLAAARGGGWPFIWGALSLPGQALEQSSSGSCLHLQDVQQAARRRMPATHPPPVPSLSPVGHSRFCLFPVYCPQCRGLCCP

SEQ ID NO: 807917 - protein, 337 aa, Homo sapiens
MEEKRRKYSISSDNSDTTDSHATSTSASRCSKLPSSTKSGWPRQNEKKPSEVFRTDLITAMKIPDSYQLSPDDYYILADPWRQEWEKGVQVPAGAEAIPEPVVRILPPLEGPPAQASPSSTMLGEGSQPDWPGGSRYDLDEIDAYWLELINSELKEMERPELDELTLERVLEELETLCHQNMARAIETQEGLGIEYDEDVVCDVCRSPEGEDGNEMVFCDKCNVCVHQACYGILKVPTGSWLCRTCALGVQPKCLLCPKRGGALKPTRSGTKWVHVSCALWIPEVSIGCPEKMEPITKISHIPASRWALSCSLSPVGHSRFCLFPVYCPQCRGLCCP

SEQ ID NO: 807918 - protein, 152 aa, Homo sapiens
MISGLSGRKSSTGSPTSPLNAEKLESEEDVSQAFLEAVAEEKPHVKPYFSKTIRDLEVVEGSAARFDCKIEGYPDPEVVWFKDDQSIRESRHFQIDYDEDGNCSLIISDVCGDDDAKYTCKAVNSLGEATCTAELIVETMEEGEGEGEEEEE

SEQ ID NO: 807919 - protein, 90 aa, Homo sapiens
CRTHAFRIEGYPDPEVVWFKDDQSIRESRHFQIDYDEDGNCSLIISDVCGDDDAKYTCKAVNSLGEATCTAELIVETMEEGEGEGEEEEE

SEQ ID NO: 807920 - protein, 79 aa, Homo sapiens
HSARYADLNVSSSIRESRHFQIDYDEDGNCSLIISDVCGDDDAKYTCKAVNSLGEATCTAELIVETMEEGEGEGEEEEE

SEQ ID NO: 807921 - protein, 79 aa, Homo sapiens
LEDPSQLRANPKSIRESRHFQIDYDEDGNCSLIISDVCGDDDAKYTCKAVNSLGEATCTAELIVETMEEGEGEGEEEEE

SEQ ID NO: 807922 - protein, 152 aa, Homo sapiens; identical to SEQ ID NO: 807918

SEQ ID NO: 807923 - protein, 152 aa, Homo sapiens; identical to SEQ ID NO: 807918

SEQ ID NO: 807924 - protein, 152 aa, Homo sapiens; identical to SEQ ID NO: 807918

SEQ ID NO: 807925 - protein, 152 aa, Homo sapiens; identical to SEQ ID NO: 807918

SEQ ID NO: 807926 - protein, 152 aa, Homo sapiens; identical to SEQ ID NO: 807918

SEQ ID NO: 807927 - protein, 152 aa, Homo sapiens; identical to SEQ ID NO: 807918

SEQ ID NO: 807928 - protein, 127 aa, Homo sapiens
RPPTTTTARIQASNDVRGHVKPYFSKTIRDLEVVEGSAARFDCKIEGYPDPEVVWFKDDQSIRESRHFQIDYDEDGNCSLIISDVCGDDDAKYTCKAVNSLGEATCTAELIVETMEEGEGEGEEEEE

SEQ ID NO: 807929 - protein, 106 aa, Homo sapiens
MCPKLSLRLLLRKSLIAARFDCKIEGYPDPEVVWFKDDQSIRESRHFQIDYDEDGNCSLIISDVCGDDDAKYTCKAVNSLGEATCTAELIVETMEEGEGEGEEEEE

SEQ ID NO: 807930 - protein, 90 aa, Homo sapiens; identical to SEQ ID NO: 807919

SEQ ID NO: 807931 - protein, 152 aa, Homo sapiens; identical to SEQ ID NO: 807918

SEQ ID NO: 807932 - protein, 169 aa, Homo sapiens
  misc_feature (143)..(143): Xaa can be any naturally occurring amino acid
  misc_feature (147)..(148): Xaa can be any naturally occurring amino acid
  misc_feature (158)..(161): Xaa can be any naturally occurring amino acid
MISGLSGRKSSTGSPTSPLNAEKLESEEDVSQAFLEAVAEEKPHVKPYFSKTIRDLEVVEGSAARFDCKIEGYPDPEVVWFKDDQSIRESRHFQIDYDEDGNCSLIISDVCGDDDAKYTCKAVNSLGEATCTAELIVETMVFXRISXXIFQPWKTRAXXXXRLSINNGV

SEQ ID NO: 807933 - protein, 117 aa, Homo sapiens
LGSLLWQNLGSQEVLVPGNSCFSGAGLYSLQPLALPSWNQGQRLSPTLVSIFQKTGNAVRAIGRLSSMAMISGLSGRKSSTGSPTSPLNAEKLESEGRRSFSSQLVRKKGLGNKGAF

SEQ ID NO: 807934 - protein, 57 aa, Homo sapiens
MGLGWSPERPRCRVGAAAAAAAAAAAAAAGAAAVLTAAAEAGDTCTCKCAHDLCVHS

SEQ ID NO: 807935 - protein, 143 aa, Homo sapiens
FDLWELQLNVRFVFGQRKAISFGLFTPLASVNNAAMNKDMQIPAGAPALSSFQNTPEVELLHRVIPGCPAAPSHGEIPALGERTGSVLSDTCSHSSSVPSPIGQVRLLQALPSVAVRFLCRAGISIPHTLLLFVCLFPVSQGI

SEQ ID NO: 807936 - protein, 201 aa, Homo sapiens
GSWEPDVSGSAAWLASAAFGMATFSGPAGPILSLNPQEDVEFQKEVAQVRKRITQRKKQEQLTPGVVYVRHLPNLLDETQIFSYFSQFGTVTRFRLSRSKRTGNSKGYAFVEFESEDVAKIVAETMNNYLFGERLLECHFMPPEKVHKELFKDWNIPFKQPSYPSVKRYNRNRTLTQKLRMEERFKKKERLLRKKLAKKRN

SEQ ID NO: 807937 - protein, 201 aa, Homo sapiens; identical to SEQ ID NO: 807936

SEQ ID NO: 807938 - protein, 201 aa, Homo sapiens; identical to SEQ ID NO: 807936

SEQ ID NO: 807939 - protein, 201 aa, Homo sapiens; identical to SEQ ID NO: 807936

SEQ ID NO: 807940 - protein, 201 aa, Homo sapiens; identical to SEQ ID NO: 807936

SEQ ID NO: 807941 - protein, 201 aa, Homo sapiens; identical to SEQ ID NO: 807936

SEQ ID NO: 807942 - protein, 201 aa, Homo sapiens; identical to SEQ ID NO: 807936

SEQ ID NO: 807943 - protein, 201 aa, Homo sapiens; identical to SEQ ID NO: 807936

SEQ ID NO: 807944 - protein, 201 aa, Homo sapiens; identical to SEQ ID NO: 807936

SEQ ID NO: 807945 - protein, 201 aa, Homo sapiens; identical to SEQ ID NO: 807936

SEQ ID NO: 807946 - protein, 1004 aa, Homo sapiens
MVQLYNLHPFGSQQVVPCKLEPDRFCGGGRDALFVAAGCKVEAFAVAGQELCQPRCAFSTLGRVLRLAYSEAGDYLVAIEEKNKATFLRAYVNWRNKRTENSRVCIRMIGHNVEGPFSKAFRDQMYIIEMPLSEAPLCISCCPVKGDLLVGCTNKLVLFSLKYQIINEEFSLLDFERSLIIHIDNITPVEVSFCVGYVAVMSDLEVLIVKLESGPKNGERVHHHPHKTNNRIRRTEEGISNEISQLESDDFVICQKPLELLGEKSEQSGLSVTLESTGLADEKRKYSHFQHLLYRRFAPDISSYVLSDDIKLHSLQLLPIYQTGSLTSDGKNLSQEKELLSLFCFFSLPHVGYLYMVVKSVELMSVYQYPEKSQQAVLTPQFLHVITSNNLQCFTVRCSAAAAREEDPYMDTTLKACPPVSMDVCALRIQLFIGLKAICHFKNHIILLTKAEPEAIPERRQSPKRLLSRKDTSVKIKIPPVAEAGWNLYIVNTISPVQLYKEMVDYSNTYKTVKTQSCIHLLSEAHLLVRAALMDASQLEPGEKAELLEAFKESCGHLGDCYSRLDSQHSHLTLPYYKMSGLSMAEVLARTDWTVEDGLQKYERGLIFYINHSLYENLDEELNEELAAKVVQMFYVAEPKQVPHILCSPSMKNINPLTAMSYLRKLDTSGFSSILVTLTKAAVALKMGDLDMHRNEMKSHSEMKLVCGFILEPRLLIQQRKGQIVPTELALHLKETQPGLLVASVLGLQKNNKIGIEEADSFFKVLCAKDEDTIPQLLVDFWEAQLVACLPDVVLQELFFKLTSQYIWRLSKRQPPDTTPLRTSEDLINACSHYGLIYPWVHVVISSDSLADKNYTEDLSKLQSLICGPSFDIASIIPFLEPLSEDTIAGLSVHVLCRTRLKEYEQCIDILLERCPEAVIPYANHELKEENRTLWWKKLLPELCQRIKCGGEKYQLYLSSLKETLSIVAVELELKDFMNVLPEDGTATFFLPYLLYCSRKKPLT

SEQ ID NO: 807947 - protein, 272 aa, Homo sapiens
MVQLYNLHPFGSQQVVPCKLEPDRFCGGGRDALFVAAGCKVEAFAVAGQELCQPRCAFSTLGRVLRLAYSEAGISNEISQLESDDFVICQKPLELLGEKSEQSGLSVTLESTGLADEKRKYSHFQHLLYRRFAPDISSYVLSDDIKLHSLQLLPIYQTGSLTSDGKNLSQEKELLSLFCFFSLPHVGYLYMVVKSVELMSVYQYPEKSQQAVLTPQFLHVITSYQPAGCPVRAQSAGPLERNSLLLPPVGFPPLPAGLRHKTRFYAYTPLRL

SEQ ID NO: 807948 - protein, 890 aa, Homo sapiens
MVQLYNLHPFGSQQVVPCKLEPDRFCGGGRDALFVAAGCKVEAFAVAGQELCQPRCAFSTLGRVLRLAYSEAGDYLVAIEEKNKATFLRAYVNWRNKRTENSRVCIRMIGHNVEGPFSKAFRDQMYIIEMPLSEAPLCISCCPVKGDLLVGCTNKLVLFSLKYQIINEEFSLLDFERSLIIHIDNITPVEVSFCVGYVAVMSDLEVLIVKLESGPKNGERVHHHPHKTNNRIRRTEEGISNEISQLESDDFVICQKPLELLGEKSEQSGLSVTLESTGLADEKRKYSHFQHLLYRRFAPDISSYVLSDDIKLHSLQLLPIYQTGSLTSDGKNLSQEKELLSLFCFFSLPHVGYLYMVVKSVELMSVYQYPEKSQQAVLTPQFLHVITSNNLQCFTVRCSAAAAREEDPYMDTTLKACPPVSMDVCALRIQLFIGLKAICHFKNHIILLTKAEPEAIPERRQSPKRLLSRKDTSVKIKIPPVAEAGWNLYIVNTISPVQLYKEMVDYSNTYKTVKTQSCIHLLSEAHLLVRAALMDASQLEPGEKAELLEAFKESCGHLGDCYSRLDSQHSHLTLPYYKMSGLSMAEVLARTDWTVEDGLQKYERGLIFYINHSLYENLDEELNEELAAKVVQMFYVAEPKQVPHILCSPSMKNINPLTAMSYLRKLDTSGFSSILVTLTKAAVALKMGDLDMHRNEMKSHSEMKLVCGFILEPRLLIQQRKGQIVPTELALHLKETQPGLLVASVLGLQKNNKIGIEEADSFFKVLCAKDEDTIPQLLVDFWEAQLVACLPDVVLQELFFKLTSQYIWRLSKRQPPDTTPLRTSEDLINACSHYGLIYPWVHVVISSDSLADKNYTEDLSKLQLPLFRSWSHFQKTLLPASVSMFCVVHA

SEQ ID NO: 807949 - protein, 689 aa, Homo sapiens
MVQLYNLHPFGSQQVVPCKLEPDRFCGGGRDALFVAAGCKVEAFAVAGQELCQPRCAFSTLGRVLRLAYSEAGISNEISQLESDDFVICQKPLELLGEKSEQSGLSVTLELHSLQLLPIYQTGSLTSDGKNLSQEKELLSLFCFFSLPHVGYLYMVVKSVELMSVYQYPEKSQQAVLTPQFLHVITSNNLQCFTVRCSAAAAREEDPYMDTTLKACPPVSMDVCALRIQLFIGLKAICHFKNHIILLTKAEPEAIPERRQSPKRLLSRKDTSVKIKIPPVAEAGWNLYIVNTISPVQLYKEMVDYSNTYKTVKTQSCIHLLSEAHLLVRAALMDASQLEPGEKAELLEAFKESCGHLGDCYSRLDSQHSHLTLPYYKMSGLSMAEVLARTDWTVEDGLQKYERGLIFYINHSLYENLDEELNEELAAKVVQMFYVAEPKQVPHILCSPSMKNINPLTAMSYLRKLDTSGFSSILVTLTKAAVALKMGDLDMHRNEMKSHSEMKLVCGFILEPRLLIQQRKGQIVPTELALHLKETQPGLLVASVLGLQKNNKIGIEEADSFFKVLCAKDEDTIPQLLVDFWEAQLVACLPDVVLQELFFKLTSQYIWRLSKRQPPDTTPLRTSEDLINACSHYGLIYPWVHVVISSDSLADKNYTEDLSKLQLPLFRSWSHFQKTLLPASVSMFCVVHA

SEQ ID NO: 807950 - protein, 331 aa, Homo sapiens
KYWISSTTRSAHLTLPYYKMSGLSMAEVLARTDWTVEDGLQKYERGLIFYINHSLYENLDEELNEELAAKVVQMFYVAEPKQVPHILCSPSMKNINPLTAMSYLRKLDTSGFSSILVTLTKAAVALKMGDLDMHRNEMKSHSEMKLVCGFILEPRLLIQQRKGQIVPTELALHLKETQPGLLVASVLGLQKNNKIGIEEADSFFKVLCAKDEDTIPQLLVDFWEAQLVACLPDVVLQELFFKLTSQYIWRLSKRQPPDTTPLRTSEDLINACSHYGLIYPWVHVVISSDSLADKNYTEDLSKLQLPLFRSWSHFQKTLLPASVSMFCVVHA

SEQ ID NO: 807951 - protein, 1004 aa, Homo sapiens; identical to SEQ ID NO: 807946

SEQ ID NO: 807952 - protein, 1020 aa, Homo sapiens
MVQLYNLHPFGSQQVVPCKLEPDRFCGGGRDALFVAAGCKVEAFAVAGQELCQPRCAFSTLGRVLRLAYSEAGDYLVAIEEKNKATFLRAYVNWRNKRTENSRVCIRMIGHNVEGPFSKAFRDQMYIIEMPLSEAPLCISCCPVKGDLLVGCTNKLVLFSLKYQIINEEFSLLDFERSLIIHIDNITPVEVSFCVGYVAVMSDLEVLIVKLESGPKNGERVHHHPHKTNNRIRRTEEGISNEISQLESDDFVICQKPLELLGEKSEQSGLSVTLESTGLADEKRKYSHFQHLLYRRFAPDISSYVLSDDIKLHSLQLLPIYQTGSLTSDGKNLSQEKELLSLFCFFSLPHVGYLYMVVKSVELMSVYQYPEKSQQAVLTPQFLHVITSNNLQCFTVRCSAAAAREEDPYMDTTLKACPPVSMDVCALRIQLFIGLKAICHFKNHIILLTKAEPEAIPERRQSPKRLLSRKDTSVKIKIPPVAEAGWNLYIVNTISPVQLYKEMVDYSNTYKTVKTQSCIHLLSEAHLLVRAALMDASQLEPGEKAELLEAFKESCGHLGDCYSRLDSQHSHLTLPYYKMSGLSMAEVLARTDWTVEDGLQKYERGLIFYINHSLYENLDEELNEELAAKVVQMFYVAEPKQVPHILCSPSMKNINPLTAMSYLRKLDTSGFSSILVTLTKAAVALKMGDLDMHRNEMKSHSEMKLVCGFILEPRLLIQQRKGQIVPTELALHLKETQPGLLVASVLGLQKNNKIGIEEADSFFKVLCAKDEDTIPQLLVDFWEAQLVACLPDVVLQELFFKLTSQYIWRLSKRQPPDTTPLRTSEDLINACSHYGLIYPWVHVVISSDSLADKNYTEDLSKLQSLICGPSFDIASIIPFLEPLSEDTIAGLSVHVLCRTRLKEYEQCIDILLERCPEAVIPYANHELKEENRTLWWKKLLPELCQRIKCGGEKYQLYLSSLKETLSIVAVELELKDFTTSIQFIPSSTSKTMLKQSKLSSLTLRAKSRSTYYNFHLRFSI

SEQ ID NO: 807953 - protein, 467 aa, Homo sapiens
MVQLYNLHPFGSQQVVPCKLEPDRFCGGGRDALFVAAGCKVEAFAVAGQELCQPRCAFSTLGRVLRLAYSEAGDYLVAIEEKNKATFLRAYVNWRNKRTENSRVCIRMIGHNVEGPFSKAFRDQMYIIEMPLSEAPLCISCCPVKGDLLVGCTNKLVLFSLKYQIINEEFSLLDFERSLIIHIDNITPVEVSFCVGYVAVMSDLEVLIVKLESGPKNGERVHHHPHKTNNRIRRTEEGISNEISQLESDDFVICQKPLELLGEKSEQSGLSVTLESTGLADEKRKYSHFQHLLYRRFAPDISSYVLSDDIKLHSLQLLPIYQTGSLTSDGKNLSQEKELLSLFCFFSLPHVGYLYMVVKSVELMSVYQYPEKSQQAVLTPQFLHVITSNNLQCFTVRCSAAAAREEDPYMDTTLKACPPVSMDVCALRIQLFIGLKAICHFKNHIILLTKAEPEAIPERRQSPKRLL

SEQ ID NO: 807954 - protein, 117 aa, Homo sapiens
MKWTRVGPTEKKLPTHGSLTLQQRPCHSTCQPLPACRGAGAERFVPLLEPGKGTGSLLESWEVQPRFYIKIQRLAHVLGECSYSSGMKVLSVPYPPSFSPVLHTHIPGSLSLVRRLN

SEQ ID NO: 807955 - protein, 149 aa, Homo sapiens
MPTTTALRWTAAARVRRKGRGGWVPAALRSVSQDRVPGCTVMGGETRSPENAVDFTGRCYFTKICKCKLKDIACLKCGNIVGYHVIVPCSSCLLSCNNGHFWMFHSQAVYDINRLDSTGVNVLLWGNLPEIEESTDEDVLNISAEECIR

SEQ ID NO: 807956 - protein, 73 aa, Homo sapiens
VLGWDPGCPPGLGDTGGGRPMITRDANDDCPTVDRGCPCAEERERRLGAGCAAVREPGQSPRLYSDGRRDSQS

SEQ ID NO: 807957 - protein, 149 aa, Homo sapiens
MSTNICSFKDRCVSILCCKFCKQVLSSRGMKAVLLADTEIDLFSTDIPPTNAVDFTGRCYFTKICKCKLKDIACLKCGNIVGYHVIVPCSSCLLSCNNGHFWMFHSQAVYDINRLDSTGVNVLLWGNLPEIEESTDEDVLNISAEECIR

SEQ ID NO: 807958 - protein, 149 aa, Homo sapiens; identical to SEQ ID NO: 807957

SEQ ID NO: 807959 - protein, 149 aa, Homo sapiens; identical to SEQ ID NO: 807957

SEQ ID NO: 807960 - protein, 149 aa, Homo sapiens; identical to SEQ ID NO: 807957

SEQ ID NO: 807961 - protein, 121 aa, Homo sapiens
MTGAVLLADTEIDLFSTDIPPTNAVDFTGRCYFTKICKCKLKDIACLKCGNIVGYHVIVPCSSCLLSCNNGHFWMFHSQAVYDINRLDSTGVNVLLWGNLPEIEESTDEDVLNISAEECIR

SEQ ID NO: 807962 - protein, 120 aa, Homo sapiens
MKAVLLADTEIDLFSTDIPPTNAVDFTGRCYFTKICKCKLKDIACLKCGNIVGYHVIVPCSSCLLSCNNGHFWMFHSQAVYDINRLDSTGVNVLLWGNLPEIEESTDEDVLNISAEECIR

SEQ ID NO: 807963 - protein, 120 aa, Homo sapiens; identical to SEQ ID NO: 807962

SEQ ID NO: 807964 - protein, 140 aa, Homo sapiens
MSTNICSFKDRCVSILCCKFCKQVLSSRGMKAVLLADTEIDLFSTDIPPTNAVDFTGRCYFTKICKCKLKDIACLKCGNIVGYHVIVPCSSCLLSCNNGHFWMFHSQAVYDINRLDSTDFCKMPRGELGLFLFSNLPFTE

SEQ ID NO: 807965 - protein, 432 aa, Homo sapiens
SLPLPPLSARCLLSSCCQELTASRAGILCSLCAQSPTMSANATLKPLCPILEQMSRLQSHSNTSIRYIDHAAVLLHGLASLLGLVENGVILFVVGCRMRQTVVTTWVLHLALSDLLASASLPFFTYFLAVGHSWELGTTFCKLHSSIFFLNMFASGFLLSAISLDRCLQVVRPVWAQNHRTVAAAHKVCLVLWALAVLNTVPYFVFRDTISRLDGRIMCYYNVLLLNPGPDRDATCNSRQAALAVSKFLLAFLVPLAIIASSHAAVSLRLQHRGRRRPGRFVRLVAAVVAAFALCWGPYHVFSLLEARAHANPGLRPLVWRGLPFVTSLAFFNSVANPVLYVLTCPDMLRKLRRSLRTVLESVLVDDSELGGAGSSRRRRTSSTARSASPLALCSRPEEPRGPARLLGWLLGSCAASPQTGPLNRALSSTSS

SEQ ID NO: 807966 - protein, 212 aa, Homo sapiens
SGRDDQGRRAQCSAARCGRPSGGVMEDERSFSDICGGRLALQRRYYSPSCREFCLSCPRLSLRSLTAVTCTVWLAAYGLFTLCENSMILSAAIFITLLGLLGYLHFVKIDQETLLIIDSLGIQMTSSYASGKESTTFIEMGKVKDIVINEAIYMQKVIYYLCILLKDPVEPHGISQVVPVFQSAKPRLDCLIEVYRSCQEILAHQKATSTSP

SEQ ID NO: 807967 - protein, 231 aa, Homo sapiens
SGRDDQGRRAQCSAARCGRPSGGVMEDERSFSDICGGRLALQRRYYSPSCREFCLSCPRLSLRSLTAVTCTVWLAAYGLFTLCENSMILSAAIFITLLGLLGYLHFVKIDQETLLIIDSLGIQMTSSYASGKESTTFIEMGKVKDIVINEAIYMQKVIYYLCILLKDPVEPHGISQVVPVFQRQSLTLSPRLECSDNHHSLQPPPPGLKKSSCLSLLRTWDYRVPSPGWTA

SEQ ID NO: 807968 - protein, 157 aa, Homo sapiens
SGRDDQGRRAQCSAARCGRPSGGVMEDERSFSDICGGRLALQRRYYSPSCREFCLSCPRLSLRSLTAVTCTVWLAAYGLFTLCENSMILSAAIFITLLGLLGYLHFVKIDQETLLIIDSLGIQMTSSYASGKESTTFIEMGKVKDIVINEAIYMVSI

SEQ ID NO: 807969 - protein, 184 aa, Homo sapiens
SGRDDQGRRAQCSAARCGRPSGGVMEDERSFSDICGGRLALQRRYYSPSCREFCLSCPRLSLRSLTAVTCTVWLAAYGLFTLCENSMILSAAIFITLLGLLGYLHFVKIDQETLLIIDSLGIQMTSSYASGKESTTFIEMGKVKDIVINEAIYMSAKPRLDCLIEVYRSCQEILAHQKATSTSP

SEQ ID NO: 807970 - protein, 101 aa, Homo sapiens
YYSPSCREFCLSCPRLSLRSLTAVTCTVWLAAYGLFTLCEVMASRPLPALEGGGSALGGSLGSLVEPGPLVGPSYSDRTGGRELTGSGDDIPLLDSSLNDV

SEQ ID NO: 807971 - protein, 212 aa, Homo sapiens; identical to SEQ ID NO: 807966

SEQ ID NO: 807972 - protein, 217 aa, Homo sapiens
SGRDDQGRRAQCSAARCGRPSGGVMEDERSFSDICGGRLALQRRYYSPSCREFCLSCPRLSLRSLTAVTCTVWLAAYGLFTLCENSMILSAAIFITLLGLLGYLHFVKIDQETLLIIDSLGIQMTSSYASGKESTTFIEMGKVKDIVINEAIYMQKVIYYLCILLKDPVEPHGISQVVPVFQAAWCIHSKLATRPSCFLNRTLPGPSGQPSQEPIPC

SEQ ID NO: 807973 - protein, 214 aa, Homo sapiens
AAAADIRKALLILHDSPHSAARTARRRYYSPSCREFCLSCPRLSLRSLTAVTCTVWLAAYGLFTLCENSMILSAAIFITLLGLLGYLHFVKIDQETLLIIDSLGIQMTSSYASGKESTTFIEMGKVKDIVINEAIYMQKVIYYLCILLKDPVEPHGISQVVPVFQRQSLTLSPRLECSDNHHSLQPPPPGLKKSSCLSLLRTWDYRVPSPGWTA

SEQ ID NO: 807974 - protein, 96 aa, Homo sapiens
VRLKPLNSVRRIGEISYLSRSLLLNGSQICINEAYIQNQKVIYYLCILLKDPVEPHGISQVVPVFQSAKPRLDCLIEVYRSCQEILAHQKATSTSP

SEQ ID NO: 807975 - protein, 336 aa, Homo sapiens
MIYTCHRDKNCVINKVTRNRCQYCRLQKCFEVGMSKESVRNDRNKKKKETSKQECTESYEMTAELDDLTEKIRKAHQETFPSLCQLGKYTTNSSADHRVRLDLGLWDKFSELATKCIIKIVEFAKRLPGFTGLTIADQITLLKAACLDILILRICTRYTPEQDTMTFSDGLTLNRTQMHNAGFGPLTDLVFTFANQLLPLEMDDTETGLLSAICLICGDRQDLEEPTKVDKLQEPLLEALKIYIRKRRPSKPHMFPKILMKITDLRSISAKGAERVITLKMEIPGSMPPLIQEMLENSEGHEPLTPSSSGNTAEHSPSISPSSVENSGVSQSPLVQ

SEQ ID NO: 807976 - protein, 448 aa, Homo sapiens
MFDCMDVLSVSPGQILDFYTASPSSCMLQEKALKACFSGLTQTEWQHRHTAQSIETQSTSSEELVPSPPSPLPPPRVYKPCFVCQDKSSGYHYGVSACEGCKGFFRRSIQKNMIYTCHRDKNCVINKVTRNRCQYCRLQKCFEVGMSKESVRNDRNKKKKETSKQECTESYEMTAELDDLTEKIRKAHQETFPSLCQLGKYTTNSSADHRVRLDLGLWDKFSELATKCIIKIVEFAKRLPGFTGLTIADQITLLKAACLDILILRICTRYTPEQDTMTFSDGLTLNRTQMHNAGFGPLTDLVFTFANQLLPLEMDDTETGLLSAICLICGDRQDLEEPTKVDKLQEPLLEALKIYIRKRRPSKPHMFPKILMKITDLRSISAKGAERVITLKMEIPGSMPPLIQEMLENSEGHEPLTPSSSGNTAEHSPSISPSSVENSGVSQSPLVQ

SEQ ID NO: 807977 - protein, 66 aa, Homo sapiens
RPPGPLDIPEIAAHNCTFPGQETSPAGERGPPPSPEPRPAEPATRSPAAIRPSRQLKKSLSRDLEK

SEQ ID NO: 807978 - protein, 215 aa, Homo sapiens
RPPGPLDIPEIAAHNCTFPGQETSPAGERGPPPSLSPLPALPPRSGPAARCAPSPPTLPAPCGGRALPAAEEGRGLGTCCRFPPAEFGPAPPGFQVGAVEGGSLPLHPGSRLRVRASWRVPCIPHFPPAQPSLGRLMIALAVSVKIPTLRGLRTLRGQRGGRLCGIRRGPGHILPVQEINNDYKIAKEVTFKRSGEVRWPNKSLYQSSSPQEHQI

SEQ ID NO: 807979 - protein, 207 aa, Homo sapiens
MALLFARSLRLCRWGAKRLGVASTEAQRGVSFKLEEKTAHSSLALFRDDTGVKYGLVGLEPTKVALNVERFREWAVVLADTAVTSGRHYWEVTVKRSQQFRIGVADVDMSRDSCIGVDDRSWVFTYAQRKWYTMLANEKAPVEGIGQPEKVGLLLEYEAQKLSLVDVSQVSVVHTLQTDFRGPVVPAFALWDGELLTHSGLEVPEGL

SEQ ID NO: 807980 - protein, 207 aa, Homo sapiens; identical to SEQ ID NO: 807979

SEQ ID NO: 807981 - protein, 207 aa, Homo sapiens; identical to SEQ ID NO: 807979

SEQ ID NO: 807982 - protein, 152 aa, Homo sapiens
MALLFARSLRLCRWGAKRLGVASTEAQRGVSFKLEEKTAHSSLALFRDDTGVKYGLVGLEPTKVALNVERFREWAVVLADTAVTSGRHYWEVTVKRSQQFRIGVADVDMSRDSCIGVDDRSWVFTYAQRKWYTMLANEKPPFPHPPTLLPIS

SEQ ID NO: 807983 - protein, 179 aa, Homo sapiens
MCPTLNDLERDSLKGHGPNEKDGRAVVRSPFKHSTVILLQLSEFYKHLEASLCAAGRDWPPHTSPCSASQGQSLVRAQEKRACRRQGAGVSIALSQTEPEHFISYISGFSVFPDPKDFLASHAHGPSAGGAPSLLLLLPCALLHRLLRPDAPAHPRSLVPSVLQRERRPCGRPGLGHRL

SEQ ID NO: 807984 - protein, 90 aa, Homo sapiens
PKLIWSLHVRPMFKVSVELQIFKLGNSYQREKHNGGREEVTKVATQKHRQSPLNWTSSHFGEVIPITDRQDRVNAPILPENKERDESVRP

SEQ ID NO: 807985 - protein, 223 aa, Homo sapiens; identical to SEQ ID NO: 806206

SEQ ID NO: 807986 - protein, 108 aa, Homo sapiens
MHETQHTTHTLLPQVSLTCVALGNRHVMAELFFVQTRTHLPLQDLRFLTTLLASRRLLHPAEDAIPRGPERLDMGGMWQSSWKTLEQVSQQNSSPPSRHTSHSSKFLI

SEQ ID NO: 807987 - protein, 159 aa, Homo sapiens
MHETQHTTHTLLPQVSLTCVALGNRHVMAELFFVQTRCGVLSVPLKCGAEEQAPFSTFPCPCACSWFSRVRGKEKAWGLHLIYQLFLRTHLPLQDLRFLTTLLASRRLLHPAEDAIPRGPERLDMGGMWQSSWKTLEQVSQQNSSPPSRHTSHSSKFLI

SEQ ID NO: 807988 - protein, 212 aa, Homo sapiens
FPPRVFLPDPGPGSRPGASWWGERREPICPQGARGAGPAPARHMAAATSLRTPRRRAQLARGPSEAPGRPGAKQQLSGEAPASGDRDVPPHFPLPVSYYVGTLGTHTEIKRVAEEKVTLPCHHQLGLPEKDTLDIEWLLTDNEGNQKVVITYSSRHVYNNLTEEQKGRVAFASNFLAGDASLQIEPLKPSDEGRYTCKVKNSAGATCGAMSS

SEQ ID NO: 807989 - protein, 862 aa, Homo sapiens
MLRNSTFKNMQRRHTTLREKGRRQAIRGPAYMFNEKGTSLTPEEERFLDSAEYGNIPVVRKMLEESKTLNFNCVDYMGQNALQLAVGNEHLEVTELLLKKENLARVGDALLLAISKGYVRIVEAILNHPAFAQGQRLTLSPLEQELRDDDFYAYDEDGTRFSHDITPIILAAHCQEYEIVHILLLKGARIERPHDYFCKCNECTEKQRKDSFSHSRSRMNAYKGLASAAYLSLSSEDPVLTALELSNELARLANIETEFKNDYRKLSMQCKDFVVGVLDLCRDTEEVEAILNGDVNFQVWSDHHRPSLSRIKLAIKYEVKKFVAHPNCQQQLLTMWYENLSGLRQQSIAVKFLAVFGVSIGLPFLAIAYWIAPCSKLGRTLRSPFMKFVAHAVSFTIFLGLLVVNASDRFEGVKTLPNETFTDYPKQIFRVKTTQFSWTEMLIMKWVLGMIWSECKEIWEEGPREYVLHLWNLLDFGMLSIFVASFTARFMAFLKATEAQLYVDQHVQDDTLHNVSLPPEVAYFTYARDKWWPSDPQIISEGLYAIAVVLSFSRIAYILPANESFGPLQISLGRTVKDIFKFMVIFIMVFVAFMIGMFNLYSYYRGAKYNPAFTTVEESFKTLFWSIFGLSEVISVVLKYDHKFIENIGYVLYGVYNVTMVVVLLNMLIAMINNSYQEIEEDADVEWKFARAKLWLSYFDEGRTLPAPFNLVPSPKSFYYLIMRIKMCLIKLCKSKAKSCENDLEMGMLNSKFKKTRYQAGMRNSENLTANNTLSKPTRYQKIMKRLIKRYVLKAQVDRENDEVNEGELKEIKQDISSLRYELLEEKSQATGELADLIQQLSEKFGKNLNKDHLRVNKGKDI

SEQ ID NO: 807990 - protein, 140 aa, Homo sapiens
MRIKMCLIKLCKSKAKSCENDLEMGMLNSKFKKTRYQAGMRNSENLTANNTLSKPTRYQKIMKRLIKRYVLKAQVDRENDEVNEGELKEIKQDISSLRYELLEEKSQATGELADLIQQLSEKFGKNLNKDHLRVNKGKDI

SEQ ID NO: 807991 - protein, 828 aa, Homo sapiens
MNSDQDVALKLAQERAEIVAKYDRGREGAEIEPWEDADYLVYKVTDRFGFLHEEELPDHNVAVERQKHLEIERTTKWLKMLKGWEKYKNTEKFHRRIYKGIPLQLRGEVWALLLEIPKMKEETRDLYSKLKHRARGCSPDIRQIDLDVNRTFRDHIMFRDRYGVKQQSLFHVLAAYSIYNTEVGYCQGMSQITALLLMYMNEEDAFWALVKLFSGPKHAMHGFFVQGFPKLLRFQEHHEKILNKFLSKLKQHLDSQEIYTSFYTMKWFFQCFLDRTPFTLNLRIWDIYIFEGERVLTAMSYTILKLHKKHLMKLSMEELVEFFQETLAKDFFFEDDFVIEQLQISMTELKRAKLDLPEPGKEDEYPKKPLGQLPPELQSWGVHHLSNGQRSVGRPSPLASGRRESGAPHRRHEHSPHPQSRTGTPERAQPPRRKSVEEESKKLKDEADFQRKLPSGPQDSSRQYNHAAANQNSNATSNIRKEFVPKWNKPSDVSATERTAKYTMEGKGRAAHPALAVTVPGPAEVRVSNVRPKMKALDAEDGKRGSTASQYDNVPGPELDSGASVEEALERAYSQSPRHALYPPSPRKHAEPSSSPSKVSNKFTFKVQPPSHARYPSQLDGEARGLAHPPSYSNPPVYHGNSPKHFPTANSSFASPQFSPGTQLNPSRRPHGSTLSVSASPEKSYSRPSPLVLPSSRIEVLPVDTGAGGYSGNSGSPKNGKLIIPPVDYLPDNRTWSEVSYTYRPETQGQSWTRDASRGNLPKYSAFQLAPFQDHGLPAVSVDSPVRYKASPAAEDASPSGYPYSGPPPPAYHYRNRDGLSIQESVLL

SEQ ID NO: 807992 - protein, 102 aa, Homo sapiens
MMTICGVVRSYNFSTCYCECLINGSTSVKSIISQYQELHFGLHVLSQIYVVQVTLYHVNGEKSGYYEISNINQMYMWSCNVIEGTQCSQTLMQYLVLLSQIF

SEQ ID NO: 807993 - protein, 65 aa, Homo sapiens
MRKLPWQDQEVKDYVICCMINIWNVKYNSIHCVANLLAGLVLYQEDVGIHVVDGVLEDIRLGMEV

SEQ ID NO: 807994 - protein, 765 aa, Homo sapiens
MNSDQDVALKLAQERAEIVAKYDRGREGAEIEPWEDADYLVYKVTDRFGFLHEEELPDHNVAVERQKHLEIERTTKWLKMLKGWEKYKNTEKFHRRIYKGIPLQLRGEVWALLLEIPKMKEETRDLYSKLKHRARGCSPDIRQIDLDVNRTFRDHIMFRDRYGVKQQSLFHVLAAYSIYNTEVGYCQGMSQITALLLMYMNEEDAFWALVKLFSGPKHAMHGFFVQGFPKLLRFQEHHEKILNKFLSKLKQHLDSQEIYTSFYTMKWFFQCFLDRTPFTLNLRIWDIYIFEGERVLTAMSYTILKLHKKHLMKLSMEELVEFFQETLAKDFFFEDDFVIEQLQISMTELKRAKLDLPEPGKEDEYPKKPLGQLPPELQSWGVHHLSNGQRSVGRPSPLASGRRESGAPHRRHEHSPHPQSRTGTPERAQPPRRKSVEEESKKLKDEADFQRKLPSGPQDSSRQYNHAAANQNSNATSNIRKEFVPKWNKPSDVSATERTAKYTMEGKGRAAHPALAVTVPGPAEVRVSNVRPKMKALDAEDGKRGSTASQYDNVPGPELDSGASVEEALERAYSQSPRHALYPPSPRKHAEPSSSPSKVSNKFTFKVQPPSHARYPSQLDGEARGLAHPPSYSNPPVYHGNSPKHFPTANSSFASPQFSPGTQLNPSRRPHGSTLSVSASPEKSYSRPSPLVLPSSRIEVLPVDTGAGGYSGNSGSPKNGKLIIPPVDYLPDNRTWSEVSYTYRPETQGQSWTRDASRGNLPFCR

SEQ ID NO: 807995 - protein, 828 aa, Homo sapiens; identical to SEQ ID NO: 807991

SEQ ID NO: 807996 - protein, 341 aa, Homo sapiens
VGPTAAAVDGVELVLGEGVSHVVVVAKDEHAPCQVAHLGTQLRREGAAVALLVLVRAAAPAAQHVAPVGWAAHPRPRTPRSLARALRCPGPRRLQPRRPGYPPRPAHGPRGGRRGAVGAPQTLEAEAERKALVEAHAGPQPEDEPQYSMEAKPEEHQPQDERSPLHGRAGAAGIILKRGGLPADHRTPRSPRSPARFPFKELPRDAPGTSPSSPTPRLSGGPARPHGRPPSGPGLARPGPGLAGRGPGLPPTQYGRQDVRDAPRPRPSPGPRPNSQAPPPWAVRSPMGWRGEQEPRRPARELPANGRAARQRPPDAGHRRDPRPPGLGWIGSLGRACVRQS

SEQ ID NO: 807997 - protein, 341 aa, Homo sapiens; identical to SEQ ID NO: 807996

SEQ ID NO: 807998 - protein, 94 aa, Homo sapiens
GQKEPMFMAAEVTLSEPAHTSKQAEACEAGAEFLTPTSALQGTCGPVGAQTANLGLNVDMPVMRVASVAPARQSRMNVGFFSRSQMELGRVSLT

SEQ ID NO: 807999 - protein, 130 aa, Homo sapiens
GWGKAPVMEKQSPALGVTGSQVVDTLFPLGRPRRNFRSSPGNPAIALPEVAWPTVRNPEAGTRLRWIEAAMLEAAGLLPVIQPRSRWVLTRSHLVDSRQGTQDSHLLPPPMRLLEEGRPEGEASLTLLFA

SEQ ID NO: 808000 - protein, 465 aa, Homo sapiens
MTLSTEMSDASGLAEETDIDVVGEGEDEEDEEEEDDDEGGGGGPRLAVPAQRRRRRRSYAGEDELEDLEEEEDDDDILLAPPAGGSPAPPGPAPAAGAGAGGGGGGGGAGGGGSAGSGAKNPLVKPPYSYIALITMAILQSPKKRLTLSEICEFISGRFPYYREKFPAWQNSIRHNLSLNDCFVKIPREPGNPGKGNYWTLDPESADMFDNGSFLRRRKRFKRQPLLPPNAAAAESLLLRGAGAAGGAGDPAAAAALFPPAPPPPPHAYGYGPYGCGYGLQLPPYAPPSALFAAAAAAAAAAAFHPHSPPPPPPPHGAAAELARTAFGYRPHPLGAALPGPLPASAAKAGGPGASALARSPFSIESIIGGSLGPAAAAAAAAQAAAAAQASPSPSPVAAPPAPGSSGGGCAAQAAVGPAAALTRSLVAAAAAAASSVSSSAALGTLHQGTALSSVENFTARISNC

SEQ ID NO: 808001 - protein, 393 aa, Homo sapiens
MTLSTEMSDASGLAEETDIDVVGEGEDEEDEEEEDDDEGGGSAGSGAKNPLVKPPYSYIALITMAILQSPKKRLTLSEICEFISGRFPYYREKFPAWQNSIRHNLSLNDCFVKIPREPGNPGKGNYWTLDPESADMFDNGSFLRRRKRFKRQPLLPPNAAAAESLLLRGAGAAGGAGDPAAAAALFPPAPPPPPHAYGYGPYGCGYGLQLPPYAPPSALFAAAAAAAAAAAFHPHSPPPPPPPHGAAAELARTAFGYRPHPLGAALPGPLPASAAKAGGPGASALARSPFSIESIIGGSLGPAAAAAAAAQAAAAAQASPSPSPVAAPPAPGSSGGGCAAQAAVGPAAALTRSLVAAAAAAASSVSSSAALGTLHQGTALSSVENFTARISNC

SEQ ID NO: 808002 - protein, 153 aa, Homo sapiens
MTLSTEMSDASGLAEETDIDVVGEGEDEEDEEEEDDDEGGGSAGSGAKNPLVKPPYSYIALITMAILQSPKKRLTLSEICEFISGRFPYYREKFPAWQNSIRHNLSLNDCFVKIPREPGNPGKGNYWTLDPEVRRLGDSAPRDCPVQCRELYC

SEQ ID NO: 808003 - protein, 80 aa, Homo sapiens
MVDPPGLQEEGKKPMEFSDKTVNSPGAPFGSAGPSIYAKPTYATAPQPPTWGREEEGAGEGSPPCPGTRGSLDVWQMKNN

SEQ ID NO: 808004 - protein, 465 aa, Homo sapiens; identical to SEQ ID NO: 808000

SEQ ID NO: 808005 - protein, 195 aa, Homo sapiens
MTLSTEMSDASGLAEETDIDVVGEGEDEEDEEEEDDDEGGGSAGSGAKNPLVKPPYSYIALITMAILQSPKKRLTLSEICEFISGRFPYYREKFPAWQNSIRHNLSLNDCFVKIPREPGNPGKGNYWTLDPESADMFDNGSFLRRRKRFKRQPLLPPNAAAAAASSVSSSAALGTLHQGTALSSVENFTARISNC

SEQ ID NO: 808006 - protein, 393 aa, Homo sapiens; identical to SEQ ID NO: 808001

SEQ ID NO: 808007 - protein, 158 aa, Homo sapiens [sequence omitted]

SEQ ID NO: 808008 - protein, 68 aa, Homo sapiens
TSNITSEFTSNITSEFTSNAPRDAELIEPWRPSLGELLARPEALTPSNLFLLAVLGALASASATVLAW

SEQ ID NO: 808009 - protein, 239 aa, Homo sapiens
MTHALQELAAAQGSFEVAFPDAAEKMKKVITQLKEAQACIPPCGLQEFARRFLCSGCYSRVCDLPLDCPVQDVTVTRGDQAMFSCIVNFQLPKEEITYSWKFAGGGLRTQDLSYFRDMPRAEGYLARIRPAQLTHRGTFSCVIKQDQRPLARLYFFLNVTGPPPRAETELQASFREVLRWAPRDAELIEPWRPSLGELLARPEALTPSNLFLLAVLGALASASATVLAWMFFRWYCSGN

SEQ ID NO: 808010 - protein, 158 aa, Homo sapiens [sequence omitted]

SEQ ID NO: 808011 - protein, 186 aa, Homo sapiens
MTHALQELAAAQGSFEVAFPDAAEKMKKVITQLKEAQACIPPCGLQEFARRFLCSGCYSRVCDLPLDCPVQDVTVTRGDQAMFSCIVNFQLPKEEITYSWKFAGGGLRTQDLSYFRDMPRAEGYLARIRPAQLTHRGTFSCVIKQDQRPLARLYFFLNGGAGRGRVSERGRERGGARAWLTCAPPQ

SEQ ID NO: 808012 - protein, 105 aa, Homo sapiens [sequence omitted]

SEQ ID NO: 808013 - protein, 186 aa, Homo sapiens; identical to SEQ ID NO: 808011

SEQ ID NO: 808014 - protein, 239 aa, Homo sapiens; identical to SEQ ID NO: 808009

SEQ ID NO: 808015 - protein, 561 aa, Homo sapiens
MAPEIHMTGPMCLIENTNGELVANPEALKILSAITQPVVVVAIVGLYRTGKSYLMNKLAGKNKGFSLGSTVKSHTKGIWMWCVPHPKKPEHTLVLLDTEGLGDVKKGDNQNDSWIFTLAVLLSSTLVYNSMGTINQQAMDQLYYVTELTHRIRSKSSPDENENEDSADFVSFFPDFVWTLRDFSLDLEADGQPLTPDEYLEYSLKLTQGSFAQLEKLQDEELDPEFVQQVADFCSYIFSNSKTKTLSGGIKVNGPRLESLVLTYINAISRGDLPCMENAVLALAQIENSAAVQKAIAHYDQQMGQKVQLPAETLQELLDLHRVSEREATEVYMKNSFKDVDHLFQKKLAAQLDKKRDDFCKQNQEASSDRCSALLQVIFSPLEEEVKAGIYSKPGGYCLFIQKLQDLEKKYYEEPRKGIQAEEILQTYLKSKESVTDAILQTDQILTEKEKEIEVECVKAESAQASAKMVEEMQIKYQQMMEEKEKSYQEHVKQLTEKMERERAQLLEEQEKTLTSKLQEQARVLKERCQGESTQLQNEIQKLQKTLKKKTKRYMSHKLKI

SEQ ID NO: 808016 - protein, 461 aa, Homo sapiens
MQVQRRDPIYVTELTHRIRSKSSPDENENEDSADFVSFFPDFVWTLRDFSLDLEADGQPLTPDEYLEYSLKLTQGTSQKDKNFNLPRLCIRKFFPKKKCFVFDLPIHRRKLAQLEKLQDEELDPEFVQQVADFCSYIFSNSKTKTLSGGIKVNGPRLESLVLTYINAISRGDLPCMENAVLALAQIENSAAVQKAIAHYDQQMGQKVQLPAETLQELLDLHRVSEREATEVYMKNSFKDVDHLFQKKLAAQLDKKRDDFCKQNQEASSDRCSALLQVIFSPLEEEVKAGIYSKPGGYCLFIQKLQDLEKKYYEEPRKGIQAEEILQTYLKSKESVTDAILQTDQILTEKEKEIEVECVKAESAQASAKMVEEMQIKYQQMMEEKEKSYQEHVKQLTEKMERERAQLLEEQEKTLTSKLQEQARVLKERCQGESTQLQNEIQKLQKTLKKKTKRYMSHKLKI

SEQ ID NO: 808017 - protein, 461 aa, Homo sapiens; identical to SEQ ID NO: 808016

SEQ ID NO: 808018 - protein, 595 aa, Homo sapiens
MAPEIHMTGPMCLIENTNGELVANPEALKILSAITQPVVVVAIVGLYRTGKSYLMNKLAGKNKGFSLGSTVKSHTKGIWMWCVPHPKKPEHTLVLLDTEGLGDVKKGDNQNDSWIFTLAVLLSSTLVYNSMGTINQQAMDQLYYVTELTHRIRSKSSPDENENEDSADFVSFFPDFVWTLRDFSLDLEADGQPLTPDEYLEYSLKLTQGTSQKDKNFNLPRLCIRKFFPKKKCFVFDLPIHRRKLAQLEKLQDEELDPEFVQQVADFCSYIFSNSKTKTLSGGIKVNGPRLESLVLTYINAISRGDLPCMENAVLALAQIENSAAVQKAIAHYDQQMGQKVQLPAETLQELLDLHRVSEREATEVYMKNSFKDVDHLFQKKLAAQLDKKRDDFCKQNQEASSDRCSALLQVIFSPLEEEVKAGIYSKPGGYCLFIQKLQDLEKKYYEEPRKGIQAEEILQTYLKSKESVTDAILQTDQILTEKEKEIEVECVKAESAQASAKMVEEMQIKYQQMMEEKEKSYQEHVKQLTEKMERERAQLLEEQEKTLTSKLQEQARVLKERCQGESTQLQNEIQKLQKTLKKKTKRYMSHKLKI

SEQ ID NO: 808019 - protein, 516 aa, Homo sapiens
MWCVPHPKKPEHTLVLLDTEGLGDVKKGDNQNDSWIFTLAVLLSSTLVYNSMGTINQQAMDQLYYVTELTHRIRSKSSPDENENEDSADFVSFFPDFVWTLRDFSLDLEADGQPLTPDEYLEYSLKLTQGTSQKDKNFNLPRLCIRKFFPKKKCFVFDLPIHRRKLAQLEKLQDEELDPEFVQQVADFCSYIFSNSKTKTLSGGIKVNGPRLESLVLTYINAISRGDLPCMENAVLALAQIENSAAVQKAIAHYDQQMGQKVQLPAETLQELLDLHRVSEREATEVYMKNSFKDVDHLFQKKLAAQLDKKRDDFCKQNQEASSDRCSALLQVIFSPLEEEVKAGIYSKPGGYCLFIQKLQDLEKKYYEEPRKGIQAEEILQTYLKSKESVTDAILQTDQILTEKEKEIEVECVKAESAQASAKMVEEMQIKYQQMMEEKEKSYQEHVKQLTEKMERERAQLLEEQEKTLTSKLQEQARVLKERCQGESTQLQNEIQKLQKTLKKKTKRYMSHKLKI

SEQ ID NO: 808020 - protein, 430 aa, Homo sapiens
MAPEIHMTGPMCLIENTNGELVANPEALKILSAITQPVVVVAIVGLYRTGKSYLMNKLAGKNKGFSLGSTVKSHTKGIWMWCVPHPKKPEHTLVLLDTEGLGDVKKGDNQNDSWIFTLAVLLSSTLVYNSMGTINQQAMDQLYYVTELTHRIRSKSSPDENENEDSADFVSFFPDFVWTLRDFSLDLEADGQPLTPDEYLEYSLKLTQGTSQKDKNFNLPRLCIRKFFPKKKCFVFDLPIHRRKLAQLEKLQDEELDPEFVQQVADFCSYIFSNSKTKTLSGGIKVNGLAEEILQTYLKSKESVTDAILQTDQILTEKEKEIEVECVKAESAQASAKMVEEMQIKYQQMMEEKEKSYQEHVKQLTEKMERERAQLLEEQEKTLTSKLQEQARVLKERCQGESTQLQNEIQKLQKTLKKKTKRYMSHKLKI

SEQ ID NO: 808021 - protein, 510 aa, Homo sapiens
MAPEIHMTGPMCLIENTNGELVANPEALKILSAITQPVVVVAIVGLYRTGKSYLMNKLAGKNKGFSLGSTVKSHTKGIWMWCVPHPKKPEHTLVLLDTEGLGDVKKGDNQNDSWIFTLAVLLSSTLVYNSMGTINQQAMDQLYYVTELTHRIRSKSSPDENENEDSADFVSFFPDFVWTLRDFSLDLEADGQPLTPDEYLEYSLKLTQGTSQKDKNFNLPRLCIRKFFPKKKCFVFDLPIHRRKLAQLEKLQDEELDPEFVQQVADFCSYIFSNSKTKTLSGGIKVNGPRLESLVLTYINAISRGDLPCMENAVLALAQIENSAAVQKAIAHYDQQMGQKVQLPAETLQELLDLHRVSEREATEVYMKNSFKDVDHLFQKKLAAQLDKKRDDFCKQNQEASSDRCSALLQVIFSPLEEEVKAGIYSKPGGYCLFIQKLQDLEKKYYEEPRKGIQAEEILQTYLKSKESVTDAILQTDQILTEKEKEIEVECVKAESAQASAKMVRVIKNM

SEQ ID NO: 808022 - protein, 296 aa, Homo sapiens
MQVQRRDPIYVTELTHRIRSKSSPDENENEDSADFVSFFPDFVWTLRDFSLDLEADGQPLTPDEYLEYSLKLTQGTSQKDKNFNLPRLCIRKFFPKKKCFVFDLPIHRRKLAQLEKLQDEELDPEFVQQVADFCSYIFSNSKTKTLSGGIKVNGLAEEILQTYLKSKESVTDAILQTDQILTEKEKEIEVECVKAESAQASAKMVEEMQIKYQQMMEEKEKSYQEHVKQLTEKMERERAQLLEEQEKTLTSKLQEQARVLKERCQGESTQLQNEIQKLQKTLKKKTKRYMSHKLKI

SEQ ID NO: 808023 - protein, 142 aa, Homo sapiens
MAPEIHMTGPMCLIENTNGELVANPEALKILSAITQPVVVVAIVGLYRTGKSYLMNKLAGKNKGFSLGSTVKSHTKGIWMWCVPHPKKPEHTLVLLDTEGLGDVKKGDNQNDSWIFTLAVLLSSTLVYNSMGTINQQAMDQL

SEQ ID NO: 808024 - protein, 166 aa, Homo sapiens
MVGRRTGKPAYSHFLLLTLCSLGPKAEEILQTYLKSKESVTDAILQTDQILTEKEKEIEVECVKAESAQASAKMVEEMQIKYQQMMEEKEKSYQEHVKQLTEKMERERAQLLEEQEKTLTSKLQEQARVLKERCQGESTQLQNEIQKLQKTLKKKTKRYMSHKLKI

SEQ ID NO: 808025 - protein, 571 aa, Homo sapiens
MAPEIHMTGPMCLIENTNGELVANPEALKILSAITQPVVVVAIVGLYRTGKSYLMNKLAGKNKGFSLGSTVKSHTKGIWMWCVPHPKKPEHTLVLLDTEGLGDVKKGDNQNDSWIFTLAVLLSSTLVYNSMGTINQQAMDQLYYVTELTHRIRSKSSPDENENEDSADFVSFFPDFVWTLRDFSLDLEADGQPLTPDEYLEYSLKLTQGTSQKDKNFNLPRLCIRKFFPKKKCFVFDLPIHRRKLAQLEKLQDEELDPEFVQQVADFCSYIFSNSKTKTLSGGIKVNGPRLESLVLTYINAISRGDLPCMENAVLALAQIENSAAVQKAIAHYDQQMGQKVQLPAETLQELLDLHRVSEREATEVYMKNSFKDVDHLFQKKLAAQLDKKRDDFCKQNQEASSDRCSALLQVIFSPLEEEVKAGIYSKPGGYCLFIQKLQDLEKKYYEEPRKGIQAEEILQTYLKSKESVTDAILQTDQILTEKEKEIEVECVKAESAQASAKMVEEMQIKYQQMMEEKEKSYQEHVKQLTEKMERERAQLLEEQEKTLTSKLQVSKCITLWFVFLFSLCSS

SEQ ID NO: 808026 - protein, 509 aa, Homo sapiens
MAPEIHMTGPMCLIENTNGELVANPEALKILSAITQPVVVVAIVGLYRTGKSYLMNKLAGKNKGFSLGSTVKSHTKGIWMWCVPHPKKPEHTLVLLDTEGLGDVKKGDNQNDSWIFTLAVLLSSTLVYNSMGTINQQAMDQLYYVTELTHRIRSKSSPDENENEDSADFVSFFPDFVWTLRDFSLDLEADGQPLTPDEYLEYSLKLTQGTSQKDKNFNLPRLCIRKFFPKKKCFVFDLPIHRRKLAQLEKLQDEELDPEFVQQVADFCSYIFSNSKTKTLSGGIKVNGPRLESLVLTYINAISRGDLPCMENAVLALAQIENSAAVQKAIAHYDQQMGQKVQLPAETLQELLDLHRVSEREATEVYMKNSFKDVDHLFQKKLAAQLDKKRDDFCKQNQEASSDRCSALLQVIFSPLEEEVKAGIYSKPGGYCLFIQKLQDLEKKYYEEPRKGIQAEEILQTYLKSKESVTDAILQTDQILTEKEKEIEVECVKAESAQASAKMVGGIAS

SEQ ID NO: 808027 - protein, 290 aa, Homo sapiens
MAPEIHMTGPMCLIENTNGELVANPEALKILSAITQPVVVVAIVGLYRTGKSYLMNKLAGKNKGFSLGSTVKSHTKGIWMWCVPHPKKPEHTLVLLDTEGLGDVKKGDNQNDSWIFTLAVLLSSTLVYNSMGTINQQAMDQLYYVTELTHRIRSKSSPDENENEDSADFVSFFPDFVWTLRDFSLDLEADGQPLTPDEYLEYSLKLTQGTSQKDKNFNLPRLCIRKFFPKKKCFVFDLPIHRRKLAQLEKLQDEELDPEFVQQVADFCSYIFSNSKTKTLSGGIKVNGPR

SEQ ID NO: 808028 - protein, 202 aa, Homo sapiens
MEAEAGGLEELTDEEMAALGKEELVRRLRREEAARLAALVQRGRLMQEVNRQLQGHLGEIRELKQLNRRLQAENRELRDLCCFLDSERQRGRRAARQWQLFGTQASRAVREDLGGCWQKLAELEGRQEELLRENLALKELCLALGEEWGPRGGPSGAGGSGAGPAPELALPPCGPRDLGDGSSSTGSVGSPDQLPLACSPDD

SEQ ID NO: 808029 - protein, 202 aa, Homo sapiens; identical to SEQ ID NO: 808028

SEQ ID NO: 808030 - protein, 202 aa, Homo sapiens; identical to SEQ ID NO: 808028

SEQ ID NO: 808031 - protein, 189 aa, Homo sapiens
MEAEAGGLEELTDEEMAALGKEELVRRLRREEAARLAALVQRGRLMQEVNRQLQGHLGEIRELKQLNRRLQAENRELRDLCCFLDSERQRGRRAARQWQLFGTQASRAVREDLGGCWQKLAELEGRQEELLRENLALKELCLALGEEWGPRGGPSGAGGSGAGPAPELALPPCGPRDLGDGSSSTGSMD

SEQ ID NO: 808032 - protein, 196 aa, Homo sapiens
MEAEAGGLEELTDEEMAALGKEELVRRLRREEAARLAALVQRGRLMQEVNRQLQGHLGEIRELKQLNRRLQAENRELRDLCCFLDSERQRGRRAARQWQLFGTQASRAVREDLGGCWQKLAELEGRQEELLQAMEAPALAAWAVRISCPWPVPPMIEGTASSTPTPARIAPRAPGPLWTSGPGRRPGCAGGAAGMD

SEQ ID NO: 808033 - protein, 139 aa, Homo sapiens
MAEAVLIDLFGLKLNSQKNCHQTLLKTLNAVQYHHAAKAKFLCIMCCSNISYERDGEQDNCEIETSNGLSALLEEFEIVSCPSMAATLYTIKQKIDEKNLSSIKIFSYMDLLQEQVGYLIYQLLAHSISSVVPNGEIPR

SEQ ID NO: 808034 - protein, 215 aa, Homo sapiens
MAEAVLIDLFGLKLNSQTAKAKFLCIMCCSNISYERDGEQDNCEIETSNGLSALLEEFEIVSCPSMAATLYTIKQKIDEKNLSSIKVIVPRHRKTLMKAFIDQLFTDVYNFEFEDLQVTFRGGLFKQSIEINVITAQELRGIQNEIETFLRSLPALRGKLTIITSSLIPDIFIHGFTTRTGGISYIPTLSSFNLFSSSKRRDPKVVVQDKDSSFQ

SEQ ID NO: 808035 - protein, 364 aa, Homo sapiens
MSANSSRVGQLLLQGSACIRWKQDVEGAVYHLANCLLLLGFMGGSGVYGCFYLFGFLSAGYLCCVLWGWFSACGLDIVLWSFLLAVVCLLQLAHLVYRLREDTLPEEFDLLYKTLCLPLQVPLQTYKEIVHCCEEQVLTLATEQTYAVEGETPINRLSLLLSGRVRVSQDGQFLHYIFPYQFMDSPEWESLQPSEEGVFQVTLTAETSCSYISWPRKSLHLLLTKERYISCLFSALLGYDISEKLYTLNDKLFAKFGLRFDIRLPSLYHVLGPTAADAGPESEKGDEEVCEPAVSPPQATPTSLQQTPPCSTPPATTNFPAPPTRARLSRPDSGILASRIPLQSYSQVISRGQAPLAPTHTPEL

SEQ ID NO: 808036 - protein, 107 aa, Homo sapiens
MGFSPLFISFILLIIIHHTQFPLILLEFLSRATLKLYPGDRPLWLQPTRLNFKDHWTIFSVASAALFCVHRMATDRHASFPTHWKAHRQGERGHRRCQHCRYSKDLK

SEQ ID NO: 808037 - protein, 130 aa, Homo sapiens
MTSRRSSTLSMTSSLLSLGCALTSAFPASTMSWVPLLQMLDQSPRRVMRKSVSQLCPLLRPHPPLSSKHPLVLPLQLPPTFLHLLPGPGCPGQTVAYWGEDSTSLVLEDFEEVSGSESFMDYRSDGEYMR

SEQ ID NO: 808038 - protein, 254 aa, Homo sapiens
KEVFKFSMKCDYVPSFLPKATGSIPSRKGGVGSEKPEVPLQTYKEIVHCCEEQVLTLATEQTYAVEGETPINRLSLLLSGRVRVSQDGQFLHYIFPYQFMDSPEWESLQPSEEGVFQVTLTAETSCSYISWPRKSLHLLLTKERYISCLFSALLGYDISEKLYTLNDKLFAKFGLRFDIRLPSLYHVLGPTAADAGPESEKGDEEVCEPAVSPPQATPTSLQQTPPCSTPPATTNFPAPPTRARLSRPDSGILG

SEQ ID NO: 808039 - protein, 155 aa, Homo sapiens
MDSPEWESLQPSEEGVFQVTLTAETSCSYISWPRKSLHLLLTKERYISCLFSALLGYDISEKLYTLNDKLFAKFGLRFDIRLPSLYHVLGPTAADAGPESEKGDEEVCEPAVSPPQATPTSLQQTPPCSTPPATTNFPAPPTRARLSRPDSGILG

SEQ ID NO: 808040 - protein, 166 aa, Homo sapiens [sequence omitted]

SEQ ID NO: 808041 - protein, 166 aa, Homo sapiens [sequence omitted]

SEQ ID NO: 808042 - protein, 130 aa, Homo sapiens; identical to SEQ ID NO: 808037

SEQ ID NO: 808043 - protein, 228 aa, Homo sapiens
MSWVPLLQMLDQSEKGDEEVCEPAVSPPQATPTSLQQTPPCSTPPATTNFLLSGRVRVSQDGQFLHYIFPYQFMDSPEWESLQPSEEGVFQVTLTAETSCSYISWPRKSLHLLLTKERYISCLFSALLGYDISEKLYTLNDKLFAKFGLRFDIRLPSLYHVLGPTAADAGPESEKGDEEVCEPAVSPPQATPTSLQQTPPCSTPPATTNFPAPPTRARLSRPDSGILG

SEQ ID NO: 808044 - protein, 130 aa, Homo sapiens; identical to SEQ ID NO: 808037

SEQ ID NO: 808045 - protein, 135 aa, Homo sapiens
RIRNEFWHRGPLLRPHPPLSSKHPLVLPLQLPPTFLHLLPGPGCPGQTVAYWLLEFLSRATLKLYPGDRPLWLQPTRLNFKDHWTIFSVASAALFCVHRMATDRHASFPTHWKAHRQGERGHRRCQHCRYSKDLK

SEQ ID NO: 808046 - protein, 130 aa, Homo sapiens; identical to SEQ ID NO: 808037

SEQ ID NO: 808047 - protein, 181 aa, Homo sapiens
MTSRRSSTLSMTSSLLSLGCALTSAFPASTMSWVPLLQMLDQSPRRVMRKSVSQLCPLLRPHPPLSSKHPLVLPLQLPPTFLHLLPGPGCPGQTVAYWLLEFLSRATLKLYPGDRPLWLQPTRLNFKDHWTIFSVASAALFCVHRMATDRHASFPTHWKAHRQGERGHRRCQHCRYSKDLK

SEQ ID NO: 808048 - protein, 130 aa, Homo sapiens; identical to SEQ ID NO: 808037

SEQ ID NO: 808049 - protein, 135 aa, Homo sapiens
MTSRRSSTLSMTSSLLSLGCALTSAFPASTMSWVPLLQMLDQSPRRVMRKSVSQLCPLLRPHPPLSSKHPLVLPLQLPPTFLHLLPGPGCPGQTVAYWLLEFLSRATLKLYPGDRPLWLQPTRLFSHPLEGSQAR

SEQ ID NO: 808050 - protein, 130 aa, Homo sapiens; identical to SEQ ID NO: 808037

SEQ ID NO: 808051 - protein, 86 aa, Homo sapiens
VLAHLRISPAPAANNSLLEFLSRATLKLYPGDRPLWLQPTRLNFKDHWTIFSVASAALFCVHRMATDRHASSVNSGGYETHLTGLL

SEQ ID NO: 808052 - protein, 423 aa, Homo sapiens
MAMVVSSWRDPQDDVAGGNPGGPNPAAQAARGGGGGAGEQQQQAGSGAPHTPQTPGQPGAPATPGTAGDKGQGPPGSGQSQQHIECVVCGDKSSGKHYGQFTCEGCKSFFKRSVRRNLTYTCRANRNCPIDQHHRNQCQYCRLKKCLKVGMRREAVQRGRMPPTQPNPGQYALTNGDPLNGHCYLSGYISLLLRAEPYPTSRYGSQCMQPNNIMGIENICELAARLLFSAVEWARNIPFFPDLQITDQVSLLRLTWSELFVLNAAQCSMPLHVAPLLAAAGLHASPMSADRVVAFMDHIRIFQEQVEKLKALHVDSAEYSCLKAIVLFTSDACGLSDAAHIESLQEKSQCALEEYVRSQYPNQPSRFGKLLLRLPSLRTVSSSVIEQLFFVRLVGKTPIETLIRDMLLSGSSFNWPYMSIQCS

SEQ ID NO: 808053 - protein, 347 aa, Homo sapiens
PNQSIEKCICFLLHVFGHYVSATWPDTSVADRTRPIDEFELEIRYVSGRGRTRIDQHHRNQCQYCRLKKCLKVGMRREAVQRGRMPPTQPNPGQYALTNGDPLNGHCYLSGYISLLLRAEPYPTSRYGSQCMQPNNIMGIENICELAARLLFSAVEWARNIPFFPDLQITDQVSLLRLTWSELFVLNAAQCSMPLHVAPLLAAAGLHASPMSADRVVAFMDHIRIFQEQVEKLKALHVDSAEYSCLKAIVLFTSDACGLSDAAHIESLQEKSQCALEEYVRSQYPNQPSRFGKLLLRLPSLRTVSSSVIEQLFFVRLVGKTPIETLIRDMLLSGSSFNWPYMSIQCS

SEQ ID NO: 808054 - protein, 423 aa, Homo sapiens; identical to SEQ ID NO: 808052

SEQ ID NO: 808055 - protein, 272 aa, Homo sapiens
MAMVVSSWRDPQDDVAGGNPGGPNPAAQAARGGGGGAGEQQQQAGSGAPHTPQTPGQPGAPATPGTAGDKGQGPPGSGQSQQHIECVVCGDKSSGKHYGQFTCEGCKSFFKRSVRRNLTYTCRANRNCPIDQHHRNQCQYCRLKKCLKVGMRREAVQRGRMPPTQPNPGQYALTNGDPLNGHCYLSGYISLLLRAEPYPTSRYGSQCMQPNNIMGIENICELAARLLFSAVEWARNIPFFPDLQITDQVSLLRLTWSELFVLNAAHAHWRST

SEQ ID NO: 808056 - protein, 423 aa, Homo sapiens; identical to SEQ ID NO: 808052

SEQ ID NO: 808057 - protein, 309 aa, Homo sapiens
MQRNRNTCRANRNCPIDQHHRNQCQYCRLKKCLKVGMRREAVQRGRMPPTQPNPGQYALTNGDPLNGHCYLSGYISLLLRAEPYPTSRYGSQCMQPNNIMGIENICELAARLLFSAVEWARNIPFFPDLQITDQVSLLRLTWSELFVLNAAQCSMPLHVAPLLAAAGLHASPMSADRVVAFMDHIRIFQEQVEKLKALHVDSAEYSCLKAIVLFTSDACGLSDAAHIESLQEKSQCALEEYVRSQYPNQPSRFGKLLLRLPSLRTVSSSVIEQLFFVRLVGKTPIETLIRDMLLSGSSFNWPYMSIQCS

SEQ ID NO: 808058 - protein, 273 aa, Homo sapiens
MFGYSVQRGRMPPTQPNPGQYALTNGDPLNGHCYLSGYISLLLRAEPYPTSRYGSQCMQPNNIMGIENICELAARLLFSAVEWARNIPFFPDLQITDQVSLLRLTWSELFVLNAAQCSMPLHVAPLLAAAGLHASPMSADRVVAFMDHIRIFQEQVEKLKALHVDSAEYSCLKAIVLFTSDACGLSDAAHIESLQEKSQCALEEYVRSQYPNQPSRFGKLLLRLPSLRTVSSSVIEQLFFVRLVGKTPIETLIRDMLLSGSSFNWPYMSIQCS

SEQ ID NO: 808059 - protein, 108 aa, Homo sapiens [sequence omitted]

SEQ ID NO: 808060 - protein, 41 aa, Homo sapiens
MPPTQPNPGQYALTNGDPLNGHCYLSGYISLLLRAEPYPTS

SEQ ID NO: 808061 - protein, 617 aa, Homo sapiens
MAFPHRPDAPELPDFSMLKRLARDQLIYLLEQLPGKKDLFIEADLMSPLDRIANVSILKQHEVDKLYKVENKPALSSNEQLCFLVRPRIKNMRYIASLVNADKLAGRTRKYKVIFSPQKFYACEMVLEEEGIYGDVSCDEWAFSLLPLDVDLLSMELPEFFRDYFLEGDQRWINTVAQALHLLSTLYGPFPNCYGIGRCAKMAYELWRNLEEEEDGETKGRRPEIGHIFLLDRDVDFVTALCSQVVYEGLVDDTFRIKCGSVDFGPEVTSSDKSLKVLLNAEDKVFNEIRNEHFSNVFGFLSQKARNLQAQYDRRRGMDIKQMKNFVSQELKGLKQEHRLLSLHIGACESIMKKKTKQDFQELIKTEHALLEGFNIRESTSYIEEHIDRQVSPIESLRLMCLLSITENGLIPKDYRSLKTQYLQSYGPEHLLTFSNLRRAGLLTEQAPGDTLTAVESKVSKLVTDKAAGKITDAFSSLAKRSNFRAISKKLNLIPRVDGEYDLKVPRDMAYVFGGAYVPLSCRIIEQVLERRSWQGLDEVVRLLNCSDFAFTDMTKEDKASSESLRLILVVFLGGCTFSEISALRFLGREKGYRFIFLTTAVTNSARLMEAMSEVKA

SEQ ID NO: 808062 - protein, 102 aa, Homo sapiens
MAYVFGGAYVPLSCRIIEQVLERRSWQGLDEVVRLLNCSDFAFTDMTKEDKASSESLRLILVVFLGGCTFSEISALRFLGREKGKREQKGENWPALYLGNKV

SEQ ID NO: 808063 - protein, 617 aa, Homo sapiens; identical to SEQ ID NO: 808061

SEQ ID NO: 808064 - protein, 533 aa, Homo sapiens
MAFPHRPDAPELPDFSMLKRLARDQLIYLLEQLPGKKDLFIEADLMSPLDRIANVSILKQHEVDKLYKVENKPALSSNEQLCFLVRPRIKNMRYIASLVNADKLAGRTRKYKVIFSPQKFYACEMVLEEEGIYGDVSCDEWAFSLLPLDVDLLSMELPEFFRDYFLEGDQRWINTVAQALHLLSTLYGPFPNCYGIGRCAKMAYELWRNLEEEEDGETKGRRPEIGHIFLLDRDVDFVTALCSQVVYEGLVDDTFRIKCGSVDFGPEVTSSDKSLKVLLNAEDKVFNEIRNEHFSNVFGFLSQKARNLQAQYDRRRGMDIKQMKNFVSQELKGLKQEHRLLSLHIGACESIMKKKTKQDFQELIKTEHALLEGFNIRESTSYIEEHIDRQVSPIESLRLMCLLSITENGLIPKDYRSLKTQYLQSYGPEHLLTFSNLRRAGLLTEQAPGDTLTAVESKVSKLVTDKAAGKITDAFSSLAKRSNFRAISKKLNLIPRVDGEYDLKVPRDMAYVFGGAYVPLSCRIIEQATGSFS

SEQ ID NO: 808065 - protein, 109 aa, Homo sapiens [sequence omitted]

SEQ ID NO: 808066 - protein, 155 aa, Homo sapiens
MERIVICLMVIFLGTLVHKSSSQGQDRHMIRMRQLIDIVDQLKNYVNDLVPEFLPAPEDVETNCEWSAFSCFQKAQLKSANTGNNERIINVSIKKLKRKPPSTNAGRRQKHRLTCPSCDSYEKKPPKEFLERFKSLLQKMIHQHLSSRTHGSEDS

SEQ ID NO: 808067 - protein, 558 aa, Homo sapiens
MAVMPVRGPWVKLSAGPLVLHYCVSLKDYIKKYNKLKQNECTSQIQFTGVYPEEGTKEAREPERINMTDHKECHAEGIPKPQLGWLKNGIDITPKLSKQLTLQANGSEVHISNVRYEDTGAYTCIAKNEAGVDEDISSLFVEDSARKTLANILWREEGLGIGNMFYVFYEDGIKVIQPIECEFQRHIKPSEKLLGFQDEVCPKAEGDEVQRCVWASAVNVKDKFIYVAQPTLDRVLIVDVQSQKVVQAVSTDPVPVKLHYDKSHDQVWVLSWGTLEKTSPTLQVITLASGNVPHHTIHTQPVGKQFDRVDDFFIPTTTLIITHMRFGFILHKDEAALQKIDLETMSYIKTINLKDYKCVPQSLAYTHLGGYYFIGCKPDSTGAVSPQVMVDGVTDSVIGFNSDVTGTPYVSPDGHYLVSINDVKGLVRVQYITIRGEIQEAFDIYTNLHISDLAFQPSFTEAHQYNIYGSSSTQTDVLFVELSSGKVKMIKSLKEPLKAEEWPWNRKNRQIQDSGLFGQYLMTPSKDSLFILDGRLNKLNCEITEVEKGNTVIWVGDA

SEQ ID NO: 808068 - protein, 439 aa, Homo sapiens
MFKCWSVVLVLGFIFLESEGRPTKEGGYGLKSYQPLMRLRHKQEKNQESSRVKGFMIQDGPFGSCENKYCGLGRHCVTSRETGQAECACMDLCKRHYKPVCGSDGEFYENHCEVHRAACLKKQKITIVHNEDCFFKGDKCKTTEYSKMKNMLLDLQNQKYIMQENENPNGDDISRKKLLVDQMFKYFDADSNGLVDINELTQVIKQEELGKDLFDCTLYVLLKYDDFNADKHLALEEFYRAFQVIQLSLPEDQKLSITAATVGQSAVLSCAIQGTLRPPIIWKRNNIILNNLDLEDINDFGDDGSLYITKVTTTHVGNYTCYADGYEQVYQTHIFQVNVPPVIRVYPESQAREPGVTASLRCHAEGIPKPQLGWLKNGIDITPKLSKQLTLQANGSEVHISNVRYEDTGAYTCIAKNEAGVDEDISSLFVEDSARKTRS

SEQ ID NO: 808069 - protein, 66 aa, Homo sapiens
DKCKTTEYSKMKNMLLDLQNQKYIMQENENPNGDDISRKKLLVDQMFKYFDADSNGLVDINELTQV

SEQ ID NO: 808070 - protein, 847 aa, Homo sapiens
MFKCWSVVLVLGFIFLESEGRPTKEGGYGLKSYQPLMRLRHKQEKNQESSRVKGFMIQDGPFGSCENKYCGLGRHCVTSRETGQAECACMDLCKRHYKPVCGSDGEFYENHCEVHRAACLKKQKITIVHNEDCFFKGDKCKTTEYSKMKNMLLDLQNQKYIMQENENPNGDDISRKKLLVDQMFKYFDADSNGLVDINELTQVIKQEELGKDLFDCTLYVLLKYDDFNADKHLALEEFYRAFQVIQLSLPEDQKLSITAATVGQSAVLSCAIQGTLRPPIIWKRNNIILNNLDLEDINDFGDDGSLYITKVTTTHVGNYTCYADGYEQVYQTHIFQVNVPPVIRVYPESQAREPGVTASLRCHAEGIPKPQLGWLKNGIDITPKLSKQLTLQANGSEVHISNVRYEDTGAYTCIAKNEAGVDEDISSLFVEDSARKTLANILWREEGLGIGNMFYVFYEDGIKVIQPIECEFQRHIKPSEKLLGFQDEVCPKAEGDEVQRCVWASAVNVKDKFIYVAQPTLDRVLIVDVQSQKVVQAVSTDPVPVKLHYDKSHDQVWVLSWGTLEKTSPTLQVITLASGNVPHHTIHTQPVGKQFDRVDDFFIPTTTLIITHMRFGFILHKDEAALQKIDLETMSYIKTINLKDYKCVPQSLAYTHLGGYYFIGCKPDSTGAVSPQVMVDGVTDSVIGFNSDVTGTPYVSPDGHYLVSINDVKGLVRVQYITIRGEIQEAFDIYTNLHISDLAFQPSFTEAHQYNIYGSSSTQTDVLFVELSSGKVKMIKSLKEPLKAEEWPWNRKNRQIQDSGLFGQYLMTPSKDSLFILDGRLNKLNCEITEVEKGNTVIWVGDA

SEQ ID NO: 808071 - protein, 252 aa, Homo sapiens
ERCRLKKFINIMNKNAKFRFGFILHKDEAALQKIDLETMSYIKTINLKDYKCVPQSLAYTHLGGYYFIGCKPDSTGAVSPQVMVDGVTDSVIGFNSDVTGTPYVSPDGHYLVSINDVKGLVRVQYITIRGEIQEAFDIYTNLHISDLAFQPSFTEAHQYNIYGSSSTQTDVLFVELSSGKVKMIKSLKEPLKAEEWPWNRKNRQIQDSGLFGQYLMTPSKDSLFILDGRLNKLNCEITEVEKGNTVIWVGDA

SEQ ID NO: 808072 - protein, 877 aa, Homo sapiens
MLTRLQVLTLALFSKGFLLSLGDHNFLRREIKIEGDLVLGGLFPINEKGTGTEECGRINEDRGIQRLEAMLFAIDEINKDDYLLPGVKLGVHILDTCSRDTYALEQSLEFVRASLTKVDEAEYMCPDGSYAIQENIPLLIAGVIGGSYSSVSIQVANLLRLFQIPQISYASTSAKLSDKSRYDYFARTVPPDFYQAKAMAEILRFFNWTYVSTVASEGDYGETGIEAFEQEARLRNICIATAEKVGRSNIRKSYDSVIRELLQKPNARVVVLFMRSDDSRELIAAASRANASFTWVASDGWGAQESIIKGSEHVAYGAITLELASQPVRQFDRYFQSLNPYNNHRNPWFRDFWEQKFQCSLQNKRNHRRVCDKHLAIDSSNYEQESKIMFVVNAVYAMAHALHKMQRTLCPNTTKLCDAMKILDGKKLYKDYLLKINFTAPFNPNKDADSIVKFDTFGDGMGRYNVFNFQNVGGKYSYLKVGHWAETLSLDVNSIHWSRNSVPTSQCSDPCAPNEMKNMQPGDVCCWICIPCEPYEYLADEFTCMDCGSGQWPTADLTGCYDLPEDYIRWEDAWAIGPVTIACLGFMCTCMVVTVFIKHNNTPLVKASGRELCYILLFGVGLSYCMTFFFIAKPSPVICALRRLGLGSSFAICYSALLTKTNCIARIFDGVKNGAQRPKFISPSSQVFICLGLILVQIVMVSVWLILEAPGTRRYTLAEKRETVILKCNVKDSSMLISLTYDVILVILCTVYAFKTRKCPENFNEAKFIGFTMYTTCIIWLAFLPIFYVTSSDYRVQTTTMCISVSLSGFVVLGCLFAPKVHIILFQPQKNVVTHRLHLNRFSVSGTGTTYSQSSASTYVPTVCNGREVLDSTTSSL

SEQ ID NO: 808073 - protein, 303 aa, Homo sapiens
MDPEVTLLLQCPGGGLPQEQIQAELSPAHDRRPLPGGDEAITAIWETRLKAQPWLFDAPKFRLHSATLAPIGSRGPQLLLRLGLTSYRDFLGTNWSSSAAWLRQQGATDWGDTQAYLADPLGVGAALATADDFLVFLRRSRQVAEAPGLVDVPGGHPEPQALCPGGSPQHQDLAGQLVVHELFSSVLQEICDEVNLPLLTLSQPLLLGIARNETSAGRASAEFYVQCSLTSEQVRKHYLSGGPEAHESTGIFFVETQNVRRLPETEMWAELCPSAKGAIILYNRVQGSPTGAALGSPALLPPL

SEQ ID NO: 808074 - protein, 181 aa, Homo sapiens
FGTRGGTRRLSCPVQTMDPEVTLLLQCPGGGLPQEQIQAELSPAHDRRPLPGGDEAITAIWETRLKAQPWLFDAPKFRLHSATLAPIGSRGPQLLLRLGLTSYRDFLGTNWSSSAAWLRQQGATDWGDTQAYLADPLGVGAALATADDFLVFLRRSRQVAEAPGLVDVPGGHPEPQVQPDF

SEQ ID NO: 808075 - protein, 303 aa, Homo sapiens; identical to SEQ ID NO: 808073

SEQ ID NO: 808076 - protein, 303 aa, Homo sapiens; identical to SEQ ID NO: 808073

SEQ ID NO: 808077 - protein, 319 aa, Homo sapiens
FGTRGGTRRLSCPVQTMDPEVTLLLQCPGGGLPQEQIQAELSPAHDRRPLPGGDEAITAIWETRLKAQPWLFDAPKFRLHSATLAPIGSRGPQLLLRLGLTSYRDFLGTNWSSSAAWLRQQGATDWGDTQAYLADPLGVGAALATADDFLVFLRRSRQVAEAPGLVDVPGGHPEPQALCPGGSPQHQDLAGQLVVHELFSSVLQEICDEVNLPLLTLSQPLLLGIARNETSAGRASAEFYVQCSLTSEQVRKHYLSGGPEAHESTGIFFVETQNVRRLPETEMWAELCPSAKGAIILYNRVQGSPTGAALGSPALLPPL

SEQ ID NO: 808078 - protein, 315 aa, Homo sapiens
TYLLLGQAPARALQQQGHLRIHGLKGQLPQEQIQAELSPAHDRRPLPGGDEAITAIWETRLKAQPWLFDAPKFRLHSATLAPIGSRGPQLLLRLGLTSYRDFLGTNWSSSAAWLRQQGATDWGDTQAYLADPLGVGAALATADDFLVFLRRSRQVAEAPGLVDVPGGHPEPQALCPGGSPQHQDLAGQLVVHELFSSVLQEICDEVNLPLLTLSQPLLLGIARNETSAGRASAEFYVQCSLTSEQVRKHYLSGGPEAHESTGIFFVETQNVRRLPETEMWAELCPSAKGAIILYNRVQGSPTGAALGSPALLPPL

SEQ ID NO: 808079 - protein, 334 aa, Homo sapiens
MDPEVTLLLQCPGGGLPQEQIQAELSPAHDRRPLPGGDEAITAIWETRLKAQPWLFDAPKFRLHSATLAPIGSRGPQLLLRLGLTSYRDFLGTNWSSSAAWLRQQGATDWGDTQAYLADPLGVGAALATADDFLVFLRRSRQVAEAPGLVDVPGGHPEPQLDLWLSVRERTPDSGSLTLLHCATSDPQGQQALCPGGSPQHQDLAGQLVVHELFSSVLQEICDEVNLPLLTLSQPLLLGIARNETSAGRASAEFYVQCSLTSEQVRKHYLSGGPEAHESTGIFFVETQNVRRLPETEMWAELCPSAKGAIILYNRVQGSPTGAALGSPALLPPL

SEQ ID NO: 808080 - protein, 270 aa, Homo sapiens
MDPEVTLLLQCPGGGLPQEQIQAELSPAHDRRPLPGGDEAITAIWETRLKAQPWLFDAPKFRLHSATLAPIGSRGPQLLLRLGLTSYRDFLGTNWSSSAAWLRQQGATDWGDTQAYLADPLGVGAALATADDFLVFLRRSRQVAEAPGLVDVPGGHPEPQVNLPLLTLSQPLLLGIARNETSAGRASAEFYVQCSLTSEQVRKHYLSGGPEAHESTGIFFVETQNVRRLPETEMWAELCPSAKGAIILYNRVQGSPTGAALGSPALLPPL

SEQ ID NO: 808081 - protein, 114 aa, Homo sapiens
MDPEVTLLLQCPGGGLPQEQIQAELSPAHDRRPLPGGDEAITAIWETRLKAQPWLFDAPKFRLHSATLGWWTYLVGTLSLRPCALVAAPSTRTSLGSWWYMNSFPVSFRRSVMR

SEQ ID NO: 808082 - protein, 132 aa, Homo sapiens
MDPEVTLLLQCPGGGLPQEQIQAELSPAHDRRPLPGGDEAITAIWETRLKAQPWLFDAPKFRLHSATLAPIGSRGPQLLLRLGLTSYRDFLGTNWSSSAAWLRQQGATDWGDTQAYLADPLGVGAALATGAA

SEQ ID NO: 808083 - protein, 166 aa, Homo sapiens
MDPEVTLLLQCPGGGLPQEQIQAELSPAHDRRPLPGGDEAITAIWETRLKAQPWLFDAPKFRLHSATLAPIGSRGPQLLLRLGLTSYRECSLTSEQVRKHYLSGGPEAHESTGIFFVETQNVRRLPETEMWAELCPSAKGAIILYNRVQGSPTGAALGSPALLPPL

SEQ ID NO: 808084 - protein, 128 aa, Homo sapiens
MWAVALIGGPPPTPPSTAVNLPLLTLSQPLLLGIARNETSAGRASAEFYVQCSLTSEQVRKHYLSGGPEAHESTGIFFVETQNVRRLPETEMWAELCPSAKGAIILYNRVQGSPTGAALGSPALLPPL

SEQ ID NO: 808085 - protein, 80 aa, Homo sapiens
MDPEVTLLLQCPGGGLPQEQIQAELSPAHDRRPLPGGDEAITAIWETRLKAQPWLFDAPKFRLHSATLILYRYEALLNLD

SEQ ID NO: 808086 - protein, 303 aa, Homo sapiens; identical to SEQ ID NO: 808073

SEQ ID NO: 808087 - protein, 303 aa, Homo sapiens; identical to SEQ ID NO: 808073

SEQ ID NO: 808088 - protein, 334 aa, Homo sapiens; identical to SEQ ID NO: 808079

SEQ ID NO: 808089 - protein, 226 aa, Homo sapiens
MDPEVTLLLQCPGGGLPQEQIQAELSPAHDRRPLPGGDEAITAIWETRLKAQPWLFDAPKFRLHSATLAPIGSRGPQLLLRLGLTSYRDFLGTNWSSSAAWLRQQGATDWGDTQAYLADPLGVGAALATADDFLVFLRRSRQVAEAPGLVDVPGGHPEPQALCPGGSPQHQDLAGQLVVHELFSSVLQEICDEVNLPLLTLSQPLLLGIARNETSAGRASAEFYVQ

SEQ ID NO: 808090 - protein, 270 aa, Homo sapiens; identical to SEQ ID NO: 808080

SEQ ID NO: 808091 - protein, 111 aa, Homo sapiens [sequence omitted]

SEQ ID NO: 808092 - protein, 177 aa, Homo sapiens
ERQVEGAYGGEHGVGRLAAYLALLAALRVRLSPAKKQRGQRDDSGECPGERDHDVGDALAGAERVFHVARDGPVAVQAMAVTFQMLAVQQSTSHAIQSWHSLRPSCQRRPDSSCTRLSGMTSAATRTSETAMDATRLWGTRWKVRTRRMVASTSRFQANVAATRKPSKSKTSIRRMH

SEQ ID NO: 808093 - protein, 446 aa, Homo sapiens
METQADLVSQEPQALLDSALPSKVPAFSDKDSLGDEMLAAALLKAKSQELVTFEDVAVYFIRKEWKRLEPAQRDLYRDVMLENYGNVFSLDRETRTENDQEISEDTRSHGVLLGRFQKDISQGLKFKEAYEREVSLKRPLGNSPGERLNRKMPDFGQVTVEEKLTPRGERSEKYNDFGNSFTVNSNLISHQRLPVGDRPHKCDECSKSFNRTSDLIQHQRIHTGEKPYECNECGKAFSQSSHLIQHQRIHTGEKPYECSDCGKTFSCSSALILHRRIHTGEKPYECNECGKTFSWSSTLTHHQRIHTGEKPYACNECGKAFSRSSTLIHHQRIHTGEKPYECNECGKAFSQSSHLYQHQRIHTGEKPYECMECGGKFTYSSGLIQHQRIHTGENPYECSECGKAFRYSSALVRHQRIHTGEKPLNGIGMSKSSLRVTTELNIREST

SEQ ID NO: 808094 - protein, 387 aa, Homo sapiens [sequence omitted]

SEQ ID NO: 808095 - protein, 387 aa, Homo sapiens [sequence omitted]

SEQ ID NO: 808096 - protein, 387 aa, Homo sapiens [sequence omitted]

SEQ ID NO: 808097 - protein, 455 aa, Homo sapiens
ASSPLTASTPRFVLSPVCGSVTGSNRAWSVSGPPNLSSLPPGSASSFSFKTRFPLSLHPGDQRAPCPSMETQADLVSQEPQALLDSALPSKVPAFSDKDSLGDEMLAAALLKAKSQELVTFEDVAVYFIRKEWKRLEPAQRDLYRDVMLENYGNVFSLDRETRTENDQEISEDTRSHGVLLGRFQKDISQGLKFKEAYEREVSLKRPLGNSPGERLNRKMPDFGQVTVEEKLTPRGERSEKYNDFGNSFTVNSNLISHQRLPVGDRPHKCDECSKSFNRTSDLIQHQRIHTGEKPYECNECGKAFSQSSHLIQHQRIHTGEKPYECSDCGKTFSCSSALILHRRIHTGEKPYECNECGKTFSWSSTLTHHQRIHTGEKPYACNECGKAFSRSSTLIHHQRIHTEALPTFVTLIRLLPSVDPIVTNEAAFPAESLATIFALIWRLFCVHSLMFKKV

SEQ ID NO: 808098 - protein, 131 aa, Homo sapiens
METQADLVSQEPQALLDSALPSKVPAFSDKDSLGDEMLAAALLKAKSQELVTFEDVAVYFIRKEWKRLEPAQRDLYRDVMLENYGNVFSLDWIHVCLTTQKVMLAWLTGTLSVAKGLCSSELASVEPPDTF

SEQ ID NO: 808099 - protein, 138 aa, Homo sapiens
MDPHLLSWTPVSLPPPCPPFLPSQMCIFHPILSDFFGAAIHIPHPEIACQHVLFQELVTFEDVAVYFIRKEWKRLEPAQRDLYRDVMLENYGNVFSLDWIHVCLTTQKVMLAWLTGTLSVAKGLCSSELASVEPPDTF

SEQ ID NO: 808100 - protein, 117 aa, Homo sapiens [sequence omitted]

SEQ ID NO: 808101 - protein, 394 aa, Homo sapiens
MDPHLLSWTPVSLPPPCPPFLPSQMCIFHPILSDFFGAAIHIPHPEIACQHVLFQELVTFEDVAVYFIRKEWKRLEPAQRDLYRDVMLENYGNVFSLDRETRTENDQEISEDTRSHGVLLGRFQKDISQGLKFKEAYEREVSLKRPLGNSPGERLNRKMPDFGQVTVEEKLTPRGERSEKYNDFGNSFTVNSNLISHQRLPVGDRPHKCDECSKSFNRTSDLIQHQRIHTGEKPYECNECGKAFSQSSHLIQHQRIHTGEKPYECSDCGKTFSCSSALILHRRIHTGEKPYECNECGKTFSWSSTLTHHQRIHTGEKPYACNECGKAFSRSSTLIHHQRIHTEALPTFVTLIRLLPSVDPIVTNEAAFPAESLATIFALIWRLFCVHSLMFKKV

SEQ ID NO: 808102 - protein, 119 aa, Homo sapiens [sequence omitted]

SEQ ID NO: 808103 - protein, 394 aa, Homo sapiens; identical to SEQ ID NO: 808101

SEQ ID NO: 808104 - protein, 354 aa, Homo sapiens
FRLGTRLRGESAEGQELVTFEDVAVYFIRKEWKRLEPAQRDLYRDVMLENYGNVFSLDRETRTENDQEISEDTRSHGVLLGRFQKDISQGLKFKEAYEREVSLKRPLGNSPGERLNRKMPDFGQVTVEEKLTPRGERSEKYNDFGNSFTVNSNLISHQRLPVGDRPHKCDECSKSFNRTSDLIQHQRIHTGEKPYECNECGKAFSQSSHLIQHQRIHTGEKPYECSDCGKTFSCSSALILHRRIHTGEKPYECNECGKTFSWSSTLTHHQRIHTGEKPYACNECGKAFSRSSTLIHHQRIHTEALPTFVTLIRLLPSVDPIVTNEAAFPAESLATIFALIWRLFCVHSLMFKKV

SEQ ID NO: 808105 - protein, 52 aa, Homo sapiens
MCIFHPILSDFFGAAIHIPHPEIACQHVLFQELVTFEDVAVYFIRKEWKRLE

SEQ ID NO: 808106 - protein, 118 aa, Homo sapiens
MEEKYGGDVLAGPGGGGGLGPVDVPSARLTKYIVLLCFTKFLKAVGLFESYDLLKAVHIVQFIFILKLGTAFFMVLFQKPFSSGKTITKHQIIGSLKIPGRKEFKDKKLNDPRKLVGN

SEQ ID NO: 808107 - protein, 132 aa, Homo sapiens
MEEKYGGDVLAGPGGGGGLGPVDVPSARLTKYIVLLCFTKFLKAVGLFESYDLLKAVHIVQFIFILKLGTAFFMVLFQKPFSSGKTITKHQWIKIFKHAVAGCIISLLWFFGLTLCGPLRTLLLFEHSDIVV

SEQ ID NO: 808108 - protein, 112 aa, Homo sapiens
DSPRSEREGQRANCQIGARAGARERERERGRERKSERGKESANEGAERAPAATLLQHGQRQRPPSVHSTSRAACPLELLCIKDRSPICTHTPPPPPMHSSSSSFSRQLLGKK

SEQ ID NO: 808109 - protein, 66 aa, Homo sapiens
PPPPPPPPPLPPPRRPCTWAAPGSSPGPSAALPSTQRQACPPLEEKTREKRTKEAFLQSKEGGAKK

SEQ ID NO: 808110 - protein, 306 aa, Homo sapiens
MATAASNPYLPGNSLLAAGSIVHSDAAGAGGGGGGGGGGGGGGAGGGGGGMQPGSAAVTSGAYRGDPSSVKMVQSDFMQGAMADSNGGHMLSHAHQWVTALPHAAAAAAAAAAAAVEASSPWSGSAVGMAGSPQQPPQPPPPPPQGPDVKGGAGRDDLHAGTALHHRGPPHLGPPPPPPHQGHPGGWGAAAAAAAAAAAAAAAAHLPSMAGGLGRSGLQPRPIRRPPLHPETGMPALGGENAGETDQGGIFAVQGRRGQKIKSIINTQTVLYTYITNKTGREKGGDHEISFILWWCFVFVFVFKEG

SEQ ID NO: 808111 - protein, 500 aa, Homo sapiens [sequence omitted]

SEQ ID NO: 808112 - protein, 128 aa, Homo sapiens
MRENGKIHNDRCHRLTTANKASLSACVGPTSTTSLKHSKSKKESKKETLLTLFLHLLLLTGRLWYLMAGSSPSGPTLENRRKRRVVDLPAVVAEGMVLVAKIGATVAAATGVPVLKIVFCEGNPTTQL

SEQ ID NO: 808113 - protein, 142 aa, Homo sapiens
LFSGRCTAAAPQAEKPGAGEAAAAAAMAGIELERCQQQANEVTEIMRNNFGKVLERGVKLAELQQRSDQLLDMSSTFNKTTQNLAQKKCWENIRYRICVGLVVVGVLLIILIVLLVVFLPQSSDSSSAPRTQDAGIASGPGN

SEQ ID NO: 808114 - protein, 142 aa, Homo sapiens; identical to SEQ ID NO: 808113

SEQ ID NO: 808115 - protein, 580 aa, Homo sapiens
MGCFCAVPEEFYCEVLLLDESKLTLTTQQQGIKKSTKGSVVLDHVFHHVNLVEIDYFGLRYCDRSHQTYWLDPAKTLAEHKELINTGPPYTLYFGIKFYAEDPCKLKEEITRYQFFLQVKQDVLQGRLPCPVNTAAQLGAYAIQSELGDYDPYKHTAGYVSEYRFVPDQKEELEEAIERIHKTLMGQIPSEAELNYLRTAKSLEMYGVDLHPVYGENKSEYFLGLTPVGVVVYKNKKQVGKYFWPRITKVHFKETQFELRVLGKDCNETSFFFEARSKTACKHLWKCSVEHHTFFRMPENESNSLSRKLSKFGSIRYKHRYSGRTALQMSRDLSIQLPRPDQNVTRSRSKTYPKRIAQTQPAESNTISRITANMENGENEGTIKIIAPSPVKSFKKAKNENSPDTQRSKSHAPWEENGPQSGLYNSPSDRTKSPKFPYTRRRNPSCGSDNDSVQPVRRRKAHNSGEDSDLKQRRRSRSRCNTSSGSESENSNREHRKKRNRIRQENDMVDSAPQWEAVLRRQKEKNQADPNSRRSRHRSRSRSPDIQAKEELWKHIQKELVDPSGLSEEQLKEIPYTKIE

SEQ ID NO: 808116 - protein, 686 aa, Homo sapiens
MGCFCAVPEEFYCEVLLLDESKLTLTTQQQGIKKSTKGSVVLDHVFHHVNLVEIDYFGLRYCDRSHQTYWLDPAKTLAEHKELINTGPPYTLYFGIKFYAEDPCKLKEEITRYQFFLQVKQDVLQGRLPCPVNTAAQLGAYAIQSELGDYDPYKHTAGYVSEYRFVPDQKEELEEAIERIHKTLMGQIPSEAELNYLRTAKSLEMYGVDLHPVYGENKSEYFLGLTPVGVVVYKNKKQVGKYFWPRITKVHFKETQFELRVLGKDCNETSFFFEARSKTACKHLWKCSVEHHTFFRMPENESNSLSRKLSKFGSIRYKHRYSGRTALQMSRDLSIQLPRPDQNVTRSRSKTYPKRIAQTQPAESNTISRITANMENGENEGTIKIIAPSPVKSFKKAKNENSPDTQRSKSHAPWEENGPQSGLYNSPSDRTKSPKFPYTRRRNPSCGSDNDSVQPVRRRKAHNSGEDSDLKQRRRSRSRCNTSSGSESENSNREHRKKRNRIRQENDMVDSAPQWEAVLRRQKEKNQADPNSRRSRHRSRSRSPDIQAKEELWKHIQKELVDPSGLSEEQLKEIPYTKIETQGDPIRIRHSHSPRSYRQYRRSQCSDGERSVLSEVNSKTDLVPPLPVTHSSDAQGSGDATVHQRRNGSKDSLMEEKPQTSTNNLAGKHTAKTIKTIQASRLKTEN

SEQ ID NO: 808117 - protein, 580 aa, Homo sapiens; identical to SEQ ID NO: 808115

SEQ ID NO: 808118 - protein, 179 aa, Homo sapiens
MVDSAPQWEAVLRRQKEKNQADPNSRRSRHRSRSRSPDIQAKEELWKHIQKELVDPSGLSEEQLKEIPYTKIETQGDPIRIRHSHSPRSYRQYRRSQCSDGERSVLSEVNSKTDLVPPLPVTHSSDAQGSGDATVHQRRNGSKDSLMEEKPQTSTNNLAGKHTAKTIKTIQASRLKTEN

SEQ ID NO: 808119 - protein, 395 aa, Homo sapiens
MLPAVGSADEEEDPAEEDCPELVPIETTQSEEEEKSGLGAKIPVTIITGYLGAGKTTLLNYILTEQHSKRVAVILNEFGEGSALEKSLAVSQGGELYEEWLELRNGCLCCSVKDSGLRAIENLMQKKGKFDYILLETTGLADPGAVASMFWVDAELGSDIYLDGIITIVDSKYGLKHLTEEKPDGLINEATRQVALADAILINKTDLVPEEDVKKLRTTIRSINGLGQILETQRSRVDLSNVLDLHAFDSLSGISLQKKLQHVPGTQPHLDQSIVTITFEVPGNAKEEHLNMFIQNLLWEKNVRNKDNHCMEVIRLKGLVSIKDKSQQVIVQGVHELYDLEETPVSWKDDTERTNRLVLLGRNLDKDILKQLFIATVTETEKQWTTRFQEDQVCT

SEQ ID NO: 808120 - protein, 376 aa, Homo sapiens
MLPAVGSADEEEDPAEEDCPELVPIETTQSEEEEKSGLGAKIPVTIITGYLGAGKTTLLNYILTEQHSKRVAVILNEFGEGSALEKSLAVSQGGELYEEWLELRNGCLCCSVKDSGLRAIENLMQKKGKFDYILLETTGLADPGAVASMFWVDAELGSDIYLDGIITIVDSKYGLKHLTEEKPDGLINEATRQVALADAILINKTDLVPEEDVKKLRTTIRSINGLGQILETQRSSLQKKLQHVPGTQPHLDQSIVTITFEVPGNAKEEHLNMFIQNLLWEKNVRNKDNHCMEVIRLKGLVSIKDKSQQVIVQGVHELYDLEETPVSWKDDTERTNRLVLLGRNLDKDILKQLFIATVTETEKQWTTRFQEDQVCT

SEQ ID NO: 808121 - protein, 96 aa, Homo sapiens
GGISERRDVMTSGPGRPGVACWACAAAVRRVGPSGSAEVGTCCRPECYRLLDLRMRRRILRRRIVLNWFPLRRRKARRRKSLASAPRSQSQLSPGI

SEQ ID NO: 808122 - protein, 215 aa, Homo sapiens
  misc_feature (207)..(207): Xaa can be any naturally occurring amino acid
  misc_feature (211)..(211): Xaa can be any naturally occurring amino acid
MLPAVGSADEEEDPAEEDCPELVPIETTQSEEEEKSGLGAKIPVTIITGYLGAGKTTLLNYILTEQHSKRVAVILNEFGEGSALEKSLAVSQGGELYEEWLELRNGCLCCSVKDSGLRAIENLMQKKGKFDYILLETTGLADPGAVASMFWVDAELGSDIYLDGIITIVDSKYGLKHLTEEKPDGLINEATRQVALAEIGPPPNFFXPFSXKFFF

SEQ ID NO: 808123 - protein, 395 aa, Homo sapiens; identical to SEQ ID NO: 808119

SEQ ID NO: 808124 - protein, 359 aa, Homo sapiens
MYFKRAARAFPVLLTGAGKTTLLNYILTEQHSKRVAVILNEFGEGSALEKSLAVSQGGELYEEWLELRNGCLCCSVKDSGLRAIENLMQKKGKFDYILLETTGLADPGAVASMFWVDAELGSDIYLDGIITIVDSKYGLKHLTEEKPDGLINEATRQVALADAILINKTDLVPEEDVKKLRTTIRSINGLGQILETQRSRVDLSNVLDLHAFDSLSGISLQKKLQHVPGTQPHLDQSIVTITFEVPGNAKEEHLNMFIQNLLWEKNVRNKDNHCMEVIRLKGLVSIKDKSQQVIVQGVHELYDLEETPVSWKDDTERTNRLVLLGRNLDKDILKQLFIATVTETEKQWTTRFQEDQVCT

SEQ ID NO: 808125 - protein, 361 aa, Homo sapiens
MLPAVGSADEEEDPAEEDCPELVPIETTQSEEEEKSGLGAKIPVTIITGYLGAGKTTLLNYILTEQHSKRVAVILNEFGEGSALEKSLAVSQGGELYEEWLELRNGCLCCSVKDSGLRAIENLMQKKGKFDYILLETTGLADPGAVASMFWVDAELGSDIYLDGIITIVDSKYGLKHLTEEKPDGLINEATRQVALADAILINKTDLVPEEDVKKLRTTISLQKKLQHVPGTQPHLDQSIVTITFEVPGNAKEEHLNMFIQNLLWEKNVRNKDNHCMEVIRLKGLVSIKDKSQQVIVQGVHELYDLEETPVSWKDDTERTNRLVLLGRNLDKDILKQLFIATVTETEKQWTTRFQEDQVCT

SEQ ID NO: 808126 - protein, 367 aa, Homo sapiens
MLPAVGSADEEEDPAEEDCPELVPIETTQSEEEEKSGLGAKIPVTIITGYLGAGKTTLLNYILTEQHSKRVAVILNEFGEGSALEKSLAVSQGGELYEEWLELRNGCLCCSVKDSGLRAIENLMQKKGKFDYILLETTGLADPGAVASMFWVDAELGSDIYLDVITIVDSDQYGFTPFNKKEKPDGLIMKLLDPYMDYGQILETQQIRVDLSNVLDLHAFDSLSGISLQKKLQHVPGTQPHLDQSIVTITFEVPGNAKEEHLNMFIQNLLWEKNVRNKDNHCMEVIRLKGLVSIKDKSQQVIVQGVHELYDLEETPVSWKDDTERTNRLVLLGRNLDKDILKQLFIATVTETEKQWTTRFQEDQVCT

SEQ ID NO: 808127 - protein, 113 aa, Homo sapiens
MLPAVGSADEEEDPAEEDCPELVPIETTQSEEEEKSGLGAKIPVTIITGYLGAGKTTLLNYILTEQHSKRVAVILNEFGEGSALEKSLAVSQGGELYEEWLELRNGCLCCSVK

SEQ ID NO: 808128 - protein, 146 aa, Homo sapiens
MLPAVGSADEEEDPAEEDCPELVPIETTQSEEEEKSGLGAKIPVTIITGYLGAGKTTLLNYILTEQHSKRVAVILNEFGEGSALEKSLAVSQGGELYEEWLELRNGCLCCSVKDSGLRAIENLMQKKGKFDYILLETTGLADPGKK

SEQ ID NO: 808129 - protein, 101 aa, Homo sapiens
RRGCTGHLQLPARYSGCSWDPTASPGAAPAASPVQHVLESRAGPSPTVGSPSVSRMMSETLPSGSRSSWLLLSSNCTAISIASLMLVPEEHALSSISDGLY

SEQ ID NO: 808130 - protein, 583 aa, Homo sapiens
GSLCLSPCDPKSAGKMRLLLRPGGTWGALVKFSILANSNEDGKRVSPWRERLSIMKRRPWEFPGDPESGAGARPPRPVSGLRRWLDHSKHCLSVETEADSGQAGPYENWMLEPALATGEELPELTLLTTLLEGPGDKTQPPEEETLSQAPESEEEQKKKALERSMYVLSELVETEKMYVDDLGQIVEGYMATMAAQGVPESLRGRDRIVFGNIQQIYEWHRDYFLQELQRCLKDPDWLAQLFIKHERRLHMYVVYCQNKPKSEHVVSEFGDSYFEELRQQLGHRLQLNDLLIKPVQRIMKYQLLLKDFLKYYNRAGMDTADLEQAVEVMCFVPKRCNDMMTLGRLRGFEGKLTAQGKLLGQDTFWVTEPEAGGLLSSRGRERRVFLFEQIIIFSEALGGGVRGGTQPGYVYKNSIKVSCLGLEGNLQGDPCRFALTSRGPEGGIQRYVLQAADPAISQAWIKHVAQILESQRDFLNALQSPIEYQRRESQTNSLGRPRGPGVGSPGRIQLGDQAQGSTHTPINGSLPSLLLSPKGEVARALLPLDKQALGDIPQAPHDSPPVSPTPKTPPCQARLAKLDEDEL

SEQ ID NO: 808131 - protein, 574 aa, Homo sapiens
GGRCACPRVIRKVLAKCGCCFARGGRESYSIAGSEGSISASAASGLAAPSGPSSGLSSGPCSPGPPGPVSGLRRWLDHSKHCLSVETEADSGQAGPYENWMLEPALATGEELPELTLLTTLLEGPGDKTQPPEEETLSQAPESEEEQKKKALERSMYVLSELVETEKMYVDDLGQIVEGYMATMAAQGVPESLRGRDRIVFGNIQQIYEWHRDYFLQELQRCLKDPDWLAQLFIKHERRLHMYVVYCQNKPKSEHVVSEFGDSYFEELRQQLGHRLQLNDLLIKPVQRIMKYQLLLKDFLKYYNRAGMDTADLEQAVEVMCFVPKRCNDMMTLGRLRGFEGKLTAQGKLLGQDTFWVTEPEAGGLLSSRGRERRVFLFEQIIIFSEALGGGVRGGTQPGYVYKNSIKVSCLGLEGNLQGDPCRFALTSRGPEGGIQRYVLQAADPAISQAWIKHVAQILESQRDFLNALQSPIEYQRRESQTNSLGRPRGPGVGSPGRIQLGDQAQGSTHTPINGSLPSLLLSPKGEVARALLPLDKQALGDIPQAPHDSPPVSPTPKTPPCQARLAKLDEDEL

SEQ ID NO: 808132 - protein, 602 aa, Homo sapiens
GGRCACPRVIRKVLAKCGCCFARGGRESYSIAGSEGSISASAASGLAAPSGPSSGLSSGPCSPGPPGPVSGLRRWLDHSKHCLSVETEADSGQAGPYENWMLEPALATGEELPELTLLTTLLEGPGDKTQPPEEETLSQAPESEEEQKKKALERSMYVLSELVETEKMYVDDLGQIVEGYMATMAAQGVPESLRGRDRIVFGNIQQIYEWHRDYFLQELQRCLKDPDWLAQLFIKHERRLHMYVVYCQNKPKSEHVVSEFGDSYFEVSELRCLGGKEDRTGAFQAAYPPCPCPQELRQQLGHRLQLNDLLIKPVQRIMKYQLLLKDFLKYYNRAGMDTADLEQAVEVMCFVPKRCNDMMTLGRLRGFEGKLTAQGKLLGQDTFWVTEPEAGGLLSSRGRERRVFLFEQIIIFSEALGGGVRGGTQPGYVYKNSIKVSCLGLEGNLQGDPCRFALTSRGPEGGIQRYVLQAADPAISQAWIKHVAQILESQRDFLNALQSPIEYQRRESQTNSLGRPRGPGVGSPGRIQLGDQAQGSTHTPINGSLPSLLLSPKGEVARALLPLDKQALGDIPQAPHDSPPVSPTPKTPPCQARLAKLDEDEL

SEQ ID NO: 808133 - protein, 711 aa, Homo sapiens
GGRCACPRVIRKVLAKCGCCFARGGRESYSIAGSEGSISASAASGLAAPSGPSSGLSSGPCSPGPPGPVSGLRRWLDHSKHCLSVETEADSGQAGPYENWMLEPALATGEELPELTLLTTLLEGPGDKTQPPEEETLSQAPESEEEQKKKALERSMYVLSELVETEKMYVDDLGQIVEGYMATMAAQGVPESLRGRDRIVFGNIQQIYEWHRDVSGGTLTAEVLERGPHLVVLYPNISPLRLKECLEKFCRAHYQGRQLETAGSGRGGGCEMYLTCCFSTNPSSYFLQELQRCLKDPDWLAQLFIKHVRLEGAGPGAGLRNGLGFSGDASSLLAHPALSYNITPVRSAGCICMWCTVRISPSQSMWCQSLGTATLRSVAEMSWWEGGQNWGFPGCITTLSLPQELRQQLGHRLQLNDLLIKPVQRIMKYQLLLKDFLKYYNRAGMDTADLEQAVEVMCFVPKRCNDMMTLGRLRGFEGKLTAQGKLLGQDTFWVTEPEAGGLLSSRGRERRVFLFEQIIIFSEALGGGVRGGTQPGYVYKNSIKVSCLGLEGNLQGDPCRFALTSRGPEGGIQRYVLQAADPAISQAWIKHVAQILESQRDFLNALQSPIEYQRRESQTNSLGRPRGPGVGSPGRIQLGDQAQGSTHTPINGSLPSLLLSPKGEVARALLPLDKQALGDIPQAPHDSPPVSPTPKTPPCQARLAKLDEDEL

SEQ ID NO: 808134 - protein, 615 aa, Homo sapiens
GGRCACPRVIRKVLAKCGCCFARGGRESYSIAGSEGSISASAASGLAAPSGPSSGLSSGPCSPGPPGPVSGLRRWLDHSKHCLSVETEADSGQAGPYENWMLEPALATGEELPELTLLTTLLEGPGDKTQPPEEETLSQAPESEEEQKKKALERSMYVLSELVETEKMYVDDLGQIVEGYMATMAAQGVPESLRGRDRIVFGNIQQIYEWHRDYFLQELQRCLKDPDWLAQLFIKHERRLHMYVVYCQNKPKSEHVVSEFGDSYFEELRQQLGHRLQLNDLLIKPVQRIMKYQLLLKDFLKYYNRAGMDTADLEQAVEVMCFVPKRCNDMMTLGRLRGFEGKLTAQGKLLGQDTFWVTEPEAGGLLSSRGRERRVFLFEQIIIFSEALGGGVRGGTQPGYVYKNSIKVGRRPRGRAWRERGHEASERMSQRSQGGPEESGAVSYLPIQVSCLGLEGNLQGDPCRFALTSRGPEGGIQRYVLQAADPAISQAWIKHVAQILESQRDFLNALQSPIEYQRRESQTNSLGRPRGPGVGSPGRIQLGDQAQGSTHTPINGSLPSLLLSPKGEVARALLPLDKQALGDIPQAPHDSPPVSPTPKTPPCQARLAKLDEDEL

SEQ ID NO: 808135 - protein, 374 aa, Homo sapiens
TGEVVCGGGYMATMAAQGVPESLRGRDRIVFGNIQQIYEWHRDYFLQELQRCLKDPDWLAQLFIKHELRQQLGHRLQLNDLLIKPVQRIMKYQLLLKDFLKYYNRAGMDTADLEQAVEVMCFVPKRCNDMMTLGRLRGFEGKLTAQGKLLGQDTFWVTEPEAGGLLSSRGRERRVFLFEQIIIFSEALGGGVRGGTQPGYVYKNSIKVSCLGLEGNLQGDPCRFALTSRGPEGGIQRYVLQAADPAISQAWIKHVAQILESQRDFLNALQSPIEYQRRESQTNSLGRPRGPGVGSPGRIQLGDQAQGSTHTPINGSLPSLLLSPKGEVARALLPLDKQALGDIPQAPHDSPPVSPTPKTPPCQARLAKLDEDEL

SEQ ID NO: 808136 - protein, 291 aa, Homo sapiens
NQLRYLYVNAAAAQDFLKYYNRAGMDTADLEQAVEVMCFVPKRCNDMMTLGRLRGFEGKLTAQGKLLGQDTFWVTEPEAGGLLSSRGRERRVFLFEQIIIFSEALGGGVRGGTQPGYVYKNSIKVSCLGLEGNLQGDPCRFALTSRGPEGGIQRYVLQAADPAISQAWIKHVAQILESQRDFLNALQSPIEYQRRESQTNSLGRPRGPGVGSPGRIQLGDQAQGSTHTPINGSLPSLLLSPKGEVARALLPLDKQALGDIPQAPHDSPPVSPTPKTPPCQARLAKLDEDEL

SEQ ID NO: 808137 - protein, 288 aa, Homo sapiens
GGRCACPRVIRKVLAKCGCCFARGGRESYSIAGSEGSISASAASGLAAPSGPSSGLSSGPCSPGPPGPVSGLRRWLDHSKHCLSVETEADSGQAGPYENWMLEPALATGEELPELTLLTTLLEGPGDKTQPPEEETLSQAPESEEEQKKKALERSMYVLSELVETEKMYVDDLGQIVEGYMATMAAQGVPESLRGRDRIVFGNIQQIYEWHRDYFLQELQRCLKDPDWLAQLFIKHERRLHMYVVYCQNKPLVTSPRLPMTLLQSLQLQKPLPAKPDLPSWMKMSCNW

SEQ ID NO: 808138 - protein, 403 aa, Homo sapiens
GGRCACPRVIRKVLAKCGCCFARGGRESYSIAGSEGSISASAASGLAAPSGPSSGLSSGPCSPGPPGPVSGLRRWLDHSKHCLSVETEADSGQAGPYENWMLEPALATGEELPELTLLTTLLEGPGDKTQPPEEETLSQAPESEEEQKKKALERSMYVLSELVETEKMYVDDLGQIVEGYMATMAAQGVPESLRGRDRIVFGNIQQIYEWHRDYFLQELQRCLKDPDWLAQLFIKHERRLHMYVVYCQNKPKSEHVVSEFGDSYFEELRQQLGHRLQLNDLLIKPVQRIMKYQLLLKDFLKYYNRAGMDTADLEQAVEVMCFVPKRCNDMMTLGRLRGFEGKLTAQGKLLGQDTFWVTEPEAGGLLSSRGRERRVFLFEQIIIFSEALGGGVRGGTQLDEDEL

SEQ ID NO: 808139 - protein, 348 aa, Homo sapiens
GGRCACPRVIRKVLAKCGCCFARGGRESYSIAGSEGSISASAASGLAAPSGPSSGLSSGPCSPGPPGPVSGLRRWLDHSKHCLSVETEADSGQAGPYENWMLEPALATGEELPELTLLTTLLEGPGDKTQPPEEETLSQAPESEEEQKKKALERSMYVLSELVETEKMYVDDLGQIVEGYMATMAAQGVPESLRGRDRIVFGNIQQIYEWHRDYFLQELQRCLKDPDWLAQLFIKHERRLHMYVVYCQNKPKSEHVVSEFGDSYFEELRQQLGHRLQLNDLLIKPVQRIMKYQLLLKDFLKYYNRAGMDTADLEQAVEVMCFVPKRCNDMMTLGRLRGFEGKRPGYRA

SEQ ID NO: 808140 - protein, 184 aa, Homo sapiens
GTDEISIEGEMADVLDLHEAGGEDFAMDEDGDESIHKLKEKAKKRKGRGFGSEEGSRARMREDYDSVEQDGDEPGPQRSVEGWILFVTGVHEEATEEDIHDKFAEYGEIKNIHLNLDRRTGYLKGYTLVEYETYKEAQAAMEGLNGQDLMGQPISVDWCFVRGPPKGKRRGGRRRSRSPDRRRR

SEQ ID NO: 808141 - protein, 112 aa, Homo sapiens
  misc_feature (9)..(9): Xaa can be any naturally occurring amino acid
  misc_feature (13)..(13): Xaa can be any naturally occurring amino acid
GADGMTRPXARSXTRTGVHEEATEEDIHDKFAEYGEIKNIHLNLDRRTGYLKGYTLVEYETYKEAQAAMEGLNGQDLMGQPISVDWCFVRGPPKGKRRGGRRRSRSPDRRRR

SEQ ID NO: 808142 - protein, 184 aa, Homo sapiens; identical to SEQ ID NO: 808140

SEQ ID NO: 808143 - protein, 184 aa, Homo sapiens; identical to SEQ ID NO: 808140

SEQ ID NO: 808144 - protein, 184 aa, Homo sapiens; identical to SEQ ID NO: 808140

SEQ ID NO: 808145 - protein, 184 aa, Homo sapiens; identical to SEQ ID NO: 808140

SEQ ID NO: 808146 - protein, 132 aa, Homo sapiens
QQRCPRQEGDPSDSVEQDGDEPGPQRSVEGWILFVTGVHEEATEEDIHDKFAEYGEIKNIHLNLDRRTGYLKGYTLVEYETYKEAQAAMEGLNGQDLMGQPISVDWCFVRGPPKGKRRGGRRRSRSPDRRRR

SEQ ID NO: 808147 - protein, 184 aa, Homo sapiens; identical to SEQ ID NO: 808140

SEQ ID NO: 808148 - protein, 126 aa, Homo sapiens
GTDEISIEGEMADVLDLHEAGGEDFAMDEDGDESIHKLKEKAKKRKGRGFGSEEGSRARMREDYDSVEQDGDEPGPQRSVEGWILFVTGVHEEATEEDIHDKFAEYGEIKNIHLNLDRRTGYLKVS

SEQ ID NO: 808149 - protein, 184 aa, Homo sapiens; identical to SEQ ID NO: 808140

SEQ ID NO: 808150 - protein, 66 aa, Homo sapiens
  misc_feature (6)..(6): Xaa can be any naturally occurring amino acid
VLVRGXHQKEVAEDAAEVQTGDVADRSSVVQVFSSRFHLTMQPWTNRTGVELAVFIFNLLPYMRSI

SEQ ID NO: 808151 - protein, 184 aa, Homo sapiens; identical to SEQ ID NO: 808140

SEQ ID NO: 808152 - protein, 184 aa, Homo sapiens; identical to SEQ ID NO: 808140

SEQ ID NO: 808153 - protein, 241 aa, Homo sapiens
  misc_feature (232)..(232): Xaa can be any naturally occurring amino acid
GTDEISIEGEMADVLDLHEAGGEDFAMDEDGDESIHKLKEKAKKRKGRGFGSEEGSRARMREDYDSVEQDGDEPGPQRSVEGWILFVTGVHEEATEEDIHDKFAEYGEIKNIHLNLDRRTGYLKGYTLVEYETYKEAQAAMEGLNGQDLMGQPISVDWCFVRGPPKGKRRQANLPGCKEAFLQKGQNGGSGASSFFRIALVALPHSCNFKKQDGPTDTSSNSKNSIIDNSLXLKNTSECVL

SEQ ID NO: 808154 - protein, 126 aa, Homo sapiens; identical to SEQ ID NO: 808148

SEQ ID NO: 808155 - protein, 147 aa, Homo sapiens [sequence omitted]

SEQ ID NO: 808156 - protein, 69 aa, Homo sapiens
GRSHFRLVSNLQSPVVTGIEKSATKVKKDKINSFLVSSKTARERYQALSLALSSVSPSSEPPHITLNKQ

SEQ ID NO: 808157 - protein, 215 aa, Homo sapiens
HLSCWVLRNVLIDTWSLSLWSLQFSGVQLWEHGLKFYSILGQSGCSSNTGLSPRRADLNGSNMETVIGRGLKTTDGLAVDWVARNLYWTDTGRNTIEASRLDGSCRKVLINNSLDEPRAIAVFPRKGYLFWTDWGHIAKIERANLDGSERKVLINTDLGWPNGLTLDYDTRRIYWVDAHLDRIESADLNGKLRQVLVGHVSHPFALTQAGLKAER

SEQ ID NO: 808158 - protein, 555 aa, Homo sapiens
TYLLFSSRGSIRRISLDTSDHTDVHVPVPELNNVISLDYDSVDGKVYYTDVFLDVIRRADLNGSNMETVIGRGLKTTDGLAVDWVARNLYWTDTGRNTIEASRLDGSCRKVLINNSLDEPRAIAVFPRKGYLFWTDWGHIAKIERANLDGSERKVLINTDLGWPNGLTLDYDTRRIYWVDAHLDRIESADLNGKLRQVLVGHVSHPFALTQQDRWIYWTDWQTKSIQRVDKYSGRNKETVLANVEGLMDIIVVSPQRQTGTNACGVNNGGCTHLCFARASDFVCACPDEPDSQPCSLVPGLVPPAPRATGMSEKSPVLPNTPPTTLYSSTTRTRTSLEEVEGRCSERDARLGLCARSNDCCSCCSRGRTSYQLRHWWTPQYSADFGGDCSFDAVQVTSHKKSKFTDPGMGNLTYSNPSYRTSTQEVKIEAIPKPAMYNQLCYKKEGGPDHNYTKEKIKIVEGICLLSGDDAEWDDLKQLRSSRGGLLRDHVCMKTDTVSIQASSGSLDDTETEQLLQEEQSECSSVHTAATPERRGSLPDTGWKHERKLSSESQV

SEQ ID NO: 808159 - protein, 555 aa, Homo sapiens; identical to SEQ ID NO: 808158

SEQ ID NO: 808160 - protein, 555 aa, Homo sapiens; identical to SEQ ID NO: 808158

SEQ ID NO: 808161 - protein, 555 aa, Homo sapiens; identical to SEQ ID NO: 808158

SEQ ID NO: 808162 - protein, 553 aa, Homo sapiens
TYLLFSSRGSIRRISLDTSDHTDVHVPVPELNNVISLDYDSVDGKVYYTDVFLDVIRRADLNGSNMETVIGRGLKTTDGLAVDWVARNLYWTDTGRNTIEASRLDGSCRKVLINNSLDEPRAIAVFPRKGYLFWTDWGHIAKIERANLDGSERKVLINTDLGWPNGLTLDYDTRRIYWVDAHLDRIESADLNGKLRQVLVGHVSHPFALTQQDRWIYWTDWQTKSIQRVDKYSGRNKETVLANVEGLMDIIVVSPQRQTGTNACGVNNGGCTHLCFARASDFVCACPDEPDSQPCSLVPGLVPPAPRATGMSEKSPVLPNTPPTTLYSSTTRTRTSLEEVEGRCSERDARLGLCARSNDCCSCCSRGRTSYQLRHWWTPQYSADFGGDCSFDAVQVTSHKKSKFTDPGMGNLTYSNPSYRTSTQEVKIEAIPKPAMYNQLCYKKEGGPDHNYTKEKIKIVEGICLLSGDDAEWDDLKQLRSSRGGLLRDHVCMKTDTVSIQASSGSLDDTETEQLLQEEQSECSSVHTAATPERRGFCLADPCCGKPAYRHHF

SEQ ID NO: 808163 - protein, 395 aa, Homo sapiens
TYLLFSSRGSIRRISLDTSDHTDVHVPVPELNNVISLDYDSVDGKVYYTDVFLDVIRRADLNGSNMETVIGRGLKTTDGLAVDWVARNLYWTDTGRNTIEASRLDGSCRKVLINNSLDEPRAIAVFPRKGYLFWTDWGHIAKIERANLDGSERKVLINTDLGWPNGLTLDYDTRRIYWVDAHLDRIESADLNGKLRQVLVGHVSHPFALTQQDRWIYWTDWQTKSIQRVDKYSGRNKETVLANVEGLMDIIVVSPQRQTGTNACGVNNGGCTHLCFARASDFVCACPDEPDSQPCSLVPGLVPPAPRATGMSEKSPVLPNTPPTTLYSSTTRTRTSLEEVEGRCSERDARLGLCARSNDAVPAAPGEGLHISYAIGGLLSILLILVVIAALMLYR

SEQ ID NO: 808164 - protein, 130 aa, Homo sapiens
TYLLFSSRGSIRRISLDTSDHTDVHVPVPELNNVISLDYDSVDGKVYYTDVFLDVIRRADLNGSNMETVIGRGLKTTDGLAVDWVARNLYWTDTGRNTIEASRLDGSCRKVLINNSLDEPRAIAVFPRKG

SEQ ID NO: 808165 - protein, 445 aa, Homo sapiens
MYYQQALMRSTVKSSVSLGGIVKYSEQFSSNDAIMSGCLPSNPWITDDTQFWDLNAKLVEIPTKMRVERWAFNFSELIRDPKGRQSFQYFLKKEFSGENLGFWEACEDLKYGDQSKVKEKAEEIYKLFLAPGARRWINIDGKTMDITVKGLKHPHRYVLDAAQTHIYMLMKKDSYARYLKSPIYKDMLAKAIEPQETTKKSSTLPFMRRHLRSSPSPVILRQLEEEAKAREAANTVDITQPGQHMAPSPHLTVYTGTCMPPSPSSPFSSSCRSPRKPFASPSRFIRRPSTTICPSPIRVALESSSGLEQKGECSGSMAPRGPSVTESSEASLDTSWPRSRPRAPPKARMALSFSRFLRRGCLASPVFARLSPKCPAVSHGRVQPLGDVGQQLPRLKSKRVANFFQIKMDVPTGSGTCLMDSEDAGTGESGDRATEKEVICPWESL

SEQ ID NO: 808166 - protein, 674 aa, Homo sapiens
MTIRHQGQQYRPRMAFLQKIEALVKDMQNPETGVRMQNQRVLVTSVPHAMTGSDVLQWIVQRLWISSLEAQNLGNFIVRYGYIYPLQDPKNLILKPDGSLYRFQTPYFWPTQQWPAEDTDYAIYLAKRNIKKKGILEEYEKENYNFLNQKMNYKWDFVIMQAKEQYRAGKERNKADRYALDCQEKAYWLVHRCPPGMDNVLDYGLDRVTNPNEVKVNQKQTVVAVKKEIMYYQQALMRSTVKSSVSLGGIVKYSEQFSSNDAIMSGCLPSNPWITDDTQFWDLNAKLVEIPTKMRVERWAFNFSELIRDPKGRQSFQYFLKKEFSGENLGFWEACEDLKYGDQSKVKEKAEEIYKLFLAPGARRWINIDGKTMDITVKGLKHPHRYVLDAAQTHIYMLMKKDSYARYLKSPIYKDMLAKAIEPQETTKKSSTLPFMRRHLRSSPSPVILRQLEEEAKAREAANTVDITQPGQHMAPSPHLTVYTGTCMPPSPSSPFSSSCRSPRKPFASPSRFIRRPSTTICPSPIRVALESSSGLEQKGECSGSMAPRGPSVTESSEASLDTSWPRSRPRAPPKARMALSFSRFLRRGCLASPVFARLSPKCPAVSHGRVQPLGDVGQQLPRLKSKRVANFFQIKMDVPTGSGTCLMDSEDAGTGESGDRATEKEVICPWESL

SEQ ID NO: 808167 - protein, 898 aa, Homo sapiens [sequence omitted]

SEQ ID NO: 808168 - protein, 898 aa, Homo sapiens [sequence omitted]

SEQ ID NO: 808169 - protein, 898 aa, Homo sapiens [sequence omitted]

SEQ ID NO: 808170 - protein, 874 aa, Homo sapiens
MAAAAAEEGMEPRALQYEQTLMYGRYTQDLGAFAKEEAARIRLGGPEPWKGPPSSRAAPELLEYGRSRCARCRVCSVRCHKFLVSRVGEDWIFLVLLGLLMALVSWVMDYAIAACLQAQQWMSRGLNTSILLQYLAWVTYPVVLITFSAGFTQILAPQAVGSGIPEMKTILRGVVLKEYLTLKTFIAKVIGLTCALGSGMPLGKEGPFVHIASMCAALLSKFLSLFGGIYENESRNTEMLAAACAVGVGCCFAAPIGGVLFSIEVTSTFFAVRNYWRGFFAATFSAFIFRVLAVWNRDEETITALFKTRFRLDFPFDLQELPAFAVIGIASGFGGALFVYLNRKIVQVMRKQKTINRFLMRKRLLFPALVTLLISTLTFPPGFGQFMAGQLSQKETLVTLFDNRTWVRQGLVEELEPPSTSQAWNPPRANVFLTLVIFILMKAAFGRLVGESMAAWFPDGIHTDSSTYRIVPGGYAVVGAAALAGAVTHTVSTAVIVFELTGQIAHILPVMIAVILANAVAQSLQPSLYDSIIRIKKLPYLPELGWGRHQQYRVRVEDIMVRDVPHVALSCTFRDLRLALHRTKGRMLALVESPESMILLGSIERSQVVALLGAQLSPARRRQHMQERRATQTSPLSDQEGPPSPEASVCFQVNTEDSAFPAARGETHKPLKPALKRGPSVTRNLGESPTGSAESAGIALRSLFCGSPPPEAASEKLESCEKRKLKRVRISLASDADLEGEMSPEEILEWEEQQLDEPVNFSDCKIDPAPFQLVERTSLHKTHTIFSLLGVDHAYVTSIGRLIGIVTLKELRKAIEGSVTAQGVKVRPPLASFRDSATSSSDTETTEVHALWGPHSRHGLPREGSPSDSDDKCQ

SEQ ID NO: 808171 - protein, 920 aa, Homo sapiens
MAAAAAEEGMEPRALQYEQTLMYGRYTQDLGAFAKEEAARIRLGGPEPWKGPPSSRAAPELLEYGRSRCARCRVCSVRCHKFLVSRVGEDWIFLVLLGLLMALVSWVMDYAIAACLQAQQWMSRGLNTSILLQYLAWVTYPVVLITFSAGFTQILAPQAVGSGIPEMKTILRGVVLKEYLTLKTFIAKVIGLTCALGSGMPLGKEGPFVHIASMCAALLSKFLSLFGGIYENESRNTEMLAAACAVGVGCCFAAPIGGVLFSIEVTSTFFAVRNYWRGFFAATFSAFIFRVLAVWNRDEETITALFKTRFRLDFPFDLQELPAFAVIGIASGFGGALFVYLNRKIVQVMRKQKTINRFLMRNPEICEATQPLATHDCCETYDSRRLLFPALVTLLISTLTFPPGFGQFMAGQLSQKETLVTLFDNRTWVRQGLVEELEPPSTSQAWNPPRANVFLTLVIFILMKFWMSALATTIPVPCGAFMPVFVIGAAFGRLVGESMAAWFPDGIHTDSSTYRIVPGGYAVVGAAALAGAVTHTVSTAVIVFELTGQIAHILPVMIAVILANAVAQSLQPSLYDSIIRIKKLPYLPELGWGRHQQYRVRVEDIMVRDVPHVALSCTFRDLRLALHRTKGRMLALVESPESMILLGSIERSQVVALLGAQLSPARRRQHMQERRATQTSPLSDQEGPPSPEASVCFQVNTEDSAFPAARGETHKPLKPALKRGPSVTRNLGESPTGSAESAGIALRSLFCGSPPPEAASEKLESCEKRKLKRVRISLASDADLEGEMSPEEILEWEEQQLDEPVNFSDCKIDPAPFQLVERTSLHKTHTIFSLLGVDHAYVTSIGRLIGIVTLKELRKAIEGSVTAQGVKVRPPLASFRDSATSSSDTETTEVHALWGPHSRHGLPREGSPSDSDDKCQ

SEQ ID NO: 808172 - protein, 753 aa, Homo sapiens
MSRGLNTSILLQYLAWVTYPVVLITFSAGFTQILAPQAVGSGIPEMKTILRGVVLKEYLTLKTFIAKVIGLTCALGSGMPLGKEGPFVHIASMCAALLSKFLSLFGGIYENESRNTEMLAAACAVGVGCCFAAPIGGVLFSIEVTSTFFAVRNYWRGFFAATFSAFIFRVLAVWNRDEETITALFKTRFRLDFPFDLQELPAFAVIGIASGFGGALFVYLNRKIVQVMRKQKTINRFLMRKRLLFPALVTLLISTLTFPPGFGQFMAGQLSQKETLVTLFDNRTWVRQGLVEELEPPSTSQAWNPPRANVFLTLVIFILMKAAFGRLVGESMAAWFPDGIHTDSSTYRIVPGGYAVVGAAALAGAVTHTVSTAVIVFELTGQIAHILPVMIAVILANAVAQSLQPSLYDSIIRIKKLPYLPELGWGRHQQYRVRVEDIMVRDVPHVALSCTFRDLRLALHRTKGRMLALVESPESMILLGSIERSQVVALLGAQLSPARRRQHMQERRATQTSPLSDQEGPPSPEASVCFQVNTEDSAFPAARGETHKPLKPALKRGPSVTRNLGESPTGSAESAGIALRSLFCGSPPPEAASEKLESCEKRKLKRVRISLASDADLEGEMSPEEILEWEEQQLDEPVNFSDCKIDPAPFQLVERTSLHKTHTIFSLLGVDHAYVTSIGRLIGIVTLKELRKAIEGSVTAQGVKVRPPLASFRDSATSSSDTETTEVHALWGPHSRHGLPREGSPSDSDDKCQ

SEQ ID NO: 808173 - protein, 666 aa, Homo sapiens
MAAAAAEEGMEPRALQYEQTLMYGRYTQDLGAFAKEEAARIRLGGPEPWKGPPSSRAAPELLEYGRSRCARCRVCSVRCHKFLVSRVGEDWIFLVLLGLLMALVSWVMDYAIAACLQAQQWMSRGLNTSILLQYLAWVTYPVVLITFSAGFTQILAPQAVGSGIPEMKTILRGVVLKEYLTLKTFIAKVIGLTCALGSGMPLGKEGPFVHIASMCAALLSKFLSLFGGIYENESRNTEMLAAACAVGVGCCFAAPIGGVLFSIEVTSTFFAVRNYWRGFFAATFSAFIFRVLAVWNRDEETITALFKTRFRLDFPFDLQELPAFAVIGIASGFGGALFVYLNRKIVQVMRKQKTINRFLMRKRLLFPALVTLLISTLTFPPGFGQFMAGQLSQKETLVTLFDNRTWVRQGLVEELEPPSTSQAWNPPRANVFLTLVIFILMKAAFGRLVGESMAAWFPDGIHTDSSTYRIVPGGYAVVGAAALAGAVTHTVSTAVIVFELTGQIAHILPVMIAVILANAVAQSLQPSLYDSIIRIKKLPYLPELGWGRHQQYRVRVEDIMVRDVPHVALSCTFRDLRLALHRTKGRMLALVESPESMILLGSIERSQVVALLGAQLSPARRRQHMQERRATQTSPLSDQEGPPSPEASVCFQTWGASFSQFILPGI

SEQ ID NO: 808174 - protein, 131 aa, Homo sapiens
GKSVRLASSGMTRRDPLTNKVALVTASTELGFSPYNVSKTALLGLNKTLAIELAPRNIRVNCLAPGLIKTSFSRMLWMDKEKEESMKETLRIRRLGEPEDSLGIVSFLCSEDASYLTGETVMVGGGTPSRL

SEQ ID NO: 808175 - protein, 423 aa, Homo sapiens
MASALEQFVNSVRQLSAQGQMTQLCELINKSGELLAKNLSHLDTVLGALDVQEHSLGVLAVLFVKFSMPSVPDFETLFSQVQLFISTCNGEHIRYATDTFAGLCHQLTNALVERKQPLRGIGILKQAIDKMQMNTNQLTSIHADLCQLCLLAKCFKPALPYLDVDMMDICKENGAYDAKHFLCYYYYGGMIYTGLKNFERALYFYEQAITTPAMAVSHIMLESYKKYILVSLILLGKVQQLPKYTSQIVGRFIKPLSNAYHELAQVYSTNNPSELRNLVNKHSETFTRDNNMGLVKQCLSSLYKKNIQRLTKTFLTLSLQDMASRVQLSGPQEAEKYVLHMIEDGEIFASINQKDGMVSFHDNPEKYNNPAMLHNIDQEMLKCIELDERLKAMDQEITVNPQFVQKSMGSQEDDSGNKPSSYS

SEQ ID NO: 808176 - protein, 102 aa, Homo sapiens
MASRVQLSGPQEAEKYVLHMIEDGEIFASINQKDGMVSFHDNPEKYNNPAMLHNIDQEMLKCIELDERLKAMDQEITVNPQFVQKSMGSQEDDSGNKPSSYS

SEQ ID NO: 808177 - protein, 253 aa, Homo sapiens
MPSVPDFETLFSQVQLFISTCNGEHIRYATDTFAGLCHQLTNALVERKQPLRGIGILKQAIDKMQMNTNQLTSIHADLCQLCLLAKCFKPALPYLDVDMMDICKENGAYDAKHFLCYYYYGGMIYTGLKNFERALYFYEQAITTPAMAVSHIMLESYKKYILVSLILLGKVQQLPKYTSQIVGRFIKPLSNAYHELAQVYSTNNPSELRNLVNKHSETFTRDNNMGLVKQCLSSLYKKNIQRLTKVRKVPPSQ

SEQ ID NO: 808178 - protein, 423 aa, Homo sapiens; identical to SEQ ID NO: 808175

SEQ ID NO: 808179 - protein, 423 aa, Homo sapiens; identical to SEQ ID NO: 808175

SEQ ID NO: 808180 - protein, 403 aa, Homo sapiens
MTQLCELINKSGELLAKNLSHLDTVLGALDVQEHSLGVLAVLFVKFSMPSVPDFETLFSQVQLFISTCNGEHIRYATDTFAGLCHQLTNALVERKQPLRGIGILKQAIDKMQMNTNQLTSIHADLCQLCLLAKCFKPALPYLDVDMMDICKENGAYDAKHFLCYYYYGGMIYTGLKNFERALYFYEQAITTPAMAVSHIMLESYKKYILVSLILLGKVQQLPKYTSQIVGRFIKPLSNAYHELAQVYSTNNPSELRNLVNKHSETFTRDNNMGLVKQCLSSLYKKNIQRLTKTFLTLSLQDMASRVQLSGPQEAEKYVLHMIEDGEIFASINQKDGMVSFHDNPEKYNNPAMLHNIDQEMLKCIELDERLKAMDQEITVNPQFVQKSMGSQEDDSGNKPSSYS

SEQ ID NO: 808181 - protein, 403 aa, Homo sapiens; identical to SEQ ID NO: 808180

SEQ ID NO: 808182 - protein, 356 aa, Homo sapiens
MPSVPDFETLFSQVQLFISTCNGEHIRYATDTFAGLCHQLTNALVERKQPLRGIGILKQAIDKMQMNTNQLTSIHADLCQLCLLAKCFKPALPYLDVDMMDICKENGAYDAKHFLCYYYYGGMIYTGLKNFERALYFYEQAITTPAMAVSHIMLESYKKYILVSLILLGKVQQLPKYTSQIVGRFIKPLSNAYHELAQVYSTNNPSELRNLVNKHSETFTRDNNMGLVKQCLSSLYKKNIQRLTKTFLTLSLQDMASRVQLSGPQEAEKYVLHMIEDGEIFASINQKDGMVSFHDNPEKYNNPAMLHNIDQEMLKCIELDERLKAMDQEITVNPQFVQKSMGSQEDDSGNKPSSYS

SEQ ID NO: 808183 - protein, 446 aa, Homo sapiens
MASALEQFVNSVRQLSAQGQMTQLCELINKSGELLAKNLSHLDTVLGALDVQEHSLGVLAVLFVKFSMPSVPDFETLFSQVQLFISTCNGEHIRYATDTFAGLCHQLTNALVERKQGQHKIQCAAIFENLSERDVISGQPLRGIGILKQAIDKMQMNTNQLTSIHADLCQLCLLAKCFKPALPYLDVDMMDICKENGAYDAKHFLCYYYYGGMIYTGLKNFERALYFYEQAITTPAMAVSHIMLESYKKYILVSLILLGKVQQLPKYTSQIVGRFIKPLSNAYHELAQVYSTNNPSELRNLVNKHSETFTRDNNMGLVKQCLSSLYKKNIQRLTKTFLTLSLQDMASRVQLSGPQEAEKYVLHMIEDGEIFASINQKDGMVSFHDNPEKYNNPAMLHNIDQEMLKCIELDERLKAMDQEITVNPQFVQKSMGSQEDDSGNKPSSYS

SEQ ID NO: 808184 - protein, 396 aa, Homo sapiens
MASALEQFVNSVRQLSAQGQMTQLCELINKSGELLAKNLSHLDTVLGALDVQEHSLGVLAVLFVKFSMPSVPDFETLFSQVQLFISTCNGEHIRYATDTFAGLCHQLTNALVERKQPLRGIGILKQAIDKMQMNTNQLTSIHADLCQLCLLAKCFKPALPYLDVDMMDICKENGAYDAKHFLCYYYYGGMIYTGLKNFERALYFYEQAITTPAMAVSHIMLESYKKYILVSLILLGKVQQLPKYTSQIVGRFIKPLSNAYHELAQVYSTNNPSELRNLVNKHSETFTRDNNMGLVKQCLSSLYKKNIQRLTKTFLTLSLQDMASRVQLSGPQEAEKYVLHMIEDGEIFASINQKDGMVSFHDNPEKYNNPAMLHNIDQESMGSQEDDSGNKPSSYS

SEQ ID NO: 808185 - protein, 318 aa, Homo sapiens
MGSTFDMQQTLPLRGIGILKQAIDKMQMNTNQLTSIHADLCQLCLLAKCFKPALPYLDVDMMDICKENGAYDAKHFLCYYYYGGMIYTGLKNFERALYFYEQAITTPAMAVSHIMLESYKKYILVSLILLGKVQQLPKYTSQIVGRFIKPLSNAYHELAQVYSTNNPSELRNLVNKHSETFTRDNNMGLVKQCLSSLYKKNIQRLTKTFLTLSLQDMASRVQLSGPQEAEKYVLHMIEDGEIFASINQKDGMVSFHDNPEKYNNPAMLHNIDQEMLKCIELDERLKAMDQEITVNPQFVQKSMGSQEDDSGNKPSSYS

SEQ ID NO: 808186 - protein, 454 aa, Homo sapiens
MASALEQFVNSVRQLSAQGQMTQLCELINKSGELLAKNLSHLDTVLGALDVQEHSLGVLAVLFVKFSMPSVPDFETLFSQVQLFISTCNGEHIRYATDTFAGLCHQLTNALVERKQPLRGIGILKQAIDKMQMNTNQLTSIHADLCQLCLLAKCFKPALPYLDVDMMDICKENGAYDAKHFLCYYYYGGMIYTGLKNFERALYFYEQAITTPAMAVSHIMLESYKKYILVSLILLGKVQQLPKYTSQIVGRFIKRQSLAMLARLVLNSWPQAVLLRLPPRVLGLQPLSNAYHELAQVYSTNNPSELRNLVNKHSETFTRDNNMGLVKQCLSSLYKKNIQRLTKTFLTLSLQDMASRVQLSGPQEAEKYVLHMIEDGEIFASINQKDGMVSFHDNPEKYNNPAMLHNIDQEMLKCIELDERLKAMDQEITVNPQFVQKSMGSQEDDSGNKPSSYS

SEQ ID NO: 808187 - protein, 365 aa, Homo sapiens
MASALEQFVNSVRQLSAQGQMTQLCELINKSGELLAKNLSHLDTVLGALDVQEHSLGVLAVLFVKFSMPSVPDFETLFSQVQLFISTCNGEHIRYATDTFAGLCHQLTNALVERKQPLRGIGILKQAIDKMQMNTNQLTSIHADLCQLCLLAKCFKPALPYLDVDMMDICKENGAYDAKHFLCYYYYGGMIYTGLKNFERALYFYEQAITTPAMAVSHIMLESYKKYILVSLILLGKVQQLPKYTSQIVGRFIKTFLTLSLQDMASRVQLSGPQEAEKYVLHMIEDGEIFASINQKDGMVSFHDNPEKYNNPAMLHNIDQEMLKCIELDERLKAMDQEITVNPQFVQKSMGSQEDDSGNKPSSYS

SEQ ID NO: 808188 - protein, 363 aa, Homo sapiens
MASALEQFVNSVRQLSAQGQMTQLCELINKSGELLAKNLSHLDTVLGALDVQEHSLGVLAVLFVKFSMPSVPDFETLFSQVQLFISTCNGEHIRYATDTFAGLCHQLTNALVERKQPLRGIGILKQAIDKMQMNTNQLTSIHADLCQAITTPAMAVSHIMLESYKKYILVSLILLGKVQQLPKYTSQIVGRFIKPLSNAYHELAQVYSTNNPSELRNLVNKHSETFTRDNNMGLVKQCLSSLYKKNIQRLTKTFLTLSLQDMASRVQLSGPQEAEKYVLHMIEDGEIFASINQKDGMVSFHDNPEKYNNPAMLHNIDQEMLKCIELDERLKAMDQEITVNPQFVQKSMGSQEDDSGNKPSSYS

SEQ ID NO: 808189 - protein, 132 aa, Homo sapiens
MGLVKQCLSSLYKKNIQRLTKTFLTLSLQDMASRVQLSGPQEAEKYVLHMIEDGEIFASINQKDGMVSFHDNPEKYNNPAMLHNIDQEMLKCIELDERLKAMDQEITVNPQFVQKSMGSQEDDSGNKPSSYS

SEQ ID NO: 808190 - protein, 551 aa, Homo sapiens
MEEELPLFSGDSGKPVQATLSSLKMLDVGKWPIFSLCSEEELQLIRQACVFGSAGNEVLYTTVNDEIFVLGTNCCGCLGLGDVQSTIEPRRLDSLNGKKIACLSYGSGPHIVLATTEGEVFTWGHNAYSQLGNGTTNHGLVPCHISTNLSNKQVIEVACGSYHSLVLTSDGEVFAWGYNNSGQVGSGSTVNQPIPRRVTGCLQNKVVVTIACGQMCCMAVVDTGEVYVWGYNGNGQLGLGNSGNQPTPCRVAALQGIRVQRVACGYAHTLVLTDEGQVYAWGANSYGQLGTGNKSNQSYPTPVTVEKDRIIEIAACHSTHTSAAKTQGGHVYMWGQCRGQSVILPHLTHFSCTDDVFACFATPAVTWRLLSVEPDDHLTVAESLKREFDNPDTADLKFLVDGKYIYAHKVLLKIRCEHFRSSLEDNEDDIVEMSEFSYPVYRAFLEYLYTDSISLSPEEAVGLLDLATFYRENRLKKLCQQTIKQGICEENAIALLSAAVKYDAQDLEEFCFRFCINHLTVVTQTSGFAEMDHDLLKNFISKASRVGAFKN

SEQ ID NO: 808191 - protein, 527 aa, Homo sapiens
MLDVGKWPIFSLCSEEELQLIRQACVFGSAGNEVLYTTVNDEIFVLGTNCCGCLGLGDVQSTIEPRRLDSLNGKKIACLSYGSGPHIVLATTEGEVFTWGHNAYSQLGNGTTNHGLVPCHISTNLSNKQVIEVACGSYHSLVLTSDGEVFAWGYNNSGQVGSGSTVNQPIPRRVTGCLQNKVVVTIACGQMCCMAVVDTGEVYVWGYNGNGQLGLGNSGNQPTPCRVAALQGIRVQRVACGYAHTLVLTDEGQVYAWGANSYGQLGTGNKSNQSYPTPVTVEKDRIIEIAACHSTHTSAAKTQGGHVYMWGQCRGQSVILPHLTHFSCTDDVFACFATPAVTWRLLSVEPDDHLTVAESLKREFDNPDTADLKFLVDGKYIYAHKVLLKIRCEHFRSSLEDNEDDIVEMSEFSYPVYRAFLEYLYTDSISLSPEEAVGLLDLATFYRENRLKKLCQQTIKQGICEENAIALLSAAVKYDAQDLEEFCFRFCINHLTVVTQTSGFAEMDHDLLKNFISKASRVGAFKN

SEQ ID NO: 808192 - protein, 527 aa, Homo sapiens; identical to SEQ ID NO: 808191

SEQ ID NO: 808193 - protein, 309 aa, Homo sapiens
MEEELPLFSGDSGKPVQATLSSLKMLDVGKWPIFSLCSEEELQLIRQACVFGSAGNEVLYTTVNDEIFVLGTNCCGCLGLGDVQSTIEPRRLDSLNGKKIACLSYGSGPHIVLATTEGEVFTWGHNAYSQLGNGTTNHGLVPCHISTNLSNKQVIEVACGSYHSLVLTSDGEVFAWGYNNSGQVGSGSTVNQPIPRRVTGCLQNKVVVTIACGQMCCMAVVDTGEVYVWGYNGNGQLGLGNSGNQPTPCRVAALQGIRVQRVACGYAHTLVLTDEGQVYAWGANSYGQLGTGNKSNQSYPTPVTVEKDR

SEQ ID NO: 808194 - protein, 538 aa, Homo sapiens
MSFSATILFSPPSGSEARCCCCACKSETNGGNTGSQGGNPPPSTPITVTGHGLAVQSSEQLLHVIYQRVDKAVGLAEAALGLARANNELLKRLQEEVGDLRQGKVSIPDEDGESRAHSSPPEEPGPLKESPGEAFKALSAVEEECDSVGSGVQVVIEELRQLGAASVGPGPLGFPATQRDMRLPGCTLAASEAAPLLNPLVDDYVASEGAVQRVLVPAYAKQLSPATQLAIQRATPETGPENGTKLPPPRPEDMLNAAAALDSALEESGPGSTGELRHSLGLTVSPCRTRGSGQKNSRRKRDLVLSKLVHNVHNHITNDKRFNGSESIKSSWNISVVKFLLEKLKQELVTSPHNYTDKELKGACVAYFLTKRREYRNSLNPFKGLKEKEEKKLRSRRYRLFANRSSIMRHFGPEDQRLWNDVTEELMSDEEDSLNEPGVWVARPPRFRAQRLTELCYHLDANSKHGTKANRVYGPPSDRLPSAEAQLLPPELYNPNFQEEEDEGGDENAPGSPSFDQPHKTCCPDLNSFIEIKVEKDE

SEQ ID NO: 808195 - protein, 538 aa, Homo sapiens; identical to SEQ ID NO: 808194

SEQ ID NO: 808196 - protein, 498 aa, Homo sapiens
MSFSATILFSPPSGSEARCCCCACKSETNGGNTGSQGGNPPPSTPITVTGHGLAVQSSEQLLHVIYQRVDKAVGLAEAALGLARANNELLKRLQEEVGDLRQGKVSIPDEDGESRAHSSPPEEPGPLKESPGEAFKALSAVEEECDSVGSGVQVVIEELRQLGAASVGPGPLGFPATQRDMRLPGCTLAASEAAPLLNPLVDDYVASEGAVQRVLVPAYAKQLSPATQLAIQRATPETGPENGTKLPPPRPEDMLNAAAALDSALEESGPGSTGELRHSLGLTVSPCRTRGSGQKNSRRKRDLVLSKLVHNVHNHITNDKRFNGSESIKSSWNISVVKFLLEKLKQELVTSPHNYTDKELKGACVAYFLTKRREYRNSLNPFKGLKEKEEKKLRSRRYRLFANRSSIMRHFGPEDQRLWNDVTEELMSDEEDSLNEPDRLPSAEAQLLPPELYNPNFQEEEDEGGDENAPGSPSFDQPHKTCCPDLNSFIEIKVEKDE

SEQ ID NO: 808197 - protein, 538 aa, Homo sapiens; identical to SEQ ID NO: 808194

SEQ ID NO: 808198 - protein, 358 aa, Homo sapiens
MRLPGCTLAASEAAPLLNPLVDDYVASEGAVQRVLVPAYAKQLSPATQLAIQRATPETGPENGTKLPPPRPEDMLNAAAALDSALEESGPGSTGELRHSLGLTVSPCRTRGSGQKNSRRKRDLVLSKLVHNVHNHITNDKRFNGSESIKSSWNISVVKFLLEKLKQELVTSPHNYTDKELKGACVAYFLTKRREYRNSLNPFKGLKEKEEKKLRSRRYRLFANRSSIMRHFGPEDQRLWNDVTEELMSDEEDSLNEPGVWVARPPRFRAQRLTELCYHLDANSKHGTKANRVYGPPSDRLPSAEAQLLPPELYNPNFQEEEDEGGDENAPGSPSFDQPHKTCCPDLNSFIEIKVEKDE

SEQ ID NO: 808199 - protein, 520 aa, Homo sapiens
MSFSATILFSPPSGSEARCCCCACKSETNGGNTGSQGGNPPPSTPITVTGHGLAVQSSEQLLHVIYQRVDKAVGLAEAALGLARANNELLKRLQEEVGDLRQGKVSIPDEDGESRAHSSPPEEPGPLKESPGEAFKALSAVEEECDSVGSGVQVVIEELRQLGAASVGPGPLGFPATQRDMRLPGCTLAASEAAPLLNPLVDDYVASEGAVQRVLVPAYAKQLSPATQLAIQRATPETGPAALDSALEESGPGSTGELRHSLGLTVSPCRTRGSGQKNSRRKRDLVLSKLVHNVHNHITNDKRFNGSESIKSSWNISVVKFLLEKLKQELVTSPHNYTDKELKGACVAYFLTKRREYRNSLNPFKGLKEKEEKKLRSRRYRLFANRSSIMRHFGPEDQRLWNDVTEELMSDEEDSLNEPGVWVARPPRFRAQRLTELCYHLDANSKHGTKANRVYGPPSDRLPSAEAQLLPPELYNPNFQEEEDEGGDENAPGSPSFDQPHKTCCPDLNSFIEIKVEKDE

SEQ ID NO: 808200 - protein, 538 aa, Homo sapiens; identical to SEQ ID NO: 808194

SEQ ID NO: 808201 - protein, 358 aa, Homo sapiens; identical to SEQ ID NO: 808198

SEQ ID NO: 808202 - protein, 198 aa, Homo sapiens
PNLRLGDSCLGSQIEPSQCCTGTLGWPWGAQEMRKHLAPSKRSARKNGVQIRVESAGCGKMACECGGGQYPEGPVRPRFPGALSPFVASAALELEGERSLQEEQEVEQRKQPVPRLLLHLGHSPDPDQRVQQEQQPSGQGVKEDQSLHAGRSTLPTSPCLRPQDPAGRARSPPVSRNMTSTETCCCLWSLLTLSARCR

SEQ ID NO: 808203 - protein, 145 aa, Homo sapiens
VFGDLQKPGHGGPAQGPPCLSPQAPRRQRLTGKELPGLVGAAEVHGPLQHPEVRPGQGPWTAVLEGLVAAQMVTGREARAGGLPSVSDLVAAPRATPAALAMTRSERRPLASGPPFPLHAPLSSAASADLSAATWFCAERKKKVF

SEQ ID NO: 808204 - protein, 670 aa, Homo sapiens
EAERRSGSAARAVSVPRVRVATMEVKGKKQFTGKSTKTAQEKNRFHKNSDSGSSKTFPTRKVAKEGGPKVTSRNFEKSITKLGKKGVKQFKNKQQGDKSPKNKFQPANKFNKKRKFQPDGRSDESAAKKPKWDDFKKKKKELKQSRQLSDKTNYDIVVRAKQMWEILRRKDCDKEKRVKLMSDLQKLIQGKIKTIAFAHDSTRVIQCYIQYGNEEQRKQAFEELRDDLVELSKAKYSRNIVKKFLMYGSKPQIAEIIRSFKGHVRKMLRHAEASAIVEYAYNDKAILEQRNMLTEELYGNTFQLYKSADHRTLDKVLEVQPEKLELIMDEMKQILTPMAQKEAVIKHSLVHKVFLDFFTYAPPKLRSEMIEAIREAVVYLAHTHDGARVAMHCLWHGTPKDRKVIVKTMKTYVEKVANGQYSHLVLLAAFDCIDDTKLVKQIIISEIISSLPSIVNDKYGRKVLLYLLSPRDPAHTVREIIEVLQKGDGNAHSKKDTEVRRRELLESISPALLSYLQEHAQEVVLDKSACVLVSDILGSATGDVQPTMNAIASLAATGLHPGGKDGELHIAEHPAGHLVLKWLIEQDKKMKENGREGCFAKTLVEHVGMKNLKSWASVNRGAIILSSLLQSCDLEVANKVKAALKSLIPTLEKTKSTSKGIEILLEKLST

SEQ ID NO: 808205 - protein, 670 aa, Homo sapiens; identical to SEQ ID NO: 808204

SEQ ID NO: 808206 - protein, 654 aa, Homo sapiens
EAERRSGSAARAVSVPRVRVATMEVKGKKQFTGKSTKTAQEKNRFHKNSDSGSSKTFPTRKVAKEGGPKVTSRNFEKSITKLGKKGVKQFKNKQQGDKSPKNKFQPANKFNKKRKFQPDGRSDESAAKKPKWDDFKKKKKELKQSRQLSDKTNYDIVVRAKQMWEILRRKDCDKEKRVKLMSDLQKLIQGKIKTIAFAHDSTRVIQCYIQYGNEEQRKQAFEELRDDLVELSKAKYSRNIVKKFLMYGSKPQIAEIIRSFKGHVRKMLRHAEASAIVEYAYNDKAILEQRNMLTEELYGNTFQLYKSADHRTLDKVLEVQPEKLELIMDEMKQILTPMAQKEAVIKHSLVHKVFLDFFTYAPPKLRSEMIEAIREAVVYLAHTHDGARVAMHCLWHGTPKDRKVIVKTMKTYVEKVANGQYSHLVLLAAFDCIDDTKLVKQIIISEIISSLPSIVNDKYGRKVLLYLLSPRDPAHTVREIIEVLQKGDGNAHSKKDTEVRRRELLESISPALLSYLQEHAQEVVLDKSACVLVSDILGSATGDVQPTMNAIASLAATGLHPGGKDGELHIAEHPAGHLVLKWLIEQDKKMKENGREGCFAKTLVEHVGMKNLKSWASVNRGAIILSSLLQSCDLEVVNKDTTHTCTHSTHTRTQ

SEQ ID NO: 808207 - protein, 341 aa, Homo sapiens
EAERRSGSAARAVSVPRVRVATMEVKGKKQFTGKSTKTAQEKNRFHKNSDSGSSKTFPTRKVAKEGGPKVTSRNFEKSITKLGKKGVKQFKNKQQGDKSPKNKFQPANKFNKKRKFQPDGRSDESAAKKPKWDDFKKKKKELKQSRQLSDKTNYDIVVRAKQMWEILRRKDCDKEKRVKLMSDLQKLIQGKIKTIAFAHDSTRVIQCYIQYGNEEQRKQAFEELRDDLVELSKAKYSRNIVKKFLMYGSKPQIAEIIRSFKGHVRKMLRHAEASAIVEYAYNDKAILEQRNMLTEELYGNTFQLYKSADHRTLDKVLEVQPEKLELIMDEMKQILTPMAQK

SEQ ID NO: 808208 - protein, 275 aa, Homo sapiens
MPKVFLVKRRSLGVSVRSWDELPDEKRADTYIPVGLGRLLHDPPEDCRSDGGSSSGSGSSSAGEPGGAESSSSPHAPESETPEPGDAEGPDGHLATKQRPVARSKIKFTTGTCSDSVVHSCDLCGKGFRLQRMLNRHLKCHNQVKRHLCTFCGKGFNDTFDLKRHVRTHTGIRPYKCNVCNKAFTQRCSLESHLKKIHGVQQQYAYKQRRDKLYVCEDCGYTGPTQEDLYLHVNSAHPGSSFLKKTSKKLAALLQGKLTSAHQENTSLSEEEERK

SEQ ID NO: 808209 - protein, 275 aa, Homo sapiens; identical to SEQ ID NO: 808208

SEQ ID NO: 808210 - protein, 295 aa, Homo sapiens
SRASLTRRAPAAPGSWHTSDDLLEEGDRSDTRGCAGCPGRTRTRPWEGQRAPQLGLGRLLHDPPEDCRSDGGSSSGSGSSSAGEPGGAESSSSPHAPESETPEPGDAEGPDGHLATKQRPVARSKIKFTTGTCSDSVVHSCDLCGKGFRLQRMLNRHLKCHNQVKRHLCTFCGKGFNDTFDLKRHVRTHTGIRPYKCNVCNKAFTQRCSLESHLKKIHGVQQQYAYKQRRDKLYVCEDCGYTGPTQEDLYLHVNSAHPGSSFLKKTSKKLAALLQGKLTSAHQENTSLSEEEERK

SEQ ID NO: 808211 - protein, 53 aa, Homo sapiens
MTCTNVGIAISPAGKSVLPVGSPPWLELQFPTSLLRSVSVDLNVDPSLQIDIP

SEQ ID NO: 808212 - protein, 170 aa, Homo sapiens
MKFTTGTCSDSVVHSCDLCGKGFRLQRMLNRHLKCHNQVKRHLCTFCGKGFNDTFDLKRHVRTHTGIRPYKCNVCNKAFTQRCSLESHLKKIHGVQQQYAYKQRRDKLYVCEDCGYTGPTQEDLYLHVNSAHPGSSFLKKTSKKLAALLQGKLTSAHQENTSLSEEEERK

SEQ ID NO: 808213 - protein, 157 aa, Homo sapiens
MKCIPYSVLLKDLEMRNLRELEDLIIEAVYTDIIQGKLDQRNQLLEVDFCIGRDIRKKDINNIVKTLHEWCDGCEAVLLGIEQQVLRANQYKENHNRTQQQVEAEVTNIKKTLKATASSSAQEMEQQLAERECPPHAEQRQPTKKMSKVKGLVSSRH

SEQ ID NO: 808214 - protein, 116 aa, Homo sapiens
MKCIPYSVLLKDLEMRNLRELEDLIIEAVYTDIIQGKLDQRNQLLEVDFCIGRDIRKKDINNIVKTLHEWCDGCEAVLLGIEQQVLRANQYKENHNRTQQQVEAEVTNIRMVTLVP

SEQ ID NO: 808215 - protein, 264 aa, Homo sapiens
MAGEQKPSSNLLEQFILLAKGTSGSALTALISQVLEAPGVYVFGELLELANVQELAEGANAAYLQLLNLFAYGTYPDYIANKESLPELSTAQQNKLKHLTIVSLASRMKCIPYSVLLKDLEMRNLRELEDLIIEAVYTDIIQGKLDQRNQLLEVDFCIGRDIRKKDINNIVKTLHEWCDGCEAVLLGIEQQVLRANQYKENHNRTQQQVEAEVTNIKKTLKATASSSAQEMEQQLAERECPPHAEQRQPTKKMSKVKGLVSSRH

SEQ ID NO: 808216 - protein, 264 aa, Homo sapiens; identical to SEQ ID NO: 808215

SEQ ID NO: 808217 - protein, 308 aa, Homo sapiens
MAGEQKPSSNLLEQFILLAKGTSGSALTALISQVLEAPGVYVFGELLELANVQELAEGANAAYLQLLNLFAYGTYPDYIANKESLPELSTAQQNKLKHLTIVSLASRMKCIPYSVLLKDLEMRNLRELEDLIIEAVYTDIIQGKLDQRNQLLEVDFCIGRDIRKKDINNIVKTLHEWCDGCEAVLLGIEQQVLRANQYKENHNRTQQQVEAEVTNIKKTLKATASSSAQEMEQQLAERECPPHAEQRQPTKKMSKVKGPSCPLELPANACSPKIFNSSWLHLGRDGGIDAPLSAEGPVAASVFSPLLG

SEQ ID NO: 808218 - protein, 264 aa, Homo sapiens; identical to SEQ ID NO: 808215

SEQ ID NO: 808219 - protein, 118 aa, Homo sapiens
AWYHSPHDGTRAGEECPLLTRGGASFTIIPGGWLKLPPAYNQPDKMTWSKRKTGRETRYHSPHDGAVISSQASRCAAFPLLPHPLLAAPVQAVEGRDAGLCLLNPRVFSLLSPAPISN

SEQ ID NO: 808220 - protein, 264 aa, Homo sapiens; identical to SEQ ID NO: 808215

SEQ ID NO: 808221 - protein, 264 aa, Homo sapiens; identical to SEQ ID NO: 808215

SEQ ID NO: 808222 - protein, 157 aa, Homo sapiens; identical to SEQ ID NO: 808213

SEQ ID NO: 808223 - protein, 209 aa, Homo sapiens
MAGEQKPSSNLLEQFILLAKGTSGSALTALISQVLEAPGVYVFGELLELANVQECIPYSVLLKDLEMRNLRELEDLIIEAVYTDIIQGKLDQRNQLLEVDFCIGRDIRKKDINNIVKTLHEWCDGCEAVLLGIEQQVLRANQYKENHNRTQQQVEAEVTNIKKTLKATASSSAQEMEQQLAERECPPHAEQRQPTKKMSKVKGLVSSRH

SEQ ID NO: 808224 - protein, 106 aa, Homo sapiens
MQFIKVDLVICHPTAYGPCKPVWKPIFYNLQESTESDVFGSNIFSRVPMDYGIRQHRACFPAVSSAPRNFLKEAGRVNEVPPGVLQFLLPTGQGESGGSLSVDAVT

SEQ ID NO: 808225 - protein, 152 aa, Homo sapiens [sequence omitted]

SEQ ID NO: 808226 - protein, 144 aa, Homo sapiens [sequence omitted]

SEQ ID NO: 808227 - protein, 535 aa, Homo sapiens
MGRGFLGFPSLAGSAPRRILYLGDTPKAGARADGEDLTTLSDPLGKEGRRRDPGPAPPCRLVPGAKTQRARRPPGARPCPLPSAGQPAQLRRAGGAAGMARVAWGLLWLLLGSAGAQYEKYSFRGFPPEDLMPLAAAYGHALEQYEGESWRESARYLEAALRLHRLLRDSEAFCHANCSGPAPAAKPDPDGGRADEWACELRLFGRVLERAACLRRCKRTLPAFQVPYPPRQLLRDFQSRLPYQYLHYALFKANRLEKAVAAAYTFLQRNPKHELTAKYLNYYQGMLDVADESLTDLEAQPYEAVFLRAVKLYNSGDFRSSTEDMERALSEYLAVFARCLAGCEGAHEQVDFKDFYPAIADLFAESLQCKVDCEANLTPNVGGYFVDKFVATMYHYLQFAYYKLNDVRQAARSAASYMLFDPKDSVMQQNLVYYRFHRARWGLEEEDFQPREEAMLYHNQTAELRELLEFTHMYLQSDDEMELEETEPPLEPEDALSDAEFEGEGDYEEGMYADWWQEPDAKGDEAEAEPEPELA

SEQ ID NO: 808228 - protein, 437 aa, Homo sapiens
MARVAWGLLWLLLGSAGAQYEKYSFRGFPPEDLMPLAAAYGHALEQYEGESWRESARYLEAALRLHRLLRDSEAFCHANCSGPAPAAKPDPDGGRADEWACELRLFGRVLERAACLRRCKRTLPAFQVPYPPRQLLRDFQSRLPYQYLHYALFKANRLEKAVAAAYTFLQRNPKHELTAKYLNYYQGMLDVADESLTDLEAQPYEAVFLRAVKLYNSGDFRSSTEDMERALSEYLAVFARCLAGCEGAHEQVDFKDFYPAIADLFAESLQCKVDCEANLTPNVGGYFVDKFVATMYHYLQFAYYKLNDVRQAARSAASYMLFDPKDSVMQQNLVYYRFHRARWGLEEEDFQPREEAMLYHNQTAELRELLEFTHMYLQSDDEMELEETEPPLEPEDALSDAEFEGEGDYEEGMYADWWQEPDAKGDEAEAEPEPELA

SEQ ID NO: 808229 - protein, 535 aa, Homo sapiens; identical to SEQ ID NO: 808227

SEQ ID NO: 808230 - protein, 419 aa, Homo sapiens
MGRGFLGFPSLAGSAPRRILYLGDTPKAGARADGEDLTTLSDPLGKEGRRRDPGPAPPCRLVPGAKTQRARRPPGARPCPLPSAGQPAQLRRAGGAAGMARVAWGLLWLLLGSAGAQYEKYSFRGFPPEDLMPLAAAYGHALEQYEGESWRESARYLEAALRLHRLLRDSEAFCHANCSGPAPAAKPDPDGGRADEWACELRLFGRVLERAACLRRCKRTLPAFQVPYPPRQLLRDFQSRLPYQYLHYALFKANRLEKAVAAAYTFLQRNPKHELTAKYLNYYQGMLDVADESLTDLEAQPYEAVFLRAVKLYNSGDFRSSTEDMERALSEYLAVFARCLAGCEGAHEQVDFKDFYPAIADLFAESLQCKVDCEANLTPNVGGYFVDKFVATMYHYLQFAYYKSMAPPSPAWAAARTIY

SEQ ID NO: 808231 - protein, 537 aa, Homo sapiens
MGRGFLGFPSLAGSAPRRILYLGDTPKAGARADGEDLTTLSDPLGKEGRRRDPGPAPPCRLVPGAKTQRARRPPGARPCPLPSAGQPAQLRRAGGAAGMARVAWGLLWLLLGSAGAQYEKYSFRGFPPEDLMPLAAAYGHALEQYEGESWRESARYLEAALRLHRLLRDSEAFCHANCSGPAPAAKPDPDGGRADEWACELRLFGRVLERAACLRRCKRTLPAFQVPYPPRQLLRDFQSRLPYQYLHYALFKANRLEKAVAAAYTFLQRNPKHELTAKYLNYYQGMLDVADESLTDLEAQPYEVGWRVRRRLVEEELVEEGRCWGRPDSPCHAAFQAVFLRAVKLYNSGDFRSSTEDMERALSEYLAVFARCLAGCEGAHEQVDFKDFYPAIAGICHPDHGGRSSHPQGPVRQMSPSCTWSTANAEEPAGRKALSVEKDAGCRGPSGSVQGAGSEAMLYHNQTAELRELLEFTHMYLQSDDEMELEETEPPLEPEDALSDAEFEGEGDYEEGMYADWWQEPDAKGDEAEAEPEPELA

SEQ ID NO: 808232 - protein, 316 aa, Homo sapiens
MGRGFLGFPSLAGSAPRRILYLGDTPKAGARADGEDLTTLSDPLGKEGRRRDPGPAPPCRLVPGAKTQRARRPPGARPCPLPSAGQPAQLRRAGGAAGMARVAWGLLWLLLGSAGAQYEKYSFRGFPPEDLMPLAAAYGHALEQYEGESWRESARYLEAALRLHRLLRDSEAFCHANCSGPAPAAKPDPDGGRADEWACELRLFGRVLERAACLRRCKRTLPAFQVPYPPRQLLRDFQSRLPYQYLHYALFKANRLEKAVAAAYTFLQRNPKHELTAKYLNYYQGMLDVADESLTDLEAQPYEVGWRVRRRLVEEG

SEQ ID NO: 808233 - protein, 118 aa, Homo sapiens
GRADEWACELRLFGRVLERAACLRRCKRTLPAFQVPYPPRQLLRDFQSRLPYQYLHYALFKRWEPAPTRGPVSGWASWLPTDRSKERYLHPRHEARRALGAASSGLADPLPHPLPPDQ

SEQ ID NO: 808234 - protein, 97 aa, Homo sapiens
RALSEYLAVFARCLAGCEGAHEQVDFKDFYPAIAGICHPDHGGRSSHPQGPVRQMSPSCTWSTANAEEPAGRKALSVEKDAGCRGPSWECPRGWISE

SEQ ID NO: 808235 - protein, 524 aa, Homo sapiens
MNLASFAGTSNSSPLQAGARADGEDLTTLSDPLGKEGRRRDPGPAPPCRLVPGAKTQRARRPPGARPCPLPSAGQPAQLRRAGGAAGMARVAWGLLWLLLGSAGAQYEKYSFRGFPPEDLMPLAAAYGHALEQYEGESWRESARYLEAALRLHRLLRDSEAFCHANCSGPAPAAKPDPDGGRADEWACELRLFGRVLERAACLRRCKRTLPAFQVPYPPRQLLRDFQSRLPYQYLHYALFKANRLEKAVAAAYTFLQRNPKHELTAKYLNYYQGMLDVADESLTDLEAQPYEAVFLRAVKLYNSGDFRSSTEDMERALSEYLAVFARCLAGCEGAHEQVDFKDFYPAIADLFAESLQCKVDCEANLTPNVGGYFVDKFVATMYHYLQFAYYKLNDVRQAARSAASYMLFDPKDSVMQQNLVYYRFHRARWGLEEEDFQPREEAMLYHNQTAELRELLEFTHMYLQSDDEMELEETEPPLEPEDALSDAEFEGEGDYEEGMYADWWQEPDAKGDEAEAEPEPELA

SEQ ID NO: 808236 - protein, 437 aa, Homo sapiens; identical to SEQ ID NO: 808228

SEQ ID NO: 808237 - protein, 504 aa, Homo sapiens
MGRGFLGFPSLAGSAPRRILYLGDTPKAGARADGEDLTTLSDPLGKEGRRRDPGPAPPCRLVPGAKTQRARRPPGARPCPLPSAGQPAQLRRAGGAAGMARVAWGLLWLLLGSAGAQYEKYSFRGFPPEDLMPLAAAYGHALEQYEGESWRESARYLEAALRLHRLLRDSEAFCHANCSGPAPAAKPDPDGGRADEWACELRLFGRVLERAACLRRCKRTLPAFQVPYPPRQLLRDFQSRLPYQYLHYALFKANRLEKAVAAAYTFLQRNPKHELTAKYLNYYQGMLDVADESLTDLEAQPYEAVFLRAVKLYNSGDFRSSTEDMERALSEYLAVFARCLAGCEGAHEQVDFKDFYPAIAGICHPDHGGRSSHPQGPVRQMSPSCTWSTANAEEPAGRKALSVEKDAGCRGPSWECPRAGSEAMLYHNQTAELRELLEFTHMYLQSDDEMELEETEPPLEPEDALSDAEFEGEGDYEEGMYADWWQEPDAKGDEAEAEPEPELA

SEQ ID NO: 808238 - protein, 281 aa, Homo sapiens
MGRGFLGFPSLAGSAPRRILYLGDTPKAGARADGEDLTTLSDPLGKEGRRRDPGPAPPCRLVPGAKTQRARRPPGARPCPLPSAGQPAQLRRAGGAAGMARVAWGLLWLLLGSAGAQYEKYSFRGFPPEDLMPLAAAYGHALEQYEGESWRESARYLEAALRLHRLLRDSEAFCHANCSGPAPAAKPDPDGGRADEWACELRLFGRVLERAACLRRCKRTLPAFQVPYPPRQLLRDFQSRLPYQYLHYALFKANRLEKAVAAAYTFLQRNPKHELTAKYLN

SEQ ID NO: 808239 - protein, 252 aa, Homo sapiens
MGRGFLGFPSLAGSAPRRILYLGDTPKAGARADGEDLTTLSDPLGKEGRRRDPGPAPPCRLVPGAKTQRARRPPGARPCPLPSAGQPAQLRRAGGAAGMARVAWGLLWLLLGSAGAQYEKYSFRGFPPEDLMPLAAAYGHALEQYEGESWRESARYLEAALRLHRLLRDSEAFCHANCSGPAPAAKPDPDGGRADEWACELRLFGRVLERAACLRRCKRTLPAFQVPYPPRQLLRDFQSRLPYQYLHYALFK

SEQ ID NO: 808240 - protein, 62 aa, Homo sapiens
MLYHNQTAELRELLEFTHMYLQSDDEVSASCFPGLGCDGDTLDLFLGPPVCQNSAPAPGGQL

SEQ ID NO: 808241 - protein, 159 aa, Homo sapiens
MRTFRSEPSKFARSILAMWPQSVQKRYLRHNSAIIIKAWEDSTQRLREHRGPTNTIFPPSPSSLDLSSAGHKLYPFLGKTAMARGSSRLLLISTLRQEPSSLDASMVFRPVSVQYRFLATQSTASPSVVFSPRPITVSMLLPFRSARLGESPVLDEQPD

SEQ ID NO: 808242 - protein, 215 aa, Homo sapiens
MDRSNPVKPALDYFSNRLVNYQISVKCSNQFKLEVCLLNAENKVVDNQAGTQGQLKVLGANLWWPYLMHEHPAYLYSGRMVIAHTKALDPSQPVTFGTNSTYAADKGALYVDVIRVNSYYSWYRNYGHLELIRLQLAAQFENWCETSQSHYSERVWSGNACRVSPGLVNYQISVKCSNQFKLEVCLLNAENKVVDNQAGTQGQLKVLVPTSGGRT

SEQ ID NO: 808243 - protein, 99 aa, Homo sapiens
  misc_feature (27)..(27): Xaa can be any naturally occurring amino acid
RLRDPLRTVIPSAQTFLIHQQKTVDGXTMSLGNTSFQLALLHIQNMDGFVLGDSNELWGKGAQVMVLLTAPFHHIAGCLPQYSLCSSSEKATARQALRW

SEQ ID NO: 808244 - protein, 106 aa, Homo sapiens
MITLNPHSAAMSQILYRQQDGSQEATGLMIGCLVYPDGWDSSEVRRMCGEQTGKYTLGHCTIRWAFMLAILSIGDALILSFLAFVLGYRQDKLLPDDYKADGTEEV

SEQ ID NO: 808245 - protein, 129 aa, Homo sapiens
SAPRGPGTLGCPLCPKAFPLQRMLTRHLKCHSPVRRHLCRCCGKGFHDAFDLKRHMRTHTGIRPFRCSACGKAFTQRCSLEAHLAKVHGQPASYAYRERREKLHVCEDCGFTSSRPDTYAQHRALHRAA

SEQ ID NO: 808246 - protein, 129 aa, Homo sapiens
DLTPEQVRTQNSLASPDSHMQYVQAPDTSVALVLQSLHKAENSSGRKGLPKLGALGPGRRVWSSDPPSLLLPPGNPTVMTLIVSHNNLGIPWDSGAAKLFHPLVASAVLITNSSTNRSPTDRPPDRPPA

SEQ ID NO: 808247 - protein, 172 aa, Homo sapiens
DLTPEQVRTQNSLASPDSHMQYVQAPDTSVALVLQSLHKAENSSGRKGLPKLGALGPGRRVWSSDPPSLLLPPGNPTVMTLIVSHNNLGIPWDSGAAKLFHPLVASAVLITSLTIPQAHPQWACGIHISYSYFKPQYPAKCLLSTQNSIPSAGCGGSCLNPSTLGGQDGRIA

SEQ ID NO: 808248 - protein, 128 aa, Homo sapiens
SYYPSKAMILKITITIPAGWAVQGPTGPTAGADHTGRPGPGPERWRHPPGRRQTLQRQEKVSPEGSGRLPCPVSPLHICLDLTGLPFPWKADLLGTRHILEQGIGKLFLKGPESQYFRLCKPIPPHLG

SEQ ID NO: 808249 - protein, 182 aa, Homo sapiens
MPSGEERRDRQKGRRAGCDTSSTPSNTAPRIPEPGAHPTAARPATAQPPRSLLPPVCSKTIALPASAAAASGSDTAGMRGLGKAPHSGEGHERGRGNSKMKACNNYQYGYLAKPDTSFWIKCRRWLLADAGRHTQRPFWTFRVSHSPLLEAEAGRPSDVSQLQLGSDLKPKMRRPAGELFSP

SEQ ID NO: 808250 - protein, 236 aa, Homo sapiens
GTEAVSVGGQGTLRFYCVILPPSWPDAMGVTCVSQMPVAEGKSVQQTVELLTRKLEMLGAEKQGTFCVDCETYHTAASTLGSQGQTGKLMYVMHNSEYPLSCFALFENGPCLIADTNFDVLMVKLKGFFQSAKASKIETRGTRYQYCDFLVKVGTVTMGPVPGISVEVEYGPCVVASDCWSLLLEFLQSFLGSHTPGAPAVFGNRHDAVYGPADTMVQYMELFNKIRKQQQVAGIR

SEQ ID NO: 808251 - protein, 102 aa, Homo sapiens
MQRYNFHYLKYIVHFYRTCDYSRMIRMVLAYGELLLLTVSAEILFQWTNIVAWQQMPTFCGIAANLQETLVGFSFCFLCFFPLLLNQQGWKEGREVMNYSFQ

SEQ ID NO: 808252 - protein, 101 aa, Homo sapiens
VTPEDYLALPIVHFYRTCDYSRMIRMVLAYGELLLLTVSAEILFQWTNIVAWQQMPTFCGIAANLQETLVGFSFCFLCFFPLLLNQQGWKEGREVMNYSFQ

SEQ ID NO: 808253 - protein, 102 aa, Homo sapiens; identical to SEQ ID NO: 808251

SEQ ID NO: 808254 - protein, 168 aa, Homo sapiens
MQMIIIWALLDTEAESSAKGVHSFYNNISGLTDFGEKVVAEMNRLGMMVDLSHVSDAVARRALEVSQAPVIFSHSAARGVCNSARNVPDDILQLLKKNGGVVMVSLSMGVIQCNPSANVSTVADHFDHIKAVIGSKFIGIGGDYDGAGKYRKKTNGKAPWRTSSRMSS

SEQ ID NO: 808255 - protein, 82 aa, Homo sapiens
CLSVSGIGGFLVSLSSRMKLQTLAVSVTALKFWSAYVPCQTQDRDALRLTLEQIDLIRRMCASYSELELVTSAKGRQVDGKR

SEQ ID NO: 808256 - protein, 486 aa, Homo sapiens
MQPSGLEGPGTFGRWPLLSLLLLLLLLQPVTCAYTTPGPPRALTTLGAPRAHTMPGTYAPSTTLSSPSTQGLQEQARALMRDFPLVDGHNDLPLVLRQVYQKGLQDVNLRNFSYGQTSLDRLRDGLVGAQFWSAYVPCQTQDRDALRLTLEQIDLIRRMCASYSELELVTSAKALNDTQKLACLIGVEGGHSLDNSLSILRTFYMLGVRYLTLTHTCNTPWAESSAKGVHSFYNNISGLTDFGEKVVAEMNRLGMMVDLSHVSDAVARRALEVSQAPVIFSHSAARGVCNSARNVPDDILQLLKKNGGVVMVSLSMGVIQCNPSANVSTVADHFDHIKAVIGSKFIGIGGDYDGAGKFPQGLEDVSTYPVLIEELLSRGWSEEELQGVLRGNLLRVFRQVEKVQEENKWQSPLEDKFPDEQLSSSCHSDLSRLRQRQSLTSGQELTEIPIHWTAKLPAKWSVSESSPHMAPVLAVVATFPVLILWL

SEQ ID NO: 808257 - protein, 486 aa, Homo sapiens; identical to SEQ ID NO: 808256

SEQ ID NO: 808258 - protein, 486 aa, Homo sapiens; identical to SEQ ID NO: 808256

SEQ ID NO: 808259 - protein, 486 aa, Homo sapiens; identical to SEQ ID NO: 808256

SEQ ID NO: 808260 - protein, 398 aa, Homo sapiens
MQPSGLEGPGTFGRWPLLSLLLLLLLLQPVTCAYTTPGPPRAFWSAYVPCQTQDRDALRLTLEQIDLIRRMCASYSELELVTSAKALNDTQKLACLIGVEGGHSLDNSLSILRTFYMLGVRYLTLTHTCNTPWAESSAKGVHSFYNNISGLTDFGEKVVAEMNRLGMMVDLSHVSDAVARRALEVSQAPVIFSHSAARGVCNSARNVPDDILQLLKKNGGVVMVSLSMGVIQCNPSANVSTVADHFDHIKAVIGSKFIGIGGDYDGAGKFPQGLEDVSTYPVLIEELLSRGWSEEELQGVLRGNLLRVFRQVEKVQEENKWQSPLEDKFPDEQLSSSCHSDLSRLRQRQSLTSGQELTEIPIHWTAKLPAKWSVSESSPHMAPVLAVVATFPVLILWL

SEQ ID NO: 808261 - protein, 499 aa, Homo sapiens
MQPSGLEGPGTFGRWPLLSLLLLLLLLQPVTCAYTTPGPPRALTTLGAPRAHTMPGTYAPSTTLSSPSTQGLQEQARALMRDFPLVDGHNDLPLVLRQVYQKGLQDVNLRNFSYGQTSLDRLRDGLVGAQFWSAYVPCQTQDRDALRLTLEQIDLIRRMCASYSELELVTSAKALNDTQKLACLIGVEGGHSLDNSLSILRTFYMLGVRYLTLTHTCNTPWAESSAKGVHSFYNNISGLTDFGEKVVAEMNRLGMMVDLSHVSDAVARRALEVSQAPVIFSHSAARGVCNSARNVPDDILQLLKKNGGVVMVSLSMGVIQCNPSANVSTVADHFDHIKAVIGSKFIGIGGDYDGAGKESGLKPTSWWPHRFPQGLEDVSTYPVLIEELLSRGWSEEELQGVLRGNLLRVFRQVEKVQEENKWQSPLEDKFPDEQLSSSCHSDLSRLRQRQSLTSGQELTEIPIHWTAKLPAKWSVSESSPHMAPVLAVVATFPVLILWL

SEQ ID NO: 808262 - protein, 276 aa, Homo sapiens
MIIIWALLDTEAESSAKGVHSFYNNISGLTDFGEKVVAEMNRLGMMVDLSHVSDAVARRALEVSQAPVIFSHSAARGVCNSARNVPDDILQLLKKNGGVVMVSLSMGVIQCNPSANVSTVADHFDHIKAVIGSKFIGIGGDYDGAGKFPQGLEDVSTYPVLIEELLSRGWSEEELQGVLRGNLLRVFRQVEKVQEENKWQSPLEDKFPDEQLSSSCHSDLSRLRQRQSLTSGQELTEIPIHWTAKLPAKWSVSESSPHMAPVLAVVATFPVLILWL

SEQ ID NO: 808263 - protein, 376 aa, Homo sapiens
MQPSGLEGPGTFGRWPLLSLLLLLLLLQPVTCAYTTPGPPRALTTLGAPRAHTMPGTYAPSTTLSSPSTQGLQEQARALMRDFPLVDGHNDLPLVLRQVYQKGLQDVNLRNFSYGQTSLDRLRDGLVGAQFWSAYVPCQTQDRDALRLTLEQIDLIRRMCASYSELELVTSAKALNDTQKLACLIGVEGGHSLDNSLSILRTFYMLGVRYLTLTHTCNTPWAESSAKGVHSFYNNISGLTDFGEKVVAEMNRLGMMVDLSHVSDAVARRALEVSQAPVIFSHSAARGVCNSARNVPDDILQLLKKNGGVVMVSLSMGVIQCNPSANVSTVADHFDHIKAVIGSKFIGIGGDYDGAGKYRKKTNGKAPWRTSSRMSS

SEQ ID NO: 808264 - protein, 370 aa, Homo sapiens
MQPSGLEGPGTFGRWPLLSLLLLLLLLQPVTCAYTTPGPPRALTTLGAPRAHTMPGTYAPSTTLSSPSTQGLQEQARALMRDFPLVDGHNDLPLVLRQVYQKGLQDVNLRNFSYGQTSLDRLRDGLVGAQFWSAYVPCQTQDRDALRLTLEQIDLIRRMCASYSELELVTSAKALNDTQKLACLIGVEGGHSLDNSLSILRTFYMLGVRYLTLTHTCNTPWAESSAKGVHSFYNNISGLTDFGEKVVAEMNRLGMMVDLSHVSDAVARRALEVSQAPVIFSHSAARGVCNSARNVPDDILQLLKKNGGVVMVSLSMGVIQCNHQPMCPLWQITSTTSRLSLDPSSSGLVEIMMGPANSLRGWKTCPHTRS

SEQ ID NO: 808265 - protein, 1463 aa, Homo sapiens
MHVNAHADSLPVRREGRRDGSPWRSVVCRYCRCSRQTGASVTTVSLPSSSSSPGLDPRGPRQASVRSLRSEPVLLFLPFRTPYRDSEEGKREGLSRLRAVCRRAGPRGRGSFSPRDARASPRLHFLVAAVTTGAASRRQRGARVRQPSPSSSRRAKRLRECERRSLHAPPAMDASYDGTEVTVVMEEIEEAYCYTSPGPPKKKKKYKIHGEKTKKPRSAYLLYYYDIYLKVQQELPHLPQSEINKKISESWRLLSVAERSYYLEKAKLEKEGLDPNSKLSALTAVVPDIPGFRKILPRSDYIIIPKSSLQEDRSCPQLELCVAQNQMSPKGPPLVSNTAPETVPSHAGMAEQCLAVEALAEEVGALTQSGAVQEIATSEILSQDVLLEDASLEVGESHQPYQTSLVIEETLVNGSPDLPTGSLAVPHPQVGESVSVVTVMRDSSESSSSAPATQFIMLPLPAYSVVENPTSIKLTTTYTRRGHGTCTSPGCSFTYVTRHKPPKCPTCGNFLGGKWIPKEKPAKVKVELASGVSSKGSVVKRNQQPVTTEQNSSKENASKLTLENSEAVSQLLNVAPPREVGEESEWEEVIISDAHVLVKEAPGNCGTAVTKTPVVKSGVQPEVTLGTTDNDSPGADVPTPSEGTSTSSPLPAPKKPTGVDLLTPGSRAPELKGRARGKPSLLAAARPMRAILPAPVNVGRGSSMGLPRARQAFSLSDKTPSVRTCGLKPSTLKQLGQPIQQPSGPGEVKLPSGPSNRTSQVKVVEVKPDMFPPYKYSCTVTLDLGLATSRGRGKCKNPSCSYVYTNRHKPRICPSCGVNLAKDRTEKTTKAIEVSSPLPDVLNATEPLSTAQREIQRQSTLQLLRKVLQIPENESELAEVFALIHELNSSRLILSNVSEETVTIEQTSWSNYYESPSTQCLLCSSPLFKGGQNSLAGPQECWLLTASRLQTVTAQVKMCLNPHCLALHSFIDIYTGLFNVGNKLLVSLDLLFAIRNQIKLGEDPRVSINVVLKSVQEQTEKTLTSEELSQLQELLCNGYWAFECLTVRDYNDMICGICGVAPKVEMAQRSEENVLALKSVEFTWPEFLGSNEVNVEDFWATMETEVIEQVAFPASIPITKFDASVIAPFFPPLMRGAVVVNTEKDKNLDVQPVPGSGSALVRLLQEGTCKLDEIGSYSEEKLQHLLRQCGIPFGAEDSKDQLCFSLLALYESVQNGARAIRPPRHFTGGKIYKVCPHQVVCGSKYLVRGESARDHVDLLASSRHWPPVYVVDMATSVALCADLCYPELTNQMWGRNQGCFSSPTEPPVSVSCPELLDQHYTVDMTETEHSIQHPVTKTATRRIVHAGLQPNPGDPSAGHHSLALCPELAPYATILASIVDSKPNGVRQRPIAFDNATHYYLYNRLMDFLTSREIVNRQIHDIVQSCQPGEVVIRDTLYRLGVAQIKTETEEEGEEEEVAAVAE

SEQ ID NO: 808266 - protein, 776 aa, Homo sapiens
MRAILPAPVNVGRGSSMGLPRARQAFSLSDKTPSVRTCGLKPSTLKQLGQPIQQPSGPGEVKLPSGPSNRTSQVKVVEVKPDMFPPYKYSCTVTLDLGLATSRGRGKCKNPSCSYVYTNRHKPRICPSCGVNLAKDRTEKTTKAIEVSSPLPDVLNATEPLSTAQREIQRQSTLQLLRKVLQIPENESELAEVFALIHELNSSRLILSNVSEETVTIEQTSWSNYYESPSTQCLLCSSPLFKGGQNSLAGPQECWLLTASRLQTVTAQVKMCLNPHCLALHSFIDIYTGLFNVGNKLLVSLDLLFAIRNQIKLGEDPRVSINVVLKSVQEQTEKTLTSEELSQLQELLCNGYWAFECLTVRDYNDMICGICGVAPKVEMAQRSEENVLALKSVEFTWPEFLGSNEVNVEDFWATMETEVIEQVAFPASIPITKFDASVIAPFFPPLMRGAVVVNTEKDKNLDVQPVPGSGSALVRLLQEGTCKLDEIGSYSEEKLQHLLRQCGIPFGAEDSKDQLCFSLLALYESVQNGARAIRPPRHFTGGKIYKVCPHQVVCGSKYLVRGESARDHVDLLASSRHWPPVYVVDMATSVALCADLCYPELTNQMWGRNQGCFSSPTEPPVSVSCPELLDQHYTVDMTETEHSIQHPVTKTATRRIVHAGLQPNPGDPSAGHHSLALCPELAPYATILASIVDSKPNGVRQRPIAFDNATHYYLYNRLMDFLTSREIVNRQIHDIVQSCQPGEVVIRDTLYRLGVAQIKTETEEEGEEEEVAAVAE

SEQ ID NO: 808267 - protein, 694 aa, Homo sapiens
MFPPYKYSCTVTLDLGLATSRGRGKCKNPSCSYVYTNRHKPRICPSCGVNLAKDRTEKTTKAIEVSSPLPDVLNATEPLSTAQREIQRQSTLQLLRKVLQIPENESELAEVFALIHELNSSRLILSNVSEETVTIEQTSWSNYYESPSTQCLLCSSPLFKGGQNSLAGPQECWLLTASRLQTVTAQVKMCLNPHCLALHSFIDIYTGLFNVGNKLLVSLDLLFAIRNQIKLGEDPRVSINVVLKSVQEQTEKTLTSEELSQLQELLCNGYWAFECLTVRDYNDMICGICGVAPKVEMAQRSEENVLALKSVEFTWPEFLGSNEVNVEDFWATMETEVIEQVAFPASIPITKFDASVIAPFFPPLMRGAVVVNTEKDKNLDVQPVPGSGSALVRLLQEGTCKLDEIGSYSEEKLQHLLRQCGIPFGAEDSKDQLCFSLLALYESVQNGARAIRPPRHFTGGKIYKVCPHQVVCGSKYLVRGESARDHVDLLASSRHWPPVYVVDMATSVALCADLCYPELTNQMWGRNQGCFSSPTEPPVSVSCPELLDQHYTVDMTETEHSIQHPVTKTATRRIVHAGLQPNPGDPSAGHHSLALCPELAPYATILASIVDSKPNGVRQRPIAFDNATHYYLYNRLMDFLTSREIVNRQIHDIVQSCQPGEVVIRDTLYRLGVAQIKTETEEEGEEEEVAAVAE

SEQ ID NO: 808268 - protein, 1463 aa, Homo sapiens; identical to SEQ ID NO: 808265

SEQ ID NO: 808269 - protein, 326 aa, Homo sapiens
  misc_feature (4)..(4): Xaa can be any naturally occurring amino acid
QYGXHGSGSQQEWTAVPGSGSALVRLLQEGTCKLDEIGSYSEEKLQHLLRQCGIPFGAEDSKDQLCFSLLALYESVQNGARAIRPPRHFTGGKIYKVCPHQVVCGSKYLVRGESARDHVDLLASSRHWPPVYVVDMATSVALCADLCYPELTNQMWGRNQGCFSSPTEPPVSVSCPELLDQHYTVDMTETEHSIQHPVTKTATRRIVHAGLQPNPGDPSAGHHSLALCPELAPYATILASIVDSKPNGVRQRPIAFDNATHYYLYNRLMDFLTSREIVNRQIHDIVQSCQPGEVVIRDTLYRLGVAQIKTETEEEGEEEEVAAVAE

SEQ ID NO: 808270 - protein, 420 aa, Homo sapiens
MAPWPPKGLVPAVLWGLSLFLNLPGPIWLQPSPPPQSSPPPQPHPCHTCRGLVDSFNKGLERTIRDNFGGGNTAWEEENLSKYKDSETRLVEVLEGVCSKSDFECHRLLELSEELVESWWFHKQQEAPDLFQWLCSDSLKLCCPAGTFGPSCLPCPGGTERPCGGYGQCEGEGTRGGSGHCDCQAGYGGEACGQCGLGYFEAERNASHLVCSACFGPCARCSGPEESNCLQCKKGWALHHLKCVDIDECGTEGANCGADQFCVNTEGSYECRDCAKACLGCMGAGPGRCKKCSPGYQQVGSKCLDVDECETEVCPGENKQCENTEGGYRCICAEGYKQMEGICVKEQIPESAGFFSEMTEDELVVLQQMFFGIIICALATLAAKGDLVFTAIFIGAVAAMTGYWLSERSDRVLEGFIKGR

SEQ ID NO: 808271 - protein, 295 aa, Homo sapiens
MAPWPPKGLVPAVLWGLSLFLNLPGPIWLQPSPPPQSSPPPQPHPCHTCRGLVDSFNKGLERTIRDNFGGGNTAWEEENLSKYKDSETRLVEVLEGVCSKSDFECHRLLELSEELVESWWFHKQQEAPDLFQWLCSDSLKLCCPAGTFGPSCLPCPGGTERPCGGYGQCEGEGTRGGSGHCDCQAGYGGEACGQCGLGYFEAERNASHLVCSVVRPVPDVRTDDQLLHAEGGCSPQCVTGQLLGDGGRPSRKMSLDTGAMSRIWNTGGTTCTRGPLPGTSLGPTSTRGTKSREAP

SEQ ID NO: 808272 - protein, 74 aa, Homo sapiens
  misc_feature (34)..(34): Xaa can be any naturally occurring amino acid
LLLGPPGFPLSSRSYVWEIGGGYNFPRNRYAMIXQAELPLTKGTKLELPAVAAALELVNPPGCRKSTQLEKGLD

SEQ ID NO: 808273 - protein, 420 aa, Homo sapiens; identical to SEQ ID NO: 808270

SEQ ID NO: 808274 - protein, 489 aa, Homo sapiens
MAPWPPKGLVPAVLWGLSLFLNLPGPIWLQPSPPPQSSPPPQPHPCHTCRGLVDSFNKGLERTIRDNFGGGNTAWEEENLSKYKDSETRLVEVLEGVCSKSDFECHRLLELSEELVESWWFHKQQEAPDLFQWLCSDSLKLCCPAGTFGPSCLPCPGGTERPCGGYGQCEGEGTRGGSGHCDCQAGYGGEACGQCGLGYFEAERNASHLVCSACFGPCARCSGPEESNCLQCKKGWALHHLKCVDIDECGTEGANCGADQFCVNTEGSYECRDCAKACLGCMGAGPGRCKKCSPGYQQVGSKCLGESPADGTQAPGSASPSMNGEEAGIWAGGGRKGGMLPGQGQRGVLEMDKMESGCWVGGPSRTLTPPSPQDVDECETEVCPGENKQCENTEGGYRCICAEGYKQMEGICVKEQIPESAGFFSEMTEDELVVLQQMFFGIIICALATLAAKGDLVFTAIFIGAVAAMTGYWLSERSDRVLEGFIKGR

SEQ ID NO: 808275 - protein, 574 aa, Homo sapiens
MAPWPPKGLVPAVLWGLSLFLNLPGPIWLQPSPPPQSSPPPQPHPCHTCRGLVDSFNKGLERTIRDNFGGGNTAWEEENLSKYKDSETRLVEVLEGVCSKSDFECHRLLELSEELVESWWFHKQQEAPDLFQWLCSDSLKLCCPAGTFGPSCLPCPGGTERPCGGYGQCEGEGTRGGSGHCDCQAGYGGEACGQCGLGYFEAERNASHLVCSACFGPCARCSGPEESNCLQCKKGWALHHLKCVDIDECGTEGANCGADQFCVNTEGSYECRDCAKACLGCMGAGPGRCKKCSPGYQQVGSKCLDVDECETEVCPGENKQCENTEGGYRCICAEGYKQMEGICVKEQIPGAFPILTDLTPETTRRWKLGSHPHSTYVKMKMQRDEATFPGLYGKQVAKLGSQSRQSDRGTRLIHVINALPPTCPPHGLGKSNPFTSLSLTFPFSETGMVTAPCRVVLSSKCSVPGLLGRPGGHDDQVVGVLGRLQELPGTGIRVPGCISCSSAESAGFFSEMTEDELVVLQQMFFGIIICALATLAAKGDLVFTAIFIGAVAAMTGYWLSERSDRVLEGFIKGR

SEQ ID NO: 808276 - protein, 240 aa, Homo sapiens
SSWFPPEETLAFCVNTEGSYECRDCAKACLGCMGAGPGRCKKCSPGYQQVGSKCLGESPADGTQAPGSASPSMNGEEAGIWAGGGRKGGMLPGQGQRGVLEMDKMESGCWVGGPSRTLTPPSPQDVDECETEVCPGENKQCENTEGGYRCICAEGYKQMEGICVKEQIPESAGFFSEMTEDELVVLQQMFFGIIICALATLAAKGDLVFTAIFIGAVAAMTGYWLSERSDRVLEGFIKGR

SEQ ID NO: 808277 - protein, 241 aa, Homo sapiens
MAGTISPAITVSDAVLGAFPILTDLTPETTRRWKLGSHPHSTYVKMKMQRDEATFPGLYGKQVAKLGSQSRQSDRGTRLIHVINALPPTCPPHGLGKSNPFTSLSLTFPFSETGMVTAPCRVVLSSKCSVPGLLGRPGGHDDQVVGVLGRLQELPGTGIRVPGCISCSSAESAGFFSEMTEDELVVLQQMFFGIIICALATLAAKGDLVFTAIFIGAVAAMTGYWLSERSDRVLEGFIKGR

SEQ ID NO: 808278 - protein, 241 aa, Homo sapiens; identical to SEQ ID NO: 808277

SEQ ID NO: 808279 - protein, 71 aa, Homo sapiens
CGVLEDPKRPEDELVVLQQMFFGIIICALATLAAKGDLVFTAIFIGAVAAMTGYWLSERSDRVLEGFIKGR

SEQ ID NO: 808280 - protein, 439 aa, Homo sapiens
MAPWPPKGLVPAVLWGLSLFLNLPGPIWLQPSPPPQSSPPPQPHPCHTCRGLVDSFNKGLERTIRDNFGGGNTAWEEENLSKYKDSETRLVEVLEGVCSKSDFECHRLLELSEELVESWWFHKQQEAPDLFQWLCSDSLKLCCPAGTFGPSCLPCPGGTERPCGGYGQCEGEGTRGGSGHCDCQAGYGGEACGQCGLGYFEAERNASHLVCSACFGPCARCSGPEESNCLQCKKGWALHHLKCVDIDECGTEGANCGADQFCVNTEGSYECRDCAKACLGCMGAGPGRCKKCSPGYQQVGSKCLDVDECETEVCPGENKQCENTEGGYRCICAEGYKQMEGICVKEQIPESAGFFSEMTEDELVVLQQMFFGIIICALATLAAKGDLVFTAIFIGAVAAMTGYWLSERSDRVLEGFQASQCVNFKSFSLMVAARALAPA

SEQ ID NO: 808281 - protein, 85 aa, Homo sapiens
GSDAVRRRPTAPAGWGGRFFLLRGLRGGSGSFSAGSWAVPLPFCEALNLIPSLHIRIRAPPSKPGVPDTSPKTTPLASSPSVLGI

SEQ ID NO: 808282 - protein, 429 aa, Homo sapiens
MAPWPPKGLVPAVLWGLSLFLNLPGPIWLQPSPPPQSSPPPQPHPCHTCRGLVDSFNKGLERTIRDNFGGGNTAWEEENLSKYKDSETRLVEVLEGVCSKSDFECHRLLELSEELVESWWFHKQQEAPDLFQWLCSDSLKLCCPAGTFGPSCLPCPGGTERPCGGYGQCEGEGTRGGSGHCDCQAGYGGEACGQCGLGYFEAERNASHLVCSACFGPCARCSGPEESNCLQCKKGWALHHLKCVDIDECGTEGANCGADQFCVNTEGSYECRDCAKACLGCMGAGPGRCKKCSPGYQQVGSKCLDVDECETEVCPGENKQCENTEGGYRCICAEGYKQMEGICVKEQIPESAGFFSEMTEDELVVLQQMFFGIIICALATLAAKGDLVFTAIFIGAVAAERQSEQSGWGRNHSKAGYELRGTLEGSSTV

SEQ ID NO: 808283 - protein, 455 aa, Homo sapiens
GSDAVRRRPTAPAGWGGRFFLLRGLRGSPAWVKMAPWPPKGLVPAVLWGLSLFLNLPGPIWLQPSPPPQSSPPPQPHPCHTCRGLVDSFNKGLERTIRDNFGGGNTAWEEENLSKYKDSETRLVEVLEGVCSKSDFECHRLLELSEELVESWWFHKQQEAPDLFQWLCSDSLKLCCPAGTFGPSCLPCPGGTERPCGGYGQCEGEGTRGGSGHCDCQAGYGGEACGQCGLGYFEAERNASHLVCSACFGPCARCSGPEESNCLQCKKGWALHHLKCVDIDECGTEGANCGADQFCVNTEGSYECRDCAKACLGCMGAGPGRCKKCSPGYQQVGSKCLDVDECETEVCPGENKQCENTEGGYRCICAEGYKQMEGICVKEQIPGAFPILTDLTPETTRRWKLGSHPHSTYVKMKMQRDEATFPGLYGKQVAKLGSQSRQSDRGTRLIHSQQASSQR

SEQ ID NO: 808284 - protein, 156 aa, Homo sapiens
GSDAVRRRPTAPAGWGGRFFLLRGLRGSPAWVKMAPWPPKGLVPAVLWGLSLFLNLPGPIWLQPSPPPQSSPPPQPHPCHTCRGLVDSFNKGLERTIRDNFGGGNTAWEEENLSKYKDSETRLVEVLEGVCSKSDFECHRLLELSEELVESWWFHK

SEQ ID NO: 808285 - protein, 420 aa, Homo sapiens; identical to SEQ ID NO: 808270

SEQ ID NO: 808286 - protein, 363 aa, Homo sapiens
MGLERTIRDNFGGGNTAWEEENLSKYKDSETRLVEVLEGVCSKSDFECHRLLELSEELVESWWFHKQQEAPDLFQWLCSDSLKLCCPAGTFGPSCLPCPGGTERPCGGYGQCEGEGTRGGSGHCDCQAGYGGEACGQCGLGYFEAERNASHLVCSACFGPCARCSGPEESNCLQCKKGWALHHLKCVDIDECGTEGANCGADQFCVNTEGSYECRDCAKACLGCMGAGPGRCKKCSPGYQQVGSKCLDVDECETEVCPGENKQCENTEGGYRCICAEGYKQMEGICVKEQIPESAGFFSEMTEDELVVLQQMFFGIIICALATLAAKGDLVFTAIFIGAVAAMTGYWLSERSDRVLEGFIKGR

SEQ ID NO: 808287 - protein, 349 aa, Homo sapiens
MAPWPPKGLVPAVLWGLSLFLNLPGPIWLQPSPPPQSSPPPQPHPCHTCRGLVDSFNKGLERTIRDNFGGGNTAWEEENLSKYKDSETRLVEVLEGVCSKSDFECHRLLELSEELVESWWFHKQQEAPDLFQWLCSDSLKLCCPAGTFGPSCLPCPGGTERPCGGYGQCEGEGTRGGSGHCDCQAGYGGEACGQCGLGYFEAERNASHLVCSACFGPCARCSGPEESNCLQCKKGWALHHLKCVDIDECGTEGANCGADQFCVNTEGSYECRDCAKACLGCMGAGPGRCKKCSPGYQQVGSKCLGESPADGTQAPGSASPSMNGEEAGIWADGRHLCEGADPRCIPHLN

SEQ ID NO: 808288 - protein, 420 aa, Homo sapiens; identical to SEQ ID NO: 808270

SEQ ID NO: 808289 - protein, 420 aa, Homo sapiens; identical to SEQ ID NO: 808270

SEQ ID NO: 808290 - protein, 439 aa, Homo sapiens; identical to SEQ ID NO: 808280

SEQ ID NO: 808291 - protein, 404 aa, Homo sapiens
MAPWPPKGLVPAVLWGLSLFLNLPGPIWLQPSPPPQSSPPPQPHPCHTCRGLVDSFNKGLERTIRDNFGGGNTAWEEENLSKYKDSETRLVEVLEGVCSKSDFECHRLLELSEELVESWWFHKQQEAPDLFQWLCSDSLKLCCPAGTFGPSCLPCPGGTERPCGGYGQCEGEGTRGGSGHCDCQAGYGGEACGQCGLGYFEAERNASHLVCSACFGPCARCSGPEESNCLQCKKGWALHHLKCVDIDECGTEGANCGADQFCVNTEGSYECRDCAKACLGCMGAGPGRCKKCSPGYQQVGSKCLDVDECETEVCPGENKQCENTEGGYRCICAEGYKQMEGICVKEQIPESAGFFSEMTEDELVVLQQMFFGIIICALATLAAKGDLVFTAIFIGAVAARLHNV

SEQ ID NO: 808292 - protein, 218 aa, Homo sapiens [sequence omitted]

SEQ ID NO: 808293 - protein, 89 aa, Homo sapiens
LQLFGLSLWLVLRCAASHGALWAQRSDRLRRIGTGPAACGHHGLHGVRGSVKKLTHLTWKQCLNKLKEQLWKEVTKHWATRNTPVAQQS

SEQ ID NO: 808294 - protein, 84 aa, Homo sapiens
PRREVKTSLKRDCISTKYFKTRLHMVVHACSPSYYSWYRNYGHLELIQLQLATQFENWCKTSQSHYSERVWSGNACRVSPGKRC

SEQ ID NO: 808295 - protein, 89 aa, Homo sapiens; identical to SEQ ID NO: 808293

SEQ ID NO: 808296 - protein, 111 aa, Homo sapiens
LQLFGLSLWLVLRCAASHGALWAQRSDRLRRIGTGPAACGHHGLHGVRGSVKKLTHLTWKQCLNKLKEQLWKEVTKHWTRLQRGIDLPCPRPHHHSVSLSSVGAVWHCLCP

SEQ ID NO: 808297 - protein, 82 aa, Homo sapiens
HAYAHASGPAMERFWAQRSDRLRRIGTGPAACGHHGLHGVRGSVKKLTHLTWKQCLNKLKEQLWKEVTKHWATRNTPVAQQS

SEQ ID NO: 808298 - protein, 111 aa, Homo sapiens; identical to SEQ ID NO: 808296

SEQ ID NO: 808299 - protein, 104 aa, Homo sapiens
PRVRPRVRASHGALWAQRSDRLRRIGTGPAACGHHGLHGVRGSVKKLTHLTWKQCLNKLKEQLWKEVTKHWTRLQRGIDLPCPRPHHHSVSLSSVGAVWHCLCP

SEQ ID NO: 808300 - protein, 141 aa, Homo sapiens
MFEQTQRTAVERSHKTLGLVNYQISIKCSNQFKLEVCLLNAENKVVDNQAGTQGQLKVLGANLWWPYLMHEHPAYLYSWEDGDCSHQSLGPLPACDLCDQRHLCSRQGGSVCGCDPCEQLLLLVSQLRAPGVDSAAAGHPV

SEQ ID NO: 808301 - protein, 110 aa, Homo sapiens
GAAATVGGGAGGSGGACPVPSPGSGHTSGPALRCWQRVAGTLLPHLHALHGSKVKIKRITLRARLVGVRRGDSTSPQCCVLIGPPGPSEPSPSDHLVSRSCSKRCEKVSP

SEQ ID NO: 808302 - protein, 151 aa, Homo sapiens
RAARNCFHCKQKKATHDQAGGGEARGGRRAEGGTERRAEGAGERENVGGGAGGSGGACPVPSPGSGHTSGPALRCWQRVAGTLLPHLHALHGSKVKIKRITLRARLVGVRRGDSTSPQCCVLIGPPGPSEPSPSDHLVSRSCSKRCEKVSP

SEQ ID NO: 808303 - protein, 141 aa, Homo sapiens
RAARNCFHCKQKKATHDQAGGGEARGGRRAEGGTERRAEGAGERENVGGGAGGSGGACPVPSPGSGHTSGPALRCWQRVAGTLLPHLHALHGSKVKIKRITLRARLVGVRRGDSTSPQCCVLIGPPGPSEPSPSDHLVSRR

SEQ ID NO: 808304 - protein, 74 aa, Homo sapiens
QVRHCPGARPATGVGARVSAFAFEVPALRWGLHLPLHEQVCRIQEPAHHTVLSFSLLPKPALNFFAVLLSQNFK

SEQ ID NO: 808305 - protein, 497 aa, Homo sapiens
MLRTTVRPSLLPVMGLARQPEEVVLQASVSSYHLFRDVAEVTAFRGSLLSWYDQEKRDLPWRRRAEDEMDLDRRAYAVWVSEVMLQQTQVATVINYYTGWMQKWPTLQDLASASLEEVNQLWAGLGYYSRGRRLQEGARKVVEELGGHMPRTAETLQQLLPGVGRYTAGAIASIAFGQATGVVDGNVARVLCRVRAIGADPSSTLVSQQLWGLAQQLVDPARPGDFNQAAMELGATVCTPQRPLCSQCPVESLCRARQRVEQEQLLASGSLSGSPDVEECAPNTGQCHLCLPPSEPWDQTLGVVNFPRKASRKPPREESSATCVLEQPGALGAQILLVQRPNSGLLAGLWEFPSVTWEPSEQLQRKALLQELQRWAGPLPATHLRHLGEVVHTFSHIKLTYQVYGLALEGQTPVTTVPPGARWLTQEEFHTAAVSTAMKKVFRVYQGQQPGTCMGSKRSQVSSPCSRKKPRMGQQVLDNFFRSHISTDAHSLNSAAQ

SEQ ID NO: 808306 - protein, 546 aa, Homo sapiens
MTPLVSRLSRLWAIMRKPRAAVGSGHRKQAASQEGRQKHAKNNSQAKPSACDGMIAECPGAPAGLARQPEEVVLQASVSSYHLFRDVAEVTAFRGSLLSWYDQEKRDLPWRRRAEDEMDLDRRAYAVWVSEVMLQQTQVATVINYYTGWMQKWPTLQDLASASLEEVNQLWAGLGYYSRGRRLQEGARKVVEELGGHMPRTAETLQQLLPGVGRYTAGAIASIAFGQATGVVDGNVARVLCRVRAIGADPSSTLVSQQLWGLAQQLVDPARPGDFNQAAMELGATVCTPQRPLCSQCPVESLCRARQRVEQEQLLASGSLSGSPDVEECAPNTGQCHLCLPPSEPWDQTLGVVNFPRKASRKPPREESSATCVLEQPGALGAQILLVQRPNSGLLAGLWEFPSVTWEPSEQLQRKALLQELQRWAGPLPATHLRHLGEVVHTFSHIKLTYQVYGLALEGQTPVTTVPPGARWLTQEEFHTAAVSTAMKKVFRVYQGQQPGTCMGSKRSQVSSPCSRKKPRMGQQVLDNFFRSHISTDAHSLNSAAQ

SEQ ID NO: 808307 - protein, 429 aa, Homo sapiens
MDLDRRAYAVWVSEVMLQQTQVATVINYYTGWMQKWPTLQDLASASLEEVNQLWAGLGYYSRGRRLQEGARKVVEELGGHMPRTAETLQQLLPGVGRYTAGAIASIAFGQATGVVDGNVARVLCRVRAIGADPSSTLVSQQLWGLAQQLVDPARPGDFNQAAMELGATVCTPQRPLCSQCPVESLCRARQRVEQEQLLASGSLSGSPDVEECAPNTGQCHLCLPPSEPWDQTLGVVNFPRKASRKPPREESSATCVLEQPGALGAQILLVQRPNSGLLAGLWEFPSVTWEPSEQLQRKALLQELQRWAGPLPATHLRHLGEVVHTFSHIKLTYQVYGLALEGQTPVTTVPPGARWLTQEEFHTAAVSTAMKKVFRVYQGQQPGTCMGSKRSQVSSPCSRKKPRMGQQVLDNFFRSHISTDAHSLNSAAQ

SEQ ID NO: 808308 - protein, 429 aa, Homo sapiens; identical to SEQ ID NO: 808307

SEQ ID NO: 808309 - protein, 103 aa, Homo sapiens
MPPELTPPRVSGPTARDLYVETGFHHVDKAGLELLTSSDLPILASQSAGITGVSHHTHPWELSVLIGRRIRKGCLEEAAGFQKVPGVLSVQSEKAPHGPASPG

SEQ ID NO: 808310 - protein, 285 aa, Homo sapiens
MLRTTVRPSLLPVMGLARQPEEVVLQASVSSYHLFRDVAEVTAFRGSLLSWYDQEKRDLPWRRRAEDEMDLDRRAYAVWVSEVMLQQTQVATVINYYTGWMQKWPTLQDLASASLEEVNQLWAGLGYYSRGRRLQEGARKVVEELGGHMPRTAETLQQLLPGVGRYTAGAIASIAFGQATGVVDGNVARVLCRVRAIGADPSSTLVSQQLWGLAQQLVDPARPGDFNQAAMELGATVCTPQRPLCSQCPVESLCRARQRVEQEQLLASGSLSGSPDVEECGEHQT

SEQ ID NO: 808311 - protein, 362 aa, Homo sapiens
MLRTTVRPSLLPVMGLARQPEEVVLQASVSSYHLFRDVAEVTAFRGSLLSWYDQEKRDLPWRRRAEDEMDLDRRAYAVWVSEVMLQQTQVATVINYYTGWMQKWPTLQDLASASLEEVNQLWAGLGYYSRGRRLQEGARKVVEELGGHMPRTAETLQQLLPGVGRYTAGAIASIAFGQATGVVDGNVARVLCRVRAIGADPSSTLVSQQLWGLAQQLVDPARPGDFNQAAMELGATVCTPQRPLCSQCPVESLCRARQRVEQEQLLASGSLSGSPDVEECGFGDLRSQLPTLDSATCACLPRSPGTRPWEWSTSPERPAASPPGRRALPPVFWNSLGPLGPKFCWCRGPTQVCWQDCGSSRP

SEQ ID NO: 808312 - protein, 349 aa, Homo sapiens
MPRTAETLQQLLPGVGRYTAGAIASIAFGQATGVVDGNVARVLCRVRAIGADPSSTLVSQQLWGLAQQLVDPARPGDFNQAAMELGATVCTPQRPLCSQCPVESLCRARQRVEQEQLLASGSLSGSPDVEECAPNTGQCHLCLPPSEPWDQTLGVVNFPRKASRKPPREESSATCVLEQPGALGAQILLVQRPNSGLLAGLWEFPSVTWEPSEQLQRKALLQELQRWAGPLPATHLRHLGEVVHTFSHIKLTYQVYGLALEGQTPVTTVPPGARWLTQEEFHTAAVSTAMKKVFRVYQGQQPGTCMGSKRSQVSSPCSRKKPRMGQQVLDNFFRSHISTDAHSLNSAAQ

SEQ ID NO: 808313 - protein, 349 aa, Homo sapiens; identical to SEQ ID NO: 808312

SEQ ID NO: 808314 - protein, 247 aa, Homo sapiens
MGQTPDESLYFGVGVEKASSTTFTLDLVSFCLPVAIEVAYTAGPGQCFPGGESHPRVGEIGTIEGLTGDLFDLCSYPQEVNQLWAGLGYYSRGRRLQEGARKVVEELGGHMPRTAETLQQLLPGVGRYTAGAIASIAFGQATGVVDGNVARVLCRVRAIGADPSSTLVSQQLWGLAQQLVDPARPGDFNQAAMELGATVCTPQRPLCSQCPVESLCRARQRVEQEQLLASGSLSGSPDVEECGEHQT

SEQ ID NO: 808315 - protein, 349 aa, Homo sapiens; identical to SEQ ID NO: 808312

SEQ ID NO: 808316 - protein, 393 aa, Homo sapiens
MTPLVSRLSRLWEVNQLWAGLGYYSRGRRLQEGARKVVEELGGHMPRTAETLQQLLPGVGRYTAGAIASIAFGQATGVVDGNVARVLCRVRAIGADPSSTLVSQQLWGLAQQLVDPARPGDFNQAAMELGATVCTPQRPLCSQCPVESLCRARQRVEQEQLLASGSLSGSPDVEECAPNTGQCHLCLPPSEPWDQTLGVVNFPRKASRKPPREESSATCVLEQPGALGAQILLVQRPNSGLLAGLWEFPSVTWEPSEQLQRKALLQELQRWAGPLPATHLRHLGEVVHTFSHIKLTYQVYGLALEGQTPVTTVPPGARWLTQEEFHTAAVSTAMKKVFRVYQGQQPGTCMGSKRSQVSSPCSRKKPRMGQQVLDNFFRSHISTDAHSLNSAAQ

SEQ ID NO: 808317 - protein, 309 aa, Homo sapiens
GNKGASGVSAKELCFTAVFPSFRGLAQQLVDPARPGDFNQAAMELGATVCTPQRPLCSQCPVESLCRARQRVEQEQLLASGSLSGSPDVEECAPNTGQCHLCLPPSEPWDQTLGVVNFPRKASRKPPREESSATCVLEQPGALGAQILLVQRPNSGLLAGLWEFPSVTWEPSEQLQRKALLQELQRWAGPLPATHLRHLGEVVHTFSHIKLTYQVYGLALEGQTPVTTVPPGARWLTQEEFHTAAVSTAMKKVFRVYQGQQPGTCMGSKRSQVSSPCSRKKPRMGQQVLDNFFRSHISTDAHSLNSAAQ

SEQ ID NO: 808318 - protein, 479 aa, Homo sapiens
MLRTTVRPSLLPVMGLARQPEEVVLQASVSSYHLFRDVAEVTAFRGSLLSWYDQEKRDLPWRRRAEDEMDLDRRAYAVWVSEVMLQQTQVATVINYYTGWMQKWPTLQDLASASLEEVNQLWAGLGYYSRGRRLQEGARKVVEELGGHMPRTAETLQQLLPGVGRYTAGAIASIAFGQATGVVDGNVARVLCRVRAIGADPSSTLVSQQLWGLAQQLVDPARPGDFNQAAMELGATVCTPQRPLCSQCPVESLCRARQRVEQEQLLASGSLSGSPDVEECAPNTGQCHLCLPPSEPWDQTLGVVNFPRKASRKPPREESSATCVLEQPGALGAQILLVQRPNSGLLAGLWEFPSVTWEPSEQLQRKALLQELQRWAGPLPATHLRHLGEVVHTFSHIKLTYQVYGLALEGQTPVTTVPPGARWLTQEEFHTAAVSTAMKKVFRVYQGQQPGTCMGSKRSQVSSPCSRTTDAHSLNSAAQ

SEQ ID NO: 808319 - protein, 468 aa, Homo sapiens
MLRTTVRPSLLPVMGLARQPEEVVLQASVSSYHLFRDVAEVTAFRGSLLSWYDQEKRDLPWRRRAEDEMDLDRRAYAVWVSEVMLQQTQVATVINYYTGWMQKWPTLQDLASASLEEVNQLWAGLGYYSRGRRLQEGARKVVEELGGHMPRTAETLQQLLPGVGRYTAGAIASIAFGQATGVVDGNVARVLCRVRAIGADPSSTLVSQQLWGLAQQLVDPARPGDFNQAAMELGATVCTPQRPLCSQCPVESLCRARQRVEQEQLLASGSLSGSPDVEECAPNTGQCHLCLPPSEPWDQTLGVVNFPRKASRKPPREESSATCVLEQPGALGAQILLVQRPNSGLLAGLWEFPSVTWEPSEQLQRKALLQELQRWAGPLPATHLRHLGEVVHTFSHIKLTYQVYGLALEGQTPVTTVPPGARWLTQEEFHTAAVSTAMKKVFRMYQAQQATDSVLEYGFTTVISHRLD

SEQ ID NO: 808320 - protein, 497 aa, Homo sapiens; identical to SEQ ID NO: 808305

SEQ ID NO: 808321 - protein, 497 aa, Homo sapiens; identical to SEQ ID NO: 808305

SEQ ID NO: 808322 - protein, 497 aa, Homo sapiens; identical to SEQ ID NO: 808305

SEQ ID NO: 808323 - protein, 552 aa, Homo sapiens
RRERGASVFCCLHQRGPRAIMRKPRAAVGSGHRKQAASQEGRQKHAKNNSQAKPSACDGMIAECPGAPAGLARQPEEVVLQASVSSYHLFRDVAEVTAFRGSLLSWYDQEKRDLPWRRRAEDEMDLDRRAYAVWVSEVMLQQTQVATVINYYTGWMQKWPTLQDLASASLEEVNQLWAGLGYYSRGRRLQEGARKVVEELGGHMPRTAETLQQLLPGVGRYTAGAIASIAFGQATGVVDGNVARVLCRVRAIGADPSSTLVSQQLWGLAQQLVDPARPGDFNQAAMELGATVCTPQRPLCSQCPVESLCRARQRVEQEQLLASGSLSGSPDVEECAPNTGQCHLCLPPSEPWDQTLGVVNFPRKASRKPPREESSATCVLEQPGALGAQILLVQRPNSGLLAGLWEFPSVTWEPSEQLQRKALLQELQRWAGPLPATHLRHLGEVVHTFSHIKLTYQVYGLALEGQTPVTTVPPGARWLTQEEFHTAAVSTAMKKVFRVYQGQQPGTCMGSKRSQVSSPCSRKKPRMGQQVLDNFFRSHISTDAHSLNSAAQ

SEQ ID NO: 808324 - protein, 82 aa, Homo sapiens
  misc_feature (5)..(5): Xaa can be any naturally occurring amino acid
  misc_feature (7)..(7): Xaa can be any naturally occurring amino acid
  misc_feature (9)..(9): Xaa can be any naturally occurring amino acid
AGPAXPXLXFQPFFFSLSHHSAGVDTTTLCQGPQPGTCMGSKRSQVSSPCSRKKPRMGQQVLDNFFRSHISTDAHSLNSAAQ

SEQ ID NO: 808325 - protein, 522 aa, Homo sapiens
MLRTTVRPSLLPVMGLARQPEEVVLQASVSSYHLFRDVAEVTAFRGSLLSWYDQEKRDLPWRRRAEDEMDLDRRAYAVWVSEVMLQQTQVATVINYYTGWMQKWPTLQDLASASLEEVNQLWAGLGYYSRGRRLQEGARKVRGWQEGRNPGVLGVFNLESCTPMQVVEELGGHMPRTAETLQQLLPGVGRYTAGAIASIAFGQATGVVDGNVARVLCRVRAIGADPSSTLVSQQLWGLAQQLVDPARPGDFNQAAMELGATVCTPQRPLCSQCPVESLCRARQRVEQEQLLASGSLSGSPDVEECAPNTGQCHLCLPPSEPWDQTLGVVNFPRKASRKPPREESSATCVLEQPGALGAQILLVQRPNSGLLAGLWEFPSVTWEPSEQLQRKALLQELQRWAGPLPATHLRHLGEVVHTFSHIKLTYQVYGLALEGQTPVTTVPPGARWLTQEEFHTAAVSTAMKKVFRVYQGQQPGTCMGSKRSQVSSPCSRKKPRMGQQVLDNFFRSHISTDAHSLNSAAQ

SEQ ID NO: 808326 - protein, 349 aa, Homo sapiens; identical to SEQ ID NO: 808312

SEQ ID NO: 808327 - protein, 349 aa, Homo sapiens; identical to SEQ ID NO: 808312

SEQ ID NO: 808328 - protein, 349 aa, Homo sapiens; identical to SEQ ID NO: 808312

SEQ ID NO: 808329 - protein, 392 aa, Homo sapiens
MRWTWTGGHMLEVNQLWAGLGYYSRGRRLQEGARKVVEELGGHMPRTAETLQQLLPGVGRYTAGAIASIAFGQATGVVDGNVARVLCRVRAIGADPSSTLVSQQLWGLAQQLVDPARPGDFNQAAMELGATVCTPQRPLCSQCPVESLCRARQRVEQEQLLASGSLSGSPDVEECAPNTGQCHLCLPPSEPWDQTLGVVNFPRKASRKPPREESSATCVLEQPGALGAQILLVQRPNSGLLAGLWEFPSVTWEPSEQLQRKALLQELQRWAGPLPATHLRHLGEVVHTFSHIKLTYQVYGLALEGQTPVTTVPPGARWLTQEEFHTAAVSTAMKKVFRVYQGQQPGTCMGSKRSQVSSPCSRKKPRMGQQVLDNFFRSHISTDAHSLNSAAQ

SEQ ID NO: 808330 - protein, 195 aa, Homo sapiens
MDAEVAYTAGPGQCFPGGGESTLGWPGLLFSWPAAAGGSSEGLLAGLWEFPSVTWEPSEQLQRKALLQELQRWAGPLPATHLRHLGEVVHTFSHIKLTYQVYGLALEGQTPVTTVPPGARWLTQEEFHTAAVSTAMKKVFRVYQGQQPGTCMGSKRSQVSSPCSRKKPRMGQQVLDNFFRSHISTDAHSLNSAAQ

SEQ ID NO: 808331 - protein, 114 aa, Homo sapiens
LAGLWEFPSVTWEPSEQLQRKALLQELQRWAGPLPATHLRHLGEVSEQRNSQGCWLLRLYPQAYLNPLTLPPGCPHLLSHQADISSIWAGLGRADPSDHRTTRCSLADAGGISH

SEQ ID NO: 808332 - protein, 120 aa, Homo sapiens
GRRWKVILRFHFSFQKNNVEQVVRALPTTPSRESAHVHPHVHLCVQDACPYAYPPMCPGHMSPACLPVCPGCVSPCVSTCVSAHVPGTCVRLCVHPCVRLPMCLGRMSPCVPAVCPWLSH

SEQ ID NO: 808333 - protein, 136 aa, Homo sapiens
MFLHLDSHSSLERTKPTVVGVDTHMELDEVHCCPGRDSGGGFIKGPMLQGLQGEGKLAPIPKPTLPSPSRLTLFVSSSQMEDHGFPARRNGLTQASFIYQMPAGWGSPGGLFLPCQPVPTPVVLKPPLPPCPISWG

SEQ ID NO: 808334 - protein, 532 aa, Homo sapiens
LTASPAPGLKRFSCLRLPRWQHAKGVPVPQGVMASMLLAQRLACSFQHSYRLLVPGSRHISQAAAKVDVEFDYDGPLMKTEVPGPRSQELMKQLNIIQNAEAVHFFCNYEESRGNYLVDVDGNRMLDLYSQISSVPIGYSHPALLKLIQQPQNASMFVNRPALGILPPENFVEKLRQSLLSVAPKGMSQLITMACGSCSNENALKTIFMWYRSKERGQRGFSQEELETCMINQAPGCPDYSILSFMGAFHGRTMGCLATTHSKAIHKIDIPSFDWPIAPFPRLKYPLEEFVKENQQEEARCLEEVEDLIVKYRKKKKTVAGIIVEPIQSEGGDNHASDDFFRKLRDIARKHGCAFLVDEVQTGGGCTGKFWAHEHWGLDDPADVMTFSKKMMTGGFFHKEEFRPNAPYRIFNTWLGDPSKNLLLAEVINIIKREDLLNNAAHAGKALLTGLLDLQARYPQFISRVRGRGTFCSFDTPDDSIRNKLILIARNKGVVLGGCGDKSIRFRPTLVFRDHHAHLFLNIFSDILADFK

SEQ ID NO: 808335 - protein, 561 aa, Homo sapiens
GRSAEPGSPASRWGKSSRHPALPELGARIPQVGTRRIGSRRSETGPGGWQHAKGVPVPQGVMASMLLAQRLACSFQHSYRLLVPGSRHISQAAAKVDVEFDYDGPLMKTEVPGPRSQELMKQLNIIQNAEAVHFFCNYEESRGNYLVDVDGNRMLDLYSQISSVPIGYSHPALLKLIQQPQNASMFVNRPALGILPPENFVEKLRQSLLSVAPKGMSQLITMACGSCSNENALKTIFMWYRSKERGQRGFSQEELETCMINQAPGCPDYSILSFMGAFHGRTMGCLATTHSKAIHKIDIPSFDWPIAPFPRLKYPLEEFVKENQQEEARCLEEVEDLIVKYRKKKKTVAGIIVEPIQSEGGDNHASDDFFRKLRDIARKHGCAFLVDEVQTGGGCTGKFWAHEHWGLDDPADVMTFSKKMMTGGFFHKEEFRPNAPYRIFNTWLGDPSKNLLLAEVINIIKREDLLNNAAHAGKALLTGLLDLQARYPQFISRVRGRGTFCSFDTPDDSIRNKLILIARNKGVVLGGCGDKSIRFRPTLVFRDHHAHLFLNIFSDILADFK

SEQ ID NO: 808336 - protein, 545 aa, Homo sapiens
GRSAEPGSPASRWGKSSRHPALPELGARIPQVGTRRIGSRRSETGPGGWQHAKGVPVPQGVMASMLLAQRLACSFQHSYRLLVPGSRHISQAAAKVDVEFDYDGPLMKTEVPGPRSQELMKQLNIIQNAEAVHFFCNYEESRGNYLVDVDGNRMLDLYSQISSVPIGYSHPALLKLIQQPQNASMFVNRPALGILPPENFVEKLRQSLLSVAPKGMSQLITMACGSCSNENALKTIFMWYRSKERGQRGFSQEELETCMINQAPGCPDYSILSFMGAFHGRTMGCLATTHSKAIHKIDIPSFDWPIAPFPRLKYPLEEFVKENQQEEARCLEEVEDLIVKYRKKKKTVAGIIVEPIQSEGGDNHASDDFFRKLRDIARKHGCAFLVDEVQTGGGCTGKFWAHEHWGLDDPADVMTFSKKMMTGGFFHKEEFRPNAPYRIFNTWLGDPSKNLLLAEVINIIKREDLLNNAAHAGKALLTGLLDLQARYPQFISRVRGRGTFCSFDTPDDSIRNKLILIARNKGKGSGVAAEFHEHPVFPAVAATCC

SEQ ID NO: 808337 - protein, 259 aa, Homo sapiens
LTASPAPGLKRFSCLRLPRWQHAKGVPVPQGVMASMLLAQRLACSFQHSYRLLVPGSRHISQAAAKVDVEFDYDGPLMKTEVPGPRSQELMKQLNIIQNAEAVHFFCNYEESRGNYLVDVDGNRMLDLYSQISSVPIGYSHPALLKLIQQPQNANEAWSRTAGHVQLLQILPDSSPNRSHQLHSHSRGRVPVLPHPRQHGVSLEDFSLTQRVTYLSTHDKELDPRKKSKKGRRNKDPILVRKGVPSPKTYFTLNKQSWS

SEQ ID NO: 808338 - protein, 120 aa, Homo sapiens
MFSLKSIRGECTVKGDLWGGSIFGGLGGGEGREGLVLIFLPAEPMVHIGLSPEILLEPWTHLGKGHGRSWLEFCPTLTNPSNFSKSQSRALHLFLGLAAGPPGCQSISSAIFCDHGCWLP

SEQ ID NO: 808339 - protein, 404 aa, Homo sapiens
GRSAEPGSPASRWGKSSRHPALPELGARIPQVGTRRIGSRRSETGPGGWQHAKGVPVPQGVMASMLLAQRLACSFQHSYRLLVPGSRHISQAAAKVDVEFDYDGPLMKTEVPGPRSQELMKQLNIIQNAEAVHFFCNYEESRGNYLVDVDGNRMLDLYSQISSVPIGYSHPALLKLIQQPQNASMFVNRPALGILPPENFVEKLRQSLLSVAPKGMSQLITMACGSCSNENALKTIFMWYRSKERGQRGFSQEELETCMINQAPGCPDYSILSFMGAFHGRTMGCLATTHSKAIHKIDIPSFDWPIAPFPRLKYPLEEFVKENQQEEARCLEEVEDLIVKYRKKKKTVAGIIVEPIQSEGGDNHASDDFFRKLRDIARKHGCAFLVDEVQTGGASFHRQHPKVQ

SEQ ID NO: 808340 - protein, 107 aa, Homo sapiens
MRHEAWSRTAGHVQLLQILPDSSPNRSHQLHSHSRGRVPVLPHPRQHGVSLEDFSLTQRVTYLSTHDKELDPRKKSKKGRRNKDPILVRKGVPSPKTYFTLNKQSWS

SEQ ID NO: 808341 - protein, 131 aa, Homo sapiens [sequence omitted]

SEQ ID NO: 808342 - protein, 111 aa, Homo sapiens
WPGHCLGEVCCLDAQTHLGRSFLATVMTFRDREAEASNARAFCWVGSQHRDRQMMAHSPMILSPHLRKPTTLQQCKWSSTSCGIPTFCRPKSCSTSSPSWKGGRGPRQPQG

SEQ ID NO: 808343 - protein, 84 aa, Homo sapiens
VCCLDAQTHLGRSFLATVMTFRDREAEASNARAFCWVGSQHRDRQMMAHSPMILSPHLRKPTTLQQCKWSSTSCGIPTFCRPKR

SEQ ID NO: 808344 - protein, 78 aa, Homo sapiens
GRESGARGGGGGREVMLAPGIGAAAAEQQHLRDPGCSVPVARAPAQRPETTRPADPLETLQELLSPGVEGFCEDTDAP

SEQ ID NO: 808345 - protein, 364 aa, Homo sapiens
MPRGRCRQQGPRIPIWAAANYANAHPWQQMDKASPGVAYTPLVDPWIERPCCGDTVCVRTTMEQKSTASGTCGGKPAERGPLAGHMPSSRPHRVDFCWVPGSDPGTFDGSPWLLDRFLAQLGDYMSFHFEHYQDNISRVCEILRRLTGRAQAWAAPYLDGDLPLPDDYELFCQDLKEVVQDPNSFAEYHAVVTCPLPLASSQLPVAPQLPVVRQYLARFLEGLALDMGTAPRSLPAAMATPAVSGSNSVSRSALFEQQLTKESTPGPKEPPVLPSSTCSSKPGPVEPASSQPEEAAPTPVPRLSESANPPAQRPDPAHPGGPKPQKTEEEVLETEGDQEVSLGTPQEVVEAPETPGEPPLSPGF

SEQ ID NO: 808346 - protein, 364 aa, Homo sapiens; identical to SEQ ID NO: 808345

SEQ ID NO: 808347 - protein, 465 aa, Homo sapiens
MTSMASLFSFTSPAVKRLLGWKQGDEEEKWAEKAVDALVKKLKKKKGAMEELEKALSSPGQPSKCVTIPRSLDGRLQVSHRKGLPHVIYCRVWRWPDLQSHHELKPLDICEFPFGSKQKEVCINPYHYKRVESPVLPPVLVPRHNEFNPQHSLLVQFRNLSHNEPHMPQNATFPDSFHQPNNTPFPLSPNSPYPPSPASSTYPNSPASSGPGSPFQLPADTPPPAYMPPDDQMGQDNSQPMDTSNNMIPQIMPSISSRDVQPVAYEEPKHWCSIVYYELNNRVGEAFHASSTSVLVDGFTDPSNNKSRFCLGLLSNVNRNSTIENTRRHIGKGVHLYYVGGEVYAECLSDSSIFVQSRNCNFHHGFHPTTVCKIPSSCSLKIFNNQEFAQLLAQSVNHGFEAVYELTKMCTIRMSFVKGWGAEYHRQDVTSTPCWIEIHLHGPLQWLDKVLTQMGSPLNPISSVS

SEQ ID NO: 808348 - protein, 465 aa, Homo sapiens; identical to SEQ ID NO: 808347

SEQ ID NO: 808349 - protein, 465 aa, Homo sapiens; identical to SEQ ID NO: 808347

SEQ ID NO: 808350 - protein, 465 aa, Homo sapiens; identical to SEQ ID NO: 808347

SEQ ID NO: 808351 - protein, 465 aa, Homo sapiens; identical to SEQ ID NO: 808347

SEQ ID NO: 808352 - protein, 465 aa, Homo sapiens; identical to SEQ ID NO: 808347

SEQ ID NO: 808353 - protein, 239 aa, Homo sapiens
MPPDDQMGQDNSQPMDTSNNMIPQIMPSISSRDVQPVAYEEPKHWCSIVYYELNNRVGEAFHASSTSVLVDGFTDPSNNKSRFCLGLLSNVNRNSTIENTRRHIGKGVHLYYVGGEVYAECLSDSSIFVQSRNCNFHHGFHPTTVCKIPSSCSLKIFNNQEFAQLLAQSVNHGFEAVYELTKMCTIRMSFVKGWGAEYHRQDVTSTPCWIEIHLHGPLQWLDKVLTQMGSPLNPISSVS

SEQ ID NO: 808354 - protein, 423 aa, Homo sapiens
MTSMASLFSFTSPAVKRLLGWKQGDEEEKWAEKAVDALVKKLKKKKGAMEELEKALSSPGQPSKCVTIPRSLDGRLQVSHRKGLPHVIYCRVWRWPDLQSHHELKPLDICEFPFGSKQKEVCINPYHYKRVESPVLPPVLVPRHNEFNPQHSLLVQFRNLSHNEPHMPQNATFPDSFHQPNNTPFPLSPNSPYPPSPASSTYPNSPASSGPGSPFQLPADTPPPAYMPPDDQMGQDNSQPMDTSNNMIPQIMPSISSRDVQPVAYEEPKHWCSIVYYELNNRVGEAFHASSTSVLVDGFTDPSNNKSRFCLGLLSNVNRNSTIENTRRHIGKGVHLYYVGGEVYAECLSDSSIFVQSRNCNFHHGFHPTTVCKIPSSCSLKIFNNQEFAQLLAQSVNHGFEAVYELTKMCTIRMSFVKSLQEI

SEQ ID NO: 808355 - protein, 296 aa, Homo sapiens
MTSMASLFSFTSPAVKRLLGWKQGDEEEKWAEKAVDALVKKLKKKKGAMEELEKALSSPGQPSKCVTIPRSLDGRLQVSHRKGLPHVIYCRVWRWPDLQSHHELKPLDICEFPFGSKQKEVCINPYHYKRVESPVLPPVLVPRHNEFNPQHSLLVQFRNLSHNEPHMPQNATFPDSFHQPNNTPFPLSPNSPYPPSPASSTYPNSPASSGPGSPFQLPADTPPPAYMPPDDQMGQDNSQPMDTSNNMIPQIMPSISSRDVQPVAYEEPKHWCSIVYYELNNRVGLLGDNIDVIPNT

SEQ ID NO: 808356 - protein, 351 aa, Homo sapiens
MTSMASLFSFTSPAVKRLLGWKQGDEEEKWAEKAVDALVKKLKKKKGAMEELEKALSSPGQPSKCVTIPRSLDGRLQVSHRKGLPHVIYCRVWRWPDLQSHHELKPLDICEFPFGSKQKEVCINPYHYKRVESPVLPPVLVPRHNEFNPQHSLLVQFRNLSHNEPHMPQNATFPDSFHQPNNTPFPLSPNSPYPPSPASSTYPNSPASSGPGSPFQLPADTPPPAYMPPDDQMGQDNSQPMDTSNNMIPQIMPSISSRDVQPVAYEEPKHWCSIVYYELNNRVGEAFHASSTSVLVDGFTDPSNNKSRFCLGLLSNVNRNSTIENTRRHIGKGNLVIFLHLIEFNHLLYLP

SEQ ID NO: 808357 - protein, 407 aa, Homo sapiens
GAEGAEVPPPPRASRERARRGEPGTRSESRLPAAAAHGTAATMALLLCFVLLCGVVDFARSLSITTPEEMIEKAKGETAYLPCKFTLSPEDQGPLDIEWLISPADNQKVDQVIILYSGDKIYDDYYPDLKGRVHFTSNDLKSGDASINVTNLQLSDIGTYQCKVKKAPGVANKKIHLVVLVKPSGARCYVDGSEEIGSDFKIKCEPKEGSLPLQYEWQKLSDSQKMPTSWLAEMTSSVISVKNASSEYSGTYSCTVRNRVGSDQCLLRLNVVPPSNKAGLIAGAIIGTLLALALIGLIIFCCRKKRREEKYEKEVHHDIREDVPPPKSRTSTARSYIGSNHSSLGSMSPSNMEGYSKTQYNQVPSEDFERTPQSPTLPPAKVAAPNLSRMGAIPVMIPAQSKDGSIV

SEQ ID NO: 808358 - protein, 294 aa, Homo sapiens
GAEGAEVPPPPRASRERARRGEPGTRSESRLPAAAAHGTAATMALLLCFVLLCGVVDFARSLSITTPEEMIEKAKGETAYLPCKFTLSPEDQGPLDIEWLISPADNQKVDQVIILYSGDKIYDDYYPDLKGRVHFTSNDLKSGDASINVTNLQLSDIGTYQCKVKKAPGVANKKIHLVVLVKPSGARCYVDGSEEIGSDFKIKCEPKEGSLPLQYEWQKLSDSQKMPTSWLAGKMCHLQRAVRPLPEATSAVIIHPWGPCLLPTWKDIPRLSITKYQVKTLNALLRVRLSHLLR

SEQ ID NO: 808359 - protein, 191 aa, Homo sapiens
GAEGAEVPPPPRASRERARRGEPGTRSESRLPAAAAHGTAATMALLLCFVLLCGVVDFARSLSITTPEEMIEKAKGETAYLPCKFTLSPEDQGPLDIEWLISPADNQKVDQVIILYSGDKIYDDYYPDLKGRVHFTSNDLKSGDASINVTNLQLSDIGTYQCKVKKAPGVANKKIHLVVLGKLFLFVLTGY

SEQ ID NO: 808360 - protein, 394 aa, Homo sapiens
GAEGAEVPPPPRASRERARRGEPGTRSESRLPAAAAHGTAATMALLLCFVLLCGVVDFARSLSITTPEEMIEKAKGETAYLPCKFTLSPEDQGPLDIEWLISPADNQKVDQVIILYSGDKIYDDYYPDLKGRVHFTSNDLKSGDASINVTNLQLSDIGTYQCKVKKAPGVANKKIHLVVLVKPSGARCYVDGSEEIGSDFKIKCEPKEGSLPLQYEWQKLSDSQKMPTSWLAEMTSSVISVKNASSEYSGTYSCTVRNRVGSDQCLLRLNVVPPSNKAGLIAGAIIGTLLALALIGLIIFCCRKKRREEKYEKEVHHDIREDVPPPKSRTSTARSYIGSNHSSLGSMSPSNMEGYSKTQYNQVPSEDFERTPQSPTLPPAKFKYPYKTDGITVV

SEQ ID NO: 808361 - protein, 479 aa, Homo sapiens
GAEGAEVPPPPRASRERARRGEPGTRSESRLPAAAAHGTAATMALLLCFVLLCGVVDFARSLSITTPEEMIEKAKGETAYLPCKFTLSPEDQGPLDIEWLISPADNQKVDQVIILYSGDKIYDDYYPDLKGRVHFTSNDLKSGDASINVTNLQLSDIGTYQCKVKKAPGVANKKIHLVVLVKPSGARCYVDGSEEIGSDFKIKCEPKEGSLPLQYEWQKLSDSQKMPTSWLAEMTSSVISVKNASSEYSGTYSCTVRNRVGSDQCLLRLNVVPPSNKAGLIAGAIIGTLLALALIGLIIFCCRKKRREEKYEKEVHHDIREDVPPPKSRTSTARSYIGSNHSSLGSMSPSNMEGYSKTQYNQVPSEDFERTPQSPTLPPAKVAAPPHGVSRYVAPRCGGSSLTPGLKQSSCLYLPKYWDKLIFLKRKEGGNMRPLKKRGRKKVKPRCLERTELQPLPAALLMRGIEFLQAMMFDLRLEQ

SEQ ID NO: 808362 - protein, 314 aa, Homo sapiens
MATQAFVLFQFPFTSCGTTRQITGDRAVYENELVATRDVKNGSRGSVTRDSIFRLHVSCSYSVSSNSLPINVQVFTLPPPFPETQPGPLTLELQIAKDKNYGSYYGVGDYPVVKLLRDPIYVEVSILHRTDPYLGLLLQQCWATPSTDPLSQPQWPILVKGCPYIGDNYQTQLIPVQKALDLPFPSHHQRFSIFTFSFVNPTVEKQALRGPVHLHCSVSVCQPAETPSCVVTCPDLSRRRNFDNSSQNTTASVSSKGPMILLQATKDPPEKLRVPVDSKVLWVAGLSGTLILGALLVSYLAVKKQKSCPDQMCQ

SEQ ID NO: 808363 - protein, 540 aa, Homo sapiens
MWLLRCVLLCVSLSLAVSGQHKPEAPDYSSVLHCGPWSFQFAVNLNQEATSPPVLIAWDNQGLLHELQNDSDCGTWIRKGPGSSVVLEATYSSCYVTEWDSHYIMPVGVEGAGAAEHKVVTERKLLKCPMDLLARDAPDTDWCDSIPARDRLPCAPSPISRGDCEGLGCCYSSEEVNSCYYGNTVTLHCTREGHFSIAVSRNVTSPPLLLDSVRLALRNDSACNPVMATQAFVLFQFPFTSCGTTRQITGDRAVYENELVATRDVKNGSRGSVTRDSIFRLHVSCSYSVSSNSLPINVQVFTLPPPFPETQPGPLTLELQIAKDKNYGSYYGVGDYPVVKLLRDPIYVEVSILHRTDPYLGLLLQQCWATPSTDPLSQPQWPILVKGCPYIGDNYQTQLIPVQKALDLPFPSHHQRFSIFTFSFVNPTVEKQALRGPVHLHCSVSVCQPAETPSCVVTCPDLSRRRNFDNSSQNTTASVSSKGPMILLQATKDPPEKLRVPVDSKVLWVAGLSGTLILGALLVSYLAVKKQKSCPDQMCQ

SEQ ID NO: 808364 - protein, 110 aa, Homo sapiens [sequence omitted]

SEQ ID NO: 808365 - protein, 110 aa, Homo sapiens [sequence omitted]

SEQ ID NO: 808366 - protein, 110 aa, Homo sapiens [sequence omitted]

SEQ ID NO: 808367 - protein, 156 aa, Homo sapiens
MNMVKRIMGRPRQEECSPQDNALGLMHLRRLFTELCHPPRHMTQKEQEEKLYMMLPVFNRVFGNAPPNTMTEKFSDLLQFTTQVSRLMVTEIRRRASNKSTEAASRAIVQFLEINQSEEASRGWMLLTTINLLASSGQKTVDCMTTMSVPSTLVKC

SEQ ID NO: 808368 - protein, 110 aa, Homo sapiens [sequence omitted]

SEQ ID NO: 808369 - protein, 767 aa, Homo sapiens
MEGAMAVRVTAAHTAEAQAEAGREAGEGAVAAVAAALAPSGFLGLPAPFSEEDEDDVHRCGRCQAEFTALEDFVQHKIQKACQRAPPEALPATPATTALLGQEVVPAAPGPEEPITVAHIVVEAASLAADISHASDLVGGGHIKEVIVAAEAELGDGEMAEAPGSPHQQGLGLAGEGEQAQVKLLVNKDGRYVCALCHKTFKTGSILKAHMVTHSSRKDHECKLCGASFRTKGSLIRHHRRHTDERPYKCSKCGKSFRESGALTRHLKSLTPCTEKIRFSVSKDVVVSKEDARAGSGAGAAGLGTATSSVTGEPIETSPVIHLVTDAKGTVIHEVHVQMQELSLGMKALAPEPPVSQELPCSSEGSRENLLHQAMQNSGIVLERAAGEEGALEPAPAAGSSPQPLAVAAPQLPVLEVQPLETQVASEASAVPRTHPCPQCSETFPTAATLEAHKRGHTGPRPFACAQCGKAFPKAYLLKKHQEVHVRERRFRCGDCGKLYKTIAHVRGHRRVHSDERPYPCPKCGKRYKTKNAQQVHFRTHLEEKPHVCQFCSRGFREKGSLVRHVRHHTGEKPFKCYKCGRGFAEHGTLNRHLRTKGGCLLEVEELLVSEDSPAAATTVLTEDPHTVPLLDDAETSEATEIIEGTQTEVDSHIMKVVQQIVHQASAGHQIIVQNVTMDEETALGPEAAAADTITIATPESLTEQVAMTLASAISEGTVLAARAGTSGTEQATVTMVSSEDIEILEHAGELVIASPEGQLEVQTVIV

SEQ ID NO: 808370 - protein, 784 aa, Homo sapiens
MEGAMAVRVTAAHTAEAQAEAGREAGEGAVAAVAAALAPSGFLGLPAPFSEEDEDDVHRCGRCQAEFTALEDFVQHKIQKACQRAPPEALPATPATTALLGQEVVPAAPGPEEPITVAHIVVEAASLAADISHASDLVGGGHIKEVIVAAEAELGDGEMAEAPGSPHQQGLGLAGEGEQAQVKLLVNKDGRYVCALCHKTFKTGSILKAHMVTHSSRKDHECKLCGASFRTKGSLIRHHRRHTDERPYKCSKCGKSFRESGALTRHLKSLTPCTEKIRFSVSKDVVVSKEDARAGSGAGAAGLGTATSSVTGEPIETSPVIHLVTDAKGTVIHEVHVQMQELSLGMKALAPEPPVSQELPCSSEGSRENLLHQAMQNSGIVLERAAGEEGALEPAPAAGSSPQPLAVAAPQLPVLEVQPLETQVASEASAVPRTHPCPQCSETFPTAATLEAHKRGHTGPRPFACAQCGKAFPKAYLLKKHQEVHVRERRFRCGDCGKLYKTIAHVRGHRRVHSDERPYPCPKCGKRYKTKNAQQVHFRTHLEEKPHVCQFCSRGFREKGSLVRHVRHHTGEKPFKCYKCGRGFAEHGTLNRHLRTKGGCLLEVEELLVSEDSPAAATTVLTEDPHTVLVEFSSVVADTQEYIIEATADDAETSEATEIIEGTQTEVDSHIMKVVQQIVHQASAGHQIIVQNVTMDEETALGPEAAAADTITIATPESLTEQVAMTLASAISEGTVLAARAGTSGTEQATVTMVSSEDIEILEHAGELVIASPEGQLEVQTVIV

SEQ ID NO: 808371 - protein, 834 aa, Homo sapiens
MEGAMAVRVTAAHTAEAQAEAGREAGEGAVAAVAAALAPSGFLGLPAPFSEEDEDDVHRCGRCQAEFTALEDFVQHKIQKACQRAPPEALPATPATTALLGQEVVPAAPGPEEPITVAHIVVEAASLAADISHASDLVGGGHIKEVIVAAEAELGDGEMAEAPGSPHQQGLGLAGEGEQAQVKLLVNKDGRYVCALCHKTFKTGSILKAHMVTHSSRKDHECKLCGASFRTKGSLIRHHRRHTDERPYKCSKCGKSFRESGALTRHLKSLTPCTEKIRFSVSKDVVVSKEDARAGSGAGAAGLGTATSSVTGEPIETSPVIHLVTDAKGTVIHEVHVQMQELSLGMKALAPEPPVSQELPCSSEGSRENLLHQAMQNSGIVLERAAGEEGALEPAPAAGSSPQPLAVAAPQLPVLEVQPLETQVASEASAVPRTHPCPQCSETFPTAATLEAHKRGHTGPRPFACAQCGKAFPKAYLLKKHQEVHVRERRFRCGDCGKLYKTIAHVRGHRRVHSDERPYPCPKCGKRYKTKNAQQVHFRTHLEEKPHVCQFCSRGFREKGSLVRHVRHHTGEKPFKCYKCGRGFAEHGTLNRHLRTKGGCLLEVEELLVSEDSPAAATTVLTEDPHTVLVEFSSVVADTQEYIIEVGVGPWGRAGTQGQPRLTSVLLPSAQATADDAETSEATEIIEGTQTEVRGRAGGGGEAPWHSRSCWAVALQVDSHIMKVVQQIVHQASAGHQIIVQNVTMDEETALGPEAAAADTITIATPESLTEQVAMTLASAISEGTVLAARAGTSGTEQATVTMVSSEDIEILEHAGELVIASPEGQLEVQTVIV

SEQ ID NO: 808372 - protein, 736 aa, Homo sapiens
MLVADEDDVHRCGRCQAEFTALEDFVQHKIQKACQRAPPEALPATPATTALLGQEVVPAAPGPEEPITVAHIVVEAASLAADISHASDLVGGGHIKEVIVAAEAELGDGEMAEAPGSPHQQGLGLAGEGEQAQVKLLVNKDGRYVCALCHKTFKTGSILKAHMVTHSSRKDHECKLCGASFRTKGSLIRHHRRHTDERPYKCSKCGKSFRESGALTRHLKSLTPCTEKIRFSVSKDVVVSKEDARAGSGAGAAGLGTATSSVTGEPIETSPVIHLVTDAKGTVIHEVHVQMQELSLGMKALAPEPPVSQELPCSSEGSRENLLHQAMQNSGIVLERAAGEEGALEPAPAAGSSPQPLAVAAPQLPVLEVQPLETQVASEASAVPRTHPCPQCSETFPTAATLEAHKRGHTGPRPFACAQCGKAFPKAYLLKKHQEVHVRERRFRCGDCGKLYKTIAHVRGHRRVHSDERPYPCPKCGKRYKTKNAQQVHFRTHLEEKPHVCQFCSRGFREKGSLVRHVRHHTGEKPFKCYKCGRGFAEHGTLNRHLRTKGGCLLEVEELLVSEDSPAAATTVLTEDPHTVLVEFSSVVADTQEYIIEATADDAETSEATEIIEGTQTEVDSHIMKVVQQIVHQASAGHQIIVQNVTMDEETALGPEAAAADTITIATPESLTEQVAMTLASAISEGTVLAARAGTSGTEQATVTMVSSEDIEILEHAGELVIASPEGQLEVQTVIV

SEQ ID NO: 808373 - protein, 784 aa, Homo sapiens; identical to SEQ ID NO: 808370

SEQ ID NO: 808374 - protein, 468 aa, Homo sapiens
MEGAMAVRVTAAHTAEAQAEAGREAGEGAVAAVAAALAPSGFLGLPAPFSEEDEDDVHRCGRCQAEFTALEDFVQHKIQKACQRAPPEALPATPATTALLGQEVVPAAPGPEEPITVAHIVVEAASLAADISHASDLVGGGHIKEVIVAAEAELGDGEMAEAPGSPHQQGLGLAGEGEQAQVKLLVNKDGRYVCALCHKTFKTGSILKAHMVTHSSRKDHECKLCGASFRTKGSLIRHHRRHTDERPYKCSKCGKSFRESGALTRHLKSLTPCTEKIRFSVSKDVVVSKEDARAGSGAGAAGLGTATSSVTGEPIETSPVIHLVTDAKGTVIHEVHVQMQELSLGMKALAPEQVASEASAVPRTHPCPQCSETFPTAATLEAHKRGHTGPRPFACAQCGKAFPKAYLLKKHQEVHVRERRFRCGDCGKLYKTIAHVRGHRRVHSDERPYPCPKCGKRYKTKMHLWPQD

SEQ ID NO: 808375 - protein, 297 aa, Homo sapiens
MEGAMAVRVTAAHTAEAQAEAGREAGEGAVAAVAAALAPSGFLGLPAPFSEEGNRADPEGAAGVRAVHPGLAEARMARAAGSTDPPRPRHLADLAGPSQPSTKPPDEDDVHRCGRCQAEFTALEDFVQHKIQKACQRAPPEALPATPATTALLGQEVVPAAPGPEEPITVAHIVVEAASLAADISHASDLVGGGHIKEVIVAAEAELGDGEMAEAPGSPHQQGLGLAGEGEQAQVKLLVNKDGRYVCALCHKTFKTGSILKAHMVTHSSRKDHECKLCGASFRTKGPAGGADGHRLA

SEQ ID NO: 808376 - protein, 257 aa, Homo sapiens
MLVADEDDVHRCGRCQAEFTALEDFVQHKIQKACQRAPPEALPATPATTALLGQEVVPAAPGPEEPITVAHIVVEAASLAADISHASDLVGKPTSMNRWPDRPSWLGPEDGAPAACMLVSPETRAWLGGAAASWQPFCGHSLQEEEALGTGPSSGVHSGRGHTQAPGSHWAVLSPVSFPGWSLPCPSQNLPHFPATPWFLLPARRQQHPPGTHQNGPLAQQRLWRVGTGWTGLSRLSSWARTCCWPWPALPSAPSGV

SEQ ID NO: 808377 - protein, 784 aa, Homo sapiens; identical to SEQ ID NO: 808370

SEQ ID NO: 808378 - protein, 837 aa, Homo sapiens
MEGAMAVRVTAAHTAEAQAEAGREAGEGAVAAVAAALAPSGFLGLPAPFSEEGNRADPEGAAGVRAVHPGLAEARMARAAGSTDPPRPRHLADLAGPSQPSTKPPDEDDVHRCGRCQAEFTALEDFVQHKIQKACQRAPPEALPATPATTALLGQEVVPAAPGPEEPITVAHIVVEAASLAADISHASDLVGGGHIKEVIVAAEAELGDGEMAEAPGSPHQQGLGLAGEGEQAQVKLLVNKDGRYVCALCHKTFKTGSILKAHMVTHSSRKDHECKLCGASFRTKGSLIRHHRRHTDERPYKCSKCGKSFRESGALTRHLKSLTPCTEKIRFSVSKDVVVSKEDARAGSGAGAAGLGTATSSVTGEPIETSPVIHLVTDAKGTVIHEVHVQMQELSLGMKALAPEPPVSQELPCSSEGSRENLLHQAMQNSGIVLERAAGEEGALEPAPAAGSSPQPLAVAAPQLPVLEVQPLETQVASEASAVPRTHPCPQCSETFPTAATLEAHKRGHTGPRPFACAQCGKAFPKAYLLKKHQEVHVRERRFRCGDCGKLYKTIAHVRGHRRVHSDERPYPCPKCGKRYKTKNAQQVHFRTHLEEKPHVCQFCSRGFREKGSLVRHVRHHTGEKPFKCYKCGRGFAEHGTLNRHLRTKGGCLLEVEELLVSEDSPAAATTVLTEDPHTVLVEFSSVVADTQEYIIEATADDAETSEATEIIEGTQTEVDSHIMKVVQQIVHQASAGHQIIVQNVTMDEETALGPEAAAADTITIATPESLTEQVAMTLASAISEGTVLAARAGTSGTEQATVTMVSSEDIEILEHAGELVIASPEGQLEVQTVIV

SEQ ID NO: 808379 - protein, 868 aa, Homo sapiens
MEGAMAVRVTAAHTAEAQAEAGREAGEGAVAAVAAALAPSGFLGLPAPFSEEDEDDVHRCGRCQAEFTALEDFVQHKIQKACQRAPPEALPATPATTALLGQEVVPAAPGPEEPITVAHIVVEAASLAADISHASDLVGGGHIKEVIVAAEAELGDGEMAEAPGSPHQQGLGLAGEGEQAQVKLLVNKDGRYVCALCHKTFKTGSILKAHMVTHSSRKDHECKLCGASFRTKGSLIRHHRRHTDERPYKCSKCGKSFRESGALTRHLKSLTPCTEKIRFSVSKDVVVSKEDARAGSGAGAAGLGTATSSVTGEPIETSPVIHLVTDAKGTVIHEVHVQMQELSLGMKALAPEVGATGGPGGLLCLLPARCQSLFWALAPGSEPGRRGLGFPQGEQGQWERHGGLRVCTRLLACVCPMGWVLEPGCLASLLSLPPLQPPVSQELPCSSEGSRENLLHQAMQNSGIVLERAAGEEGALEPAPAAGSSPQPLAVAAPQLPVLEVQPLETQVASEASAVPRTHPCPQCSETFPTAATLEAHKRGHTGPRPFACAQCGKAFPKAYLLKKHQEVHVRERRFRCGDCGKLYKTIAHVRGHRRVHSDERPYPCPKCGKRYKTKNAQQVHFRTHLEEKPHVCQFCSRGFREKGSLVRHVRHHTGEKPFKCYKCGRGFAEHGTLNRHLRTKGGCLLEVEELLVSEDSPAAATTVLTEDPHTVLVEFSSVVADTQEYIIEATADDAETSEATEIIEGTQTEVDSHIMKVVQQIVHQASAGHQIIVQNVTMDEETALGPEAAAADTITIATPESLTEQVAMTLASAISEGTVLAARAGTSGTEQATVTMVSSEDIEILEHAGELVIASPEGQLEVQTVIV

SEQ ID NO: 808380 - protein, 359 aa, Homo sapiens
MEGAMAVRVTAAHTAEAQAEAGREAGEGAVAAVAAALAPSGFLGLPAPFSEEDEDDVHRCGRCQAEFTALEDFVQHKIQKACQRAPPEALPATPATTALLGQEVVPAAPGPEEPITVAHIVVEAASLAADISHASDLVGGGHIKEVIVAAEAELGDGEMAEAPGSPHQQGLGLAGEGEQAQVKLLVNKDGRYVCALCHKTFKTGSILKAHMVTHSSRKDHECKLCGASFRTKGSLIRHHRRHTDERPYKCSKCGKSFRESGALTRHLKSLTPCTEKIRFSVSKDVVVSKEDARAGSGAGAAGLGTATSSVTGEPIETSPVIHLCDHGVIRGHRDPGACRRAGHRLAGGPAGGADGHRLA

SEQ ID NO: 808381 - protein, 103 aa, Homo sapiens
MAQLSTSLAKEENNAHKIAPDGGATFLGQVLQLKSMNRVLPAGYSSCLTSRKLVTCSWRSPSYRRPKKLRKHRGNNQGSPGKATQLHHHSLVPEKINQNKQVY

SEQ ID NO: 808382 - protein, 172 aa, Homo sapiens
MWGAVWGLAVLPPQQPLLPRPQWQLGGCHTELSGASYCSAELGPPVSRRSLGLGRAAPRLSGGDTIGGDAGSEAKATFPGTESLACTRHRGGMEDAVTLIHMTSPSSQQPVGGPPGPTVPPSQLGTEAQGGKGTCPRAPSPQIPRRTPHTMLPPTTQRTWPAGTYQVPCGSQ

SEQ ID NO: 808383 - protein, 1162 aa, Homo sapiens
MAAAPALKHWRTTLERVEKFVSPLYFTDCNLRGRLFGASCPVAVLSSFLTPERLPYQEAVQRDFRPAQVGDSFGPTWWTCWFRVELTIPEAWVGQEVHLCWESDGEGLVWRDGEPVQGLTKEGEKTSYVLTDRLGERDPRSLTLYVEVACNGLLGAGKGSMIAAPDPEKMFQLSRAELAVFHRDVHMLLVDLELLLGIAKGLGKDNQRSFQALYTANQMVNVCDPAQPETFPVAQALASRFFGQHGGESQHTIHATGHCHIDTAWLWPFKETVRKCARSWVTALQLMERNPEFIFACSQAQQLEWVKSRYPGLYSRIQEFACRGQFVPVGGTWVEMDGNLPSGEAMVRQFLQGQNFFLQEFGKMCSEFWLPDTFGYSAQLPQIMHGCGIRRFLTQKLSWNLVNSFPHHTFFWEGLDGSRVLVHFPPGDSYGMQGSVEEVLKTVANNRDKGRANHSAFLFGFGDGGGGPTQTMLDRLKRLSNTDGLPRVQLSSPRQLFSALESDSEQLCTWVGELFLELHNGTYTTHAQIKKGNRECERILHDVELLSSLALARSAQFLYPAAQLQHLWRLLLLNQFHDVVTGSCIQMVAEEAMCHYEDIRSHGNTLLSAAAAALCAGEPGPEGLLIVNTLPWKRIEVMALPKPGGAHSLGRAEGKGCYCSRKDGGQTDQAWDTPRDLGAPDWRVVDIFHQPIPTCASFLKGQEGCTDAQASPPALVTVPSMGYAPVPPPTSLQPLLPQQPVFVVQEVSPACPGGQELCWDTFLQLRVLSSPVWSKWGGGAGVGVGRLLVWEAPTDSASRPPPTKTDGSVTLDNGIIRVKLDPTGRLTSLVLVASGREAIAEGAVGNQFVLFDDVPLYWDAWDVMDYHLETRKPVLGQAGTLAVGTEGGLRGSAWFLLQISPNSRLSQEVVLDVGCPYVRFHTEVHWHEAHKFLKVEFPARVRSSQATYEIQFGHLQRPTHYNTSWDWARFEVWAHRWMDLSEHGFGLALLNDCKYGASVRGSILSLSLLRAPKAPDATADTGRHEFTYALMPHKGSFQDAGVIQAAYSLNFPLLALPAPSPAPATSWSAFSVSSPAVVLETVKQAESSPQRRSLVLRLYEAHGSHVDCWLHLSLPVQEAILCDLLERPDPAGHLTLRDNRLKLTFSPFQVLSLLLVLQPPPH

SEQ ID NO: 808384 - protein, 1068 aa, Homo sapiens
MAAAPALKHWRTTLERVEKFVSPLYFTDCNLRGRLFGASCPVAVLSSFLTPERLPYQEAVQRDFRPAQVGDSFGPTWWTCWFRVELTIPEAWVGQEVHLCWESDGEGLVWRDGEPVQGLTKEGEKTSYVLTDRLGERDPRSLTLYVEVACNGLLGAGKGSMIAAPDPEKMFQLSRAELAVFHRDVHMLLVDLELLLGIAKGLGKDNQRSFQALYTANQMVNVCDPAQPETFPVAQALASRFFGQHGGESQHTIHATGHCHIDTAWLWPFKETVRKCARSWVTALQLMERNPEFIFACSQAQQLEWVKSRYPGLYSRIQEFACRGQFVPVGGTWVEMDGNLPSGEAMVRQFLQGQNFFLQEFGKMCSEFWLPDTFGYSAQLPQIMHGCGIRRFLTQKLSWNLVNSFPHHTFFWEGLDGSRVLVHFPPGDSYGMQGSVEEVLKTVANNRDKGRANHSAFLFGFGDGGGGPTQTMLDRLKRLSNTDGLPRVQLSSPRQLFSALESDSEQLCTWVGELFLELHNGTYTTHAQIKKGNRECERILHDVELLSSLALARSAQFLYPAAQLQHLWRLLLLNQFHDVVTGSCIQMVAEEAMCHYEDIRSHGNTLLSAAAAALCAGEPGPEGLLIVNTLPWKRIEVMALPKPGGAHSLALVTVPSMGYAPVPPPTSLQPLLPQQPVFVVQETDGSVTLDNGIIRVKLDPTGRLTSLVLVASGREAIAEGAVGNQFVLFDDVPLYWDAWDVMDYHLETRYRLGACGDGGGGGNTGCSGSVCPPLSHRKPVLGQAGTLAVGTEGGLRGSAWFLLQISPNSRLSQEVVLDVGCPYVRFHTEVHWHEAHKFLKVEFPARVRSSQATYEIQFGHLQRPTHYNTSWDWARFEVWAHRWMDLSEHGFGLALLNDCKYGASVRGSILSLSLLRAPKAPDATADTGRHEFTYALMPHKGSFQDAGVIQAAYSLNFPLLALPAPSPAPATSWSAFSVSSPAVVLETVKQAESSPQRRSLVLRLYEAHGSHVDCWLHLSLPVQEAILCDLLERPDPAGHLTLRDNRLKLTFSPFQVLSLLLVLQPPPH

SEQ ID NO: 808385 - protein, 1126 aa, Homo sapiens
MAAAPALKHWRTTLERVEKFVSPLYFTDCNLRGRLFGASCPVAVLSSFLTPERLPYQEAVQRDFRPAQVGDSFGPTWWTCWFRVELTIPEAWVGQEVHLCWESDGEGLVWRDGEPVQGLTKEGEKTSYVLTDRLGERDPRSLTLYVEVACNGLLGAGKGSMIAAPDPEKMFQLSRAELAVFHRDVHMLLVDLELLLGIAKGLGKDNQRSFQALYTANQMVNVCDPAQPETFPVAQALASRFFGQHGGESQHTIHATGHCHIDTAWLWPFKETVRKCARSWVTALQLMERNPEFIFACSQAQQLEWVKSRYPGLYSRIQEFACRGQFVPVGGTWVEMDGNLPSGEAMVRQFLQGQNFFLQEFGKMCSEFWLPDTFGYSAQLPQIMHGCGIRRFLTQKLSWNLVNSFPHHTFFWEGLDGSRVLVHFPPGDSYGMQGSVEEVLKTVANNRDKGRANHSAFLFGFGDGGGGPTQTMLDRLKRLSNTDGLPRVQLSSPRQLFSALESDSEQLCTWVGELFLELHNGTYTTHAQIKKGNRECERILHDVELLSSLALARSAQFLYPAAQLQHLWRLLLLNQFHDVVTGSCIQMVAEEAMCHYEDIRSHGNTLLSAAAAALCAGEPGPEGLLIVNTLPWKRIEVMALPKPGGAHSLALVTVPSMGYAPVPPPTSLQPLLPQQPVFVVQEVSPACPGGQELCWDTFLQLRVLSSPVWSKWGGGAGVGVGRLLVWEAPTDSASRPPPTKTDGSVTLDNGIIRVKLDPTGRLTSLVLVASGREAIAEGAVGNQFVLFDDVPLYWDAWDVMDYHLETRYRLGACGDGGGGGNTGCSGSVCPPLSHRKPVLGQAGTLAVGTEGGLRGSAWFLLQISPNSRLSQEVVLDVGCPYVRFHTEVHWHEAHKFLKVEFPARVRSSQATYEIQFGHLQRPTHYNTSWDWARFEVWAHRWMDLSEHGFGLALLNDCKYGASVRGSILSLSLLRAPKAPDATADTGRHEFTYALMPHKGSFQDAGVIQAAYSLNFPLLALPAPSPAPATSWSAFSVSSPAVVLETVKQAESSPQRRSLVLRLYEAHGSHVDCWLHLSLPVQEAILCDLLERPDPAGHLTLRDNRLKLTFSPFQVLSLLLVLQPPPH

SEQ ID NO: 808386 - protein, 1162 aa, Homo sapiens; identical to SEQ ID NO: 808383

SEQ ID NO: 808387 - protein, 1162 aa, Homo sapiens; identical to SEQ ID NO: 808383

SEQ ID NO: 808388 - protein, 1075 aa, Homo sapiens
MAAAPALKHWRTTLERVEKFVSPLYFTDCNLRGRLFGASCPVAVLSSFLTPERLPYQEAVQRDFRPAQVGDSFGPTWWTCWFRVELTIPEAWVGQEVHLCWESDGEGLVWRDGEPVQGLTKEGEKTSYVLTDRLGERDPRSLTLYVEVACNGLLGAGKGSMIAAPDPEKMFQLSRAELAVFHRDVHMLLVDLELLLGIAKGLGKDNQRSFQALYTANQMVNVCDPAQPETFPVAQALASRFFGQHGGESQHTIHATGHCHIDTAWLWPFKETVRKCARSWVTALQLMERNPEFIFACSQAQQLEWVKSRYPGLYSRIQEFACRGQFVPVGGTWVEMDGNLPSGEAMVRQFLQGQNFFLQEFGKMCSEFWLPDTFGYSAQLPQIMHGCGIRRFLTQKLSWNLVNSFPHHTFFWEGLDGSRVLVHFPPGDSYGMQGSVEEVLKTVANNRDKGRANHSAFLFGFGDGGGGPTQTMLDRLKRLSNTDGLPRVQLSSPRQLFSALESDSEQLCTWVGELFLELHNGTYTTHAQIKKGNRECERILHDVELLSSLALARSAQFLYPAAQLQHLWRLLLLNQFHDVVTGSCIQMVAEEAMCHYEDIRSHGNTLLSAAAAALCAGEPGPEGLLIVNTLPWKRIEVMALPKPGGAHSLGRAEGKGCYCSRKDGGQTDQAWDTPRDLGAPDWRVVDIFHQPIPTCASFLKGQEGCTDAQASPPALVTVPSMGYAPVPPPTSLQPLLPQQPVFVVQEVSPACPGGQELCWDTFLQLRVLSSPVWSKWGGGAGVGVGRLLVWEAPTDSASRPPPTKTDGSVTLDNGIIRVKLDPTGRLTSLVLVASGREAIAEGAVGNQFVLFDDVPLYWDAWDVMDYHLETRKPVLGQAGTLAVGTEGGLRGSAWFLLQISPNSRLSQEVVLDVGCPYVRFHTEVHWHEAHKFLKVEFPARVRSSQATYEIQFGHLQRPTHYNTSWDWARFEVWAHRWMDLSEHGFGLALLNDCKYGASVRGSILSLSLLRAPKAPDATADTGRHEFTYALMPHKAQPSARHLLECVFRVFTRGRIGDRQAGGEQPPAPLAGPEAV

SEQ ID NO: 808389 - protein, 1189 aa, Homo sapiens
MAAAPALKHWRTTLERVEKFVSPLYFTDCNLRGRLFGASCPVAVLSSFLTPERLPYQEAVQRDFRPAQVGDSFGPTWWTCWFRVELTIPEAWVGQEVHLCWESDGEGLVWRDGEPVQGLTKEGEKTSYVLTDRLGERDPRSLTLYVEVACNGLLGAGKGSMIAAPDPEKMFQLSRAELAVFHRDVHMLLVDLELLLGIAKGLGKDNQRSFQALYTANQMVNVCDPAQPETFPVAQALASRFFGQHGGESQHTIHATGHCHIDTAWLWPFKETVRKCARSWVTALQLMERNPEFIFACSQAQQLEWVKSRYPGLYSRIQEFACRGQFVPVGGTWVEMDGNLPSGEAMVRQFLQGQNFFLQEFGKMCSEFWLPDTFGYSAQLPQIMHGCGIRRFLTQKLSWNLVNSFPHHTFFWEGLDGSRVLVHFPPGDSYGMQGSVEEVLKTVANNRDKGRANHSAFLFGFGDGGGGPTQTMLDRLKRLSNTDGLPRVQLSSPRQLFSALESDSEQLCTWVGELFLELHNGTYTTHAQIKKGNRECERILHDVELLSSLALARSAQFLYPAAQLQHLWRLLLLNQFHDVVTGSCIQMVAEEAMCHYEDIRSHGNTLLSAAAAALCAGEPGPEGLLIVNTLPWKRIEVMALPKPGGAHSLGRAEGKGCYCSRKDGGQTDQAWDTPRDLGAPDWRVVDIFHQPIPTCASFLKGQEGCTDAQASPPALVTVPSMGYAPVPPPTSLQPLLPQQPVFVVQEVSPACPGGQELCWDTFLQLRVLSSPVWSKWGGGAGVGVGRLLVWEAPTDSASRPPPTKTDGSVTLDNGIIRVKLDPTGRLTSLVLVASGREAIAEGAVGNQFVLFDDVPLYWDAWDVMDYHLETRKPVLGQAGTLAVGTEGGLRGSAWFLLQISPNSRLSQEVVLDVGCPYVRFHTEVHWHEAHKFLKVEFPARVRSSQATYEIQFGHLQRPTHYNTSWDWARFEVWAHRWMDLSEHGFGLALLNDCKYGASVRGSILSLSLLRAPKAPDATADTGRHEFTYALMPHKGSFQDAGVIQAAYSLNFPLLALPAPSPAPATSWSAFSVSSPAVVLETVKQARGGTCWGRGSELGLPSAPPTRRVPLQAESSPQRRSLVLRLYEAHGSHVDCWLHLSLPVQEAILCDLLERPDPAGHLTLRDNRLKLTFSPFQVLSLLLVLQPPPH

SEQ ID NO: 808390 - protein, 805 aa, Homo sapiens
MAAAPALKHWRTTLERVEKFVSPLYFTDCNLRGRLFGASCPVAVLSSFLTPERLPYQEAVQRDFRPAQVGDSFGPTWWTCWFRVELTIPEAWVGQEVHLCWESDGEGLVWRDGEPVQGLTKEGEKTSYVLTDRLGERDPRSLTLYVEVACNGLLGAGKGSMIAAPDPEKMFQLSRAELAVFHRDVHMLLVDLELLLGIAKGLGKDNQRSFQALYTANQMVNVCDPAQPETFPVAQALASRFFGQHGGESQHTIHATGHCHIDTAWLWPFKETVRKCARSWVTALQLMERNPEFIFACSQAQQLEWVKSRYPGLYSRIQEFACRGQFVPVGGTWVEMDGNLPSGEAMVRQFLQGQNFFLQEFGKMCSEFWLPDTFGYSAQLPQIMHGCGIRRFLTQKLSWNLVNSFPHHTFFWEGLDGSRVLVHFPPGDSYGMQGSVEEVLKTVANNRDKGRANHSAFLFGFGDGGGGPTQTMLDRLKRLSNTDGLPRVQLSSPRQLFSALESDSEQLCTWVGELFLELHNGTYTTHAQIKKGNRECERILHDVELLSSLALARSAQFLYPAAQLQHLWRLLLLNQFHDVVTGSCIQMVAEEAMCHYEDIRSHGNTLLSAAAAALCAGEPGPEGLLIVNTLPWKRIEVMALPKPGGAHSLALVTVPSMGYAPVPPPTSLQPLLPQQPVFVVQETDGSVTLDNGIIRVKLDPTGRLTSLVLVASGREAIAEGAVGNQFVLFDDVPLYWDAWDVMDYHLETRKPVLGQAGTLAVGTEGGLRGSAWFLLQISPNSRLSQEVVLDVGCPYVRFHTEVVGG

SEQ ID NO: 808391 - protein, 817 aa, Homo sapiens
MAAAPALKHWRTTLERVEKFVSPLYFTDCNLRGRLFGASCPVAVLSSFLTPERLPYQEAVQRDFRPAQVGDSFGPTWWTCWFRVELTIPEAWVGQEVHLCWESDGEGLVWRDGEPVQGLTKEGEKTSYVLTDRLGERDPRSLTLYVEVACNGLLGAGKGSMIAAPDPEKMFQLSRAELAVFHRDVHMLLVDLELLLGIAKGLGKDNQRSFQALYTANQMVNVCDPAQPETFPVAQALASRFFGQHGGESQHTIHATGHCHIDTAWLWPFKETVRKCARSWVTALQLMERNPEFIFACSQAQQLEWVKSRYPGLYSRIQEFACRGQFVPVGGTWVEMDGNLPSGEAMVRQFLQGQNFFLQEFGKMCSEFWLPDTFGYSAQLPQIMHGCGIRRFLTQKLSWNLVNSFPHHTFFWEGLDGSRVLVHFPPGDSYGMQGSVEEVLKTVANNRDKGRANHSAFLFGFGDGGGGPTQTMLDRLKRLSNTDGLPRVQLSSPRQLFSALESDSEQLCTWVGELFLELHNGTYTTHAQIKKGNRECERILHDVELLSSLALARSAQFLYPAAQLQHLWRLLLLNQFHDVVTGSCIQMVAEEAMCHYEDIRSHGNTLLSAAAAALCAGEPGPEGLLIVNTLPWKRIEVMALPKPGGAHSLALVTVPSMGYAPVPPPTSLQPLLPQQPVFVVQETDGSVTLDNGIIRVKLDPTGRLTSLVLVASGREAIAEGAVGNQFVLFDDVPLYWDAWDVMDYHLETRKPVLGQAGTLAVGTEGGLRGSAWFLLQISPNSRLSQEVVLDVGCPYVRFHTEVHWHEAHKFLISASPA

SEQ ID NO: 808392 - protein, 592 aa, Homo sapiens
MAAAPALKHWRTTLERVEKFVSPLYFTDCNLRGRLFGASCPVAVLSSFLTPERLPYQEAVQRDFRPAQVGDSFGPTWWTCWFRVELTIPEAWVGQEVHLCWESDGEGLVWRDGEPVQGLTKEGEKTSYVLTDRLGERDPRSLTLYVEVACNGLLGAGKGSMIAAPDPEKMFQLSRAELAVFHRDVHMLLVDLELLLGIAKGLGKDNQRSFQALYTANQMVNVCDPAQPETFPVAQALASRFFGQHGGESQHTIHATGHCHIDTAWLWPFKETVRKCARSWVTALQLMERNPEFIFACSQAQQLEWVKSRYPGLYSRIQEFACRGQFVPVGGTWVEMDGNLPSGEAMVRQFLQGQNFFLQEFGKMCSEFWLPDTFGYSAQLPQIMHGCGIRRFLTQKLSWNLVNSFPHHTFFWEGLDGSRVLVHFPPGDSYGMQGSVEEVLKTVANNRDKGRANHSAFLFGFGDGGGGPTQTMLDRLKRLSNTDGLPRVQLSSPRQLFSALESDSEQLCTWVGELFLELHNGTYTTHAQIKKGNRECERISAQLPQIMHGCGIRRFLTQKLSWNLVNSFPHHTFFWEGLDGSRVLVHFPPGDS

SEQ ID NO: 808393 - protein, 66 aa, Homo sapiens
IKKGNRECERILHDVELLSSLALARSAQFLYPAAQLQHLWRSAQFCPCHPPDCSLQLPLCLPLPAF

SEQ ID NO: 808394 - protein, 1040 aa, Homo sapiens
MAAAPALKHWRTTLERVEKFVSPLYFTDCNLRGRLFGASCPVAVLSSFLTPERLPYQEAVQRDFRPAQVGDSFGPTWWTCWFRVELTIPEAWVGQEVHLCWESDGEGLVWRDGEPVQGLTKEGEKTSYVLTDRLGERDPRSLTLYVEVACNGLLGAGKGSMIAAPDPEKMFQLSRAELAVFHRDVHMLLVDLELLLGIAKGLGKDNQRSFQALYTANQMVNVCDPAQPETFPVAQALASRFFGQHGGESQHTIHATGHCHIDTAWLWPFKETVRKCARSWVTALQLMERNPEFIFACSQAQQLEWVKSRYPGLYSRIQEFACRGQFVPVGGTWVEMDGNLPSGEAMVRQFLQGQNFFLQEFGKMCSEFWLPDTFGYSAQLPQIMHGCGIRRFLTQKLSWNLVNSFPHHTFFWEGLDGSRVLVHFPPGDSYGMQGSVEEVLKTVANNRDKGRANHSAFLFGFGDGGGGPTQTMLDRLKRLSNTDGLPRVQLSSPRQLFSALESDSEQLCTWVGELFLELHNGTYTTHAQIKKGNRECERILHDVELLSSLALARSAQFLYPAAQLQHLWRLLLLNQFHDVVTGSCIQMVAEEAMCHYEDIRSHGNTLLSAAAAALCAGEPGPEGLLIVNTLPWKRIEVMALPKPGGAHSLALVTVPSMGYAPVPPPTSLQPLLPQQPVFVVQETDGSVTLDNGIIRVKLDPTGRLTSLVLVASGREAIAEGAVGNQFVLFDDVPLYWDAWDVMDYHLETRKPVLGQAGTLAVGTEGGLRGSAWFLLQISPNSRLSQEVVLDVGCPYVRFHTEVHWHEAHKFLKVEFPARVRSSQATYEIQFGHLQRPTHYNTSWDWARFEVWAHRWMDLSEHGFGLALLNDCKYGASVRGSILSLSLLRAPKAPDATADTGRHEFTYALMPHKGSFQDAGVIQAAYSLNFPLLALPAPSPAPATSWSAFSVSSPAVVLETVKQAESSPQRRSLVLRLYEAHGSHVDCWLHLSLPVQEAILCDLLERPDPAGHLTLRDNRLKLTFSPFQVLSLLLVLQPPPH

SEQ ID NO: 808395 - protein, 217 aa, Homo sapiens
LCRIACVNCIRETEGSNREQGGNRQQRKPQVVGAARQVRVRPFSFALTAPYMTRRFEAEDLLLEQRITDIHVIPDHPIALCAVAWADTHSRRTASSLWTFSLAYSTAGMCCRPSPAPATSWSAFSVSSPAVVLETVKQAESSPQRRSLVLRLYEAHGSHVDCWLHLSLPVQEAILCDLLERPDPLAYSTCLAMSRAMKRMEGSIGPISQLGSAGNQE

SEQ ID NO: 808396 - protein, 1198 aa, Homo sapiens
MAAAPALKHWRTTLERVEKFVSPLYFTDCNLRGRLFGASCPVAVLSSFLTPERLPYQEAVQRDFRPAQVGDSFGPTWWTCWFRVELTIPEAWVGQEVHLCWESDGEGLVWRDGEPVQGLTKEGEKTSYVLTDRLGERDPRSLTLYVEVACNGLLGAGKGSMIAAPDPEKMFQLSRAELAVFHRDVHMLLVDLELLLGIAKGLGKDNQRSFQALYTANQMVNVCDPAQPETFPVAQALASRFFGQHGGESQHTIHATGHCHIDTAWLWPFKETVRKCARSWVTALQLMERNPEFIFACSQAQQLEWVKSRYPGLYSRIQEFACRGQFVPVGGTWVEMDGNLPSGEAMVRQFLQGQNFFLQEFGKMCSEFWLPDTFGYSAQLPQIMHGCGIRRFLTQKLSWNLVNSFPHHTFFWEGLDGSRVLVHFPPGDSYGMQGSVEEVLKTVANNRDKGRANHSAFLFGFGDGGGGPTQTMLDRLKRLSNTDGLPRVQLSSPRQLFSALESDSEQLCTWVGELFLELHNGTYTTHAQIKKGNRECERILHDVELLSSLALARSAQFLYPAAQLQHLWRLLLLNQFHDVVTGSCIQMVAEEAMCHYEDIRSHGNTLLSAAAAALCAGEPGPEGLLIVNTLPWKRIEVMALPKPGGAHSLGRAEGKGCYCSRKDGGQTDQAWDTPRDLGAPDWRVVDIFHQPIPTCASFLKGQEGCTDAQASPPALVTVPSMGYAPVPPPTSLQPLLPQQPVFVVQEVSPACPGGQELCWDTFLQLRVLSSPVWSKWGGGAGVGVGRLLVWEAPTDSASRPPPTKTDGSVTLDNGIIRVKLDPTGRLTSLVLVASGREAIAEGAVGNQFVLFDDVPLYWDAWDVMDYHLETRKPVLGQAGTLAVGTEGGLRGSAWFLLQISPNSRLSQEVVLDVGCPYVRFHTEVHWHEAHKFLKVEFPARVRSSQATYEIQFGHLQRPTHYNTSWDWARFEVWAHRWMDLSEHGFGLALLNDCKYGASVRGSILSLSLYSGVPTRPGSWHGEMGLPDHNSNSFSVAPTRPPHPSLRAPKAPDATADTGRHEFTYALMPHKGSFQDAGVIQAAYSLNFPLLALPAPSPAPATSWSAFSVSSPAVVLETVKQAESSPQRRSLVLRLYEAHGSHVDCWLHLSLPVQEAILCDLLERPDPAGHLTLRDNRLKLTFSPFQVLSLLLVLQPPPH

SEQ ID NO: 808397 - protein, 1081 aa, Homo sapiens
MAAAPALKHWRTTLERVEKFVSPLYFTDCNLRGRLFGASCPVAVLSSFLTPERLPYQEAVQRDFRPAQVGDSFGPTWWTCWFRVELTIPEAWVGQEVHLCWESDGEGLVWRDGEPVQGLTKEGEKTSYVLTDRLGERDPRSLTLYVEVACNGLLGAGKGSMIAAPDPEKMFQLSRAELAVFHRDVHMLLVDLELLLGIAKGLGKDNQRSFQALYTANQMVNVCDPAQPETFPVAQALASRFFGQHGGESQHTIHATGHCHIDTAWLWPFKETVRKCARSWVTALQLMERNPEFIFACSQAQQLEWVKSRYPGLYSRIQEFACRGQFVPVGGTWVEMDGNLPSGEAMVRQFLQGQNFFLQEFGKMCSEFWLPDTFGYSAQLPQIMHGCGIRRFLTQKLSWNLVNSFPHHTFFWEGLDGSRVLVHFPPGDSYGMQGSVEEVLKTVANNRDKGRANHSAFLFGFGDGGGGPTQTMLDRLKRLSNTDGLPRVQLSSPRQLFSALESDSEQLCTWVGELFLELHNGTYTTHAQIKKGNRECERILHDVELLSSLALARSAQFLYPAAQLQHLWRLLLLNQFHDVVTGSCIQMVAEEAMCHYEDIRSHGNTLLSAAAAALCAGEPGPEGLLIVNTLPWKRIEVMALPKPGGAHSLALVTVPSMGYAPVPPPTSLQPLLPQQPVFVVQEPLQTQPQGLLPQKTDGSVTLDNGIIRVKLDPTGRLTSLVLVASGREAIAEGAVGNQFVLFDDVPLYWDAWDVMDYHLETRYRLGACGDGGGGGNTGCSGSVCPPLSHRKPVLGQAGTLAVGTEGGLRGSAWFLLQISPNSRLSQEVVLDVGCPYVRFHTEVHWHEAHKFLKVEFPARVRSSQATYEIQFGHLQRPTHYNTSWDWARFEVWAHRWMDLSEHGFGLALLNDCKYGASVRGSILSLSLLRAPKAPDATADTGRHEFTYALMPHKGSFQDAGVIQAAYSLNFPLLALPAPSPAPATSWSAFSVSSPAVVLETVKQAESSPQRRSLVLRLYEAHGSHVDCWLHLSLPVQEAILCDLLERPDPAGHLTLRDNRLKLTFSPFQVLSLLLVLQPPPH

SEQ ID NO: 808398 - protein, 1075 aa, Homo sapiens; identical to SEQ ID NO: 808388

SEQ ID NO: 808399 - protein, 1151 aa, Homo sapiens
MAAAPALKHWRTTLERVEKFVSPLYFTDCNLRGRLFGASCPVAVLSSFLTPERLPYQEAVQRDFRPAQVGDSFGPTWWTCWFRVELTIPEAWVGQEVHLCWESDGEGLVWRDGEPVQGLTKEGEKTSYVLTDRLGERDPRSLTLYVEVACNGLLGAGKGSMIAAPDPEKMFQLSRAELAVFHRDVHMLLVDLELLLGIAKGLGKDNQRSFQALYTANQMVNVCDPAQPETFPVAQALASRFFGQHGGESQHTIHATGHCHIDTAWLWPFKETVRKCARSWVTALQLMERNPEFIFACSQAQQLEWVKSRYPGLYSRIQEFACRGQFVPVGGTWVEMDGNLPSGEAMVRQFLQGQNFFLQEFGKMCSEFWLPDTFGYSAQLPQIMHGCGIRRFLTQKLSWNLVNSFPHHTFFWEGLDGSRVLVHFPPGDSYGMQGSVEEVLKTVANNRDKGRANHSAFLFGFGDGGGGPTQTMLDRLKRLSNTDGLPRVQLSSPRQLFSALESDSEQLCTWVGELFLELHNGTYTTHAQIKKGNRECERILHDVELLSSLALARSAQFLYPAAQLQHLWRLLLLNQFHDVVTGSCIQMVAEEAMCHYEDIRSHGNTLLSAAAAALCAGEPGPEGLLIVNTLPWKRIEVMALPKPGGAHSLGRAEGKGCYCSRKDGGQTDQAWDTPRDLGAPDWRVVDIFHQPIPTCASFLKGQEGCTDAQASPPALVTVPSMGYAPVPPPTSLQPLLPQQPVFVVQEVSPACPGGQELCWDTFLQLRVLSSPVWSKWGGGAGVGVGRLLVWEAPTDSASRPPPTKTDGSVTLDNGIIRVKLDPTGRLTSLVLVASGREAIAEGAVGNQFVLFDDVPLYWDAWDVMDYHLETRKPVLGQAGTLAVGTEGGLRGSAWFLLQISPNSRLSQEVVLDVGCPYVRFHTEVHWHEAHKFLKVEFPARVRSSQATYEIQFGHLQRPTHYNTSWDWARFEVWAHRWMDLSEHGFGLALLNDCKYGASVRGSILSLSLLRAPKAPDATADTGRHEFTYALMPHKGSFQDAGVIQAAYSLNFPLLALPAPSPAPATSWSAFSVSSPAVVLETVKQAESSPQRRSLVLRLYEAHGSHVDCWLHLSLPVQEAILCDLLERPDPAGHLTLRDNRHTESLGLGFCL

SEQ ID NO: 808400 - protein, 652 aa, Homo sapiens [sequence omitted]

SEQ ID NO: 808401 - protein, 213 aa, Homo sapiens
LWSLGAQRGAQGHQVGLGSALQVWAHRWMDLSEHGFGLALLNDCKYGASVRGSILSLSLLRAPKAPDATADTGRHEFTYALMPHKGSFQDAGVIQAAYSLNFPLLALPAPSPAPATSWSAFSVSSPAVVLETVKQAESSPQRRSLVLRLYEAHGSHVDCWLHLSLPVQEAILCDLLERPDPAGHLTLRDNRLKLTFSPFQVLSLLLVLQPPPH

SEQ ID NO: 808402 - protein, 140 aa, Homo sapiens
SLWSAICNKVLSNFSHQTLEGEYANQKFSGLLITSNFTERQQYQACNDEVSSPAVVLETVKQAESSPQRRSLVLRLYEAHGSHVDCWLHLSLPVQEAILCDLLERPDPAGHLTLRDNRLKLTFSPFQVLSLLLVLQPPPH

SEQ ID NO: 808403 - protein, 121 aa, Homo sapiens
LWAGPAQRLQVWRVSARQHPQPLAVSGVPTRPGSWHGEMGLPDHNSNSFSVAPTRPPHPSLRAPKAPDATADTGRHEFTYALMPHKGECWGRWGLPAALDTSLPFPEPKPQQPGFLPLLGT

SEQ ID NO: 808404 - protein, 102 aa, Homo sapiens
MFACSKFVSIPLVKSTSQLLSRPLSAVVLKRPEILTDESLSSLAVSCPLTSLVSSRSFQTSAISRDIDTAAKFIGAGAATVGVAGSGAGIGTVFGSLIIGYA

SEQ ID NO: 808405 - protein, 476 aa, Homo sapiens
RPPPCSPRATGPRPAMEDLDALLSDLETTTSHMPRSGAPKERPAEPLTPPPSYGHQPQTGSGESSGASGDKDHLYSTVCKPRSPKPAAPAAPPFSSSSGVLGTGLCELDRLLQELNATQFNITDEIMSQFPSSKVASGEQKEDQSEDKKRPSLPSSPSPGLPKASATSATLELDRLMASLSDFRVQNHLPASGPTQPPVVSSTNEGSPSPPEPTGKGSLDTMLGLLQSDLSRRGVPTQAKGLCGSCNKPIAGQVVTALGRAWHPEHFVCGGCSTALGGSSFFEKDGAPFCPECYFERFSPRCGFCNQPIRHKMVTALGTHWHPEHFCCVSCGEPFGDEGFHEREGRPYCRRDFLQLFAPRCQGCQGPILDNYISALSALWHPDCFVCRECFAPFSGGSFFEHEGRPLCENHFHARRGSLCATCGLPVTGRCVSALGRRFHPDHFTCTFCLRPLTKGSFQERAGKPYCQPCFLKLFG

SEQ ID NO: 808406 - protein, 444 aa, Homo sapiens
MPRSGAPKERPAEPLTPPPSYGHQPQTGSGESSGASGDKDHLYSTVCKPRSPKPAAPAAPPFSSSSGVLGTGLCELDRLLQELNATQFNITDEIMSQFPSSKVASGEQKEDQSEDKKRPSLPSSPSPGLPKASATSATLELDRLMASLSDFRVQNHLPASGPTQPPVVSSTNEGSPSPPEPTGKGSLDTMLGLLQSDLSRRGVPTQAKGLCGSCNKPIAGQVVTALGRAWHPEHFVCGGCSTALGGSSFFEKDGAPFCPECYFERFSPRCGFCNQPIRHKMVTALGTHWHPEHFCCVSCGEPFGDEGFHEREGRPYCRRDFLQLFAPRCQGCQGPILDNYISALSALWHPDCFVCRECFAPFSGGSFFEHEGRPLCENHFHARRGSLCATCGLPVTGRCVSALGRRFHPDHFTCTFCLRPLTKGSFQERAGKPYCQPCFLKLFG

SEQ ID NO: 808407 - protein, 250 aa, Homo sapiens
PGGEFGTREDLDALLSDLETTTSHMPRSGAPKERPAEPLTPPPSYGHQPQTGSGESSGASGDKDHLYSTVCKPRSPKPAAPAAPPFSSSSGVLGTGLCELDRLLQELNATQFNITDEIMSQFPSSKVASGEQKEDQSEDKKRPSLPSSPSPGLPKASATSATLELDRLMASLSDFRVQNHLPASGPTQPPVVSSTNEGSPSPPEPTGKGSLDTMLGLLQSDLSRRGVPTQAKGLCGSCNKPIAGQVSGAL

SEQ ID NO: 808408 - protein, 476 aa, Homo sapiens; identical to SEQ ID NO: 808405

SEQ ID NO: 808409 - protein, 468 aa, Homo sapiens
PGGEFGTREDLDALLSDLETTTSHMPRSGAPKERPAEPLTPPPSYGHQPQTGSGESSGASGDKDHLYSTVCKPRSPKPAAPAAPPFSSSSGVLGTGLCELDRLLQELNATQFNITDEIMSQFPSSKVASGEQKEDQSEDKKRPSLPSSPSPGLPKASATSATLELDRLMASLSDFRVQNHLPASGPTQPPVVSSTNEGSPSPPEPTGKGSLDTMLGLLQSDLSRRGVPTQAKGLCGSCNKPIAGQVVTALGRAWHPEHFVCGGCSTALGGSSFFEKDGAPFCPECYFERFSPRCGFCNQPIRHKMVTALGTHWHPEHFCCVSCGEPFGDEGFHEREGRPYCRRDFLQLFAPRCQGCQGPILDNYISALSALWHPDCFVCRECFAPFSGGSFFEHEGRPLCENHFHARRGSLCATCGLPVTGRCVSALGRRFHPDHFTCTFCLRPLTKGSFQERAGKPYCQPCFLKLFG

SEQ ID NO: 808410 - protein, 475 aa, Homo sapiens
MEDLDALLSDLETTTSHMPRSGAPKERPAEPLTPPPSYGHQPQTGSGESSGASGDKDHLYSTVCKPRSPKPAAPAAPPFSSSSGVLGTGLCELDRLLQELNATQFNITDEIMSQFPSSKVASGEQKEDQSEDKKRPSLPSSPSPGLPKASATSATLELDRLMASLSDFRVQNHLPASGPTQPPVVSSTNEGSPSPPEPTGKGSLDTMLGLLQSDLSRRGVPTQAKGLCGSCNKPIAGQVVTALGRAWHPEHFVCGGCSTALGGSSFFEKDGAPFCPECYFERFSPRCGFCNQPIRHKMVTALGTHWHPEHFCCVSCGEPFGDEGFHEREGRPYCRRDFLQLFAPRCQGCQGPILDNYISALSALWHPDCFVCRECFAPFSGGSFFEHEGRPLCENHFHARRGSLCATCGLPVTGRCVSALGRRFHPDHFTCTFCLRPLTKGSFQERRALPEKPGPPDPEALLSEREAPPTGEPRP

SEQ ID NO: 808411 - protein, 107 aa, Homo sapiens
GPRPVRPAPPARAPPWRTWMPCSLTWRLPPRTCQGQGLPKSALRSLSPLPHPMATSHRQGLGSLQEPRGTRTTCTARYASLGPQSLQPRRPLHSPLPAVSWVPGSVS

SEQ ID NO: 808412 - protein, 418 aa, Homo sapiens
PRARSCRGASGDKDHLYSTVCKPRSPKPAAPAAPPFSSSSGVLGTGLCELDRLLQELNATQFNITDEIMSQFPSSKVASGEQKEDQSEDKKRPSLPSSPSPGLPKASATSATLELDRLMASLSDFRVQNHLPASGPTQPPVVSSTNEGSPSPPEPTGKGSLDTMLGLLQSDLSRRGVPTQAKGLCGSCNKPIAGQVVTALGRAWHPEHFVCGGCSTALGGSSFFEKDGAPFCPECYFERFSPRCGFCNQPIRHKMVTALGTHWHPEHFCCVSCGEPFGDEGFHEREGRPYCRRDFLQLFAPRCQGCQGPILDNYISALSALWHPDCFVCRECFAPFSGGSFFEHEGRPLCENHFHARRGSLCATCGLPVTGRCVSALGRRFHPDHFTCTFCLRPLTKGSFQERAGKPYCQPCFLKLFG

SEQ ID NO: 808413 - protein, 290 aa, Homo sapiens
MYRSILERSWKTEHGSYISIAYRLRDLEHWILYSDRSERTRKTPRKSCLTGHVVVRAALTRLTSHSQVVTALGRAWHPEHFVCGGCSTALGGSSFFEKDGAPFCPECYFERFSPRCGFCNQPIRHKMVTALGTHWHPEHFCCVSCGEPFGDEGFHEREGRPYCRRDFLQLFAPRCQGCQGPILDNYISALSALWHPDCFVCRECFAPFSGGSFFEHEGRPLCENHFHARRGSLCATCGLPVTGRCVSALGRRFHPDHFTCTFCLRPLTKGSFQERAGKPYCQPCFLKLFG

SEQ ID NO: 808414 - protein, 175 aa, Homo sapiens
MYRSILERSWKTEHGSYISIAYRLRDLEHWILYSDRSERTRKTPRKSCLTGHVVVRAALTRLTSHSQVVTALGRAWHPEHFVCGGCSTALGGSSFFEKDGAPFCPECYFARAARAPSWITTSRRSARSGTRTVSSAGNASRPSREAAFSSTRAARCARTTSTHDAARCAPRVASL

SEQ ID NO: 808415 - protein, 555 aa, Homo sapiens
MARPDDEEGAAVAPGHPLAKGYLPLPRGAPVGKESVELQNGPKAGTFPVNGAPRDSLAAASGVLGGPQTPLAPEEETQARLLPAGAGAETPGAESSPLPLTALSPRRFVVLLIFSLYSLVNAFQWIQYSIISNVFEGFYGVTLLHIDWLSMVYMLAYVPLIFPATWLLDTRGLRLTALLGSGLNCLGAWIKCGSVQQHLFWVTMLGQCLCSVAQVFILGLPSRIASVWFGPKEVSTACATAVLGNQLGTAVGFLLPPVLVPNTQNDTNLLACNISTMFYGTSAVATLLFILTAIAFKEKPRYPPSQAQAALQDSPPEEYSYKKSIRNLFKNIPFVLLLITYGIMTGAFYSVSTLLNQMILTYYEGEEVNAGRIGLTLVVAGMVGSILCGLWLDYTKTYKQTTLIVYILSFIGMVIFTFTLDLRYIIIVFVTGGVLGFFMTGYLPLGFEFAVEITYPESEGTSSGLLNASAQIFGILFTLAQGKLTSDYGPKAGNIFLCVWMFIGIILTALIKSDLRRHNINIGITNVDVKAIPADSPTDQEPKTVMLSKQSESAI

SEQ ID NO: 808416 - protein, 508 aa, Homo sapiens
MARPDDEEGAAVAPGHPLAKGYLPLPRGAPVGKESVELQNGPKAGTFPVNGAPRDSLAAASGVLGGPQTPLAPEEETQARLLPAGAGAETPGAESSPLPLTALSPRRFVVLLIFSLYSLVNAFQWIQYSIISNVFEGFYGVTLLHIDWLSMVYMLAYVPLIFPATWLLDTRGLRLTALLGSGLNCLGAWIKCGSVQQHLFWVTMLGQCLCSVAQVFILGLPSRIASVWFGPKEVSTACATAVLGNQLGTAVGFLLPPVLVPNTQNDTNLLACNISTMFYGTSAVATLLFILTAIGIMTGAFYSVSTLLNQMILTYYEGEEVNAGRIGLTLVVAGMVGSILCGLWLDYTKTYKQTTLIVYILSFIGMVIFTFTLDLRYIIIVFVTGGVLGFFMTGYLPLGFEFAVEITYPESEGTSSGLLNASAQIFGILFTLAQGKLTSDYGPKAGNIFLCVWMFIGIILTALIKSDLRRHNINIGITNVDVKAIPADSPTDQEPKTVMLSKQSESAI

SEQ ID NO: 808417 - protein, 518 aa, Homo sapiens
MARPDDEEGAAVAPGHPLAKGYLPLPRGAPVGKESVELQNGPKAGTFPVNGAPRDSLAAASGVLGGPQTPLAPEEETQARLLPAGAGAETPGAESSPLPLTALSPRRFVVLLIFSLYSLVNAFQWIQYSIISNVFEGFYGVTLLHIDWLSMVYMLAYVPLIFPATWLLDTRGLRLTALLGSGLNCLGAWIKCGSVQQHLFWVTMLGQCLCSVAQVFILGLPSRIASVWFGPKEVSTACATAVLGNQLGTAVGFLLPPVLVPNTQNDTNLLACNISTMFYGTSAVATLLFILTAIAFKEKPRYPPSQAQAALQDSPPEEYSYKKSIRNLFKNIPFVLLLITYGIMTGAFYSVSTLLNQMILTYYEGEEVNAGRIGLTLVVAGMVGSILCGLWLDYTKTYNFFMTGYLPLGFEFAVEITYPESEGTSSGLLNASAQIFGILFTLAQGKLTSDYGPKAGNIFLCVWMFIGIILTALIKSDLRRHNINIGITNVDVKAIPADSPTDQEPKTVMLSKQSESAI

SEQ ID NO: 808418 - protein, 555 aa, Homo sapiens; identical to SEQ ID NO: 808415

SEQ ID NO: 808419 - protein, 518 aa, Homo sapiens; identical to SEQ ID NO: 808417

SEQ ID NO: 808420 - protein, 111 aa, Homo sapiens
PHSPRAAPGFCTVTALRFPALGILTRFHGSRPGGTAAIMRGGGTYERRSYARARPATGVWNSSSFFLWLWICVPDSLKEDRPFIHEDDPQLGPVHVSSDSSLAFLAERLKK

SEQ ID NO: 808421 - protein, 111 aa, Homo sapiens; identical to SEQ ID NO: 808420

SEQ ID NO: 808422 - protein, 640 aa, Homo sapiens
MDRCKHVGRLRLAQDHSILNPQKWCCLECATTESVWACLKCSHVACGRYIEDHALKHFEETGHPLAMEVRDLYVFCYLCKDYVLNDNPEGDLKLLRSSLLAVRGQKQDTPVRRGRTLRSMASGEDVVLPQRAPQGQPQMLTALWYRRQRLLARTLRLWFEKSSRGQAKLEQRRQEEALERKKEEARRRRREVKRRLLEELASTPPRKSARLLLHTPRDAGPAASRPAALPTSRRVPAATLKLRRQPAMAPGVTGLRNLGNTCYMNSILQVLSHLQKFRECFLNLDPSKTEHLFPKATNGKTQLSGKPTNSSATELSLRNDRAEACEREGFCWNGRASISRSLELIQNKEPSSKHISLCRELHTLFRVMWSGKWALVSPFAMLHSVWSLIPAFRGYDQQDAQEFLCELLHKVQQELESEGTTRRILIPFSQRKLTKQVLKVVNTIFHGQLLSQVTCISCNYKSNTIEPFWDLSLEFPERYHCIEKGFVPLNQTECLLTEMLAKFTETEALEGRIYACDQCNSKRRKSNPKPLVLSEARKQLMIYRLPQVLRLHLKRFRWSGRNHREKIGVHVVFDQVLTMEPYCCRDMLSSLDKETFAYDLSAVVMHHGKGFGSGHYTAYCYNTEGGACALLCGVGDTERG

SEQ ID NO: 808423 - protein, 529 aa, Homo sapiens [sequence omitted]

SEQ ID NO: 808424 - protein, 503 aa, Homo sapiens
MDRCKHVGRLRLAQDHSILNPQKWCCLECATTESVWACLKCSHVACGRYIEDHALKHFEETGHPLAMEVRDLYVFCYLCKDYVLNDNPEGDLKLLRSSLLAVRGQKQDTPVRRGRTLRSMASGEDVVLPQRAPQGQPQMLTALWYRRQRLLARTLRLWFEKSSRGQAKLEQRRQEEALERKSARLLLHTPRDAGPAASRPAALPTSRRVPAATLKLRRQPAMAPGVTGLRNLGNTCYMNSILQVLSHLQKFRECFLNLDPSKTEHLFPKATNGKTQLSGKPTNSSATELSLRNDRAEACEREGFCWNGRASISRSLELIQNKEPSSKHISLCRELHTLFRVMWSGKWALVSPFAMLHSVWSLIPAFRGYDQQDAQEFLCELLHKVQQELESEGTTRRILIPFSQRKLTKQVLKVVNTIFHGQLLSQVTCISCNYKSNTIEPFWDLSLEFPERYHCIEKGFVPLNQTECLLTEMLAKFTETEALEGRIYACDQCNSECCVEEGA

SEQ ID NO: 808425 - protein, 495 aa, Homo sapiens
MEALLEGIQNRGHGGGFLTSCEAELQELMKQIDIMVAHKKSEWEGRTHALETCLKIREQELKSLRSQLDVTHKEVGMLHQQVEEHEKIKQEMTMEYKQELKKLHEELCILKRSYEKLQKKQMREFRGNTKNHREDRSEIERLTAKIEEFRQKSLDWEKQRLIYQQQVSSLEAQRKALAEQSEIIQAQLVNRKQKLESVELSSQSEIQHLSSKLERANDTICANELEIERLTMRVNDLVGTSMTVLQEQQQKEEKLRESEKLLEALQEEKRELKAALQSQENLIHEARIQKEKLQEKVKATNTQHAVEAISLESVSATCKQLSQELMEKYEELKRMEAHNNEYKAEIKKLKEQILQGEQSYSSALEGMKMEISHLTQELHQRDITIASTKGSSSDMEKRLRAEMQKAEDKAVEHKEILDQLESLKLENRHLSEMVMKLELGLHECSLPVSPLGSIATRFLEEEELRSHHILERLDAHIEELKRESEKTVRQFTALK

SEQ ID NO: 808426 - protein, 475 aa, Homo sapiens
MEALLEGIQNRGHGGGFLTSCEAELQELMKQIDIMVAHKKSEWEGRTHALETCLKIREQELKSLRSQLDVTHKEVGMLHQQVEEHEKIKQEMTMEYKQELKKLHEELCILKRSYEKLQKKQMREFRGNTKNHREDRSEIERLTAKIEEFRQKSLDWEKQRLIYQQQVSSLEAQRKALAEQSEIIQAQLVNRKQKLESVELSSQSEIQHLSSKLERANDTICANELEIERLTMRVNDLVGTSMTVLQEQQQKEEKLRESEKLLEALQEEKRELKAALQSQENLIHEARIQKEKLQEKVKATNTQHAVEAISLESVSATCKQLSQELMEKYEELKRMEAHNNEYKAEIKKLKEQILQGEQSYSSALEGMKMEISHLTQELHQRDITIASTKGSSSDMEKRLRAEMQKAEDKAVEHKEILDQLESLKLENRHLSEMVMKLELGLHERWGFTMLSSLVLNFGIQAIRQPQRPKVLELQV

SEQ ID NO: 808427 - protein, 620 aa, Homo sapiens
RREGSGACLRQPCNRRCASWRGKGLPCPGLEAAQAALVILASRPHGLRPVCATACEPPGVSPPAWVRPEAQSLGLARYALHTGGVWRGAARRGVRPRQVVSPSSESRWLGALRRVASCQNKGDLVMEALLEGIQNRGHGGGFLTSCEAELQELMKQIDIMVAHKKSEWEGRTHALETCLKIREQELKSLRSQLDVTHKEVGMLHQQVEEHEKIKQEMTMEYKQELKKLHEELCILKRSYEKLQKKQMREFRGNTKNHREDRSEIERLTAKIEEFRQKSLDWEKQRLIYQQQVSSLEAQRKALAEQSEIIQAQLVNRKQKLESVELSSQSEIQHLSSKLERANDTICANELEIERLTMRVNDLVGTSMTVLQEQQQKEEKLRESEKLLEALQEEKRELKAALQSQENLIHEARIQKEKLQEKVKATNTQHAVEAISLESVSATCKQLSQELMEKYEELKRMEAHNNEYKAEIKKLKEQILQGEQSYSSALEGMKMEISHLTQELHQRDITIASTKGSSSDMEKRLRAEMQKAEDKAVEHKEILDQLESLKLENRHLSEMVMKLELGLHECSLPVSPLGSIATRFLEEEELRSHHILERLDAHIEELKRESEKTVRQFTALK

SEQ ID NO: 808428 - protein, 495 aa, Homo sapiens; identical to SEQ ID NO: 808425

SEQ ID NO: 808429 - protein, 477 aa, Homo sapiens
MEALLEGIQNRGHGGGFLTSCEAELQELMKQIDIMVAHKKSEWEGRTHALETCLKIREQELKSLRSQLDVTHKEVGMLHQQVEEHEKIKQEMTMEYKQELKKLHEELCILKRSYEKLQKKQMREFRGNTKNHREDRSEIERLTAYQQQVSSLEAQRKALAEQSEIIQAQLVNRKQKLESVELSSQSEIQHLSSKLERANDTICANELEIERLTMRVNDLVGTSMTVLQEQQQKEEKLRESEKLLEALQEEKRELKAALQSQENLIHEARIQKEKLQEKVKATNTQHAVEAISLESVSATCKQLSQELMEKYEELKRMEAHNNEYKAEIKKLKEQILQGEQSYSSALEGMKMEISHLTQELHQRDITIASTKGSSSDMEKRLRAEMQKAEDKAVEHKEILDQLESLKLENRHLSEMVMKLELGLHECSLPVSPLGSIATRFLEEEELRSHHILERLDAHIEELKRESEKTVRQFTALK

SEQ ID NO: 808430 - protein, 467 aa, Homo sapiens
MKQIDIMVAHKKSEWEGRTHALETCLKIREQELKSLRSQLDVTHKEVGMLHQQVEEHEKIKQEMTMEYKQELKKLHEELCILKRSYEKLQKKQMREFRGNTKNHREDRSEIERLTAKIEEFRQKSLDWEKQRLIYQQQVSSLEAQRKALAEQSEIIQAQLVNRKQKLESVELSSQSEIQHLSSKLERANDTICANELEIERLTMRVNDLVGTSMTVLQEQQQKEEKLRESEKLLEALQEEKRELKAALQSQENLIHEARIQKEKLQEKVKATNTQHAVEAISLESVSATCKQLSQELMEKYEELKRMEAHNNEYKAEIKKLKEQILQGEQSYSSALEGMKMEISHLTQELHQRDITIASTKGSSSDMEKRLRAEMQKAEDKAVEHKEILDQLESLKLENRHLSEMVMKLELGLHECSLPVSPLGSIATRFLEEEELRSHHILERLDAHIEELKRESEKTVRQFTALK

SEQ ID NO: 808431 - protein, 661 aa, Homo sapiens
MGIGGSPTLSNERIPAPPKPRPGALETLTGTRPPRQTLAPATPPPLPRITCLHSLSSDSRMWGVHLLACRGSLEKALFQLLKVWGQWAEQTRRLQRLDVSLAVARVRSAGPSCQNKGDLVMEALLEGIQNRGHGGGFLTSCEAELQELMKQIDIMVAHKKSEWEGRTHALETCLKIREQELKSLRSQLDVTHKEVGMLHQQVEEHEKIKQEMTMEYKQELKKLHEELCILKRSYEKLQKKQMREFRGNTKNHREDRSEIERLTAKIEEFRQKSLDWEKQRLIYQQQVSSLEAQRKALAEQSEIIQAQLVNRKQKLESVELSSQSEIQHLSSKLERANDTICANELEIERLTMRVNDLVGTSMTVLQEQQQKEEKLRESEKLLEALQEEKRELKAALQSQENLIHEARIQKEKLQEKVKATNTQHAVEAIRPREESLAEKKYTSQGQGDLDSVLSQLNFTHTSEDLLQAEVTCLEGSLESVSATCKQLSQELMEKYEELKRMEAHNNEYKAEIKKLKEQILQGEQSYSSALEGMKMEISHLTQELHQRDITIASTKGSSSDMEKRLRAEMQKAEDKAVEHKEILDQLESLKLENRHLSEMVMKLELGLHECSLPVSPLGSIATRFLEEEELRSHHILERLDAHIEELKRESEKTVRQFTALK

SEQ ID NO: 808432 - protein, 639 aa, Homo sapiens
MGIGGSPTLSNERIPAPPKPRPGALETLTGTRPPRQTLAPATPPPLPRITCLHSLSSDSRMWVSSFARVQGKSGEGIVSIIKSVGAVGGTNAPTTEAGRKLSGGARAQRRPEGPPNPGPQSSTSPWPVGTRLQSRSCQNKGDLVMEALLEGIQNRGHGGGFLTSCEAELQELMKQIDIMVAHKKSEWEGRTHALETCLKIREQELKSLRSQLDVTHKEVGMLHQQVEEHEKIKQEMTMEYKQELKKLHEELCILKRSYEKLQKKQMREFRGNTKNHREDRSEIERLTAKIEEFRQKSLDWEKQRLIYQQQVSSLEAQRKALAEQSEIIQAQLVNRKQKLESVELSSQSEIQHLSSKLERANDTICANELEIERLTMRVNDLVGTSMTVLQEQQQKEEKLRESEKLLEALQEEKRELKAALQSQENLIHEARIQKEKLQEKVKATNTQHAVEAISLESVSATCKQLSQELMEKYEELKRMEAHNNEYKAEIKKLKEQILQGEQSYSSALEGMKMEISHLTQELHQRDITIASTKGSSSDMEKRLRAEMQKAEDKAVEHKEILDQLESLKLENRHLSEMVMKLELGLHECSLPVSPLGSIATRFLEEEELRSHHILERLDAHIEELKRESEKTVRQFTALK

SEQ ID NO: 808433 - protein, 609 aa, Homo sapiens
ASARRVLNRPRQGLPCPGLEAAQAALVILASRPHGLRPVCATACEPPGVSPPAWVRPEAQSLGLARYALHTGGVWRGAARRGVRPRQVVSPSSESRWLGALRRVASCQNKGDLVMEALLEGIQNRGHGGGFLTSCEAELQELMKQIDIMVAHKKSEWEGRTHALETCLKIREQELKSLRSQLDVTHKEVGMLHQQVEEHEKIKQEMTMEYKQELKKLHEELCILKRSYEKLQKKQMREFRGNTKNHREDRSEIERLTAKIEEFRQKSLDWEKQRLIYQQQVSSLEAQRKALAEQSEIIQAQLVNRKQKLESVELSSQSEIQHLSSKLERANDTICANELEIERLTMRVNDLVGTSMTVLQEQQQKEEKLRESEKLLEALQEEKRELKAALQSQENLIHEARIQKEKLQEKVKATNTQHAVEAISLESVSATCKQLSQELMEKYEELKRMEAHNNEYKAEIKKLKEQILQGEQSYSSALEGMKMEISHLTQELHQRDITIASTKGSSSDMEKRLRAEMQKAEDKAVEHKEILDQLESLKLENRHLSEMVMKLELGLHECSLPVSPLGSIATRFLEEEELRSHHILERLDAHIEELKRESEKTVRQFTALK

SEQ ID NO: 808434 - protein, 348 aa, Homo sapiens
MPHIDNDVKLDFKDVLLRPKRSTLKSRSEVDLTRSFSFRNSKQTYSGVPIIAANMDTVGTFEMAKVLCKFSLFTAVHKHYSLVQWQEFAGQNPDCLEHLAASSGTGSSDFEQLEQILEAIPQVKYICLDVANGYSEHFVEFVKDVRKRFPQHTIMAGNVVTGEMVEELILSGADIIKVGIGPGSVCTTRKKTGVGYPQLSAVMECADAAHGLKGHIISDGGCSCPGDVAKAFGAGADFVMLGGMLAGHSESGGELIERDGKKYKLFYGMSSEMAMKKYAGGVAEYRASEGKTVEVPFKGDVEHTIRDILGGIRSTCTYVGAAKLKELSRRTTFIRVTQQVNPIFSEAC

SEQ ID NO: 808435 - protein, 366 aa, Homo sapiens
MTSCLPALRFIATPRLSAMPHIDNDVKLDFKDVLLRPKRSTLKSRSEVDLTRSFSFRNSKQTYSGVPIIAANMDTVGTFEMAKVLCKFSLFTAVHKHYSLVQWQEFAGQNPDCLEHLAASSGTGSSDFEQLEQILEAIPQVKYICLDVANGYSEHFVEFVKDVRKRFPQHTIMAGNVVTGEMVEELILSGADIIKVGIGPGSVCTTRKKTGVGYPQLSAVMECADAAHGLKGHIISDGGCSCPGDVAKAFGAGADFVMLGGMLAGHSESGGELIERDGKKYKLFYGMSSEMAMKKYAGGVAEYRASEGKTVEVPFKGDVEHTIRDILGGIRSTCTYVGAAKLKELSRRTTFIRVTQQVNPIFSEAC

SEQ ID NO: 808436 - protein, 348 aa, Homo sapiens; identical to SEQ ID NO: 808434

SEQ ID NO: 808437 - protein, 138 aa, Homo sapiens
MPHIDNDVKLDFKDVLLRPKRSTLKSRSEVDLTRSFSFRNSKQTYSGVPIIAANMDTVGTFEMAKVLCKFSLFTAVHKHYSLVQWQEFAGQNPDCLEHLAASSGTGSSDFEQLEQILEAIPQVKYICLDVANGYSEHF

SEQ ID NO: 808438 - protein, 348 aa, Homo sapiens; identical to SEQ ID NO: 808434

SEQ ID NO: 808439 - protein, 348 aa, Homo sapiens; identical to SEQ ID NO: 808434

SEQ ID NO: 808440 - protein, 348 aa, Homo sapiens; identical to SEQ ID NO: 808434

SEQ ID NO: 808441 - protein, 241 aa, Homo sapiens
MPHIDNDVKLDFKDVLLRPKRSTLKSRSEVDLTRSFSFRNSKQTYSGVPIIAANMDTVGTFEMAKVLCKFSLFTAVHKHYSLVQWQEFAGQNPDCLEHLAASSGTGSSDFEQLEQILEAIPQVKYICLDVANGYSEHFVEFVKDVRKRFPQHTIMAGNVVTGEMVEELILSGADIIKVGIGPGSVCTTRKKTGVGYPQLSAVMECADAAHGLKGHIISDGGCSCPGDVAKAFGKELEGTEG

SEQ ID NO: 808442 - protein, 241 aa, Homo sapiens; identical to SEQ ID NO: 808441

SEQ ID NO: 808443 - protein, 241 aa, Homo sapiens; identical to SEQ ID NO: 808441

SEQ ID NO: 808444 - protein, 312 aa, Homo sapiens
MGCVFLIYKLFTLKWKMLLLSVLLPASILVAEKFSLFTAVHKHYSLVQWQEFAGQNPDCLEHLAASSGTGSSDFEQLEQILEAIPQVKYICLDVANGYSEHFVEFVKDVRKRFPQHTIMAGNVVTGEMVEELILSGADIIKVGIGPGSVCTTRKKTGVGYPQLSAVMECADAAHGLKGHIISDGGCSCPGDVAKAFGAGADFVMLGGMLAGHSESGGELIERDGKKYKLFYGMSSEMAMKKYAGGVAEYRASEGKTVEVPFKGDVEHTIRDILGGIRSTCTYVGAAKLKELSRRTTFIRVTQQVNPIFSEAC

SEQ ID NO: 808445 - protein, 312 aa, Homo sapiens; identical to SEQ ID NO: 808444

SEQ ID NO: 808446 - protein, 358 aa, Homo sapiens
MPHIDNDVKLDFKDVLLRPKRSTLKSRSEVDLTRSFSFRNSKQTYSGVPIIAANMDTVGTFEMAKVLCKFSLFTAVHKHYSLVQWQEFAGQNPDCLEHLAASSGTGSSDFEQLEQILEAIPQVKYICLDVANGYSEHFVEFVKDVRKRFPQHTIMDAVISIALSQAGNVVTGEMVEELILSGADIIKVGIGPGSVCTTRKKTGVGYPQLSAVMECADAAHGLKGHIISDGGCSCPGDVAKAFGAGADFVMLGGMLAGHSESGGELIERDGKKYKLFYGMSSEMAMKKYAGGVAEYRASEGKTVEVPFKGDVEHTIRDILGGIRSTCTYVGAAKLKELSRRTTFIRVTQQVNPIFSEAC

SEQ ID NO: 808447 - protein, 312 aa, Homo sapiens; identical to SEQ ID NO: 808444

SEQ ID NO: 808448 - protein, 294 aa, Homo sapiens [sequence omitted]

SEQ ID NO: 808449 - protein, 194 aa, Homo sapiens [sequence omitted]

SEQ ID NO: 808450 - protein, 194 aa, Homo sapiens [sequence omitted]

SEQ ID NO: 808451 - protein, 185 aa, Homo sapiens
MVEELILSGADIIKVGIGPGSVCTTRKKTGVGYPQLSAVMECADAAHGLKGHIISDGGCSCPGDVAKAFGAGADFVMLGGMLAGHSESGGELIERDGKKYKLFYGMSSEMAMKKYAGGVAEYRASEGKTVEVPFKGDVEHTIRDILGGIRSTCTYVGAAKLKELSRRTTFIRVTQQVNPIFSEAC

SEQ ID NO: 808452 - protein, 218 aa, Homo sapiens
MVRGRCEFGRGKDVRNRFPQHTIMAAGNVVTGEMVEELILSGADIIKVGIGPGSVCTTRKKTGVGYPQLSAVMECADAAHGLKGHIISDGGCSCPGDVAKAFGAGADFVMLGGMLAGHSESGGELIERDGKKYKLFYGMSSEMAMKKYAGGVAEYRASEGKTVEVPFKGDVEHTIRDILGGIRSTCTYVGAAKLKELSRRTTFIRVTQQVNPIFSEAC

SEQ ID NO: 808453 - protein, 348 aa, Homo sapiens; identical to SEQ ID NO: 808434

SEQ ID NO: 808454 - protein, 348 aa, Homo sapiens; identical to SEQ ID NO: 808434

SEQ ID NO: 808455 - protein, 119 aa, Homo sapiens [sequence omitted]

SEQ ID NO: 808456 - protein, 101 aa, Homo sapiens
CNSSDEGIGGESIIALQLAVRSETMAPDRSYSEASLLGKASEGKTVEVPFKGDVEHTIRDILGGIRSTCTYVGAAKLKELSRRTTFIRVTQQVNPIFSEAC

SEQ ID NO: 808457 - protein, 138 aa, Homo sapiens; identical to SEQ ID NO: 808437

SEQ ID NO: 808458 - protein, 378 aa, Homo sapiens
MPHIDNDVKLDFKDVLLRPKRSTLKSRSEVDLTRSFSFRNSKQTYSGVPIIAANMDTVGTFEMAKVLCKFSLFTAVHKHYSLVQWQEFAGQNPDCLEHLAASSGTGSSDFEQLEQILEAIPQVKYICLDVANGYSEHFVEFVKDVRKRFPQHTIMAGNVVTGEMVEELILSGADIIKVGIGPGSVCTTRKKTGVGYPQLSAVMECADAAHGLKGHIISDGGCSCPGDVAKAFGAGADFVMLGGMLAGHSESGGELIERDGKKYKLFYGMSSEMAMKKYAGGVAEYRASEGKTVEVPFKGDVEHTIRDILGGIRSTCTYVGAAKLKELSRRTTFIRVTQQVNPIFSEGSCSNSVLLYLHTQNAQGTHWGGSKEANSLRK

SEQ ID NO: 808459 - protein, 348 aa, Homo sapiens; identical to SEQ ID NO: 808434

SEQ ID NO: 808460 - protein, 246 aa, Homo sapiens
MTSCLPALRFIATPRLSAMPHIDNDVKLDFKDVLLRPKRSTLKSRSEVDLTRSFSFRNSKQTYSGVPIIAANMDTVGTFEMAKVLCKFSLFTAVHKHYSLVQWQEFAGQNPDCLEHLAASSGTGSSDFEQLEQILEAIPQVKYICLDVANGYSEHFVEFVKDVRKRFPQHTIMAGNVVTGEMVEELILSGADIIKVGIGPALYYFVISCCLTPEGSCSNSVLLYLHTQNAQGTHWGGSKEANSLRK

SEQ ID NO: 808461 - protein, 179 aa, Homo sapiens
MTSCLPALRFIATPRLSAMPHIDNDVKLDFKDVLLRPKRSTLKSRSEVDLTRSFSFRNSKQTYSGVPIIAANMDTVGTFEMAKVLCKFSLFTAVHKHYSLVQWQEFAGQNPDCLEHLAASSGTGSSDFEQLEQILEAIPQVKYICLDVANGYSEHFVEFVKDVRKRFPQHTIMQGMGDP

SEQ ID NO: 808462 - protein, 299 aa, Homo sapiens
MEELEQGLLMQPWAWLQLAENSLLAKVFITKQGYALLVSDLQQVWHEQVDTSVVSQRAKELNKRLTAPPAAFLCHLDNLLRPLLKDAAHPSEATFSCDCVADALILRVRSELSGLPFYWNFHCMLASPSLVSQHLIRPLMGMSLALQCQVRELATLLHMKDLEIQDYQESGATLIRDRLKTEPFEENSFLEQFMIEKLPEACSIGDGKPFVMNLQDLYMAVTTQEVQVGQKHQGAGDPHTSNSASLQGIDSQCVNQPEQLVSSAPTLSAPEKESTGTSGPLQRPQLSKVKRKKPRGLFS

SEQ ID NO: 808463 - protein, 309 aa, Homo sapiens
PGVDGRARVKMEELEQGLLMQPWAWLQLAENSLLAKVFITKQGYALLVSDLQQVWHEQVDTSVVSQRAKELNKRLTAPPAAFLCHLDNLLRPLLKDAAHPSEATFSCDCVADALILRVRSELSGLPFYWNFHCMLASPSLVSQHLIRPLMGMSLALQCQVRELATLLHMKDLEIQDYQESGATLIRDRLKTEPFEENSFLEQFMIEKLPEACSIGDGKPFVMNLQDLYMAVTTQEVQVGQKHQGAGDPHTSNSASLQGIDSQCVNQPEQLVSSAPTLSAPEKESTGTSGPLQRPQLSKVKRKKPRGLFS

SEQ ID NO: 808464 - protein, 299 aa, Homo sapiens; identical to SEQ ID NO: 808462

SEQ ID NO: 808465 - protein, 281 aa, Homo sapiens
MEELEQGLLMQPWAWLQLAENSLLAKVFITKQGYALLVSDLQQVWHEQVDTSVVSQRAKELNKRLTAPPAAFLCHLDNLLRPLLKDAAHPSEATFSCDCVADALILRVRSELSGLPFYWNFHCMLASPSLVSQHLIRPLMGMSLALQCQVRELATLLHMKDLEIQDYQESGATLIRDRLKTEPFEVGDGKPFVMNLQDLYMAVTTQEVQVGQKHQGAGDPHTSNSASLQGIDSQCVNQPEQLVSSAPTLSAPEKESTGTSGPLQRPQLSKVKRKKPRGLFS

SEQ ID NO: 808466 - protein, 299 aa, Homo sapiens; identical to SEQ ID NO: 808462

SEQ ID NO: 808467 - protein, 69 aa, Homo sapiens
GIYHYLLLIFLISGDPHTSNSASLQGIDSQCVNQPEQLVSSAPTLSAPEKESTVSHEQLPGWCSESWHL

SEQ ID NO: 808468 - protein, 310 aa, Homo sapiens
KDERKARCPSSPLRPLGPNPRPGSRSSPLCGLDSLPATTLVGSKRKEVAGPTEEDTQEPGRRAEKTNNVTPEAEPRPPLFPTPASPGDESCGHLQFNGLRGKGEKGGEGNGSLCPRGSSPSSCRLLKTNKLNPPPSGVSGNSWDREKVVPKSGRLRTSDFRGAGARWRLWLGAATRGSSERGPPPLAPSCGFPSAGPVQAEPCVPASLGGGPGRGCPQGRLLLRPAGKGRIPPRSAGRPSASWEARAHVLRLPKGERNRAGRRAHGNQERKAGTGEPKEPDRARPRALLARLRSVTGTQAPTHGECLERS

SEQ ID NO: 808469 - protein, 310 aa, Homo sapiens; identical to SEQ ID NO: 808468

SEQ ID NO: 808470 - protein, 103 aa, Homo sapiens
KLGWYGPGLRSGRLLLRPAGKGRIPPRSAGRPSASWEARAHVLRLPKGERNRAGRRAHGNQERKAGTGEPKEPDRARPRALLARLRSVTGTQAPTHGECLERS

SEQ ID NO: 808471 - protein, 109 aa, Homo sapiens
ASRNWGSGPLTSCPLLAGMISDSFTKEDLMSAKIAFLFGMTDLGEDLFLLRIALVLEGDHLVRGAEFRVPPAAATSSGELGHPGGSVISAPLWEHPRNSRKDRGAPLCD

SEQ ID NO: 808472 - protein, 124 aa, Homo sapiens
MYGRNRDRAGPVQAEPCVPASLGGGPGRGCPQGRLLLRPAGKGRIPPRSAGRPSASWEARAHVLRLPKGERNRAGRRAHGNQERKAGTGEPKEPDRARPRALLARLRSVTGTQAPTHGECLERS

SEQ ID NO: 808473 - protein, 140 aa, Homo sapiens
ESHFRNKRRVSEEKLLVRIPRVIMATYSLANERLRALEDIEREIGAILQNAGTVILELSKEKTNERLLDRQAAAFTASVQHVEAELSAQIRYLTQVATGQPHEGSSYSSRKDCQMALKRVDYARLKLSDVARTCEQMLEN

SEQ ID NO: 808474 - protein, 140 aa, Homo sapiens; identical to SEQ ID NO: 808473

SEQ ID NO: 808475 - protein, 72 aa, Homo sapiens
ESHFRNKRRVSEEKLLVRIPRVIMATYSLANERLRALEDIEREIGAILQNAGSGCDNLDSGERKRDRAALAA

SEQ ID NO: 808476 - protein, 108 aa, Homo sapiens
ESHFRNKRRVSEEKLLVRIPRVIMATYSLANERLRALEDIEREIGAILQNAGTVILELSKEKTNERLLDRQAAAFTASVQHVEAELSAQIRYLTQLPDGLTNSNSGKK

SEQ ID NO: 808477 - protein, 140 aa, Homo sapiens; identical to SEQ ID NO: 808473

SEQ ID NO: 808478 - protein, 116 aa, Homo sapiens
ESHFRNKRRVSEEKLLVRIPRVIMATYSLANERLRALEDIEREIGAILQNAGTVILELSKEKTNERLLDRQAAAFTASVQHVEAELSAQIRYLTQVGVSGGFCERTPALGQSLRLG

SEQ ID NO: 808479 - protein, 140 aa, Homo sapiens; identical to SEQ ID NO: 808473

SEQ ID NO: 808480 - protein, 610 aa, Homo sapiens
MRRVCRGRVRPWMNSHPSGFSFRDNMAPSTPLLTVRGSEGLYMVNGPPHFTESTVFPRESGKNCKVCIFSKDGTLFAWGNGEKVNIISVTNKGLLHSFDLLKAVCLEFSPKNTVLATWQPYTTSKDGTAGIPNLQLYDVKTGTCLKSFIQKKMQNWCPSWSEDETLCARNVNNEVHFFENNNFNTIANKLHLQKINDFVLSPGPQPYKVAVYVPGSKGAPSFVRLYQYPNFAGPHAALANKSFFKADKVTMLWNKKATAVLVIASTDVDKTGASYYGEQTLHYIATNGESAVVQLPKNGPIYDVVWNSSSTEFCAVYGFMPAKATIFNLKCDPVFDFGTGPRNAAYYSPHGHILVLAGFGNLRGQMEVWDVKNYKLISKPVASDSTYFAWCPDGEHILTATCAPRLRVNNGYKIWHYTGSILHKYDVPSNAELWQVSWQPFLDGIFPAKTITYQAVPSEVPNEEPKVATAYRPPALRNKPITNSKLHEEEPPQNMKPQSGNDKPLSKTALKNQRKHEAKKAAKQEARSDKSPDLAPTPAPQSTPRNTVSQSISGDPEIDKKIKNLKKKLKAIEQLKEQAATGKQLEKNQLEKIQKETALLQELEDLELGI

SEQ ID NO: 808481 - protein, 190 aa, Homo sapiens
MRRVCRGRVRPWMNSHPSGFSFRDNMAPSTPLLTVRGSEGLYMVNGPPHFTESTVFPRESGKNCKVCIFSKDGTLFAWGNGEKVNIISVTNKGLLHSFDLLKAVCLEFSPKNTVLATWQPYTTSKDGTAGIPNLQLYDVKTGTCLKSFIQKKMQNWCPSWSEDETLCARNVNNEVHFFENNNFSMERFMT

SEQ ID NO: 808482 - protein, 190 aa, Homo sapiens; identical to SEQ ID NO: 808481

SEQ ID NO: 808483 - protein, 572 aa, Homo sapiens
MRRVCRGRVRPWMNSHPSGFSFRDNMAPSTPLLTVRGSEGLYMVNGPPHFTESTVFPRESGKNCKVCIFSKDGTLFAWGNGEKVNIISVTNKGLLHSFDLLKAVCLEFSPKNTVLATWQPYTTSKDGTAGIPNLQLYDVKTGTCLKSFIQKKMQNWCPSWSEDETLCARNVNNEVHFFENNNFNTIANKLHLQKINDFVLSPGPQPYKVAVYVPGSKGAPSFVRLYQYPNFAGPHAALANKSFFKADKVTMLWNKKATAVLVIASTDVDKTGASYYGEQTLHYIATNGESAVVQLPKNGPIYDVVWNSSSTEFCAVYGFMPAKATIFNLKCDPVFDFGTGPRNAAYYSPHGHILVLAGFGNLRGQMEVWDVKNYKLISKPVASDSTYFAWCPDGEHILTATCAPRLRVNNGYKIWHYTGSILHKYDVPSNAELWQVSWQPFLDGIFPAKTITYQAVPSEVPNEEPKVATAYRPPALRNKPITNSKLEARSDKSPDLAPTPAPQSTPRNTVSQSISGDPEIDKKIKNLKKKLKAIEQLKEQAATGKQLEKNQLEKIQKETALLQELEDLELGI

SEQ ID NO: 808484 - protein, 585 aa, Homo sapiens
MAPSTPLLTVRGSEGLYMVNGPPHFTESTVFPRESGKNCKVCIFSKDGTLFAWGNGEKVNIISVTNKGLLHSFDLLKAVCLEFSPKNTVLATWQPYTTSKDGTAGIPNLQLYDVKTGTCLKSFIQKKMQNWCPSWSEDETLCARNVNNEVHFFENNNFNTIANKLHLQKINDFVLSPGPQPYKVAVYVPGSKGAPSFVRLYQYPNFAGPHAALANKSFFKADKVTMLWNKKATAVLVIASTDVDKTGASYYGEQTLHYIATNGESAVVQLPKNGPIYDVVWNSSSTEFCAVYGFMPAKATIFNLKCDPVFDFGTGPRNAAYYSPHGHILVLAGFGNLRGQMEVWDVKNYKLISKPVASDSTYFAWCPDGEHILTATCAPRLRVNNGYKIWHYTGSILHKYDVPSNAELWQVSWQPFLDGIFPAKTITYQAVPSEVPNEEPKVATAYRPPALRNKPITNSKLHEEEPPQNMKPQSGNDKPLSKTALKNQRKHEAKKAAKQEARSDKSPDLAPTPAPQSTPRNTVSQSISGDPEIDKKIKNLKKKLKAIEQLKEQAATGKQLEKNQLEKIQKETALLQELEDLELGI

SEQ ID NO: 808485 - protein, 599 aa, Homo sapiens
GALTNVSDWQNLDDMAPSTPLLTVRGSEGLYMVNGPPHFTESTVFPRESGKNCKVCIFSKDGTLFAWGNGEKVNIISVTNKGLLHSFDLLKAVCLEFSPKNTVLATWQPYTTSKDGTAGIPNLQLYDVKTGTCLKSFIQKKMQNWCPSWSEDETLCARNVNNEVHFFENNNFNTIANKLHLQKINDFVLSPGPQPYKVAVYVPGSKGAPSFVRLYQYPNFAGPHAALANKSFFKADKVTMLWNKKATAVLVIASTDVDKTGASYYGEQTLHYIATNGESAVVQLPKNGPIYDVVWNSSSTEFCAVYGFMPAKATIFNLKCDPVFDFGTGPRNAAYYSPHGHILVLAGFGNLRGQMEVWDVKNYKLISKPVASDSTYFAWCPDGEHILTATCAPRLRVNNGYKIWHYTGSILHKYDVPSNAELWQVSWQPFLDGIFPAKTITYQAVPSEVPNEEPKVATAYRPPALRNKPITNSKLHEEEPPQNMKPQSGNDKPLSKTALKNQRKHEAKKAAKQEARSDKSPDLAPTPAPQSTPRNTVSQSISGDPEIDKKIKNLKKKLKAIEQLKEQAATGKQLEKNQLEKIQKETALLQELEDLELGI

SEQ ID NO: 808486 - protein, 588 aa, Homo sapiens
FLFPGHLCVSLTVRGSEGLYMVNGPPHFTESTVFPRESGKNCKVCIFSKDGTLFAWGNGEKVNIISVTNKGLLHSFDLLKAVCLEFSPKNTVLATWQPYTTSKDGTAGIPNLQLYDVKTGTCLKSFIQKKMQNWCPSWSEDETLCARNVNNEVHFFENNNFNTIANKLHLQKINDFVLSPGPQPYKVAVYVPGSKGAPSFVRLYQYPNFAGPHAALANKSFFKADKVTMLWNKKATAVLVIASTDVDKTGASYYGEQTLHYIATNGESAVVQLPKNGPIYDVVWNSSSTEFCAVYGFMPAKATIFNLKCDPVFDFGTGPRNAAYYSPHGHILVLAGFGNLRGQMEVWDVKNYKLISKPVASDSTYFAWCPDGEHILTATCAPRLRVNNGYKIWHYTGSILHKYDVPSNAELWQVSWQPFLDGIFPAKTITYQAVPSEVPNEEPKVATAYRPPALRNKPITNSKLHEEEPPQNMKPQSGNDKPLSKTALKNQRKHEAKKAAKQEARSDKSPDLAPTPAPQSTPRNTVSQSISGDPEIDKKIKNLKKKLKAIEQLKEQAATGKQLEKNQLEKIQKETALLQELEDLELGI

SEQ ID NO: 808487 - protein, 586 aa, Homo sapiens
  misc_feature (9)..(9): Xaa can be any naturally occurring amino acid
GTRRRGRRXVVRGSEGLYMVNGPPHFTESTVFPRESGKNCKVCIFSKDGTLFAWGNGEKVNIISVTNKGLLHSFDLLKAVCLEFSPKNTVLATWQPYTTSKDGTAGIPNLQLYDVKTGTCLKSFIQKKMQNWCPSWSEDETLCARNVNNEVHFFENNNFNTIANKLHLQKINDFVLSPGPQPYKVAVYVPGSKGAPSFVRLYQYPNFAGPHAALANKSFFKADKVTMLWNKKATAVLVIASTDVDKTGASYYGEQTLHYIATNGESAVVQLPKNGPIYDVVWNSSSTEFCAVYGFMPAKATIFNLKCDPVFDFGTGPRNAAYYSPHGHILVLAGFGNLRGQMEVWDVKNYKLISKPVASDSTYFAWCPDGEHILTATCAPRLRVNNGYKIWHYTGSILHKYDVPSNAELWQVSWQPFLDGIFPAKTITYQAVPSEVPNEEPKVATAYRPPALRNKPITNSKLHEEEPPQNMKPQSGNDKPLSKTALKNQRKHEAKKAAKQEARSDKSPDLAPTPAPQSTPRNTVSQSISGDPEIDKKIKNLKKKLKAIEQLKEQAATGKQLEKNQLEKIQKETALLQELEDLELGI

SEQ ID NO: 808488 - protein, 610 aa, Homo sapiens; identical to SEQ ID NO: 808480

SEQ ID NO: 808489 - protein, 610 aa, Homo sapiens; identical to SEQ ID NO: 808480

SEQ ID NO: 808490 - protein, 567 aa, Homo sapiens
MRRVCRGRVRPWMNSHPSGFSFRDNMAPSTPLLTVRGSEGLYMVNGPPHFTESTVFPRESGKNCKVCIFSKDGTLFAWGNGEKVNIISVTNKGLLHSFDLLKAVCLEFSPKNTVLATWQPYTTSKDGTAGIPNLQLYDVKTGTCLKSFIQKKMQNWCPSWSEDETLCARNVNNEVHFFENNNFNTIANKLHLQKINDFVLSPGPQPYKVAVYVPGSKGAPSFVRLYQYPNFAGPHAALANKSFFKADKVTMLWNKKATAVLVIASTDVDKTGASYYGEQTLHYIATNGESAVVQLPKNGPIYDVVWNSSSTEFCAVYGFMPAKATIFNLKCDPVFDFGTGPRNAAYYSPHGHILVLAGFGNLRGQMEVWDVKNYKLISKPVASDSTYFAWCPDGEHILTATCAPRLRVNNGYKIWHYTGSILHKYDVPSNAELWQVSWQPFLDGIFPAKTITYQAVPSEVPNEEPKVATAYRPPALRNKPITNSKLHEEEPPQNMKPQSGNDKPLSKTALKNQRKHEAKKAAKQKLKAIEQLKEQAATGKQLEKNQLEKIQKETALLQELEDLELGI

SEQ ID NO: 808491 - protein, 600 aa, Homo sapiens
FLFPGHLCVSLTVRGSEGLYMVNGPPHFTESTVFPRESGKNCKVCIFSKDGTLFAWGNGEKVNIISVTNKGLLHSFDLLKAVCLEFSPKNTVLATWQPYTTSKDGTAGIPNLQLYDVKTGTCLKSFIQKKMQNWCPSWSEDETLCARNVNNEVHFFENNNFIGSRVSASGSFLDTIANKLHLQKINDFVLSPGPQPYKVAVYVPGSKGAPSFVRLYQYPNFAGPHAALANKSFFKADKVTMLWNKKATAVLVIASTDVDKTGASYYGEQTLHYIATNGESAVVQLPKNGPIYDVVWNSSSTEFCAVYGFMPAKATIFNLKCDPVFDFGTGPRNAAYYSPHGHILVLAGFGNLRGQMEVWDVKNYKLISKPVASDSTYFAWCPDGEHILTATCAPRLRVNNGYKIWHYTGSILHKYDVPSNAELWQVSWQPFLDGIFPAKTITYQAVPSEVPNEEPKVATAYRPPALRNKPITNSKLHEEEPPQNMKPQSGNDKPLSKTALKNQRKHEAKKAAKQEARSDKSPDLAPTPAPQSTPRNTVSQSISGDPEIDKKIKNLKKKLKAIEQLKEQAATGKQLEKNQLEKIQKETALLQELEDLELGI

SEQ ID NO: 808492 - protein, 570 aa, Homo sapiens
GALTNVSDWQNLDDMAPSTPLLTVRGSEGLYMVNGPPHFTESTVFPRESGKNCKVCIFSKDGTLFAWGNGEKVNIISVTNKGLLHSFDLLKAVCLEFSPKNTVLATWQPYTTSKDGTAGIPNLQLYDVKTGTCLKSFIQKKMQNWCPSWSEDETLCARNVNNEVHFFENNNFNTIANKLHLQKINDFVLSPGPQPYKVAVYVPGSKDKVTMLWNKKATAVLVIASTDVDKTGASYYGEQTLHYIATNGESAVVQLPKNGPIYDVVWNSSSTEFCAVYGFMPAKATIFNLKCDPVFDFGTGPRNAAYYSPHGHILVLAGFGNLRGQMEVWDVKNYKLISKPVASDSTYFAWCPDGEHILTATCAPRLRVNNGYKIWHYTGSILHKYDVPSNAELWQVSWQPFLDGIFPAKTITYQAVPSEVPNEEPKVATAYRPPALRNKPITNSKLHEEEPPQNMKPQSGNDKPLSKTALKNQRKHEAKKAAKQEARSDKSPDLAPTPAPQSTPRNTVSQSISGDPEIDKKIKNLKKKLKAIEQLKEQAATGKQLEKNQLEKIQKETALLQELEDLELGI

SEQ ID NO: 808493 - protein, 291 aa, Homo sapiens [sequence omitted]

SEQ ID NO: 808494 - protein, 160 aa, Homo sapiens
IELGTCQSVVPNEEPKVATAYRPPALRNKPITNSKLHEEEPPQNMKPQSGNDKPLSKTALKNQRKHEAKKAAKQEARSDKSPDLAPTPAPQSTPRNTVSQSISGDPEIDKKIKNLKKKLKAIEQLKEQAATGKQLEKNQLEKIQKETALLQELEDLELGI

SEQ ID NO: 808495 - protein, 624 aa, Homo sapiens
MRRVCRGRVRPWMNSHPSGFSFRDNMAPSTPLLTVRGSEGLYMVNGPPHFTESTVFPRESGKNCKVCIFSKDGTLFAWGNGEKVNIISVTNKGLLHSFDLLKAVCLEFSPKNTVLATWQPYTTSKDGTAGIPNLQLYDVKTGTCLKSFIQKKMQNWCPSWSEDETLCARNVNNEVHFFENNNFNTIANKLHLQKINDFVLSPGPQPYKVAVYVPGSKGAPSFVRLYQYPNFAGPHAALANKSFFKADKVTMLWNKKATAVLVIASTDVDKTGASYYGEQTLHYIATNGESAVVQLPKNGPIYDVVWNSSSTEFCAVYGFMPAKATIFNLKCDPVFDFGTGPRNAAYYSPHGHILVLAGFGNLRGQMEVWDVKNYKLISKPVASDSTYFAWCPDGEHILTATCAPRLRVNNGYKIWHYTGSILHKYDVPSNAELWQVSWQPFLDGIFPAKTITYQAVPSEVPNEEPKVATAYRPPALRNKPITNSKLHEEEPPQNMKPQSGNDKPLSKTALKNQRKHEAKKAAKQEARSDKSPDLAPTPAPQSTPRNTVSQSISGDPEIDKNQNQEEMEASNMKTAHGTVENRGESKKLSGGIDGLQSGECVRIWLLYLVDSGLGYLLSVQGVGE

SEQ ID NO: 808496 - protein, 567 aa, Homo sapiens; identical to SEQ ID NO: 808490

SEQ ID NO: 808497 - protein, 436 aa, Homo sapiens
MRRVCRGRVRPWMNSHPSGFSFRDNMAPSTPLLTVRGSEGLYMVNGPPHFTESTVFPRESGKNCKVCIFSKDGTLFAWGNGEKVNIISVTNKGLLHSFDLLKAVCLEFSPKNTVLATWQPYTTSKDGTAGIPNLQLYDVKTGTCLKSFIQKKMQNWCPSWSEDETLCARNVNNEVHFFENNNFNTIANKLHLQKINDFVLSPGPQPYKVAVYVPGSKGAPSFVRLYQYPNFAGPHAALANKSFFKADKVTMLWNKKATAVLVIASTDVDKTGASYYGEQTLHYIATNGESAVVQLPKNGPIYDVVWNSSSTEFCAVYGFMPAKATIFNLKCDPVFDFGTGPRNAAYYSPHGHILVLAGFGNLRGQMEVWDVKNYKLISKPVASDSTYFAWCPDGEHILTALHVLPGYGLIMNNWHIALSAQYGCPSIRLWQFGTIG

SEQ ID NO: 808498 - protein, 190 aa, Homo sapiens; identical to SEQ ID NO: 808481

SEQ ID NO: 808499 - protein, 190 aa, Homo sapiens; identical to SEQ ID NO: 808481

SEQ ID NO: 808500 - protein, 245 aa, Homo sapiens
MAPSTPLLTVRGSEGLYMVNGPPHFTESTVFPRESGKNCKVCIFSKDGTLFAWGNGEKVNIISVTNKGLLHSFDLLKAVCLEFSPKNTVLATWQPYTTSKDGTAGIPNLQLYDVKTGTCLKSFIQKKMQNWCPSWSEDETLCARNVNNEVHFFENNNFNTIANKLHLQKINDFVLSPGPQPYKVAVYVPGSKGAPSFVRLYQYPNFAGPHAALANKSFFKADKVTMLWNKKVWRQTLTHWNNGEG

SEQ ID NO: 808501 - protein, 237 aa, Homo sapiens
MALPPSPLAMEYVNDFDLMKFEVKREPSEGRPGPPTASLGSTPYSSVPPSPTFSEPGMVGATEGTRPGLEELYWLATLQQQLGAGEALGLSPEEAMELLQGQGPVPVDGPHGYYPGSPEETGAQHVQLAERFSDAALVSMSVRELNRQLRGCGRDEALRLKQRRRTLKNRGYAQACRSKRLQQRRGLEAERARLAAQLDALRAEVARLARERDLYKARCDRLTSSGPGSGDPSHLFL

SEQ ID NO: 808502 - protein, 237 aa, Homo sapiens; identical to SEQ ID NO: 808501

SEQ ID NO: 808503 - protein, 235 aa, Homo sapiens
NRTSLGAPGLDGGRSQLYGVSPCWPSWSPTPDLVIRLPWPPKVLEFTGVSHHARLVILSLHNPMRKLICPPNYHHKVLRWFLKLYLHWDISLQPETTGYHPQCYIAPQTQHIYDGCLLSIHSPFLLAERFSDAALVSMSVRELNRQLRGCGRDEALRLKQRRRTLKNRGYAQACRSKRLQQRRGLEAERARLAAQLDALRAEVARLARERDLYKARCDRLTSSGPGSGDPSHLFL

SEQ ID NO: 808504 - protein, 193 aa, Homo sapiens
EGWGLSGCGSTGHTRAWSWMPGIPETSPGFRCATGSPDRGRPCTVGRPPDWSNGQLGGPGSVGAWGGLWTETDCVEGRAFLVKLAERFSDAALVSMSVRELNRQLRGCGRDEALRLKQRRRTLKNRGYAQACRSKRLQQRRGLEAERARLAAQLDALRAEVARLARERDLYKARCDRLTSSGPGSGDPSHLFL

SEQ ID NO: 808505 - protein, 208 aa, Homo sapiens
RRGCVRHEGEEAEKHLPLKPAVTAPRETTHQPGAVAGPAAARGLVYTDCRHCVGQPLLRHALRSSRISRLPGRRAANVTRRPRPLGQPTGQRSTMIDELAERFSDAALVSMSVRELNRQLRGCGRDEALRLKQRRRTLKNRGYAQACRSKRLQQRRGLEAERARLAAQLDALRAEVARLARERDLYKARCDRLTSSGPGSGDPSHLFL

SEQ ID NO: 808506 - protein, 75 aa, Homo sapiens
NRTSLGAPGLDGGRSQLYGVSPCWPSWSPTPDLVIRLPWPPKVLEFTGVSHHARPGHSFSPQSNEETHLPTQLPS

SEQ ID NO: 808507 - protein, 1393 aa, Homo sapiens
QYNLANAIEAADAYTVFAPNNNAIENYIREKKVLSLEEDVLRYHVVLEEKLLKNDLHNGMHRETMLGFSYFLSFFLHNDQLYVNEAPINYTNVATDKGVIHGLGKVLEIQKNRCDNNDTTIIRGRCRTCSSELTCPFGTKSLGNEKRRCIYTSYFMGRRTLFIGCQPKCVRTVITRECCAGFFGPQCQPCPGNAQNVCFGNGICLDGVNGTGVCECGEGFSGTACETCTEGKYGIHCDQACSCVHGRCNQGPLGDGSCDCDVGWRGVHCDNATTEDNCNGTCHTSANCLTNSDGTASCKCAAGFQGNGTICTAINACEISNGGCSAKADCKRTTPGRRVCTCKAGYTGDGIVCLEINPCLENHGGCDKNAECTQTGPNQAACNCLPAYTGDGKVCTLINVCLTKNGGCSEFAICNHTGQVERTCTCKPNYIGDGFTCRGSIYQELPKNPKTSQYFFQLQEHFVKDLVGPGPFTVFAPLSAAFDEEARVKDWDKYGLMPQVLRYHVVACHQLLLENLKLISNATSLQGEPIVISVSQSTVYINNKAKIISSDIISTNGIVHIIDKLLSPKNLLITPKDNSGRILQNLTTLATNNGYIKFSNLIQDSGLLSVITDPIHTPVTLFWPTDQALHALPAEQQDFLFNQDNKDKLKEYLKFHVIRDAKVLAVDLPTSTAWKTLQGSELSVKCGAGRDIGDLFLNGQTCRIVQRELLFDLGVAYGIDCLLIDPTLGGRCDTFTTFDASGECGSCVNTPSCPRWSKPKGVKQKCLYNLPFKRNLEGCRERCSLVIQIPRCCKGYFGRDCQACPGGPDAPCNNRGVCLDQYSATGECKCNTGFNGTACEMCWPGRFGPDCLPCGCSDHGQCDDGITGSGQCLCETGWTGPSCDTQAVLPAVCTPPCSAHATCKENNTCECNLDYEGDGITCTVVDFCKQDNGGCAKVARCSQKGTKVSCSCQKGYKGDGHSCTEIDPCADGLNGGCHEHATCKMTGPGKHKCECKSHYVGDGLNCEPEQLPIDRCLQDNGQCHADAKCVDLHFQDTTVGVFHLRSPLGQYKLTFDKAREACANEAATMATYNQLSYAQKAKYHLCSAGWLETGRVAYPTAFASQNCGSGVVGIVDYGPRPNKSEMWDVFCYRMKDVNCTCKVGYVGDGFSCSGNLLQVLMSFPSLTNFLTEVLAYSNSSARGRAFLEHLTDLSIRGTLFVPQNSGLGENETLSGRDIEHHLANVSMFFYNDLVNGTTLQTRLGSKLLITASQDPLQPTETRFVDGRAILQWDIFASNGIIHVISRPLKAPPAPVTLTHTGLGAGIFFAIILVTGAVALAAYSYFRINRRTIGFQHFESEEDINVAALGKQQPENISNPLYESTTSAPPEPSYDPFTDSEERQLEGNDPLRTL

SEQ ID NO: 808508 - protein, 1115 aa, Homo sapiens
MGHAITSANCLTNSDGTASCKCAAGFQGNGTICTAINACEISNGGCSAKADCKRTTPGRRVCTCKAGYTGDGIVCLEINPCLENHGGCDKNAECTQTGPNQAACNCLPAYTGDGKVCTLINVCLTKNGGCSEFAICNHTGQVERTCTCKPNYIGDGFTCRGSIYQELPKNPKTSQYFFQLQEHFVKDLVGPGPFTVFAPLSAAFDEEARVKDWDKYGLMPQVLRYHVVACHQLLLENLKLISNATSLQGEPIVISVSQSTVYINNKAKIISSDIISTNGIVHIIDKLLSPKNLLITPKDNSGRILQNLTTLATNNGYIKFSNLIQDSGLLSVITDPIHTPVTLFWPTDQALHALPAEQQDFLFNQDNKDKLKEYLKFHVIRDAKVLAVDLPTSTAWKTLQGSELSVKCGAGRDIGDLFLNGQTCRIVQRELLFDLGVAYGIDCLLIDPTLGGRCDTFTTFDASGECGSCVNTPSCPRWSKPKGVKQKCLYNLPFKRNLEGCRERCSLVIQIPRCCKGYFGRDCQACPGGPDAPCNNRGVCLDQYSATGECKCNTGFNGTACEMCWPGRFGPDCLPCGCSDHGQCDDGITGSGQCLCETGWTGPSCDTQAVLPAVCTPPCSAHATCKENNTCECNLDYEGDGITCTVVDFCKQDNGGCAKVARCSQKGTKVSCSCQKGYKGDGHSCTEIDPCADGLNGGCHEHATCKMTGPGKHKCECKSHYVGDGLNCEPEQLPIDRCLQDNGQCHADAKCVDLHFQDTTVGVFHLRSPLGQYKLTFDKAREACANEAATMATYNQLSYAQKAKYHLCSAGWLETGRVAYPTAFASQNCGSGVVGIVDYGPRPNKSEMWDVFCYRMKDVNCTCKVGYVGDGFSCSGNLLQVLMSFPSLTNFLTEVLAYSNSSARGRAFLEHLTDLSIRGTLFVPQNSGLGENETLSGRDIEHHLANVSMFFYNDLVNGTTLQTRLGSKLLITASQDPLQPTETRFVDGRAILQWDIFASNGIIHVISRPLKAPPAPVTLTHTGLGAGIFFAIILVTGAVALAAYSYFRINRRTIGFQHFESEEDINVAALGKQQPENISNPLYESTTSAPPEPSYDPFTDSEERQLEGNDPLRTL

SEQ ID NO: 808509 - protein, 385 aa, Homo sapiens
MALSVSLQAKYHLCSAGWLETGRVAYPTAFASQNCGSGVVGIVDYGPRPNKSEMWDVFCYRMKDVNCTCKVGYVGDGFSCSGNLLQVLMSFPSLTNFLTDSLRKGKVLKLSHGAGRRHSKEQQAELAHTMNIHRWVMPWDLLQPPRSLHTRAGPSDDFLSSPQEVLAYSNSSARGRAFLEHLTDLSIRGTLFVPQNSGLGENETLSGRDIEHHLANVSMFFYNDLVNGTTLQTRLGSKLLITASQDPLQPTETRFVDGRAILQWDIFASNGIIHVISRPLKAPPAPVTLTHTGLGAGIFFAIILVTGAVALAAYSYFRINRRTIGFQHFESEEDINVAALGKQQPENISNPLYESTTSAPPEPSYDPFTDSEERQLEGNDPLRTL

SEQ ID NO: 808510 - protein, 1475 aa, Homo sapiens
QYNLANAIEAADAYTVFAPNNNAIENYIREKKVLSLEEDVLRYHVVLEEKLLKNDLHNGMHRETMLGFSYFLSFFLHNDQLYVNEAPINYTNVATDKGVIHGLGKVLEIQKNRCDNNDTTIIRGRCRTCSSELTCPFGTKSLGNEKRRCIYTSYFMGRRTLFIGCQPKCVRTVITRECCAGFFGPQCQPCPGNAQNVCFGNGICLDGVNGTGVCECGEGFSGTACETCTEGKYGIHCDQACSCVHGRCNQGPLGDGSCDCDVGWRGVHCDNATTEDNCNGTCHTSANCLTNSDGTASCKCAAGFQGNGTICTAINACEISNGGCSAKADCKRTTPGRRVCTCKAGYTGDGIVCLEINPCLENHGGCDKNAECTQTGPNQAACNCLPAYTGDGKVCTLINVCLTKNGGCSEFAICNHTGQVERTCTCKPNYIGDGFTCRGSIYQELPKNPKTSQYFFQLQEHFVKDLVGPGPFTVFAPLSAAFDEEARVKDWDKYGLMPQVLRYHVVACHQLLLENLKLISNATSLQGEPIVISVSQSTVYINNKAKIISSDIISTNGIVHIIDKLLSPKNLLITPKDNSGRILQNLTTLATNNGYIKFSNLIQDSGLLSVITDPIHTPVTLFWPTDQALHALPAEQQDFLFNQDNKDKLKEYLKFHVIRDAKVLAVDLPTSTAWKTLQGSELSVKCGAGRDIGDLFLNGQTCRIVQRELLFDLGVAYGIDCLLIDPTLGGRCDTFTTFDASGECGSCVNTPSCPRWSKPKGVKQKCLYNLPFKRNLEGCRERCSLVIQIPRCCKGYFGRDCQACPGGPDAPCNNRGVCLDQYSATGECKCNTGFNGTACEMCWPGRFGPDCLPCGCSDHGQCDDGITGSGQCLCETGWTGPSCDTQAVLPAVCTPPCSAHATCKENNTCECNLDYEGDGITCTVVDFCKQDNGGCAKVARCSQKGTKVSCSCQKGYKGDGHSCTEIDPCADGLNGGCHEHATCKMTGPGKHKCECKSHYVGDGLNCEPEQLPIDRCLQDNGQCHADAKCVDLHFQDTTVGVFHLRSPLGQYKLTFDKAREACANEAATMATYNQLSYAQKAKYHLCSAGWLETGRVAYPTAFASQNCGSGVVGIVDYGPRPNKSEMWDVFCYRMKDVNCTCKVGYVGDGFSCSGNLLQVLMSFPSLTNFLTEVLAYSNSSARGRAFLEHLTDLSIRGTLFVPQNSGLGENETLSGRDIEHHLANVSMFFYNDLVNGTTLQTRLGSKLLITASQDPLQPTETRFVDGRAILQWDIFASNGIIHVISRPLKAPPAPVTLTHTGLGAGIFFAIILVTGAVALAAYSYFRINRRTIGFQHFESEEDINVAALGKQQPENISNPLYESTTSAPPEPSYDPFTMKKLQPSWDDLSWATQLQAGETKTGGPTPSPSCLPTQGSSTNKHAQHIRVHSAQGESCLRPVATRKIQLGLNTQNALPPYNPLFSRTLKNGSLRAMTP

SEQ ID NO: 808511 - protein, 105 aa, Homo sapiens
ESSLNKVLLKKEKLPEAKGGLLYLPTWLRRSCFGDAPGFHACLSKQSEEDINVAALGKQQPENISNPLYESTTSAPPEPSYDPFTVSLHSYLGIGSLGVQGNDVF

SEQ ID NO: 808512 - protein, 1357 aa, Homo sapiens
QYNLANAIEAADAYTVFAPNNNAIENYIREKKVLSLEEDVLRYHVVLEEKLLKNDLHNGMHRETMLGFSYFLSFFLHNDQLYVNEAPINYTNVATDKGVIHGLGKVLEIQKNRCDNNDTTIIRGRCRTCSSELTCPFGTKSLGNEKRRCIYTSYFMGRRTLFIGCQPKCVRTVITRECCAGFFGPQCQPCPGNAQNVCFGNGICLDGVNGTGVCECGEGFSGTACETCTEGKYGIHCDQACSCVHGRCNQGPLGDGSCDCDVGWRGVHCDNATTEDNCNGTCHTSANCLTNSDGTASCKCAAGFQGNGTICTAINACEISNGGCSAKADCKRTTPGRRVCTCKAGYTGDGIVCLEINPCLENHGGCDKNAECTQTGPNQAACNCLPAYTGDGKVCTLINVCLTKNGGCSEFAICNHTGQVERTCTCKPNYIGDGFTCRGSIYQELPKNPKTSQYFFQLQEHFVKDLVGPGPFTVFAPLSAAFDEEARVKDWDKYGLMPQVLRYHVVACHQLLLENLKLISNATSLQGEPIVISVSQSTVYINNKAKIISSDIISTNGIVHIIDKLLSPKNLLITPKDNSGRILQNLTTLATNNGYIKFSNLIQDSGLLSVITDPIHTPVTLFWPTDQALHALPAEQQDFLFNQDNKDKLKEYLKFHVIRDAKVLAVDLPTSTAWKTLQGSELSVKCGAGRDIGDLFLNGQTCRIVQRELLFDLGVAYGIDCLLIDPTLGGRCDTFTTFDASGECGSCVNTPSCPRWSKPKGVKQKCLYNLPFKRNLEGCRERCSLVIQIPRCCKGYFGRDCQACPGGPDAPCNNRGVCLDQYSATGECKCNTGFNGTACEMCWPGRFGPDCLPCGCSDHGQCDDGITGSGQCLCETGWTGPSCDTQAVLPAVCTPPCSAHATCKENNTCECNLDYEGDGITCTVVDFCKQDNGGCAKVARCSQKGTKVSCSCQKGYKGDGHSCTEIDPCADGLNGGCHEHATCKMTGPGKHKCECKSHYVGDGLNCEPEQLPIDRCLQDNGQCHADAKCVDLHFQDTTVGVFHLRSPLGQYKLTFDKAREACANEAATMATYNQLSYAQKAKYHLCSAGWLETGRVAYPTAFASQNCGSGVVGIVDYGPRPNKSEMWDVFCYRMKGSAGLFQQLSSRPCISRTPDDLSIRGTLFVPQNSGLGENETLSGRDIEHHLANVSMFFYNDLVNGTTLQTRLGSKLLITASQDPLQPTETRFVDGRAILQWDIFASNGIIHVISRPLKAPPAPVTLTHTGLGAGIFFAIILVTGAVALAAYSYFRINRRTIGFQHFESEEDINVAALGKQQPENISNPLYESTTSAPPEPSYDPFTDSEERQLEGNDPLRTL

SEQ ID NO: 808513 - protein, 525 aa, Homo sapiens
MGFNSSHHGYRMKVAPFFAVLPAVCTPPCSAHATCKENNTCECNLDYEGDGITCTVVDFCKQDNGGCAKVARCSQKGTKVSCSCQKGYKGDGHSCTEIDPCADGLNGGCHEHATCKMTGPGKHKCECKSHYVGDGLNCEPEQLPIDRCLQDNGQCHADAKCVDLHFQDTTVGVFHLRSPLGQYKLTFDKAREACANEAATMATYNQLSYAQKAKYHLCSAGWLETGRVAYPTAFASQNCGSGVVGIVDYGPRPNKSEMWDVFCYRMKDVNCTCKVGYVGDGFSCSGNLLQVLMSFPSLTNFLTEVLAYSNSSARGRAFLEHLTDLSIRGTLFVPQNSGLGENETLSGRDIEHHLANVSMFFYNDLVNGTTLQTRLGSKLLITASQDPLQPTETRFVDGRAILQWDIFASNGIIHVISRPLKAPPAPVTLTHTGLGAGIFFAIILVTGAVALAAYSYFRINRRTIGFQHFESEEDINVAALGKQQPENISNPLYESTTSAPPEPSYDPFTDSEERQLEGNDPLRTL

SEQ ID NO: 808514 - protein, 251 aa, Homo sapiens
QYNLANAIEAADAYTVFAPNNNAIENYIREKKVLSLEEDVLRYHVVLEEKLLKNDLHNGMHRETMLGFSYFLSFFLHNDQLYVNEAPINYTNVATDKGVIHGLGKVLEIQKNRCDNNDTTIIRGRCRTCSSELTCPFGTKSLGNEKRRCIYTSYFMGRRTLFIGCQPKCVRTVITRECCAGFFGPQCQPCPGNAQNVCFGNGICLDGVNGTGVCECGEGFSGTACETCTEGKYGIHCDQGEHRPLHRGSWA

SEQ ID NO: 808515 - protein, 265 aa, Homo sapiens
MHFYRLFLGATRRFLNPEWKGEIDNWCVYVLTSLLPFKIQSQDIKALQKELEQFAKLLKQKRITLGYTQADVGLTLGVLFGKVFSQTTICRFEALQLSFKNMCKLRPLLQKWVEEADNNENLQEICKAETLVQARKRKRTSIENRVRGNLENLFLQCPKPTLQQISHIAQQLGLEKDVVRVWFCNRRQKGKRSSSDYAQREDFEAAGSPFSGGPVSFPLAPGPHFGTPGYGSPHFTALYSSVPFPEGEAFPPVSVTTLGSPMHSN

SEQ ID NO: 808516 - protein, 149 aa, Homo sapiens
VTPFPPAQICKAETLVQARKRKRTSIENRVRGNLENLFLQCPKPTLQQISHIAQQLGLEKDVVRVWFCNRRQKGKRSSSDYAQREDFEAAGSPFSGGPVSFPLAPGPHFGTPGYGSPHFTALYSSVPFPEGEAFPPVSVTTLGSPMHSN

SEQ ID NO: 808517 - protein, 338 aa, Homo sapiens
MGAEPGWVDPLTWLSFQGPPGGPGIGPGVGPGSEVWGIPPCPPPYELCGGMAYCGPQVGVGLVPQGGLETSQPEGEAGVGVESNSDGASPEPCTVTPGAVKLEKEKLEQNPEKSQDIKALQKELEQFAKLLKQKRITLGYTQADVGLTLGVLFGKVFSQTTICRFEALQLSFKNMCKLRPLLQKWVEEADNNENLQEICKAETLVQARKRKRTSIENRVRGNLENLFLQCPKPTLQQISHIAQQLGLEKDVVRVWFCNRRQKGKRSSSDYAQREDFEAAGSPFSGGPVSFPLAPGPHFGTPGYGSPHFTALYSSVPFPEGEAFPPVSVTTLGSPMHSN

SEQ ID NO: 808518 - protein, 81 aa, Homo sapiens
ERSFLVVWPQSFAVPRRPSPSHATAPHLSKSADILIFPTLSVRSPPPLDARAPGLVGCAAPRTASHQPAPSLSCSTLICTP

SEQ ID NO: 808519 - protein, 81 aa, Homo sapiens; identical to SEQ ID NO: 808518

SEQ ID NO: 808520 - protein, 81 aa, Homo sapiens; identical to SEQ ID NO: 808518

SEQ ID NO: 808521 - protein, 81 aa, Homo sapiens; identical to SEQ ID NO: 808518

SEQ ID NO: 808522 - protein, 51 aa, Homo sapiens
MTLITKSFIFEFVAVVHFLPTHSINLTELQKKKGGAKNPGPSTYSSDKGHR

SEQ ID NO: 808523 - protein, 71 aa, Homo sapiens
ERSFLVVWPQSFAVPRRPSPSHATAPHLSKSADILIFPTLSVRSPPPLDARAPGESTAGRMVGSTLTIGGN

SEQ ID NO: 808524 - protein, 71 aa, Homo sapiens; identical to SEQ ID NO: 808523

SEQ ID NO: 808525 - protein, 81 aa, Homo sapiens; identical to SEQ ID NO: 808518

SEQ ID NO: 808526 - protein, 71 aa, Homo sapiens; identical to SEQ ID NO: 808523

SEQ ID NO: 808527 - protein, 71 aa, Homo sapiens; identical to SEQ ID NO: 808523

SEQ ID NO: 808528 - protein, 81 aa, Homo sapiens; identical to SEQ ID NO: 808518

SEQ ID NO: 808529 - protein, 81 aa, Homo sapiens; identical to SEQ ID NO: 808518

SEQ ID NO: 808530 - protein, 81 aa, Homo sapiens; identical to SEQ ID NO: 808518

SEQ ID NO: 808531 - protein, 163 aa, Homo sapiens
LVVCLWKRYYYYLTNGIRKDMIAPEEGEVMVRISKLISNTLLTSPFLEPLMVVLVQEKENDYYCSLMKSIVDYILMDPMERKRLFIESIPRLFPQRVIRAPVPWHSVYRSAKKWNEEHLHTVNPMMLRLKELWFAEFRDLRFVRTAEILAGKLPLQPQEFWDV

SEQ ID NO: 808532 - protein, 136 aa, Homo sapiens
LVVCLWKRYYYYLTNGIRKDMIAPEEGEVMVRISKLISNTLLTSPFLEPLMVVLVQEKENDYYCSLMKSIVDYILMDPMERKRLFIESIPRLFPQRVIRAPVPWHSVYRSAKKWNEEHLHTVNPMMLRLKELWFAE

SEQ ID NO: 808533 - protein, 1272 aa, Homo sapiens
MPAERKKPASMEEKDSLPNNKEKDCSERRTVSSKERPKDDIKLTAKKEVSKAPEDKKKRLEDDKRKKEDKERKKKDEEKVKAEEESKKKEEEEKKKHQEEERKKQEEQAKRQQEEEAAAQMKEKEESIQLHQEAWERHHLRKELRSKNQNAPDSRPEENFFSRLDSSLKKNTAFVKKLKTITEQQRDSLSHDFNGLNLSKYIAEAVASIVEAKLKISDVNCAVHLCSLFHQRYADFAPSLLQVWKKHFEARKEEKTPNITKLRTDLRFIAELTIVGIFTDKEGLSLIYEQLKNIINADRESHTHVSVVISFCRHCGDDIAGLVPRKVKSAAEKFNLSFPPSEIISPEKQQPFQNLLKEYFTSLTKHLKRDHRELQNTERQNRRILHSKGELSEDRHKQYEEFAMSYQKLLANSQSLADLLDENMPDLPQDKPTPEEHGPGIDIFTPGKPGEYDLEGGIWEDEDARNFYENLIDLKAFVPAILFKDNEKSCQNKESNKDDTKEAKESKENKEVSSPDDLELELENLEINDDTLELEGGDEAEDLTKKLLDEQEQEDEEASTGSHLKLIVDAFLQQLPNCVNRDLIDKAAMDFCMNMNTKANRKKLVRALFIVPRQRLDLLPFYARLVATLHPCMSDVAEDLCSMLRGDFRFHVRKKDQINIETKNKTVRFIGELTKFKMFTKNDTLHCLKMLLSDFSHHHIEMACTLLETCGRFLFRSPESHLRTSVLLEQMMRKKQAMHLDARYVTMVENAYYYCNPPPAEKTVKKKRPPLQEYVRKLLYKDLSKVTTEKVLRQMRKLPWQDQEVKDYVICCMINIWNVKYNSIHCVANLLAGLVLYQEDVGIHVVDGVLEDIRLGMEVNQPKFNQRRISSAKFLGELYNYRMVESAVIFRTLYSFTSFGVNPDGSPSSLDPPEHLFRIRLVCTILDTCGQYFDRGSSKRKLDCFLVYFQRYVWWKKSLEVWTKDHPFPIDIDYMISDTLELLRPKIKLCNSLEESIRQVQDLEREFLIKLGLVNDKDSKDSMTEGENLEEDEEEEEGGAETEEQSGNESEVNEPEEEEGSDNDDDEGEEEEEENTDYLTDSNKENETDEENTEVMIKGGGLKHVPCVEDEDFIQALDKMMLENLQQRSGESVKVHQLDVAIPLHLKSQLRKGPPLGGGEGEAESADTMPFVMLTRKGNKQQFKILNVPMSSQLAANHWNQQQAEQEERMRMKKLTLDINERQEQEDYQEMLQSLAQRPAPANTNRERRPRYQHPKGAPNADLIFKTGGRRR

SEQ ID NO: 808534 - protein, 1272 aa, Homo sapiens; identical to SEQ ID NO: 808533

SEQ ID NO: 808535 - protein, 1255 aa, Homo sapiens
GRLLLLNSRPRRPVSSKERPKDDIKLTAKKEVSKAPEDKKKRLEDDKRKKEDKERKKKDEEKVKAEEESKKKEEEEKKKHQEEERKKQEEQAKRQQEEEAAAQMKEKEESIQLHQEAWERHHLRKELRSKNQNAPDSRPEENFFSRLDSSLKKNTAFVKKLKTITEQQRDSLSHDFNGLNLSKYIAEAVASIVEAKLKISDVNCAVHLCSLFHQRYADFAPSLLQVWKKHFEARKEEKTPNITKLRTDLRFIAELTIVGIFTDKEGLSLIYEQLKNIINADRESHTHVSVVISFCRHCGDDIAGLVPRKVKSAAEKFNLSFPPSEIISPEKQQPFQNLLKEYFTSLTKHLKRDHRELQNTERQNRRILHSKGELSEDRHKQYEEFAMSYQKLLANSQSLADLLDENMPDLPQDKPTPEEHGPGIDIFTPGKPGEYDLEGGIWEDEDARNFYENLIDLKAFVPAILFKDNEKSCQNKESNKDDTKEAKESKENKEVSSPDDLELELENLEINDDTLELEGGDEAEDLTKKLLDEQEQEDEEASTGSHLKLIVDAFLQQLPNCVNRDLIDKAAMDFCMNMNTKANRKKLVRALFIVPRQRLDLLPFYARLVATLHPCMSDVAEDLCSMLRGDFRFHVRKKDQINIETKNKTVRFIGELTKFKMFTKNDTLHCLKMLLSDFSHHHIEMACTLLETCGRFLFRSPESHLRTSVLLEQMMRKKQAMHLDARYVTMVENAYYYCNPPPAEKTVKKKRPPLQEYVRKLLYKDLSKVTTEKVLRQMRKLPWQDQEVKDYVICCMINIWNVKYNSIHCVANLLAGLVLYQEDVGIHVVDGVLEDIRLGMEVNQPKFNQRRISSAKFLGELYNYRMVESAVIFRTLYSFTSFGVNPDGSPSSLDPPEHLFRIRLVCTILDTCGQYFDRGSSKRKLDCFLVYFQRYVWWKKSLEVWTKDHPFPIDIDYMISDTLELLRPKIKLCNSLEESIRQVQDLEREFLIKLGLVNDKDSKDSMTEGENLEEDEEEEEGGAETEEQSGNESEVNEPEEEEGSDNDDDEGEEEEEENTDYLTDSNKENETDEENTEVMIKGGGLKHVPCVEDEDFIQALDKMMLENLQQRSGESVKVHQLDVAIPLHLKSQLRKGPPLGGGEGEAESADTMPFVMLTRKGNKQQFKILNVPMSSQLAANHWNQQQAEQEERMRMKKLTLDINERQEQEDYQEMLQSLAQRPAPANTNRERRPRYQHPKGAPNADLIFKTGGRRR

SEQ ID NO: 808536 - protein, 1262 aa, Homo sapiens
GGGRGGESPSAGVGAGKPGANVDNRLEIVLGHIMPAERKKPASMEEKDSLPNNKEKDCSERRTVSSKERPKDDIKLTAKKEVSKAPEDKKKRLEDDKRKKEDKERKKKDEEKVKAEEESKKKEEEEKKKHQEEERKKQEEQAKRQQEEEAAAQMKEKEESIQLHQEAWERHHLRKELRSKNQNAPDSRPEENFFSRLDSSLKKNTAFVKKLKTITEQQRDSLSHDFNGLNLSKYIAEAVASIVEAKLKISDVNCAVHLCSLFHQRYADFAPSLLQVWKKHFEARKEEKTPNITKLRTDLRFIAELTIVGIFTDKEGLSLIYEQLKNIINADRESHTHVSVVISFCRHCGDDIAGLVPRKVKSAAEKFNLSFPPSEIISPEKQQPFQNLLKEYFTSLTKHLKRDHRELQNTERQNRRILHSKGELSEDRHKQYEEFAMSYQKLLANSQSLADLLDENMPDLPQDKPTPEEHGPGIDIFTPGKPGEYDLEGGIWEDEDARNFYENLIDLKAFVPAILFKDNEKSCQNKESNKDDTKEAKESKENKEVSSPDDLELELENLEINDDTLELEGGDEAEDLTKKLLDEQEQEDEEASTGSHLKLIVDAFLQQLPNCVNRDLIDKAAMDFCMNMNTKANRKKLVRALFIVPRQRLDLLPFYARLVATLHPCMSDVAEDLCSMLRGDFRFHVRKKDQINIETKNKTVRFIGELTKFKMFTKNDTLHCLKMLLSDFSHHHIEMACTLLETCGRFLFRSPESHLRTSVLLEQMMRKKQAMHLDARYVTMVENAYYYCNPPPAEKTVKKKRPPLQEYVRKLLYKDLSKVTTEKVLRQMRKLPWQDQEVKDYVICCMINIWNVKYNSIHCVANLLAGLVLYQEDVGIHVVDGVLEDIRLGMEVNQPKFNQRRISSAKFLGELYNYRMVESAVIFRTLYSFTSFGVNPDGSPSSLDPPEHLFRIRLVCTILDTCGQYFDRGSSKRKLDCFLVYFQRYVWWKKSLEVWTKDHPFPIDIDYMISDTLELLRPKIKLCNSLEESIRQVQDLEREFLIKLGLVNDKDSKDSMTEGENLEEDEEEEEGGAETEEQSGNESEVNEPEEEEGSDNDDDEGEEEEEENTDYLTDSNKENETDEENTEVMIKGGGLKHVPCVEDEDFIQALDKMMLENLQQRSGESVKVHQLDVAIPLHLKSQLRKGPPLGGGEGEAESADTMPFVMLTRKGNKQQFKILNVPMSSQLAANHWNQQQAEQEERMRMKNVAVSCTAPSSSKHQS

SEQ ID NO: 808537 - protein, 908 aa, Homo sapiens
GGGRGGESPSAGVGAGKPGANVDNRLEIVLGHIMPAERKKPASMEEKDSLPNNKEKDCSERRTVSSKERPKDDIKLTAKKEVSKAPEDKKKRLEDDKRKKEDKERKKKDEEKVKAEEESKKKEEEEKKKHQEEERKKQEEQAKRQQEEEAAAQMKEKEESIQLHQEAWERHHLRKELRSKNQNAPDSRPEENFFSRLDSSLKKNTAFVKKLKTITEQQRDSLSHDFNGLNLSKYIAEAVASIVEAKLKISDVNCAVHLCSLFHQRYADFAPSLLQVWKKHFEARKEEKTPNITKLRTDLRFIAELTIVGIFTDKEGLSLIYEQLKNIINADRESHTHVSVVISFCRHCGDDIAGLVPRKVKSAAEKFNLSFPPSEIISPEKQQPFQNLLKEYFTSLTKHLKRDHRELQNTERQNRRILHSKGELSEDRHKQYEEFAMSYQKLLANSQSLADLLDENMPDLPQDKPTPEEHGPGIDIFTPGKPGEYDLEGGIWEDEDARNFYENLIDLKAFVPAILFKDNEKSCQNKESNKDDTKEAKESKENKEVSSPDDLELELENLEINDDTLELEGGDEAEDLTKKLLDEQEQEDEEASTGSHLKLIVDAFLQQLPNCVNRDLIDKAAMDFCMNMNTKANRKKLVRALFIVPRQRLDLLPFYARLVATLHPCMSDVAEDLCSMLRGDFRFHVRKKDQINIETKNKTVRFIGELTKFKMFTKNDTLHCLKMLLSDFSHHHIEMACTLLETCGRFLFRSPESHLRTSVLLEQMMRKKQAMHLDARYVTMVENAYYYCNPPPAEKTVKKKRPPLQEYVRKLLYKDLSKVTTEKVLRQMRKLPWQDQEVKDYVICCMINIWNVKYNSIHCVANLLAGLVLYQEDVGIHVVDGVLEDIRLGMEYNPKFNQSTDAVGSELD

SEQ ID NO: 808538 - protein, 1305 aa, Homo sapiens
GGGRGGESPSAGVGAGKPGANVDNRLEIVLGHIMPAERKKPASMEEKDSLPNNKEKDCSERRTVSSKERPKDDIKLTAKKEVSKAPEDKKKRLEDDKRKKEDKERKKKDEEKVKAEEESKKKEEEEKKKHQEEERKKQEEQAKRQQEEEAAAQMKEKEESIQLHQEAWERHHLRKELRSKNQNAPDSRPEENFFSRLDSSLKKNTAFVKKLKTITEQQRDSLSHDFNGLNLSKYIAEAVASIVEAKLKISDVNCAVHLCSLFHQRYADFAPSLLQVWKKHFEARKEEKTPNITKLRTDLRFIAELTIVGIFTDKEGLSLIYEQLKNIINADRESHTHVSVVISFCRHCGDDIAGLVPRKVKSAAEKFNLSFPPSEIISPEKQQPFQNLLKEYFTSLTKHLKRDHRELQNTERQNRRILHSKGELSEDRHKQYEEFAMSYQKLLANSQSLADLLDENMPDLPQDKPTPEEHGPGIDIFTPGKPGEYDLEGGIWEDEDARNFYENLIDLKAFVPAILFKDNEKSCQNKESNKDDTKEAKESKENKEVSSPDDLELELENLEINDDTLELEGGDEAEDLTKKLLDEQEQEDEEASTGSHLKLIVDAFLQQLPNCVNRDLIDKAAMDFCMNMNTKANRKKLVRALFIVPRQRLDLLPFYARLVATLHPCMSDVAEDLCSMLRGDFRFHVRKKDQINIETKNKTVRFIGELTKFKMFTKNDTLHCLKMLLSDFSHHHIEMACTLLETCGRFLFRSPESHLRTSVLLEQMMRKKQAMHLDARYVTMVENAYYYCNPPPAEKTVKKKRPPLQEYVRKLLYKDLSKVTTEKVLRQMRKLPWQDQEVKDYVICCMINIWNVKYNSIHCVANLLAGLVLYQEDVGIHVVDGVLEDIRLGMEVNQPKFNQRRISSAKFLGELYNYRMVESAVIFRTLYSFTSFGVNPDGSPSSLDPPEHLFRIRLVCTILDTCGQYFDRGSSKRKLDCFLVYFQRYVWWKKSLEVWTKDHPFPIDIDYMISDTLELLRPKIKLCNSLEESIRQVQDLEREFLIKLGLVNDKDSKDSMTEGENLEEDEEEEEGGAETEEQSGNESEVNEPEEEEGSDNDDDEGEEEEEENTDYLTDSNKENETDEENTEVMIKGGGLKHVPCVEDEDFIQALDKMMLENLQQRSGESVKVHQLDVAIPLHLKSQLRKGPPLGGGEGEAESADTMPFVMLTRKGNKQQFKILNVPMSSQLAANHWNQQQAEQEERMRMKKLTLDINERQEQEDYQEMLQSLAQRPAPANTNRERRPRYQHPKGAPNADLIFKTGGRRR

SEQ ID NO: 808539 - protein, 86 aa, Homo sapiens
MPAERKKPASMEEKDSLPNNKEKDCSERRTVSSKERPKDDIKLTAKKEVSKAPEDKKKRLEDDKRKKGDAAETPTSHKNGLGCQTQ

SEQ ID NO: 808540 - protein, 1272 aa, Homo sapiens; identical to SEQ ID NO: 808533

SEQ ID NO: 808541 - protein, 1248 aa, Homo sapiens
GGGRGGESPSAGVGAGKPGANVDNRLEIVLGHIMPAERKKPASMEEKDSLPNNKEKDCSERRTVSSKERPKDDIKLTAKKEVSKAPEDKKKRLEDDKRKKEDKERKKKDEEKVKAEEESKKKEEEEKKKHQEEERKKQEEQAKRQQEEEAAAQMKEKEESIQLHQEAWERHHLRKELRSKNQNAPDSRPEENFFSRLDSSLKKNTAFVKKLKTITEQQRDSLSHDFNGLNLSKYIAEAVASIVEAKLKISDVNCAVHLCSLFHQRYADFAPSLLQVWKKHFEARKEEKTPNITKLRTDLRFIAELTIVGIFTDKEGLSLIYEQLKNIINADRESHTHVSVVISFCRHCGDDIAGLVPRKVKSAAEKFNLSFPPSEIISPEKQQPFQNLLKEYFTSLTKHLKRDHRELQNTERQNRRILHSKGELSEDRHKQYEEFAMSYQKLLANSQSLADLLDENMPDLPQDKPTPEEHGPGIDIFTPGKPGEYDLEGGIWEDEDARNFYENLIDLKAFVPAILFKDNEKSCQNKESNKDDTKEAKESKENKEVSSPDDLELELENLEINDDTLELEGGDEAEDLTKKLLDEQEQEDEEASTGSHLKLIVDAFLQQLPNCVNRDLIDKAAMDFCMNMNTKANRKKLVRALFIVPRQRLDLLPFYARLVATLHPCMSDVAEDLCSMLRGDFRFHVRKKDQINIETKNKTVRFIGELTKFKMFTKNDTLHCLKMLLSDFSHHHIEMACTLLETCGRFLFRSPESHLRTSVLLEQMMRKKQAMHLDARYVTMVENAYYYCNPPPAEKTVKKKRPPLQEYVRKLLYKDLSKVTTEKVLRQMRKLPWQDQEVKDYVICCMINIWNVKYNSIHCVANLLAGLVLYQEDVGIHVVDGVLEDIRLGMEVNQPKFNQRRISSAKFLGELYNYRMVESAVIFRTLYSFTSFGVNPDGSPSSLDPPEHLFRIRLVCTILDTCGQYFDRGSSKRKLDCFLVYFQRYVWWKKSLEVWTKDHPFPIDIDYMISDTLELLRPKIKLCNSLEESIRQVQDLEREFLIKLGLVNDKDSKDSMTEGENLEEDEEEEEGGAETEEQSGNESEVNEPEEEEGSDNDDDEGEEEEEENTDYLTDSNKENETDEENTEVMIKGGGLKHVPCVEDEDFIQALDKMMLENLQQRSGESVKVHQLDVAIPLHLKSQLRKGPPLGGGEGEAESADTMPFVMLTRKGNKQQFKILNVPMSSQLAANHWNQQQAEQEERMRMKQN

SEQ ID NO: 808542 - protein, 70 aa, Homo sapiens
RILGPAERGGRPLEFDPSGPRSAEDLGYPLTQAGRDPPRIWGPLAPNPELPDVASKSTVLLNLNFRQDRF

SEQ ID NO: 808543 - protein, 70 aa, Homo sapiens; identical to SEQ ID NO: 808542

SEQ ID NO: 808544 - protein, 111 aa, Homo sapiens
RPLARSPAPPPLPLPPGPCPAVYMPVRSPAAPNPSEPRLPEGEARRPANWTGGSLRPGAPDSDLRRLRHHQGGIRLWCFEEGVWCRERNPVPLHLFSPSGLQTQGTRSWLS

SEQ ID NO: 808545 - protein, 306 aa, Homo sapiens [sequence omitted]

SEQ ID NO: 808546 - protein, 316 aa, Homo sapiens
MSANPATGLLDPCVFRVSVRKELKGGKAYSKLGFADLNLAEFAGSGSTVRCCLLEGYDTKNTRQDNSILKVTIGMFLLSGDPCFKTPPSTAKSISIPGQDSSLQLTCKGGGTSSGGSSTNSLTGSRPPKARPTILSSGLPEEPDQNLSSPEEVFHSGHSRNSSYASQQSKISGYSTEHSRSSSLSDLTHRRNTSTSSSASGGLGMTVEGPEGSEREHRPPEKPPRPPRPLHLSDRSFRRKKDSVESHPTWVDDTRIDADAIVEKIVQSQDFTDGSNTEDSNLRLFVSRDGSATLSGIQLATRVSSGVYEPVVIESH

SEQ ID NO: 808547 - protein, 384 aa, Homo sapiens
MAFLMKKKKFKFQTTFTLEELTAVPFVNGVLFCKVRLLDGGDFVSLSSREEVQENCVRWRKRFTFVCKMSANPATGLLDPCVFRVSVRKELKGGKAYSKLGFADLNLAEFAGSGSTVRCCLLEGYDTKNTRQDNSILKVTIGMFLLSGDPCFKTPPSTAKSISIPGQDSSLQLTCKGGGTSSGGSSTNSLTGSRPPKARPTILSSGLPEEPDQNLSSPEEVFHSGHSRNSSYASQQSKISGYSTEHSRSSSLSDLTHRRNTSTSSSASGGLGMTVEGPEGSEREHRPPEKPPRPPRPLHLSDRSFRRKKDSVESHPTWVDDTRIDADAIVEKIVQSQDFTDGSNTEDSNLRLFVSRDGSATLSGIQLATRVSSGVYEPVVIESH

SEQ ID NO: 808548 - protein, 519 aa, Homo sapiens
MSSKSPSLAPPRLNLTFPSRSSRLGLHPQGLLSACPLRTYSHFPPHPSILCPEVPRACSDPELCPAAPHSVLYQGAFPGAPAHPAVPLPSQPLWGCPITFPSTHFPQAFPPPLPADPAAPDSTALFPREQCICVTDNNVLFMSGALAPVHAGTWHKGCFVQLRDVSSWLCHVGAADPGPLSLGPSYATVSRGCGAGPGALSVSLSNFCQVTLLGFRQPGAHTPSALPHAPLTSKLGFADLNLAEFAGSGSTVRCCLLEGYDTKNTRQDNSILKVTIGMFLLSGDPCFKTPPSTAKSISIPGQDSSLQLTCKGGGTSSGGSSTNSLTGSRPPKARPTILSSGLPEEPDQNLSSPEEVFHSGHSRNSSYASQQSKISGYSTEHSRSSSLSDLTHRRNTSTSSSASGGLGMTVEGPEGSEREHRPPEKPPRPPRPLHLSDRSFRRKKDSVESHPTWVDDTRIDADAIVEKIVQSQDFTDGSNTEDSNLRLFVSRDGSATLSGIQLATRVSSGVYEPVVIESH

SEQ ID NO: 808549 - protein, 112 aa, Homo sapiens [sequence omitted]

SEQ ID NO: 808550 - protein, 133 aa, Homo sapiens [sequence omitted]

SEQ ID NO: 808551 - protein, 384 aa, Homo sapiens; identical to SEQ ID NO: 808547

SEQ ID NO: 808552 - protein, 384 aa, Homo sapiens; identical to SEQ ID NO: 808547

SEQ ID NO: 808553 - protein, 335 aa, Homo sapiens
MAFLMKKKKFKFQTTFTLEELTAVPFVNGVLFCKVRLLDGGDFVSLSSREEVQENCVRWRKRFTFVCKMSANPATGLLDPCVFRVSVRKELKGGKAYSKLGFADLNLAEFAGSGSTVRCCLLEGYDTKNTRQDNSILKVTIGMFLLSGDPCFKTPPSTAKSISIPGQDSSLQLTCKGGGTSSGGSSTNSLTGSRPPKARPTILSSGLPEEPDQNLSSPEEVFHSGHSRNSSYASQQSKISGEWLPGPAPVASSFLGIPHCDAPLLSPLTGYSTEHSRSSSLSDLTHRRNTSTSSSASGGLGMTVEGPEGSEREHRPPEKPPRPPRPLHLSDRSFR

SEQ ID NO: 808554 - protein, 344 aa, Homo sapiens
AHLSPLAHREEVQENCVRWRKRFTFVCKMSANPATGLLDPCVFRVSVRKELKGGKAYSKLGFADLNLAEFAGSGSTVRCCLLEGYDTKNTRQDNSILKVTIGMFLLSGDPCFKTPPSTAKSISIPGQDSSLQLTCKGGGTSSGGSSTNSLTGSRPPKARPTILSSGLPEEPDQNLSSPEEVFHSGHSRNSSYASQQSKISGYSTEHSRSSSLSDLTHRRNTSTSSSASGGLGMTVEGPEGSEREHRPPEKPPRPPRPLHLSDRSFRRKKDSVESHPTWVDDTRIDADAIVEKIVQSQDFTDGSNTEDSNLRLFVSRDGSATLSGIQLATRVSSGVYEPVVIESH

SEQ ID NO: 808555 - protein, 548 aa, Homo sapiens
MSSKSPSLAPPRLNLTFPSRSSRLGLHPQGLLSACPLRTYSHFPPHPSILCPEVPRACSDPELCPAAPHSVLYQGAFPGAPAHPAVPLPSQPLWGCPITFPSTHFPQAFPPPLPADPAAPDSTALFPREQCICVTDNNVLFMSGALAPVHAGTWHKGCFVQLRDVSSWLCHVGAADPGPLSLGPSYATVSRGCGAGPGALSVSLSNFCQVTLLGFRQPGAHTPSALPHAPLTSKLGFADLNLAEFAGSGSTVRCCLLEGYDTKNTRQDNSILKVTIGMFLLSGDPCFKTPPSTAKSISIPGQDSSLQLTCKGGGTSSGGSSTNSLTGSRPPKARPTILSSGLPEEPDQNLSSPEEVFHSGHSRNSSYASQQSKISGEWLPGPAPVASSFLGIPHCDAPLRSPLTGYSTEHSRSSSLSDLTHRRNTSTSSSASGGLGMTVEGPEGSEREHRPPEKPPRPPRPLHLSDRSFRRKKDSVESHPTWVDDTRIDADAIVEKIVQSQDFTDGSNTEDSNLRLFVSRDGSATLSGIQLATRVSSGVYEPVVIESH

SEQ ID NO: 808556 - protein, 159 aa, Homo sapiens
LAGSFPTSPTAVKISGYSTEHSRSSSLSDLTHRRNTSTSSSASGGLGMTVEGPEGSEREHRPPEKPPRPPRPLHLSDRSFRRKKDSVESHPTWVDDTRIDADAIVEKIVQSQDFTDGSNTEDSNLRLFVSRDGSATLSGIQLATRVSSGVYEPVVIESH

SEQ ID NO: 808557 - protein, 306 aa, Homo sapiens [sequence omitted]

SEQ ID NO: 808558 - protein, 109 aa, Homo sapiens
LSTVYLGCFFLFYILGCGFVGKFCGSNFKSNFSGIFALKLTFSNSDAAAVDEFLTSVDAIAYLLQVFWTGSSVFFSVLCYCPGTSLCFFSLQGWGLKCMKFLVYSPAYF

SEQ ID NO: 808559 - protein, 436 aa, Homo sapiens
MASPTNGHHGGNCGKCSPGRAPLVGSGALADHDPRQAPRLRRRLTQSAPGRGSDRVGASQRLPRRFEFCAAGVRWFSELCPRLPRAGARERVRGFLTQTRVRSAQSPGGSLPSDDLGEMESSSSDYYNKDNEEESLLANVASLRHELKITEWSLQSLGEELSSVSPSENSDYAPNPSRSEKLILDVQPSHPGLLNYSPYENVCKISGSSTDFQKKPRDKMFSSSAPVDQEIKSLREKLNKLRQQNACLVTQNHSLMTKFESIHFELTQSRAKVSMLESAQQQAASVPILEEQIINLEAEVSAQDKVLREAENKLEQSQKMVIEKEQSLQESKEECIKLKVDLLEQTKQGKRAERQRNEALYNAEELSKAFQQYKKKVAEKLEKVQAEEEILERNLTNCEKENKRLQERCGLYKSELEILKEKLRQLKEENNNEKEK

SEQ ID NO: 808560 - protein, 369 aa, Homo sapiens
MASPTNGHHGGNCGKCSPGRAPLVGSGALADHDPRQAPRLRRRLTQSAPGRGSDRVGASQRLPRRFEFCAAGVRWFSELCPRLPRAGARERVRGFLTQTRVRSAQSPEMESSSSDYYNKDNEEESLLANVASLRHELKITDMEFAEFRGRVIQMFSSSAPVDQEIKSLREKLNKLRQQNACLVTQNHSLMTKFESIHFELTQSRAKVSMLESAQQQAASVPILEEQIINLEAEVSAQDKVLREAENKLEQSQKMVIEKEQSLQESKEECIKLKVDLLEQTKQGKRAERQRNEALYNAEELSKAFQQYKKKVAEKLEKVQAEEEILERNLTNCEKENKRLQERCGLYKSELEILKEKLRQLKEENNNEKE

SEQ ID NO: 808561 - protein, 2003 aa, Homo sapiens
MQPPSLLLLLLLLLLLCVSVVRPRGLLCGSFPEPCANGGTCLSLSLGQGTCQCAPGFLGETCQFPDPCQNAQLCQNGGSCQALLPAPLGLPSSPSPLTPSFLCTCLPGFTGERCQAKLEDPCPPSFCSKRGRCHIQASGRPQCSCMPGWTGEQCQLRDFCSANPCVNGGVCLATYPQIQCHCPPGFEGHACERDVNECFQDPGPCPKGTSCHNTLGSFQCLCPVGQEGPRCELRAGPCPPRGCSNGGTCQLMPEKDSTFHLCLCPPGFIGPDCEVNPDNCVSHQCQNGGTCQDGLDTYTCLCPETWTGWDCSEDVDECETQGPPHCRNGGTCQNSAGSFHCVCVSGWGGTSCEENLDDCIAATCAPGSTCIDRVGSFSCLCPPGRTGLLCHLEDMCLSQPCHGDAQCSTNPLTGSTLCLCQPGYSGPTCHQDLDECLMAQQGPSPCEHGGSCLNTPGSFNCLCPPGYTGSRCEADHNECLSQPCHPGSTCLDLLATFHCLCPPGLEGQLCEVETNECASAPCLNHADCHDLLNGFQCICLPGFSGTRCEEDIDECRSSPCANGGQCQDQPGAFHCKCLPGFEGPRCQTEVDECLSDPCPVGASCLDLPGAFFCLCPSGFTGQLCEVPLCAPNLCQPKQICKDQKDKANCLCPDGSPGCAPPEDNCTCHHGHCQRSSCVCDVGWTGPECEAELGGCISAPCAHGGTCYPQPSGYNCTCPTGYTGPTCSEEMTACHSGPCLNGGSCNPSPGGYYCTCPPSHTGPQCQTSTDYCVSAPCFNGGTCVNRPGTFSCLCAMGFQGPRCEGKLRPSCADSPCRNRATCQDSPQGPRCLCPTGYTGGSCQTLMDLCAQKPCPRNSHCLQTGPSFHCLCLQGWTGPLCNLPLSSCQKAALSQGIDVSSLCHNGGLCVDSGPSYFCHCPPGFQGSLCQDHVNPCESRPCQNGATCMAQPSGYLCQCAPGYDGQNCSKELDACQSQPCHNHGTCTPKPGGFHCACPPGFVGLRCEGDVDECLDQPCHPTGTAACHSLANAFYCQCLPGHTGQWCEVEIDPCHSQPCFHGGTCEATAGSPLGFICHCPKGFEGPTCSHRAPSCGFHHCHHGGLCLPSPKPGFPPRCACLSGYGGPDCLTPPAPKGCGPPSPCLYNGSCSETTGLGGPGFRCSCPHSSPGPRCQKPGAKGCEGRSGDGACDAGCSGPGGNWDGGDCSLGVPDPWKGCPSHSRCWLLFRDGQCHPQCDSEECLFDGYDCETPPACTPAYDQYCHDHFHNGHCEKGCNTAECGWDGGDCRPEDGDPEWGPSLALLVVLSPPALDQQLFALARVLSLTLRVGLWVRKDRDGRDMVYPYPGARAEEKLGGTRDPTYQERAAPQTQPLGKETDSLSAGFVVVMGVDLSRCGPDHPASRCPWDPGLLLRFLAAMAAVGALEPLLPGPLLAVHPHAGTAPPANQLPWPVLCSPVAGVILLALGALLVLQLIRRRRREHGALWLPPGFTRRPRTQSAPHRRRPPLGEDSIGLKALKPKAEVDEDGVVMCSGPEEGEEVGQAEETGPPSTCQLWSLSGGCGALPQAAMLTPPQESEMEAPDLDTRGPDGVTPLMSAVCCGEVQSGTFQGAWLGCPEPWEPLLDGGACPQAHTVGTGETPLHLAARFSRPTAARRLLEAGANPNQPDRAGRTPLHAAVAADAREVCQLLLRSRQTAVDARTEDGTTPLMLAARLAVEDLVEELIAAQADVGARDKWGKTALHWAAAVNNARAARSLLQAGADKDAQDNREQTPLFLAAREGAVEVAQLLLGLGAARELRDQAGLAPADVAHQRNHWDLLTLLEGAGPPEARHKATPGREAGPFPRARTVSVSVPPHGGGALPRCRTLSAGAGPRGGGACLQARTWSVDLAARGGGAYSHCRSLSGVGAGGGPTPRGRRFSAGMRGPRPNPAIMRGRYGVAAGRGGRVSTDDWPCDWVALGACGSASNIPIPPPCLTPSPERGSPQLDCGPPALQEMPINQGGEGKK

SEQ ID NO: 808562 - protein, 1762 aa, Homo sapiens
MQPPSLLLLLLLLLLLCVSVVRPRGLLCGSFPEPCANGGTCLSLSLGQGTCQCAPGFLGETCQFPDPCQNAQLCQNGGSCQALLPAPLGLPSSPSPLTPSFLCTCLPGFTGERCQAKLEDPCPPSFCSKRGRCHIQASGRPQCSCMPGWTGEQCQLRDFCSANPCVNGGVCLATYPQIQCHCPPGFEGHACERDVNECFQDPGPCPKGTSCHNTLGSFQCLCPVGQEGPRCELRAGPCPPRGCSNGGTCQLMPEKDSTFHLCLCPPGFIGPDCEVNPDNCVSHQCQNGGTCQDGLDTYTCLCPETWTGWDCSEDVDECETQGPPHCRNGGTCQNSAGSFHCVCVSGWGGTSCEENLDDCIAATCAPGSTCIDRVGSFSCLCPPGRTGLLCHLEDMCLSQPCHGDAQCSTNPLTGSTLCLCQPGYSGPTCHQDLDECLMAQQGPSPCEHGGSCLNTPGSFNCLCPPGYTGSRCEADHNECLSQPCHPGSTCLDLLATFHCLCPPGLEGQLCEVETNECASAPCLNHADCHDLLNGFQCICLPGFSGTRCEEDIDECRSSPCANGGQCQDQPGAFHCKCLPGFEGPRCQTEVDECLSDPCPVGASCLDLPGAFFCLCPSGFTGQLCEVPLCAPNLCQPKQICKDQKDKANCLCPDGSPGCAPPEDNCTCHHGHCQRSSCVCDVGWTGPECEAELGGCISAPCAHGGTCYPQPSGYNCTCPTGYTGPTCSEEMTACHSGPCLNGGSCNPSPGGYYCTCPPSHTGPQCQTSTDYCVSAPCFNGGTCVNRPGTFSCLCAMGFQGPRCEGKLRPSCAEQTLMDLCAQKPCPRNSHCLQTGPSFHCLCLQGWTGPLCNLPLSSCQKAALSQGIDVSSLCHNGGLCVDSGPSYFCHCPPGFQGSLCQDHVNPCESRPCQNGATCMAQPSGYLCQCAPGYDGQNCSKELDACQSQPCHNHGTCTPKPGGFHCACPPGFVGLRCEGDVDECLDQPCHPTGTAACHSLANAFYCQCLPGHTGQWCEVEIDPCHSQPCFHGGTCEATAGSPLGFICHCPKGFEGPTCSHRAPSCGFHHCHHGGLCLPSPKPGFPPRCACLSGYGGPDCLTPPAPKGCGPPSPCLYNGSCSETTGLGGPGFRCSCPHSSPGPRCQKPGAKGCEGRSGDGACDAGCSGPGGNWDGGDCSLGVPDPWKGCPSHSRCWLLFRDGQCHPQCDSEECLFDGYDCETPPACTPAYDQYCHDHFHNGHCEKGCNTAECGWDGGDCRPEDGDPEWGPSLALLVVLSPPALDQQLFALARVLSLTLRVGLWVRKDRDGRDMVYPYPGARAEEKLGGTRDPTYQERAAPQTQPLGKETDSLSAGFVVVMGVDLSRCGPDHPASRCPWDPGLLLRFLAAMAAVGALEPLLPGPLLAVHPHAGTAPPANQLPWPVLCSPVAGVILLALGALLVLQLIRRRRREHGALWLPPGFTRRPRTQSAPHRRRPPLGEDSIGLKALKPKAEVDEDGVVMCSGPEEGEEVGQAEETGPPSTCQLWSLSGGCGALPQAAMLTPPQESEMEAPDLDTRGPDGVTPLMSAVCCGEVQSGTFQGAWLGCPEPWEPLLDGGACPQAHTVGTGETPLHLAARFSRPTAARRLLEAGANPNQPDRAGRTPLHAAVAADAREVCQLLLRSRQTAVDARTEDGTTPLMLAARLAVEDLVEELIAAQADVGARDKWGKTALHWAAAVNNARAARSLLQAGADKDAQDNRVRWDRGLPTKQSGAREMESAVTRKA

SEQ ID NO: 808563 - protein, 1111 aa, Homo sapiens
MQPPSLLLLLLLLLLLCVSVVRPRGLLCGSFPEPCANGGTCLSLSLGQGTCQCAPGFLGETCQFPDPCQNAQLCQNGGSCQALLPAPLGLPSSPSPLTPSFLCTCLPGFTGERCQAKLEDPCPPSFCSKRGRCHIQASGRPQCSCMPGWTGEQCQLRDFCSANPCVNGGVCLATYPQIQCHCPPGFEGHACERDVNECFQDPGPCPKGTSCHNTLGSFQCLCPVGQEGPRCELRAGPCPPRGCSNGGTCQLMPEKDSTFHLCLCPPGFIGPDCEVNPDNCVSHQCQNGGTCQDGLDTYTCLCPETWTGWDCSEDVDECETQGPPHCRNGGTCQNSAGSFHCVCVSGWGGTSCEENLDDCIAATCAPGSTCIDRVGSFSCLCPPGRTGLLCHLEDMCLSQPCHGDAQCSTNPLTGSTLCLCQPGYSGPTCHQDLDECLMAQQGPSPCEHGGSCLNTPGSFNCLCPPGYTGSRCEADHNECLSQPCHPGSTCLDLLATFHCLCPPGLEGQLCEVETNECASAPCLNHADCHDLLNGFQCICLPGFSGTRCEEDIDECRSSPCANGGQCQDQPGAFHCKCLPGFEGPRCQTEVDECLSDPCPVGASCLDLPGAFFCLCPSGFTGQLCEVPLCAPNLCQPKQICKDQKDKANCLCPDGSPGCAPPEDNCTCHHGHCQRSSCVCDVGWTGPECEAELGGCISAPCAHGGTCYPQPSGYNCTCPTGYTGPTCSEEMTACHSGPCLNGGSCNPSPGGYYCTCPPSHTGPQCQTSTDYCVSAPCFNGGTCVNRPGTFSCLCAMGFQGPRCEGKLRPSCAEQTLMDLCAQKPCPRNSHCLQTGPSFHCLCLQGWTGPLCNLPLSSCQKAALSQGIDVSSLCHNGGLCVDSGPSYFCHCPPGFQGSLCQDHVNPCESRPCQNGATCMAQPSGYLCQCAPGYDGQNCSKELDACQSQPCHNHGTCTPKPGGFHCACPPGFVGLRCEGDVDECLDQPCHPTGTAACHSLANAFYCQCLPGHTGQWCEVEIDPCHSQPCFHGGTCEATAGSPLGFICHCPKASDHKSAFSVAPYADKARIPQLESQKGLWVSTDVEIIGKSHAKLTVGSVSQKQSKARQDQLIA

SEQ ID NO: 808564 - protein, 544 aa, Homo sapiens
MQPPSLLLLLLLLLLLCVSVVRPRGLLCGSFPEPCANGGTCLSLSLGQGTCQCAPGFLGETCQFPDPCQNAQLCQNGGSCQALLPAPLGLPSSPSPLTPSFLCTCLPGFTGERCQAKLEDPCPPSFCSKRGRCHIQASGRPQCSCMPGWTGEQCQLRDFCSANPCVNGGVCLATYPQIQCHCPPGFEGHACERDVNECFQDPGPCPKGTSCHNTLGSFQCLCPVGQEGPRCELRAGPCPPRGCSNGGTCQLMPEKDSTFHLCLCPPGFIGPDCEVNPDNCVSHQCQNGGTCQDGLDTYTCLCPETWTGWDCSEDVDECETQGPPHCRNGGTCQNSAGSFHCVCVSGWGGTSCEENLDDCIAATCAPGSTCIDRVGSFSCLCPPGRTGLLCHLEDMCLSQPCHGDAQCSTNPLTGSTLCLCQPGYSGPTCHQDLDECLMAQQGPSPCEHGGSCLNTPGSFNCLCPPGYTGSRCEADHNECLSQPCHPGSTCLDLLATFHCLCPPVLPSHRLCEIDGPVTSFKPHVEPTRDPRMSAHLHGVPGQIS

SEQ ID NO: 808565 - protein, 105 aa, Homo sapiens [sequence omitted]

SEQ ID NO: 808566 - protein, 1974 aa, Homo sapiens
MQPPSLLLLLLLLLLLCVSVVRPRGLLCGSFPEPCANGGTCLSLSLGQGTCQCAPGFLGETCQFPDPCQNAQLCQNGGSCQALLPAPLGLPSSPSPLTPSFLCTCLPGFTGERCQAKLEDPCPPSFCSKRGRCHIQASGRPQCSCMPGWTGEQCQLRDFCSANPCVNGGVCLATYPQIQCHCPPGFEGHACERDVNECFQDPGPCPKGTSCHNTLGSFQCLCPVGQEGPRCELRAGPCPPRGCSNGGTCQLMPEKDSTFHLCLCPPGFIGPDCEVNPDNCVSHQCQNGGTCQDGLDTYTCLCPETWTGWDCSEDVDECETQGPPHCRNGGTCQNSAGSFHCVCVSGWGGTSCEENLDDCIAATCAPGSTCIDRVGSFSCLCPPGRTGLLCHLEDMCLSQPCHGDAQCSTNPLTGSTLCLCQPGYSGPTCHQDLDECLMAQQGPSPCEHGGSCLNTPGSFNCLCPPGYTGSRCEADHNECLSQPCHPGSTCLDLLATFHCLCPPGLEGQLCEVETNECASAPCLNHADCHDLLNGFQCICLPGFSGTRCEEDIDECRSSPCANGGQCQDQPGAFHCKCLPGFEGPRCQTEVDECLSDPCPVGASCLDLPGAFFCLCPSGFTGQLCEVPLCAPNLCQPKQICKDQKDKANCLCPDGSPGCAPPEDNCTCHHGHCQRSSCVCDVGWTGPECEAELGGCISAPCAHGGTCYPQPSGYNCTCPTGYTGPTCSEEMTACHSGPCLNGGSCNPSPGGYYCTCPPSHTGPQCQTSTDYCVSAPCFNGGTCVNRPGTFSCLCAMGFQGPRCEGKLRPSCAEQTLMDLCAQKPCPRNSHCLQTGPSFHCLCLQGWTGPLCNLPLSSCQKAALSQGIDVSSLCHNGGLCVDSGPSYFCHCPPGFQGSLCQDHVNPCESRPCQNGATCMAQPSGYLCQCAPGYDGQNCSKELDACQSQPCHNHGTCTPKPGGFHCACPPGFVGLRCEGDVDECLDQPCHPTGTAACHSLANAFYCQCLPGHTGQWCEVEIDPCHSQPCFHGGTCEATAGSPLGFICHCPKGFEGPTCSHRAPSCGFHHCHHGGLCLPSPKPGFPPRCACLSGYGGPDCLTPPAPKGCGPPSPCLYNGSCSETTGLGGPGFRCSCPHSSPGPRCQKPGAKGCEGRSGDGACDAGCSGPGGNWDGGDCSLGVPDPWKGCPSHSRCWLLFRDGQCHPQCDSEECLFDGYDCETPPACTPAYDQYCHDHFHNGHCEKGCNTAECGWDGGDCRPEDGDPEWGPSLALLVVLSPPALDQQLFALARVLSLTLRVGLWVRKDRDGRDMVYPYPGARAEEKLGGTRDPTYQERAAPQTQPLGKETDSLSAGFVVVMGVDLSRCGPDHPASRCPWDPGLLLRFLAAMAAVGALEPLLPGPLLAVHPHAGTAPPANQLPWPVLCSPVAGVILLALGALLVLQLIRRRRREHGALWLPPGFTRRPRTQSAPHRRRPPLGEDSIGLKALKPKAEVDEDGVVMCSGPEEGEEVGQAEETGPPSTCQLWSLSGGCGALPQAAMLTPPQESEMEAPDLDTRGPDGVTPLMSAVCCGEVQSGTFQGAWLGCPEPWEPLLDGGACPQAHTVGTGETPLHLAARFSRPTAARRLLEAGANPNQPDRAGRTPLHAAVAADAREVCQLLLRSRQTAVDARTEDGTTPLMLAARLAVEDLVEELIAAQADVGARDKWGKTALHWAAAVNNARAARSLLQAGADKDAQDNREQTPLFLAAREGAVEVAQLLLGLGAARELRDQAGLAPADVAHQRNHWDLLTLLEGAGPPEARHKATPGREAGPFPRARTVSVSVPPHGGGALPRCRTLSAGAGPRGGGACLQARTWSVDLAARGGGAYSHCRSLSGVGAGGGPTPRGRRFSAGMRGPRPNPAIMRGRYGVAAGRGGRVSTDDWPCDWVALGACGSASNIPIPPPCLTPSPERGSPQLDCGPPALQEMPINQGGEGKK

SEQ ID NO: 808567 - protein, 317 aa, Homo sapiens
VVSWATLPAFEGPAGPNSPSPKARTRGKPEPRRLAPNWGNNLPRRPLGKTALHWAAAVNNARAARSLLQAGADKDAQDNREQTPLFLAAREGAVEVAQLLLGLGAARELRDQAGLAPADVAHQRNHWDLLTLLEGAGPPEARHKATPGREAGPFPRARTVSVSVPPHGGGALPRCRTLSAGAGPRGGGACLQARTWSVDLAARGGGAYSHCRSLSGVGAGGGPTPRGRRFSAGMRGPRPNPAIMRGRYGVAAGRGGRVSTDDWPCDWVALGACGSASNIPIPPPCLTPSPERGSPQLDCGPPALQEMPINQGGEGKK

SEQ ID NO: 808568 - protein, 103 aa, Homo sapiens
PHSLWVVAAGLKTADRTSRPAACGHPPAQALSWKTQHLEFRLALREGRAFATSWGAPSVTSQGRAFCHVTRAVQCLELGSLLRVEPGNRDLPASSCVLLAGKG

SEQ ID NO: 808569 - protein, 918 aa, Homo sapiens
MASLSRALRVAAAHPRQSPTRGMGPCNLSSAAGPTAEKSVPYQRTLKEGQGTSVVAQGPSRPLPSTANVVVIGGGSLGCQTLYHLAKLGMSGAVLLERERLTSGTTWHTAGLLWQLRPSDVEVELLAHTRRVVSRELEEETGLHTGWIQNGGLFIASNRQRLDEYKRLMSLGKAYGVESHVLSPAETKTLYPLMNVDDLYGTLYVPHDGTMDPAGTCTTLARAASARGAQVIENCPVTGIRVWTDDFGVRRVAGVETQHGSIQTPCVVNCAGVWASAVGRMAGVKVPLVAMHHAYVVTERIEGIQNMPNVRDHDASVYLRLQGDALSVGGYEANPIFWEEVSDKFAFGLFDLDWEVFTQHIEGAINRVPVLEKTGIKSTVCGPESFTPDHKPLMGEAPELRGFFLGCGFNSAGMMLGGGCGQELAHWIIHGRPEKDMHGYDIRRFHHSLTDHPRWIRERSHESYAKNYSVVFPHDEPLAGRNMRRDPLHEELLGQGCVFQERHGWERPGWFHPRGPAPVLEYDYYGAYGSRAHEDYAYRRLLADEYTFAFPPHHDTIKKECLACRGAAAVFDMSYFGKFYLVGLDARKAADWLFSADVSRPPGSTVYTCMLNHHGGTESDLTVSRLAPSHQASPLAPAFEGDGYYLAVGGAVAQHNWSHITTVLQDQKSQCQLIDSSEDLGMISIQGPASRAILQEVLDADLSNEAFPFSTHKLLRAAGHLVRAMRLSFVGELGWELHIPKASCVPVYRAVMAAGAKHGLINAGYRAIDSLSIEKGYRHWHADLRPDDSPLEAGLAFTCKLKSPVPFLGREALEQQRAAGLRRRLVCFTMEDKVPMFGLEAIWRNGQVVGHVRRADFGFAIDKTIAYGYIHDPSGGPVSLDFVKSGDYALERMGVTYGAQAHLKSPFDPNNKRVKGIY

SEQ ID NO: 808570 - protein, 431 aa, Homo sapiens [sequence omitted]

SEQ ID NO: 808571 - protein, 690 aa, Homo sapiens
MASLSRALRVAAAHPRQSPTRGMGPCNLSSAAGPTAEKSVPYQRTLKEGQGTSVVAQGPSRPLPSTANVVVIGGGSLGCQTLYHLAKLGMSGAVLLERERLTSGTTWHTAGLLWQLRPSDVEVELLAHTRRVVSRELEEETGLHTGWIQNGGLFIASNRQRLDEYKRLMSLGKAYGVESHVLSPAETKTLYPLMNVDDLYGTLYVPHDGTMDPAGTCTTLARAASARGAQVIENCPVTGIRVWTDDFGVRRVAGVETQHGSIQTPCVVNCAGVWASAVGRMAGVKVPLVAMHHAYVVTERIEGIQNMPNVRDHDASVYLRLQGDALSVGGYEANPIFWEEVSDKFAFGLFDLDWEVFTQHIEGAINRVPVLEKTGIKSTVCGPESFTPDHKPLMGEAPELRGFFLGCGFNSAGMMLGGGCGQELAHWIIHGRPEKDMHGYDIRRFHHSLTDHPRWIRERSHESYAKNYSVVFPHDEPLAGRNMRRDPLHEELLGQGCVFQERHGWERPGWFHPRGPAPVLEYDYYGAYGSRAHEDYAYRRLLADEYTFAFPPHHDTIKKECLACRGAAAVFDMSYFGKFYLVGLDARKAADWLFSADVSRPPGSTVYTCMLNHHGGTESDLTVSRLAPSHQASPLAPAFEGDGYYLAVGGAVAQHNWSHITTVLQDQKSQCQLIDSSEDLGMISIQGPAR

SEQ ID NO: 808572 - protein, 372 aa, Homo sapiens
MASLSRALRVAAAHPRQSPTRGMGPCNLSSAAGPTAEKSVPYQRTLKEGQGTSVVAQGPSRPLPSTANVVVIGGGSLGCQTLYHLAKLGMSGAVLLERERLTSGTTWHTAGLLWQLRPSDVEVELLAHTRRVVSRELEEETGLHTGWIQNGGLFIASNRQRLDEYKRLMSLGKAYGVESHVLSPAETKTLYPLMNVDDLYGTLYVPHDGTMDPAGTCTTLARAASARGAQVIENCPVTGIRVWTDDFGVRRVAGVETQHGSIQTPCVVNCAGVWASAVGRMAGVKVPLVAMHHAYVVTERIEGIQNMPNVRDHDASVYLRLQGDALSVGGYEANPIFWEEAVKYRPRAAGGLCLKTSTEKVCAVWSDDLRRA

SEQ ID NO: 808573 - protein, 170 aa, Homo sapiens
QQSPLLVLMFSIHPFYSLEARALLSRPGAGLALGTSVVLVGQPYLPGATVGCASCSPPFSSRPLWTRPHPAVSGAPAFSTASSSKVPMFGLEAIWRNGQVVGHVRRADFGFAIDKTIAYGYIHDPSGGPVSLDFVKSGDYALERMGVTYGAQAHLKSPFDPNNKRVKGIY

SEQ ID NO: 808574 - protein, 396 aa, Homo sapiens
MASLSRALRVAAAHPRQSPTRGMGPCNLSSAAGPTAEKSVPYQRTLKEGQGTSVVAQGPSRPLPSTANVVVIGGGSLGCQTLYHLAKLGMSGAVLLERERLTSGTTWHTAGLLWQLRPSDVEVELLAHTRRVVSRELEEETGLHTGWIQNGGLFIASNRQRLDEYKRLMSLGKAYGVESHVLSPAETKTLYPLMNVDDLYGTLYVPHDGTMDPAGTCTTLARAASARGAQVIENCPVTGIRVWTDDFGVRRVAGVETQHGSIQTPCVVNCAGVWASAVGRMAGVKVPLVAMHHAYVVTERIEGIQSFTLLPTLEYSGTVSAHCNLRLPGSSNSRASASHVAGIKCARHHTRLIFFCILVETEFHHVAKAGLELLSSGNPPISDFQSARITGVSHHA

SEQ ID NO: 808575 - protein, 918 aa, Homo sapiens; identical to SEQ ID NO: 808569

SEQ ID NO: 808576 - protein, 560 aa, Homo sapiens
GEAPELPHQGLWSGVKDSGPQTVDLIPVFSSRGPLMGEAPELRGFFLGCGFNSAGMMLGGGCGQELAHWIIHGRPEKDMHGYDIRRFHHSLTDHPRWIRERSHESYAKNYSVVFPHDEPLAGRNMRRDPLHEELLGQGCVFQERHGWERPGWFHPRGPAPVLEYDYYGAYGSRAHEDYAYRRLLADEYTFAFPPHHDTIKKECLACRGAAAVFDMSYFGKFYLVGLDARKAADWLFSADVSRPPGSTVYTCMLNHHGGTESDLTVSRLAPSHQASPLAPAFEGDGYYLAVGGAVAQHNWSHITTVLQDQKSQCQLIDSSEDLGMISIQGPASRAILQEVLDADLSNEAFPFSTHKLLRAAGHLVRAMRLSFVGELGWELHIPKASCVPVYRAVMAAGAKHGLINAGYRAIDSLSIEKGYRHWHADLRPDDSPLEAGLAFTCKLKSPVPFLGREALEQQRAAGLRRRLVCFTMEDKVPMFGLEAIWRNGQVVGHVRRADFGFAIDKTIAYGYIHDPSGGPVSLDFVKSGDYALERMGVTYGAQAHLKSPFDPNNKRVKGIY

SEQ ID NO: 808577 - protein, 283 aa, Homo sapiens
GLPWPHTVSPASKEQTQNYRSHIISGPRRWIGQPLPRHSWDFPPETLYLLGPWSDPQTRPSFGITDLGRPDGTGGHPCPHSPAGGWKGGFLDEEGDTGVLTHHQAKLQRPFTWTLPRAFWGSEPIPPRGRSLPSHVGAPQDSPALEPRQQTAMCGERGRSPMSLWGMRASAGPSVHNAHSLRATGVGWLWGRKLSSPKGGANGESGARSMLSHKGDSGAGDRGPGLPWVLGSPSLTGHPQSSDPSPVCGRRFHHSLTDHPRWIRERSHESYAKNYSVVFPHDE

SEQ ID NO: 808578 - protein, 564 aa, Homo sapiens
RSSWGHPREGRVCRERELLSSTGRAGSWLVLTPWPQRQVLPRAFGGDMELEELGIREECGVFGCIASGEWPTQLDVPHVITLGLVGLQHRGQESAGIVTSDGSSVPTFKSHKGMGLVNHVFTEDNLKKLYVSNLGIGHTRYATTGKCELENCQPFVVETLHGKIAVAHNGELVNAARLRKKLLRHGIGLSTSSDSEMITQLLAYTPPQEQDDTPDWVARIKNLMKEAPTAYSLLIMHRDVIYAVRDPYGNRPLCIGRLIPVSDINDKEKKTSETEGWVVSSESCSFLSIGARYYREVLPGEIVEISRHNVQTLDIISRSEGNPVAFCIFEYVYFARPDSMFEDQMVYTVRYRCGQQLAIEAPVDADLVSTVPESATPAALAYAGKCGLPYVEVLCKNRYVGRTFIQPNMRLRQLGVAKKFGVLSDNFKGKRIVLVDDSIVRGNTISPIIKLLKESGAKEVHIRVASPPIKYPCFMGINIPTKEELIANKPEFDHLAEYLGANSVVYLSVEGLVSSVQEGIKFKKQKEKKHDIMIQENGNGLECFEKSGHCTACLTGKYPVELEW

SEQ ID NO: 808579 - protein, 564 aa, Homo sapiens; identical to SEQ ID NO: 808578

SEQ ID NO: 808580 - protein, 368 aa, Homo sapiens
MITQLLAYTPPQEQDDTPDWVARIKNLMKEAPTAYSLLIMHRDVIYAVRDPYGNRPLCIGRLIPVSDINDKEKKTSETEGWVVSSESCSFLSIGARYYREVLPGEIVEISRHNVQTLDIISRSEGNPVAFCIFEYVYFARPDSMFEDQMVYTVRYRCGQQLAIEAPVDADLVSTVPESATPAALAYAGKCGLPYVEVLCKNRYVGRTFIQPNMRLRQLGVAKKFGVLSDNFKGKRIVLVDDSIVRGNTISPIIKLLKESGAKEVHIRVASPPIKYPCFMGINIPTKEELIANKPEFDHLAEYLGANSVVYLSVEGLVSSVQEGIKFKKQKEKKHDIMIQENGNGLECFEKSGHCTACLTGKYPVELEW

SEQ ID NO: 808581 - protein, 451 aa, Homo sapiens [sequence omitted]

SEQ ID NO: 808582 - protein, 106 aa, Homo sapiens
RKAKGEIYPSLNYSVCNYSLLTRFFLSKGILITFLFFPLSLGANSVVYLSVEGLVSSVQEGIKFKKQKEKKHDIMIQENGNGLECFEKSGHCTACLTGKYPVELEW

SEQ ID NO: 808583 - protein, 564 aa, Homo sapiens; identical to SEQ ID NO: 808578

SEQ ID NO: 808584 - protein, 469 aa, Homo sapiens
RSSWGHPREGRVCRERELLSSTGRAGSWLVLTPWPQRQVLPRAFGGDMELEELGIREECGVFGCIASGEWPTQLDVPHVITLGLVGLQHRGQESAGIVTSDGSSVPTFKSHKGMGLVNHVFTEDNLKKLYVSNLGIGHTRYATTGKCELENCQPFVVETLHGKIAVAHNGELVNAARLRKKLLRHGIGLSTSSDSEMITQLLAYTPPQEQDDTPDWVARIKNLMKEAPTAYSLLIMHRDVIYAVRDPYGNRPLCIGRLIPVSDINDKEKKTSETEGWVVSSESCSFLSIGARYYREVLPGEIVEISRHNVQTLDIISRSEGNPVAFCIFEYVYFARPDSMFEDQMVYTVRYRCGQQLAIEAPVDADLVSTVPESATPAALAYAGKCGLPYVEVLCKNRYVGRTFIQPNMRLRQLGVAKKFGVLSDNFKGKRIVLVDDSIVRGNTISPIIKLLKESGAKEVSNIKTYPKA

SEQ ID NO: 808585 - protein, 184 aa, Homo sapiens
RSSWGHPREGRVCRERELLSSTGRAGSWLVLTPWPQRQVLPRAFGGDMELEELGIREECGVFGCIASGEWPTQLDVPHVITLGLVGLQHRGQESAGIVTSDGSSVPTFKSHKGMGLVNHVFTEDNLKKLYVSNLGIGHTRYATTGKCELENCQPFVVETLHGKIPRSKLSIRPNASVRFLKQEH

SEQ ID NO: 808586 - protein, 756 aa, Homo sapiens
MASAPPASPPGSEPPGPDPEPGGPDGPGAAQLAPGPAELRLGAPVGGPDPQSPGLDEPAPGAAADGGARWSAGPAPGLEGGPRDPGPSAPPPRSGPRGQLASPDAPGPGPRSEAPLPELDPLFSWTEEPEECGPASCPESAPFRLQGSSSSHRARGEVDVFSPFPAPTAGELALEQGPGSPPQPSDLSQTHPLPSEPVGSQEDGPRLRAVFDALDGDGDGFVRIEDFIQFATVYGAEQVKDLTKYLDPSGLGVISFEDFYQGITAIRNGDPDGQCYGGVASAQDEEPLACPDEFDDFVTYEANEVTDSAYMGSESTYSECETFTDEDTSTLVHPELQPEGDADSAGGSAVPSECLDAMEEPDHGALLLLPGRPHPHGQSVITVIGGEEHFEDYGEGSEAELSPETLCNGQLGCSDPAFLTPSPTKRLSSKKVARYLHQSGALTMEALEDPSPELMEGPEEDIADKVVFLERRVLELEKDTAATGEQHSRLRQENLQLVHRANALEEQLKEQELRACEMVLEETRRQKELLCKMEREKSIEIENLQTRLQQLDEENSELRSCTPCLKANIERLEEEKQKLLDEIESLTLRLSEEQENKRRMGDRLSHERHQFQRDKEATQELIEDLRKQLEHLQLLKLEAEQRRGRSSSMGLQEYHSRARESELEQEVRRLKQDNRNLKEQNEELNGQIITLSIQGAKSLFSTAFSESLAAEISSVSRDELMEAIQKQEEINFRLQDYIDRIIVAIMETNPSILEVK

SEQ ID NO: 808587 - protein, 801 aa, Homo sapiens
MASAPPASPPGSEPPGPDPEPGGPDGPGAAQLAPGPAELRLGAPVGGPDPQSPGLDEPAPGAAADGGARWSAGPAPGLEGGPRDPGPSAPPPRSGPRGQLASPDAPGPGPRSEAPLPELDPLFSWTEEPEECGPASCPESAPFRLQGSSSSHRARGEVDVFSPFPAPTAGELALEQGPGSPPQPSDLSQTHPLPSEPVGSQEDGPRLRAVFDALDGDGDGFVRIEDFIQFATVYGAEQVKDLTKYLDPSGLGVISFEDFYQGITAIRNGDPDGQCYGGVASAQDEEPLACPDEFDDFVTYEANEVTDSAYMGSESTYSECETFTDEDTSTLVHPELQPEGDADSAGGSAVPSECLDAMEEPDHGALLLLPGRPHPHGQSVITVIGGEEHFEDYGEGSEAELSPETLCNGQLGCSDPAFLTPSTDPLAAKLHSILTDEAFEFYCSQCHKQINRLEDLSARLSDLEMNSPTKRLSSKKVARYLHQSGALTMEALEDPSPELMEGPEEDIADKVVFLERRVLELEKDTAATGEQHSRLRQENLQLVHRANALEEQLKEQELRACEMVLEETRRQKELLCKMEREKSIEIENLQTRLQQLDEENSELRSCTPCLKANIERLEEEKQKLLDEIESLTLRLSEEQENKRRMGDRLSHERHQFQRDKEATQELIEDLRKQLEHLQLLKLEAEQRRGRSSSMGLQEYHSRARESELEQEVRRLKQDNRNLKEQNEELNGQIITLSIQGAKSLFSTAFSESLAAEISSVSRDELMEAIQKQEEINFRLQDYIDRIIVAIMETNPSILEVK

SEQ ID NO: 808588 - protein, 289 aa, Homo sapiens
AGSLEVLRQLLGMGGATAHPAWRQLSSSLCLSRANALEEQLKEQELRACEMVLEETRRQKELLCKMEREKSIEIENLQTRLQQLDEENSELRSCTPCLKANIERLEEEKQKLLDEIESLTLRLSEEQENKRRMGDRLSHERHQFQRDKEATQELIEDLRKQLEHLQLLKLEAEQRRGRSSSMGLQEYHSRARESELEQEVRRLKQDNRNLKEQNEELNGQIITLSIQGAKSLFSTAFSESLAAEISSVSRDELMEAIQKQEEINFRLQDYIDRIIVAIMETNPSILEVK

SEQ ID NO: 808589 - protein, 801 aa, Homo sapiens; identical to SEQ ID NO: 808587

SEQ ID NO: 808590 - protein, 479 aa, Homo sapiens
MASAPPASPPGSEPPGPDPEPGGPDGPGAAQLAPGPAELRLGAPVGGPDPQSPGLDEPAPGAAADGGARWSAGPAPGLEGGPRDPGPSAPPPRSGPRGQLASPDAPGPGPRSEAPLPELDPLFSWTEEPEECGPASCPESAPFRLQGSSSSHRARGEVDVFSPFPAPTAGELALEQGPGSPPQPSDLSQTHPLPSEPVGSQEDGPRLRAVFDALDGDGDGFVRIEDFIQFATVYGAEQVKDLTKYLDPSGLGVISFEDFYQGITAIRNGDPDGQCYGGVASAQDEEPLACPDEFDDFVTYEANEVTDSAYMGSESTYSECETFTDEDTSTLVHPELQPEGDADSAGGSAVPSECLDAMEEPDHGALLLLPGRPHPHGQSVITVIGGEEHFEDYGEGSEAELSPETLCNGQLGCSDPAFLTPSTDPLAAKLHSILTDEAFEFYCSQCHKQINRLEDLSARLSDLEMNSPTKRLSSKKVAR

SEQ ID NO: 808591 - protein, 481 aa, Homo sapiens
MASAPPASPPGSEPPGPDPEPGGPDGPGAAQLAPGPAELRLGAPVGGPDPQSPGLDEPAPGAAADGGARWSAGPAPGLEGGPRDPGPSAPPPRSGPRGQLASPDAPGPGPRSEAPLPELDPLFSWTEEPEECGPASCPESAPFRLQGSSSSHRARGEVDVFSPFPAPTAGELALEQGPGSPPQPSDLSQTHPLPSEPVGSQEDGPRLRAVFDALDGDGDGFVRIEDFIQFATVYGAEQVKDLTKYLDPSGLGVISFEDFYQGITAIRNGDPDGQCYGGVASAQDEEPLACPDEFDDFVTYEANEVTDSAYMGSESTYSECETFTDEDTSTLVHPELQPEGDADSAGGSAVPSECLDAMEEPDHGALLLLPGRPHPHGQSVITVIGGEEHFEDYGEGSEAELSPETLCNGQLGCSDPAFLTPSTDPLAAKLHSILTDEAFEFYCSQCHKQINRLEDLSARLSDLEMNSPTKRLSSKKVASFV

SEQ ID NO: 808592 - protein, 436 aa, Homo sapiens
MASAPPASPPGSEPPGPDPEPGGPDGPGAAQLAPGPAELRLGAPVGGPDPQSPGLDEPAPGAAADGGARWSAGPAPGLEGGPRDPGPSAPPPRSGPRGQLASPDAPGPGPRSEAPLPELDPLFSWTEEPEECGPASCPESAPFRLQGSSSSHRARGEVDVFSPFPAPTAGELALEQGPGSPPQPSDLSQTHPLPSEPVGSQEDGPRLRAVFDALDGDGDGFVRIEDFIQFATVYGAEQVKDLTKYLDPSGLGVISFEDFYQGITAIRNGDPDGQCYGGVASAQDEEPLACPDEFDDFVTYEANEVTDSAYMGSESTYSECETFTDEDTSTLVHPELQPEGDADSAGGSAVPSECLDAMEEPDHGALLLLPGRPHPHGQSVITVIGGEEHFEDYGEGSEAELSPETLCNGQLGCSDPAFLTPSPTKRLSSKKVASFV

SEQ ID NO: 808593 - protein, 481 aa, Homo sapiens; identical to SEQ ID NO: 808591

SEQ ID NO: 808594 - protein, 596 aa, Homo sapiens
MASAPPASPPGSEPPGPDPEPGGPDGPGAAQLAPGPAELRLGAPVGGPDPQSPGLDEPAPGAAADGGARWSAGPAPGLEGGPRDPGPSAPPPRSGPRGQLASPDAPGPGPRSEAPLPELDPLFSWTEEPEECGPASCPESAPFRLQGSSSSHRARGEVDVFSPFPAPTAGELALEQGPGSPPQPSDLSQTHPLPSEPVGSQEDGPRLRAVFDALDGDGDGFVRIEDFIQFATVYGAEQVKDLTKYLDPSGLGVISFEDFYQGITAIRNGDPDGQCYGGVASAQDEEPLACPDEFDDFVTYEANEVTDSAYMGSESTYSECETFTDEDTSTLVHPELQPEGDADSAGGSAVPSECLDAMEEPDHGALLLLPGRPHPHGQSVITVIGGEEHFEDYGEGSEAELSPETLCNGQLGCSDPAFLTPSTDPLAAKLHSILTDEAFEFYCSQCHKQINRLEDLSARLSDLEMNSPTKRLSSKKVARYLHQSGALTMEALEDPSPELMEGPEEDIADKVVFLERRVLELEKDTAATGEQHSRLRQENLQLVHSRDALQEQMNRTQRAGGRPAKNAIQETDERRAMRKRSVTVQRLETGEQALRE

SEQ ID NO: 808595 - protein, 92 aa, Homo sapiens
KRGSQDSRVACSTPYGKHLPHPQLGGALAFSQKTIISVLLCRPHPHGQSVITVIGGEEHFEDYGEGSEAELSPETLCNGQLGCSDPAFLTPR

SEQ ID NO: 808596 - protein, 72 aa, Homo sapiens
PRLRAVFDALDGDGDGFVRIEDFIQFATVYGAEQVRSGPGRGVGTGQVALAGGVDVGPVDAAPGVGKGTVKT

SEQ ID NO: 808597 - protein, 756 aa, Homo sapiens; identical to SEQ ID NO: 808586

SEQ ID NO: 808598 - protein, 130 aa, Homo sapiens
MARGLPTIASLARLCQKLNRLKPLEDSTMETSLRRCLSTLDLTLLGVGGMVGSGLYVLTGAVAKEVAGPAVLLSFGVAAVASLLAALCYAEFGARVPRTGSAYLFTYVSTAQGIHNNNCLASHVACWRKK

SEQ ID NO: 808599 - protein, 635 aa, Homo sapiens
MARGLPTIASLARLCQKLNRLKPLEDSTMETSLRRCLSTLDLTLLGVGGMVGSGLYVLTGAVAKEVAGPAVLLSFGVAAVASLLAALCYAEFGARVPRTGSAYLFTYVSMGELWAFLIGWNVLLEYIIGGAAVARAWSGYLDSMFSHSIRNFTETHVGSWQVPLLGHYPDFLAAGIILLASAFVSCGARVSSWLNHTFSAISLLVILFIVILGFILAQPHNWSADEGGFAPFGFSGVMAGTASCFYAFVGFDVIAASSEEAQNPRRSVPLAIAISLAIAAGAYILVSTVLTLMVPWHSLDPDSALADAFYQRGYRWAGFIVAAGSICAMNTVLLSLLFSLPRIVYAMAADGLFFQVFAHVHPRTQVPVAGTLAFGLLTAFLALLLDLESLVQFLSLGTLLAYTFVATSIIVLRFQKSSPPSSPGPASPGPLTKQQSSFSDHLQLVGTVHASVPEPGELKPALRPYLGFLDGYSPGAVVTWALGVMLASAITIGCVLVFGNSTLHLPHWGYILLLLLTSVMFLLSLLVLGAHQQQYREDLFQIPMVPLIPALSIVLNICLMLKLSYLTWVRFSIWLLMGLAVYFGYGIRHSKENQRELPGLNSTHYVVFPRGSLEETVQAMQPPSQAPAQDPGHME

SEQ ID NO: 808600 - protein, 130 aa, Homo sapiens; identical to SEQ ID NO: 808598

SEQ ID NO: 808601 - protein, 578 aa, Homo sapiens
MARGLPTIASLARLCQKLNRLKPLEDSTMETSLRRCLSTLDLTLLGVGGMVGSGLYVLTGAVAKEVAGPAVLLSFGVAAVASLLDSMFSHSIRNFTETHVGSWQVPLLGHYPDFLAAGIILLASAFVSCGARVSSWLNHTFSAISLLVILFIVILGFILAQPHNWSADEGGFAPFGFSGVMAGTASCFYAFVGFDVIAASSEEAQNPRRSVPLAIAISLAIAAGAYILVSTVLTLMVPWHSLDPDSALADAFYQRGYRWAGFIVAAGSICAMNTVLLSLLFSLPRIVYAMAADGLFFQVFAHVHPRTQVPVAGTLAFGLLTAFLALLLDLESLVQFLSLGTLLAYTFVATSIIVLRFQKSSPPSSPGPASPGPLTKQQSSFSDHLQLVGTVHASVPEPGELKPALRPYLGFLDGYSPGAVVTWALGVMLASAITIGCVLVFGNSTLHLPHWGYILLLLLTSVMFLLSLLVLGAHQQQYREDLFQIPMVPLIPALSIVLNICLMLKLSYLTWVRFSIWLLMGLAVYFGYGIRHSKENQRELPGLNSTHYVVFPRGSLEETVQAMQPPSQAPAQDPGHME

SEQ ID NO: 808602 - protein, 615 aa, Homo sapiens
  misc_feature (38)..(38): Xaa can be any naturally occurring amino acid
MTSFIGVLRVSNSEESSAIFLSDASIKTYAVATQEGMXGLDHVLVSYLIHAVCDQLVSPPVRVLAALCYAEFGARVPRTGSAYLFTYVSMGELWAFLIGWNVLLEYIIGGAAVARAWSGYLDSMFSHSIRNFTETHVGSWQVPLLGHYPDFLAAGIILLASAFVSCGARVSSWLNHTFSAISLLVILFIVILGFILAQPHNWSADEGGFAPFGFSGVMAGTASCFYAFVGFDVIAASSEEAQNPRRSVPLAIAISLAIAAGAYILVSTVLTLMVPWHSLDPDSALADAFYQRGYRWAGFIVAAGSICAMNTVLLSLLFSLPRIVYAMAADGLFFQVFAHVHPRTQVPVAGTLAFGLLTAFLALLLDLESLVQFLSLGTLLAYTFVATSIIVLRFQKSSPPSSPGPASPGPLTKQQSSFSDHLQLVGTVHASVPEPGELKPALRPYLGFLDGYSPGAVVTWALGVMLASAITIGCVLVFGNSTLHLPHWGYILLLLLTSVMFLLSLLVLGAHQQQYREDLFQIPMVPLIPALSIVLNICLMLKLSYLTWVRFSIWLLMGLAVYFGYGIRHSKENQRELPGLNSTHYVVFPRGSLEETVQAMQPPSQAPAQDPGHME

SEQ ID NO: 808603 - protein, 635 aa, Homo sapiens; identical to SEQ ID NO: 808599

SEQ ID NO: 808604 - protein, 192 aa, Homo sapiens
LLGHYPDFLAAGIILLASAFVSCGARVSSWLNHTFSAISLLVILFIVILGFILAQPHNWSADEGGFAPFGFSGVMAGTASCFYAFVGFDVIAASSEEAQNPRRSVPLAIAISLAIAAGAYILVSTVLTLMVPWHSLDPDSALADAFYQRGYRWAGFIVAAGSICGERLFLGRVAGKRARGTLSSDSWGMHLQ

SEQ ID NO: 808605 - protein, 187 aa, Homo sapiens
MWCASPVAVVAFCAGLLVSHPVLTQGQEAGGRPGADCEVCKEFLNRFYKSLIDRGVNFSLDTIEKELISFCLDTKGKENRLCYYLGATKDAATKILSEVTRPMSVHMPAMKICEKLKKLDSQICELKYEKTLDLASVDLRKMRVAELKQILHSWGEECRACAEKTDYVNLIQELAPKYAATHPKTEL

SEQ ID NO: 808606 - protein, 78 aa, Homo sapiens
SPVAVVAFCAGLLVSHPVLTQGQEAGGRPGADCEGERCDNCLHGGGPALRRSSCRLWLLLALAINNIPPRKCRPCPSF

SEQ ID NO: 808607 - protein, 287 aa, Homo sapiens
RVTCAMEPKVAELKQKIEDTLCPFGFEVYPFQVAWYNELLPPAFHLPLPGPTLAFLVLSTPAMFDRALKPFLQSCHLRMLTDPVDQCVAYHLGRVRESLPELQIEIIADYEVHPNRRPKILAQTAAHVAGAAYYYQRQDVEADPWGNQRISGVCIHPRFGGWFAIRGVVLLPGIEVPDLPPRKPHDCVPTRADRIALLEGFNFHWRDWTYRDAVTPQERYSEEQKAYFSTPPAQRLALLGLAQPSEKPSSPSPDLPFTTPAPKKPGNPSRARSWLSPRVSPPASPGP

SEQ ID NO: 808608 - protein, 287 aa, Homo sapiens; identical to SEQ ID NO: 808607

SEQ ID NO: 808609 - protein, 287 aa, Homo sapiens; identical to SEQ ID NO: 808607

SEQ ID NO: 808610 - protein, 104 aa, Homo sapiens
DLHDLAFLHPPPQRISGVCIHPRFGGWFAIRGVVLLPGIEVPDLPPRKPHDCVPTRADRIALLEGFNFHWRDWTYRDAVTPQERYSEEQKAYFSTPPAQRLALL

SEQ ID NO: 808611 - protein, 593 aa, Homo sapiens
MAGERTRRLTRSLLRPGRRRAPAQPAASAAAVAVSSRQQQRQEKPRLLEPLDYETVIEELEKTYRNDPLQDLLFFPSDDFSAATVSWDIRTLYSTVPEDAEHKAENLLVKEACKFYSSQWHVVNYKYEQYSGDIRQLPRAEYKPEKLPSHSFEIDHEDADKDEDTTSHSSSKGGGGAGGTGVFKSGWLYKGNFNSTVNNTVTVRSFKKRYFQLTQLPDNSYIMNFYKDEKISKEPKGCIFLDSCTGVVQNNRLRKYAFELKMNDLTYFVLAAETESDMDEWIHTLNRILQISPEGPLQGRRSTELTDLGLDSLDNSVTCECTPEETDSSENNLHADFAKYLTETEDTVKTTRNMERLNLFSLDPDIDTLKLQKKDLLEPESVIKPFEEKAAKRIMIICKALNSNLQGCVTENENDPITNIEPFFVSVALYDLRDSRKISADFHVDLNHAAVRQMLLGASVALENGNIDTITPRQSEEPHIKGLPEEWLKFPKQAVFSVSNPHSEIVLVAKIEKVLMGNIASGAEPYIKNPDSNKYAQKILKSNRQFCSKLGKYRMPFAWAVRYVDSCSQQTRNTFNGGIGSFSFERFCVAYYF

SEQ ID NO: 808612 - protein, 123 aa, Homo sapiens
MAGERTRRLTRSLLRPGQAAELRHSLPRPPPRWQSAAGSSSGKKSLGFSSLWIMRLSLKNLKRPTGMILFKISCSSPVMTFQQPQFPGISARCTQQYLKMQSTRQKIYWLRRLVNFIVPSGMW

SEQ ID NO: 808613 - protein, 420 aa, Homo sapiens
MLKAVILIGGPQKGTRFRPLSFEVPKPLFPVAGVPMIQHHIEACAQVPGMQEILLIGFYQPDEPLTQFLEAAQQEFNLPVRYLQEFAPLGTGGGLYHFRDQILAGSPEAFFVLNADVCSDFPLSAMLEAHRRQRHPFLLLGTTANRTQSLNYGCIVENPQTHEVLHYVEKPSTFISDIINCGIYLFSPEALKPLRDVFQRNQQDGQLEDSPGLWPGAGTIRLEQDVFSALAGQGQIYVHLTDGIWSQIKSAGSALYASRLYLSRYQDTHPERLAKHTPGGPWIRGNVYIHPTAKVAPSAVLGPNVSIGKGVTVGEGVRLRESIVLHGATLQEHTCVLHSIVGWGSTVGRWARVEGTPSDPNPNDPRARMDSESLFKDGKLLPAITILGCRVRIPAEVLILNSIVLPHKELSRSFTNQIIL

SEQ ID NO: 808614 - protein, 420 aa, Homo sapiens; identical to SEQ ID NO: 808613

SEQ ID NO: 808615 - protein, 420 aa, Homo sapiens; identical to SEQ ID NO: 808613

SEQ ID NO: 808616 - protein, 207 aa, Homo sapiens
IELVPMQRTREDGQLEDSPGLWPGAGTIRLEQDVFSALAGQGQIYVHLTDGIWSQIKSAGSALYASRLYLSRYQDTHPERLAKHTPGGPWIRGNVYIHPTAKVAPSAVLGPNVSIGKGVTVGEGVRLRESIVLHGATLQEHTCVLHSIVGWGSTVGRWARVEGTPSDPNPNDPRARMDSESLFKDGKLLPAITILGSRVPCIGTEHR

SEQ ID NO: 808617 - protein, 182 aa, Homo sapiens
MLKAVILIGGPQKGTRFRPLSFEVPKPLFPVAGVPMIQHHIEACAQVLHYVEKPSTFISDIINCGIYLFSPEALKPLRDVFQRNQQDGQLEDSPGLWPGAGTIRLEQDVFSALAGQGQIYVHLTDGIWSQIKSAGSSLYGSGSTERYRKSPEGGKHTQGAWSRVFHSRTQCLVVGQSEGDGR

SEQ ID NO: 808618 - protein, 117 aa, Homo sapiens
MGQGGKQASAWGSLVIAPTQVGAGWERFLGCEQPHPREGRTRPGERGLERWWESSYSCPWETVLAPQSGLSWGTNVSILPLCQGGLTRLVARGRYHPPRAGCVFSPGRAGPDIRASH

SEQ ID NO: 808619 - protein, 166 aa, Homo sapiens
  misc_feature (47)..(47): Xaa can be any naturally occurring amino acid
  misc_feature (53)..(54): Xaa can be any naturally occurring amino acid
  misc_feature (67)..(67): Xaa can be any naturally occurring amino acid
  misc_feature (75)..(75): Xaa can be any naturally occurring amino acid
  misc_feature (86)..(86): Xaa can be any naturally occurring amino acid
  misc_feature (90)..(92): Xaa can be any naturally occurring amino acid
  misc_feature (98)..(100): Xaa can be any naturally occurring amino acid
  misc_feature (104)..(104): Xaa can be any naturally occurring amino acid
  misc_feature (108)..(108): Xaa can be any naturally occurring amino acid
  misc_feature (112)..(112): Xaa can be any naturally occurring amino acid
  misc_feature (119)..(119): Xaa can be any naturally occurring amino acid
  misc_feature (125)..(125): Xaa can be any naturally occurring amino acid
  misc_feature (136)..(136): Xaa can be any naturally occurring amino acid
  misc_feature (146)..(146): Xaa can be any naturally occurring amino acid
  misc_feature (156)..(156): Xaa can be any naturally occurring amino acid
MLKAVILIGGPQKGTRFRPLSFEVPKPLFPVAGVPMIQHHIEACAQXLEAGDXXQGAATNLSELRIXGPSNAAHXEWNRPGSDRQXGAPXXXWGGLCXXXYIIXLFGXPRGXRRSQVGXRRRWPXEGEGWNPYRCXRHPGGRRGTXANIYLKPAMXASVGDKATYT

SEQ ID NO: 808620 - protein, 107 aa, Homo sapiens
SPSRAYGVCFSPQLGPNVSIGKGVTVGEGVRLRESIVLHGATLQEHTCVLHSIVGWGSTVGRWARVEGTPSDPNPNDPRARMDSESLFKDGKLLPAITILGMASWGP

SEQ ID NO: 808621 - protein, 420 aa, Homo sapiens; identical to SEQ ID NO: 808613

SEQ ID NO: 808622 - protein, 420 aa, Homo sapiens; identical to SEQ ID NO: 808613

SEQ ID NO: 808623 - protein, 385 aa, Homo sapiens [sequence omitted]

SEQ ID NO: 808624 - protein, 295 aa, Homo sapiens
MLEAHRRQRHPFLLLGTTANRTQSLNYGCIVENPQTHEVLHYVEKPSTFISDIINCGIYLFSPEALKPLRDVFQRNQQDGQLEDSPGLWPGAGTIRLEQDVFSALAGQGQIYVHLTDGIWSQIKSAGSALYASRLYLSRYQDTHPERLAKHTPGGPWIRGNVYIHPTAKVAPSAVLGPNVSIGKGVTVGEGVRLRESIVLHGATLQEHTCVLHSIVGWGSTVGRWARVEGTPSDPNPNDPRARMDSESLFKDGKLLPAITILGCRVRIPAEVLILNSIVLPHKELSRSFTNQIIL

SEQ ID NO: 808625 - protein, 295 aa, Homo sapiens; identical to SEQ ID NO: 808624

SEQ ID NO: 808626 - protein, 295 aa, Homo sapiens; identical to SEQ ID NO: 808624

SEQ ID NO: 808627 - protein, 473 aa, Homo sapiens
MLKAVILIGGPQKGTRFRPLSFEVPKPLFPVAGVPMIQHHIEACAQVPGMQEILLIGFYQPDEPLTQFLEAAQQEFNLPVRYLQEFAPLGTGGGLYHFRDQILAGSPEAFFVLNADVCSDFPLSAMLEAHRRQRHPFLLLGTTANRTQSLNYGCIVENPQTHEVLHYVEKPSTFISDIINCGIYLFSPEALKPLRDVFQRNQQDGQLEDSPGLWPGAGTIRLEQDVFSALAGQGQIYVHLTDGIWSQIKSAGSALYASRLYLSRYQDTHPERLAKHTPGGPWIRGTQPAPIPNLWLPPQPSEPGFLTSSPELKPQSLPLPDQIRFGIFAPRASLLLLGNVYIHPTAKVAPSAVLGPNVSIGKGVTVGEGVRLRESIVLHGATLQEHTCVLHSIVGWGSTVGRWARVEGTPSDPNPNDPRARMDSESLFKDGKLLPAITILGCRVRIPAEVLILNSIVLPHKELSRSFTNQIIL

SEQ ID NO: 808628 - protein, 427 aa, Homo sapiens
MLKAVILIGGPQKGTRFRPLSFEVPKPLFPVAGVPMIQHHIEACAQVPGMQEILLIGFYQPDEPLTQFLEAAQQEFNLPVRYLQEFAPLGTGGGLYHFRDQILAGSPEAFFVLNADVCSDFPLSAMLEAHRRQRHPFLLLGTTANRTQSLNYGCIVENPQTHEVLHYVEKPSTFISDIINCGIYLFSPEALKPLRDVFQRNQQDGQLEDSPGLWPGAGTIRLEQDVFSALAGQGQIYVHLTDGIWSQIKSAGSALYASRLYLSRYQDTHPERLAKHTPGGPWIRGPLFCFYGNVYIHPTAKVAPSAVLGPNVSIGKGVTVGEGVRLRESIVLHGATLQEHTCVLHSIVGWGSTVGRWARVEGTPSDPNPNDPRARMDSESLFKDGKLLPAITILGCRVRIPAEVLILNSIVLPHKELSRSFTNQIIL

SEQ ID NO: 808629 - protein, 228 aa, Homo sapiens
IELVPMQRTREDGQLEDSPGLWPGAGTIRLEQDVFSALAGQGQIYVHLTDGIWSQIKSAGSALYASRLYLSRYQDTHPERLAKHTPGGPWIRGNVYIHPTAKVAPSAVLGPNVSIGKGVTVGEGVRLRESIVLHGATLQEHTCVLHSIVGWGSTVGRWARVEGTPSDPNPNDPRARMDSESLFKDGKLLPAITILGCRVRIPAEVLILNSIVLPHKELSRSFTNQIIL

SEQ ID NO: 808630 - protein, 222 aa, Homo sapiens [sequence omitted]

SEQ ID NO: 808631 - protein, 399 aa, Homo sapiens
MLKAVILIGGPQKGTRFRPLSFEVPKPLFPVAGVPMIQHHIEACAQVPGMQEILLIGFYQPDEPLTQFLEAAQQEFNLPVRYLQEFAPLGTGGGLYHFRDQILAGSPEAFFVLNADVCSDFPLSAMLEAHRRQRHPFLLLGTTANRTQSLNYGCIVENPQTHEVLHYVEKPSTFISDIINCGIYLFSPEALKPLRDVFQRNQQDGQLEDSPGLWPGAGTIRLEQDVFSALAGQGQIYVHLTDGIWSQIKSAGSALYASRLYLSRYQDTHPERLAKHTPGGPWIRGNVYIHPTAKVAPSAVLGPNVSIGKGVTVGEGVRLRESIVLHGATLQEHTCVLHSIVGWGSTVGRWARVEGTPSDPNPNDPRARMDSESLFKDGKLLPAITILGSRVPCIGTEHR

SEQ ID NO: 808632 - protein, 268 aa, Homo sapiens
MLKAVILIGGPQKGTRFRPLSFEVPKPLFPVAGVPMIQHHIEACAQVPGMQEILLIGFYQPDEPLTQFLEAAQQEFNLPVRYLQEFAPLGTGGGLYHFRDQILAGSPEAFFVLNADVCSDFPLSAMLEAHRRQRHPFLLLGTTANRTQSLNYGCIVENPQTHEVLHYVEKPSTFISDIINCGIYLFSPEALKPLRDVFQRNQQDGQLEDSPGLWPGAGTIRLEQDVFSALAGQGQIYVHLTDGIWSQIKSAGSALYSCAVVSAHFRCI

SEQ ID NO: 808633 - protein, 95 aa, Homo sapiens
CEKTRARKELAVAGGRAGVKGASGKGSWWRGGGRGKGQGTPSRRRAGSEVLAGPRCARPCVGPTIPGNERPGFIGQSQLWGSEGQQSINPPNPEI

SEQ ID NO: 808634 - protein, 147 aa, Homo sapiens
MAAQRLGKRVLSKLQSPSRARGPGGSPGGLQKRHARVTVKYDRRELQRRLDVEKWIDGRLEELYRGMEADMPDEINIDELLELESEEERSRKIQGLLKSCGKPVEDFIQELLAKLQGLHRQPGLRQPSPSHDGSLSPLQDRARTAHP

SEQ ID NO: 808635 - protein, 120 aa, Homo sapiens
MAAQRLGKRVLSKLQSPSRARGPGGSPGGLQKRHARVTVKYDRRELQRRLDVEKWIDGRLEELYRGMGLLKSCGKPVEDFIQELLAKLQGLHRQPGLRQPSPSHDGSLSPLQDRARTAHP

SEQ ID NO: 808636 - protein, 153 aa, Homo sapiens
MAAQRLGKRVLSKLQSPSRARGPGGSPGGLQKRHARVTVKYDRRELQRRLDVEKWIDGRLEELYRGMEADMPDEINIDELLELESEEERSRKIQGLLKSCGKPVEDFIQELLAKLQGLHRQPGLRQPSPSHDCSPLTLLHSPCPPDAAQLACV

SEQ ID NO: 808637 - protein, 121 aa, Homo sapiens
MAAQRLGKRVLSKLQSPSRARGPGGSPGGLQKRHARVTVKYDRRELQRRLDVEKWIDGRLEELYRGMEADMPDEINIDELLELESEEERSRKIQGLLKSCGKPVEVSFLSLILSLFWPQVL

SEQ ID NO: 808638 - protein, 585 aa, Homo sapiens
MARPDPSAPPSLLLLLLAQLVGRAAAASKAPVCQEITVPMCRGIGYNLTHMPNQFNHDTQDEAGLEVHQFWPLVEIQCSPDLRFFLCSMYTPICLPDYHKPLPPCRSVCERAKAGCSPLMRQYGFAWPERMSCDRLPVLGRDAEVLCMDYNRSEATTAPPRPFPAKPTLPGPPGAPASGGECPAGGPFVCKCREPFVPILKESHPLYNKVRTGQVPNCAVPCYQPSFSADERTFATFWIGLWSVLCFISTSTTVATFLIDMERFRYPERPIIFLSACYLCVSLGFLVRLVVGHASVACSREHNHIHYETTGPALCTIVFLLVYFFGMASSIWWVILSLTWFLAAGMKWGNEAIAGYAQYFHLAAWLIPSVKSITALALSSVDGDPVAGICYVGNQNLNSLRGFVLGPLVLYLLVGTLFLLAGFVSLFRIRSVIKQGGTKTDKLEKLMIRIGIFTLLYTVPASIVVACYLYEQHYRESWEAALTCACPGHDTGQPRAKPEYWVLMLKYFMCLVVGITSGVWIWSGKTVESWRRFTSRCCCRPRRGHKSGGAMAAGDYPEASAALTGRTGPPGPAATYHKQVSLSHV

SEQ ID NO: 808639 - protein, 142 aa, Homo sapiens
MAAVVAATALKGRGARNARVLRGILAGATANKASHNRTRALQSHSSPEGKEEPEPLSPELEYIPRKRGKNPMKAVGLAWAIGFPCGILLFILTKREVDKDRVKQMKARQNMRLSNTGEYESQRFRASSQSAPSPDVGSGVQT

SEQ ID NO: 808640 - protein, 175 aa, Homo sapiens
VVLLGPLCGLLGDVVSGLQAGRKERGRPLTQTTIPGGERGEAGVGSEHGGGGSCYGAEGPGGEKCPRPPGTRALQSHSSPEGKEEPEPLSPELEYIPRKRGKNPMKAVGLAWAIGFPCGILLFILTKREVDKDRVKQMKARQNMRLSNTGEYESQRFRASSQSAPSPDVGSGVQT

SEQ ID NO: 808641 - protein, 142 aa, Homo sapiens; identical to SEQ ID NO: 808639

SEQ ID NO: 808642 - protein, 99 aa, Homo sapiens
IWTALGPGSQLHDRPVGQVAHARARPRGTMTTSSSLGVSLIPTASPSCRIRHEVDKDRVKQMKARQNMRLSNTGEYESQRFRASSQSAPSPDVGSGVQT

SEQ ID NO: 808643 - protein, 117 aa, Homo sapiens
VIYSDLIPVLGSHSSPEGKEEPEPLSPELEYIPRKRGKNPMKAVGLAWAIGFPCGILLFILTKREVDKDRVKQMKARQNMRLSNTGEYESQLTRLLITGPGPCKATAPQRARRNLNP

SEQ ID NO: 808644 - protein, 130 aa, Homo sapiens
MAAVVAATALKGRGARNARVLRGKERDPGEGRTAEDPFSFTSSPTIAGGQGSWFLPTLFCKILESGGAEMLFRGHPVHPPAFGLLDTSGVLLQEGAPRKPVGLPRSRCFTLTAVQRKEPRASGGLSSSPG

SEQ ID NO: 808645 - protein, 92 aa, Homo sapiens
LMKLEGLPPAPLAQAWPLPKPRAHLPTRRAIGFPCGILLFILTKREVDKDRVKQMKARQNMRLSNTGEYESQRFRASSQSAPSPDVGSGVQT

SEQ ID NO: 808646 - protein, 255 aa, Homo sapiens [sequence omitted]

SEQ ID NO: 808647 - protein, 279 aa, Homo sapiens
  misc_feature (38)..(38): Xaa can be any naturally occurring amino acid
MASPGAGRAAFPGGKGLFLNPRGGQKAPGGNILGREGXLTPGRKVEVPWGIKRYQGAADSAPYDWFGDFSSFRALLEPELRPEDRILVLGCGNSALSYELFLGGFPNVTSVDYSSVVVAAMQARYAHVPQLRWETMDVRKLDFPSASFDVVLEKGTLDALLAGERDPWTVSSEGVHTVDQVLSEVSRVLVPGGRFISMTSAAPHFRTRHYAQAYYGWSLRHATYGSGFHFHLYLMHKGGKLSVAQLALGAQILSPPRPPTSPCFLQDSDHEDFLSAIQL

SEQ ID NO: 808648 - protein, 255 aa, Homo sapiens [sequence omitted]

SEQ ID NO: 808649 - protein, 255 aa, Homo sapiens [sequence omitted]

SEQ ID NO: 808650 - protein, 128 aa, Homo sapiens
GWQRREKLLGNLVTRSYSTSSVSSESLSSRRPLTGHRRSPHMDQYVSTAPPRFPIAQLGTFKQDSAGMGRIFKGNLLQKKALTTFENEHHIRFFTLLVLFHVMVLLRNHSRIQGVSEDWKRANSIFRK

SEQ ID NO: 808651 - protein, 1056 aa, Homo sapiens
MLSVVENGLDPQAAIPVIKKKLVGSVKALQKQYVSLDTVVTSEDGDANTMCSALEAVFIHGLHAKHIRAEAGGKRKKSAHQKPLPQPVFWPLLKAVTHKHIISELEHLTFVNTDVGRCRAWLRLALNDGLMECYLKLLLQEQARLHEYYQPTALLRDAEEGEFLLSFLQGLTSLSFELSYKSAILNEWTLTPLALSGLCPLSELDPLSTSGAELQRKESLDSISHSSGSEDIEVHHSGHKIRRNQKLTASSLSLDTASSSQLSCSLNSDSCLLQENGSKSPDHCEEPMSCDSDLGTANAEDSDRSLQEVLLEFSKAQVNSVPTNGLSQETEIPTPQASLSLHGLNTSTYLHCEAPAEPLPAQAASGTQDGVHVQEPRPQAPSPLDLQQPVESTSGQQPSSTVSETAREVGQGNGLQKAQAHDGAGLKLVVSSPTSPKNKSWISEDDFYRPSREQPLESASDHPIASYRGTPGSRPGLHRHFSQEPRKNCSLGALDQACVPSPGRRQAQAAPSQGHKSFRVVHRRQMGLSNPFRGLMKLGTVERRGAMGIWKELFCELSPLEFRLYLSNEEHTCVENCSLLRCESVGPAHSDGRFELVFSGKKLALRASSQDEAEDWLDRVREALQKVRPQQEDEWVNVQYPDQPEEPPEAPQGCLSPSDLLSEPAALQGTQFDWSSAQVPEPDAIKESLLYLYMDRTWMPYIFSLSLEALKCFRIRNNEKMLSDSHGVETIRDILPDTSLGGPSFFKIITAKAVLKLQAGNAEEAALWRDLVRKVLASYLETAEEAVTLGGSLDENCQEVLKFATRENGFLLQYLVAIPMEKGLDSQGCFCAGCSRQIGFSFVRPKLCAFSGLYYCDICHQDDASVIPARIIHNWDLTKRPICRQALKFLTQIRAQPLINLQMVNASLYEHVERMHLIGRRREQLKLLGDYLGLCRSGALKELSKRLNHRNYLLESPHRFSVADLQQIADGVYEGFLKALIEFASQHVYHCDLCTQRGFICQICQHHDIIFPFEFDTTVRCAECKTVFHQSCQAVVKKGCPRCARRRKYQEQNIFA

SEQ ID NO: 808652 - protein, 318 aa, Homo sapiens [sequence omitted]

SEQ ID NO: 808653 - protein, 336 aa, Homo sapiens [sequence omitted]

SEQ ID NO: 808654 - protein, 1039 aa, Homo sapiens
SLQRQGSLQRQGSLQQSGLDTVVTSEDGDANTMCSALEAVFIHGLHAKHIRAEAGGKRKKSAHQKPLPQPVFWPLLKAVTHKHIISELEHLTFVNTDVGRCRAWLRLALNDGLMECYLKLLLQEQARLHEYYQPTALLRDAEEGEFLLSFLQGLTSLSFELSYKSAILNEWTLTPLALSGLCPLSELDPLSTSGAELQRKESLDSISHSSGSEDIEVHHSGHKIRRNQKLTASSLSLDTASSSQLSCSLNSDSCLLQENGSKSPDHCEEPMSCDSDLGTANAEDSDRSLQEVLLEFSKAQVNSVPTNGLSQETEIPTPQASLSLHGLNTSTYLHCEAPAEPLPAQAASGTQDGVHVQEPRPQAPSPLDLQQPVESTSGQQPSSTVSETAREVGQGNGLQKAQAHDGAGLKLVVSSPTSPKNKSWISEDDFYRPSREQPLESASDHPIASYRGTPGSRPGLHRHFSQEPRKNCSLGALDQACVPSPGRRQAQAAPSQGHKSFRVVHRRQMGLSNPFRGLMKLGTVERRGAMGIWKELFCELSPLEFRLYLSNEEHTCVENCSLLRCESVGPAHSDGRFELVFSGKKLALRASSQDEAEDWLDRVREALQKVRPQQEDEWVNVQYPDQPEEPPEAPQGCLSPSDLLSEPAALQGTQFDWSSAQVPEPDAIKESLLYLYMDRTWMPYIFSLSLEALKCFRIRNNEKMLSDSHGVETIRDILPDTSLGGPSFFKIITAKAVLKLQAGNAEEAALWRDLVRKVLASYLETAEEAVTLGGSLDENCQEVLKFATRENGFLLQYLVAIPMEKGLDSQGCFCAGCSRQIGFSFVRPKLCAFSGLYYCDICHQDDASVIPARIIHNWDLTKRPICRQALKFLTQIRAQPLINLQMVNASLYEHVERMHLIGRRREQLKLLGDYLGLCRSGALKELSKRLNHRNYLLESPHRFSVADLQQIADGVYEGFLKALIEFASQHVYHCDLCTQRGFICQICQHHDIIFPFEFDTTVRCAECKTVFHQSCQAVVKKGCPRCARRRKYQEQNIFA

SEQ ID NO: 808655 - protein, 1056 aa, Homo sapiens; identical to SEQ ID NO: 808651

SEQ ID NO: 808656 - protein, 1056 aa, Homo sapiens; identical to SEQ ID NO: 808651

SEQ ID NO: 808657 - protein, 1056 aa, Homo sapiens; identical to SEQ ID NO: 808651

SEQ ID NO: 808658 - protein, 1015 aa, Homo sapiens
GRETASSARRLRGCRGRERPSPRSSLRLVSCDSLREQLREWRCFQWWRMDWTPRLPSRHIISELEHLTFVNTDVGRCRAWLRLALNDGLMECYLKLLLQEQARLHEYYQPTALLRDAEEGEFLLSFLQGLTSLSFELSYKSAILNEWTLTPLALSGLCPLSELDPLSTSGAELQRKESLDSISHSSGSEDIEVHHSGHKIRRNQKLTASSLSLDTASSSQLSCSLNSDSCLLQENGSKSPDHCEEPMSCDSDLGTANAEDSDRSLQEVLLEFSKAQVNSVPTNGLSQETEIPTPQASLSLHGLNTSTYLHCEAPAEPLPAQAASGTQDGVHVQEPRPQAPSPLDLQQPVESTSGQQPSSTVSETAREVGQGNGLQKAQAHDGAGLKLVVSSPTSPKNKSWISEDDFYRPSREQPLESASDHPIASYRGTPGSRPGLHRHFSQEPRKNCSLGALDQACVPSPGRRQAQAAPSQGHKSFRVVHRRQMGLSNPFRGLMKLGTVERRGAMGIWKELFCELSPLEFRLYLSNEEHTCVENCSLLRCESVGPAHSDGRFELVFSGKKLALRASSQDEAEDWLDRVREALQKVRPQQEDEWVNVQYPDQPEEPPEAPQGCLSPSDLLSEPAALQGTQFDWSSAQVPEPDAIKESLLYLYMDRTWMPYIFSLSLEALKCFRIRNNEKMLSDSHGVETIRDILPDTSLGGPSFFKIITAKAVLKLQAGNAEEAALWRDLVRKVLASYLETAEEAVTLGGSLDENCQEVLKFATRENGFLLQYLVAIPMEKGLDSQGCFCAGCSRQIGFSFVRPKLCAFSGLYYCDICHQDDASVIPARIIHNWDLTKRPICRQALKFLTQIRAQPLINLQMVNASLYEHVERMHLIGRRREQLKLLGDYLGLCRSGALKELSKRLNHRNYLLESPHRFSVADLQQIADGVYEGFLKALIEFASQHVYHCDLCTQRGFICQICQHHDIIFPFEFDTTVRCAECKTVFHQSCQAVVKKGCPRCARRRKYQEQNIFA

SEQ ID NO: 808659 - protein, 928 aa, Homo sapiens
MLSVVENGLDPQAAIPVIKKKLVGSVKALQKQYVSLDTVVTSEDGDANTMCSALEAVFIHGLHAKHIRAEAGGKRKKSAHQKPLPQPVFWPLLKAVTHKHIISELEHLTFVNTDVGRCRAWLRLALNDGLMECYLKLLLQEQARLHEYYQPTALLRDAEEGEFLLSFLQGLTSLSFELSYKSAILNEWTLTPLALSGLCPLSELDPLSTSGAELQRKESLDSISHSSGSEDIEVHHSGHKIRRNQKLTASSLSLDTASSSQLSCSLNSDSCLLQENGSKSPDHCEEPMSCDSDLGTANAEDSDRSLQEKTRAGSQRMTSTGLPGSNPWRVLQTTQVASYRGTPGSRPGLHRHFSQEPRKNCSLGALDQACVPSPGRRQAQAAPSQGHKSFRVVHRRQMGLSNPFRGLMKLGTVERRGAMGIWKELFCELSPLEFRLYLSNEEHTCVENCSLLRCESVGPAHSDGRFELVFSGKKLALRASSQDEAEDWLDRVREALQKVRPQQEDEWVNVQYPDQPEEPPEAPQGCLSPSDLLSEPAALQGTQFDWSSAQVPEPDAIKESLLYLYMDRTWMPYIFSLSLEALKCFRIRNNEKMLSDSHGVETIRDILPDTSLGGPSFFKIITAKAVLKLQAGNAEEAALWRDLVRKVLASYLETAEEAVTLGGSLDENCQEVLKFATRENGFLLQYLVAIPMEKGLDSQGCFCAGCSRQIGFSFVRPKLCAFSGLYYCDICHQDDASVIPARIIHNWDLTKRPICRQALKFLTQIRAQPLINLQMVNASLYEHVERMHLIGRRREQLKLLGDYLGLCRSGALKELSKRLNHRNYLLESPHRFSVADLQQIADGVYEGFLKALIEFASQHVYHCDLCTQRGFICQICQHHDIIFPFEFDTTVRCAECKTVFHQSCQAVVKKGCPRCARRRKYQEQNIFA

SEQ ID NO: 808660 - protein, 1056 aa, Homo sapiens; identical to SEQ ID NO: 808651

SEQ ID NO: 808661 - protein, 1037 aa, Homo sapiens
MLSVVENGLDPQAAIPVIKKKLVGSVKALQKQYVSLDTVVTSEDGDANTMCSALEAVFIHGLHAKHIRAEAGGKRKKSAHQKPLPQPVFWPLLKAVTHKHIISELEHLTFVNTDVGRCRAWLRLALNDGLMECYLKLLLQEQARLHEYYQPTALLRDAEEGEFLLSFLQGLTSLSFELSYKSAILNEWTLTPLALSGLCPLSELDPLSTSGAELQRKESLDSISHSSGSEDIEVHHSGHKIRRNQKLTASSLSLDTASSSQLSCSLNSDSCLLQENGSKSPDHCEEPMSCDSDLGTANAEDSDRSLQEVLLEFSKAQVNSVPTNGLSQETEIPTPQASLSLHGLNTSTYLHCEAPAEPLPAQAASGTQDGVHVQEPRPQAPSPLDLQQPVESTSGQQPSSTVSETAREVGQGNGLQKAQAHDGAGLKLVVSSPTSPKNKSWISEDDFYRPSREQPLESASDHPIASYRGTPGSRPGLHRHFSQEPRKNCSLGALDQACVPSPGRRQAQAAPSQGHKSFRVVHRRQMGLSNPFRGLMKLGTVERRGAMGIWKELFCELSPLEFRLYLSNEEHTCVENCSLLRCESVGPAHSDGRFELVFSGKKLALRASSQDEAEDWLDRVREALQKVRPQQEDEWVNVQYPDQPEEPPEAPQGCLSPSDLLSEPAALQGTQFDWSSAQVPEPDAIKESLLYLYMDRTWMPYIFSLSLEALKCFRIRNNEKMLSDSHGVETIRDILPDTSLGGPSFFKIITAKAVLKLQAGNAEEAALWRDLVRKVLASYLETAEEAVTLGGSLDENCQEVLKFATRENGFLLQYLVAIPMEKGLDSQGCFCAGCSRQIGFSFVRPKLCAFSGLYYCDICHQDDASVIPARIIHNWDLTKRPICRQALKFLTQIRAQPLINLQMVNASLYEHVERMHLIGRRREQLKLLGDYLGLCRSGALKELSKRLNHRNYLLESPHRFSVADLQQHVYHCDLCTQRGFICQICQHHDIIFPFEFDTTVRCAECKTVFHQSCQAVVKKGCPRCARRRKYQEQNIFA

SEQ ID NO: 808662 - protein, 539 aa, Homo sapiens
MCPFLPLPPGLSNPFRGLMKLGTVERRGAMGIWKELFCELSPLEFRLYLSNEEHTCVENCSLLRCESVGPAHSDGRFELVFSGKKLALRASSQDEAEDWLDRVREALQKVRPQQEDEWVNVQYPDQPEEPPEAPQGCLSPSDLLSEPAALQGTQFDWSSAQVPEPDAIKESLLYLYMDRTWMPYIFSLSLEALKCFRIRNNEKMLSDSHGVETIRDILPDTSLGGPSFFKIITAKAVLKLQAGNAEEAALWRDLVRKVLASYLETAEEAVTLGGSLDENCQEVLKFATRENGFLLQYLVAIPMEKGLDSQGCFCAGCSRQIGFSFVRPKLCAFSGLYYCDICHQDDASVIPARIIHNWDLTKRPICRQALKFLTQIRAQPLINLQMVNASLYEHVERMHLIGRRREQLKLLGDYLGLCRSGALKELSKRLNHRNYLLESPHRFSVADLQQIADGVYEGFLKALIEFASQHVYHCDLCTQRGFICQICQHHDIIFPFEFDTTVRCAECKTVFHQSCQAVVKKGCPRCARRRKYQEQNIFA

SEQ ID NO: 808663 - protein, 199 aa, Homo sapiens
MAPGQAVLTEQPFLPIPNAWWYPQICRQALKFLTQIRAQPLINLQMVNASLYEHVERMHLIGRRREQLKLLGDYLGLCRSGALKELSKRLNHRNYLLESPHRFSVADLQQIADGVYEGFLKALIEFASQHVYHCDLCTQRGFICQICQHHDIIFPFEFDTTVRCAECKTVFHQSCQAVVKKGCPRCARRRKYQEQNIFA

SEQ ID NO: 808664 - protein, 164 aa, Homo sapiens
PKSLIAEQVNIPARRMMRWGDGSRKVVRVLECPVSLHWRWHLGKSGCVIQGCGASDFRSRSNWKWFQEKPLSFSHTRPYRKPTQVGEMSILRRNERFKSLMWKGDLGSIFNSTFLIKRSSFLRWVFPIHISTESIFLFLTLRESPMKSRHSHPQRMHRSHSGLA

SEQ ID NO: 808665 - protein, 1056 aa, Homo sapiens; identical to SEQ ID NO: 808651

SEQ ID NO: 808666 - protein, 558 aa, Homo sapiens
MLSVVENGLDPQAAIPVIKKKLVGSVKALQKQYVSLDTVVTSEDGDANTMCSALEAVFIHGLHAKHIRAEAGGKRKKSAHQKPLPQPVFWPLLKAVTHKHIISELEHLTFVNTDVGRCRAWLRLALNDGLMECYLKLLLQEQARLHEYYQPTALLRDAEEGEFLLSFLQGLTSLSFELSYKSAILNEWTLTPLALSGLCPLSELDPLSTSGAELQRKESLDSISHSSGSEDIEVHHSGHKIRRNQKLTASSLSLDTASSSQLSCSLNSDSCLLQENGSKSPDHCEEPMSCDSDLGTANAEDSDRSLQEVLLEFSKAQVNSVPTNGLSQETEIPTPQASLSLHGLNTSTYLHCEAPAEPLPAQAASGTQDGVHVQEPRPQAPSPLDLQQPVESTSGQQPSSTVSETAREVGQGNGLQKAQAHDGAGLKLVVSSPTSPKNKSWISEDDFYRPSREQPLESASDHPIASYRGTPGSRPGLHRHFSQEPRKNCSLGALDQACVPSPGRRQAQAAPSQGHKSFRVVHRRQMGRLPGGSRVGPICRDQAFQKAAVKFCFPLLKG

SEQ ID NO: 808667 - protein, 458 aa, Homo sapiens
MLSVVENGLDPQAAIPVIKKKLVGSVKALQKQYVSLDTVVTSEDGDANTMCSALEAVFIHGLHAKHIRAEAGGKRKKSAHQKPLPQPVFWPLLKAVTHKHIISELEHLTFVNTDVGRCRAWLRLALNDGLMECYLKLLLQEQARLHEYYQPTALLRDAEEGEFLLSFLQGLTSLSFELSYKSAILNEWTLTPLALSGLCPLSELDPLSTSGAELQRKESLDSISHSSGSEDIEVHHSGHKIRRNQKLTASSLSLDTASSSQLSCSLNSDSCLLQENGSKSPDHCEEPMSCDSDLGTANAEDSDRSLQEVLLEFSKAQVNSVPTNGLSQETEIPTPQASLSLHGLNTSTYLHCEAPAEPLPAQAASGTQDGVHVQEPRPQAPSPLDLQQPVESTSGQQPSSTVSETAREVGQGNGLQKAQAHDGAGLKLVVSSPTSPVSGASRSGGSLGKCQLTQGFPS

SEQ ID NO: 808668 - protein, 141 aa, Homo sapiens
GRETASSARRLRGCRGRERPSPRSSLRLVSCDSLREQLRELEMLSVVENGLDPQAAIPVIKKKLVGSVKALQKQYVSLDTVVTSEDGDANTMCSALEAVFIHGLHAKHIRAEAGGKRKKSAHQKPLPQPVFWPLLKAVTHK

SEQ ID NO: 808669 - protein, 80 aa, Homo sapiens
LCAFSGLYYCDICHQDDASVIPARIIHNWDLTKRPVSLKPSSPAAEGQRGVHSSLLLLFICLEEFGSSKQGKPGSLVQAL

SEQ ID NO: 808670 - protein, 470 aa, Homo sapiens
MHFSIPETESRSGDSGGSAYVAYNIHVNGVLHCRVRYSQLLGLHEQLRKEYGANVLPAFPPKKLFSLTPAEVEQRREQLEKYMQAVRQDPLLGSSETFNSFLRRAQQETQQVPTEEVSLEVLLSNGQKVLVNVLTSDQTEDVLEAVAAKLDLPDDLIGYFSLFLVREKEDGAFSFVRKLQEFELPYVSVTSLRSQEYKIVLRKSYWDSAYDDDVMENRVGLNLLYAQTVSDIERGWILVTKEQHRQLKSLQEKVSKKEFLRLAQTLRHYGYLRFDACVADFPEKDCPVVVSAGNSELSLQLRLPGQQLREGSFRVTRMRCWRVTSSVPLPSGSTSSPGRGRGEVRLELAFEYLMSKDRLQWVTITSPQAIMMSICLQSMVDELMVKKSGGSIRKMLRRRVGGTLRRSDSQQAVKSPPLLESPDATRESMVKLSSKLSAVSLRGIGSPSTDASASDVHGNFAFEGIGDEDL

SEQ ID NO: 808671 - protein, 117 aa, Homo sapiens [sequence omitted]

SEQ ID NO: 808672 - protein, 117 aa, Homo sapiens [sequence omitted]

SEQ ID NO: 808673 - protein, 265 aa, Homo sapiens
MHFSIPETESRSGDSGGSAYVAYNIHVNGVLHCRVRYSQLLGLHEQLRKEYGANVLPAFPPKKLFSLTPAEVEQRREQLEKYMQAVRQDPLLGSSETFNSFLRRAQQETQQVPTEEVSLEVLLSNGQKVLVNVLTSDQTEDVLEAVAAKLDLPDDLIGYFSLFLVREKEDGAFSFVRKLQEFELPYVSVTSLRSQEYKIVLRKRTSYGDSGYDDDVWGTGGLEPVYAPTVRFERGGLGARTAGTNSGKIQRSKGHWAMMLSGGPK

SEQ ID NO: 808674 - protein, 212 aa, Homo sapiens
MHFSIPETESRSGDSGGSAYVAYNIHVNGVLHCRVRYSQLLGLHEQLRKEYGANVLPAFPPKKLFSLTPAEVEQRREQLEKYMQAVRQDPLLGSSETFNSFLRRAQQETQQVPTEEVSLEVLLSNGQKVLVNVLTSDQTEDVLEAVAAKLDLPDDLIGYFSLFLVREKEDGAFSFVRSAELSCYVSVTTFGSELEGAGSWARLKQSGTGGRP

SEQ ID NO: 808675 - protein, 470 aa, Homo sapiens; identical to SEQ ID NO: 808670

SEQ ID NO: 808676 - protein, 470 aa, Homo sapiens; identical to SEQ ID NO: 808670

SEQ ID NO: 808677 - protein, 470 aa, Homo sapiens; identical to SEQ ID NO: 808670

SEQ ID NO: 808678 - protein, 470 aa, Homo sapiens; identical to SEQ ID NO: 808670

SEQ ID NO: 808679 - protein, 452 aa, Homo sapiens
MHFSIPETESRSGDSGGSAYVAYNIHVNGVLHCRVRYSQLLGLHEQLRKEYGANVLPAFPPKKLFSLTPAEVEQRREQLEKYMQAVRQDPLLGSSETFNSFLRRAQQETQQVPTEEVSLEVLLSNGQKVLVNVLTSDQTEDVLEAVAAKLDLPDDLIGYFSLFLVREKEDGAFSFVRKLQEFELPYVSVTSLRSQEYKIVLRKSYWDSAYDDDVMENRVGLNLLYAQTVSDIERGWILVTKEQHRQLKSLQEKVSKKEFLRLAQTLRHYGYLRFDACVADFPVRLPGQQLREGSFRVTRMRCWRVTSSVPLPSGSTSSPGRGRGEVRLELAFEYLMSKDRLQWVTITSPQAIMMSICLQSMVDELMVKKSGGSIRKMLRRRVGGTLRRSDSQQAVKSPPLLESPDATRESMVKLSSKLSAVSLRGIGSPSTDASASDVHGNFAFEGIGDEDL

SEQ ID NO: 808680 - protein, 470 aa, Homo sapiens; identical to SEQ ID NO: 808670

SEQ ID NO: 808681 - protein, 422 aa, Homo sapiens
MHFSIPETESRSGDSGGSAYVAYNIHVNGVLHCRVRYSQLLGLHEQLRKEYGANVLPAFPPKKLFSLTPAEVEQRREQLEKYMQAVRQDPLLGSSETFNSFLRRAQQETQQVPTEEVSLEVLLSNGQKVLVNVLTSDQTEDVLEAVAAKLDLPDDLIGYFSLFLVREKEDGAFSFVRKLQEFELPYVSVTSLRSQEYKIVLRKSYWDSAYDDDVMENRVGLNLLYAQTVSDIERGWILVTKEQHRQLKSLQEKVSKKEFLRLAQTLRHYGYLRFDACVADFPEKDCPVVVSAGNSELSLQLRLPGQQLREGSFRVTRMRCWRVTSSVPLPSGSTSSPGRGRGEVRLELAFEYLMSKDRLQWVTITSPQAIMMSICLQSMVDELMVKKSGGSIRKMLRRRVGGTLRRSDSQQAVKSPPLLEST

SEQ ID NO: 808682 - protein, 455 aa, Homo sapiens
MHFSIPETESRSGDSGGSAYVAYNIHVNGVLHCRVRYSQLLGLHEQLRKEYGANVLPAFPPKKLFSLTPAEVEQRREQLEKYMQAVRQDPLLGSSETFNSFLRRAQQETQQVPTEEVSLEVLLSNGQKVLVNVLTSDQTEDVLEAVAAKLDLPDDLIGYFSLFLVREKEDGAFSFVRKLQEFELPYVSVTSLRSQEYKIVLRKSYWDSAYDDDVMENRVGLNLLYAQTVSDIERGWILVTKEQHRQLKSLQEKVSKKEFLRLAQTLRHYGYLRFDACVADFPEKDCPVVVSAGNSELSLQLRLPGQQLREGSFRVTRMRCWRVTSSVPLPSGSTSSPGRGRGEVRLELAFEYLMSKDRLQWVTITSPQAIMMSICLQSMVDELMVKKSGGSIRKVGSKCGLSSEQMLRRRVGGTLRRSDSQQAVKSPPLLESPDATRESMVKLSSKLSAGGWGNG

SEQ ID NO: 808683 - protein, 470 aa, Homo sapiens; identical to SEQ ID NO: 808670

SEQ ID NO: 808684 - protein, 473 aa, Homo sapiens
MPRRLRPRTDVPPPSHIGSQGSQNAYNIHVNGVLHCRVRYSQLLGLHEQLRKEYGANVLPAFPPKKLFSLTPAEVEQRREQLEKYMQAVRQDPLLGSSETFNSFLRRAQQETQQVPTEEVSLEVLLSNGQKVLVNVLTSDQTEDVLEAVAAKLDLPDDLIGYFSLFLVREKEDGAFSFVRKLQEFELPYVSVTSLRSQEYKIVLRKSYWDSAYDDDVMENRVGLNLLYAQTVSDIERGWILVTKEQHRQLKSLQEKVSKKEFLRLAQTLRHYGYLRFDACVADFPEKDCPVVVSAGNSELSLQLRLPGQQLREGSFRVTRMRCWRVTSSVPLPSGSTSSPGRGRGEVRLELAFEYLMSKDRLQWVTITSPQAIMMSICLQSMVDELMVKKSGGSIRKMLRRRVGGTLRRSDSQQAVKSPPLLESPDATRESMVKLSSKLSAVSLRGIGSPSTDASASDVHGNFAFEGIGDEDL

SEQ ID NO: 808685 - protein, 256 aa, Homo sapiens
MENRVGLNLLYAQTVSDIERGWILVTKEQHRQLKSLQEKVSKKEFLRLAQTLRHYGYLRFDACVADFPEKDCPVVVSAGNSELSLQLRLPGQQLREGSFRVTRMRCWRVTSSVPLPSGSTSSPGRGRGEVRLELAFEYLMSKDRLQWVTITSPQAIMMSICLQSMVDELMVKKSGGSIRKMLRRRVGGTLRRSDSQQAVKSPPLLESPDATRESMVKLSSKLSAVSLRGIGSPSTDASASDVHGNFAFEGIGDEDL

SEQ ID NO: 808686 - protein, 388 aa, Homo sapiens
MQAVRQDPLLGSSETFNSFLRRAQQETQQVPTEEVSLEVLLSNGQKVLVNVLTSDQTEDVLEAVAAKLDLPDDLIGYFSLFLVREKEDGAFSFVRKLQEFELPYVSVTSLRSQEYKIVLRKSYWDSAYDDDVMENRVGLNLLYAQTVSDIERGWILVTKEQHRQLKSLQEKVSKKEFLRLAQTLRHYGYLRFDACVADFPEKDCPVVVSAGNSELSLQLRLPGQQLREGSFRVTRMRCWRVTSSVPLPSGSTSSPGRGRGEVRLELAFEYLMSKDRLQWVTITSPQAIMMSICLQSMVDELMVKKSGGSIRKMLRRRVGGTLRRSDSQQAVKSPPLLESPDATRESMVKLSSKLSAVSLRGIGSPSTDASASDVHGNFAFEGIGDEDL

SEQ ID NO: 808687 - protein, 388 aa, Homo sapiens
MPQVRQDPLLGSSETFNSFLRRAQQETQQVPTEEVSLEVLLSNGQKVLVNVLTSDQTEDVLEAVAAKLDLPDDLIGYFSLFLVREKEDGAFSFVRKLQEFELPYVSVTSLRSQEYKIVLRKSYWDSAYDDDVMENRVGLNLLYAQTVSDIERGWILVTKEQHRQLKSLQEKVSKKEFLRLAQTLRHYGYLRFDACVADFPEKDCPVVVSAGNSELSLQLRLPGQQLREGSFRVTRMRCWRVTSSVPLPSGSTSSPGRGRGEVRLELAFEYLMSKDRLQWVTITSPQAIMMSICLQSMVDELMVKKSGGSIRKMLRRRVGGTLRRSDSQQAVKSPPLLESPDATRESMVKLSSKLSAVSLRGIGSPSTDASASDVHGNFAFEGIGDEDL

SEQ ID NO: 808688 - protein, 329 aa, Homo sapiens
MHFSIPETESRSGDSGGSAYVAYNIHVNGVLHCRVRYSQLLGLHEQLRKEYGANVLPAFPPKKLFSLTPAEVEQRREQLEKYMQAVRQDPLLGSSETFNSFLRRAQQETQQVPTEEVSLEVLLSNGQKVLVNVLTSDQTEDVLEAVAAKLDLPDDLIGYFSLFLVREKEDGAFSFVRKLQEFELPYVSVTSLRSQEYKIVLRKSYWDSAYDDDVMENRVGLNLLYAQTVSDIERGWILVTKEQHRQLKSLQEKVSKKEFLRLAQTLRHYGYLRFDACVADFPEKDCPVVVSAGNSELSLQLRLPGQQLREGSFRVTRMRSQTVGSVDRR

SEQ ID NO: 808689 - protein, 408 aa, Homo sapiens
MKSKKSQPIFKQLRIKTHRDLEIELGIGQGKGQGSASHPHVCSQQETQQVPTEEVSLEVLLSNGQKVLVNVLTSDQTEDVLEAVAAKLDLPDDLIGYFSLFLVREKEDGAFSFVRKLQEFELPYVSVTSLRSQEYKIVLRKSYWDSAYDDDVMENRVGLNLLYAQTVSDIERGWILVTKEQHRQLKSLQEKVSKKEFLRLAQTLRHYGYLRFDACVADFPEKDCPVVVSAGNSELSLQLRLPGQQLREGSFRVTRMRCWRVTSSVPLPSGSTSSPGRGRGEVRLELAFEYLMSKDRLQWVTITSPQAIMMSICLQSMVDELMVKKSGGSIRKMLRRRVGGTLRRSDSQQAVKSPPLLESPDATRESMVKLSSKLSAVSLRGIGSPSTDASASDVHGNFAFEGIGDEDL

SEQ ID NO: 808690 - protein, 153 aa, Homo sapiens
MRCWRVTSSVPLPSGSTSSPGRGRGEVRLELAFEYLMSKDRLQWVTITSPQAIMMSICLQSMVDELMVKKSGGSIRKMLRRRVGGTLRRSDSQQAVKSPPLLESPDATRESMVKLSSKLSAVSLRGIGSPSTDASASDVHGNFAFEGIGDEDL

SEQ ID NO: 808691 - protein, 236 aa, Homo sapiens
MHFSIPETESRSGDSGGSAYVAYNIHVNGVLHCRVRYSQLLGLHEQLRKEYGANVLPAFPPKKLFSLTPAEVEQRREQLEKYMQAVRQDPLLGSSETFNSFLRRAQQETQQVPTEEVSLEVLLSNGQKVLVNVLTSDQTEDVLEAVAAKLDLPDDLIGYFSLFLVREKEDGAFSFVRKLQEFELPYVSVTSLRSQEYKIVLRKRRYQILSVGGSWSPRNSTGNSNLCKRKSPRRSS

SEQ ID NO: 808692 - protein, 265 aa, Homo sapiens; identical to SEQ ID NO: 808673

SEQ ID NO: 808693 - protein, 212 aa, Homo sapiens; identical to SEQ ID NO: 808674

SEQ ID NO: 808694 - protein, 69 aa, Homo sapiens
MQAVRQDPLLGSSETFNSFLRRAQQETQQVPTEEVSLEVLLSNGQKVLVNVLTSDQTEDVLELSIVLQG

SEQ ID NO: 808695 - protein, 511 aa, Homo sapiens
ISFRAGALDCITVPVVFTINERAEPLRPSQSGARPCRAVGNMHFSIPETESRSGDSGGSAYVAYNIHVNGVLHCRVRYSQLLGLHEQLRKEYGANVLPAFPPKKLFSLTPAEVEQRREQLEKYMQAVRQDPLLGSSETFNSFLRRAQQETQQVPTEEVSLEVLLSNGQKVLVNVLTSDQTEDVLEAVAAKLDLPDDLIGYFSLFLVREKEDGAFSFVRKLQEFELPYVSVTSLRSQEYKIVLRKSYWDSAYDDDVMENRVGLNLLYAQTVSDIERGWILVTKEQHRQLKSLQEKVSKKEFLRLAQTLRHYGYLRFDACVADFPEKDCPVVVSAGNSELSLQLRLPGQQLREGSFRVTRMRCWRVTSSVPLPSGSTSSPGRGRGEVRLELAFEYLMSKDRLQWVTITSPQAIMMSICLQSMVDELMVKKSGGSIRKMLRRRVGGTLRRSDSQQAVKSPPLLESPDATRESMVKLSSKLSAVSLRGIGSPSTDASASDVHGNFAFEGIGDEDL

SEQ ID NO: 808696 - protein, 397 aa, Homo sapiens
MHFSIPETESRSGDSGGSAYVAYNIHVNGVLHCRVRYSQLLGLHEQLRKEYGANVLPAFPPKKLFSLTPAEVEQRREQLEKYMQAVRQDPLLGSSETFNSFLRRAQQETQQVPTEEVSLEVLLSNGQKVLVNVLTSDQTEDVLEAVAAKLDLPDDLIGYFSLFLVREKEDGAFSFVRKLQEFELPYVSVTSLRSQEYKIVLRKSYWDSAYDDDVMENRVGLNLLYAQTVSDIERGWILVTKEQHRQLKSLQEKVSKKEFLRLAQTLRHYGYLRFDACVADFPEKDCPVVVSAGNSELSLQLRLPGQQLREGSFRVTRMRCWRVTSSVPLPSGSTSSPGRGRGEVRLELAFEYLWFPLTAPASPITAWTTMLRVRPNCLPLPIQHRHGFVSVSFIIKH

SEQ ID NO: 808697 - protein, 256 aa, Homo sapiens; identical to SEQ ID NO: 808685

SEQ ID NO: 808698 - protein, 388 aa, Homo sapiens; identical to SEQ ID NO: 808686

SEQ ID NO: 808699 - protein, 256 aa, Homo sapiens; identical to SEQ ID NO: 808685

SEQ ID NO: 808700 - protein, 256 aa, Homo sapiens; identical to SEQ ID NO: 808685

SEQ ID NO: 808701 - protein, 277 aa, Homo sapiens
MHFSIPETESRSGDSGGSAYVAYNIHVNGVLHCRVRYSQLLGLHEQLRKEYGANVLPAFPPKKLFSLTPAEVEQRREQLEKYMQAVRQDPLLGSSETFNSFLRRAQQETQQVPTEEVSLEVLLSNGQKVLVNVLTSDQTEDVLEAVAAKLDLPDDLIGYFSLFLVREKEDGAFSFVRKLQEFELPYVSVTSLRSQEYKIVLRKSYWDSAYDDDVMENRVGLNLLYAQTVSDIERGWILVTKEQHRQLKSLQEKVSKKEFLSLALALLEMLTGFLQRH

SEQ ID NO: 808702 - protein, 117 aa, Homo sapiens
HLNYRFPSSVPLVRHAIMMSICLQSMVDELMVKKSGGSIRKMLRRRVGGTLRRSDSQQAVKSPPLLESPDATRESMVKLSSKLSAVSLRGIGSPSTDASASDVHGNFAFEGIGDEDL

SEQ ID NO: 808703 - protein, 320 aa, Homo sapiens
MHFSIPETESRSGDSGGSAYVAYNIHVNGVLHCRVRYSQLLGLHEQLRKEYGANVLPAFPPKKLFSLTPAEVEQRREQLEKYMQAVRQDPLLGSSETFNSFLRRAQQETQQVPTEEVSLEVLLSNGQKVLVNVLTSDQTEDVLEAVAAKLDLPDDLIGYFSLFLVREKEDGAFSFVRKLQEFELPYVSVTSLRSQEYKIVLRKRLGPDYMRSHEHGVAAKEKEKDNTLTPLRYTPQPTPQDHLQQPPEESRKGQQEAKGDEREQRYTDKQRRVPTPERKTDQESEQKNQDTTLSNATRKPQGEDTQPDDTRQTRQHHTGT

SEQ ID NO: 808704 - protein, 122 aa, Homo sapiens
MRWGPALRGRETRPSCPTVAMHLLVALVVVPVARGIGAGGTAEGLLACVPQHVTFEVHALVAAVVAKATPKRFVTRVDATMTLEVGQIATGIRAEGALVGLLSCMDAPWCRFQVIQMSRGIR

SEQ ID NO: 808705 - protein, 235 aa, Homo sapiens
MATWDEKAVTRRAKVAPAERMSKFLRHFTVVGDDYHAWNINYKKWENEEEEEEEEQPPPTPVSGVIIICLVVLDALLVLAELILDLKIIQPDKNNYAAMVFHYMSITILVFFMMEIIFKLFVFRLEFFHHKFEILDAVVVVVSFILDIVLLFQEHQFEALGLLILLRLWRVARIINGIIISVKTRSERQLLRLKQMNVQLAAKIQHLEFSCSEKEQEIERLNKLLRQHGLLGEVN

SEQ ID NO: 808706 - protein, 273 aa, Homo sapiens
MATWDEKAVTRRAKVAPAERMSKFLRHFTVVGDDYHAWNINYKKWENEEEEEEEEQPPPTPVSGEEGRAAAPDVAPAPGPAPRAPLDFRGMLRKLFSSHRFQVIIICLVVLDALLVLAELILDLKIIQPDKNNYAAMVFHYMSITILVFFMMEIIFKLFVFRLEFFHHKFEILDAVVVVVSFILDIVLLFQEHQFEALGLLILLRLWRVARIINGIIISVKTRSERQLLRLKQMNVQLAAKIQHLEFSCSEKEQEIERLNKLLRQHGLLGEVN

SEQ ID NO: 808707 - protein, 273 aa, Homo sapiens; identical to SEQ ID NO: 808706

SEQ ID NO: 808708 - protein, 273 aa, Homo sapiens; identical to SEQ ID NO: 808706

SEQ ID NO: 808709 - protein, 364 aa, Homo sapiens
PREVLRAERLLIRQSVLPTLHPCMAETVQGTRPRNQETQRQGWPGDGGMEQKLPERGWRGGFAPLQPAEEVKKPRRREAKPLALGHTAKGGRARTHNQAVTRRAKVAPAERMSKFLRHFTVVGDDYHAWNINYKKWENEEEEEEEEQPPPTPVSGEEGRAAAPDVAPAPGPAPRAPLDFRGMLRKLFSSHRFQVIIICLVVLDALLVLAELILDLKIIQPDKNNYAAMVFHYMSITILVFFMMEIIFKLFVFRLEFFHHKFEILDAVVVVVSFILDIVLLFQEHQFEALGLLILLRLWRVARIINGIIISVKTRSERQLLRLKQMNVQLAAKIQHLEFSCSEKEQEIERLNKLLRQHGLLGEVN

SEQ ID NO: 808710 - protein, 310 aa, Homo sapiens
SEAPSRSGDRGRVGRRVKKPRRREAKPLALGHTAKGGRARTHNQAVTRRAKVAPAERMSKFLRHFTVVGDDYHAWNINYKKWENEEEEEEEEQPPPTPVSGEEGRAAAPDVAPAPGPAPRAPLDFRGMLRKLFSSHRFQVIIICLVVLDALLVLAELILDLKIIQPDKNNYAAMVFHYMSITILVFFMMEIIFKLFVFRLEFFHHKFEILDAVVVVVSFILDIVLLFQEHQFEALGLLILLRLWRVARIINGIIISVKTRSERQLLRLKQMNVQLAAKIQHLEFSCSEKEQEIERLNKLLRQHGLLGEVN

SEQ ID NO: 808711 - protein, 253 aa, Homo sapiens
MSKFLRHFTVVGDDYHAWNINYKKWENEEEEEEEEQPPPTPVSGEEGRAAAPDVAPAPGPAPRAPLDFRGMLRKLFSSHRFQVIIICLVVLDALLVLAELILDLKIIQPDKNNYAAMVFHYMSITILVFFMMEIIFKLFVFRLEFFHHKFEILDAVVVVVSFILDIVLLFQEHQFEALGLLILLRLWRVARIINGIIISVKTRSERQLLRLKQMNVQLAAKIQHLEFSCSEKEQEIERLNKLLRQHGLLGEVN

SEQ ID NO: 808712 - protein, 273 aa, Homo sapiens; identical to SEQ ID NO: 808706

SEQ ID NO: 808713 - protein, 235 aa, Homo sapiens; identical to SEQ ID NO: 808705

SEQ ID NO: 808714 - protein, 151 aa, Homo sapiens
MATWDEKAVTRRAKVAPAERMSKFLRHFTVVGDDYHAWNINYKKWENEEEEEEEEQPPPTPVSGEEGRAAAPDVAPAPGPAPRAPLDFRGMLRKLFSSHRFQVIIICLVVLDALLVLAELILDLKIIQPDKNNYAAMGLSSQLRHVQNGNS

SEQ ID NO: 808715 - protein, 267 aa, Homo sapiens
AGPAAPDAGCALPGAERPRARARATGPAGAVLIPSPVKSYRGWLVMGEPSREEYKIQSFDAETQQLLKTALKDPGAVDLEKVANVIVDHSLQDCVFSKEAGRMCYAIIQAESKQAGQSVFRRGLLNRLQQEYQAREQLRARSLQGWVCYVTFICNIFDYLRVNNMPMMALVNPVYDCLFRLAQPDSLSKEEEVDCLVLQLHRVGEQLEKMNGQRMDELFVLIRDGFLLPTGLSSLAQLLLLEIIEFRAAGWKTTPAAHKYYYSEVSD

SEQ ID NO: 808716 - protein, 222 aa, Homo sapiens
MGEPSREEYKIQSFDAETQQLLKTALKDPGAVDLEKVANVIVDHSLQDCVFSKEAGRMCYAIIQAESKQAGQSVFRRGLLNRLQQEYQAREQLRARSLQGWVCYVTFICNIFDYLRVNNMPMMALVNPVYDCLFRLAQPDSLSKEEEVDCLVLQLHRVGEQLEKMNGQRMDELFVLIRDGFLLPTGLSSLAQLLLLEIIEFRAAGWKTTPAAHKYYYSEVSD

SEQ ID NO: 808717 - protein, 299 aa, Homo sapiens
RLSRPRDPGPWAPQPALCLREGRSGRGGNGRGLETLKAPPTARGEPPAGATSPGRIILPPSAVLIPSPVKSYRGWLVMGEPSREEYKIQSFDAETQQLLKTALKDPGAVDLEKVANVIVDHSLQDCVFSKEAGRMCYAIIQAESKQAGQSVFRRGLLNRLQQEYQAREQLRARSLQGWVCYVTFICNIFDYLRVNNMPMMALVNPVYDCLFRLAQPDSLSKEEEVDCLVLQLHRVGEQLEKMNGQRMDELFVLIRDGFLLPTGLSSLAQLLLLEIIEFRAAGWKTTPAAHKYYYSEVSD

SEQ ID NO: 808718 - protein, 282 aa, Homo sapiens
MGEPSREEYKIQSFDAETQQLLKTALKDPGAVDLEKVANVIVDHSLQDCVFSKEAGRMCYAIIQVGGWERKGSCFEEGASGVGRRPGLQDRDAQGLAQREKRHRMGGVTGAPPPTLHLPLPGSQAESKQAGQSVFRRGLLNRLQQEYQAREQLRARSLQGWVCYVTFICNIFDYLRVNNMPMMALVNPVYDCLFRLAQPDSLSKEEEVDCLVLQLHRVGEQLEKMNGQRMDELFVLIRDGFLLPTGLSSLAQLLLLEIIEFRAAGWKTTPAAHKYYYSEVSD

SEQ ID NO: 808719 - protein, 290 aa, Homo sapiens
AGPAAPDAGCALPGAERPRARARATGPAGAVLIPSPVKSYRGWLVMGEPSREEYTPSLECTVACFETEDGEYSVCQRSYSNCSRLMPSRCNTQYRDPGAVDLEKVANVIVDHSLQDCVFSKEAGRMCYAIIQAESKQAGQSVFRRGLLNRLQQEYQAREQLRARSLQGWVCYVTFICNIFDYLRVNNMPMMALVNPVYDCLFRLAQPDSLSKEEEVDCLVLQLHRVGEQLEKMNGQRMDELFVLIRDGFLLPTGLSSLAQLLLLEIIEFRAAGWKTTPAAHKYYYSEVSD

SEQ ID NO: 808720 - protein, 267 aa, Homo sapiens; identical to SEQ ID NO: 808715

SEQ ID NO: 808721 - protein, 170 aa, Homo sapiens
MGEPSREEYKIQSFDAETQQLLKTALKDPGAVDLEKVANVIVDHSLQDCVFSKEAGRMCYAIIQVNNMPMMALVNPVYDCLFRLAQPDSLSKEEEVDCLVLQLHRVGEQLEKMNGQRMDELFVLIRDGFLLPTGLSSLAQLLLLEIIEFRAAGWKTTPAAHKYYYSEVSD

SEQ ID NO: 808722 - protein, 249 aa, Homo sapiens
AGPAAPDAGCALPGAERPRARARATGPAGAVLIPSPVKSYRGWLVMGEPSREEYKIQSFDAETQQLLKTALKDPGAVDLEKVANVIVDHSLQDCVFSKEAGRMCYAIIQAESKQAGQSVFRRGLLNRLQQEYQAREQLRARSLQGWVCYVTFICNIFDYLRVNNMPMMALVNPVYDCLFRLAQPDSLSKEEEVDCLVLQLHRVGEQLELLPTGLSSLAQLLLLEIIEFRAAGWKTTPAAHKYYYSEVSD

SEQ ID NO: 808723 - protein, 267 aa, Homo sapiens; identical to SEQ ID NO: 808715

SEQ ID NO: 808724 - protein, 267 aa, Homo sapiens; identical to SEQ ID NO: 808715

SEQ ID NO: 808725 - protein, 37 aa, Homo sapiens
MNGQRMDELFVLIRDGFLLPTGLSSLAQLLLLEIIEF

SEQ ID NO: 808726 - protein, 308 aa, Homo sapiens
AGPAAPDAGCALPGAERPRARARATGPAGAVLIPSPVKSYRGWLVMGEPSREEYKIQSFDAETQQLLKTALKAPSLECTVACFETEDGEYSVCQRSYSNCSRLMPSRCNTQYRDPGAVDLEKVANVIVDHSLQDCVFSKEAGRMCYAIIQAESKQAGQSVFRRGLLNRLQQEYQAREQLRARSLQGWVCYVTFICNIFDYLRVNNMPMMALVNPVYDCLFRLAQPDSLSKEEEVDCLVLQLHRVGEQLEKMNGQRMDELFVLIRDGFLLPTGLSSLAQLLLLEIIEFRAAGWKTTPAAHKYYYSEVSD

SEQ ID NO: 808727 - protein, 256 aa, Homo sapiens
MGEPSREEYKIQSFDAETQQLLKTALKVACFETEDGEYSVCQRSYSNCSRLMPSRCNTQYRDPGAVDLEKVANVIVDHSLQDCVFSKEAGRMCYAIIQAESKQAGQSVFRRGLLNRLQQEYQAREQLRARSLQGWVCYVTFICNIFDYLRVNNMPMMALVNPVYDCLFRLAQPDSLSKEEEVDCLVLQLHRVGEQLEKMNGQRMDELFVLIRDGFLLPTGLSSLAQLLLLEIIEFRAAGWKTTPAAHKYYYSEVSD

SEQ ID NO: 808728 - protein, 323 aa, Homo sapiens
MGEPSREEYKIQSFDAETQQLLKTALKAPSLECTVACFETEDGEYSVCQRSYSNCSRLMPSRCNTQYRDPGAVDLEKVANVIVDHSLQDCVFSKEAGRMCYAIIQVGGWERKGSCFEEGASGVGRRPGLQDRDAQGLAQREREARMGGVTGAPPPTLHLPLPGSQAESKQAGQSVFRRGLLNRLQQEYQAREQLRARSLQGWVCYVTFICNIFDYLRVNNMPMMALVNPVYDCLFRLAQPDSLSKEEEVDCLVLQLHRVGEQLEKMNGQRMDELFVLIRDGFLLPTGLSSLAQLLLLEIIEFRAAGWKTTPAAHKYYYSEVSD

SEQ ID NO: 808729 - protein, 178 aa, Homo sapiens [sequence omitted]

SEQ ID NO: 808730 - protein, 204 aa, Homo sapiens
MGEPSREEYKIQSFDAETQQLLKTALKDPGAVDLEKVANVIVDHSLQDCVFSKEAGRMCYAIIQAESKQAGQSVFRRGLLNRLQQEYQAREQLRARSLQGWVCYVTFICNIFDYLRVNNMPMMALVNPVYDCLFRLAQPDSLSKEEEVDCLVLQLHRVGEQLELLPTGLSSLAQLLLLEIIEFRAAGWKTTPAAHKYYYSEVSD

SEQ ID NO: 808731 - protein, 267 aa, Homo sapiens; identical to SEQ ID NO: 808715

SEQ ID NO: 808732 - protein, 621 aa, Homo sapiens
MTKAMKVKTPLRALKSLWDYDFLIYDGVIDNTAPDFLAFKEHFSLAWGGIFSLLEHVEKFLRNYAIPEVKIKGNNLVALLPEFELTNKLTRYDLLSVLEDPAHVQMLINLPGQRYKGQDGNSEAAMKIQATWKCYKARKFFLFYRQQKWASGVIAIAWLLYCHKTRLKKILKESRQRHLENFRIRAKHLAANWNRIRTSRRTIIHIPSLGYSQPVREHIADFNTQQNMQLGRLCDILDANVNVIYICSHHMNDELVLYYKKILSLHAAVKSGNLEDRSDLQDRFKIITPEAVNIFPMIEQLSQLITDHLQIQRWLFKMDSEFRGNGTAFCDIPSYLKCYKWVLKESSRYGLEDWRKKWAQEPALVKISEELAGILAQHAQPVNEKRFPTWRKFLQTFLSQGGVIEAFPPADNVTNLTVDMLIEPNGKISVLSTGDQLHAESPFISSGTTVPQTSVDPQVLTYLCLQIGKACRMRDVVGYFSIDLVTFIDPSTLEQQVWATGLNLAYSDQLALTQLTLYLTNGHLDCSLSTLEVPRFVPKERKKTKCMSALSMPMLATSRYAVMTTQLRHSNLSLVFHYVFLQICRAHGIGYDLENNRRGSPGGPHDLCSPSLHHPSRNIST

SEQ ID NO: 808733 - protein, 168 aa, Homo sapiens
MAQNTENHDPVGSILIQIHEDLYQLKEKLTKFSPEEKGETLDIQSLETAIKRTEVGLRIHIEKYLNVVNQNVLTTSVNDESLYTPQASKWLLPTVIDQKSFIFPQESEGTFWQPQRQHSSSLPVFPRAKRKIGLNVKILQDPENIHHRAAVNANYGISLPYINQRKAC

SEQ ID NO: 808734 - protein, 1027 aa, Homo sapiens
MAQNTENHDPVGSILIQIHEDLYQLKEKLTKFSPEEKGETLDIQSLETAIKRTEVGLRIHIEKYLNVVNQNVLTTSVNDESLYTPQASKWLLPTVIDQKSFIFPQESEGTFWQPQRQHSSSLPVFPRAKIKVSKLIKGSNISSLTVLPSSHCTDPYFTPIPVLQADAHKGILSMIERGLIPPTARITFQNPPITPRAAPLHSFDEARKIPTVATFTIPREPPPSPAEVKFFPKKQRSKGKSRRSRGHHDRKAMKVKTPLRALKSLWDYDFLIYDGVIDNTAPDFLAFKEHFSLAWGGIFSLLEHVEKFLRNYAIPEVKIKGNNLVALLPEFELTNKLTRYDLLSVLEDPAHVQMLINLPGQRYKGQDGNSEAAMKIQATWKCYKARKFFLFYRQQKWASGVIAIAWLLYCHKTRLKKILKESRQRHLENFRIRAKHLAANWNRIRTSRRTIIHIPSLGYSQPVREHIADFNTQQNMQLGRLCDILDANVNVIYICSHHMNDELVLYYKKILSLHAAVKSGNLEDRSDLQDRFKIITPEAVNIFPKHHMCLATHLMYSPKAIKRIKNLIRGTEAYIVSGLLHRDDLAVADMLDIPILGSEPELAHLYSTKSGGKRVFDSANVAVPPGIYDIYSQQQMIEQLSQLITDHLQIQRWLFKMDSEFRGNGTAFCDIPSYLKCYKWVLKESSRYGLEDWRKKWAQEPALVKISEELAGILAQHAQPVNEKRFPTWRKFLQTFLSQGGVIEAFPPADNVTNLTVDMLIEPNGKISVLSTGDQLHAESPFISSGTTVPQTSVDPQVLTYLCLQIGKACRMRDVVGYFSIDLVTFIDPSTLEQQVWATGLNLAYSDQLALTQLTLYLTNGHLDCSLSTLEVPRFVPKERKKTKCMSALSMPMLATSRYAVMTTQLRHSNLSLVFHYVFLQICRAHGIGYDLEERQGTVFILYEHLKRHKLGMLTIGEDLQGVLMTFARHLFIIHQEISAPNMQGETNFKTTIADIETILRVTKENKMRFEEEQQSKDDKNLSKPKK

SEQ ID NO: 808735 - protein, 854 aa, Homo sapiens [sequence omitted]

SEQ ID NO: 808736 - protein, 775 aa, Homo sapiens
MKVKTPLRALKSLWDYDFLIYDGVIDNTAPDFLAFKEHFSLAWGGIFSLLEHVEKFLRNYAIPEVKIKGNNLVALLPEFELTNKLTRYDLLSVLEDPAHVQMLINLPGQRYKGQDGNSEAAMKIQATWKCYKARKFFLFYRQQKWASGVIAIAWLLYCHKTRLKKILKESRQRHLENFRIRAKHLAANWNRIRTSRRTIIHIPSLGYSQPVREHIADFNTQQNMQLGRLCDILDANVNVIYICSHHMNDELVLYYKKILSLHAAVKSGNLEDRSDLQDRFKIITPEAVNIFPKHHMCLATHLMYSPKAIKRIKNLIRGTEAYIVSGLLHRDDLAVADMLDIPILGSEPELAHLYSTKSGGKRVFDSANVAVPPGIYDIYSQQQMIEQLSQLITDHLQIQRWLFKMDSEFRGNGTAFCDIPSYLKCYKWVLKESSRYGLEDWRKKWAQEPALVKISEELAGILAQHAQPVNEKRFPTWRKFLQTFLSQGGVIEAFPPADNVTNLTVDMLIEPNGKISVLSTGDQLHAESPFISSGTTVPQTSVDPQVLTYLCLQIGKACRMRDVVGYFSIDLVTFIDPSTLEQQVWATGLNLAYSDQLALTQLTLYLTNGHLDCSLSTLEVPRFVPKERKKTKCMSALSMPMLATSRYAVMTTQLRHSNLSLVFHYVFLQICRAHGIGYDLEERQGTVFILYEHLKRHKLGMLTIGEDLQGVLMTFARHLFIIHQEISAPNMQGETNFKTTIADIETILRVTKENKMRFEEEQQSKDDKNLSKPKK

SEQ ID NO: 808737 - protein, 341 aa, Homo sapiens
MQSHFLELRVHFKEPALVKISEELAGILAQHAQPVNEKRFPTWRKFLQTFLSQGGVIEAFPPADNVTNLTVDMLIEPNGKISVLSTGDQLHAESPFISSGTTVPQTSVDPQVLTYLCLQIGKACRMRDVVGYFSIDLVTFIDPSTLEQQVWATGLNLAYSDQLALTQLTLYLTNGHLDCSLSTLEVPRFVPKERKKTKCMSALSMPMLATSRYAVMTTQLRHSNLSLVFHYVFLQICRAHGIGYDLEERQGTVFILYEHLKRHKLGMLTIGEDLQGVLMTFARHLFIIHQEISAPNMQGETNFKTTIADIETILRVTKENKMRFEEEQQSKDDKNLSKPKK

SEQ ID NO: 808738 - protein, 305 aa, Homo sapiens
MIERGLIPPTARITFQNPPITPRAAPLHSFDEARKIPTVATFTIPREPPPSPAEVKFFPKKQRSKGKSRRSRGHHDRKAMKVKTPLRALKSLWDYDFLIYDGVIDNTAPDFLAFKEHFSLAWGGIFSLLEHVEKFLRNYAIPEVKIKGNNLVALLPEFELTNKLTRYDLLSVLEDPAHVQMLINLPGQRYKGQDGNSEAAMKIQATWKCYKARKFFLFYRQQKWASGVIAIAWLLYCHKTRLKKILKESRQRHLENFRIRAKHLAANWNRIRTSRRTIIHIPSLGITLLPANLSATSITHHIMAP

SEQ ID NO: 808739 - protein, 854 aa, Homo sapiens [sequence omitted]

SEQ ID NO: 808740 - protein, 90 aa, Homo sapiens
  misc_feature (16)..(16): Xaa can be any naturally occurring amino acid
EEEELGGRFKQGNKAXVTIGEDLQGVLMTFARHLFIIHQEISAPNMQGETNFKTTIADIETILRVTKENKMRFEEEQQSKDDKNLSKPKK

SEQ ID NO: 808741 - protein, 257 aa, Homo sapiens
MAQNTENHDPVGSILIQIHEDLYQLKEKLTKFSPEEKGETLDIQSLETAIKRTEVGLRIHIEKYLNVVNQNVLTTSVNDESLYTPQASKWLLPTVIDQKSFIFPQESEGTFWQPQRQHSSSLPVFPRAKIKVSKLIKGSNISSLTVLPSSHCTDPYFTPIPVLQADAHKGILSMIERGLIPPTARITFQNPPITPRAAPLHSFDEARKIPTVATFTIPREPPPSPAEVKFFPKKQRSKGKSRRSRGHHDRKVCNLCD

SEQ ID NO: 808742 - protein, 335 aa, Homo sapiens
MTENVVCTGAVNAVKEVWEKRIKKLNEDLKREKEFQHKLVRIWEERVSLTKLREKVTREDGRVILKIEKEEWKTLPSSLLKLNQLQEWQLHRTGLLKIPEFIGRFQNLMVLDLSRNTISEIPPGIGLLTRLQELILRYNKIKTVPKELSNCASLEKLELAVNRDICDLPQELSNLLKLTHLDLSMNDFTTIPLAVLNMPALEWLDMGSNKLEQLPDTIERMQNLHTLWLQRNEITCLPQTISNMKNLGTLVLSNNKLQDIPVCMEEMANLRFVNFRDNPLKLKVSLPPSEGTDEEEERELFGLQFMHTYIQESRRRADHQVNGSTTLPISINTDG

SEQ ID NO: 808743 - protein, 175 aa, Homo sapiens
MTENVVCTGAVNAVKEVWEKRIKKLNEDLKREKEFQHKLVRIWEERVSLTKLREKVTREDGRVILKIEKEEWKTLPSSLLKLNQLQEWQLHRTGLLKIPEFIGRFQNLMVLDLSRNTISEIPPGIGLLTRLQELILRYNKIKTVPKELSNCASLEKLELAVNRDICDLPQEVRKT

SEQ ID NO: 808744 - protein, 335 aa, Homo sapiens; identical to SEQ ID NO: 808742

SEQ ID NO: 808745 - protein, 335 aa, Homo sapiens; identical to SEQ ID NO: 808742

SEQ ID NO: 808746 - protein, 167 aa, Homo sapiens
RRKCPSDDRKPGGRGEKEREKGKDKSGEAGRREAGLKRQRAAFVRRELGRGPAPRSPAPHRVLHRLPRRAAGRGRAGGGLLQAARSEPPAGLGRGAGPAAALPGSVLPLWDLATAAEGEGSGARAGAGGGWGGGRAAAGLGLGIRIGIGPPWTTRRSPRSWTSGSSS

SEQ ID NO: 808747 - protein, 309 aa, Homo sapiens
MDDKAFTKELDQWVEQLNECKQLNENQVRTLCEKAKEILTKESNVQEVRCPVTVCGDVHGQFHDLMELFRIGGKSPDTNYLFMGDYVDRGYYSVETVTLLVALKVRYPERITILRGNHESRQITQVYGFYDECLRKYGNANVWKYFTDLFDYLPLTALVDGQIFCLHGGLSPSIDTLDHIRALDRLQEVPHEGPMCDLLWSDPDDRGGWGISPRGAGYTFGQDISETFNHANGLTLVSRAHQLVMEGYNWCHDRNVVTIFSAPNYCYRCGNQAAIMELDDTLKYSFLQFDPAPRRGEPHVTRRTPDYFL

SEQ ID NO: 808748 - protein, 309 aa, Homo sapiens; identical to SEQ ID NO: 808747

SEQ ID NO: 808749 - protein, 115 aa, Homo sapiens
MCDLLWSDPDDRGGWGISPRGAGYTFGQDISETFNHANGLTLVSRAHQLVMEGYNWCHDRNVVTIFSAPNYCYRCGNQAAIMELDDTLKYSFLQFDPAPRRGEPHVTRRTPDYFL

SEQ ID NO: 808750 - protein, 309 aa, Homo sapiens; identical to SEQ ID NO: 808747

SEQ ID NO: 808751 - protein, 309 aa, Homo sapiens; identical to SEQ ID NO: 808747

SEQ ID NO: 808752 - protein, 253 aa, Homo sapiens
MDDKAFTKELDQWVEQLNECKQLNENQVRTLCEKAKEILTKESNVQEVRCPVTVCGDVHGQFHDLMELFRIGGKSPDTNYLFMGDYVDRGYYSVETVTLLVALKVRYPERITILRGNHESRQITQVYGFYDECLRKYGNANVWKYFTDLFDYLPLTALVDGQIFCLHGGLSPSIDTLDHIRALDRLQEVPHEGPMCDLLWSDPDDRGGWGISPRGAGYTFGQDISETFNHANGLTLVSRAHQLVMEVCTFLTE

SEQ ID NO: 808753 - protein, 179 aa, Homo sapiens
MDDKAFTKELDQWVEQLNECKQLNENQVRTLCEKAKEILTKESNVQEVRCPVTVCGDVHGQFHDLMELFRIGGKSPDTNYLFMGDYVDRGYYSVETVTLLVALKVRYPERITILRGNHESRQITQVYGFYDECLRKYGNANVWKYFTDLFDYLPLTALVDGQVCICVLTSWEEVNGSRD

SEQ ID NO: 808754 - protein, 244 aa, Homo sapiens
MELFRIGGKSPDTNYLFMGDYVDRGYYSVETVTLLVALKVRYPERITILRGNHESRQITQVYGFYDECLRKYGNANVWKYFTDLFDYLPLTALVDGQIFCLHGGLSPSIDTLDHIRALDRLQEVPHEGPMCDLLWSDPDDRGGWGISPRGAGYTFGQDISETFNHANGLTLVSRAHQLVMEGYNWCHDRNVVTIFSAPNYCYRCGNQAAIMELDDTLKYSFLQFDPAPRRGEPHVTRRTPDYFL

SEQ ID NO: 808755 - protein, 324 aa, Homo sapiens
MDDKAFTKELDQWVEQLNECKQLNENQVRTLCEKAKEILTKESNVQEVRCPVTVCGDVHGQFHDLMELFRIGGKSPDTNYLFMGDYVDRGYYSVETVTLLVALKVRYPERITILRGNHESRQITQVYGFYDECLRKYGNANVWKYFTDLFDYLPLTALVDGQIFCLHGGLSPSIDTLDHIRALDRLQEVPHEGPMCDLLWSDPDDRGGWGISPRGAGYTFGQDISETFNHANGLTLVSRAHQLVMEGYNWCHDRNVVTIFSAPNYCYRCGNQAAIMELDDTLKYSFYTAHPRLLPINFSWETCLCMWKYTWLFKIYVFKNKKQQ

SEQ ID NO: 808756 - protein, 309 aa, Homo sapiens; identical to SEQ ID NO: 808747

SEQ ID NO: 808757 - protein, 179 aa, Homo sapiens; identical to SEQ ID NO: 808753

SEQ ID NO: 808758 - protein, 109 aa, Homo sapiens
ACMLGSPGSAAFTHCRSAAAAVKENLSGRAHLLLLGSCAQAVPAASNTHPLDFYGADSSPSSLGSNVTFTVKATHGWVCGCAGSAPSKGPEWKNELTSVLYYTKTMLST

SEQ ID NO: 808759 - protein, 100 aa, Homo sapiens
MWVNPEEVLLANALWITERANPYFILQRRKGHAGDGGGGGGLAGLLVGTLDVVLDSSARVAPYRILYQTPDSLVYWTIACGVVPGKKSLNTGEWVEQNLL

SEQ ID NO: 808760 - protein, 106 aa, Homo sapiens
TTCQNKGPMTASLRQTGFQVTVAKRNTYPALISQGEDKMTKRKKLRTSAPLMRKQDLPAGSSVNQKRSQLPFLLPRTHSGGLFPSLQNPGSWPPLSRAHPVRICKF

SEQ ID NO: 808761 - protein, 550 aa, Homo sapiens
MKDEDRGSGAFSLETIAESSAQSPGCQLLVETLGVPLQEATELGDPTQADSARPEQSSQSPVQAVPGSGDSQPDDPPDRGTGLSASQRASQDHLSEQGADDSKPETDRVPGDGGQKEHLPSIDSEGEKPDRGAPQEGGAQRTAGAGLPGGPQEEGDGVPCTPASAPTSGPAPGLGPASWCLEPGSVAQGSPDPQQTPSRMGREGEGTHSSLGCSSLGMVVIADLSTDPTELEERALEVAGPDGQASAISPASPRRKAADGGHRRALPGCTSLTGETTGESGEAGQDGKPPGDVLVGPTASLALAPGSGESMMGAGDSGHASPDTGPCVNQKQEPGPAQEEAELGGQNLERDLEGFRVSPQASVVLEHREIADDPLQEPGAQQGIPDTTSELAGQRDHLPHSADQGTWADSLAVELDFLLDSQIQDALDASDFEAPPEQLFPSGNKPGPCWPGPSSHANGDPVAVAKAQPRTFVGIQASEASRMEDATNVVRGLIVELSNLNRLIMGTHRDLEAFKRLNYRKTKLGGKAPLPYPSKGPGNIPRGDPPWREL

SEQ ID NO: 808762 - protein, 900 aa, Homo sapiens
ASARGSRGSFPLVHLQGWMPGPPAPKPGLALPPSPGSVAAHSPFLSPALLVGAPRPSIPSPRFPAWPSHFRLGPRAPPHRSAATGLAGSAEPKLQLPAGSAWARRRLAGAVLTVAGCEGGVCALMRGAGPRGARERGRARAGVRGGDICGVQSVCQSPTGSGFTWALGLWSPHFSVVGVVSVWGLSPGAGSTAPTLRPFHLSPPDSRPPAFCEGQFGHLFFPKRVTRIIQATYSQLIQAELVSDKDRGSSTTSVAQISQGEDKMTKRKKLRTSGEGLCPPKPLKNPRLGDFYGDPQSSMLGCLHHPEEPEGKLGPVPSTQQHGEEPGKAVSSSPDEETGSPCRLLRQPEKEPAPLPPSQNSFGRFVPQFAKSRKTVTRKEEMKDEDRGSGAFSLETIAESSAQSPGCQLLVETLGVPLQEATELGDPTQADSARPEQSSQSPVQAVPGSGDSQPDDPPDRGTGLSASQRASQDHLSEQGADDSKPETDRVPGDGGQKEHLPSIDSEGEKPDRGAPQEGGAQRTAGAGLPGGPQEEGDGVPCTPASAPTSGPAPGLGPASWCLEPGSVAQGSPDPQQTPSRMGREGEGTHSSLGCSSLGMVVIADLSTDPTELEERALEVAGPDGQASAISPASPRRKAADGGHRRALPGCTSLTGETTGESGEAGQDGKPPGDVLVGPTASLALAPGSGESMMGAGDSGHASPDTGPCVNQKQEPGPAQEEAELGGQNLERDLEGFRVSPQASVVLEHREIADDPLQEPGAQQGIPDTTSELAGQRDHLPHSADQGTWADSLAVELDFLLDSQIQDALDASDFEAPPEQLFPSGNKPGPCWPGPSSHANGDPVAVAKAQPSRLIMGTHRDLEAFKRLNYRKTKLGGKAPLPYPSKGPGNIPRGDPPWREL

SEQ ID NO: 808763 - protein, 862 aa, Homo sapiens
ASARGSRGSFPLVHLQGWMPGPPAPKPGLALPPSPGSVAAHSPFLSPALLVGAPRPSIPSPRFPAWPSHFRLGPRAPPHRSAATGLAGSAEPKLQLPAGSAWARRRLAGAVLTVAGCEGGVCALMRGAGPRGARERGRARAGVRGGDICGVQSVCQSPTGSGFTWALGLWSPHFSVVGVVSVWGLSPGAGSTAPTLRPFHLSPPDSRPPAFCEGQFGHLFFPKRVTRIIQATYSQLIQAELVSDKDRGSSTTSVAQISQGEDKMTKRKKLRTSGEGLCPPKPLKNPRLGDFYGDPQSSMLGCLHHPEEPEGKLGPVPSTQQHGEEPGKAVSSSPDEETGSPCRLLRQPEKEPAPLPPSQNSFGRFVPQFAKSRKTVTRKEEMKDEDRGSGAFSLETIAESSAQSPGCQLLVETLGVPLQEATELGDPTQADSARPEQSSQSPVQAVPGSGDSQPDDPPDRGTGLSASQRASQDHLSEQGADDSKPETDRVPGDGGQKEHLPSIDSEGEKPDRGAPQEGGAQRTAGAGLPGGPQEEGDGVPCTPASAPTSGPAPGLGPASWCLEPGSVAQGSPDPQQTPSRMGREGEGTHSSLGCSSLGMVVIADLSTDPTELEERALEVAGPDGQASAISPASPRRKAADGGHRRALPGCTSLTGETTGESGEAGQDGKPPGDVLVGPTASLALAPGSGESMMGAGDSGHASPDTGPCVNQKQEPGPAQEEAELGGQNLERDLEGFRVSPQASVVLEHREIADDPLQEPGAQQGIPDTTSELAGQRDHLPHSADQGTWADSLAVELDFLLDSQIQDALDASDFEAPPEQLFPSGNKPGPCWPGPSSHANGDPVAVAKAQPRPPVSRPPACCV

SEQ ID NO: 808764 - protein, 30 aa, Homo sapiens
MGTHRDLEAFKRLNYRKTKLGGKAPLPYPS

SEQ ID NO: 808765 - protein, 931 aa, Homo sapiens
ASARGSRGSFPLVHLQGWMPGPPAPKPGLALPPSPGSVAAHSPFLSPALLVGAPRPSIPSPRFPAWPSHFRLGPRAPPHRSAATGLAGSAEPKLQLPAGSAWARRRLAGAVLTVAGCEGGVCALMRGAGPRGARERGRARAGVRGGDICGVQSVCQSPTGSGFTWALGLWSPHFSVVGVVSVWGLSPGAGSTAPTLRPFHLSPPDSRPPAFCEGQFGHLFFPKRVTRIIQATYSQLIQAELVSDKDRGSSTTSVAQISQGEDKMTKRKKLRTSGEGLCPPKPLKNPRLGDFYGDPQSSMLGCLHHPEEPEGKLGPVPSTQQHGEEPGKAVSSSPDEETGSPCRLLRQPEKEPAPLPPSQNSFGRFVPQFAKSRKTVTRKEEMKDEDRGSGAFSLETIAESSAQSPGCQLLVETLGVPLQEATELGDPTQADSARPEQSSQSPVQAVPGSGDSQPDDPPDRGTGLSASQRASQDHLSEQGADDSKPETDRVPGDGGQKEHLPSIDSEGEKPDRGAPQEGGAQRTAGAGLPGGPQEEGDGVPCTPASAPTSGPAPGLGPASWCLEPGSVAQGSPDPQQTPSRMGREGEGTHSSLGCSSLGMVVIADLSTDPTELEERALEVAGPDGQASAISPASPRRKAADGGHRRALPGCTSLTGETTGESGEAGQDGKPPGDVLVGPTASLALAPGSGESMMGAGDSGHASPDTGPCVNQKQEPGPAQEEAELGGQNLERDLEGFRVSPQASVVLEHREIADDPLQEPGAQQGIPDTTSELAGQRDHLPHSADQGTWADSLAVELDFLLDSQIQDALDASDFEAPPEQLFPSGNKPGPCWPGPSSHANGDPVAVAKAQPRTFVGIQASEASRMEDATNVVRGLIVELSNLNRLIMGTHRDLEAFKRLNYRKTKLGGKAPLPYPSKGPGNIPRGDPPWREL

SEQ ID NO: 808766 - protein, 817 aa, Homo sapiens
ASARGSRGSFPLVHLQGWMPGPPAPKPGLALPPSPGSVAAHSPFLSPALLVGAPRPSIPSPRFPAWPSHFRLGPRAPPHRSAATGLAGSAEPKLQLPAGSAWARRRLAGAVLTVAGCEGGVCVAHARGWDLAGRGKEAERAQISQGEDKMTKRKKLRTSGEGLCPPKPLKNPRLGDFYGDPQSSMLGCLHHPEEPEGKLGPVPSTQQHGEEPGKAVSSSPDEETGSPCRLLRQPEKEPAPLPPSQNSFGRFVPQFAKSRKTVTRKEEMKDEDRGSGAFSLETIAESSAQSPGCQLLVETLGVPLQEATELGDPTQADSARPEQSSQSPVQAVPGSGDSQPDDPPDRGTGLSASQRASQDHLSEQGADDSKPETDRVPGDGGQKEHLPSIDSEGEKPDRGAPQEGGAQRTAGAGLPGGPQEEGDGVPCTPASAPTSGPAPGLGPASWCLEPGSVAQGSPDPQQTPSRMGREGEGTHSSLGCSSLGMVVIADLSTDPTELEERALEVAGPDGQASAISPASPRRKAADGGHRRALPGCTSLTGETTGESGEAGQDGKPPGDVLVGPTASLALAPGSGESMMGAGDSGHASPDTGPCVNQKQEPGPAQEEAELGGQNLERDLEGFRVSPQASVVLEHREIADDPLQEPGAQQGIPDTTSELAGQRDHLPHSADQGTWADSLAVELDFLLDSQIQDALDASDFEAPPEQLFPSGNKPGPCWPGPSSHANGDPVAVAKAQPRTFVGIQASEASRMEDATNVVRGLIVELSNLNRLIMGTHRDLEAFKRLNYRKTKLGGKAPLPYPSKGPGNIPRGDPPWREL

SEQ ID NO: 808767 - protein, 506 aa, Homo sapiens
ASARGSRGSFPLVHLQGWMPGPPAPKPGLALPPSPGSVAAHSPFLSPALLVGAPRPSIPSPRFPAWPSHFRLGPRAPPHRSAATGLAGSAEPKLQLPAGSAWARRRLAGAVLTVAGCEGGVCALMRGAGPRGARERGRARAGVRGGDICGVQSVCQSPTGSGFTWALGLWSPHFSVVGVVSVWGLSPGAGSTAPTLRPFHLSPPDSRPPAFCEGQFGHLFFPKRVTRIIQATYSQLIQAELVSDKDRGSSTTSVAQISQGEDKMTKRKKLRTSGEGLCPPKPLKNPRLGDFYGDPQSSMLGCLHHPEEPEGKLGPVPSTQQHGEEPGKAVSSSPDEETGSPCRLLRQPEKEPAPLPPSQNSFGRFVPQFAKSRKTVTRKEEMKDEDRGSGAFSLLFPSGNKPGPCWPGPSSHANGDPVAVAKAQPRTFVGIQASEASRMEDATNVVRGLIVELSNLNRLIMGTHRDLEAFKRLNYRKTKLGGKAPLPYPSKGPGNIPRGDPPWREL

SEQ ID NO: 808768 - protein, 132 aa, Homo sapiens
MTLQTGGRGCPPHRGPAKTTCQNKGPMTASLRQTGFQVTVAKRNTYQALILKGRSQTEEPPRREGPKGQQGLACLEGPRRRETVSPVPQHQLLPQALLQDWALPLGAWNPGLWPRAPLTPSRPPAGWVGKGK

SEQ ID NO: 808769 - protein, 548 aa, Homo sapiens
MKTPADTGFAFPDWAYKPESSPGSRQIQLWHFILELLRKEEYQGVIAWQGDYGEFVIKDPDEVARLWGVRKCKPQMNYDKLSRALRYYYNKRILHKTKGKRFTYKFNFNKLVLVNYPFIDVGLAGGAVPQSAPPVPSGGSHFRFPPSTPSEVLSPTEDPRSPPACSSSSSSLFSAVVARRLGRGSVSDCSDGTSELEEPLGEDPRARPPGPPDLGAFRGPPLARLPHDPGVFRVYPRPRGGPEPLSPFPVSPLAGPGSLLPPQLSPALPMTPTHLAYTPSPTLSPMYPSGGGGPSGSGGGSHFSFSPEDMKRYLQAHTQSVYNYHLSPRAFLHYPGLVVPQPQRPDKCPLPPMAPETPPVPSSASSSSSSSSSPFKFKLQPPPLGRRQRAAGEKAVAGADKSGGSAGGLAEGAGALAPPPPPPQIKVEPISEGESEEVEVTDISDEDEEDGEVFKTPRAPPAPPKPEPGEAPGASQCMPLKLRFKRRWSEDCRLEGGGGPAGGFEDEGEDKKVRGEGPGEAGGPLTPRRVSSDLQHATAQLSLEHRDS

SEQ ID NO: 808770 - protein, 560 aa, Homo sapiens
VSFPRRRRRRRRRLGLLCAGFAFPDWAYKPESSPGSRQIQLWHFILELLRKEEYQGVIAWQGDYGEFVIKDPDEVARLWGVRKCKPQMNYDKLSRALRYYYNKRILHKTKGKRFTYKFNFNKLVLVNYPFIDVGLAGGAVPQSAPPVPSGGSHFRFPPSTPSEVLSPTEDPRSPPACSSSSSSLFSAVVARRLGRGSVSDCSDGTSELEEPLGEDPRARPPGPPDLGAFRGPPLARLPHDPGVFRVYPRPRGGPEPLSPFPVSPLAGPGSLLPPQLSPALPMTPTHLAYTPSPTLSPMYPSGGGGPSGSGGGSHFSFSPEDMKRYLQAHTQSVYNYHLSPRAFLHYPGLVVPQPQRPDKCPLPPMAPETPPVPSSASSSSSSSSSPFKFKLQPPPLGRRQRAAGEKAVAGADKSGGSAGGLAEGAGALAPPPPPPQIKVEPISEGESEEVEVTDISDEDEEDGEVFKTPRAPPAPPKPEPGEAPGASQCMPLKLRFKRRWSEDCRLEGGGGPAGGFEDEGEDKKVRGEGPGEAGGPLTPRRVSSDLQHATAQLSLEHRDS

SEQ ID NO: 808771 - protein, 478 aa, Homo sapiens
TRLVTGEGSLPLAVEVEGIHQHQPCQLVHGSFPKQVADHTFCVCLHPVIDDGLAGGAVPQSAPPVPSGGSHFRFPPSTPSEVLSPTEDPRSPPACSSSSSSLFSAVVARRLGRGSVSDCSDGTSELEEPLGEDPRARPPGPPDLGAFRGPPLARLPHDPGVFRVYPRPRGGPEPLSPFPVSPLAGPGSLLPPQLSPALPMTPTHLAYTPSPTLSPMYPSGGGGPSGSGGGSHFSFSPEDMKRYLQAHTQSVYNYHLSPRAFLHYPGLVVPQPQRPDKCPLPPMAPETPPVPSSASSSSSSSSSPFKFKLQPPPLGRRQRAAGEKAVAGADKSGGSAGGLAEGAGALAPPPPPPQIKVEPISEGESEEVEVTDISDEDEEDGEVFKTPRAPPAPPKPEPGEAPGASQCMPLKLRFKRRWSEDCRLEGGGGPAGGFEDEGEDKKVRGEGPGEAGGPLTPRRVSSDLQHATAQLSLEHRDS

SEQ ID NO: 808772 - protein, 348 aa, Homo sapiens
AAGRGEALRGPPDLGAFRGPPLARLPHDPGVFRVYPRPRGGPEPLSPFPVSPLAGPGSLLPPQLSPALPMTPTHLAYTPSPTLSPMYPSGGGGPSGSGGGSHFSFSPEDMKRYLQAHTQSVYNYHLSPRAFLHYPGLVVPQPQRPDKCPLPPMAPETPPVPSSASSSSSSSSSPFKFKLQPPPLGRRQRAAGEKAVAGADKSGGSAGGLAEGAGALAPPPPPPQIKVEPISEGESEEVEVTDISDEDEEDGEVFKTPRAPPAPPKPEPGEAPGASQCMPLKLRFKRRWSEDCRLEGGGGPAGGFEDEGEDKKVRGEGPGEAGGPLTPRRVSSDLQHATAQLSLEHRDS

SEQ ID NO: 808773 - protein, 548 aa, Homo sapiens; identical to SEQ ID NO: 808769

SEQ ID NO: 808774 - protein, 548 aa, Homo sapiens; identical to SEQ ID NO: 808769

SEQ ID NO: 808775 - protein, 548 aa, Homo sapiens; identical to SEQ ID NO: 808769

SEQ ID NO: 808776 - protein, 395 aa, Homo sapiens
MKTPADTGFAFPDWAYKPESSPGSRQIQLWHFILELLRKEEYQGVIAWQGDYGEFVIKDPDEVARLWGVRKCKPQMNYDKLSRALRYYYNKRILHKTKGKRFTYKFNFNKLVLVNYPFIDVGLAGGAVPQSAPPVPSGGSHFRFPPSTPSEVLSPTEDPRSPPACSSSSSSLFSAVVARRLGRGSVSDCSDGTSELEEPLGEDPRARPPGPPDLGAFRGPPLARLPHDPGVFRVYPRPRGGPEPLSPFPVSPLAGPGSLLPPQLSPALPMTPTHLAYTPSPTLSPMYPSGGGGPSGSGGGSHFSFSPEDMKRYLQAHTQSVYNYHLSPRAFLHYPGLVVPQPQRPDKCPLPPMAPETPPVPSSASSSSSSSSSPFKFKLQPPPWAGGWGDGKGVP

SEQ ID NO: 808777 - protein, 273 aa, Homo sapiens
MSPKRDGLGTGDGLHSQVLQEQVSTGDNLHECDSQGPSKDTLVREGKTYKCKECGSVFNKNSLLVRHQQIHTGVKPYECQECGKAFPEKVDFVRHMRIHTGEKPCKCVECGKVFNRRSHLLCYRQIHTGEKPYECSECGKTFSYHSVFIQHRVTHTGEKLFGCKECGKTFYYNSSLTRHMKIHTGEKPCKCSECGKTFTYRSVFFRHSMTHTAGKPYECKECGKGFYYSYSLTRHTRSHTGEKPYECLEHRKDFGYHSAFAQQSKIHSGGKNL

SEQ ID NO: 808778 - protein, 357 aa, Homo sapiens
MDLPVNLTSFSLSTPSPLETNHSLGKDDLRPSSPLLSVFGVLILTLLGFLVAATFAWNLLVLATILRVRTFHRVPHNLVASMAVSDVLVAALVMPLSLVHELSGRRWQLGRRLCQLWIACDVLCCTASIWNVTAIALDRYWSITRHMEYTLRTRKCVSNVMIALTWALSAVISLAPLLFGWGETYSEGSEECQVSREPSYAVFSTVGAFYLPLCVVLFVYWKIYKAAKFRVGSRKTNSVSPISEAVEVKDSAKQPQMVFTVRHATVTFQPEGDTWREQKEQRAALMVGILIGVFVLCWIPFFLTELISPLCSCDIPAIWKSIFLWLGYSNSFFNPLIYTAFNKNYNSAFKNFFSRQH

SEQ ID NO: 808779 - protein, 141 aa, Homo sapiens
MLPLCQVLLHMSEQDTSSKYALSYHGIKWASLCAAVSFVNLDLKVLVLWSPSTPSSISRPPLFRPLTCRIRPGSRFNTIYRFRLQQPIQAFPSRSESLALKQPETRIAHTCFSPNMRVLDKWDHAACKILKLPARRDGSRL

SEQ ID NO: 808780 - protein, 105 aa, Homo sapiens
REALCLPAGDTIQRCRTDPDAAAIADATASHAVPPLRCRAGPRTQIRRHAREHARERACAALLARSLRSFQYFGVKFEAVVTVLSLVLLIMVFYVCQPRVDFCND

SEQ ID NO: 808781 - protein, 122 aa, Homo sapiens
MFSYIDKERPVQSLKTSRDTSPSSGSAVSSSKVLDKPSRLTEKELAEAASKWAAEKLEKSDESNLPEISEYEAGSTAPLFTDQPEEPESNTTHGIELFEDSQLTTRSKAIASKTKEIEQVRV

SEQ ID NO: 808782 - protein, 319 aa, Homo sapiens
MAYRRDEMWSEGRYEYERIPRERAPPRSHPSDESGYRWTRDDHSASRQPEYRDMRDGFRRKSFYSSHYARERSPYKRDNTFFRESPVGRKDSPHSRSGSSVSSRSYSPERSKSYSFHQSQHRKSVRPGASYKRQNEGNPERDKERPVQSLKTSRDTSPSSGSAVSSSKVLDKPSRLTEKELAEAASKWAAEKLEKSDESNLPEISEYEAGSTAPLFTDQPEEPESNTTHGIELFEDSQLTTRSKAIASKTKEIEQVYRQDCETFGMVVKMLIEKDPSLEKSIQFALRQNLHEIGERCVEELKHFIAEYDTSTQDFGEPF

SEQ ID NO: 808783 - protein, 312 aa, Homo sapiens
MWSEGRYEYERIPRERAPPRSHPSDESGYRWTRDDHSASRQPEYRDMRDGFRRKSFYSSHYARERSPYKRDNTFFRESPVGRKDSPHSRSGSSVSSRSYSPERSKSYSFHQSQHRKSVRPGASYKRQNEGNPERDKERPVQSLKTSRDTSPSSGSAVSSSKVLDKPSRLTEKELAEAASKWAAEKLEKSDESNLPEISEYEAGSTAPLFTDQPEEPESNTTHGIELFEDSQLTTRSKAIASKTKEIEQVYRQDCETFGMVVKMLIEKDPSLEKSIQFALRQNLHEIGERCVEELKHFIAEYDTSTQDFGEPF

SEQ ID NO: 808784 - protein, 383 aa, Homo sapiens
AALEVPEHVVAYRRDEMWSEGRYEYERIPRERAPPRSHPSDGYNRLVNIVPKKPPLLDRPGEGSYNRYYSHVDYRDYDEGRSFSHDRRSGPPHRGDESGYRWTRDDHSASRQPEYRDMRDGFRRKSFYSSHYARERSPYKRDNTFFRESPVGRKDSPHSRSGSSVSSRSYSPERSKSYSFHQSQHRKSVRPGASYKRQNEGNPERDKERPVQSLKTSRDTSPSSGSAVSSSKVLDKPSRLTEKELAEAASKWAAEKLEKSDESNLPEISEYEAGSTAPLFTDQPEEPESNTTHGIELFEDSQLTTRSKAIASKTKEIEQVYRQDCETFGMVVKMLIEKDPSLEKSIQFALRQNLHEIGERCVEELKHFIAEYDTSTQDFGEPF

SEQ ID NO: 808785 - protein, 294 aa, Homo sapiens
MWSEGRYEYERIPRERAPPRSHPSDESGYRWTRDDHSASRQPEYRDMRDGFRRKSFYSSHYARERSPYNSRSGSSVSSRSYSPERSKSYSFHQSQHRKSVRPGASYKRQNEGNPERDKERPVQSLKTSRDTSPSSGSAVSSSKVLDKPSRLTEKELAEAASKWAAEKLEKSDESNLPEISEYEAGSTAPLFTDQPEEPESNTTHGIELFEDSQLTTRSKAIASKTKEIEQVYRQDCETFGMVVKMLIEKDPSLEKSIQFALRQNLHEIGERCVEELKHFIAEYDTSTQDFGEPF

SEQ ID NO: 808786 - protein, 293 aa, Homo sapiens
MWSEGRYEYERIPRERAPPRSHPSDESGYRWTRDDHSASRQPEYRDMRDGFRRKSFYSSHYARERSPYKRDNTFFRESPVGRKDSPHSRSGSSVSSRSYSPERSKSYSFHQSQHRNKERPVQSLKTSRDTSPSSGSAVSSSKVLDKPSRLTEKELAEAASKWAAEKLEKSDESNLPEISEYEAGSTAPLFTDQPEEPESNTTHGIELFEDSQLTTRSKAIASKTKEIEQVYRQDCETFGMVVKMLIEKDPSLEKSIQFALRQNLHEIGERCVEELKHFIAEYDTSTQDFGEPF

SEQ ID NO: 808787 - protein, 355 aa, Homo sapiens
MAYRRDEMWSEGRYEYERIPRERAPPRSHPSDGYNRLVNIVPKKPPLLDRPGEGSYNRYYSHVDYRDYDEGRSFSHDRRSGPPHRGDESGYRWTRDDHSASRQPEYRDMRDGFRRKSFYSSHYARERSPYKRDNTFFRESPVGRKDSPHSRSGSSVSSRSYSPERSKSYSFHQSQHRNKERPVQSLKTSRDTSPSSGSAVSSSKVLDKPSRLTEKELAEAASKWAAEKLEKSDESNLPEISEYEAGSTAPLFTDQPEEPESNTTHGIELFEDSQLTTRSKAIASKTKEIEQVYRQDCETFGMVVKMLIEKDPSLEKSIQFALRQNLHEIGERCVEELKHFIAEYDTSTQDFGEPF

SEQ ID NO: 808788 - protein, 434 aa, Homo sapiens [sequence omitted]

SEQ ID NO: 808789 - protein, 256 aa, Homo sapiens
RAPEVPTWDNGGERTAAFTGSPGGPESWLTEETKCGLRDDMNMKEFRENEHLLEVIPVMNLVIDGQETIILQAGNLNTDKERPVQSLKTSRDTSPSSGSAVSSSKVLDKPSRLTEKELAEAASKWAAEKLEKSDESNLPEISEYEAGSTAPLFTDQPEEPESNTTHGIELFEDSQLTTRSKAIASKTKEIEQVYRQDCETFGMVVKMLIEKDPSLEKSIQFALRQNLHEIGERCVEELKHFIAEYDTSTQDFGEPF

SEQ ID NO: 808790 - protein, 434 aa, Homo sapiens [sequence omitted]

SEQ ID NO: 808791 - protein, 316 aa, Homo sapiens
MWSEGRYEYERIPRERAPPRSHPSDESGYRWTRDDHSASRQPEYRDMRDGFRRKSFYSSHYARERSPYKRDNTFFRESPVGRKDSPHSRSGSSVSSRSYSPERSKSYSFHQSQHRKSVRPGASYKRQNEGNPERDKERPVQSLKTSRDTSPSSGSAVSSSKVLDKPSRLTEKELAEAASKWAAEKLEKSDESNLPEISEYEAGSTAPLFTDQPEEPESNTTHGIELFEDSQLTTRSKAIASKTKEIEQVYRQDCETFGMVVKMLIEKDPSLEKSIQFALRQNLHEIGERCVEELKHFIAEYDTSTQDFGRHVRGIL

SEQ ID NO: 808792 - protein, 179 aa, Homo sapiens
  misc_feature (13)..(13): Xaa can be any naturally occurring amino acid
  misc_feature (16)..(16): Xaa can be any naturally occurring amino acid
  misc_feature (24)..(24): Xaa can be any naturally occurring amino acid
ERNLKGKGAFRRXLRXLPPQWFSXFFIKVLDKPSRLTEKELAEAASKWAAEKLEKSDESNLPEISEYEAGSTAPLFTDQPEEPESNTTHGIELFEDSQLTTRSKAIASKTKEIEQVYRQDCETFGMVVKMLIEKDPSLEKSIQFALRQNLHEIGERCVEELKHFIAEYDTSTQDFGEPF

SEQ ID NO: 808793 - protein, 294 aa, Homo sapiens
MWSEGRYEYERIPRERAPPRSHPSDESGYRWTRDDHSASRQPEYRDMRDGFRRKSFYSSHYARERSPYKRDNTFFRESPVGRKDSPHSRSGSSVSSRSYSPERSKSYSFHQSQHRKSVRPGASYKRQNEGNPERDKERPVQSLKTSRDTSPSSGSAVSSSKVLDKPSRLTEKELAEAASKWAAAGSTAPLFTDQPEEPESNTTHGIELFEDSQLTTRSKAIASKTKEIEQVYRQDCETFGMVVKMLIEKDPSLEKSIQFALRQNLHEIGERCVEELKHFIAEYDTSTQDFGEPF

SEQ ID NO: 808794 - protein, 254 aa, Homo sapiens
MWSEGRYEYERIPRERAPPRSHPSDESGYRWTRDDHSASRQPEYRDMRDGFRRKSFYSSHYARERSPYKRDNTFFRESPVGRKDSPHSRSGSSVSSRSYSPERSKSYSFHQSQHRKSVRPGASYKRQNEGNPERDKERPVQSLKTSRDTSPSSGSAVSSSKVLDKPSRLTEKELAEAASKWAAEKLEKSDESNLPEISEYEAGSTAPLFTDQPEEPESNTTHGIELFEDSQLTTRSKAIASKTKEIEQDIRDGV

SEQ ID NO: 808795 - protein, 70 aa, Homo sapiens
RAPEVPTWDNGGERTAAFTGSPGGPESWLTEETKCGLRDDMNMKEFRENEHLLEVIPVFTDKTVKLSGWW

SEQ ID NO: 808796 - protein, 107 aa, Homo sapiens
MWSEGRYEYERIPRERAPPRSHPSDGYNRLVNIVPKKPPLLDRPGEGSYNRYYSHVDYRDYDEGRSFSHDRRSGPPHRGDESGYRWTRDDHSASRQPEYSRDGVSPC

SEQ ID NO: 808797 - protein, 319 aa, Homo sapiens; identical to SEQ ID NO: 808782

SEQ ID NO: 808798 - protein, 367 aa, Homo sapiens
MWSEGRYEYERIPRERAPPRSHPSDGYNRLVNIVPKKPPLLDRPGEGSYNRYYSHVDYRDYDEGRSFSHDRRSGPPHRGDESGYRWTRDDHSASRQPEYRDMRDGFRRKSFYSSHYARERSPYKRDNTFFRESPVGRKDSPHSRSGSSVSSRSYSPERSKSYSFHQSQHRKSVRPGASYKRQNEGNPERDKERPVQSLKTSRDTSPSSGSAVSSSKVLDKPSRLTEKELAEAASKWAAEKLEKSDESNLPEISEYEAGSTAPLFTDQPEEPESNTTHGIELFEDSQLTTRSKAIASKTKEIEQVYRQDCETFGMVVKMLIEKDPSLEKSIQFALRQNLHEIGERCVEELKHFIAEYDTSTQDFGEPF

SEQ ID NO: 808799 - protein, 376 aa, Homo sapiens
LALWVDTSFYVFDTLSPKDVGMTQKHQYFIQESDGYNRLVNIVPKKPPLLDRPGEGSYNRYYSHVDYRDYDEGRSFSHDRRSGPPHRGDESGYRWTRDDHSASRQPEYRDMRDGFRRKSFYSSHYARERSPYKRDNTFFRESPVGRKDSPHSRSGSSVSSRSYSPERSKSYSFHQSQHRKSVRPGASYKRQNEGNPERDKERPVQSLKTSRDTSPSSGSAVSSSKVLDKPSRLTEKELAEAASKWAAEKLEKSDESNLPEISEYEAGSTAPLFTDQPEEPESNTTHGIELFEDSQLTTRSKAIASKTKEIEQVYRQDCETFGMVVKMLIEKDPSLEKSIQFALRQNLHEIGERCVEELKHFIAEYDTSTQDFGEPF

SEQ ID NO: 808800 - protein, 348 aa, Homo sapiens
MWSEGRYEYERIPRERAPPRSHPSDGYNRLVNIVPKKPPLLDRPGEGSYNRYYSHVDYRDYDEGRSFSHDRRSGPPHRGDESGYRWTRDDHSASRQPEYRDMRDGFRRKSFYSSHYARERSPYKRDNTFFRESPVGRKDSPHSRSGSSVSSRSYSPERSKSYSFHQSQHRNKERPVQSLKTSRDTSPSSGSAVSSSKVLDKPSRLTEKELAEAASKWAAEKLEKSDESNLPEISEYEAGSTAPLFTDQPEEPESNTTHGIELFEDSQLTTRSKAIASKTKEIEQVYRQDCETFGMVVKMLIEKDPSLEKSIQFALRQNLHEIGERCVEELKHFIAEYDTSTQDFGEPF

SEQ ID NO: 808801 - protein, 293 aa, Homo sapiens; identical to SEQ ID NO: 808786

SEQ ID NO: 808802 - protein, 278 aa, Homo sapiens
AALEVPEHVVAYRRDEMWSEGRYEYERIPRERAPPRSHPSDESGYRWTRDDHSASRQPEYRESPVGRKDSPHSRSGSSVSSRSYSPERSKSYSFHQSQHRNKERPVQSLKTSRDTSPSSGSAVSSSKVLDKPSRLTEKELAEAASKWAAEKLEKSDESNLPEISEYEAGSTAPLFTDQPEEPESNTTHGIELFEDSQLTTRSKAIASKTKEIEQVYRQDCETFGMVVKMLIEKDPSLEKSIQFALRQNLHEIGERCVEELKHFIAEYDTSTQDFGEPF

SEQ ID NO: 808803 - protein, 434 aa, Homo sapiens [sequence omitted]

SEQ ID NO: 808804 - protein, 282 aa, Homo sapiens
MRQKPSESASATGGWVRELVLQELRLRDTTTSGALQCWSGEASFYTRPALLGGATVFEMKPGGDRLSTGRGSSFLGTLDPSGAEKEMQTGLLTTTRNAFGCPSAPGTMPPTACRAGSVPELFPGTAVSSSKVLDKPSRLTEKELAEAASKWAAEKLEKSDESNLPEISEYEAGSTAPLFTDQPEEPESNTTHGIELFEDSQLTTRSKAIASKTKEIEQVYRQDCETFGMVVKMLIEKDPSLEKSIQFALRQNLHEIGERCVEELKHFIAEYDTSTQDFGEPF

SEQ ID NO: 808805 - protein, 328 aa, Homo sapiens
MWSEGRYEYERIPRERAPPRSHPSDESGYRWTRDDHSASRQPEYRDMRDGFRRKSFYSSHYARERSPYKRDNTFFRESPVGRKDSPHSRSGSSVSSRSYSPERSKSYSFHQSQHRKSVRPGASYKRQNEGNPERDKERPVQSLKTSRDTSPSSGSAVSSSKVLDKPSRLTEKELAEAASKWAAEKLEKSDESNLPEISEYEAGSTAPLFTDQPEEPESNTTHGIELFEDSQLTTRSKAIASKTKEIEQVYRQDCETFGMVVKMLIEKDPSLEKSIQFALRQNLHEIESAGQTWQQVPPVRNTEMDHDGTPENEGEETAQSDMLVFTSP

SEQ ID NO: 808806 - protein, 251 aa, Homo sapiens
MWSEGRYEYERIPRERAPPRSHPSDESGYRWTRDDHSASRQPEYRDMRDGFRRKSFYSSHYARERSPYKRDNTFFRESPVGRKDSPHSRSGSSVSSRSYSPERSKSYSFHQSQHRKSVRPGASYKRQNEGNPERDKERPVQSLKTSRDTSPSSGSAVSSSKVLDKPSRLTEKELAEAASKWAAEKLEKSDESNLPEISEYEAGSTAPLFTDQPEEPESNTTHGIELFEDSQLTTRSKAIASKTKEIEQVRV

SEQ ID NO: 808807 - protein, 95 aa, Homo sapiens
CARRKYLPGITAASGRLHLRGLPEGQSRKLLKTLNLIPKRTQWLTEETKCGLRDDMNMKEFRENEHLLEVIPVMNLVIDGQETIILQAGNLNTGT

SEQ ID NO: 808808 - protein, 154 aa, Homo sapiens
MAENSGRAGKSSGSGAGKGAVSAEQVIAGFNRLRQEQRGLASKAAELEMELNEHSLVIDTLKEVDETRKCYRMVGGVLVERTVKEVLPALENNKEQIQKIIETLTQQLQAKGKELNEFREKHNIRLMGEDEKPAAKENSEGAGAKASSAGVLVS

SEQ ID NO: 808809 - protein, 154 aa, Homo sapiens; identical to SEQ ID NO: 808808

SEQ ID NO: 808810 - protein, 154 aa, Homo sapiens; identical to SEQ ID NO: 808808

SEQ ID NO: 808811 - protein, 229 aa, Homo sapiens
  misc_feature (131)..(131): Xaa can be any naturally occurring amino acid
  misc_feature (134)..(135): Xaa can be any naturally occurring amino acid
  misc_feature (141)..(141): Xaa can be any naturally occurring amino acid
  misc_feature (154)..(154): Xaa can be any naturally occurring amino acid
MAENSGRAGKSSGSGAGKGAVSAEQVIAGFNRLRQEQRGLASKAAELEMELNEHSLVIDTLKEVDETRKCYRMVGGVLVERTVKEVLPALENNKEQIQKIIETLTQQLQAKGKELNEFREKPPFFWGVFFXPFXXPRPFGXPPPPGKIFGSGGXQNPSPGSAVLTSRAACWAWGPAKGPGAIPDAANGGVDMARLQLQAGRGQTAGVRGLPGIGRLWGLSVGTSLRDPP

SEQ ID NO: 808812 - protein, 231 aa, Homo sapiens
MGGLWRPGWRCVPFCGWRWIHPGSPTRAAERVEPFLRPEWSGTGGAERGLRWLGTWKRCSLRARHPALQPPRRPKSSNPFTRAQEEERRRQNKTTLTYVAAVAVGMLGASYAAVPLYRLYCQTTGLGGSAVAGHASDKIENMVPVKDRIIKISFNADVHASLQWNFRPQQTEIYVVPGETALAFYRAKNPTDKPVIGISTYNIVPFEAGQYFNKIQASKLHRVYVLESWHL

SEQ ID NO: 808813 - protein, 231 aa, Homo sapiens; identical to SEQ ID NO: 808812

SEQ ID NO: 808814 - protein, 152 aa, Homo sapiens [sequence omitted]

SEQ ID NO: 808815 - protein, 155 aa, Homo sapiens
MGGLWRPGWRCVPFCGWRWIHPGSPTRAAERVEPFLRPEWSGTGGAERGLRWLGTWKRCSLRARHPALQPPRRPKSSNPFTRAQEEERRRQNKTTLTYVAAVAVGMLGASYAAVPLYRLYCQAGVALIAQAGVALIAQAGVALCPGWSSSYAQDG

SEQ ID NO: 808816 - protein, 276 aa, Homo sapiens
MGGLWRPGWRCVPFCGWRWIHPGSPTRAAERVEPFLRPEWSGTGGAERGLRWLGTWKRCSLRARHPALQPPRRPKSSNPFTRAQEEERRRQNKTTLTYVAAVAVGMLGASYAAVPLYRLYCQTTGLGGSAVAGHASDKIENMVPVKDRIIKISFNADVHASLQWNFRPQQTEIYVVPGETALAFYRAKNPTDKPVIGISTYNIVPFEAGQYFNKIQCFCFEEQRLNPQEEVDMPVFFYIDPEFAEDPRMIKVDLITLSYTFFEAKEGHKLPVPGYN

SEQ ID NO: 808817 - protein, 276 aa, Homo sapiens; identical to SEQ ID NO: 808816

SEQ ID NO: 808818 - protein, 230 aa, Homo sapiens
MGGLWRPGWRCVPFCGWRWIHPGSPTRAAERVEPFLRPEWSGTGGAERGLRWLGTWKRCSLRARHPALQPPRRPKSSNPFTRAQEEERRRQNKTTLTYVAAVAVGMLGASYAAVPLYRLYCQTTGLGGSAVAGHASDKIENMVPVKDRIIKISFNADVHASLQWNFRPQQTEIYVVPGETALAFYRAKNPTDKPVIGISTYNIVPFEAGQYFNKIQVHQSVNFTEYDKDT

SEQ ID NO: 808819 - protein, 231 aa, Homo sapiens; identical to SEQ ID NO: 808812

SEQ ID NO: 808820 - protein, 221 aa, Homo sapiens
MGGLWRPGWRCVPFCGWRWIHPGSPTRAAERVEPFLRPEWSGTGGAERGLRWLGTWKRCSLRARHPALQPPRRPKSSNPFTRAQEEERRRQNKTTLTYVAAVAVGMLGASYAAVPLYRLYCQTTGLGGSAVAGHASDKIENMVPVKDRIIKISFNADVHASLQWNFRPQQTEIYVVPGETALAFYRAKNPTDKPVIGISTYNIVPFEAGQYFNKIQLCDDF

SEQ ID NO: 808821 - protein, 276 aa, Homo sapiens; identical to SEQ ID NO: 808816

SEQ ID NO: 808822 - protein, 151 aa, Homo sapiens
GERGFARVYVFFKTVDLYNWKSHSKGLWVSPREFVTLIWRIFSTHNPTWPGVQTVTATLLTAEDKSATMAKTKEEADNMCADNLVTWPVEVSVPIANPNWDPSDNKNQEWLHHYRNMLLRGMREASQSLVNWGNLREIEQGPNENPSAFLN

SEQ ID NO: 808823 - protein, 276 aa, Homo sapiens; identical to SEQ ID NO: 808816

SEQ ID NO: 808824 - protein, 276 aa, Homo sapiens; identical to SEQ ID NO: 808816

SEQ ID NO: 808825 - protein, 276 aa, Homo sapiens; identical to SEQ ID NO: 808816

SEQ ID NO: 808826 - protein, 246 aa, Homo sapiens
MGGLWRPGWRCVPFCGWRWIHPGSPTRAAERVEPFLRPEWSGTGGAERGLRWLGTWKRCSLRARHPALQPPRRPKSSNPFTRAQEEERRRQNKTTLTYVAAVAVGMLGASYAAVPLYRLYCQTTGLGGSAVAGHASDKIENMVPVKDRIIKISFNADVHASLQWNFRPQQTEIYVVPGETALAFYRAKNPTDKPVIGISTYNIVPFEAGQYFNKIQRFLDSFGNQQLFGGESFFLALTATLEVPCS

SEQ ID NO: 808827 - protein, 617 aa, Homo sapiens [sequence omitted]

SEQ ID NO: 808828 - protein, 658 aa, Homo sapiens
AFAAGARVESCAPVPGPELRLRLGRLRCLKMAELGELKHMVMSFRVSELQVLLGFAGRNKSGRKHELLAKALHLLKSSCAPSVQMKIKELYRRRFPRKTLGPSDLSLLSLPPGTSPVGSPGPLAPIPPTLLAPGTLLGPKREVDMHPPLPQPVHPDVTMKPLPFYEVYGELIRPTTLASTSSQRFEEAHFTFALTPQQVQQILTSREVLPGAKCDYTIQVQLRFCLCETSCPQEDYFPPNLFVKVNGKLCPLPGYLPPTKNGAEPKRPSRPINITPLARLSATVPNTIVVNWSSEFGRNYSLSVYLVRQLTAGTLLQKLRAKGIRNPDHSRALIKEKLTADPDSEVATTSLRVSLMCPLGKMRLTVPCRALTCAHLQSFDAALYLQMNEKKPTWTCPVCDKKAPYESLIIDGLFMEILSSCSDCDEIQFMEDGSWCPMKPKKEASEVCPPPGYGLDGLQYSPVQGGDPSENKKKVEVIDLTIESSSDEEDLPPTKKHCSVTSAAIPALPGSKGVLTSGHQPSSVLRSPAMGTLGGDFLSSLPLHEYPPAFPLGADIQGLDLFSFLQTESQHYGPSVITSLDEQDALGHFFQYRGTPSHFLGPLAPTLGSSHCSATPAPPPGRVSSIVAPGGALREGHGGPLPSGPSLTGCRSDIISLD

SEQ ID NO: 808829 - protein, 469 aa, Homo sapiens
AFAAGARVESCAPVPGPELRLRLGRLRCLKMAELGELKHMVMSFRVSELQVLLGFAGRNKSGRKHELLAKALHLLKSSCAPSVQMKIKELYRRRFPRKTLGPSDLSLLSLPPGTSPVGSPGPLAPIPPTLLAPGTLLGPKREVDMHPPLPQPVHPDVTMKPLPFYEVYGELIRPTTLASTSSQRFEEAHFTFALTPQQVQQILTSREVLPGAKCDYTIQVQLRFCLCETSCPQEDYFPPNLFVKVNGKLCPLPGYLPPTKNGAEPKRPSRPINITPLARLSATVPNTIVVNWSSEFGRNYSLSVYLVRQLTAGTLLQKLRAKGIRNPDHSRALIKEKLTADPDSEVATTSLRVSLMCPLGKMRLTVPCRALTCAHLQSFDAALYLQMNEKKPTWTCPVCDKKAPYESLIIDGLFMEILSSCSDCDEIQFMEDGSWCPMKPKKEASEASSTAQSRGEIHQRIRRRSKLLT

SEQ ID NO: 808830 - protein, 412 aa, Homo sapiens
AFAAGARVESCAPVPGPELRLRLGRLRCLKMAELGELKHMVMSFRVSELQVLLGFAGRNKSGRKHELLAKALHLLKSSCAPSVQMKIKELYRRRFPRKTLGPSDLSLLSLPPGTSPVGSPGPLAPIPPTLLAPGTLLGPKREVDMHPPLPQPVHPDVTMKPLPFYEVYGELIRPTTLASTSSQRFEEAHFTFALTPQQVQQILTSREVLPGAKCDYTIQVQLRFCLCETSCPQEDYFPPNLFVKVNGKLCPLPGYLPPTKNGAEPKRPSRPINITPLARLSATVPNTIVVNWSSEFGRNYSLSVYLVRQLTAGTLLQKLRAKGIRNPDHSRALIKEKLTADPDSEVATTSLRVSLMCPLGKMRLTVPCRALTCAHLQSFDAALYLQMNEKKPTWTCPVCDKKAPYESLIIDG

SEQ ID NO: 808831 - protein, 222 aa, Homo sapiens
AFAAGARVESCAPVPGPELRLRLGRLRCLKMAELGELKHMVMSFRVSELQVLLGFAGRNKSGRKHELLAKALHLLKSSCAPSVQMKIKELYRRRFPRKTLGPSDLSLLSLPPGTSPVGSPGPLAPIPPTLLAPGTLLGPKREVDMHPPLPQPVHPDVTMKPLPFYEVYGELIRPTTLGMALCGPLVFWTPYLFPKHFLGFSPMGSVTWDGGDFCGCLCMGLE

SEQ ID NO: 808832 - protein, 72 aa, Homo sapiens
PTKNGAEPKRPSRPINITPLARLSATVPNTIVVNWSSEFGRVSTAKAGAWKSLLRVKGNHPVSWVGEAFSSL

SEQ ID NO: 808833 - protein, 658 aa, Homo sapiens; identical to SEQ ID NO: 808828

SEQ ID NO: 808834 - protein, 710 aa, Homo sapiens
AFAAGARVESCAPVPGPELRLRLGRLRCLKMAELGELKHMVMSFRVSELQVLLGFAGRNKSGRKHELLAKALHLLKSSCAPSVQMKIKELYRRRFPRKTLGPSDLSLLSLPPGTSPVGSPGPLAPIPPTLLAPGTLLGPKREVDMHPPLPQPVHPDVTMKPLPFYEVYGELIRPTTLGMALCGPLVFWTPYLFPKHFLGFSPMGSVTWDGGDFCGCLCMGLENCPFVSSASTSSQRFEEAHFTFALTPQQVQQILTSREVLPGAKCDYTIQVQLRFCLCETSCPQEDYFPPNLFVKVNGKLCPLPGYLPPTKNGAEPKRPSRPINITPLARLSATVPNTIVVNWSSEFGRNYSLSVYLVRQLTAGTLLQKLRAKGIRNPDHSRALIKEKLTADPDSEVATTSLRVSLMCPLGKMRLTVPCRALTCAHLQSFDAALYLQMNEKKPTWTCPVCDKKAPYESLIIDGLFMEILSSCSDCDEIQFMEDGSWCPMKPKKEASEVCPPPGYGLDGLQYSPVQGGDPSENKKKVEVIDLTIESSSDEEDLPPTKKHCSVTSAAIPALPGSKGVLTSGHQPSSVLRSPAMGTLGGDFLSSLPLHEYPPAFPLGADIQGLDLFSFLQTESQHYGPSVITSLDEQDALGHFFQYRGTPSHFLGPLAPTLGSSHCSATPAPPPGRVSSIVAPGGALREGHGGPLPSGPSLTGCRSDIISLD

SEQ ID NO: 808835 - protein, 419 aa, Homo sapiens
AFAAGARVESCAPVPGPELRLRLGRLRCLKMAELGELKHMVMSFRVSELQVLLGFAGRNKSGRKHELLAKALHLLKSSCAPSVQMKIKELYRRRFPRKTLGPSDLSLLSLPPGTSPVGSPGPLAPIPPTLLAPGTLLGPKREVDMHPPLPQPVHPDVTMKPLPFYEVYGELIRPTTLASTSSQRFEEAHFTFALTPQQVQQILTSREVLPGAKCDYTIQVQLRFCLCETSCPQEDYFPPNLFVKVNGKLCPLPGYLPPTKNGAEPKRPSRPINITPLARLSATVPNTIVVNWSSEFGRNYSLSVYLVRQLTAGTLLQKLRAKGIRNPDHSRALIKEKLTADPDSEVATTSLRVSLMCPLGKMRLTVPCRALTCAHLQSFDAALYLQMNEKKPTWTCPVCDKKAPYESLIIDGSVAHGYR

SEQ ID NO: 808836 - protein, 222 aa, Homo sapiens; identical to SEQ ID NO: 808831

SEQ ID NO: 808837 - protein, 216 aa, Homo sapiens
AFAAGARVESCAPVPGPELRLRLGRLRCLKMAELGELKHMVMSFRVSELQVLLGFAGRNKSGRKHELLAKALHLLKSSCAPSVQMKIKELYRRRFPRKTLGPSDLSLLSLPPGTSPVGSPGPLAPIPPTLLAPGTLLGPKREVDMHPPLPQPVHPDVTMKPLPFYEVYGELIRPTTLASTSSQRFEEAHFTFALTPQQVQQILTSSQQRTTRQTRT

SEQ ID NO: 808838 - protein, 344 aa, Homo sapiens
MGFNLTFHLSYKFRLLLLLTLCLTVVGWATSNYFVGAIQEIPKAKEFMANFHKTLILGKGKTLTNEASTKKVELDNCPSVSPYLRGQSKLIFKPDLTLEEVQAENPKVSRGRYRPQECKALQRVAILVPHRNREKHLMYLLEHLHPFLQRQQLDYGIYVIHQAEGKKFNRAKLLNVGYLEALKEENWDCFIFHDVDLVPENDFNLYKCEEHPKHLVVGRNSTGYRLRYSGYFGGVTALSREQFFKVNGFSNNYWGWGGEDDDLRLRVELQRMKISRPLPEVGKYTMVFHTRDKGNEVNAERMKLLHQVSRVWRTDGLSSCSYKLVSVEHNPLYINITVDFWFGA

SEQ ID NO: 808839 - protein, 344 aa, Homo sapiens; identical to SEQ ID NO: 808838

SEQ ID NO: 808840 - protein, 344 aa, Homo sapiens; identical to SEQ ID NO: 808838

SEQ ID NO: 808841 - protein, 246 aa, Homo sapiens
MGFNLTFHLSYKFRLLLLLTLCLTVVGWATSNYFVGAIQEIPKAKEFMANFHKTLILGKGKTLTNEASTKKVELDNCPSVSPYLRGQSKLIFKPDLTLEEVQAENPKVSRGRYRPQECKALQRVAILVPHRNREKHLMYLLEHLHPFLQRQQLDYGIYVIHQAEGKKFNRAKLLNVGYLEALKEENWDCFIFHDVDLVPENDFNLYKCEEHPKHLVVGRNSTGYRLRYSGYFGGVTALSREQFFKG

SEQ ID NO: 808842 - protein, 344 aa, Homo sapiens; identical to SEQ ID NO: 808838

SEQ ID NO: 808843 - protein, 109 aa, Homo sapiens
MYLLEHLHPFLQRQQLDYGIYVIHQAEGKKFNRAKLLNVGYLEALKEENWDCFIFHDVDLVPENDFNLYKCEEHPKHLVVGRNSTGYRLRYSGYFGGVTALSREQFFKG

SEQ ID NO: 808844 - protein, 109 aa, Homo sapiens
MGFNLTFHLSYKFRLLLLLTLCLTVVGWATSNYFVGAIQEIPKAKEFMANFHKTLILGKGKTLTNEASTKKVELDNCPSVSPYLRGQSKLIFKPDLTLEEVQEIRLLNV

SEQ ID NO: 808845 - protein, 176 aa, Homo sapiens
MGFNLTFHLSYKFRLLLLLTLCLTVVGWATSNYFVGAIQEIPKAKEFMANFHKTLILGKGKTLTNEASTKKVELDNCPSVSPYLRGQSKLIFKPDLTLEEVQAENPKVSRGRYRPQECKALQRVAILVPHRNREKHLMYLLEHLHPFLQRQQLDYGIYVIHQAEGKKFRRSRRGSS

SEQ ID NO: 808846 - protein, 102 aa, Homo sapiens
MTWRRPWGSPASAGAVGRAGGLQEAEPGGRHRLRCWRSARRRLCCGPGEPDEVLPGRKKSRAHSYPRSRFRGRPQHFSAGCINLKKPLLPGNPPSPAFQRGN

SEQ ID NO: 808847 - protein, 102 aa, Homo sapiens; identical to SEQ ID NO: 808846

SEQ ID NO: 808848 - protein, 603 aa, Homo sapiens
MFDADTTTNLVTISFILPIGVHVFGLCSTALITDIIQLSTGYQAPYFLTVCKPNYTSLNVSCKENSYIVEDICSGSDLTVINSGRKSFPSQHATLAAFAAVYVSMYFNSTLTDSSKLLKPLLVFTFIICGIICGLTRITQYKNHPVDVYCGFLIGGGIALYLGLYAVGNFLPSDESMFQHRDALRSLTDLNQDPNRLLSAKNGSSSDGIAHTEGILNRNHRDASSLTNLKRANADVEIITPRSPMGKENMVTFSNTLPRANTPSVEDPVRRNASIHASMDSARSKQLLTQWKNKNESRKLSLQVIEPEPGQSPPRSIEMRSSSEPSRVGVNGDHHGPGNQYLKIQPGAVPGCNNSMPGGPRVSIQSRPGSSQLVHIPEETQENISTSPKSSSARAKWLKAAEKTVACNRSNSQPRIMQVIAMSKQQGVLQSSPKNTEGSTVSCTGSIRYKTLTDHEPSGIVRVEAHPENNRPIIQIPSTEGEGSGSWKWKAPEKGSLRQTYELNDLNRDSESCESLKDSFGSGDRKRSNIDSNEHHHHGITTIRVTPVEGSEIGSETLSISSSRDSTLRRKGNIILIPERSNSPENTRNIFYKGTSPTRAYKD

SEQ ID NO: 808849 - protein, 755 aa, Homo sapiens
GRGECDISGAGRLGLEEAARLSCAVHTSPGGGRRPGQAAGMSAKERPKGKVIKDSVTLLPCFYFVELPILASSVVSLYFLELTDVFKPVHSGFSCYDRSLSMPYIEPTQEAIPFLMLLSLAFAGPAITIMVGEGILYCCLSKRRNGVGLEPNINAGGCNFNSFLRRAVRFVGVHVFGLCSTALITDIIQLSTGYQAPYFLTVCKPNYTSLNVSCKENSYIVEDICSGSDLTVINSGRKSFPSQHATLAAFAAVYVSMYFNSTLTDSSKLLKPLLVFTFIICGIICGLTRITQYKNHPVDVYCGFLIGGGIALYLGLYAVGNFLPSDESMFQHRDALRSLTDLNQDPNRLLSAKNGSSSDGIAHTEGILNRNHRDASSLTNLKRANADVEIITPRSPMGKENMVTFSNTLPRANTPSVEDPVRRNASIHASMDSARSKQLLTQWKNKNESRKLSLQVIEPEPGQSPPRSIEMRSSSEPSRVGVNGDHHGPGNQYLKIQPGAVPGCNNSMPGGPRVSIQSRPGSSQLVHIPEETQENISTSPKSSSARAKWLKAAEKTVACNRSNSQPRIMQVIAMSKQQGVLQSSPKNTEGSTVSCTGSIRYKTLTDHEPSGIVRVEAHPENNRPIIQIPSTEGEGSGSWKWKAPEKGSLRQTYELNDLNRDSESCESLKDSFGSGDRKRSNIDSNEHHHHGITTIRVTPVEGSEIGSETLSISSSRDSTLRRKGNIILIPERSNSPENTRNIFYKGTSPTRAYKD

SEQ ID NO: 808850 - protein, 854 aa, Homo sapiens
MALEQALQAARQGELDVLRSLHAAGLLGPSLRDPLDALPVHHAARAGKLHCLRFLVEEAALPAAARARNGATPAHDASATGHLACLQWLLSQGGCRVQDKDNSGATVLHLAARFGHPEVVNWLLHHGGGDPTAATDMGALPIHYAAAKGDFPSLRLLVEHYPEGVNAQTKNGATPLYLACQEGHLEVTQYLVQECGADPHARAHDGMTPLHAAAQMGHSPVIVWLVSCTDVSLSEQDKDGATAMHFAASRGHTKVLSWLLLHGGEISADLWGGTPLHDAAENGELECCQILVVNGAELDVRDRDGYTAADLSDFNGHSHCTRYLRTVENLSVEHRVLSRDPSAELEAKQPDSGMSSPNTTVSVQPLNFDLSSPTSTLSNYDSCSSSHSSIKGQHPPCGLSSARAADIQSYMDMLNPELGLPRGTIGKPTPPPPPPSFPPPPPPPGTQLPPPPPGYPAPKPPVGPQAADIYMQTKNKLRHVETEALKKELSSCDGHDGLRRQDSSRKPRAFSKQPSTGDYYRQLGRCPGETLAARPGMAHSEEVRARQPARAGCPRLGPAARGSLEGPSAPPQAALLPGNHVPNGCAADPKASRELPLPPPPPPPPLPEAASSPPPAPPLPLESAGPGCGQRRSSSSTGSTKSFNMMSPTGDNSELLAEIKAGKSLKPTPQSKGLTTVFSGIGQPAFQPDSPLPSVSPALSPVRSPTPPAAGFQPLLNGSLVPVPPTTPAPGVQLDVEALIPTHDEQGRPIPEWKRQVMVRKMQLKMQEEEEQRRKEEEEEARLASMPAWRRDLLRKKLEEEREQKRKEEERQKQEELRREKEQSEKLRTLGYDESKLAPWQRQVILKKGDIAKY

SEQ ID NO: 808851 - protein, 854 aa, Homo sapiens; identical to SEQ ID NO: 808850

SEQ ID NO: 808852 - protein, 210 aa, Homo sapiens [sequence omitted]

SEQ ID NO: 808853 - protein, 248 aa, Homo sapiens
AVPVSSCPPSLLTPLSLLSSWSLEVRVLRHRKSTKSFNMMSPTGDNSELLAEIKAGKSLKPTPQSKGLTTVFSGIGQPAFQPDSPLPSVSPALSPVRSPTPPAAGFQPLLNGSLVPVPPTTPAPGVQLDVEALIPTHDEQGRPIPEWKRQVMVRKMQLKMQEEEEQRRKEEEEEARLASMPAWRRDLLRKKLEEEREQKRKEEERQKQEELRREKEQSEKLRTLGYDESKLAPWQRQVILKKGDIAKY

SEQ ID NO: 808854 - protein, 802 aa, Homo sapiens
MALEQALQAARQGELDVLRSLHAAGLLGPSLRDPLDALPVHHAARAGKLHCLRFLVEEAALPAAARARNGATPAHDASATGHLACLQWLLSQGGCRVQDKDNSGATVLHLAARFGHPEVVNWLLHHGGGDPTAATDMGALPIHYAAAKGDFPSLRLLVEHYPEGVNAQTKNGATPLYLACQEGHLEVTQYLVQECGADPHARAHDGMTPLHAAAQMGHSPVIVWLVSCTDVSLSEQDKDGATAMHFAASRGHTKVLSWLLLHGGEISADLWGGTPLHDAAENGELECCQILVVNGAELDVRDRDGYTAADLSDFNGHSHCTRYLRTVENLSVEHRVLSRDPSAELEAKQPDSGMSSPNTTVSVQPLNFDLSSPTSTLSNYDSCSSSHSSIKGQHPPCGLSSARAADIQSYMDMLNPELGLPRGTIGKPTPPPPPPSFPPPPPPPGTQLPPPPPGYPAPKPPVGPQAADIYMQTKNKLRHVETEALKKELSSCDGHDGLRRQDSSRKPRAFSKQPSTGDYYRQLGRCPGETLAARPGMAHSEEVRARQPARAGCPRLGPAARGSLEGPSAPPQAALLPGNHVPNGCAADPKASRELPLPPPPPPPPLPEAASSPPPAPPLPLESAGPGCGQRRSSSSTGSTKSFNMMSPTGDNSELLAEIKAGKSLKPTPQSKGLTTVFSGIGQPAFQPDSPLPSVSPALSPVRSPTPPAAGFQPLLNGSLVPVPPTTPAPGVQLDVEALIPTHDEQGRPIPEWKRQVMVRKMQLKMQEEEEQRRKERGGATEAGGAAAGEGTVREAADAGLR

SEQ ID NO: 808855 - protein, 159 aa, Homo sapiens
MSAAKCKQSRLWVKALVMKNKKKKIPKHFLTLVLKKTPSPKVCFSFNFLDFARLSGCKLPTLFWMDRDKVFKQRLCPLHKPFPPPPPQPPAAIITGAVKWLLSDGHTTRRQMKRSGSKRGSASQYQPAVPRGGSAGRTVFPRQAAMPPPTAKAPKGNIR

SEQ ID NO: 808856 - protein, 159 aa, Homo sapiens; identical to SEQ ID NO: 808855

SEQ ID NO: 808857 - protein, 402 aa, Homo sapiens
TELQKKSGTGTSVSKRLNMNPQIRNPMERMYRDTFYDNFENEPILYGRSYTWLCYEVKIKRGRSNLLWDTGVFRGQAQVYFKPQYHAEMCFLSWFCGNQLPAYKCFQITWFVSWTPCPDCVAKLAEFLSEHPNVTLTISAARLYYYWERDYRRALCRLSQAGARVKIMDYEEFAYCWENFVYNEGQQFMPWYKFDENYAFLHRTLKEILRYLMDPDTFTFNFNNDPLVLRRRQTYLCYEVERLDNGTWVLMDQHMGFLCNEAKNLLCGFYGRHAELRFLDLVPSLQLDPAQIYRVTWFISWSPCFSWGCAGEVRAFLQENTHVRLRIFAARIYDYDPLYKEALQMLRDAGAQVSIMTYDEFEYCWDTFVYRQGCPFQPWDGLEEHSQALSGRLRAILQNQGN

SEQ ID NO: 808858 - protein, 510 aa, Homo sapiens
TELQKKSGTGTSVSKRLNMNPQIRNPMERMYRDTFYDNFENEPILYGRSYTWLCYEVKIKRGRSNLLWDTGVFRGQAQVYFKPQYHAEMCFLSWFCGNQLPAYKCFQITWFVSWTPCPDCVAKLAEFLSEHPNVTLTISAARLYYYWERDYRRALCRLSQAGARVKIMDYEEFAYCWENFVYNEGQQFMPWYKFDENYAFLHRTLKEILRYLMDPDTFTFNFNNDPLVLRRRQTYLCYEVERLDNGTWVLMDQHMGFLCNEAKNLLCGFYGRHAELRFLDLVPSLQLDPAQIYRVTWFISWSPCFSWGCAGEVRAFLQENTHVRLRIFAARIYDYDPLYKEALQMLRDAGAQVSIMTYDEFEYCWDTFVYRQGCPFQPWDGLEEHSQALSGRLRAILQVRASSLCLVPHRPPPPPRSPVPCLPLCSEPPLGSLLPTGRPAPSLPFLLTASFSFPPPASLPPLPSLSLSPGHLPVPSFHSLTSCSIQPPCSSRIRETEGWASVSKEGRDLG

SEQ ID NO: 808859 - protein, 172 aa, Homo sapiens
LLLESELAVDRPRHHVAAAVLGELRRLRPAAWRCHDLRARGQRGGRTRGKRGRSEGKSEEQKERDHLLAAARPPCTASLVRVLQPSALATSAPRRARPACRGAPENLRVSWPAPAARGSPNLKRVSPCSGGFPSSTQSPMARSQGAVRVLKSPPNRGAGAGAKGACKAGRGH

SEQ ID NO: 808860 - protein, 571 aa, Homo sapiens
MDRSKRNSIAGFPPRVERLEEFEGGGGGEGNVSQVGRVWPSSYRALISAFSRLTRLDDFTCEKIGSGFFSEVFKVRHRASGQVMALKMNTLSSNRANMLKEVQLMNRLSHPNILRFMGVCVHQGQLHALTEYINSGNLEQLLDSNLHLPWTVRVKLAYDIAVGLSYLHFKGIFHRDLTSKNCLIKRDENGYSAVVADFGLAEKIPDVSMGSEKLAVVGSPFWMAPEVLRDEPYNEKADVFSYGIILCEIIARIQADPDYLPRTENFGLDYDAFQHMVGDCPPDFLQLTFNCCNMDPKLRPSFVEIGKTLEEILSRLQEEEQERDRKLQPTARGLLEKAPGVKRLSSLDDKIPHKSPCPRRTIWLSRSQSDIFSRKPPRTVSVLDPYYRPRDGAARTPKVNPFSARQDLMGGKIKFFDLPSKSVISLVFDLDAPGPGTMPLADWQEPLAPPIRRWRSLPGSPEFLHQEACPFVGREESLSDGPPPRLSSLKYRVKEIPPFRASALPAAQAHEAMDCSILQEENGFGSRPQGTSPCPAGASEEMEVEERPAGSTPATFSTSGIGLQTQGKQDG

SEQ ID NO: 808861 - protein, 555 aa, Homo sapiens
MDRSKRNSIAGFPPRVERLEEFEGGGGGEGNVSQVGRVWPSSYRALISAFSRLTRLDDFTCEKIGSGFFSEVFKVRHRASGQVMALKMNTLSSNRANMLKEVQLMNRLSHPNILSYINSGNLEQLLDSNLHLPWTVRVKLAYDIAVGLSYLHFKGIFHRDLTSKNCLIKRDENGYSAVVADFGLAEKIPDVSMGSEKLAVVGSPFWMAPEVLRDEPYNEKADVFSYGIILCEIIARIQADPDYLPRTENFGLDYDAFQHMVGDCPPDFLQLTFNCCNMDPKLRPSFVEIGKTLEEILSRLQEEEQERDRKLQPTARGLLEKAPGVKRLSSLDDKIPHKSPCPRRTIWLSRSQSDIFSRKPPRTVSVLDPYYRPRDGAARTPKVNPFSARQDLMGGKIKFFDLPSKSVISLVFDLDAPGPGTMPLADWQEPLAPPIRRWRSLPGSPEFLHQEACPFVGREESLSDGPPPRLSSLKYRVKEIPPFRASALPAAQAHEAMDCSILQEENGFGSRPQGTSPCPAGASEEMEVEERPAGSTPATFSTSGIGLQTQGKQDG

SEQ ID NO: 808862 - protein, 361 aa, Homo sapiens
  misc_feature (3)..(3): Xaa can be any naturally occurring amino acid
YRXSSEATKLHWMAPEVLRDEPYNEKADVFSYGIILCEIIARIQADPDYLPRTENFGLDYDAFQHMVGDCPPDFLQLTFNCCNMDPKLRPSFVEIGKTLEEILSRLQEEEQERDRKLQPTARGLLEKAPGVKRLSSLDDKIPHKSPCPRRTIWLSRSQSDIFSRKPPRTVSVLDPYYRPRDGAARTPKVNPFSARQDLMGGKIKFFDLPSKSVISLVFDLDAPGPGTMPLADWQEPLAPPIRRWRSLPGSPEFLHQEACPFVGREESLSDGPPPRLSSLKYRVKEIPPFRASALPAAQAHEAMDCSILQEENGFGSRPQGTSPCPAGASEEMEVEERPAGSTPATFSTSGIGLQTQGKQDG

SEQ ID NO: 808863 - protein, 116 aa, Homo sapiens [sequence omitted]

SEQ ID NO: 808864 - protein, 103 aa, Homo sapiens
CSVPGMDLLELSVAGCQGQLPTTSTEQARMGGGINELSTYAFHTHPQNFGLDYDAFQHMVGDCPPDFLQLTFNCCNVSVFLPLPFIRGWLNPFHLVRTVQRGC

SEQ ID NO: 808865 - protein, 118 aa, Homo sapiens
FFFQKILNCSLYTFSVVEGFMNQRGARVSSPILIISYETFRLHVGVLQKGSVGLVICDEVLDSQQLDSLNTSRRVLISGTPIQNDLLEYFSLVHFVNSGILGKNLALFATSERSPALS

SEQ ID NO: 808866 - protein, 747 aa, Homo sapiens
MRRSLAPSQLAKRKPEGRSCDDEDWQPGLVTPRKRKSSSETQIQECFLSPFRKPLSQLTNQPPCLDSSQHEAFIRSILSKPFKVPIPNYQGPLGSRALGLKRAGVRRALHDPLEKDALVLYEPPPLSAHDQLKLDKEKLPVHVVVDPILSKVLRPHQREGVKFLWECVTSRRIPGSHGCIMADEMGLGKTLQCITLMWTLLRQSPECKPEIDKAVVVSPSSLVKNWYNEVGKWLGGRIQPLAIDGGSKDEIDQKLEGFMNQRGARVSSPILIISYETFRLHVGVLQKGSVGLVICDEGHRLKNSENQTYQALDSLNTSRRVLISGTPIQNDLLEYFSLVHFVNSGILGTAHEFKKHFELPILKGRDAAASEADRQLGEERLRELTSIVNRCLIRRTSDILSKYLPVKIEQVVCCRLTPLQTELYKRFLRQAKPAEELLEGKMSVSSLSSITSLKKLCNHPALIYDKCVEEEDGFVGALDLFPPGYSSKALEPQLSGKMLVLDYILAVTRSRSSDKVVLVSNYTQTLDLFEKLCRARRYLYVRLDGTMSIKKRAKVVERFNSPSSPDFVFMLSSKAGGCGLNLIGANRLVMFDPDWNPANDEQAMARVWRDGQKKTCYIYRLLSAGTIEEKIFQRQSHKKALSSCVVDEEQDVERHFSLGELKELFILDEASLSDTHDRLHCRRCVNSRQIRPPPDGSDCTSDLAGWNHCTDKWGLRDEVLQAAWDAASTAITFVFHQRSHEEQRGLR

SEQ ID NO: 808867 - protein, 567 aa, Homo sapiens
MADEMGLGKTLQCITLMWTLLRQSPECKPEIDKAVVVSPSSLVKNWYNEVGKWLGGRIQPLAIDGGSKDEIDQKLEGFMNQRGARVSSPILIISYETFRLHVGVLQKGSVGLVICDEGHRLKNSENQTYQALDSLNTSRRVLISGTPIQNDLLEYFSLVHFVNSGILGTAHEFKKHFELPILKGRDAAASEADRQLGEERLRELTSIVNRCLIRRTSDILSKYLPVKIEQVVCCRLTPLQTELYKRFLRQAKPAEELLEGKMSVSSLSSITSLKKLCNHPALIYDKCVEEEDGFVGALDLFPPGYSSKALEPQLSGKMLVLDYILAVTRSRSSDKVVLVSNYTQTLDLFEKLCRARRYLYVRLDGTMSIKKRAKVVERFNSPSSPDFVFMLSSKAGGCGLNLIGANRLVMFDPDWNPANDEQAMARVWRDGQKKTCYIYRLLSAGTIEEKIFQRQSHKKALSSCVVDEEQDVERHFSLGELKELFILDEASLSDTHDRLHCRRCVNSRQIRPPPDGSDCTSDLAGWNHCTDKWGLRDEVLQAAWDAASTAITFVFHQRSHEEQRGLR

SEQ ID NO: 808868 - protein, 489 aa, Homo sapiens
MNQRGARVSSPILIISYETFRLHVGVLQKGSVGLVICDEGHRLKNSENQTYQALDSLNTSRRVLISGTPIQNDLLEYFSLVHFVNSGILGTAHEFKKHFELPILKGRDAAASEADRQLGEERLRELTSIVNRCLIRRTSDILSKYLPVKIEQVVCCRLTPLQTELYKRFLRQAKPAEELLEGKMSVSSLSSITSLKKLCNHPALIYDKCVEEEDGFVGALDLFPPGYSSKALEPQLSGKMLVLDYILAVTRSRSSDKVVLVSNYTQTLDLFEKLCRARRYLYVRLDGTMSIKKRAKVVERFNSPSSPDFVFMLSSKAGGCGLNLIGANRLVMFDPDWNPANDEQAMARVWRDGQKKTCYIYRLLSAGTIEEKIFQRQSHKKALSSCVVDEEQDVERHFSLGELKELFILDEASLSDTHDRLHCRRCVNSRQIRPPPDGSDCTSDLAGWNHCTDKWGLRDEVLQAAWDAASTAITFVFHQRSHEEQRGLR

SEQ ID NO: 808869 - protein, 306 aa, Homo sapiens [sequence omitted]

SEQ ID NO: 808870 - protein, 436 aa, Homo sapiens
MDSLNTSRRVLISGTPIQNDLLEYFSLVHFVNSGILGTAHEFKKHFELPILKGRDAAASEADRQLGEERLRELTSIVNRCLIRRTSDILSKYLPVKIEQVVCCRLTPLQTELYKRFLRQAKPAEELLEGKMSVSSLSSITSLKKLCNHPALIYDKCVEEEDGFVGALDLFPPGYSSKALEPQLSGKMLVLDYILAVTRSRSSDKVVLVSNYTQTLDLFEKLCRARRYLYVRLDGTMSIKKRAKVVERFNSPSSPDFVFMLSSKAGGCGLNLIGANRLVMFDPDWNPANDEQAMARVWRDGQKKTCYIYRLLSAGTIEEKIFQRQSHKKALSSCVVDEEQDVERHFSLGELKELFILDEASLSDTHDRLHCRRCVNSRQIRPPPDGSDCTSDLAGWNHCTDKWGLRDEVLQAAWDAASTAITFVFHQRSHEEQRGLR

SEQ ID NO: 808871 - protein, 444 aa, Homo sapiens
MRRSLAPSQLAKRKPEGRSCDDEDWQPGLVTPRKRKSSSETQIQECFLSPFRKPLSQLTNQPPCLDSSQHEAFIRSILSKPFKVPIPNYQGPLGSRALGLKRAGVRRALHDPLEKDALVLYEPPPLSAHDQLKLDKEKLPVHVVVDPILSKVLRPHQREGVKFLWECVTSRRIPGSHGCIMADEMGLGKTLQCITLMWTLLRQSPECKPEIDKAVVVSPSSLVKNWYNEVGKWLGGRIQPLAIDGGSKDEIDQKLEGFMNQRGARVSSPILIISYETFRLHVGVLQKGSVGLVICDEGHRLKNSENQTYQALDSLNTSRRVLISGTPIQNDLLEYFSLVHFVNSGILGTAHEFKKHFELPILKGRDAAASEADRQLGEERLRELTSIVNRCLIRRTSDILSKYLPVKIEQVVCCRLTPLQTELYKRFLGCCLHCHHLRLPPAFS

SEQ ID NO: 808872 - protein, 747 aa, Homo sapiens; identical to SEQ ID NO: 808866

SEQ ID NO: 808873 - protein, 567 aa, Homo sapiens; identical to SEQ ID NO: 808867

SEQ ID NO: 808874 - protein, 490 aa, Homo sapiens
MYEAGCVLRDEDILIISYETFRLHVGVLQKGSVGLVICDEGHRLKNSENQTYQALDSLNTSRRVLISGTPIQNDLLEYFSLVHFVNSGILGTAHEFKKHFELPILKGRDAAASEADRQLGEERLRELTSIVNRCLIRRTSDILSKYLPVKIEQVVCCRLTPLQTELYKRFLRQAKPAEELLEGKMSVSSLSSITSLKKLCNHPALIYDKCVEEEDGFVGALDLFPPGYSSKALEPQLSGKMLVLDYILAVTRSRSSDKVVLVSNYTQTLDLFEKLCRARRYLYVRLDGTMSIKKRAKVVERFNSPSSPDFVFMLSSKAGGCGLNLIGANRLVMFDPDWNPANDEQAMARVWRDGQKKTCYIYRLLSAGTIEEKIFQRQSHKKALSSCVVDEEQDVERHFSLGELKELFILDEASLSDTHDRLHCRRCVNSRQIRPPPDGSDCTSDLAGWNHCTDKWGLRDEVLQAAWDAASTAITFVFHQRSHEEQRGLR

SEQ ID NO: 808875 - protein, 306 aa, Homo sapiens [sequence omitted]

SEQ ID NO: 808876 - protein, 198 aa, Homo sapiens
MARFTIVDGKMGKGVSFKDVAGMHEAKLEVREFVDYLKSPERFLQLGAKVPKGALLLGPPGCGKTLLAKAVATEAQVPFLAMAGPEFVEVIGGLGAARVRSLFKEARARAPCIVYIDEIDAVGKKRSTTMSGFSNTEEEQTLNQLLVEMDGASLDQLPSQGTMRKLRGKTPACSCLTEPTGSRRAMEGHSLCWGCLLH

SEQ ID NO: 808877 - protein, 489 aa, Homo sapiens
MAVLLLLLRALRRGPGPGPRPLWGPGPAWSPGFPARPGRGRPYMASRPPGDLAEAVGRALQSLQLRLLTPTFEGINGLLLKQHLVQNPVRLWQLLGGTFYFNTSRLKQKNKEKDKSKGKAPEEDEEERRRRERDDQMYRERLRTLLVIAVVMSLLNALSTSGGSISWNDFVHEMLAKGEVQRVQVVPESDVVEVYLHPGAVVFGRPRLALMYRMQVANIDKFEEKLRAAEDELNIEAKDRIPVSYKRTGFFGNALYSVGMTAVGLAILWYVFRLAGMTGREGGFSAFNQLKMARFTIVDGKMGKGVSFKDVAGMHEAKLEVREFVDYLKSPERFLQLGAKVPKGALLLGPPGCGKTLLAKAVATEAQVPFLAMAGPEFVEVIGGLGAARVRSLFKEARARAPCIVYIDEIDAVGKKRSTTMSGFSNTEEEQTLNQLLVEMDGASLDQLPSQGTMRKLRGKTPACSCLTEPTGSRRAMEGHSLCWGCLLH

SEQ ID NO: 808878 - protein, 121 aa, Homo sapiens
RGTLTAPRFLSITSGPLPEHLQPFLHGRPPQRRHERCQRTPTPDTPAPPPKRDLSGASPRAPSPPSRPGAGTGARRVRESYRLQTLSRCGKQETKPKTLVVLFNISGQKRSPICFSPIAAS

SEQ ID NO: 808879 - protein, 124 aa, Homo sapiens
GRGKAGAVLAGTGVYALLPEAGSRLCSLPGFCAATPHPRRLSSLPLHAPAGQGELQASDFISLWKARDQAKNFGRAFQHLRSKEVANLLFSHCCVLEGCGAMIPLLKILLNASPLCCSLNNEDI

SEQ ID NO: 808880 - protein, 116 aa, Homo sapiens
RRQRPEEAGGGGGGGGGRGSRRGRGGGERGGPRAQAVRRRLSALRGRGRRRRLKRLRRAQETSGAAALERACASVREELLPVLQFSEPGKRAVQTSSGSHSGCFDVGWKRVRPKMF

SEQ ID NO: 808881 - protein, 127 aa, Homo sapiens
MRPLDIVELAEPEEVEVLEPEEDFEQFLLPVINEMREDIASLTREHGRAYLRNRSKLWEMDNMLIQIKTQVEASEESALNHLQNPGDAAEGRAAKRCEKAEEKAKEIAKMAEMLVELVRRIEKSESS

SEQ ID NO: 808882 - protein, 127 aa, Homo sapiens; identical to SEQ ID NO: 808881

SEQ ID NO: 808883 - protein, 148 aa, Homo sapiens
SGFVRRYSAHIAIAVPRQWEEMRPLDIVELAEPEEVEVLEPEEDFEQFLLPVINEMREDIASLTREHGRAYLRNRSKLWEMDNMLIQIKTQVEASEESALNHLQNPGDAAEGRAAKRCEKAEEKAKEIAKMAEMLVELVRRIEKSESS

SEQ ID NO: 808884 - protein, 127 aa, Homo sapiens; identical to SEQ ID NO: 808881

SEQ ID NO: 808885 - protein, 145 aa, Homo sapiens
MGTRPRDIAIAVPRQWEEMRPLDIVELAEPEEVEVLEPEEDFEQFLLPVINEMREDIASLTREHGRAYLRNRSKLWEMDNMLIQIKTQVEASEESALNHLQNPGDAAEGRAAKRCEKAEEKAKEIAKMAEMLVELVRRIEKSESS

SEQ ID NO: 808886 - protein, 146 aa, Homo sapiens
WADAWAAHIAIAVPRQWEEMRPLDIVELAEPEEVEVLEPEEDFEQFLLPVINEMREDIASLTREHGRAYLRNRSKLWEMDNMLIQIKTQVEASEESALNHLQNPGDAAEGRAAKRCEKAEEKAKEIAKMAEMLVELVRRIEKSESS

SEQ ID NO: 808887 - protein, 153 aa, Homo sapiens
DAWVDGRVGRPTRPDIAIAVPRQWEEMRPLDIVELAEPEEVEVLEPEEDFEQFLLPVINEMREDIASLTREHGRAYLRNRSKLWEMDNMLIQIKTQVEASEESALNHLQNPGDAAEGRAAKRCEKAEEKAKEIAKMAEMLVELVRRIEKSESS

SEQ ID NO: 808888 - protein, 127 aa, Homo sapiens; identical to SEQ ID NO: 808881

SEQ ID NO: 808889 - protein, 127 aa, Homo sapiens; identical to SEQ ID NO: 808881

SEQ ID NO: 808890 - protein, 69 aa, Homo sapiens
QLGTIFEIIKTQVEASEESALNHLQNPGDAAEGRAAKRCEKAEEKAKEIAKMAEMLVELVRRIEKSESS

SEQ ID NO: 808891 - protein, 127 aa, Homo sapiens; identical to SEQ ID NO: 808881

SEQ ID NO: 808892 - protein, 127 aa, Homo sapiens; identical to SEQ ID NO: 808881

SEQ ID NO: 808893 - protein, 127 aa, Homo sapiens; identical to SEQ ID NO: 808881

SEQ ID NO: 808894 - protein, 127 aa, Homo sapiens; identical to SEQ ID NO: 808881

SEQ ID NO: 808895 - protein, 76 aa, Homo sapiens
  misc_feature (28)..(28): Xaa can be any naturally occurring amino acid
  misc_feature (48)..(48): Xaa can be any naturally occurring amino acid
ANERVITPPESLRSPLRLRRLGQLEKMXNFLEMDYGDGWTTHEKVTLXPGLRELKMGKLATFMLKINVPPLKPSGP

SEQ ID NO: 808896 - protein, 148 aa, Homo sapiens
LDFVRRYSAHIAIAVPRQWEEMRPLDIVELAEPEEVEVLEPEEDFEQFLLPVINEMREDIASLTREHGRAYLRNRSKLWEMDNMLIQIKTQVEASEESALNHLQNPGDAAEGRAAKRCEKAEEKAKEIAKMAEMLVELVRRIEKSESS

SEQ ID NO: 808897 - protein, 127 aa, Homo sapiens; identical to SEQ ID NO: 808881

SEQ ID NO: 808898 - protein, 311 aa, Homo sapiens
MARPQPCGPPHARCGSPSLPERPLQVKVVGLFSCPNFQIAKSAAENLKNNHPSKFEDPILVPLQEFAWHQYLQEKKRELKNETWEYSSSVISFVNGQFLGDALDLQKWAHEVWDIVDIKPSALYDALTEDFSAKFLRDTKHDFVFLDICIDSSPIGRLIFELYCDVCPKTCKNFQVLCTGKAGFSQRGIRLHYKNSIFHRIVQNGWIQGGDIVYGKGDNGESIYGPTFEDENFSVPHNKRGVLGMANKGRHSNGSQFYITLQATPYLDRKFVAFGQLIEGTEVLKQLELVPTQNERPIHMCRITDSGDPYA

SEQ ID NO: 808899 - protein, 311 aa, Homo sapiens; identical to SEQ ID NO: 808898

SEQ ID NO: 808900 - protein, 279 aa, Homo sapiens
MARPQPCGPPHARCGSPSLPERPLQVKVVGLFSCPNFQIAKSAAEELKNETWEYSSSVISFVNGQFLGDALDLQKWAHEVWDIVDIKPSALYDALTEDFSAKFLRDTKHDFVFLDICIDSSPIGRLIFELYCDVCPKTCKNFQVLCTGKAGFSQRGIRLHYKNSIFHRIVQNGWIQGGDIVYGKGDNGESIYGPTFEDENFSVPHNKRGVLGMANKGRHSNGSQFYITLQATPYLDRKFVAFGQLIEGTEVLKQLELVPTQNERPIHMCRITDSGDPYA

SEQ ID NO: 808901 - protein, 199 aa, Homo sapiens
MARPQPCGPPHARCGSPSLPERPLQVKVVGLFSCPNFQIAKSAAEELKNETWEYSSSVISFVNGQFLGDALDLQKWAHEVWDIVDIKPSALYDALTEDFSAKFLRDTKHDFVFLDICIDSSPIGRLIFELYCDVCPKTCKNFQVLCTGKAGFSQRGIRLHYKNSIFHRIVQNGWIQGGDIVYGKGDNGESIYGPTFEGN

SEQ ID NO: 808902 - protein, 137 aa, Homo sapiens
MARPQPCGPPHARCGSPSLPERPLQVKVVGLFSCPNFQIAKSAAEVTTEKPPSWAALPATRSRPRGLQAPRLLEAAGVEAPPAEEGAGVSWPGGLRLEDREESIGGQVRVRGRAFHLATFKGRTERRKGSEPRWEIR

SEQ ID NO: 808903 - protein, 311 aa, Homo sapiens; identical to SEQ ID NO: 808898

SEQ ID NO: 808904 - protein, 231 aa, Homo sapiens
MARPQPCGPPHARCGSPSLPERPLQVKVVGLFSCPNFQIAKSAAENLKNNHPSKFEDPILVPLQEFAWHQYLQEKKRELKNETWEYSSSVISFVNGQFLGDALDLQKWAHEVWDIVDIKPSALYDALTEDFSAKFLRDTKHDFVFLDICIDSSPIGRLIFELYCDVCPKTCKNFQVLCTGKAGFSQRGIRLHYKNSIFHRIVQNGWIQGGDIVYGKGDNGESIYGPTFEGN

SEQ ID NO: 808905 - protein, 164 aa, Homo sapiens
MARPQPCGPPHARCGSPSLPERPLQVKVVGLFSCPNFQIAKSAAEELKNETWEYSSSVISFVNGQFLGDALDLQKWAHEVWDIVDIKPSALYDALTEDFSAKFLRDTKVLCTGKAGFSQRGIRLHYKNSIFHRIVQNGWIQGGDIVYGKGDNGESIYGPTFEGN

SEQ ID NO: 808906 - protein, 599 aa, Homo sapiens
MSGPCGEKPVLEASPTMSLWEFEDSHSRQGTPRPGQELAAEEASALELQMKVDFFRKLGYSSTEIHSVLQKLGVQADTNTVLGELVKHGTATERERQTSPDPCPQLPLVPRGGGTPKAPNLEPPLPEEEKEGSDLRPVVIDGSNVAMSHGNKEVFSCRGILLAVNWFLERGHTDITVFVPSWRKEQPRPDVPITDQHILRELEKKKILVFTPSRRVGGKRVVCYDDRFIVKLAYESDGIVVSNDTYRDLQGERQEWKRFIEERLLMYSFVNDKFMPPDDPLGRHGPSLDNFLRKKPLTLEHRKQPCPYGRKCTYGIKCRFFHPERPSCPQRSVADELRANALLSPPRAPSKDKNGRRPSPSSQSSSLLTESEQCSLDGKKLGAQASPGSRQEGLTQTYAPSGRSLAPSGGSGSSFGPTDWLPQTLDSLPYVSQDCLDSGIGSLESQMSELWGVRGGGPGEPGPPRAPYTGYSPYGSELPATAAFSAFGRAMGAGHFSVPADYPPAPPAFPPREYWSEPYPLPPPTSVLQEPPVQSPGAGRSPWGRAGSLAKEQASVYTKLCGVFPPHLVEAVMGRFPQLLDPQQLAAEILSYKSQHPSE

SEQ ID NO: 808907 - protein, 107 aa, Homo sapiens
SGAGRGEAAPPPGRSPGTAPPLARFRVSASPPPARAPPHIKAPPSLPPGLGPMETPPAAAGAWRGEARRGGCGPRRGSGRERSGGVRAEPRGGDGRGREGWRIMVFI

SEQ ID NO: 808908 - protein, 599 aa, Homo sapiens; identical to SEQ ID NO: 808906

SEQ ID NO: 808909 - protein, 520 aa, Homo sapiens
VRKSSTPEEVKKRKKAVLFCLSEDKKNIILEEGKEILVGDVGQTVDDPYATFVKMLPDKDCRYALYDDNHGNKEVFSCRGILLAVNWFLERGHTDITVFVPSWRKEQPRPDVPITDQHILRELEKKKILVFTPSRRVGGKRVVCYDDRFIVKLAYESDGIVVSNDTYRDLQGERQEWKRFIEERLLMYSFVNDKFMPPDDPLGRHGPSLDNFLRKKPLTLEHRKQPCPYGRKCTYGIKCRFFHPERPSCPQRSVADELRANALLSPPRAPSKDKNGRRPSPSSQSSSLLTESEQCSLDGKKLGAQASPGSRQEGLTQTYAPSGRSLAPSGGSGSSFGPTDWLPQTLDSLPYVSQDCLDSGIGSLESQMSELWGVRGGGPGEPGPPRAPYTGYSPYGSELPATAAFSAFGRAMGAGHFSVPADYPPAPPAFPPREYWSEPYPLPPPTSVLQEPPVQSPGAGRSPWGRAGSLAKEQASVYTKLCGVFPPHLVEAVMGRFPQLLDPQQLAAEILSYKSQHPSE

SEQ ID NO: 808910 - protein, 325 aa, Homo sapiens
MPPDDPLGRHGPSLDNFLRKKPLTLEHRKQPCPYGRKCTYGIKCRFFHPERPSCPQRSVADELRANALLSPPRAPSKDKNGRRPSPSSQSSSLLTESEQCSLDGKKLGAQASPGSRQEGLTQTYAPSGRSLAPSGGSGSSFGPTDWLPQTLDSLPYVSQDCLDSGIGSLESQMSELWGVRGGGPGEPGPPRAPYTGYSPYGSELPATAAFSAFGRAMGAGHFSVPADYPPAPPAFPPREYWSEPYPLPPPTSVLQEPPVQSPGAGRSPWGRAGSLAKEQASVYTKLCGVFPPHLVEAVMGRFPQLLDPQQLAAEILSYKSQHPSE

SEQ ID NO: 808911 - protein, 244 aa, Homo sapiens [sequence omitted]

SEQ ID NO: 808912 - protein, 355 aa, Homo sapiens
MSGPCGEKPVLEASPTMSLWEFEDSHSRQGTPRPGQELAAEEASALELQMKVDFFRKLGYSSTEIHSVLQKLGVQADTNTVLGELVKHGTATERERQTSPDPCPQLPLVPRGGGTPKAPNLEPPLPEEEKEGSDLRPVVIDGSNVAMSHGNKEVFSCRGILLAVNWFLERGHTDITVFVPSWRKEQPRPDVPITDQHILRELEKKKILVFTPSRRVGGKRVVCYDDRFIVKLAYESDGIVVSNDTYRDLQGERQEWKRFIEERLLMYSFVNDKLAIGPFSAIRSPCMAPTSREFFAPSAGLCPLMTHWAGTGPAWTTSCVRSHSLWSTGSSRVPMVWNPACPPRPSSLLPFLSPV

SEQ ID NO: 808913 - protein, 83 aa, Homo sapiens
AACVQMFLVFRQQTVPRQGRGWGMEEASAELVLAPVTLALTTPVCGHQQVREPCRPGSRSRWALTCVHPSPPRPAHPAGTGEE

SEQ ID NO: 808914 - protein, 134 aa, Homo sapiens
MWNQLFLYMFISTKFHYLNYFQTNNFQARVCVPGFSAPPILRSLFVCLLFLTQKYRWLGKIHLIELSYAVSVYICISFYSYLAFFFFFTQIWFSLPFVKTRIEQHCTSEMVPRKCLCSSVFFVKTSMQRQSQQS

SEQ ID NO: 808915 - protein, 777 aa, Homo sapiens
MAAPGGRSEPPQLPEYSCSYMVSRPVYSELAFQQQHERRLQERKTLRESLAKCCSCSRKRAFGVLKTLVPILEWLPKYRVKEWLLSDVISGVSTGLVATLQGMAYALLAAVPVGYGLYSAFFPILTYFIFGTSRHISVGPFPVVSLMVGSVVLSMAPDEHFLVSSSNGTVLNTTMIDTAARDTARVLIASALTLLVGIIQLIFGGLQIGFIVRYLADPLVGGFTTAAAFQVLVSQLKIVLNVSTKNYNGVLSIIYTLVEIFQNIGDTNLADFTAGLLTIVVCMAVKELNDRFRHKIPVPIPIEVIVTIIATAISYGANLEKNYNAGIVKSIPRGFLPPELPPVSLFSEMLAASFSIAVVAYAIAVSVGKVYATKYDYTIDGNQEFIAFGISNIFSGFFSCFVATTALSRTAVQESTGGVAGIISAAIVMIAILALGKLLEPLQKSVLAAVVIANLKGMFMQLCDIPRLWRQNKIDAVIWVFTCIVSIILGLDLGLLAGLIFGLLTVVLRVQFPSWNGLGSIPSTDIYKSTKNYKNIEEPQGVKILRFSSPIFYGNVDGFKKCIKSTVGFDAIRVYNKRLKALRKIQKLIKSGQLRATKNGIISDAVSTNNAFEPDEDIEDLEELDIPTKEIEIQVDWNSELPVKVNVPKVPIHSLVLDCGAISFLDVVGVRSLRVIVKEFQRIDVNVYFASLQDYVIEKLEQCGFFDDNIRKDTFFLTVHDAILYLQNQVKSQEGQGSILETITLIQDCKDTLELIETELTEEELDVQDEAMRTLAS

SEQ ID NO: 808916 - protein, 349 aa, Homo sapiens
MIAILALGKLLEPLQKSVLAAVVIANLKGMFMQLCDIPRLWRQNKIDAVIWVFTCIVSIILGLDLGLLAGLIFGLLTVVLRVQFPSWNGLGSIPSTDIYKSTKNYKNIEEPQGVKILRFSSPIFYGNVDGFKKCIKSTVGFDAIRVYNKRLKALRKIQKLIKSGQLRATKNGIISDAVSTNNAFEPDEDIEDLEELDIPTKEIEIQVDWNSELPVKVNVPKVPIHSLVLDCGAISFLDVVGVRSLRVIVKEFQRIDVNVYFASLQDYVIEKLEQCGFFDDNIRKDTFFLTVHDAILYLQNQVKSQEGQGSILETITLIQDCKDTLELIETELTEEELDVQDEAMRTLAS

SEQ ID NO: 808917 - protein, 112 aa, Homo sapiens
EQHSCRIPWSETQDNIKSNESRSFQEGRAARCRAALNDGLAWRPWWQQWPHQAPCSHSTKTQVSERDACTKSPFPLFQVSGCCVILFCSIQFCKEPSECFHQWTMKGIWTSS

SEQ ID NO: 808918 - protein, 471 aa, Homo sapiens
MGSRCVSSNIVLLTQAFRKKFVIPDFEEFTGHVDRIFEDVKELTGGKVAAYIPQLAKSNPDLWGVSLCTVDGQRHSVGHTKIPFCLQSCVKPLTYAISISTLGTDYVHKFVGKEPSGLRYNKLSLNEEGIPHNPMVNAGAIVVSSLIKMDCNKAEKFDFVLQYLNKMAGNEYMGFSNATFQSEKETGDRNYAIGYYLKEKKCFPKGVDMMAALDLYFQLCSVEVTCESGSVMAATLANGGICPITGESVLSAEAVRNTLSLMHSCGMYDFSGQFAFHVGLPAKSAVSGAILLVVPNVMGMMCLSPPLDKLGNSHRGTSFCQKLVSLFNFHNYDNLRHCARKLDPRREGAEIRNKTVVNLLFAAYSGDVSALRRFALSAMDMEQKDYDSRTALHVAAAEGHIEVVKFLIEACKVNPFAKDRWGNIPLDDAVQFNHLEVVKLLQDYQDSYTLSETQAEAAAEALSKENLESMV

SEQ ID NO: 808919 - protein, 559 aa, Homo sapiens
MRSMKALQKALSRAGSHCGRGGWGHPSRSPLLGGGVRHHLSEAAAQGRETPHSHQPQHQDHDSSESGMLSRLGDLLFYTIAEGQERIPIHKFTTALKATGLQTSDPRLRDCMSEMHRVVQESSSGGLLDRDLFRKVAAYIPQLAKSNPDLWGVSLCTVDGQRHSVGHTKIPFCLQSCVKPLTYAISISTLGTDYVHKFVGKEPSGLRYNKLSLNEEGIPHNPMVNAGAIVVSSLIKMDCNKAEKFDFVLQYLNKMAGNEYMGFSNATFQSEKETGDRNYAIGYYLKEKKCFPKGVDMMAALDLYFQLCSVEVTCESGSVMAATLANGGICPITGESVLSAEAVRNTLSLMHSCGMYDFSGQFAFHVGLPAKSAVSGAILLVVPNVMGMMCLSPPLDKLGNSHRGTSFCQKLVSLFNFHNYDNLRHCARKLDPRREGAEIRNKTVVNLLFAAYSGDVSALRRFALSAMDMEQKDYDSRTALHVAAAEGHIEVVKFLIEACKVNPFAKDRWGNIPLDDAVQFNHLEVVKLLQDYQDSYTLSETQAEAAAEALSKENLESMV

SEQ ID NO: 808920 - protein, 262 aa, Homo sapiens [sequence omitted]

SEQ ID NO: 808921 - protein, 446 aa, Homo sapiens
MRSMKALQKALSRAGSHCGRGGWGHPSRSPLLGGGVRHHLSEAAAQGRETPHSHQPQHQDHDSSESGMLSRLGDLLFYTIAEGQERIPIHKFTTALKATGLQTSDPRLRDCMSEMHRVVQESSSGGLLDRDLFRKCVSSNIVLLTQAFRKKFVIPDFEEFTGHVDRIFEDVKELTGGKVAAYIPQLAKSNPDLWGVSLCTVDGQRHSVGHTKIPFCLQSCVKPLTYAISISTLGTDYVHKFVGKEPSGLRYNKLSLNEEGIPHNPMVNAGAIVVSSLIKMDCNKAEKFDFVLQYLNKMAGNEYMGFSNATFQSEKETGDRNYAIGYYLKEKKLCSVEVTCESGSVMAATLANGGICPITGESVLSAEAVRNTLSLMHSCGMYDFSGQFAFHVGLPAKSAVSGAILLVVPNVMGMMCLSPPLDKLGNSHRGTSFCQVRCFAYSTYYF

SEQ ID NO: 808922 - protein, 126 aa, Homo sapiens
FSFIPNAPHLAPVLRVPLTLEPALKGQAPSPAPAPAPPTGPTFSVFQVQRSLTELPRTLSRSLRPSFPATARGPGRTCRAGGLLGHALHEGSAEGPEPGWQSLRARRLGSPEPEPPPWRGRPAPPQ

SEQ ID NO: 808923 - protein, 602 aa, Homo sapiens
MRSMKALQKALSRAGSHCGRGGWGHPSRSPLLGGGVRHHLSEAAAQGRETPHSHQPQHQDHDSSESGMLSRLGDLLFYTIAEGQERIPIHKFTTALKATGLQTSDPRLRDCMSEMHRVVQESSSGGLLDRDLFRKCVSSNIVLLTQAFRKKFVIPDFEEFTGHVDRIFEDVKELTGGKVAAYIPQLAKSNPDLWGVSLCTVDGQRHSVGHTKIPFCLQSCVKPLTYAISISTLGTDYVHKFVGKEPSGLRYNKLSLNEEGIPHNPMVNAGAIVVSSLIKMDCNKAEKFDFVLQYLNKMAGNEYMGFSNATFQSEKETGDRNYAIGYYLKEKKCFPKGVDMMAALDLYFQLCSVEVTCESGSVMAATLANGGICPITGESVLSAEAVRNTLSLMHSCGMYDFSGQFAFHVGLPAKSAVSGAILLVVPNVMGMMCLSPPLDKLGNSHRGTSFCQKLVSLFNFHNYDNLRHCARKLDPRREGAEIRNKTVVNLLFAAYSGDVSALRRFALSAMDMEQKDYDSRTALHVAAAEGHIEVVKFLIEACKVNPFAKDRWGNIPLDDAVQFNHLEVVKLLQDYQDSYTLSETQAEAAAEALSKENLESMV

SEQ ID NO: 808924 - protein, 602 aa, Homo sapiens; identical to SEQ ID NO: 808923

SEQ ID NO: 808925 - protein, 141 aa, Homo sapiens
STSISLFSTHSCPGGSLHPSAGQVKPRPVGCLPVHCGWSTVRCWARGRGGRAQVPNTGQPLSWHLSASRHSVGHTKIPFCLQSCVKPLTYAISISTLGTDYVHKFVGKEPSGLRYNKLSLNEEGEHYQGSDRTYSCPLLLI

SEQ ID NO: 808926 - protein, 1133 aa, Homo sapiens
GTRRYWARAAPGSGRLGTPRGRAPAAAAAAAPALRCAPPPVPAAERSLRARRAPSAPFPEPAAMGAARGSPARPRRLPLLSVLLLPLLGGTQTAIVFIKQPSSQDALQGRRALLRCEVEAPGPVHVYWLLDGAPVQDTERRFAQGSSLSFAAVDRLQDSGTFQCVARDDVTGEEARSANASFNIKWIEAGPVVLKHPASEAEIQPQTQVTLRCHIDGHPRPTYQWFRDGTPLSDGQSNHTVSSKERNLTLRPAGPEHSGLYSCCAHSAFGQACSSQNFTLSIADESFARVVLAPQDVVVARYEEAMFHCQFSAQPPPSLQWLFEDETPITNRSRPPHLRRATVFANGSLLLTQVRPRNAGIYRCIGQGQRGPPIILEATLHLAEIEDMPLFEPRVFTAGSEERVTCLPPKGLPEPSVWWEHAGVRLPTHGRVYQKGHELVLANIAESDAGVYTCHAANLAGQRRQDVNITVATVPSWLKKPQDSQLEEGKPGYLDCLTQATPKPTVVWYRNQMLISEDSRFEVFKNGTLRINSVEVYDGTWYRCMSSTPAGSIEAQARVQVLEKLKFTPPPQPQQCMEFDKEATVPCSATGREKPTIKWERADGSSLPEWVTDNAGTLHFARVTRDDAGNYTCIASNGPQGQIRAHVQLTVAVFITFKVEPERTTVYQGHTALLQCEAQGDPKPLIQWKGKDRILDPTKLGPRMHIFQNGSLVIHDVAPEDSGRYTCIAGNSCNIKHTEAPLYVVDKPVPEESEGPGSPPPYKMIQTIGLSVGAAVAYIIAVLGLMFYCKKRCKAKRLQKQPEGEEPEMECLNGGPLQNGQPSAEIQEEVALTSLGSGPAATNKRHSTSDKMHFPRSSLQPITTLGKSEFGEVFLAKAQGLEEGVAETLVLVKSLQSKDEQQQLDFRRELEMFGKLNHANVVRLLGLCREAEPHYMVLEYVDLGDLKQFLRISKSKDEKLKSQPLSTKQKVALCTQVALGMEHLSNNRFVHKDLAARNCLVSAQRQVKVSALGLSKDVYNSEYYHFRQAWVPLRWMSPEAILEGDFSTKSDVWAFGVLMWEVFTHGEMPHGGQADDEVLADLQAGKARLPQPEGCPSKLYRLMQRCWALSPKDRPSFSEIASALGDSTVDSKP

SEQ ID NO: 808927 - protein, 854 aa, Homo sapiens
MGTLDESFARVVLAPQDVVVARYEEAMFHCQFSAQPPPSLQWLFEDETPITNRSRPPHLRRATVFANGSLLLTQVRPRNAGIYRCIGQGQRGPPIILEATLHLAEIEDMPLFEPRVFTAGSEERVTCLPPKGLPEPSVWWEHAGVRLPTHGRVYQKGHELVLANIAESDAGVYTCHAANLAGQRRQDVNITVATVPSWLKKPQDSQLEEGKPGYLDCLTQATPKPTVVWYRNQMLISEDSRFEVFKNGTLRINSVEVYDGTWYRCMSSTPAGSIEAQARVQVLEKLKFTPPPQPQQCMEFDKEATVPCSATGREKPTIKWERADGSSLPEWVTDNAGTLHFARVTRDDAGNYTCIASNGPQGQIRAHVQLTVAVFITFKVEPERTTVYQGHTALLQCEAQGDPKPLIQWKGKDRILDPTKLGPRMHIFQNGSLVIHDVAPEDSGRYTCIAGNSCNIKHTEAPLYVVDKPVPEESEGPGSPPPYKMIQTIGLSVGAAVAYIIAVLGLMFYCKKRCKAKRLQKQPEGEEPEMECLNGGPLQNGQPSAEIQEEVALTSLGSGPAATNKRHSTSDKMHFPRSSLQPITTLGKSEFGEVFLAKAQGLEEGVAETLVLVKSLQSKDEQQQLDFRRELEMFGKLNHANVVRLLGLCREAEPHYMVLEYVDLGDLKQFLRISKSKDEKLKSQPLSTKQKVALCTQVALGMEHLSNNRFVHKDLAARNCLVSAQRQVKVSALGLSKDVYNSEYYHFRQAWVPLRWMSPEAILEGDFSTKSDVWAFGVLMWEVFTHGEMPHGGQADDEVLADLQAGKARLPQPEGCPSKLYRLMQRCWALSPKDRPSFSEIASALGDSTVDSKP

SEQ ID NO: 808928 - protein, 89 aa, Homo sapiens
LGESGRPGDRTEIPMVARVSGLIVTLLSSSFPGGPLQNGQPSAEIQEEVALTSLGSGPAATNKRHSTSDKMHFPRSSLQPITTLVGMLP

SEQ ID NO: 808929 - protein, 933 aa, Homo sapiens
TSSLSARMKCGFQDDGWAPLPTYQWFRDGTPLSDGQSNHTVSSKERNLTLRPAGPEHSGLYSCCAHSAFGQACSSQNFTLSIADESFARVVLAPQDVVVARYEEAMFHCQFSAQPPPSLQWLFEDETPITNRSRPPHLRRATVFANGSLLLTQVRPRNAGIYRCIGQGQRGPPIILEATLHLAEIEDMPLFEPRVFTAGSEERVTCLPPKGLPEPSVWWEHAGVRLPTHGRVYQKGHELVLANIAESDAGVYTCHAANLAGQRRQDVNITVATVPSWLKKPQDSQLEEGKPGYLDCLTQATPKPTVVWYRNQMLISEDSRFEVFKNGTLRINSVEVYDGTWYRCMSSTPAGSIEAQARVQVLEKLKFTPPPQPQQCMEFDKEATVPCSATGREKPTIKWERADGSSLPEWVTDNAGTLHFARVTRDDAGNYTCIASNGPQGQIRAHVQLTVAVFITFKVEPERTTVYQGHTALLQCEAQGDPKPLIQWKGKDRILDPTKLGPRMHIFQNGSLVIHDVAPEDSGRYTCIAGNSCNIKHTEAPLYVVDKPVPEESEGPGSPPPYKMIQTIGLSVGAAVAYIIAVLGLMFYCKKRCKAKRLQKQPEGEEPEMECLNGGPLQNGQPSAEIQEEVALTSLGSGPAATNKRHSTSDKMHFPRSSLQPITTLGKSEFGEVFLAKAQGLEEGVAETLVLVKSLQSKDEQQQLDFRRELEMFGKLNHANVVRLLGLCREAEPHYMVLEYVDLGDLKQFLRISKSKDEKLKSQPLSTKQKVALCTQVALGMEHLSNNRFVHKDLAARNCLVSAQRQVKVSALGLSKDVYNSEYYHFRQAWVPLRWMSPEAILEGDFSTKSDVWAFGVLMWEVFTHGEMPHGGQADDEVLADLQAGKARLPQPEGCPSKLYRLMQRCWALSPKDRPSFSEIASALGDSTVDSKP

SEQ ID NO: 808930 - protein, 797 aa, Homo sapiens
GTRRYWARAAPGSGRLGTPRGRAPAAAAAAAPALRCAPPPVPAAERSLRARRAPSAPFPEPAAMGAARGSPARPRRLPLLSVLLLPLLGGTQTAIVFIKQPSSQDALQGRRALLRCEVEAPGPVHVYWLLDGAPVQDTERRFAQGSSLSFAAVDRLQDSGTFQCVARDDVTGEEARSANASFNIKWIEAGPVVLKHPASEAEIQPQTQVTLRCHIDGHPRPTYQWFRDGTPLSDGQSNHTVSSKERNLTLRPAGPEHSGLYSCCAHSAFGQACSSQNFTLSIADESFARVVLAPQDVVVARYEEAMFHCQFSAQPPPSLQWLFEDETPITNRSRPPHLRRATVFANGSLLLTQVRPRNAGIYRCIGQGQRGPPIILEATLHLAEIEDMPLFEPRVFTAGSEERVTCLPPKGLPEPSVWWEHAGVRLPTHGRVYQKGHELVLANIAESDAGVYTCHAANLAGQRRQDVNITVATVPSWLKKPQDSQLEEGKPGYLDCLTQATPKPTVVWYRNQMLISEDSRFEVFKNGTLRINSVEVYDGTWYRCMSSTPAGSIEAQARVQVLEKLKFTPPPQPQQCMEFDKEATVPCSATGREKPTIKWERADGSSLPEWVTDNAGTLHFARVTRDDAGNYTCIASNGPQGQIRAHVQLTVAVFITFKVEPERTTVYQGHTALLQCEAQGDPKPLIQWKGKDRILDPTKLGPRMHIFQNGSLVIHDVAPEDSGRYTCIAGNSCNIKHTEAPLYVVDKPVPEESEGPGSPPPYKMIQTIGLSVGAAVAYIIAVLGLMFRGHQQTPQHK

SEQ ID NO: 808931 - protein, 352 aa, Homo sapiens
RGESGRPGDRTEIPMVARVSGLIVTLLSSSFPGGPLQNGQPSAEIQEEVALTSLGSGPAATNKRHSTSDKMHFPRSSLQPITTLGKSEFGEVFLAKAQGLEEGVAETLVLVKSLQSKDEQQQLDFRRELEMFGKLNHANVVRLLGLCREAEPHYMVLEYVDLGDLKQFLRISKSKDEKLKSQPLSTKQKVALCTQVALGMEHLSNNRFVHKDLAARNCLVSAQRQVKVSALGLSKDVYNSEYYHFRQAWVPLRWMSPEAILEGDFSTKSDVWAFGVLMWEVFTHGEMPHGGQADDEVLADLQAGKARLPQPEGCPSKLYRLMQRCWALSPKDRPSFSEIASALGDSTVDSKP

SEQ ID NO: 808932 - protein, 1133 aa, Homo sapiens; identical to SEQ ID NO: 808926

SEQ ID NO: 808933 - protein, 1086 aa, Homo sapiens
GTRRYWARAAPGSGRLGTPRGRAPAAAAAAAPALRCAPPPVPAAERSLRARRAPSAPFPEPAAMGAARGSPARPRRLPLLSVLLLPLLGGTQTAIVFIKQPSSQDALQGRRALLRCEVEAPGPVHVYWLLDGAPVQDTERRFAQGSSLSFAAVDRLQDSGTFQCVARDDVTGEEARSANASFNIKWIEAGPVVLKHPASEAEIQPQTQVTLRCHIDGHPRPTYQWFRDGTPLSDGQSNHTVSSKERNLTLRPAGPEHSGLYSCCAHSAFGQACSSQNFTLSIADESFARVVLAPQDVVVARYEEAMFHCQFSAQPPPSLQWLFEDETPITNRSRPPHLRRATVFANGSLLLTQVRPRNAGIYRCIGQGQRGPPIILEATLHLAEIEDMPLFEPRVFTAGSEERVTCLPPKGLPEPSVWWEHAGVRLPTHGRVYQKGHELVLANIAESDAGVYTCHAANLAGQRRQDVNITVATVPSWLKKPQDSQLEEGKPGYLDCLTQATPKPTVVWYRNQMLISEDSRFEVFKNGTLRINSVEVYDGTWYRCMSSTPAGSIEAQARVQVLEKLKFTPPPQPQQCMEFDKEATVPCSATGREKPTIKWERADGSSLPEWVTDNAGTLHFARVTRDDAGNYTCIASNGPQGQIRAHVQLTVAVFITFKVEPERTTVYQGHTALLQCEAQGDPKPLIQWKGKDRILDPTKLGPRMHIFQNGSLVIHDVAPEDSGRYTCIAGNSCNIKHTEAPLYVVDKPVPEESEGPGSPPPYKMIQTIGLSVGAAVAYIIAVLGLMFYCKKRCKAKRLQKQPEGEEPEMECLNGGPLQNGQPSAEIQEEVALTSLGSGPAATNKRHSTSDKMHFPRSSLQPITTLGKSEFGEVFLAKAQGLEEGVAETLVLVKSLQSKDEQQQLDFRRELEMFGKLNHANVVRLLGLCREAEPHYMVLEYVDLGDLKQFLRISKSKDEKLKSQPLSTKQKVALCTQVALGMEHLSNNRFVHKDLAARNCLVSAQRQVKVSALGLSKDVYNSEYYHFRQAWVPLRWMSPEAILEGDFSTKSDVWAFGVLMWEVFTHGEMPHGGQADDEVLAGVFRSF

SEQ ID NO: 808934 - protein, 1063 aa, Homo sapiens
GTRRYWARAAPGSGRLGTPRGRAPAAAAAAAPALRCAPPPVPAAERSLRARRAPSAPFPEPAAMGAARGSPARPRRLPLLSVLLLPLLGGTQTAIVFIKQPSSQDALQGRRALLRCEVEAPGPVHVYWLLDGAPVQDTERRFAQGSSLSFAAVDRLQDSGTFQCVARDDVTGEEARSANASFNIKWIEAGPVVLKHPASEAEIQPQTQVTLRCHIDGHPRPTYQWFRDGTPLSDGQSNHTVSSKERNLTLRPAGPEHSGLYSCCAHSAFGQACSSQNFTLSIADESFARVVLAPQDVVVARYEEAMFHCQFSAQPPPSLQWLFEDETPITNRSRPPHLRRATVFANGSLLLTQVRPRNAGIYRCIGQGQRGPPIILEATLHLAEIEDMPLFEPRVFTAGSEERVTCLPPKGLPEPSVWWEHAGVRLPTHGRVYQKGHELVLANIAESDAGVYTCHAANLAGQRRQDVNITVATVPSWLKKPQDSQLEEGKPGYLDCLTQATPKPTVVWYRNQMLISEDSRFEVFKNGTLRINSVEVYDGTWYRCMSSTPAGSIEAQARVQVLEKLKFTPPPQPQQCMEFDKEATVPCSATGREKPTIKWERADGSSLPEWVTDNAGTLHFARVTRDDAGNYTCIASNGPQGQIRAHVQLTVAVFITFKVEPERTTVYQGHTALLQCEAQGDPKPLIQWKGKDRILDPTKLGPRMHIFQNGSLVIHDVAPEDSGRYTCIAGNSCNIKHTEAPLYVVDKPVPEESEGPGSPPPYKMIQTIGLSVGAAVAYIIAVLGLMFYCKKRCKAKRLQKQPEGEEPEMECLNGGPLQNGQPSAEIQEEVALTSLGSGPAATNKRHSTSDKMHFPRSSLQPITTLGKSEFGEVFLAKAQGLEEGVAETLVLVKSLQSKDEQQQLDFRRELEMFGKLNHANVVRLLGLCREAEPHYMVLEYVDLVCCWQGTWGSRVGRAVSYKGGSQWLEHRENLVSCSLSRDLTCLLLHFAHLMMLSFCLPCSWMPAFPLSAPSLSICISGALVLSFSGTSHCHTAGMPSRSSSLTLVFFGLLFFPPQKLVPT

SEQ ID NO: 808935 - protein, 874 aa, Homo sapiens
GTRRYWARAAPGSGRLGTPRGRAPAAAAAAAPALRCAPPPVPAAERSLRARRAPSAPFPEPAAMGAARGSPARPRRLPLLSVLLLPLLGGTQTAIVFIKQPSSQDALQGRRALLRCEVEAPGPVHVYWLLDGAPVQDTERRFAQGSSLSFAAVDRLQDSGTFQCVARDDVTGEEARSANASFNIKWIEAGPVVLKHPASEAEIQPQTQVTLRCHIDGHPRPTYQWFRDGTPLSDGQSNHTVSSKERNLTLRPAGPEHSGLYSCCAHSAFGQACSSQNFTLSIADESFARVVLAPQDVVVARYEEAMFHCQFSAQPPPSLQWLFEDETPITNRSRPPHLRRATVFANGSLLLTQVRPRNAGIYRCIGQGQRGPPIILEATLHLAEIEDMPLFEPRVFTAGSEERVTCLPPKGLPEPSVWWEHAGVRLPTHGRVYQKGHELVLANIAESDAGVYTCHAANLAGQRRQDVNITVATVPSWLKKPQDSQLEEGKPGYLDCLTQATPKPTVVWYRNQMLISEDSRFEVFKNGTLRINSVEVYDGTWYRCMSSTPAGSIEAQARVQVLEKLKFTPPPQPQQCMEFDKEATVPCSATGREKPTIKWERADGSSLPEWVTDNAGTLHFARVTRDDAGNYTCIASNGPQGQIRAHVQLTVAVFITFKVEPERTTVYQGHTALLQCEAQGDPKPLIQWKGKDRILDPTKLGPRMHIFQNGSLVIHDVAPEDSGRYTCIAGNSCNIKHTEAPLYVVDKPVPEESEGPGSPPPYKMIQTIGLSVGAAVAYIIAVLGLMFYCKKRCKAKRLQKQPEGEEPEMECLNGGPLQNGQPSAEIQEEVALTSLGSGPAATNKRHSTSDKMHFPRSSLQPITTLAHPSLLSSS

SEQ ID NO: 808936 - protein, 898 aa, Homo sapiens
  misc_feature (872)..(872): Xaa can be any naturally occurring amino acid
  misc_feature (874)..(874): Xaa can be any naturally occurring amino acid
  misc_feature (877)..(877): Xaa can be any naturally occurring amino acid
  misc_feature (883)..(883): Xaa can be any naturally occurring amino acid
  misc_feature (888)..(888): Xaa can be any naturally occurring amino acid
  misc_feature (892)..(892): Xaa can be any naturally occurring amino acid
  misc_feature (897)..(897): Xaa can be any naturally occurring amino acid
GTRRYWARAAPGSGRLGTPRGRAPAAAAAAAPALRCAPPPVPAAERSLRARRAPSAPFPEPAAMGAARGSPARPRRLPLLSVLLLPLLGGTQTAIVFIKQPSSQDALQGRRALLRCEVEAPGPVHVYWLLDGAPVQDTERRFAQGSSLSFAAVDRLQDSGTFQCVARDDVTGEEARSANASFNIKWIEAGPVVLKHPASEAEIQPQTQVTLRCHIDGHPRPTYQWFRDGTPLSDGQSNHTVSSKERNLTLRPAGPEHSGLYSCCAHSAFGQACSSQNFTLSIADESFARVVLAPQDVVVARYEEAMFHCQFSAQPPPSLQWLFEDETPITNRSRPPHLRRATVFANGSLLLTQVRPRNAGIYRCIGQGQRGPPIILEATLHLAEIEDMPLFEPRVFTAGSEERVTCLPPKGLPEPSVWWEHAGVRLPTHGRVYQKGHELVLANIAESDAGVYTCHAANLAGQRRQDVNITVATVPSWLKKPQDSQLEEGKPGYLDCLTQATPKPTVVWYRNQMLISEDSRFEVFKNGTLRINSVEVYDGTWYRCMSSTPAGSIEAQARVQVLEKLKFTPPPQPQQCMEFDKEATVPCSATGREKPTIKWERADGSSLPEWVTDNAGTLHFARVTRDDAGNYTCIASNGPQGQIRAHVQLTVAVFITFKVEPERTTVYQGHTALLQCEAQGDPKPLIQWKGKDRILDPTKLGPRMHIFQNGSLVIHDVAPEDSGRYTCIAGNSCNIKHTEAPLYVVDKPVPEESEGPGSPPPYKMIQTIGLSVGAAVAYIIAVLGLMFYCKKRCKAKRLQKQPEGEEPEMECLNGGPLQNGQPSAEIQEEVALTSLGSGPAATNKRHSTSDKMHFQGNLGPLQLGKRIGGGLXRXGLXGRENLXLKTPXGKPXLLRGXG

SEQ ID NO: 808937 - protein, 427 aa, Homo sapiens
GTRRYWARAAPGSGRLGTPRGRAPAAAAAAAPALRCAPPPVPAAERSLRARRAPSAPFPEPAAMGAARGSPARPRRLPLLSVLLLPLLGGTQTAIVFIKQPSSQDALQGRRALLRCEVEAPGPVHVYWLLDGAPVQDTERRFAQGSSLSFAAVDRLQDSGTFQCVARDDVTGEEARSANASFNIKWIEAGPVVLKHPASEAEIQPQTQVTLRCHIDGHPRPTYQWFRDGTPLSDGQSNHTVSSKERNLTLRPAGPEHSGLYSCCAHSAFGQACSSQNFTLSIADESFARVVLAPQDVVVARYEEAMFHCQFSAQPPPSLQWLFEDETPITNRSRPPHLRRATVFANGSLLLTQVRPRNAGIYRCIGQGQRGPPIILEATLHLAEIEDMPLFEPRVFTAGSEERVTCPTLLSFPHPKCLADEGVFRSF

SEQ ID NO: 808938 - protein, 202 aa, Homo sapiens
GTRRYWARAAPGSGRLGTPRGRAPAAAAAAAPALRCAPPPVPAAERSLRARRAPSAPFPEPAAMGAARGSPARPRRLPLLSVLLLPLLGGTQTAIVFIKQPSSQDALQGRRALLRCEVEAPGPVHVYWLLDGAPVQDTERRFAQGSSLSFAAVDRLQDSGTFQCVARDDVTGEEARSANASFNIKCESQGGCAQSPCQTLND

SEQ ID NO: 808939 - protein, 785 aa, Homo sapiens
GTRRYWARAAPGSGRLGTPRGRAPAAAAAAAPALRCAPPPVPAAERSLRARRAPSAPFPEPAAMGAARGSPARPRRLPLLSVLLLPLLGGTQTAIVFIKQPSSQDALQGRRALLRCEVEAPGPVHVYWLLDGAPVQDTERRFAQGSSLSFAAVDRLQDSGTFQCVARDDVTGEEARSANASFNIKWIEAGPVVLKHPASEAEIQPQTQVTLRCHIDGHPRPTYQWFRDGTPLSDGQSNHTVSSKERNLTLRPAGPEHSGLYSCCAHSAFGQACSSQNFTLSIADESFARVVLAPQDVVVARYEEAMFHCQFSAQPPPSLQWLFEDETPITNRSRPPHLRRATVFANGSLLLTQVRPRNAGIYRCIGQGQRGPPIILEATLHLAEIEDMPLFEPRVFTAGSEERVTCLPPKGLPEPSVWWEHAGVRLPTHGRVYQKGHELVLANIAESDAGVYTCHAANLAGQRRQDVNITVATVPSWLKKPQDSQLEEGKPGYLDCLTQATPKPTVVWYRNQMLISDGKSEFGEVFLAKAQGLEEGVAETLVLVKSLQSKDEQQQLDFRRELEMFGKLNHANVVRLLGLCREAEPHYMVLEYVDLGDLKQFLRISKSKDEKLKSQPLSTKQKVALCTQVALGMEHLSNNRFVHKDLAARNCLVSAQRQVKVSALGLSKDVYNSEYYHFRQAWVPLRWMSPEAILEGDFSTKSDVWAFGVLMWEVFTHGEMPHGGQADDEVLADLQAGKARLPQPEGCPSKLYRLMQRCWALSPKDRPSFSEIASALGDSTVDSKP

SEQ ID NO: 808940 - protein, 1003 aa, Homo sapiens
GTRRYWARAAPGSGRLGTPRGRAPAAAAAAAPALRCAPPPVPAAERSLRARRAPSAPFPEPAAMGAARGSPARPRRLPLLSVLLLPLLGGTQTAIVFIKQPSSQDALQGRRALLRCEVEAPGPVHVYWLLDGAPVQDTERRFAQGSSLSFAAVDRLQDSGTFQCVARDDVTGEEARSANASFNIKWIEAGPVVLKHPASEAEIQPQTQVTLRCHIDGHPRPTYQWFRDGTPLSDGQSNHTVSSKERNLTLRPAGPEHSGLYSCCAHSAFGQACSSQNFTLSIADESFARVVLAPQDVVVARYEEAMFHCQFSAQPPPSLQWLFEDETPITNRSRPPHLRRATVFANGSLLLTQVRPRNAGIYRCIGQGQRGPPIILEATLHLAEIEDMPLFEPRVFTAGSEERVTCLPPKGLPEPSVWWEHAGVRLPTHGRVYQKGHELVLANIAESDAGVYTCHAANLAGQRRQDVNITVANGSSLPEWVTDNAGTLHFARVTRDDAGNYTCIASNGPQGQIRAHVQLTVAVFITFKVEPERTTVYQGHTALLQCEAQGDPKPLIQWKGKDRILDPTKLGPRMHIFQNGSLVIHDVAPEDSGRYTCIAGNSCNIKHTEAPLYVVDKPVPEESEGPGSPPPYKMIQTIGLSVGAAVAYIIAVLGLMFYCKKRCKAKRLQKQPEGEEPEMECLNGGPLQNGQPSAEIQEEVALTSLGSGPAATNKRHSTSDKMHFPRSSLQPITTLGKSEFGEVFLAKAQGLEEGVAETLVLVKSLQSKDEQQQLDFRRELEMFGKLNHANVVRLLGLCREAEPHYMVLEYVDLGDLKQFLRISKSKDEKLKSQPLSTKQKVALCTQVALGMEHLSNNRFVHKDLAARNCLVSAQRQVKVSALGLSKDVYNSEYYHFRQAWVPLRWMSPEAILEGDFSTKSDVWAFGVLMWEVFTHGEMPHGGQADDEVLADLQAGKARLPQPEGCPSKLYRLMQRCWALSPKDRPSFSEIASALGDSTVDSKP

SEQ ID NO: 808941 - protein, 828 aa, Homo sapiens [sequence omitted]

SEQ ID NO: 808942 - protein, 920 aa, Homo sapiens
GTRRYWARAAPGSGRLGTPRGRAPAAAAAAAPALRCAPPPVPAAERSLRARRAPSAPFPEPAAMGAARGSPARPRRLPLLSVLLLPLLGGTQTAIVFIKQPSSQDALQGRRALLRCEVEAPGPVHVYWLLDGAPVQDTERRFAQGSSLSFAAVDRLQDSGTFQCVARDDVTGEEARSANASFNIKWIEAGPVVLKHPASEAEIQPQTQVTLRCHIDGHPRPTYQWFRDGTPLSDGQSNHTVSSKERNLTLRPAGPEHSGLYSCCAHSAFGQACSSQNFTLSIADESFARVVLAPQDVVVARYEEAMFHCQFSAQPPPSLQWLFEDETPITNRSRPPHLRRATVFANGSLLLTQVRPRNAGIYRCIGQGQRGPPIILEATLHLAEIEDMPLFEPRVFTAGSEERVTCLPPKGLPEPSVWWEHAGVRLPTHGRVYQKGHELVLANIAESDAGVYTCHAANLAGQRRQDVNITVATVPSWLKKPQDSQLEEGKPGYLDCLTQATPKPTVVWYRNQMLISEDSRFEVFKNGTLRINSVEVYDGTWYRCMSSTPAGSIEAQARVQVLEKLKFTPPPQPQQCMEFDKEATVPCSATGREKPTIKWERADGSSLPEWVTDNAGTLHFARVTRDDAGNYTCIASNGPQGQIRAHVQLTVAVFITFKVEPERTTVYQGHTALLQCEAQGDPKPLIQWKGKDRILDPTKLGPRMHIFQNGSLVIHDVAPEDSGRYTCIAGNSCNIKHTEAPLYVVDKPVPEESEGPGSPPPYKMIQTIGLSVGAAVAYIIAVLGLMFYCKKRCKAKRLQKQPEGEEPEMECLNGGPLQNGQPSAEIQEEVALTSLGSGPAATNKRHSTMFTHGEMPHGGQADDEVLADLQAGKARLPQPEGCPSKLYRLMQRCWALSPKDRPSFSEIASALGDSTVDSKP

SEQ ID NO: 808943 - protein, 153 aa, Homo sapiens [sequence omitted]

SEQ ID NO: 808944 - protein, 866 aa, Homo sapiens
GTRRYWARAAPGSGRLGTPRGRAPAAAAAAAPALRCAPPPVPAAERSLRARRAPSAPFPEPAAMGAARGSPARPRRLPLLSVLLLPLLGGTQTAIVFIKQPSSQDALQGRRALLRCEVEAPGPVHVYWLLDGAPVQDTERRFAQGSSLSFAAVDRLQDSGTFQCVARDDVTGEEARSANASFNIKWIEAGPVVLKHPASEAEIQPQTQVTLRCHIDGHPRPTYQWFRDGTPLSDGQSNHTVSSKERNLTLRPAGPEHSGLYSCCAHSAFGQACSSQNFTLSIADESFARVVLAPQDVVVARYEEAMFHCQFSAQPPPSLQWLFEDETPITNRSRPPHLRRATVFANGSLLLTQVRPRNAGIYRCIGQGQRGPPIILEATLHLAEIEDMPLFEPRVFTAGSEERVTCLPPKGLPEPSVWWEHAGVRLPTHGRVYQKGHELVLANIAESDAGVYTCHAANLAGQRRQDVNITVATVPSWLKKPQDSQLEEGKPGYLDCLTQATPKPTVVWYRNQMLISEDSRFEVFKNGTLRINSVEVYDGTWYRCMSSTPAGSIEAQARVQVLEKLKFTPPPQPQQCMEFDKEATVPCSATGREKPTIKWERADGSSLPEWVTDNAGTLHFARVTRDDAGNYTCIASNGPQGQIRAHVQLTVAVFITFKVEPERTTVYQGHTALLQCEAQGDPKPLIQWKGKDRILDPTKLGPRMHIFQNGSLVIHDVAPEDSGRYTCIAGNSCNIKHTEAPLYVVDKPVPEESEGPGSPPPYKMIQTIGLSVGAAVAYIIAVLGLMFYCKKRCKAKRLQKQPEGEEPEMECLNGGPLQNGQPSAEIQEEVALTSLGSGPAATNKRHSTSDKMHFPRSSLQPITTLA

SEQ ID NO: 808945 - protein, 862 aa, Homo sapiens
GTRRYWARAAPGSGRLGTPRGRAPAAAAAAAPALRCAPPPVPAAERSLRARRAPSAPFPEPAAMGAARGSPARPRRLPLLSVLLLPLLGGTQTAIVFIKQPSSQDALQGRRALLRCEVEAPGPVHVYWLLDGAPVQDTERRFAQGSSLSFAAVDRLQDSGTFQCVARDDVTGEEARSANASFNIKWIEAGPVVLKHPASEAEIQPQTQVTLRCHIDGHPRPTYQWFRDGTPLSDGQSNHTVSSKERNLTLRPAGPEHSGLYSCCAHSAFGQACSSQNFTLSIADESFARVVLAPQDVVVARYEEAMFHCQFSAQPPPSLQWLFEDETPITNRSRPPHLRRATVFANGSLLLTQVRPRNAGIYRCIGQGQRGPPIILEATLHLAEIEDMPLFEPRVFTAGSEERVTCLPPKGLPEPSVWWEHAGVRLPTHGRVYQKGHELVLANIAESDAGVYTCHAANLAGQRRQDVNITVATVPSWLKKPQDSQLEEGKPGYLDCLTQATPKPTVVWYRNQMLISEDSRFEVFKNGTLRINSVEVYDGTWYRCMSSTPAGSIEAQARVQVLEKLKFTPPPQPQQCMEFDKEATVPCSATGREKPTIKWERADGSSLPEWVTDNAGTLHFARVTRDDAGNYTCIASNGPQGQIRAHVQLTVAVFITFKVEPERTTVYQGHTALLQCEAQGDPKPLIQWKGKDRILDPTKLGPRMHIFQNGSLVIHDVAPEDSGRYTCIAGNSCNIKHTEAPLYVVDKPVPEESEGPGSPPPYKMIQTIGLSVGAAVAYIIAVLGLMFYCKKRCKAKRLQKQPEGEEPELRLPLHSPAGPCPHPMVLKLLLLKSLVLGQERAGVLSVFPLTSTYAAGHSGSHL

SEQ ID NO: 808946 - protein, 269 aa, Homo sapiens
SRNEGATDSERQVQRVVRERPPAGGAAGTADHGQFLHVARGRARPVRRGEGSLEKAPAAAPPSLPPGYDETKVRGAARGETALLENVAGAGPGALLPGCPARPMHARQGPALRGGGPRGRRGAASAAAPGALVAVRADYGACRQLRHLPHRVRGCRRLLLVPGRPRSRGCRLAGAKACGQAVTEEGVELPVDVGQGHRKRRVLRPRAPWRQREAGPKAGFCTAPGGRLLKEKAVPWQVVQAPAPPATWATPVGLCCLGLHLQQSLYRHL

SEQ ID NO: 808947 - protein, 247 aa, Homo sapiens
PEEETGQSVWRGRRTPSSPCWPPGPVLAEPSGGWDRAPTMGNAQERPSETIDRERKRLVETLQADSGLLLDALLARGVLTGPEYEALDALPDAERRVRRLLLLVQGKGEAACQELLRCAQRTAGAPDPAWDWQHVGPGYRDRSYDPPCPGHWTPEAPGSGTTCPGLPRASDPDEAGGPEGSEAVQSGTPEEPEPELEAEASKEAEPEPEPEPELEPEAEAEPEPELEPEPDPEPEPDFEERDESEDS

SEQ ID NO: 808948 - protein, 314 aa, Homo sapiens
PEEETGQSVWRGRRTPSSPCWPPGPVLAEPSGGWDRAPTMGNAQERPSETIDRERKRLVETLQADSGLLLDALLARGVLTGPEYEALDALPDAERRVRRLLLLVQGKGEAACQELLRCAQRTAGAPDPAWDWQHVGPGERAGRGLGQSRDGAGADKRPGEGRVVVSARSEASVKPHRGKLSLSHSHFLPQATGTAAMTLHAQATGRRRHPARGPHAPGCPELQTLTRPGALRAPRRCNPGPRRSQSQSWKLRPLKRLNRSRSQSQSWNPRLKQNQSRNWSQNRTQSPSPTSRKGTSPKIPEGQSSDRRCPAHAG

SEQ ID NO: 808949 - protein, 247 aa, Homo sapiens; identical to SEQ ID NO: 808947

SEQ ID NO: 808950 - protein, 220 aa, Homo sapiens
PEEETGQSVWRGRRTPSSPCWPPGPVLAEPSGGWDRAPTMGNAQERPSETIDRERKRLVETLQADSGLLLDALLARGVLTGPEYEALDALPDAERRATGTAAMTLHAQATGRRRHPARGPHAPGCPELQTLTRPGALRAPRRCNPGPRRSQSQSWKLRPLKRLNRSRSQSQSWNPRLKQNQSRNWSQNRTQSPSPTSRKGTSPKIPEGQSSDRRCPAHAG

SEQ ID NO: 808951 - protein, 146 aa, Homo sapiens
PEEETGQSVWRGRRTPSSPCWPPGPVLAEPSGGWDRGYRDRSYDPPCPGHWTPEAPGSGTTCPGLPRASDPDEAGGPEGSEAVQSGTPEEPEPELEAEASKEAEPEPEPEPELEPEAEAEPEPELEPEPDPEPEPDFEERDESEDS

SEQ ID NO: 808952 - protein, 599 aa, Homo sapiens
MEGPLTPPPLQGGGAAAVPEPGARQHPGHETAAQRYSARLLQAGYEPESPRLDLATHPTTPRSELSSVVLLAGVGVQMDRLRRASMADYLISGGTGYVPEDGLTAQQLFASADGLTYNDFLILPGFIDFIADEVDLTSALTRKITLKTPLISSPMDTVTEADMAIAMALMGGIGFIHHNCTPEFQANEVRKVKKFEQGFITDPVVLSPSHTVGDVLEAKMRHGFSGIPITETGTMGSKLVGIVTSRDIDFLAEKDHTTLLSEVMTPRIELVVAPAGVTLKEANEILQRSKKGKLPIVNDCDELVAIIARTDLKKNRDYPLASKDSQKQLLCGAAVGTREDDKYRLDLLTQAGVDVIVLDSSQGNSVYQIAMVHYIKQKYPHLQVIGGNVVTAAQAKNLIDAGVDGLRVGMGCGSICITQEVMACGRPQGTAVYKVAEYARRFGVPIIADGGIQTVGHVVKALALGASTVMMGSLLAATTEAPGEYFFSDGVRLKKYRGMGSLDAMEKSSSSQKRYFSEGDKVKIAQGVSGSIQDKGSIQKFVPYLIAGIQHGCQDIGARSLSVLRSMMYSGELKFEKRTMSAQIEGGVHGLHSYEKRLY

SEQ ID NO: 808953 - protein, 529 aa, Homo sapiens
AAARVFMSGRGVSRHMADYLISGGTGYVPEDGLTAQQLFASADGLTYNDFLILPGFIDFIADEVDLTSALTRKITLKTPLISSPMDTVTEADMAIAMALMGGIGFIHHNCTPEFQANEVRKVKKFEQGFITDPVVLSPSHTVGDVLEAKMRHGFSGIPITETGTMGSKLVGIVTSRDIDFLAEKDHTTLLSEVMTPRIELVVAPAGVTLKEANEILQRSKKGKLPIVNDCDELVAIIARTDLKKNRDYPLASKDSQKQLLCGAAVGTREDDKYRLDLLTQAGVDVIVLDSSQGNSVYQIAMVHYIKQKYPHLQVIGGNVVTAAQAKNLIDAGVDGLRVGMGCGSICITQEVMACGRPQGTAVYKVAEYARRFGVPIIADGGIQTVGHVVKALALGASTVMMGSLLAATTEAPGEYFFSDGVRLKKYRGMGSLDAMEKSSSSQKRYFSEGDKVKIAQGVSGSIQDKGSIQKFVPYLIAGIQHGCQDIGARSLSVLRSMMYSGELKFEKRTMSAQIEGGVHGLHSYEKRLY

SEQ ID NO: 808954 - protein, 530 aa, Homo sapiens
MEGPLTPPPLQGGGAAAVPEPGARQHPGHETAAQRYSARLLQAGYEPESDFLILPGFIDFIADEVDLTSALTRKITLKTPLISSPMDTVTEADMAIAMALMGGIGFIHHNCTPEFQANEVRKVKKFEQGFITDPVVLSPSHTVGDVLEAKMRHGFSGIPITETGTMGSKLVGIVTSRDIDFLAEKDHTTLLSEVMTPRIELVVAPAGVTLKEANEILQRSKKGKLPIVNDCDELVAIIARTDLKKNRDYPLASKDSQKQLLCGAAVGTREDDKYRLDLLTQAGVDVIVLDSSQGNSVYQIAMVHYIKQKYPHLQVIGGNVVTAAQAKNLIDAGVDGLRVGMGCGSICITQEVMACGRPQGTAVYKVAEYARRFGVPIIADGGIQTVGHVVKALALGASTVMMGSLLAATTEAPGEYFFSDGVRLKKYRGMGSLDAMEKSSSSQKRYFSEGDKVKIAQGVSGSIQDKGSIQKFVPYLIAGIQHGCQDIGARSLSVLRSMMYSGELKFEKRTMSAQIEGGVHGLHSYEKRLY

SEQ ID NO: 808955 - protein, 529 aa, Homo sapiens; identical to SEQ ID NO: 808953

SEQ ID NO: 808956 - protein, 505 aa, Homo sapiens
MEGPLTPPPLQGGGAAAVPEPGARQHPGHETAAQRYSARLLQAGYEPESDFLILPGFIDFIADEVDLTSALTRKITLKTPLISSPMDTVTEADMAIAMAKFEQGFITDPVVLSPSHTVGDVLEAKMRHGFSGIPITETGTMGSKLVGIVTSRDIDFLAEKDHTTLLSEVMTPRIELVVAPAGVTLKEANEILQRSKKGKLPIVNDCDELVAIIARTDLKKNRDYPLASKDSQKQLLCGAAVGTREDDKYRLDLLTQAGVDVIVLDSSQGNSVYQIAMVHYIKQKYPHLQVIGGNVVTAAQAKNLIDAGVDGLRVGMGCGSICITQEVMACGRPQGTAVYKVAEYARRFGVPIIADGGIQTVGHVVKALALGASTVMMGSLLAATTEAPGEYFFSDGVRLKKYRGMGSLDAMEKSSSSQKRYFSEGDKVKIAQGVSGSIQDKGSIQKFVPYLIAGIQHGCQDIGARSLSVLRSMMYSGELKFEKRTMSAQIEGGVHGLHSYEKRLY

SEQ ID NO: 808957 - protein, 523 aa, Homo sapiens
AAARVFMSGRGVSRHMADYLISGGTGYVPEDGLTAQQLFASADGLTYNDFLILPGFIDFIADEVDLTSALTRKITLKTPLISSPMDTVTEADMAIAMALMGGIGFIHHNCTPEFQANEVRKVKKFEQGFITDPVVLSPSHTVGDVLEAKMRHGFSGIPITETGTMGSKLVGIVTSRDIDFLAEKDHTTLLSEVMTPRIELVVAPAGVTLKEANEILQRSKKGKLPIVNDCDELVAIIARTDLKKNRDYPLASKDSQKQLLCGAAVGTREDDKYRLDLLTQAGVDVIVLDSSQGNSVYQIAMVHYIKQKYPHLQVIGGNVVTAAQAKNLIDAGVDGLRVGMGCGSICITQEVMACGRPQGTAVYKVAEYARRFGVPIIADGGIQTVGHVVKALALGASTVMMGSLLAATTEAPGEYFFSDGVRLKKYRGMGSLDAMEKSSSSQKRYFSEGDKVKIAQGVSGSIQDKGSIQKFVPYLIAGIQHGCQDIGARSLSVLRSMMYSGELKFEKRTMSAQIEGGVHGLHS

SEQ ID NO: 808958 - protein, 563 aa, Homo sapiens
MEGPLTPPPLQGGGAAAVPEPGARQHPGHETAAQRYSARLLQAGYEPESMADYLISGGTGYVPEDGLTAQQLFASADGLTYNDFLILPGFIDFIADEVDLTSALTRKITLKTPLISSPMDTVTEADMAIAMALMGGIGFIHHNCTPEFQANEVRKVKKFEQGFITDPVVLSPSHTVGDVLEAKMRHGFSGIPITETGTMGSKLVGIVTSRDIDFLAEKDHTTLLSEVMTPRIELVVAPAGVTLKEANEILQRSKKGKLPIVNDCDELVAIIARTDLKKNRDYPLASKDSQKQLLCGAAVGTREDDKYRLDLLTQAGVDVIVLDSSQGNSVYQIAMVHYIKQKYPHLQVIGGNVVTAAQAKNLIDAGVDGLRVGMGCGSICITQEVMACGRPQGTAVYKVAEYARRFGVPIIADGGIQTVGHVVKALALGASTVMMGSLLAATTEAPGEYFFSDGVRLKKYRGMGSLDAMEKSSSSQKRYFSEGDKVKIAQGVSGSIQDKGSIQKFVPYLIAGIQHGCQDIGARSLSVLRSMMYSGELKFEKRTMSAQIEGGVHGLHSYEKRLY

SEQ ID NO: 808959 - protein, 514 aa, Homo sapiens
MADYLISGGTGYVPEDGLTAQQLFASADGLTYNDFLILPGFIDFIADEVDLTSALTRKITLKTPLISSPMDTVTEADMAIAMALMGGIGFIHHNCTPEFQANEVRKVKKFEQGFITDPVVLSPSHTVGDVLEAKMRHGFSGIPITETGTMGSKLVGIVTSRDIDFLAEKDHTTLLSEVMTPRIELVVAPAGVTLKEANEILQRSKKGKLPIVNDCDELVAIIARTDLKKNRDYPLASKDSQKQLLCGAAVGTREDDKYRLDLLTQAGVDVIVLDSSQGNSVYQIAMVHYIKQKYPHLQVIGGNVVTAAQAKNLIDAGVDGLRVGMGCGSICITQEVMACGRPQGTAVYKVAEYARRFGVPIIADGGIQTVGHVVKALALGASTVMMGSLLAATTEAPGEYFFSDGVRLKKYRGMGSLDAMEKSSSSQKRYFSEGDKVKIAQGVSGSIQDKGSIQKFVPYLIAGIQHGCQDIGARSLSVLRSMMYSGELKFEKRTMSAQIEGGVHGLHSYEKRLY

SEQ ID NO: 808960 - protein, 489 aa, Homo sapiens
MDRLRRASDFLILPGFIDFIADEVDLTSALTRKITLKTPLISSPMDTVTEADMAIAMALMGGIGFIHHNCTPEFQANEVRKVKKFEQGFITDPVVLSPSHTVGDVLEAKMRHGFSGIPITETGTMGSKLVGIVTSRDIDFLAEKDHTTLLSEVMTPRIELVVAPAGVTLKEANEILQRSKKGKLPIVNDCDELVAIIARTDLKKNRDYPLASKDSQKQLLCGAAVGTREDDKYRLDLLTQAGVDVIVLDSSQGNSVYQIAMVHYIKQKYPHLQVIGGNVVTAAQAKNLIDAGVDGLRVGMGCGSICITQEVMACGRPQGTAVYKVAEYARRFGVPIIADGGIQTVGHVVKALALGASTVMMGSLLAATTEAPGEYFFSDGVRLKKYRGMGSLDAMEKSSSSQKRYFSEGDKVKIAQGVSGSIQDKGSIQKFVPYLIAGIQHGCQDIGARSLSVLRSMMYSGELKFEKRTMSAQIEGGVHGLHSYEKRLY

SEQ ID NO: 808961 - protein, 529 aa, Homo sapiens; identical to SEQ ID NO: 808953

SEQ ID NO: 808962 - protein, 159 aa, Homo sapiens [sequence omitted]

SEQ ID NO: 808963 - protein, 165 aa, Homo sapiens
DAWVDHAVAHASGIAGSAMSSEPPPPPQPPTHQASVGLLDTPRSRERSPSPLRGNVVPSPLPTRRTRTFSATVRASQGPVYKGVCKCFCRSKGHGFITPADGGPDIFLHISDVEGEYVPVEGDEVTYKMCSIPPKNEKLQAVEVVITHLAPGTKHETWSGHVISS

SEQ ID NO: 808964 - protein, 169 aa, Homo sapiens
EGEDVQGASQARKQHNGQDLTVVGTAFVSTHSQSTCVFAILKQLPSTPLGWKDKGGLFLSSLELFPVGFPRAHLLVQSTLPKPRPERAFTAPSLSPVTLGFCLGRILCQRLLLCPSCLATALSINGYSRTAGCQSWKGRDTGLHKGKLLEALGGTEGFGDRARAKIEDS

SEQ ID NO: 808965 - protein, 191 aa, Homo sapiens
MCSTVPWRRTLREGQFLPLLPCGVWLPAASGRVRGVAEFGSRWLALKSPWLWVFFFETESCSVAQAGVQWCDLSSLEPPPPRFKQFSCLSLQVDGITGACHHAQLIFVFVLETGFPHVGQASLELLTLSDPPASASQSAGIAGVSHCARPLALGFLLTFLLPSHKYYVSQMCRDPCLVLGTQRGPMPSWSW

SEQ ID NO: 808966 - protein, 164 aa, Homo sapiens
RSRSEAAGGAERIAGSAMSSEPPPPPQPPTHQASVGLLDTPRSRERSPSPLRGNVVPSPLPTRRTRTFSATVRASQGPVYKGVCKCFCRSKGHGFITPADGGPDIFLHISDVEGEYVPVEGDEVTYKMCSIPPKNEKLQAVEVVITHLAPGTKHETWSGHVISS

SEQ ID NO: 808967 - protein, 164 aa, Homo sapiens; identical to SEQ ID NO: 808966

SEQ ID NO: 808968 - protein, 164 aa, Homo sapiens; identical to SEQ ID NO: 808966

SEQ ID NO: 808969 - protein, 164 aa, Homo sapiens; identical to SEQ ID NO: 808966

SEQ ID NO: 808970 - protein, 164 aa, Homo sapiens; identical to SEQ ID NO: 808966

SEQ ID NO: 808971 - protein, 164 aa, Homo sapiens; identical to SEQ ID NO: 808966

SEQ ID NO: 808972 - protein, 147 aa, Homo sapiens
MSSEPPPPPQPPTHQASVGLLDTPRSRERSPSPLRGNVVPSPLPTRRTRTFSATVRASQGPVYKGVCKCFCRSKGHGFITPADGGPDIFLHISDVEGEYVPVEGDEVTYKMCSIPPKNEKLQAVEVVITHLAPGTKHETWSGHVISS

SEQ ID NO: 808973 - protein, 188 aa, Homo sapiens
GHAGALAPRPAAGAFLRWGLPGLRSSSLAAAVAERRDRRSAMSSEPPPPPQPPTHQASVGLLDTPRSRERSPSPLRGNVVPSPLPTRRTRTFSATVRASQGPVYKGVCKCFCRSKGHGFITPADGGPDIFLHISDVEGEYVPVEGDEVTYKMCSIPPKNEKLQAVEVVITHLAPGTKHETWSGHVISS

SEQ ID NO: 808974 - protein, 147 aa, Homo sapiens; identical to SEQ ID NO: 808972

SEQ ID NO: 808975 - protein, 147 aa, Homo sapiens; identical to SEQ ID NO: 808972

SEQ ID NO: 808976 - protein, 147 aa, Homo sapiens; identical to SEQ ID NO: 808972

SEQ ID NO: 808977 - protein, 138 aa, Homo sapiens
MASLPQLMAAPTSSCTSLMWKGSMSQWKATRSPIKCAPSHPRMRSCRPWRSSSLTWHQAPSMRPGLDMSSAPRRWWKHPLSCACGRLCGEEAADTGDDILPHETGLQPGMVPLKYLLEEGVWGGRCGVWGVPGHQHSL

SEQ ID NO: 808978 - protein, 211 aa, Homo sapiens
RSRSEAAGGAERIAGSAMSSEPPPPPQPPTHQASVGLLDTPRSRERSPSPLRGNVVPSPLPTRRTRTFSATVRASQGPVYKGVCKCFCRSKGHGFITPADGGPDIFLHISDVEGEYVPVEGDEVTYLTWHQAPSMRPGLDMSSAPRRWWKHPLSCACGRLCGEEAADTGDDILPHETGLQPGMVPLKYLLEEGVWGGRCGVWGVPGHQHSL

SEQ ID NO: 808979 - protein, 164 aa, Homo sapiens; identical to SEQ ID NO: 808966

SEQ ID NO: 808980 - protein, 75 aa, Homo sapiens
ARYELVWNRHRGKKRRGAHWWLSGGSNPIPGSGSRVVFLQLLRHMGSTHRIPLPPGAGGPRFPDLAPWQPDRDLA

SEQ ID NO: 808981 - protein, 159 aa, Homo sapiens [sequence omitted]

SEQ ID NO: 808982 - protein, 245 aa, Homo sapiens
MAEIHTPYSSLKKLLSLLNGFVAVSGIILVGLGIGGKCGGASLTNVLGLSSAYLLHVGNLCLVMGCITVLLGCAGWYGATKESRGTLLFCILSMVIVLIMEVTAATVVLLFFPIVGDVALEHTFVTLRKNYRGYNEPDDYSTQWNLVMEKLKCCGVNNYTDFSGSSFEMTTGHTYPRSCCKSIGSVSCDGRDVSPNVIHQKGCFHKLLKITKTQSFTLSGSSLGAAVIQRWGSRYVAQAGLELLA

SEQ ID NO: 808983 - protein, 219 aa, Homo sapiens
MAEIHTPYSSLKKLLSLLNGFVAVSGIILVGLGIGGKCGGASLTNVLGLSSAYLLHVGNLCLVMGCITVLLGCAGWYGATKESRGTLLFVGDVALEHTFVTLRKNYRGYNEPDDYSTQWNLVMEKLKCCGVNNYTDFSGSSFEMTTGHTYPRSCCKSIGSVSCDGRDVSPNVIHQKGCFHKLLKITKTQSFTLSGSSLGAAVIQLPGILATLLLFIKLG

SEQ ID NO: 808984 - protein, 203 aa, Homo sapiens
MAEIHTPYSSLKKLLSLLNGFVAVSGIILVGLGIGGKCGGASLTNVLGLSSAYLLHVGNLCLVMGCITVLLGCAGWYGATKESRGTLLFVGDVALEHTFVTLRKNYRGYNEPDDYSTQWNLVMEKLKCCGVNNYTDFSGSSFEMTTGHTYPRSCCKSIGSVSCDGRDVSPNVIHQKKLRLGEGTSLVQDHRALAELEFEAPLA

SEQ ID NO: 808985 - protein, 73 aa, Homo sapiens
RPLLPPLTYSVPTPTPLPPPARHGPVTCSSKRLTTAWTHSTGLCAAMSSPRPGGGGGKGGPAPWAGKRAGSGG

SEQ ID NO: 808986 - protein, 124 aa, Homo sapiens
MSWGHLLSLIDAESIQKLPDQPSHHTQKRPFPSGEKLPDQPFTHHSQEGPFPPGEKLPDQPLIPQPRGAFLTWREISRPSPLTTARRGLSHRKKKMIRIIFFFRDVFFSDLCLPSTCDHCTCRQ

SEQ ID NO: 808987 - protein, 120 aa, Homo sapiens
GDDIINSAHVRSRFPKRRCRLWSHGWARSPADTLTLFLILTRWYRCSGNAFRGMKRPMPLLTLMFPSSKTILPWLMTTSGEPWHSIPSKMLYSTACTNSLSVTSQDLLCPKRAVHNSDFA

SEQ ID NO: 808988 - protein, 152 aa, Homo sapiens
MEECALSSVLQTHLREDHEGTIRGVLGRLGGLTEESTRCVLQGHDLLLRSALRRLALRGNALATLTQMRLSGKKHLLQELREQRALEQGSSQCLDEHQWQLLRALVRPAWWPHPFQTGGAPAAGPSFQQVCQNPNPITLGAAGCGIHSPGLP

SEQ ID NO: 808989 - protein, 992 aa, Homo sapiens
MARGGAACKSDARLLLGRDALRPAPALLAPAVLLGAALGLGLGLWLGCRAGRQRTRHQKDDTQNLLKNLESNAQTPSETGSPSRRRKREVQMSKDKEAVDECEPPSNSNITAFALKAKVIYPINQKFRPLADGSSNPSLHENLKQAVLPHQPVEASPSSSLGSLSQGEKDDCSSSSSVHSATSDDRFLSRTFLRVNAFPEVLACESVDVDLCIYSLHLKDLLHLDTALRQEKHMMFIQIFKMCLLDLLPKKKSDDELYQKILSKQEKDLEELEKGLQVKLSNTEMSGAGDSEYITLADVEKKEREYSEQLIDNMEAFWKQMANIQHFLVDQFKCSSSKARQLMMTLTERMIAAEGLLCDSQELQALDALERTMGRAHMAKVIEFLKLQVQEETRCRLAAISHGLELLAGEGKLSGRQKEELLTQQHKAFWQEAERFSREFVQRGKDLVTASLAHQVEGTAKLTLAQEEEQRSFLAEAQPTADPEKFLEAFHEVLERQRLMQCDLEEEENVRATEAVVALCQELYFSTVDTFQKFVDALFLQTLPGMTGLPPEECDYLRQEVQENAAWQLGKSNRFRRQQWKLFQELLEQDQQVWMEECALSSVLQTHLREDHEGTIRGVLGRLGGLTEESTRCVLQGHDLLLRSALRRLALRGNALATLTQMRLSGKKHLLQELREQRALEQGSSQCLDEHQWQLLRALEARVLEEASRLEEEAQQTRLQLQQRLLAEAQEVGQLLQQHMECAIGQALLVHARNAATKSRAKDRDDFKRTLMEAAVESVYVTSAGVSRLVQAYYQQIGRIMEDHEERKLQHLKTLQGERMENYKLRKKQELSNPSSGSRTAGGAHETSQAVHQRMLSQQKRFLAQFPVHQQMRLHAQQQQAGVMDLLEAQLETQLQEAEQNFISELAALARVPLAESKLLPAKRGLLEKPLRTKRKKPLPQERGDLGVPNNEDLASGDQTSGSLSSKRLSQQESEAGDSGNSKKMLKRRSNL

SEQ ID NO: 808990 - protein, 992 aa, Homo sapiens; identical to SEQ ID NO: 808989

SEQ ID NO: 808991 - protein, 992 aa, Homo sapiens; identical to SEQ ID NO: 808989

SEQ ID NO: 808992 - protein, 992 aa, Homo sapiens; identical to SEQ ID NO: 808989

SEQ ID NO: 808993 - protein, 992 aa, Homo sapiens; identical to SEQ ID NO: 808989

SEQ ID NO: 808994 - protein, 796 aa, Homo sapiens
LEDPGIPIQSVDVDLCIYSLHLKDLLHLDTALRQEKHMMFIQIFKMCLLDLLPKKKSDDELYQKILSKQEKDLEELEKGLQVKLSNTEMSGAGDSEYITLADVEKKEREYSEQLIDNMEAFWKQMANIQHFLVDQFKCSSSKARQLMMTLTERMIAAEGLLCDSQELQALDALERTMGRAHMAKVIEFLKLQVQEETRCRLAAISHGLELLAGEGKLSGRQKEELLTQQHKAFWQEAERFSREFVQRGKDLVTASLAHQVEGTAKLTLAQEEEQRSFLAEAQPTADPEKFLEAFHEVLERQRLMQCDLEEEENVRATEAVVALCQELYFSTVDTFQKFVDALFLQTLPGMTGLPPEECDYLRQEVQENAAWQLGKSNRFRRQQWKLFQELLEQDQQVWMEECALSSVLQTHLREDHEGTIRGVLGRLGGLTEESTRCVLQGHDLLLRSALRRLALRGNALATLTQMRLSGKKHLLQELREQRALEQGSSQCLDEHQWQLLRALEARVLEEASRLEEEAQQTRLQLQQRLLAEAQEVGQLLQQHMECAIGQALLVHARNAATKSRAKDRDDFKRTLMEAAVESVYVTSAGVSRLVQAYYQQIGRIMEDHEERKLQHLKTLQGERMENYKLRKKQELSNPSSGSRTAGGAHETSQAVHQRMLSQQKRFLAQFPVHQQMRLHAQQQQAGVMDLLEAQLETQLQEAEQNFISELAALARVPLAESKLLPAKRGLLEKPLRTKRKKPLPQERGDLGVPNNEDLASGDQTSGSLSSKRLSQQESEAGDSGNSKKMLKRRSNL

SEQ ID NO: 808995 - protein, 751 aa, Homo sapiens
MCLLDLLPKKKSDDELYQKILSKQEKDLEELEKGLQVKLSNTEMSGAGDSEYITLADVEKKEREYSEQLIDNMEAFWKQMANIQHFLVDQFKCSSSKARQLMMTLTERMIAAEGLLCDSQELQALDALERTMGRAHMAKVIEFLKLQVQEETRCRLAAISHGLELLAGEGKLSGRQKEELLTQQHKAFWQEAERFSREFVQRGKDLVTASLAHQVEGTAKLTLAQEEEQRSFLAEAQPTADPEKFLEAFHEVLERQRLMQCDLEEEENVRATEAVVALCQELYFSTVDTFQKFVDALFLQTLPGMTGLPPEECDYLRQEVQENAAWQLGKSNRFRRQQWKLFQELLEQDQQVWMEECALSSVLQTHLREDHEGTIRGVLGRLGGLTEESTRCVLQGHDLLLRSALRRLALRGNALATLTQMRLSGKKHLLQELREQRALEQGSSQCLDEHQWQLLRALEARVLEEASRLEEEAQQTRLQLQQRLLAEAQEVGQLLQQHMECAIGQALLVHARNAATKSRAKDRDDFKRTLMEAAVESVYVTSAGVSRLVQAYYQQIGRIMEDHEERKLQHLKTLQGERMENYKLRKKQELSNPSSGSRTAGGAHETSQAVHQRMLSQQKRFLAQFPVHQQMRLHAQQQQAGVMDLLEAQLETQLQEAEQNFISELAALARVPLAESKLLPAKRGLLEKPLRTKRKKPLPQERGDLGVPNNEDLASGDQTSGSLSSKRLSQQESEAGDSGNSKKMLKRRSNL

SEQ ID NO: 808996 - protein, 478 aa, Homo sapiens
MSWGHLLSLIDAESIQKLPDQPSHHTQKRPFPSGEKLPDQPFTHHSQEGPFPPGEKLPDQPLIPQPRGAFLTWREISRPSPLTTARRGLSHRKKKLPDQPLTPQPREAFPAWRETSRPALSLQPGEAFPAWKLPDKPLTHHSQERPFPPGQKLPDQPLSPQPGEAFTTWREASRPAPHTTARRGLSHLERNFQTSPSYHSQEGPFSPGEKLPDQPLTPPPGEAFPTGRETSRPAPHTTARRGLSHRERNFQTSPLTTARRGLSHRERNFQTSPSHHSQERPFPPGEKLQASSSHHSQERPFLPGEKLSDQPHTPQPGEAVPAWREASRPALHTTARRGLSHLERNFQTSPSHHSQERPFPPGGKIAPLMEVRDCHPQHCEHTGRDHSSGEGAAQSITGCSSVPGLCPPDASTPTIRGNQGCLQTLPRVHGVITHCAESKGALPWSNPGHSRGYVQKSPEPSEPSGSGSPYLRNFQGHL

SEQ ID NO: 808997 - protein, 992 aa, Homo sapiens; identical to SEQ ID NO: 808989

SEQ ID NO: 808998 - protein, 185 aa, Homo sapiens
LEDPGIPIQSVDVDLCIYSLHLKDLLHLDTALRQEKHMMFIQIFKMCLLDLLPKKKSDDELYQKILSKQEKDLEELEKGLQVKLSNTEMSGAGDSEYITLADVEKKEREYSEQLIDNMEAFWKQMANIQHFLVDQFKCSSSKARQLMMTLTERMIAAEGLLCDSQELQALVMLEGAGGNIKIFRL

SEQ ID NO: 808999 - protein, 58 aa, Homo sapiens
TLMEAAVESVYVTSAGVSRLVQAYYQQIGRIMEDHEERKLQHLKTLQGTGPPLREAPE

SEQ ID NO: 809000 - protein, 992 aa, Homo sapiens; identical to SEQ ID NO: 808989

SEQ ID NO: 809001 - protein, 992 aa, Homo sapiens; identical to SEQ ID NO: 808989

SEQ ID NO: 809002 - protein, 98 aa, Homo sapiens
MLAYTHAHTHTLQHTHTHPHMHTYTRACMYTCTHDTHRHTHMCACTHTHTHTKLAFLANISCLMGKAAAMGMGGPGWGRCWPRAGVSLSCEKVPSSEL

SEQ ID NO: 809003 - protein, 992 aa, Homo sapiens; identical to SEQ ID NO: 808989

SEQ ID NO: 809004 - protein, 992 aa, Homo sapiens; identical to SEQ ID NO: 808989

SEQ ID NO: 809005 - protein, 992 aa, Homo sapiens; identical to SEQ ID NO: 808989

SEQ ID NO: 809006 - protein, 992 aa, Homo sapiens; identical to SEQ ID NO: 808989

SEQ ID NO: 809007 - protein, 583 aa, Homo sapiens
LEDPGIPIQSVDVDLCIYSLHLKDLLHLDTALRQEKHMMFIQIFKMCLLDLLPKKKSDDELYQKILSKQEKDLEELEKGLQVKLSNTEMSGAGDSEYITLADVEKKEREYSEQLIDNMEAFWKQMANIQHFLVDQFKCSSSKARQLMMTLTERMIAAEGLLCDSQELQALDALERTMGRAHMAKVIEFLKLQVQEETRCRLAAISHGLELLAGEGKLSGRQKEELLTQQHKAFWQEAERFSREFVQRGKDLVTASLAHQVEGTAKLTLAQEEEQRSFLAEAQPTADPEKFLEPSHHSQERPFPPEEETSRPAPHTTAKRSLSSLERNFQTSPLTTARRGLSRLETSGQASHTPQPGEAFPTWTETSRPAPLTTARRGLYHLERSFQTSPSHHSQERPFPPGEKLPDQPLIPQPRGAFLTWRETSRPAPHTTARRGLSHRERNFQTSPSHHSQERPFPPGEKLPDQPSHYSQKRPFPPGEELPDQPLTPQPGEAFPAWREASGQLLTPQPGETFSAWRETFRPAPHTTARRGRSCLERSFQTSPSHHSQERPFPPGEKLPDQPLSPQPGEAVPTWRENCSFDGG

SEQ ID NO: 809008 - protein, 436 aa, Homo sapiens
GEGPLGEGNGAVTGIPEGAAEATMAEGPEEARGHPPGQDDGGGDHEPVPSLRGPPTTAVPCPRDDPQAEPQAPGRPTAPGLAAAAAADKLEPPRELRKRGEAASGSGAELQEQAGCEAPEAAAPRERPARLSAREYSRQVHEWLWQSYCGYLTWHSGLAAFPAYCSPQPSPQSFPSGGAAVPQAAAPPPPQLGYYNPFYFLSPGAAGPDPRTAAGISTPAPVAGLGPRAPHVQASVRATPVTRVGSAAPSRSPSETGRQAGREYVIPSLAHRFMAEMVDFFILFFIKATIVLSIMHLSGIKDISKFAMHYIIEEIDEDTSMEDLQKMMVVALIYRLLVCFYEIICIWGAGGATPGKFLLGLRVVTCDTSVLIAPSRVLVIPSSNVSITTSTIRALIKNFSIASFFPAFITLLFFQHNRTAYDIVAGTIVVKRNGVR

SEQ ID NO: 809009 - protein, 436 aa, Homo sapiens; identical to SEQ ID NO: 809008

SEQ ID NO: 809010 - protein, 436 aa, Homo sapiens; identical to SEQ ID NO: 809008

SEQ ID NO: 809011 - protein, 436 aa, Homo sapiens; identical to SEQ ID NO: 809008

SEQ ID NO: 809012 - protein, 436 aa, Homo sapiens; identical to SEQ ID NO: 809008

SEQ ID NO: 809013 - protein, 436 aa, Homo sapiens; identical to SEQ ID NO: 809008

SEQ ID NO: 809014 - protein, 436 aa, Homo sapiens; identical to SEQ ID NO: 809008

SEQ ID NO: 809015 - protein, 436 aa, Homo sapiens; identical to SEQ ID NO: 809008

SEQ ID NO: 809016 - protein, 436 aa, Homo sapiens; identical to SEQ ID NO: 809008

SEQ ID NO: 809017 - protein, 436 aa, Homo sapiens; identical to SEQ ID NO: 809008

SEQ ID NO: 809018 - protein, 81 aa, Homo sapiens
PSFTYYHSGQNLYLSCFADSNPPAQYSWTINGKFQLSGQKLSIPQITTKHSGLYACSVRNSATGKESSKSVTVRVSDWTLP

SEQ ID NO: 809019 - protein, 526 aa, Homo sapiens
PYWPYLTAETLKNRMGHQPPPPTQQHSITDNSLSLKTPPECLLIPFHPQRMIISRKKEKEGGRTAHLTALLRKSLDPRLISTGENTQTAETMGPLSAPPCTQHITWKGLLLTASLLNFWNLPTTAQVIIEAKPPKVSEGKDVLLLVHNLPQNLTGYIWYKGQMTDLYHYITSYVVHGQIIYGPAYSGRETVYSNASLLIQNVTQEDAGSYTLHIIKRGDGTGGVTGYFTVTLYSETPKPSISSSNLNPREVMEAVRLICDPETPDASYLWLLNGQNLPMTHRLQLSKTNRTLYLFGVTKYIAGPYECEIRNPVSASRSDPVTLNLLPKLPMPYITINNLNPREKKDVLAFTCEPKSRNYTYIWWLNGQSLPVSPRVKRPIENRILILPSVTRNETGPYQCEIRDRYGGIRSNPVTLNVLYGPDLPRIYPSFTYYRSGENLDLSCFADSNPPAEYSWTINGKFQLSGQKLFIPQITTNHSGLYACSVRNSATGKEISKSMIVKVSETASPQVTYAGPNTWFQEILLL

SEQ ID NO: 809020 - protein, 423 aa, Homo sapiens
PYWPYLTAETLKNRMGHQPPPPTQQHSITDNSLSLKTPPECLLIPFHPQRMIISRKKEKEGGRTAHLTALLRKSLDPRLISTGENTQTAETMGPLSAPPCTQHITWKGLLLTASLLNFWNLPTTAQVIIEAKPPKVSEGKDVLLLVHNLPQNLTGYIWYKGQMTDLYHYITSYVVHGQIIYGPAYSGRETVYSNASLLIQNVTQEDAGSYTLHIIKRGDGTGGVTGYFTVTLYSETPKPSISSSNLNPREVMEAVRLICDPETPDASYLWLLNGQNLPMTHRLQLSKTNRTLYLFGVTKYIAGPYECEIRNPVSASRSDPVTLNLLHGPDLPRIYPSFTYYRSGENLDLSCFADSNPPAEYSWTINGKFQLSGQKLFIPQITTNHSGLYACSVRNSATGKEISKSMIVKVSGKWIPASLAIGF

SEQ ID NO: 809021 - protein, 543 aa, Homo sapiens
PYWPYLTAETLKNRMGHQPPPPTQQHSITDNSLSLKTPPECLLIPFHPQRMIISRKKEKEGGRTAHLTALLRKSLDPRLISTGENTQTAETMGPLSAPPCTQHITWKGLLLTASLLNFWNLPTTAQVIIEAKPPKVSEGKDVLLLVHNLPQNLTGYIWYKGQMTDLYHYITSYVVHGQIIYGPAYSGRETVYSNASLLIQNVTQEDAGSYTLHIIKRGDGTGGVTGYFTVTLYSETPKPSISSSNLNPREVMEAVRLICDPETPDASYLWLLNGQNLPMTHRLQLSKTNRTLYLFGVTKYIAGPYECEIRNPVSASRSDPVTLNLLLWEMPTLNEGCLWRNQRCHTGQSSVIHTAKLPMPYITINNLNPREKKDVLAFTCEPKSRNYTYIWWLNGQSLPVSPRVKRPIENRILILPSVTRNETGPYQCEIRDRYGGIRSNPVTLNVLYGPDLPRIYPSFTYYRSGENLDLSCFADSNPPAEYSWTINGKFQLSGQKLFIPQITTNHSGLYACSVRNSATGKEISKSMIVKVSGPCHGNQTESH

SEQ ID NO: 809022 - protein, 395 aa, Homo sapiens
PYWPYLTAETLKNRMGHQPPPPTQQHSITDNSLSLKTPPECLLIPFHPQRMIISRKKEKEGGRTAHLTALLRKSLDPRLISTGENTQTAETMGPLSAPPCTQHITWKGLLLTAETPKPSISSSNLNPREVMEAVRLICDPETPDASYLWLLNGQNLPMTHRLQLSKTNRTLYLFGVTKYIAGPYECEIRNPVSASRSDPVTLNLLPKLPMPYITINNLNPREKKDVLAFTCEPKSRNYTYIWWLNGQSLPVSPRVKRPIENRILILPSVTRNETGPYQCEIRDRYGGIRSNPVTLNVLYGPDLPRIYPSFTYYRSGENLDLSCFADSNPPAEYSWTINGKFQLSGQKLFIPQITTNHSGLYACSVRNSATGKEISKSMIVKVSGKWIPASLAIGF

SEQ ID NO: 809023 - protein, 449 aa, Homo sapiens
PYWPYLTAETLKNRMGHQPPPPTQQHSITDNSLSLKTPPECLLIPFHPQRMIISRKKEKEGGRTAHLTALLRKSLDPRLISTGENTQTAETMGPLSAPPCTQHITWKGLLLTASLLNFWNLPTTAQVIIEAKPPKVSEGKDVLLLVHNLPQNLTGYIWYKGQMTDLYHYITSYVVHGQIIYGPAYSGRETVYSNASLLIQNVTQEDAGSYTLHIIKRGDGTGGVTGYFTVTLYSETPKPSISSSNLNPREVMEAVRLICDPETPDASYLWLLNGQNLPMTHRLQLSKTNRTLYLFGVTKYIAGPYECEIRNPVSASRSDPVTLNLLPKLPMPYITINNLNPREKKDVLAFTCEPKSRNYTYIWWLNGQSLPVSPRVKRPIENRILILPSVTRNETGPYQCEIRDRYGGIRSNPVTLNVLCEYPLFLCGPGHQLNSKRPEARPLSLSPVQ

SEQ ID NO: 809024 - protein, 330 aa, Homo sapiens
PYWPYLTAETLKNRMGHQPPPPTQQHSITDNSLSLKTPPECLLIPFHPQRMIISRKKEKEGGRTAHLTALLRKSLDPRLISTGENTQTAETMGPLSAPPCTQHITWKGLLLTASLLNFWNLPTTAQVIIEAKPPKVSEGKDVLLLVHNLPQNLTGYIWYKGQMTDLYHYITSYVVHGQIIYGPAYSGRETVYSNASLLIQNVTQEDAGSYTLHIIKRGDGTGGVTGYFTVTLYYGPDLPRIYPSFTYYRSGENLDLSCFADSNPPAEYSWTINGKFQLSGQKLFIPQITTNHSGLYACSVRNSATGKEISKSMIVKVSGKWIPASLAIGF

SEQ ID NO: 809025 - protein, 385 aa, Homo sapiens
PYWPYLTAETLKNRMGHQPPPPTQQHSITDNSLSLKTPPECLLIPFHPQRMIISRKKEKEGGRTAHLTALLRKSLDPRLISTGENTQTAETMGPLSAPPCTQHITWKGLLLTASLLNFWNLPTTAQVIIEAKPPKVSEGKDVLLLVHNLPQNLTGYIWYKGQMTDLYHYITSYVVHGQIIYGPAYSGRETVYSNASLLIQNVTQEDAGSYTLHIIKRGDGTGGVTGYFTVTLYSETPKPSISSSNLNPREVMEAVRLICDPETPDASYLWLLNGQNLPMTHRLQLSKTNRTLYLFGVTKYIAGPYECEIRNPVSASRSDPVTLNLLREYLLFLCEPGCHPKYKWPEARPLSPSQVQVQRPLSLNIKAGHDFLLQANQSRPRLDQQ

SEQ ID NO: 809026 - protein, 411 aa, Homo sapiens
PYWPYLTAETLKNRMGHQPPPPTQQHSITDNSLSLKTPPECLLIPFHPQRMIISRKKEKEGGRTAHLTALLRKSLDPRLISTGENTQTAETMGPLSAPPCTQHITWKGLLLTASLLNFWNLPTTAQVIIEAKPPKVSEGKDVLLLVHNLPQNLTGYIWYKGQMTDLYHYITSYVVHGQIIYGPAYSGRETVYSNASLLIQNVTQEDAGSYTLHIIKRGDGTGGVTGYFTVTLYYVGQLQRLSHTLNGNTCGLGTRWRWPAETPKPSISSSNLNPREVMEAVRLICDPETPDASYLWLLNGQNLPMTHRLQLSKTNRTLYLFGVTKYIAGPYECEIRNPVSASRSDPVTLNLLREYLLFLCEPGCHPKYKWPEARPLSPSQVQVQRPLSLNIKAGHDFLLQANQSRPRLDQQ

SEQ ID NO: 809027 - protein, 223 aa, Homo sapiens
  misc_feature (178)..(178): Xaa can be any naturally occurring amino acid
  misc_feature (182)..(183): Xaa can be any naturally occurring amino acid
  misc_feature (185)..(186): Xaa can be any naturally occurring amino acid
  misc_feature (188)..(188): Xaa can be any naturally occurring amino acid
  misc_feature (197)..(197): Xaa can be any naturally occurring amino acid
  misc_feature (203)..(203): Xaa can be any naturally occurring amino acid
  misc_feature (205)..(205): Xaa can be any naturally occurring amino acid
  misc_feature (209)..(209): Xaa can be any naturally occurring amino acid
  misc_feature (211)..(211): Xaa can be any naturally occurring amino acid
  misc_feature (214)..(214): Xaa can be any naturally occurring amino acid
  misc_feature (216)..(216): Xaa can be any naturally occurring amino acid
  misc_feature (222)..(223): Xaa can be any naturally occurring amino acid
PYWPYLTAETLKNRMGHQPPPPTQQHSITDNSLSLKTPPECLLIPFHPQRMIISRKKEKEGGRTAHLTALLRKSLDPRLISTGENTQTAETMGPLSAPPCTQHITWKGLLLTASLLNFWNLPTTAQVIIEAKPPKVSEGKDVLLLVHNLPQNLTGYIWYKGQMTDLYHYITSYVVHGXLLTXXDXXRXADTRLNRTXRGRVPXPXDKQXSXERXAXTSQSPXX

SEQ ID NO: 809028 - protein, 288 aa, Homo sapiens
STEGGRTAHHLEGAPASLLNFWNLPTTAQVIIEAKPPKVSEGKDVLLLVHNLPQNLTGYIWYKGQMTDLYHYITSYVVHGQIIYGPAYSGRETVYSNASLLIQNVTQEDAGSYTLHIIKRGDGTGGVTGYFTVTLYSETPKPSISSSNLNPREVMEAVRLICDPETPDASYLWLLNGQNLPMTHRLQLSKTNRTLYLFGVTKYIAGPYECEIRNPVSASRSDPVTLNLLREYLLFLCEPGCHPKYKWPEARPLSPSQVQVQRPLSLNIKAGHDFLLQANQSRPRLDQQ

SEQ ID NO: 809029 - protein, 58 aa, Homo sapiens
RWDHGVYRLHNRTLYLFGVTKYIAGPYECEIRNPVSASRSDPVTLNLLPKLPVSNLSV

SEQ ID NO: 809030 - protein, 515 aa, Homo sapiens
PYWPYLTAETLKNRMGHQPPPPTQQHSITDNSLSLKTPPECLLIPFHPQRMIISRKKEKEGGRTAHLTALLRKSLDPRLISTGENTQTAETMGPLSAPPCTQHITWKGLLLTASLLNFWNLPTTAQVIIEAKPPKVSEGKDVLLLVHNLPQNLTGYIWYKGQMTDLYHYITSYVVHGQIIYGPAYSGRETVYSNASLLIQNVTQEDAGSYTLHIIKRGDGTGGVTGYFTVTLYSETPKPSISSSNLNPREVMEAVRLICDPETPDASYLWLLNGQNLPMTHRLQLSKTNRTLYLFGVTKYIAGPYECEIRNPVSASRSDPVTLNLLPKLPMPYITINNLNPREKKDVLAFTCEPKSRNYTYIWWLNGQSLPVSPRVKRPIENRILILPSVTRNETGPYQCEIRDRYGGIRSNPVTLNVLYGPDLPRIYPSFTYYRSGENLDLSCFADSNPPAEYSWTINGKFQLSGQKLFIPQITTNHSGLYACSVRNSATGKEISKSMIVKVSGPCHGNQTESH

SEQ ID NO: 809031 - protein, 515 aa, Homo sapiens; identical to SEQ ID NO: 809030

SEQ ID NO: 809032 - protein, 516 aa, Homo sapiens
PYWPYLTAETLKNRMGHQPPPPTQQHSITDNSLSLKTPPECLLIPFHPQRMIISRKKEKEGGRTAHLTALLRKSLDPRLISTGENTQTAETMGPLSAPPCTQHITWKGLLLTASLLNFWNLPTTAQVIIEAKPPKVSEGKDVLLLVHNLPQNLTGYIWYKGQMTDLYHYITSYVVHGQIIYGPAYSGRETVYSNASLLIQNVTQEDAGSYTLHIIKRGDGTGGVTGYFTVTLYSETPKPSISSSNLNPREVMEAVRLICDPETPDASYLWLLNGQNLPMTHRLQLSKTNRTLYLFGVTKYIAGPYECEIRNPVSASRSDPVTLNLLPKLPMPYITINNLNPREKKDVLAFTCEPKSRNYTYIWWLNGQSLPVSPRVKRPIENRILILPSVTRNETGPYQCEIRDRYGGIRSNPVTLNVLYGPDLPRIYPSFTYYRSGENLDLSCFADSNPPAEYSWTINGKFQLSGQKLFIPQITTNHSGLYACSVRNSATGKEISKSMIVKVSGKWIPASLAIGF

SEQ ID NO: 809033 - protein, 544 aa, Homo sapiens
PYWPYLTAETLKNRMGHQPPPPTQQHSITDNSLSLKTPPECLLTPLPPSADDNLKKEKKEGGRTAHLTALLRKSLDPRLISTGENTQTAETMGPLSAPPCTQHITWKGLLLTASLLNFWNLPTTAQVIIEAKPPKVSEGKDVLLLVHNLPQNLTGYIWYKGQMTDLYHYITSYVVHGQIIYGPAYSGRETVYSNASLLIQNVTQEDAGSYTLHIIKRGDGTGGVTGYFTVTLYSETPKPSISSSNLNPREVMEAVRLICDPETPDASYLWLLNGQNLPMTHRLQLSKTNRTLYLFGVTKYIAGPYECEIRNPVSASRSDPVTLNLLREEMPTLNEGCLWRNQRCHTGQSSVIHTAKLPMPYITINNLNPREKKDVLAFTCEPKSRNYTYIWWLNGQSLPVSPRVKRPIENRILILPSVTRNETGPYQCEIRDRYGGIRSNPVTLNVLYGPDLPRIYPSFTYYRSGENLDLSCFADSNPPAEYSWTINGKFQLSGQKLFIPQITTNHSGLYACSVRNSATGKEISKSMIVKVSGKWIPASLAIGF

SEQ ID NO: 809034 - protein, 542 aa, Homo sapiens
PYWPYLTAETLKNRMGHQPPPPTQQHSITDNSLSLKTPPECLLIPFHPQRMIISRKKEKEGGRTAHLTALLRKSLDPRLISTGENTQTAETMGPLSAPPCTQHITWKGLLLTASLLNFWNLPTTAQVIIEAKPPKVSEGKDVLLLVHNLPQNLTGYIWYKGQMTDLYHYITSYVVHGQIIYGPAYSGRETVYSNASLLIQNVTQEDAGSYTLHIIKRGDGTGGVTGYFTVTLYYVGQLQRLSHTLNGNTCGLGTRWRWPAETPKPSISSSNLNPREVMEAVRLICDPETPDASYLWLLNGQNLPMTHRLQLSKTNRTLYLFGVTKYIAGPYECEIRNPVSASRSDPVTLNLLPKLPMPYITINNLNPREKKDVLAFTCEPKSRNYTYIWWLNGQSLPVSPRVKRPIENRILILPSVTRNETGPYQCEIRDRYGGIRSNPVTLNVLYGPDLPRIYPSFTYYRSGENLDLSCFADSNPPAEYSWTINGKFQLSGQKLFIPQITTNHSGLYACSVRNSATGKEISKSMIVKVSGKWIPASLAIGF

SEQ ID NO: 809035 - protein, 500 aa, Homo sapiens
PYWPYLTAETLKNRMGHQPPPPTQQHSITDNSLSLKTPPECLLIPFHPQRMIISRKKEKEGGRTAHLTALLRKSLDPRLISTGENTQTAETMGPLSAPPCTQHITWKGLLLTASLLNFWNLPTTAQVIIEAKPPKVSEGKDVLLLVHNLPQNLTGYIWYKGQMTDLYHYITSYVVHGQIIYGPAYSGRETVYSNASLLIQNVTQEDAGSYTLHIIKRGDGTGGVTGYFTVTLYSETPKPSISSSNLNPREVMEAVRLICDPETPDASYLWLLNGQNLPMTHRLQLSKTNRTLYLFGVTKYIAGPYECEIRNPVSASRSDPVTLNLLPKLPMPYITINNLNPREKKDVLAFTCEPKSRNYTYIWWLNGQSLPVSPRVKRPIENRILILPSVTRNETGPYQCEIRDRYGGIRSNPVTLNVLYGPDLPRIYPSFTYYRSGENLDLSCFADSNPPAEYSWTINGKFQLSGQKLFIPQITTNHSGLYACSVRNSATGKARTLARL

SEQ ID NO: 809036 - protein, 422 aa, Homo sapiens
PYWPYLTAETLKNRMGHQPPPPTQQHSITDNSLSLKTPPECLLIPFHPQRMIISRKKEKEGGRTAHLTALLRKSLDPRLISTGENTQTAETMGPLSAPPCTQHITWKGLLLTASLLNFWNLPTTAQVIIEAKPPKVSEGKDVLLLVHNLPQNLTGYIWYKGQMTDLYHYITSYVVHGQIIYGPAYSGRETVYSNASLLIQNVTQEDAGSYTLHIIKRGDGTGGVTGYFTVTLYSETPKPSISSSNLNPREVMEAVRLICDPETPDASYLWLLNGQNLPMTHRLQLSKTNRTLYLFGVTKYIAGPYECEIRNPVSASRSDPVTLNLLHGPDLPRIYPSFTYYRSGENLDLSCFADSNPPAEYSWTINGKFQLSGQKLFIPQITTNHSGLYACSVRNSATGKEISKSMIVKVSGPCHGNQTESH

SEQ ID NO: 809037 - protein, 343 aa, Homo sapiens
PYWPYLTAETLKNRMGHQPPPPTQQHSITDNSLSLKTPPECLLIPFHPQRMIISRKKEKEGGRTAHLTALLRKSLDPRLISTGENTQTAETMGPLSAPPCTQHITWKGLLLTASLLNFWNLPTTAQVIIEAKPPKVSEGKDVLLLVHNLPQNLTGYIWYKGQMTDLYHYITSYVVHGQIIYGPAYSGRETVYSNASLLIQNVTQEDAGSYTLHIIKRGDGTGGVTGYFTVTLYSETPKPSISSSNLNPREVMEAVRLICDPETPDASYLWLLNGQNLPMTHRLQLSKTNRTLYLFGVTKYIAGPYECEIRNPVSASRSDPVTLNLLHGPELPRITLLSSLSDV

SEQ ID NO: 809038 - protein, 324 aa, Homo sapiens
PYWPYLTAETLKNRMGHQPPPPTQQHSITDNSLSLKTPPECLLIPFHPQRMIISRKKEKEGGRTAHLTALLRKSLDPRLISTGENTQTAETMGPLSAPPCTQHITWKGLLLTASLLNFWNLPTTAQVIIEAKPPKVSEGKDVLLLVHNLPQNLTGYIWYKGQMTDLYHYITSYVVHGQIIYGPAYSGRETVYSNASLLIQNVTQEDAGSYTLHIIKRGDGTGGVTGYFTVTLYSETPKPSISSSNLNPREVMEAVRLICDPETPDASYLWLLNGQKQPQRTREVPVDHSDGHVPTQISNSQLVSPTEKHSIHENTPMKLEIQHL

SEQ ID NO: 809039 - protein, 264 aa, Homo sapiens
PYWPYLTAETLKNRMGHQPPPPTQQHSITDNSLSLKTPPECLLIPFHPQRMIISRKKEKEGGRTAHLTALLRKSLDPRLISTGENTQTAETMGPLSAPPCTQHITWKGLLLTAETPKPSISSSNLNPREVMEAVRLICDPETPDASYLWLLNGQNLPMTHRLQLSKTNRTLYLFGVTKYIAGPYECEIRNPVSASRSDPVTLNLLREYLLFLCEPGCHPKYKWPEARPLSPSQVQVQRPLSLNIKAGHDFLLQANQSRPRLDQQ

SEQ ID NO: 809040 - protein, 191 aa, Homo sapiens
PVNCYPVSVLPNNLDFKLQCSLINPRYRYIEIFPSRRNEVRTHVGSYKGKKIASFPTAKYITEPEMVFEEHEVNEDIQPMTAFESEKEIELPKEVPEKLPEAADFGTTSSLHFVHMRGLPFQANAQDIINFFAPLKPVRITMEYSSSGKATGEADVHFETHEDAVAAMLKDRSHVHHRYIELFLNSCPKGK

SEQ ID NO: 809041 - protein, 193 aa, Homo sapiens
RPPVPTLPSVPTRTISQESKTTYLEDLPPPPEYELAPSKLEEEVDDVFLIRAQGLPWSCTMEDVLNFFSDCRIRNGENGIHFLLNRDGKRRGDALIEMESEQDVQKALEKHRMYMGQRYVEVYEINNEDVDALMKSLQVKSSPVVNDGVVRLRGLPYSCNEKDIVDFFAGTLQLYYAWELISFFPWYLLLYLR

SEQ ID NO: 809042 - protein, 154 aa, Homo sapiens
MDYRGRRKTGEAYVQFEEPEMANQALLKHREEIGNRYIEIFPSRRNEVRTHVGSYKGKKIASFPTAKYITEPEMVFEEHEVNEDIQPMTAFESEKEIELPKEVPEKLPEAADFGTTSSLHFVHMRGLPFQANAQDIINVCGSKISNLNRFEQKF

SEQ ID NO: 809043 - protein, 487 aa, Homo sapiens
TGRSVALSSTSFRLSEAPHPVPAAHVPGTPHPQPALDSTSVPPSLLEQLPSGPAPPPESMAGTRWVLGALLRGCGCNCSSCRRTGAACLPFYSAAGSIPSYPALRASLLPQSLAAAAAVPTRSYSQESKTTYLEDLPPPPEYELAPSKLEEEVDDVFLIRAQGLPWSCTMEDVLNFFSDCRIRNGENGIHFLLNRDGKRRGDALIEMESEQDVQKALEKHRMYMGQRYVEVYEINNEDVDALMKSLQVKSSPVVNDGVVRLRGLPYSCNEKDIVDFFAGLNIVDITFVMDYRGRRKTGEAYVQFEEPEMANQALLKHREEIGNRYIEIFPSRRNEVRTHVGSYKGKKIASFPTAKYITEPEMVFEEHEVNEDIQPMTAFESEKEIELPKEVPEKLPEAADFGTTSSLHFVHMRGLPFQANAQDIINFFAPLKPVRITMEYSSSGKATGEADVHFETHEDAVAAMLKDRSHVHHRYIELFLNSCPKGK

SEQ ID NO: 809044 - protein, 540 aa, Homo sapiens
RLGGASRSPPPPSDSRRPPTQCPRRMCQAHPTPNRPWIPLPFHHRCWSSCLQALRRLRSPWPARAGYSGRCSGAAAVTAAAAGAPAPPACPSTPPLALSPSGVSGRRRLLLLLGAAAAAASQTRGLQTGPVPPGRLAGPPAVATSAAAAAAASYPALRASLLPQSLAAAAAVPTRSYSQESKTTYLEDLPPPPEYELAPSKLEEEVDDVFLIRAQGLPWSCTMEDVLNFFSDCRIRNGENGIHFLLNRDGKRRGDALIEMESEQDVQKALEKHRMYMGQRYVEVYEINNEDVDALMKSLQVKSSPVVNDGVVRLRGLPYSCNEKDIVDFFAGLNIVDITFVMDYRGRRKTGEAYVQFEEPEMANQALLKHREEIGNRYIEIFPSRRNEVRTHVGSYKGKKIASFPTAKYITEPEMVFEEHEVNEDIQPMTAFESEKEIELPKEVPEKLPEAADFGTTSSLHFVHMRGLPFQANAQDIINFFAPLKPVRITMEYSSSGKATGEADVHFETHEDAVAAMLKDRSHVHHRYIELFLNSCPKGK

SEQ ID NO: 809045 - protein, 470 aa, Homo sapiens
TGRSVALSSTSFRLSEAPHPVPAAHVPGTPHPQPALDSTSVPPSLLEQLPSGPAPPPESMAGTRWVLGALLRGCGCNCSSCRRTGAACLPFYSAAGSIPAAVPTRSYSQESKTTYLEDLPPPPEYELAPSKLEEEVDDVFLIRAQGLPWSCTMEDVLNFFSDCRIRNGENGIHFLLNRDGKRRGDALIEMESEQDVQKALEKHRMYMGQRYVEVYEINNEDVDALMKSLQVKSSPVVNDGVVRLRGLPYSCNEKDIVDFFAGLNIVDITFVMDYRGRRKTGEAYVQFEEPEMANQALLKHREEIGNRYIEIFPSRRNEVRTHVGSYKGKKIASFPTAKYITEPEMVFEEHEVNEDIQPMTAFESEKEIELPKEVPEKLPEAADFGTTSSLHFVHMRGLPFQANAQDIINFFAPLKPVRITMEYSSSGKATGEADVHFETHEDAVAAMLKDRSHVHHRYIELFLNSCPKGK

SEQ ID NO: 809046 - protein, 411 aa, Homo sapiens
MAGTRWVLGALLRGCGCNCSSCRRTGAACLPFYSAAGSIPAAVPTRSYSQESKTTYLEDLPPPPEYELAPSKLEEEVDDVFLIRAQGLPWSCTMEDVLNFFSDCRIRNGENGIHFLLNRDGKRRGDALIEMESEQDVQKALEKHRMYMGQRYVEVYEINNEDVDALMKSLQVKSSPVVNDGVVRLRGLPYSCNEKDIVDFFAGLNIVDITFVMDYRGRRKTGEAYVQFEEPEMANQALLKHREEIGNRYIEIFPSRRNEVRTHVGSYKGKKIASFPTAKYITEPEMVFEEHEVNEDIQPMTAFESEKEIELPKEVPEKLPEAADFGTTSSLHFVHMRGLPFQANAQDIINFFAPLKPVRITMEYSSSGKATGEADVHFETHEDAVAAMLKDRSHVHHRYIELFLNSCPKGK

SEQ ID NO: 809047 - protein, 540 aa, Homo sapiens; identical to SEQ ID NO: 809044

SEQ ID NO: 809048 - protein, 540 aa, Homo sapiens; identical to SEQ ID NO: 809044

SEQ ID NO: 809049 - protein, 525 aa, Homo sapiens
RLGGASRSPPPPSDSRRPPTQCPRRMCQAHPTPNRPWIPLPFHHRCWSSCLQALRRLRSPWPARAGYSGRCSGAAAVTAAAAGAPAPPACPSTPPLALSPSGVSGRRRLLLLLGAAAAAASQTRGLQTGPVPPGRLAGPPAVATSAAAAAAASYPALRASLLPQSLAAAAAVPTRSYSQESKTTYLEDLPPPPEYELAPSKLEEEVDDVFLIRAQGLPWSCTMEDVLNFFSDCRIRNGENGIHFLLNRDGKRRGDALIEMESEQDVQKALEKHRMYMGQRYVEVYEINNEDVDALMKSLQVKSSPVVNDGVVRLRGLPYSCNEKDIVDFFAGLNIVDITFVMDYRGRRKTGEAYVQFEEPEMANQALLKHREEIGNRYIEIFPSRRNEVRTHVGSYKGKKIASFPTAKYITEPEMVFEEHEVNEDIQPMTAFESEKEIELPKEVPEKLPEAADFGTTSSLHFVHMRGLPFQANAQDIINFFAPLKPVRITMEYSSSGKATGEADVHFETHEDAVAAMLKDRSHVR

SEQ ID NO: 809050 - protein, 621 aa, Homo sapiens
RLGGASRSPPPPSDSRRPPTQCPRRMCQAHPTPNRPWIPLPFHHRCWSSCLQALRRLRSPWPARAGYSGRCSGAAAVTAAAAGAPAPPACPSTPPLALSPSGVSGRRRLLLLLGAAAAAASQTRGLQTGPVPPGRLAGPPAVATSAAAAAAASYPALRASLLPQSLAAAAAVPTRSYSQVRGRREGPGARSLPGRVHAPPRPSVPPCAPRGHARGSATLAAHPPPSTLCSYWALEQGKLSQASGLLLVLFSPRISGRLGSESKTTYLEDLPPPPEYELAPSKLEEEVDDVFLIRAQGLPWSCTMEDVLNFFSDCRIRNGENGIHFLLNRDGKRRGDALIEMESEQDVQKALEKHRMYMGQRYVEVYEINNEDVDALMKSLQVKSSPVVNDGVVRLRGLPYSCNEKDIVDFFAGLNIVDITFVMDYRGRRKTGEAYVQFEEPEMANQALLKHREEIGNRYIEIFPSRRNEVRTHVGSYKGKKIASFPTAKYITEPEMVFEEHEVNEDIQPMTAFESEKEIELPKEVPEKLPEAADFGTTSSLHFVHMRGLPFQANAQDIINFFAPLKPVRITMEYSSSGKATGEADVHFETHEDAVAAMLKDRSHVHHRYIELFLNSCPKGK

SEQ ID NO: 809051 - protein, 638 aa, Homo sapiens
RLGGASRSPPPPSDSRRPPTQCPRRMCQAHPTPNRPWIPLPFHHRCWSSCLQALRRLRSPWPARAGYSGRCSGAAAVTAAAAGAPAPPACPSTPPLALSPSGVSGRRRLLLLLGAAAAAASQTRGLQTGPVPPGRLAGPPAVATSAAAAAAASYPALRASLLPQSLAAAAAVPTRSYSQVRGRREGPGARSLPGRVHAPPRPSVPPCAPRGHARGSATLAAHPPPSTLCSYWALEQGKLSQASGLLLVLFSPRISGRLGSVSVAGVNVEALFPAWPMESKTTYLEDLPPPPEYELAPSKLEEEVDDVFLIRAQGLPWSCTMEDVLNFFSDCRIRNGENGIHFLLNRDGKRRGDALIEMESEQDVQKALEKHRMYMGQRYVEVYEINNEDVDALMKSLQVKSSPVVNDGVVRLRGLPYSCNEKDIVDFFAGLNIVDITFVMDYRGRRKTGEAYVQFEEPEMANQALLKHREEIGNRYIEIFPSRRNEVRTHVGSYKGKKIASFPTAKYITEPEMVFEEHEVNEDIQPMTAFESEKEIELPKEVPEKLPEAADFGTTSSLHFVHMRGLPFQANAQDIINFFAPLKPVRITMEYSSSGKATGEADVHFETHEDAVAAMLKDRSHVHHRYIELFLNSCPKGK

SEQ ID NO: 809052 - protein, 398 aa, Homo sapiens
LVGKEPVPIAPSLSCPQGKTSCPGLLKVTSATPLIQKESKTTYLEDLPPPPEYELAPSKLEEEVDDVFLIRAQGLPWSCTMEDVLNFFSDCRIRNGENGIHFLLNRDGKRRGDALIEMESEQDVQKALEKHRMYMGQRYVEVYEINNEDVDALMKSLQVKSSPVVNDGVVRLRGLPYSCNEKDIVDFFAGLNIVDITFVMDYRGRRKTGEAYVQFEEPEMANQALLKHREEIGNRYIEIFPSRRNEVRTHVGSYKGKKIASFPTAKYITEPEMVFEEHEVNEDIQPMTAFESEKEIELPKEVPEKLPEAADFGTTSSLHFVHMRGLPFQANAQDIINFFAPLKPVRITMEYSSSGKATGEADVHFETHEDAVAAMLKDRSHVHHRYIELFLNSCPKGK

SEQ ID NO: 809053 - protein, 378 aa, Homo sapiens
RPPVPTLPSVPTRTISQESKTTYLEDLPPPPEYELAPSKLEEEVDDVFLIRAQGLPWSCTMEDVLNFFSDCRIRNGENGIHFLLNRDGKRRGDALIEMESEQDVQKALEKHRMYMGQRYVEVYEINNEDVDALMKSLQVKSSPVVNDGVVRLRGLPYSCNEKDIVDFFAGLNIVDITFVMDYRGRRKTGEAYVQFEEPEMANQALLKHREEIGNRYIEIFPSRRNEVRTHVGSYKGKKIASFPTAKYITEPEMVFEEHEVNEDIQPMTAFESEKEIELPKEVPEKLPEAADFGTTSSLHFVHMRGLPFQANAQDIINFFAPLKPVRITMEYSSSGKATGEADVHFETHEDAVAAMLKDRSHVHHRYIELFLNSCPKGK

SEQ ID NO: 809054 - protein, 540 aa, Homo sapiens; identical to SEQ ID NO: 809044

SEQ ID NO: 809055 - protein, 540 aa, Homo sapiens; identical to SEQ ID NO: 809044

SEQ ID NO: 809056 - protein, 421 aa, Homo sapiens
GDISSSLRLPRQNSDGGQKNKPREHIIDCGDIVWSLAFGSSVPEKQSRCVNMNGIASDLDKIILVDFQVSPLKWRQSGDHFKLEEEVDDVFLIRAQGLPWSCTMEDVLNFFSDCRIRNGENGIHFLLNRDGKRRGDALIEMESEQDVQKALEKHRMYMGQRYVEVYEINNEDVDALMKSLQVKSSPVVNDGVVRLRGLPYSCNEKDIVDFFAGLNIVDITFVMDYRGRRKTGEAYVQFEEPEMANQALLKHREEIGNRYIEIFPSRRNEVRTHVGSYKGKKIASFPTAKYITEPEMVFEEHEVNEDIQPMTAFESEKEIELPKEVPEKLPEAADFGTTSSLHFVHMRGLPFQANAQDIINFFAPLKPVRITMEYSSSGKATGEADVHFETHEDAVAAMLKDRSHVHHRYIELFLNSCPKGK

SEQ ID NO: 809057 - protein, 281 aa, Homo sapiens [sequence omitted]

SEQ ID NO: 809058 - protein, 540 aa, Homo sapiens; identical to SEQ ID NO: 809044

SEQ ID NO: 809059 - protein, 422 aa, Homo sapiens
RLGGASRSPPPPSDSRRPPTQCPRRMCQAHPTPNRPWIPLPFHHRCWSSCLQALRRLRSPWPARAGYSGRCSGAAAVTAAAAGAPAPPACPSTPPLALSPSGVSGRRRLLLLLGAAAAAASQTRGLQTGPVPPGRLAGPPAVATSAAAAAAASYPALRASLLPQSLAAAAAVPTRSYSQESKTTYLEDLPPPPEYELAPSKLEEEVDDVFLIRGLNIVDITFVMDYRGRRKTGEAYVQFEEPEMANQALLKHREEIGNRYIEIFPSRRNEVRTHVGSYKGKKIASFPTAKYITEPEMVFEEHEVNEDIQPMTAFESEKEIELPKEVPEKLPEAADFGTTSSLHFVHMRGLPFQANAQDIINFFAPLKPVRITMEYSSSGKATGEADVHFETHEDAVAAMLKDRSHVHHRYIELFLNSCPKGK

SEQ ID NO: 809060 - protein, 525 aa, Homo sapiens; identical to SEQ ID NO: 809049

SEQ ID NO: 809061 - protein, 540 aa, Homo sapiens; identical to SEQ ID NO: 809044

SEQ ID NO: 809062 - protein, 313 aa, Homo sapiens
RLGGASRSPPPPSDSRRPPTQCPRRMCQAHPTPNRPWIPLPFHHRCWSSCLQALRRLRSPWPARAGYSGRCSGAAAVTAAAAGAPAPPACPSTPPLALSPSGVSGRRRLLLLLGAAAAAASQTRGLQTGPVPPGRLAGPPAVATSAAAAAAASYPALRASLLPQSLAAAAAVPTRSYSQVRGRREGPGARSLPGRVHAPPRPSVPPCAPRGHARGSATLAAHPPPSTLCSYWALEQGKLSQASGLLLVLFSPRISGRLGSESKTTYLEDLPPPPEYELAPSKLEEEVDDVFLIRAQGLPWSCTMEDVLNFFSG

SEQ ID NO: 809063 - protein, 162 aa, Homo sapiens
TGRSVALSSTSFRLSEAPHPVPAAHVPGTPHPQPALDSTSVPPSLLEQLPSGPAPPPESMAGTRWVLGALLRGCGCNCSSCRRTGAACLPFYSAAGSIPVGRLGPPPPAAAARGRRGRCLPDAWPPDRACASREAGGASRSPKLLTWKTFHHPLSMNWPRPS

SEQ ID NO: 809064 - protein, 355 aa, Homo sapiens
RLGGASRSPPPPSDSRRPPTQCPRRMCQAHPTPNRPWIPLPFHHRCWSSCLQALRRLRSPWPARAGYSGRCSGAAAVTAAAAGAPAPPACPSTPPLALSPSGVSGRRRLLLLLGAAAAAASQTRGLQTGPVPPGRLAGPPAVATSAAAAAAASYPALRASLLPQSLAAAAAVPTRSYSQESKTTYLEDLPPPPEYELAPSKLEEEVDDVFLIRAQGLPWSCTMEDVLNFFSDCRIRNGENGIHFLLNRDGKRRGDALIEMESEQDVQKALEKHRMYMGQRYVEVYEINNEDVDALMKSLQVKSSPVVNDGVVRLRGLPYSCNEKDIVDFFAGTLQLYYAWELISFFPWYLLLYLR

SEQ ID NO: 809065 - protein, 293 aa, Homo sapiens
RLGGASRSPPPPSDSRRPPTQCPRRMCQAHPTPNRPWIPLPFHHRCWSSCLQALRRLRSPWPARAGYSGRCSGAAAVTAAAAGAPAPPACPSTPPLALSPSGVSGRRRLLLLLGAAAAAASQTRGLQTGPVPPGRLAGPPAVATSAAAAAAASYPALRASLLPQSLAAAAAVPTRSYSQVRGRREGPGARSLPGRVHAPPRPSVPPCAPRGHARGSATLAAHPPPSTLCSYWALEQGKLSQASGLLLVLFSPRISGRLGSVSVAGVNVEALFPAWPMESKTTYLEDLPPPPDI

SEQ ID NO: 809066 - protein, 107 aa, Homo sapiens
TFRGFDEPAAAGPERRAGPRLHHAGSASCAAHGARPQPRACLPRQAMGAGGGPRHRPPDPLEPGEGRGPSIPPVVPGSLHVSEHPCPPNPLLRLGRGSPDLAIQRSS

SEQ ID NO: 809067 - protein, 481 aa, Homo sapiens
ALSAALTSPQRPGPSAEPGRDCTMQEAPAALPTEPGPSPVPAFLGKLWALVGDPGTDHLIRWSPSGTSFLVSDQSRFAKEVLPQYFKHSNMASFVRQLNMYGFRKVVSIEQGGLLRPERDHVEFQHPSFVRGREQLLERVRRKVPALRGDDGRWRPEDLGRLLGEVQALRGVQESTEARLRELRQQNEILWREVVTLRQSHGQQHRVIGKLIQCLFGPLQAGPSNAGGKRKLSLMLDEGSSCPTPAKFNTCPLPGALLQDPYFIQSTLSQRQIWALALTGPGAPSSLTSQKTLHPLRGPGFLPPVMAGAPPPLPVAVVQAILEGKGSFSPEGPRNAQQPEPGDPREIPDRGPLGLESGDRSPESLLPPMLLQPPQESVEPAGPLDVLGPSLQGREWTLMDLDMELSLMQPLVPERGEPELAVKGLNSPSPGKDPTLGAPLLLDVQAALGGPALGLPGALTIYSTPESRTASYLGPEASPSP

SEQ ID NO: 809068 - protein, 481 aa, Homo sapiens; identical to SEQ ID NO: 809067

SEQ ID NO: 809069 - protein, 516 aa, Homo sapiens
ALSAALTSPQRPGPSAEPGRDCTMQEAPAALPTEPGPSPVPAFLGKLWALVGDPGTDHLIRWSPSGTSFLVSDQSRFAKEVLPQYFKHSNMASFVRQLNMYGFRKVVSIEQGGLLRPERDHVEFQHPSFVRGREQLLERVRRKVPALRGDDGRWRPEDLGRLLGEVQALRGVQESTEARLRELRQQNEILWREVVTLRQSHGQQHRVIGKLIQCLFGPLQAGPSNAGGKRKLSLMLDEGSSCPTPAKFNTCPLPGALLQDPYFIQSQPLPETNLGLSPHRARGPIISDIPEDSPSPEGTRLSPSSDGRREKGLALLKEEPASPGGDGEAGLALAPNECDFCVTAPPPLPVAVVQAILEGKGSFSPEGPRNAQQPEPGDPREIPDRGPLGLESGDRSPESLLPPMLLQPPQESVEPAGPLDVLGPSLQGREWTLMDLDMELSLMQPLVPERGEPELAVKGLNSPSPGKDPTLGAPLLLDVQAALGGPALGLPGALTIYSTPESRTASYLGPEASPSP

SEQ ID NO: 809070 - protein, 238 aa, Homo sapiens
MLDEGSSCPTPAKFNTCPLPGALLQDPYFIQSEEKMEASLPPNQTQALQHGLSLLPQTFSLRPGPAPPPLPVAVVQAILEGKGSFSPEGPRNAQQPEPGDPREIPDRGPLGLESGDRSPESLLPPMLLQPPQESVEPAGPLDVLGPSLQGREWTLMDLDMELSLMQPLVPERGEPELAVKGLNSPSPGKDPTLGAPLLLDVQAALGGPALGLPGALTIYSTPESRTASYLGPEASPSP

SEQ ID NO: 809071 - protein, 382 aa, Homo sapiens
MASFVRQLNMYGFRKVVSIEQGGLLRPERDHVEFQHPSFVRGREQLLERVRRKVPALRGDDGRWRPEDLGRLLGEVQALRGVQESTEARLRELRQQNEILWREVVTLRQSHGQQHRVIGKLIQCLFGPLQAGPSNAGGKRKLSLMLDEGSSCPTPAKFNTCPLPGALLQDPYFIQSEEKMEASLPPNQTQALQHGLSLLPQTFSLRPGPAPPPLPVAVVQAILEGKGSFSPEGPRNAQQPEPGDPREIPDRGPLGLESGDRSPESLLPPMLLQPPQESVEPAGPLDVLGPSLQGREWTLMDLDMELSLMQPLVPERGEPELAVKGLNSPSPGKDPTLGAPLLLDVQAALGGPALGLPGALTIYSTPESRTASYLGPEASPSP

SEQ ID NO: 809072 - protein, 303 aa, Homo sapiens
MEASLPPNQTQALQHGLSLLPQTFSLRPGPGGCWWGSGSPCAYRPRAGPSLLLQPLPETNLGLSPHRARGPIISDIPEDSPSPEGTRLSPSSDGRREKGLALLKEEPASPGGDGEAGLALAPNECDFCVTAPPPLPVAVVQAILEGKGSFSPEGPRNAQQPEPGDPREIPDRGPLGLESGDRSPESLLPPMLLQPPQESVEPAGPLDVLGPSLQGREWTLMDLDMELSLMQPLVPERGEPELAVKGLNSPSPGKDPTLGAPLLLDVQAALGGPALGLPGALTIYSTPESRTASYLGPEASPSP

SEQ ID NO: 809073 - protein, 303 aa, Homo sapiens; identical to SEQ ID NO: 809072

SEQ ID NO: 809074 - protein, 303 aa, Homo sapiens; identical to SEQ ID NO: 809072

SEQ ID NO: 809075 - protein, 281 aa, Homo sapiens
MLDEGSSCPTPAKFNTCPLPGALLQDPYFIQSEEKMEASLPPNQTQALQHGLSLLPQTFSLRPGPDSLSQRQIWALALTGPGAPSSLTSQKTLHPLRGPGFLPPVMAGAPPPLPVAVVQAILEGKGSFSPEGPRNAQQPEPGDPREIPDRGPLGLESGDRSPESLLPPMLLQPPQESVEPAGPLDVLGPSLQGREWTLMDLDMELSLMQPLVPERGEPELAVKGLNSPSPGKDPTLGAPLLLDVQAALGGPALGLPGALTIYSTPESRTASYLGPEASPSP

SEQ ID NO: 809076 - protein, 235 aa, Homo sapiens
MLDEGSSCPTPAKFNTCPLPGALLQDPYFIQSEEKMEASLPPNQTQALQHGLSLLPQTFSLRPGPDSLSQRQIWALALTGPGAPSSLTSQKTLHPLRGPGFLPPVMAGAPPPLPVAVVQAILEGKGSFSPEGPRNAQQPEPGDPREIPDRGPLGLESGDRSPESLLPPMLLQPPQESVEPAGPLDVLGPSLQGREWTLMDLDMELSLGRTPRSGPHSCWMSRRPWEAQPWACLGL

SEQ ID NO: 809077 - protein, 305 aa, Homo sapiens
MLDEGSSCPTPAKFNTCPLPGALLQDPYFIQSEEKMEASLPPNQTQALQHGLSLLPQTFSLRPGPALTGPGAPSSLTSQKTLHPLRGPGFLPPVMAGGRRAWHCSKKSRPVQGEDGEAGLALAPNECDFCVTAPPPLPVAVVQAILEGKGSFSPEGPRNAQQPEPGDPREIPDRGPLGLESGDRSPESLLPPMLLQPPQESVEPAGPLDVLGPSLQGREWTLMDLDMELSLMQPLVPERGEPELAVKGLNSPSPGKDPTLGAPLLLDVQAALGGPALGLPGALTIYSTPESRTASYLGPEASPSP

SEQ ID NO: 809078 - protein, 112 aa, Homo sapiens
EFRLHCRAFLEPPMPSPLGESGEVKNGCFILTEQKAGGQGSPSLKKGGGTFPLVSAVPLLLGKDPTLGAPLLLDVQAALGGPALGLPGALTIYSTPESRTASYLGPEASPSP

SEQ ID NO: 809079 - protein, 193 aa, Homo sapiens
MLDEGSSCPTPAKFNTCPLPGALLQDPYFIQSEEKMEASLPPNQTQALQHGLSLLPQTFSLRPGPDSLSQRQIWALALTGPGAPSSLTSQKTLHPLRGPGFLPPVMAGAPPPLPVAVVQAILEGKGSFSPLSGVSEAPTTKWPLSTTPTIPAHKLRFFFFYFFFFFFFFFFFFFFFFIPLKQVDGGGVEQWGI

SEQ ID NO: 809080 - protein, 111 aa, Homo sapiens
MVGVACSYKGWGQTAGPPLSPPPPPGPGISPLCSRTSGAGMQDSSGENLLVKVLGKGTGVAGGCAPWESSSHQSTHQMPVPERDPPPDCALLGQSGGDCPPTGPWLSGVLL

SEQ ID NO: 809081 - protein, 140 aa, Homo sapiens
MAENREPRGAVEAELDPVEYTLRKRLPSRLPRRPNDIYVNMKTDFKAQLARCQKLLDGGARGQNACSEIYIHGLGLAINRAINIALQLQAGSFGSLQVAANTSTVELVDELEPETDTREPLTRIRNNSAIHIRVFRVTPK

SEQ ID NO: 809082 - protein, 140 aa, Homo sapiens; identical to SEQ ID NO: 809081

SEQ ID NO: 809083 - protein, 123 aa, Homo sapiens
GKGRGERKPGRRFIARGVRARVRTPQPVQDPGAGRAPTSWLAACTHILLSLGPGVAVTWAGRRTLEWPGGERASRAWRALWNEERDRHTGATDSDPQQLSHPHPSLQGHTQVIEKTLLHLSPP

SEQ ID NO: 809084 - protein, 140 aa, Homo sapiens; identical to SEQ ID NO: 809081

SEQ ID NO: 809085 - protein, 110 aa, Homo sapiens
MAENREPRGAVEAELDPVEYTLRKRLPSRLPRRPNDIYVNMKTDFKAQLARCQKLLDGGARGQNACSEIYIHGLGLAINRAINIALQWLPIPPPWSLLMSWSQRPTHGSH

SEQ ID NO: 809086 - protein, 121 aa, Homo sapiens
MAENREPRGAVEAELDPVEYTLRKRLPSRLPRRPNDIYVNMKTDFKAQLARCQKLLDGGARGQNACSEIYIHGLGLAINRAINIALQLQAGSFGSLQVAANTSTVELVDELEPSSGSHPSN

SEQ ID NO: 809087 - protein, 178 aa, Homo sapiens
MTSDFQFANQYEKAFSSKYLQNWSPTKPTKESISSHEGYTQIIANDRGHLLPSVPRSKANPWGSFMGTWQMPLKIPPARVTLTSRTTAGAASLTKWIQKNPDLLKASNGLCPEILGKPHDPDSQKKLRKKSITKTVQQARSPTIIPSSPAANLNSPDELQSSHPSAGHTPGPQRPAKS

SEQ ID NO: 809088 - protein, 142 aa, Homo sapiens
QRDTHKHSFISVDALIQFFAIEEVLEKLLNLGDTSRTTNQDKIMATDFQFANQYEKAFSSKYLQNWSPTKPTKESISSHEGYTQIIANDRGHLLPSVPRSKVRYYLHSYQESQIIKAQNWEMCSLSQPLSGKLKFNLIHVVM

SEQ ID NO: 809089 - protein, 97 aa, Homo sapiens
SVPSSHQSNCEECDVSLSLIPPKTVLPALSRRPPVPSLVRLLTLPHARSVKPKSLSSGSGQQRKEVLSLEAYLPQNCARSETLEGSASREGPERSAY

SEQ ID NO: 809090 - protein, 97 aa, Homo sapiens; identical to SEQ ID NO: 809089

SEQ ID NO: 809091 - protein, 79 aa, Homo sapiens
GRVGRGRVGDHAWGTEVAGLSLIKMTTSQKHRDFVAEPMGEKPVGSLAGIGEVLGKKLEERGFDKGLCCPWPVSGAKER

SEQ ID NO: 809092 - protein, 97 aa, Homo sapiens; identical to SEQ ID NO: 809089

SEQ ID NO: 809093 - protein, 135 aa, Homo sapiens
MDPEIDLDSMRNLKASLENSLREVEARYALQMEQLNGILLHLESELAQTRAEGQRQAQEYEALLNIKVKLEAEIATYRRLLEDGEDFNLGDALDSSNSMQTIQKTTTRRIVDGKVVSETNDTKVLRHYSQQKQGT

SEQ ID NO: 809094 - protein, 97 aa, Homo sapiens; identical to SEQ ID NO: 809089

SEQ ID NO: 809095 - protein, 97 aa, Homo sapiens; identical to SEQ ID NO: 809089

SEQ ID NO: 809096 - protein, 97 aa, Homo sapiens; identical to SEQ ID NO: 809089

SEQ ID NO: 809097 - protein, 91 aa, Homo sapiens
RALGESLAALRGGGGVLRVGAGPREGAGRSGARWGRSWGADVNPAGVGAGVRSARCALRPVGRETLWLAFHAKWPFQAGSVVLVQPRSQRE

SEQ ID NO: 809098 - protein, 91 aa, Homo sapiens; identical to SEQ ID NO: 809097

SEQ ID NO: 809099 - protein, 97 aa, Homo sapiens; identical to SEQ ID NO: 809089

SEQ ID NO: 809100 - protein, 97 aa, Homo sapiens; identical to SEQ ID NO: 809089

SEQ ID NO: 809101 - protein, 135 aa, Homo sapiens; identical to SEQ ID NO: 809093

SEQ ID NO: 809102 - protein, 97 aa, Homo sapiens; identical to SEQ ID NO: 809089

SEQ ID NO: 809103 - protein, 97 aa, Homo sapiens; identical to SEQ ID NO: 809089

SEQ ID NO: 809104 - protein, 79 aa, Homo sapiens
IHSGKLVTVTGAWLGLVKSWARSWRKGVLTRAYVVLGQFLVLKKDEDLFREWLKDTCGANAKQSRDCFGCLREWCDAFL

SEQ ID NO: 809105 - protein, 97 aa, Homo sapiens; identical to SEQ ID NO: 809089

SEQ ID NO: 809106 - protein, 91 aa, Homo sapiens; identical to SEQ ID NO: 809097

SEQ ID NO: 809107 - protein, 97 aa, Homo sapiens; identical to SEQ ID NO: 809089

SEQ ID NO: 809108 - protein, 105 aa, Homo sapiens
HNLEEAADPGHLVERRGGQNPRCFLGLCALNGTGMAVLLLSLTEQLSSTLPPFPCFAAYVVLGQFLVLKKDEDLFREWLKDTCGANAKQSRDCFGCLREWCDAFL

SEQ ID NO: 809109 - protein, 147 aa, Homo sapiens
DLGPKRLHLSDKFLSLSPLPESMVLGFGPGLPRHCLTQAAHQTMITFEFSQTLNRSIHVLLMLPVPRPHLEDHCSQGSSNGLLKQTKKIYLAPHFQPARAGSLHLLQSKHLIPCSGLAGRREQDLFFILCLSGRTEKKVRWLKRGDR

SEQ ID NO: 809110 - protein, 122 aa, Homo sapiens
HKFQQMGNVVQDFSRGEKFFGICLGIREINLLKEWGHSFKRCSTICNLPGRVSTKISTTFKIRVEWPGVVPHTCNPSTLGGRGGWTTRSRDRDHPGQHGENPSLLKIQKLAERVGRCLYSQL

SEQ ID NO: 809111 - protein, 145 aa, Homo sapiens
QRLGGADAASAAAAPAAWTSFCVPYSAVRNDQFGLSHFNWPVQGANYHVLRTGCFPFIKYHCSKAPWQDLARQNRFFTALKVVNLGEWRLPRPRVKPARPGRPLSHRARDERSQAGRVPRESALPPGAGFAWGPLYSSPRGSPAC

SEQ ID NO: 809112 - protein, 145 aa, Homo sapiens; identical to SEQ ID NO: 809111

SEQ ID NO: 809113 - protein, 127 aa, Homo sapiens
QRLGGADAASAAAAPAAWTSFCVPYSAVRNDQFGLSHFNWPVQGANYHVLRTGCFPFIKYHCSKAPWQDLARQNRFFTALKVVNLGIPTLLYGLGSWLFARVTETVHTSYGPITVYFLNKEDEGAMY

SEQ ID NO: 809114 - protein, 145 aa, Homo sapiens; identical to SEQ ID NO: 809111

SEQ ID NO: 809115 - protein, 216 aa, Homo sapiens
MHDIERHGPSRQDQTPLSSSLRQEPDPRKKLTTKTCSNQQTHKCEAMRPIPSLISSQVSRIAALCLQRTLHQIRWTQQEELVVQPGSPDERTSWKRLSSSLHHNLNQTPWTQLNALIQHLPATSHQKNHCDDLRQNQERYEPITKDKTNRKHTNQESQATTELRKRDTQEPQRHETQRLPNKIKDDSPHNKSNNNHHNRHRQKAKWAKDLHKTKQT

SEQ ID NO: 809116 - protein, 225 aa, Homo sapiens
MDLRAGDSWGMLACLCTVLWHLPAVPALNRTGDPGPGPSIQKTYDLTRYLEHQLRSLAGTYLNYLGPPFNEPDFNPPRLGAETLPRATVDLEVWRSLNDKLRLTQNYEAYSHLLCYLRGLNRQAATAELRRSLAHFCTSLQGLLGSIAGVMAALGYPLPQPLPGTEPTWTPGPAHSDFLQKMDDFWLLKELQTWLWRSAKDFNRLKKKMQPPAAAVTLHLGAHGF

SEQ ID NO: 809117 - protein, 214 aa, Homo sapiens
PDTPRINGMGLADGIIKASPEPRLALPLRQPPGEEPHPAGPAPAPWTSEQLNYLGPPFNEPDFNPPRLGAETLPRATVDLEVWRSLNDKLRLTQNYEAYSHLLCYLRGLNRQAATAELRRSLAHFCTSLQGLLGSIAGVMAALGYPLPQPLPGTEPTWTPGPAHSDFLQKMDDFWLLKELQTWLWRSAKDFNRLKKKMQPPAAAVTLHLGAHGF

SEQ ID NO: 809118 - protein, 148 aa, Homo sapiens
MWNFFRRELTSNGFPENFSLDVPANTYNALKSRLCDPNADHTSCPSPCSLHAAGALPGTGRQRWRVELAHLADRKLSLRDVSRLRQGGERRSGIAVKVVRGGAGFAARLQGSVTLVQQGWFFPRLGGCQAWWRMGAVVWCGELLTCTS

SEQ ID NO: 809119 - protein, 348 aa, Homo sapiens
MLQEEERGPRLGAVHLCPNTGHQVLFQWQTAWEAINVPEFCSQTAGVGSSNQLCDWTGVIASFQVNYEEQEQSVDNMEAHSRMFKLSRPRQPVHRVILLLCCPTPPPVTMEEEIATLAIDNGSSMCKAGFAGDDAPQAVFPSIVGRPRHQGVMVGMGQKDSYVGDEAQSKRGILTLKYPIEHGIVTNWDDMEKIWHHTFYNELRVAPEEHPVLLTEAPLNPKANREKMTQIMFETFNTPAMYVAIQAVLSLYASGRTTGIVMDSGDGVTHTVPIYVGYALPHAVLHLDLAGRDLTGYLMKILTERGYSFTTSAQREIMPHIREKLCYITLDFEKEMATAASSSSLEKS

SEQ ID NO: 809120 - protein, 103 aa, Homo sapiens [sequence omitted]

SEQ ID NO: 809121 - protein, 196 aa, Homo sapiens
MVGMGQKDSYVGDEAQSKRGILTLKYPIEHGIVTNWDDMEKIWHHTFYNELRVAPEEHPVLLTEAPLNPKANREKMTQIMFETFNTPAMYVAIQAVLSLYASGRTTGIVMDSGDGVTHTVPIYVGYALPHAVLHLDLAGRDLTGYLMKILTERGYSFTTSAQREIMPHIREKLCYITLDFEKEMATAASSSSLEKS

SEQ ID NO: 809122 - protein, 286 aa, Homo sapiens
  misc_feature (28)..(28): Xaa can be any naturally occurring amino acid
ILGLCYPIEHGIVTNWDDMEKIWHHTFXNELRVAPEEHPVLLTEAPLNPKANREKMTQVRLGRRPCSSRPFPSHFLPILISDGSSPGQGVMVGMGQKDSYVGDEAQSKRGILTLKYPIEHGIVTNWDDMEKIWHHTFYNELRVAPEEHPVLLTEAPLNPKANREKMTQIMFETFNTPAMYVAIQAVLSLYASGRTTGIVMDSGDGVTHTVPIYVGYALPHAVLHLDLAGRDLTGYLMKILTERGYSFTTSAQREIMPHIREKLCYITLDFEKEMATAASSSSLEKS

SEQ ID NO: 809123 - protein, 196 aa, Homo sapiens; identical to SEQ ID NO: 809121

SEQ ID NO: 809124 - protein, 226 aa, Homo sapiens
KTSAKKGTGSYGLDFPTLTDPQDKTTGSCQPLEKSQKDSYVGDEAQSKRGILTLKYPIEHGIVTNWDDMEKIWHHTFYNELRVAPEEHPVLLTEAPLNPKANREKMTQIMFETFNTPAMYVAIQAVLSLYASGRTTGIVMDSGDGVTHTVPIYVGYALPHAVLHLDLAGRDLTGYLMKILTERGYSFTTSAQREIMPHIREKLCYITLDFEKEMATAASSSSLEKS

SEQ ID NO: 809125 - protein, 199 aa, Homo sapiens
IVTNWVLQGQDATLALGLVAHVGVLLAHAPIEHGIVTNWDDMEKIWHHTFYNELRVAPEEHPVLLTEAPLNPKANREKMTQIMFETFNTPAMYVAIQAVLSLYASGRTTGIVMDSGDGVTHTVPIYVGYALPHAVLHLDLAGRDLTGYLMKILTERGYSFTTSAQREIMPHIREKLCYITLDFEKEMATAASSSSLEKS

SEQ ID NO: 809126 - protein, 191 aa, Homo sapiens
MGGSGSRLSKELLAEYQDLTFLTKQEILLAHRRFCELLPQEQRSVESSLRAQVPFEQILSLPELKANPFKERICRVFSTSPAKDSLSFEDFLDLLSVFSDTATPDIKSHYAFRIFDFDDDGTLNREDLSRLVNCLTGEGEDTRLSASEMKQLIDNILEESDIDRDGTINLSEFQHVISRSPDFASSFKIVL

SEQ ID NO: 809127 - protein, 193 aa, Homo sapiens
MSTQTSLQQSATKQQRKYRDLTFLTKQEILLAHRRFCELLPQEQRSVESSLRAQVPFEQILSLPELKANPFKERICRVFSTSPAKDSLSFEDFLDLLSVFSDTATPDIKSHYAFRIFDFDDDGTLNREDLSRLVNCLTGEGEDTRLSASEMKQLIDNILEESDIDRDGTINLSEFQHVISRSPDFASSFKIVL

SEQ ID NO: 809128 - protein, 191 aa, Homo sapiens; identical to SEQ ID NO: 809126

SEQ ID NO: 809129 - protein, 191 aa, Homo sapiens; identical to SEQ ID NO: 809126

SEQ ID NO: 809130 - protein, 191 aa, Homo sapiens; identical to SEQ ID NO: 809126

SEQ ID NO: 809131 - protein, 105 aa, Homo sapiens
MEPSTSLSSSTSSPVLQTLPAPLRLSCDSSPSVCPGTLSKNLSTAELWPRSSLCCQLRAKLAQPGAGAVQPHPGQGRPSLSGPLLTAVVIAPFVFVLISNKGLEV

SEQ ID NO: 809132 - protein, 138 aa, Homo sapiens
LILEDPRDRVQDLTFLTKQEILLAHRRFCELLPQEQRSVESSLRAQVPFEQILSLPELKANPFKERICRVFSTSPAKDSLSFEDFLDLLSVFSDTATPDIKSHYAFRIFDFDDDGTRSEVGTRSEVGTRSEVGTRSEV

SEQ ID NO: 809133 - protein, 228 aa, Homo sapiens
MDRLEPAARLPNPAGNAWQLLGGGGPGGGGPRSGCRGDRAVTGPRAEVRKLSASDLTFLTKQEILLAHRRFCELLPQEQRSVESSLRAQVPFEQILSLPELKANPFKERICRVFSTSPAKDSLSFEDFLDLLSVFSDTATPDIKSHYAFRIFDFDDDGTLNREDLSRLVNCLTGEGEDTRLSASEMKQLIDNILEESDIDRDGTINLSEFQHVISRSPDFASSFKIVL

SEQ ID NO: 809134 - protein, 233 aa, Homo sapiens
MSTQTSLQQSATKQQRKYRDLTFLTKQEILLSVYVVLAPHLVDNEQQARSGNEHTGRPIAENTDSSPLSTRAHRRFCELLPQEQRSVESSLRAQVPFEQILSLPELKANPFKERICRVFSTSPAKDSLSFEDFLDLLSVFSDTATPDIKSHYAFRIFDFDDDGTLNREDLSRLVNCLTGEGEDTRLSASEMKQLIDNILEESDIDRDGTINLSEFQHVISRSPDFASSFKIVL

SEQ ID NO: 809135 - protein, 121 aa, Homo sapiens
MSSRQGVGMNTQGDRSLRTPTVPLSLPEPTGGFVSCFPRSSGAWSRHFGHKCPSSRFSAFQSSRPTPSRSESAGSSPHPQPKTALALRTSWISSVCSVTQPRQTSSPIMPSASLTLMMTEP

SEQ ID NO: 809136 - protein, 231 aa, Homo sapiens
MGGSGSRLSKELLAEYQDLTFLTKQEILLSVYVVLAPHLVDNEQQARSGNEHTGRPIAENTDSSPLSTRAHRRFCELLPQEQRSVESSLRAQVPFEQILSLPELKANPFKERICRVFSTSPAKDSLSFEDFLDLLSVFSDTATPDIKSHYAFRIFDFDDDGTLNREDLSRLVNCLTGEGEDTRLSASEMKQLIDNILEESDIDRDGTINLSEFQHVISRSPDFASSFKIVL

SEQ ID NO: 809137 - protein, 176 aa, Homo sapiens
MLPRLGLPKCWDYRAHRRFCELLPQEQRSVESSLRAQVPFEQILSLPELKANPFKERICRVFSTSPAKDSLSFEDFLDLLSVFSDTATPDIKSHYAFRIFDFDDDGTLNREDLSRLVNCLTGEGEDTRLSASEMKQLIDNILEESDIDRDGTINLSEFQHVISRSPDFASSFKIVL

SEQ ID NO: 809138 - protein, 134 aa, Homo sapiens
MLSPFPSWANPFKERICRVFSTSPAKDSLSFEDFLDLLSVFSDTATPDIKSHYAFRIFDFDDDGTLNREDLSRLVNCLTGEGEDTRLSASEMKQLIDNILEESDIDRDGTINLSEFQHVISRSPDFASSFKIVL

SEQ ID NO: 809139 - protein, 157 aa, Homo sapiens
MSTQTSLQQSATKQQRKYPGLDVPDEAGDPPANPFKERICRVFSTSPAKDSLSFEDFLDLLSVFSDTATPDIKSHYAFRIFDFDDDGTLNREDLSRLVNCLTGEGEDTRLSASEMKQLIDNILEESDIDRDGTINLSEFQHVISRSPDFASSFKIVL

SEQ ID NO: 809140 - protein, 191 aa, Homo sapiens; identical to SEQ ID NO: 809126

SEQ ID NO: 809141 - protein, 191 aa, Homo sapiens; identical to SEQ ID NO: 809126

SEQ ID NO: 809142 - protein, 191 aa, Homo sapiens; identical to SEQ ID NO: 809126

SEQ ID NO: 809143 - protein, 158 aa, Homo sapiens [sequence omitted]

SEQ ID NO: 809144 - protein, 191 aa, Homo sapiens; identical to SEQ ID NO: 809126

SEQ ID NO: 809145 - protein, 198 aa, Homo sapiens
MGGSGSRLSKELLAEYQDLTFLTKQEILLSVYVVLAPHLVDNEQQARSGNEHTGRPIAENTDSSPLSTRAHRRFCELLPQEQRSVESSLRAQVPFEQILSLPELKANPFKERICRVFSTSPAKDSLSFEDFLDLLSVFSDTATPDIKSHYAFRIFDFDDDGTLNREDLSRLVNCLTGEGEDTRLSASEMKQLIDNVSS

SEQ ID NO: 809146 - protein, 166 aa, Homo sapiens
MGGSGSRLSKELLAEYQDLTFLTKQEILLAHRRFCELLPQEQRSVESSLRAQVPFEQILSLPELKANPFKERICRVFSTSPAKDSLSFEDFLDLLSVFSDTATPDIKSHYAFRIFDFDDDGTLNREDLSRLVNCLTGEGEDTRLSASEMKQLIDNSISRFMGILIE

SEQ ID NO: 809147 - protein, 226 aa, Homo sapiens
MGGSGSRLSKELLAEYQDLTFLTKQEILLSVYVVLAPHLVDNEQQARSGNEHTGRPIAENTDSSPLSTRAHRRFCELLPQEQRSVESSLRAQVPFEQILSLPELKANPFKERICRVFSTSPAKDSLSFEDFLDLLSVFSDTATPDIKSHYAFRIFDFDDDGTLNREDLSRLVNCLTGEGEDTRLSASEMKQLIDNILEESDIDRDGTINLSEFQHVISRSPDFASP

SEQ ID NO: 809148 - protein, 114 aa, Homo sapiens
MSTQTSLQQSATKQQRKYRDLTFLTKQEILLSVYVVLAPHLVDNEQQARSGNEHTGRPIAENTDSSPLSTRAHRRFCELLPQEQRSVESSLRAQVPFEQILSLPELKVQALTLL

SEQ ID NO: 809149 - protein, 45 aa, Homo sapiens
MGGSGSRLSKELLAEYQVRGTPGPGELACGPLLGSRVRELAAGRP

SEQ ID NO: 809150 - protein, 201 aa, Homo sapiens
MVRQLYMWNKGDWVMEEVNSPSYYLLFLSILSWVGFVGGAAYLSVFPIISSSVRGDFDMSFLCPVFTLQATALTTLVHVFCVLLLFQLCLSCPSDFPVKCHIPSSHQALSFSVVLKTLFPSSVLTEEEALRHDSLSSPKQKKKRRRIDRTMIGEPMNFVHLTHIGSGEMGAGDGLAMTGAVQEQMRSKGNRDRPWSNSRGL

SEQ ID NO: 809151 - protein, 201 aa, Homo sapiens; identical to SEQ ID NO: 809150

SEQ ID NO: 809152 - protein, 253 aa, Homo sapiens
MAPWALLSPGVLVRTGHTVLTWGITLVLFLHDTELRQWEEQGELLLPLTFLLLVLGSLLLYLAVSLMDPGYVNVQPQPQEELKEEQTAMVPPAIPLRRCRYCLVLQPLRARHCRECRRCVRRYDHHCPWMENCVGERNHPLFVVYLALQLVVLLWGLYLAWSGLRFFQPWGLWLRSSGLLFATFLLLSLFSLVASLLLVSHLYLVASNTTTWEFISSHRIAYLRQRPSNPFDRGLTRNWPFLCAQPGTRWGEG

SEQ ID NO: 809153 - protein, 278 aa, Homo sapiens
RFFRVGPRAEAMAPWALLSPGVLVRTGHTVLTWGITLVLFLHDTELRQWEEQGELLLPLTFLLLVLGSLLLYLAVSLMDPGYVNVQPQPQEELKEEQTAMVPPAIPLRRCRYCLVLQPLRARHCRECRRCVRRYDHHCPWMENCVGERNHPLFVVYLALQLVVLLWGLYLAWSGLRFFQPWGLWLRSSGLLFATFLLLSLFSLVASLLLVSHLYLVASNTTTWEFISSHRIAYLRQRPSNPFDRGLTRNLAHFFCGWPSGSWETLWAEEEEEGSSPAV

SEQ ID NO: 809154 - protein, 267 aa, Homo sapiens
MAPWALLSPGVLVRTGHTVLTWGITLVLFLHDTELRQWEEQGELLLPLTFLLLVLGSLLLYLAVSLMDPGYVNVQPQPQEELKEEQTAMVPPAIPLRRCRYCLVLQPLRARHCRECRRCVRRYDHHCPWMENCVGERNHPLFVVYLALQLVVLLWGLYLAWSGLRFFQPWGLWLRSSGLLFATFLLLSLFSLVASLLLVSHLYLVASNTTTWEFISSHRIAYLRQRPSNPFDRGLTRNLAHFFCGWPSGSWETLWAEEEEEGSSPAV

SEQ ID NO: 809155 - protein, 215 aa, Homo sapiens
MAPWALLSPGVLVRTGHTVLTWGITLVLFLHDTELRQWEEQGELLLPLTFLLLVLGSLLLYLAVSLMDPGYVNVQPQPQEELKEEQTAMVPPAIPLRRCRYCLVLQPLRARHCRECRRCVRRYDHHCPWMENCVGERNHPLFVVYLALQLVVLLWGLYLAWSGLRFFQPWGLWLRSSGLLFATFLLLAHFFCGWPSGSWETLWAEEEEEGSSPAV

SEQ ID NO: 809156 - protein, 278 aa, Homo sapiens; identical to SEQ ID NO: 809153

SEQ ID NO: 809157 - protein, 227 aa, Homo sapiens
MAPWALLSPGVLVRTGHTVLTWGITLVLFLHDTELRQWEEQGELLLPLTFLLLVLGSLLLYLAVSLMDPGYVNVQPQPQEELKEEQTAMVPPAIPLRRCRYCLVLQPLRARHCRECRRCVRRYDHHCPWMENCVGERNHPLFVVYLALQLVVLLWGLYLACPGVCGCGPAGSCSPPSCCCPSSRWWPACSSSRTSTWWPATPPPGNSSPHTASPISASAPATPSTEA

SEQ ID NO: 809158 - protein, 227 aa, Homo sapiens; identical to SEQ ID NO: 809157

SEQ ID NO: 809159 - protein, 522 aa, Homo sapiens
MVRSGKNGDLHLKQIAYYKRTGEYHSTTLPSERSGIRRAAKKFVFKEKKLFYVGKDRKQNRLVIVSEEEKKKVLRECHENDSGAHHGISRTLTLVESNYYWTSVTNDVKQWVYACQHCQVAKNTVIVAPKQHLLKVENPWSLVTVDLMGPFHTSNRSHVYAIIMTDLFTKWIVILPLCDVSASEVSKAIINIFFLYGPPQKIIMDQRDEFIQQINIELYRLFGIKQIVISHTSGTVNPMESTPNTIKAFLSKHCADHPNNWDDHLSAVSFAFNVTHLEPTKNTPYFQMFSRNPYMPETSDSLHEVDGDNTSMFAKILDAIKEADKIMENKTTSLGQMENNNLDELNKSKIIVKKKPKQLNPFHLKVGHEVLRQRKNWWKDGRFQSEWVGPCVIDYITESGCAVLRDNTGVRLKRPIKMSHLKPYIRESSEQESLYLLQGSVVADHDYIGLPEIPIGAYQANILVEDATIGIVDNELLTSSKDRELLEYRNTKISPLIDDHSSLEKQTFSLLDSSNQVLEYLS

SEQ ID NO: 809160 - protein, 317 aa, Homo sapiens
MVRSGKNGDLHLKQIAYYKRTGEYHSTTLPSERSGIRRAAKKFVFKEKKLFYVGKDRKQNRLVIVSEEEKKKVLRECHENDSGAHHGISRTLTLVESNYYWTSVTNDVKQWVYACQHCQVAKNTVIVAPKQHLLKVENPWSLVTVDLMGPFHTSNRSHVYAIIMTDLFTKWIVILPLCDVSASEVSKAIINIFFLYGPPQKIIMDQRDEFIQQINIELYRLFGIKQIVISHTSGTVNPMESTPNTIKAFLSKHCADHPNNWDDHLSAVSFAFNVTHLEPTKNTPYFQMFSRNPYMPETSDSLHEVDGDNTNGEQQFG

SEQ ID NO: 809161 - protein, 222 aa, Homo sapiens
MVRSGKNGDLHLKQIAYYKRTGEYHSTTLPSERSGIRRAAKKFVFKEKKLFYVGKDRKQNRLVIVSEEEKKKVLRECHENDSGAHHGISRTLTLVESNYYWTSVTNDVKQWVYACQHCQVAKNTVIVAPKQHLLKVENPWSLVTVDLMGPFHTSNRSHVYAIIMTDLFTKWIVILPLCDVSASEVSKAIINIFFLYGPPQKIIMDQRDEFIQQKVFISCKVQ

SEQ ID NO: 809162 - protein, 359 aa, Homo sapiens [sequence omitted]

SEQ ID NO: 809163 - protein, 286 aa, Homo sapiens
MVRSGKNGDLHLKQIAYYKRTGEYHSTTLPSERSGIRRAAKKFVFKEKKLFYVGKDRKQNRLVIVSEEEKKKVLRECHENDSGAHHGISRTLTLVESNYYWTSVTNDVKQWVYACQHCQVAKNTVIVAPKQHLLKVENPWSLVTVDLMGPFHTSNRSHVYAIIMTDLFTKWIVILPLCDVSASEVSKAIINIFFLYGPPQKIIMDQRDEFIQQINIELYRLFGIKQIVISHTSGTVNPMESTPNTIKAFLSKHCADHPNNWDDHLSAVSFAFNVTHLKVFISCKVQ

SEQ ID NO: 809164 - protein, 176 aa, Homo sapiens
GGERGKEERRRAGGRGAGGAGRRARGGGSGEERAGRRQPRWEESAHFQCQGIVGSSHGLSRAPHLSAAPAPALASRPRFSSAPCSQGGGGGGPATMIHFILLFSRQGKLRLQKWYITLPDKERKKITREIVQIILSRGHRTSSFVDWKELKLVYKRSVSWILSLILKRLISSWTSL

SEQ ID NO: 809165 - protein, 249 aa, Homo sapiens
GGERGKEERRRAGGRGAGGAGRRARGGGSGEERAGRRQPRWEESAHFQCQGIVGSSHGLSRAPHLSAAPAPALASRPRFSSAPCSQGGGGGGPATMIHFILLFSRQGKLRLQKWYITLPDKERKKITREIVQIILSRGHRTSSFVDWKELKLVYKRYASLYFCCAIENQDNELLTLEIVHRYVELLDKYFGNVCELDIIFNFEKAYFILDEFIIGGEIQETSKKIAVKAIEDSDMLQETMEEYMNKPTF

SEQ ID NO: 809166 - protein, 199 aa, Homo sapiens
GGERGKEERRRAGGRGAGGAGRRARGGGSGEERAGRRQPRWEESAHFQCQGIVGSSHGLSRAPHLSAAPAPALASRPRFSSAPCSQGGGGGGPATMIHFILLFSRQGKLRLQKWYITLPDKERKKITREIVQIILSRGHRTSSFVDWKELKLVYKRYASLYFCCAIENQDNELLTLEIVHRYVELLDKYFGNTWPFARA

SEQ ID NO: 809167 - protein, 249 aa, Homo sapiens
GGERGKEERRRAGGRGAGGAGRRARGGGSGEERAGRRQPRWEESAHFQCQGIVGSSHGLSRAPHLSAAPAPALASRPRFSSAPCSQGGGGGGPATMIHFILLFSRQGKLRLQKWYITLPDKERKKITREIVQIILSRGHRTSSFVDWKELKLVYKRYASLYFCCAIENQDNELLTLEIVHRYVELLDKYFGNVCELDIIFNFEKAYFILDEFIIGGEIQETSKKIAVKAIEDSDMLQEVSTVSQTMGER

SEQ ID NO: 809168 - protein, 199 aa, Homo sapiens
MSGALDVLQMKEEDVLKFLAAGTHLGGTNLDFQMEQYIYKRKSDGIYIINLKRTWEKLLLAARAIVAIENPADVSVISSRNTGQRAVLKFAAATGATPIAGRFTPGTFTNQIQAAFREPRLLVVTDPRADHQPLTEASYVNLPTIALCNTDSPLRYVDIAIPCNNKGAHSVGLMWWMLAREVLRMRGTISREHPWEVMP

SEQ ID NO: 809169 - protein, 113 aa, Homo sapiens
MYQFMLVYSLPDVYMKRLSANIFHHSACNYEKFSSKKCNLAKLSTNRIGSIMFYVCSILTLCASLPCRLFRNYRISNFPRVFMKMFRFKELYCFRQNKACSSNRKIHEFQKYH

SEQ ID NO: 809170 - protein, 130 aa, Homo sapiens
MTDVWSWQHLSPFTPGPEPGQPTMGMLCFCSPSFTMPVSSPPRWGLGGMDRQRMSSTQGLQDLPVAHSARLSTTTPAKEDSIWQSFFQVPSYTCASAFLSWMMVFSLFLSLLSLTALVFHVAHPLSSVNL

SEQ ID NO: 809171 - protein, 114 aa, Homo sapiens
MAECPTLGEAVTDHPDRLWAWEKFVYLDEKQHAWLPLTIEIKDRLQLRVLLRREDVVLGRPMTPTQIGPSLLPIMWQLYPDGRYRSSDSSFWRLVYHIKIDGVEDMLLELLPDD

SEQ ID NO: 809172 - protein, 114 aa, Homo sapiens; identical to SEQ ID NO: 809171

SEQ ID NO: 809173 - protein, 114 aa, Homo sapiens; identical to SEQ ID NO: 809171

SEQ ID NO: 809174 - protein, 114 aa, Homo sapiens; identical to SEQ ID NO: 809171

SEQ ID NO: 809175 - protein, 114 aa, Homo sapiens; identical to SEQ ID NO: 809171

SEQ ID NO: 809176 - protein, 114 aa, Homo sapiens; identical to SEQ ID NO: 809171

SEQ ID NO: 809177 - protein, 130 aa, Homo sapiens; identical to SEQ ID NO: 809170

SEQ ID NO: 809178 - protein, 119 aa, Homo sapiens
MTIISHSDPCPDGWMAGRRDSGFLRLEKPWQAEPESMPCPFLLLRIKDRLQLRVLLRREDVVLGRPMTPTQIGPSLLPIMWQLYPDGRYRSSDSSFWRLVYHIKIDGVEDMLLELLPDD

SEQ ID NO: 809179 - protein, 114 aa, Homo sapiens; identical to SEQ ID NO: 809171

SEQ ID NO: 809180 - protein, 116 aa, Homo sapiens
MTIISHSDPCPDGWMAGRRDSGFLRLEKPWQAEPESMPCPFLLLRIKDRLQLRVLLRREDVVLGRPMTPTQIGPSLLPIMWQLYPDGRYRSSDSSFWRLVYHIKVLAAPVSFHPRA

SEQ ID NO: 809181 - protein, 102 aa, Homo sapiens
TRLQTLPARKHACKRCLPTQVHVQLKERPERSPYLCSGLRSLWVSGPHPGTQQEARPASPVDEPSEPLACPRGKGIEVGFPPFYRWSRTWVLQSCMWHEYFL

SEQ ID NO: 809182 - protein, 566 aa, Homo sapiens
MAAVPPGLEPWNRVRIPKAGNRSAVTVQNPGAALDLCIAAVIKECHLVILSLKSQTLDAETDVLCAVLYSNHNRMGRHKPHLALKQVEQCLKRLKNMNLEGSIQDLFELFSSNENQPLTTKVCVVPSQPVVELVLMKVLGACKLLLRLLDCCCKTFLLTVKHLGLQEFIILNLVMVGLVSRLWVLYKGVLKRLILLYEPLFGLLQEVARIQPMPYFKDFTFPSDITEFLGQPYFEAFKKKMPIAFAAKGINKLLNKLFLINEQSPRASEETLLGISKKAKQMKINVQNNVDLGQPVKNKRVFKEESSEFDVRAFCNQLKHKATQETSFDFKCSQSRLKTTKYSSQKVIGTPHAKSIVQRFREAESFTQLSEEIQMAVVWCRSKKLKAQAIFLGNKLLKSNRLKHLEAQGTSLPKKLECIKTSICNHLLRGSGIKTSKHHLRQRRSQNKFLRRQRKPQRKLQSTLLREIQQFSQGTRKSATDTSAKWRLSHCTVHRTDLYPNSKQLLNSGVSMPVIQTKEKMIHENLRGIHENETDSWTVMQINKNSTSGTIKETDDIDDIFALMGV

SEQ ID NO: 809183 - protein, 159 aa, Homo sapiens
MAAVPPGLEPWNRVRIPKAGNRSAVTVQNPGAALDLCIAAVIKECHLVILSLKSQTLDAETDVLCAVLYSNHNRMGRHKPHLALKQVEQCLKRLKNMNLEGSIQDLFELFSSNENQPLTTKVCVVPSQPVVELVLMKVLGACKLLLRLLDCCCKTFLYP

SEQ ID NO: 809184 - protein, 566 aa, Homo sapiens; identical to SEQ ID NO: 809182

SEQ ID NO: 809185 - protein, 492 aa, Homo sapiens [sequence omitted]

SEQ ID NO: 809186 - protein, 470 aa, Homo sapiens [sequence omitted]

SEQ ID NO: 809187 - protein, 422 aa, Homo sapiens
MGRHKPHLALKQVEQCLKRLKNMNLEGSIQDLFELFSSKVLYKGVLKRLILLYEPLFGLLQEVARIQPMPYFKDFTFPSDITEFLGQPYFEAFKKKMPIAFAAKGINKLLNKLFLINEQSPRASEETLLGISKKAKQMKINVQNNVDLGQPVKNKRVFKEESSEFDVRAFCNQLKHKATQETSFDFKCSQSRLKTTKYSSQKVIGTPHAKSIVQRFREAESFTQLSEEIQMAVVWCRSKKLKAQAIFLGNKLLKSNRLKHLEAQGTSLPKKLECIKTSICNHLLRGSGIKTSKHHLRQRRSQNKFLRRQRKPQRKLQSTLLREIQQFSQGTRKSATDTSAKWRLSHCTVHRTDLYPNSKQLLNSGVSMPVIQTKEKMIHENLRGIHENETDSWTVMQINKNSTSGTIKETDDIDDIFALMGV

SEQ ID NO: 809188 - protein, 496 aa, Homo sapiens
MAAVPPGLEPWNRVRIPKAGNRSAVTVQNPGAALDLCIAAVIKECHLVILSLKSQTLDAETDVLCAVLYSNHNRMGRHKPHLALKQVEQCLKRLKNMNLEGSIQDLFELFSSKVLYKGVLKRLILLYEPLFGLLQEVARIQPMPYFKDFTFPSDITEFLGQPYFEAFKKKMPIAFAAKGINKLLNKLFLINEQSPRASEETLLGISKKAKQMKINVQNNVDLGQPVKNKRVFKEESSEFDVRAFCNQLKHKATQETSFDFKCSQSRLKTTKYSSQKVIGTPHAKSIVQRFREAESFTQLSEEIQMAVVWCRSKKLKAQAIFLGNKLLKSNRLKHLEAQGTSLPKKLECIKTSICNHLLRGSGIKTSKHHLRQRRSQNKFLRRQRKPQRKLQSTLLREIQQFSQGTRKSATDTSAKWRLSHCTVHRTDLYPNSKQLLNSGVSMPVIQTKEKMIHENLRGIHENETDSWTVMQINKNSTSGTIKETDDIDDIFALMGV

SEQ ID NO: 809189 - protein, 548 aa, Homo sapiens
MAAVPPGLEPWNRVRIPKAGNRSAVTVQNPGAALDLCIAAVIKECHLVILSLKSQTLDAETDVLCAVLYSNHNRMGRHKPHLALKQVEQCLKRLKNMNLEGSIQDLFELFSSNENQPLTTKVCVVPSQPVVELVLMKVLGACKLLLRLLDCCCKTFLLTVKHLGLQEFIILNLVMVGLVSRLWVLYKGVLKRLILLYEPLFGLLQEVARIQPMPYFKDFTFPSDITEFLGQPYFEAFKKKMPIAFAAKGINKLLNKLFLINEQSPRASEETLLGISKKAKQMKINVQNNVDLGQPVKNKRVFKEESSEFDVRAFCNQLKHKATQETSFDFKCSQSRLKTTKYSSQKVIGTPHAKSIVQRFREAESFTQLSEEIQMAVVWCRSKKLKAQAIFLGNKLLKSNRLKHLEAQGTSLPKKLECIKTSICNHLLRGSGIKTSKHHLRQRRSQNKFLRRQRKPQRKLQSTLLREIQQFSQGTRKSATDTSAKWRLSHCTVHRTDLYPNSKQLLNSGVSMPVIQTKEKMIHENLRGIHENETDSWTVMQINTLMGV

SEQ ID NO: 809190 - protein, 364 aa, Homo sapiens
MCCPQSASGGVGVDEGFGSLQVVAPLVGLLLQNFSFDCETSRFARVHYFKPCDGWAGEQVMSPRASEETLLGISKKAKQMKINVQNNVDLGQPVKNKRVFKEESSEFDVRAFCNQLKHKATQETSFDFKCSQSRLKTTKYSSQKVIGTPHAKSIVQRFREAESFTQLSEEIQMAVVWCRSKKLKAQAIFLGNKLLKSNRLKHLEAQGTSLPKKLECIKTSICNHLLRGSGIKTSKHHLRQRRSQNKFLRRQRKPQRKLQSTLLREIQQFSQGTRKSATDTSAKWRLSHCTVHRTDLYPNSKQLLNSGVSMPVIQTKEKMIHENLRGIHENETDSWTVMQINKNSTSGTIKETDDIDDIFALMGV

SEQ ID NO: 809191 - protein, 269 aa, Homo sapiens
MRSPYIQESSEFDVRAFCNQLKHKATQETSFDFKCSQSRLKTTKYSSQKVIGTPHAKSIVQRFREAESFTQLSEEIQMAVVWCRSKKLKAQAIFLGNKLLKSNRLKHLEAQGTSLPKKLECIKTSICNHLLRGSGIKTSKHHLRQRRSQNKFLRRQRKPQRKLQSTLLREIQQFSQGTRKSATDTSAKWRLSHCTVHRTDLYPNSKQLLNSGVSMPVIQTKEKMIHENLRGIHENETDSWTVMQINKNSTSGTIKETDDIDDIFALMGV

SEQ ID NO: 809192 - protein, 192 aa, Homo sapiens
MAVVWCRSKKLKAQAIFLGNKLLKSNRLKHLEAQGTSLPKKLECIKTSICNHLLRGSGIKTSKHHLRQRRSQNKFLRRQRKPQRKLQSTLLREIQQFSQGTRKSATDTSAKWRLSHCTVHRTDLYPNSKQLLNSGVSMPVIQTKEKMIHENLRGIHENETDSWTVMQINKNSTSGTIKETDDIDDIFALMGV

SEQ ID NO: 809193 - protein, 110 aa, Homo sapiens [sequence omitted]

SEQ ID NO: 809194 - protein, 566 aa, Homo sapiens; identical to SEQ ID NO: 809182

SEQ ID NO: 809195 - protein, 411 aa, Homo sapiens
MAAVPPGLEPWNRVRIPKAGNRSAVTVQNPGAALDLCIAAVIKECHLVILSLKSQTLDAETDVLCAVLYSNHNRMGRHKPHLALKQVEQCLKRLKNMNLEGSIQDLFELFSSNENQPLTTKVCVVPSQPVVELVLMKVLGACKLLLRLLDCCCKTFLLTVKHLGLQEFIILNLVMVGLVSRLWVLYKGVLKRLILLYEPLFGLLQEVARIQPMPYFKDFTFPSDITEFLGQPYFEAFKKKMPIAFAAKGINKLLNKLFLINEQSPRASEETLLGISKKAKQMKINVQNNVDLGQPVKNKRVFKEESSEFDVRAFCNQLKHKATQETSFDFKCSQSRLKTTKYSSQKVIGTPHAKSIVQRFREAESFTQLSEEIQMAVVWCRSKKLKAQAIFLGNKLLKSNRLKHLEAQGTR

SEQ ID NO: 809196 - protein, 337 aa, Homo sapiens
MAAVPPGLEPWNRVRIPKAGNRSAVTVQNPGAALDLCIAAVIKECHLVILSLKSQTLDAETDVLCAVLYSNHNRMGRHKPHLALKQVEQCLKRLKNMNLEGSIQDLFELFSSNENQPLTTKVCVVPSQPVVELVLMKVLGACKLLLRLLDCCCKTFLLTVKHLGLQEFIILNLVMVGLVSRLWVLYKGVLKRLILLYEPLFGLLQEVARIQPMPYFKDFTFPSDITEFLGQPYFEAFKKKMPIAFAAKGINKLLNKLFLINEQSPRASEETLLGISKKAKQMKINVQNNVDLGQPVKNKRVFKEESSEFDVRAFCNQLKHKATQVCLASLNLAYDFC

SEQ ID NO: 809197 - protein, 281 aa, Homo sapiens
MLFIFPLSLPWRPSCWKESCSTGQRQAGRSREDSVTPPPSSPWPTPPAGAMSTKQEARRDEGEARTRGQEAQLRDRAHLSQQRRLKQATQFLHKDSADLLPLDSLKRLGTSKDLQPRSVIQRRLVEGNPNWLQGEPPRMQDLIHGQESRRKTSRTEIPALLVNCKCQDQLLRVAVDTGTQYNRISAGCLSRLGLEKRVLKASAGDLAPGPPTQVEQLELQLGQETVVCSAQVVDAESPEFCLGLQTLLSLKCCIDLEHGVLRLKAPFSELPFLPLYQEPGQ

SEQ ID NO: 809198 - protein, 294 aa, Homo sapiens
MLFIFPLSLPWRPSCWKESCSTGQRQAGRSREDSVTPPPSSPWPTPPAGAMSTKQEARRDEGEARTRGQEAQLRDRAHLSQQRRLKQATQFLHKDSADLLPLDSLKRLGTSKDLQPRSVIQRRLVEGNPNWLQGEPPRMQDLIHGQESRRKTSRTEIPALLVNCKCQDQLLRVAVDTGTQYNRISAGCLSRLGLEKRVLKASAGDLAPGPPTQVEQLELQLGQETVVCSAQVVGKSPLLQQPWCSPHLSLWGGAKAETFTPCSTRSSQRCSDYPPSLCQCPRIWGWGGQRRSNG

SEQ ID NO: 809199 - protein, 129 aa, Homo sapiens
MFEDSEDSCRNLVPVQRVVYNVLSELEKTFNLSVLEALFSEVNMQEYPDLIHIYKSFKNAIQDKLSFQESDRKEREERPDIKLSLKQGEVPESPEARKESDQACGKMDTVDIANNSTLGKPKRKRSKNK

SEQ ID NO: 809200 - protein, 351 aa, Homo sapiens
MFEDSEDSCRNLVPVQRVVYNVLSELEKTFNLSVLEALFSEVNMQEYPDLIHIYKSFKNAIQDKLSFQESDRKEREERPDIKLSLKQGEVPESPEARKESDQACGKMDTVDIANNSTLGKPKRKRRKKKGHGWSRTGTRTQKNNQQNDNSKADGQLVSSEKKANMNLKDLSKIRGRKRGKPGTHFTQSDRAPQKRVRSRASRKHKDETVDFQAPLLPVTCGGVKGILHKEKLEQGTLAKCIQTEDGKWFTPMEFEIKGGYARSKNWRLSVRCGGWPLRRLMEEGSLPNPPRIYYRNKKRILKSQNNSSVDPCMRNLDECEVCRDGGELFCCDTCSRVFHEDCHIPPVESEK

SEQ ID NO: 809201 - protein, 526 aa, Homo sapiens
MFEDSEDSCRNLVPVQRVVYNVLSELEKTFNLSVLEALFSEVNMQEYPDLIHIYKSFKNAIQDKLSFQESDRKEREERPDIKLSLKQGEVPESPEARKESDQACGKMDTVDIANNSTLGKPKRKRRKKKGHGWSRTGTRTQKNNQQNDNSKADGQLVSSEKKANMNLKDLSKIRGRKRGKPGTHFTQSDRAPQKRVRSRASRKHKDETVDFQAPLLPVTCGGVKGILHKEKLEQGTLAKCIQTEDGKWFTPMEFEIKGGYARSKNWRLSVRCGGWPLRRLMEEGSLPNPPRIYYRNKKRILKSQNNSSVDPCMRNLDECEVCRDGGELFCCDTCSRVFHEDCHIPPVESEKMSACVQMGKEQVHRVLGPSSVIQRAVGDAGSRRTPWNCIFCRMKESPGSQQCCQESEVLERQMCPEEQLKCEFLLLKVYCCSESSFFAKIPYYYYIREACQGLKEPMWLDKIKKRLNEHGYPQVEGFVQDMRLIFQNHRASYKYKDFGQMGLRLEAEFEKDFKEVFAIQETNGNS

SEQ ID NO: 809202 - protein, 356 aa, Homo sapiens
MFEDSEDSCRNLVPVQRVVYNVLSELEKTFNLSVLEALFSEVNMQEYPDLIHIYKSFKNAIQDKLSFQESDRKEREERPDIKLSLKQGEVPESPEARKESDQACGKMDTVDIANNSTLGKPKRKRRKKKGHGWSRTGTRTQKNNQQNDNSKADGQLVSSEKKANMNLKDLSKIRGRKRGKPGTHFTQSDRAPQKRVRSRASRKHKDETVDFQAPLLPVTCGGVKGILHKEKLEQGTLAKCIQTEDGKWFTPMEFEIKGGYARSKNWRLSVRCGGWPLRRLMEEGSLPNPPRIYYRNKKRILKSQNNSSVDPCMRNLDECEVCRDGGELFCCDTCSRVFHEDCHIPPVESEKMSACV

SEQ ID NO: 809203 - protein, 493 aa, Homo sapiens
MFEDSEDSCRNLVPVQRVVYNVLSELEKTFNLSVLEALFSEVNMQEYPDLIHIYKSFKNAIQDKLSFQESDRKEREERPDIKLSLKQGEVPESPEARKESDQACGKMDTVDIANNSTLGKPKRKRRKKKGHGWSRTGTRTQKNNQQNDNSKADGQLVSSEKKANMNLKDLSKIRGRKRGKPGTHFTQSDRAPQKRVRSRASRKHKDETVDFQAPLLPVTCGGVKGILHKEKLEQGTLAKCIQTEDGKWFTPMEFEIKGGYARSKNWRLSVRCGGWPLRRLMEEGSLPNPPRIYYRNKKRILKSQNNSSVDPCMRNLDECEVCRDGGELFCCDTCSRVFHEDCHIPPVESEKTPWNCIFCRMKESPGSQQCCQESEVLERQMCPEEQLKCEFLLLKVYCCSESSFFAKIPYYYYIREACQGLKEPMWLDKIKKRLNEHGYPQVEGFVQDMRLIFQNHRASYKYKDFGQMGLRLEAEFEKDFKEVFAIQETNGNS

SEQ ID NO: 809204 - protein, 344 aa, Homo sapiens
VIQRILSDEFTEKSPIKASRKHKDETVDFQAPLLPVTCGGVKGILHKEKLEQGTLAKCIQTEDGKWFTPMEFEIKGGYARSKNWRLSVRCGGWPLRRLMEEGSLPNPPRIYYRNKKRILKSQNNSSVDPCMRNLDECEVCRDGGELFCCDTCSRVFHEDCHIPPVESEKMSACVQMGKEQVHRVLGPSSVIQRAVGDAGSRRTPWNCIFCRMKESPGSQQCCQESEVLERQMCPEEQLKCEFLLLKVYCCSESSFFAKIPYYYYIREACQGLKEPMWLDKIKKRLNEHGYPQVEGFVQDMRLIFQNHRASYKYKDFGQMGLRLEAEFEKDFKEVFAIQETNGNS

SEQ ID NO: 809205 - protein, 233 aa, Homo sapiens
MFEDSEDSCRNLVPVQRVVYNVLSELEKTFNLSVLEALFSEVNMQEYPDLIHIYKSFKNAIQDKLSFQESDRKEREERPDIKLSLKQGEVPESPEARKESDQACGKMDTVDIANNSTLGKPKRKRRKKKGHGWSRTGTRTQKNNQQNDNSKADGQLVSSEKKANMNLKDLSKIRGRKRGKPGTHFTQSDRAPQKRVRSRGKKEKRNALSITKHLISCALCCIFSNKPISLIVL

SEQ ID NO: 809206 - protein, 72 aa, Homo sapiens
MFSKKPHGDVKKSTQKVLDTKKDALTRLKHLRIVIENAESIDLKQFFDQHFSHIYYVFFENFVTIEASLKQK

SEQ ID NO: 809207 - protein, 787 aa, Homo sapiens
MEPAGERFPEQRQVLILLLLLEVTLAGWEPRRYSVMEETERGSFVANLANDLGLGVGELAERGARVVSEDNEQGLQLDLQTGQLILNEKLDREKLCGPTEPCIMHFQVLLKKPLEVFRAELLVTDINDHSPEFPEREMTLKIPETSSLGTVFPLKKARDLDVGSNNVQNYNISPNSHFHVSTRTRGDGRKYPELVLDTELDREEQAELRLTLTAVDGGSPPRSGTVQILILVLDANDNAPEFVQALYEVQVPENSPVGSLVVKVSARDLDTGTNGEISYSLYYSSQEIDKPFELSSLSGEIRLIKKLDFETMSSYDLDIEASDGGGLSGKCSVSVKVLDVNDNFPELSISSLTSPIPENSPETEVALFRIRDRDSGENGKMICSIQDDVPFKLKPSVENFYRLVTEGALDRETRAEYNITITITDLGTPRLKTEQSITVLVSDVNDNAPAFTQTSYTLFVRENNSPALHIGSVSATDRDSGTNAQVTYSLLPPRDPHLPLTSLVSINTDNGHLFALQSLDYEALQAFEFRVGATDRGFPALSSEALVRVLVLDANDNSPFVLYPLQNGSAPCTELVPRAAEPGYLVTKVVAVDGDSGQNAWLSYQLLKATEPGLFGVWAHNGEVRTARLLSERDVAKHRLVVLVKDNGEPPRSATATLQVLLVDGFSQPYLPLPEAAPAQAQADSLTVYLVVALASVSSLFLFSVFLFVAVRLCRRSRAASVGRCSVPEGPFPGHLVDVSGTGTLSQSYQYEVCLTGGSESNDFKFLKPIFPNIVSQDSRRKSEFLE

SEQ ID NO: 809208 - protein, 495 aa, Homo sapiens
YRYRRPRPRASPRIMATSATSPHAPGFPAEGRCGYYVEKKKRFCRMVVAAGKRFCGEHAGAMEEEDARKRILCPLDPKHTVYEDQLAKHLKKCNSREKPKPDFYIQDINAGLRDETEIPEQLVPISSLSEEQLEKLIKKLRKASEGLNSTLKDHIMSHPALHDALNDPKNGDSATKHLKQQASILGNIENLKLLGPRRCFVEFGAGKGKLSHWVDIALKDAEKVHFILVEKVTTRFKVDGKHRKKNSVFERLQIDIQHLCLNKIPVLREEKLPVVGIGKHLCGMATDLALRCLVETYAASFEERNEEPLAKRIKNDKTEKEIYTLAKEGNEKNVPEKWNPVAGIVIALCCHHRCDWRHYVGKEYFRALGLGAVEFHYFQRMSSWATCGMRKTSLETSNSTTKRQDNQNDDSEEHDDGGYRITDDGADCLPGLLSVEEKKKIGHLCKLLIDQGRIQYLQQKGFSPALQYYTDPLVSLENVLLTALPNHSSSPETTA

SEQ ID NO: 809209 - protein, 431 aa, Homo sapiens
YRYRRPRPRASPRIMATSATSPHAPGFPAEGRCGYYVEKKKRFCRMVVAAGKRFCGEHAGAMEEEDARKRILCPLDPKHTVYEDQLAKHLKKCNSREKPKPDFYIQDINAGLRDETEIPEQLVPISSLSEEQLEKLIKKLRKASEGLNSTLKDHIMSHPALHDALNDPKNGDSATKHLKQQASILGNIENLKLLGPRRCFVEFGAGKGKLSHWVDIALKDAEKVHFILVEKVTTRFKVDGKHRKKNSVFERLQIDIQHLCLNKIPVLREEKLPVVGIGKHLCGMATDLALRCLVETYAASFEERNEEPLAKRIKNDKTEKEIYTLAKEGNEKNVPEKWNPVAGIVIALCCHHRCDWRHYVGKEYFRALGLGAVEFHYFQRMSSWATCGMRKTSLETSNSTTKRQDNQNDDSEEHDDGGYRITDDGADCLPG

SEQ ID NO: 809210 - protein, 301 aa, Homo sapiens
YRYRRPRPRASPRIMATSATSPHAPGFPAEGRCGYYVEKKKRFCRMVVAAGKRFCGEHAGAMEEEDARKRILCPLDPKHTVYEDQLAKHLKKCNSREKPKPDFYIQDINAGLRDETEIPEQLVPISSLSEEQLEKLIKKLRKASEGLNSTLKDHIMSHPALHDALNDPKNGDSATKHLKQQASILGNIENLKLLGPRRCFVEFGAGKGKLSHWVDIALKDAEKVHFILVEKVTTRFKVDGKHRKKNSVFERLQIDIQHLCLNKIPVLREEKLPVVGIGKHLCGMATGVIGDIMWAKNISGL

SEQ ID NO: 809211 - protein, 189 aa, Homo sapiens
YRYRRPRPRASPRIMATSATSPHAPGFPAEGRCGYYVEKKKRFCRMVVAAGKRFCGEHAGAMEEEDARKRILCPLDPKHTVYEDQLAKHLKKCNSREKPKPDFYIQDINAGLRDETEIPEQLVPISSLSEEQLEKLIKKLRKASEGLNSTLKDHIMSHPALHDALNDPKNGDSATKHLKQQVCLGYSNY

SEQ ID NO: 809212 - protein, 175 aa, Homo sapiens
YRYRRPRPRASPRIMATSATSPHAPGFPAEGRCGYYVEKKKRFCRMVVAAGKRFCGEHAGAMEEEDARKRILCPLDPKHTVYEDQLAKHLKKCNSREKPKPDFYIQDINAGLRDETEIPEQLVPISSLSEEQLEKLIKKLRKASEALHDALNDPKNGDSATKHLKQQVCLGYSNY

SEQ ID NO: 809213 - protein, 431 aa, Homo sapiens; identical to SEQ ID NO: 809209

SEQ ID NO: 809214 - protein, 431 aa, Homo sapiens; identical to SEQ ID NO: 809209

SEQ ID NO: 809215 - protein, 189 aa, Homo sapiens; identical to SEQ ID NO: 809211

SEQ ID NO: 809216 - protein, 734 aa, Homo sapiens
MWGLLLALAAFAPAVGPALGAPRNSVLGLAQPGTTKVPGSTPALHSSPAQPPAETANGTSEQHVRIRVIKKKKVIMKKRKKLTLTRPTPLVTAGPLVTPTPAGTLDPAEKQETGCPPLGLESLRVSDSRLEASSSQSFGLGPHRGRLNIQSGLEDGDLYDGAWCAEEQDADPWFQVDAGHPTRFSGVITQGRNSVWRYDWVTSYKVQFSNDSRTWWGSRNHSSGMDAVFPANSDPETPVLNLLPEPQVARFIRLLPQTWLQGGAPCLRAEILACPVSDPNDLFLEAPASGSSDPLDFQHHNYKAMRKLMKQVQEQCPNITRIYSIGKSYQGLKLYVMEMSDKPGEHELGEPEVRYVAGMHGNEALGRELLLLLMQFLCHEFLRGNPRVTRLLSEMRIHLLPSMNPDGYEIAYHRGSELVGWAEGRWNNQSIDLNHNFADLNTPLWEAQDDGKVPHIVPNHHLPLPTYYTLPNATVAPETRAVIKWMKRIPFVLSANLHGGELVVSYPFDMTRTPWAARELTPTPDDAVFRWLSTVYAGSNLAMQDTSRRPCHSQDFSVHGNIINGADWHTVPGSMNDFSYLHTNCFEVTVELSCDKFPHENELPQEWENNKDALLTYLEQVRMGIAGVVRDKDTELGIADAVIAVDGINHDVTTAWGGDYWRLLTPGDYMVTASAEGYHSVTRNCRVTFEEGPFPCNFVLTKTPKQRLRELLAAGAKVPPDLRRRLERLRGQKD

SEQ ID NO: 809217 - protein, 659 aa, Homo sapiens
MKKRKKLTLTRPTPLVTAGPLVTPTPAGTLDPAEKQETGCPPLGLESLRVSDSRLEASSSQSFGLGPHRGRLNIQSGLEDGDLYDGAWCAEEQDADPWFQVDAGHPTRFSGVITQGRNSVWRYDWVTSYKVQFSNDSRTWWGSRNHSSGMDAVFPANSDPETPVLNLLPEPQVARFIRLLPQTWLQGGAPCLRAEILACPVSDPNDLFLEAPASGSSDPLDFQHHNYKAMRKLMKQVQEQCPNITRIYSIGKSYQGLKLYVMEMSDKPGEHELGEPEVRYVAGMHGNEALGRELLLLLMQFLCHEFLRGNPRVTRLLSEMRIHLLPSMNPDGYEIAYHRGSELVGWAEGRWNNQSIDLNHNFADLNTPLWEAQDDGKVPHIVPNHHLPLPTYYTLPNATVAPETRAVIKWMKRIPFVLSANLHGGELVVSYPFDMTRTPWAARELTPTPDDAVFRWLSTVYAGSNLAMQDTSRRPCHSQDFSVHGNIINGADWHTVPGSMNDFSYLHTNCFEVTVELSCDKFPHENELPQEWENNKDALLTYLEQVRMGIAGVVRDKDTELGIADAVIAVDGINHDVTTAWGGDYWRLLTPGDYMVTASAEGYHSVTRNCRVTFEEGPFPCNFVLTKTPKQRLRELLAAGAKVPPDLRRRLERLRGQKD

SEQ ID NO: 809218 - protein, 55 aa, Homo sapiens [sequence omitted]

SEQ ID NO: 809219 - protein, 104 aa, Homo sapiens
METSHAHESNCKIKGYGVVQQLLHSQLCGAGEDLGPIGVSYVYSFRAVPFSLILSNASLHSLGGKDSIQVGCLKELMGPLSELADQILGNLFNFYDFPSHILKW

SEQ ID NO: 809220 - protein, 104 aa, Homo sapiens; identical to SEQ ID NO: 809219

SEQ ID NO: 809221 - protein, 560 aa, Homo sapiens
MLLTIIPLQRSWRKFPPPVTVMRKTQVPKASLTSQENHLLHQPTLGIHCLLFQVIQAQGYLLKEARTSPGDMELDQNATEKVQTMFTAIDELLYEQKLSVHTKSLQEECQQWTASFPHLRILGRQIITPSEGYRLYPRSPSAVSASYETTLSQERDSTIFGIRGKKLHFSSSYAHKASSIAKSSSFCSMERDEEDSIIVSEGIIEEYLAFDHIDIEEGFHGKKSEAATEKQKLGYPPIAPFYCMKEDVLAYVFDSVWCKVVSCMEQLTRSHWEGFASDDESNVAVTRPDSESSCVLSELHPLVLPRVPQSKVLYITSNPMSLCQASRHQPNVNDLLVHGMPLQPRNLSLMDKLLDLDDKLLMRPGSSTILSTRNWPNRAVEFSTSSLSYTVQSTRRRNPPPRTLHPISTSHSCAETPRSVEEILRGARVPVAPDSLSSPSPTPLSRNNLLPPIGTAEVEHVSTVGPQRQMKPHGDSSRAQSAVVDEPNYQQPQERLLLPDFFPRPNTTQSFLLDTQYRRSCAVEYPHQARPGRGSAGPQLHGSTKSQSGGRPVSRTRQGP

SEQ ID NO: 809222 - protein, 518 aa, Homo sapiens
MLLTIIPLQRSWRKFPPPVTVMRKTQVPKASLTSQENHLLHQPTLGIHCLLFQVIQAQGYLLKEARTSPGDMELDQNATEKVQTMFTAIDELLYEQKLSVHTKSLQEECQQWTASFPHLRILGRQIITPSEGYRLYPRSPSAVSASYETTLSQERDSTIFGIRGKKLHFSSSYAHKASSIAKSSSFCSMERDEEDSIIVSEGIIEEYLAFDHIDIEEGFHGKKSEAATEKQKLGYPPIAPFYCMKEDVLAYVFDSVWCKVVSCMEQLTRSHWEGFASDDESNVAVTRPDSESSCVLSELHPLVLPRVPQSKVLYITSNPMSLCQASRHQPNVNDLLVHGMPLQPRNLSLMDKLLDLDDKLLMRPGSSTILSTRNWPNRAVEFSTSSLSYTVQSTRRRNPPPRTLHPISTSHSCAETPRSVEEILRGARVPVAPDSLSSPSPTPLSRNNLLPPIGTAEVEHVSTVGPQRQMLDTQYRRSCAVEYPHQARPGRGSAGPQLHGSTKSQSGGRPVSRTRQGP

SEQ ID NO: 809223 - protein, 370 aa, Homo sapiens
MCEPGVNSAEGFGIRGKKLHFSSSYAHKASSIAKSSSFCSMERDEEDSIIVSEGIIEEYLAFDHIDIEEGFHGKKSEAATEKQKLGYPPIAPFYCMKEDVLAYVFDSVWCKVVSCMEQLTRSHWEGFASDDESNVAVTRPDSESSCVLSELHPLVLPRVPQSKVLYITSNPMSLCQASRHQPNVNDLLVHGMPLQPRNLSLMDKLLDLDDKLLMRPGSSTILSTRNWPNRAVEFSTSSLSYTVQSTRRRNPPPRTLHPISTSHSCAETPRSVEEILRGARVPVAPDSLSSPSPTPLSRNNLLPPIGTAEVEHVSTVGPQRQMLDTQYRRSCAVEYPHQARPGRGSAGPQLHGSTKSQSGGRPVSRTRQGP

SEQ ID NO: 809224 - protein, 368 aa, Homo sapiens
AIWGVVWYVFGIRGKKLHFSSSYAHKASSIAKSSSFCSMERDEEDSIIVSEGIIEEYLAFDHIDIEEGFHGKKSEAATEKQKLGYPPIAPFYCMKEDVLAYVFDSVWCKVVSCMEQLTRSHWEGFASDDESNVAVTRPDSESSCVLSELHPLVLPRVPQSKVLYITSNPMSLCQASRHQPNVNDLLVHGMPLQPRNLSLMDKLLDLDDKLLMRPGSSTILSTRNWPNRAVEFSTSSLSYTVQSTRRRNPPPRTLHPISTSHSCAETPRSVEEILRGARVPVAPDSLSSPSPTPLSRNNLLPPIGTAEVEHVSTVGPQRQMLDTQYRRSCAVEYPHQARPGRGSAGPQLHGSTKSQSGGRPVSRTRQGP

SEQ ID NO: 809225 - protein, 581 aa, Homo sapiens
MLLTIIPLQRSWRKFPPPVTVMRKTQVPKASLTSQENHLLHQPTLGIHCLLFQVIQAQGYLLKEARTSPGDMELDQNATEKVQTMFTAIDELLYEQKLSVHTKSLQEECQQWTASFPHLRILGRQIITPSEGYRLYPRSPSAVSASYETTLSQERDSTIFGIRGKKLHFSSSYAHKASSIAKSSSFCSMERDEEDSIIVSEGIIEEYLAFDHIDIEEGFHGKKSEAATEKQKLGYPPIAPFYCMKEDVLAYVFDSVWCKVVSCMEQLTRSHWEGFASALNYQNGASYDLVTTEDGTSLDDESNVAVTRPDSESSCVLSELHPLVLPRVPQSKVLYITSNPMSLCQASRHQPNVNDLLVHGMPLQPRNLSLMDKLLDLDDKLLMRPGSSTILSTRNWPNRAVEFSTSSLSYTVQSTRRRNPPPRTLHPISTSHSCAETPRSVEEILRGARVPVAPDSLSSPSPTPLSRNNLLPPIGTAEVEHVSTVGPQRQMKPHGDSSRAQSAVVDEPNYQQPQERLLLPDFFPRPNTTQSFLLDTQYRRSCAVEYPHQARPGRGSAGPQLHGSTKSQSGGRPVSRTRQGP

SEQ ID NO: 809226 - protein, 117 aa, Homo sapiens
CLGVVLFYLLDDLQKRVVFQLFMQIGLLWSQQLWLWAAQDPLPTPSFPKNPNPNPCQLQLAQHFNCYSGSHTGATTAPKQQYLSFSCLSGDNLSAQKNASNRVGISPCGKFLGSTLE

SEQ ID NO: 809227 - protein, 534 aa, Homo sapiens
MLLTIIPLQRSWRKFPPPVTVMRKTQVPKASLTSQENHLLHQPTLGIHCLLFQVIQAQGYLLKEARTSPGDMELDQNATEKVQTMFTAIDELLYEQKLSVHTKSLQEECQQWTASFPHLRILGRQIITPSEGYRLYPRSPSAVSASYETTLSQERDSTIFCSMERDEEDSIIVSEGIIEEYLAFDHIDIEEGFHGKKSEAATEKQKLGYPPIAPFYCMKEDVLAYVFDSVWCKVVSCMEQLTRSHWEGFASDDESNVAVTRPDSESSCVLSELHPLVLPRVPQSKVLYITSNPMSLCQASRHQPNVNDLLVHGMPLQPRNLSLMDKLLDLDDKLLMRPGSSTILSTRNWPNRAVEFSTSSLSYTVQSTRRRNPPPRTLHPISTSHSCAETPRSVEEILRGARVPVAPDSLSSPSPTPLSRNNLLPPIGTAEVEHVSTVGPQRQMKPHGDSSRAQSAVVDEPNYQQPQERLLLPDFFPRPNTTQSFLLDTQYRRSCAVEYPHQARPGRGSAGPQLHGSTKSQSGGRPVSRTRQGP

SEQ ID NO: 809228 - protein, 292 aa, Homo sapiens
MLLTIIPLQRSWRKFPPPVTVMRKTQVPKASLTSQENHLLHQPTLGIHCLLFQVIQAQGYLLKEARTSPGDMELDQNATEKVQTMFTAIDELLYEQKLSVHTKSLQEECQQWTASFPHLRILGRQIITPSEGYRLYPRSPSAVSASYETTLSQERDSTIFGIRGKKLHFSSSYAHKASSIAKSSSFCSMERDEEDSIIVSEGIIEEYLAFDHIDIEEGFHGKKSEAATEKQKLGYPPIAPFYCMKEDVLAYVFDSVWCKVVSCMEQLTRSHWEGFASAQWHPTRSPLPHRRP

SEQ ID NO: 809229 - protein, 117 aa, Homo sapiens; identical to SEQ ID NO: 809226

SEQ ID NO: 809230 - protein, 263 aa, Homo sapiens
KIKAWGKSINNQIGNINFWQSWMSLCQASRHQPNVNDLLVHGMPLQPRNLSLMDKLLDLDDKLLMRPGSSTILSTRNWPNRAVEFSTSSLSYTVQSTRRRNPPPRTLHPISTSHSCAETPRSVEEILRGARVPVAPDSLSSPSPTPLSRNNLLPPIGTAEVEHVSTVGPQRQMKPHGDSSRAQSAVVDEPNYQQPQERLLLPDFFPRPNTTQSFLLDTQYRRSCAVEYPHQARPGRGSAGPQLHGSTKSQSGGRPVSRTRQGP

SEQ ID NO: 809231 - protein, 241 aa, Homo sapiens
MSLCQASRHQPNVNDLLVHGMPLQPRNLSLMDKLLDLDDKLLMRPGSSTILSTRNWPNRAVEFSTSSLSYTVQSTRRRNPPPRTLHPISTSHSCAETPRSVEEILRGARVPVAPDSLSSPSPTPLSRNNLLPPIGTAEVEHVSTVGPQRQMKPHGDSSRAQSAVVDEPNYQQPQERLLLPDFFPRPNTTQSFLLDTQYRRSCAVEYPHQARPGRGSAGPQLHGSTKSQSGGRPVSRTRQGP

SEQ ID NO: 809232 - protein, 252 aa, Homo sapiens
MSLCQASRHQPNVNDLLVHGMPLQPRNLSLMDKLLDLDDKLLMRPGSSTILSTRNWPNRAVEFSTSSLSYTVQSTRRRNPPPRTLHPISTSHSCAETPRSVEEILRGARVRFQKQNFWKPCPVAPDSLSSPSPTPLSRNNLLPPIGTAEVEHVSTVGPQRQMKPHGDSSRAQSAVVDEPNYQQPQERLLLPDFFPRPNTTQSFLLDTQYRRSCAVEYPHQARPGRGSAGPQLHGSTKSQSGGRPVSRTRQGP

SEQ ID NO: 809233 - protein, 506 aa, Homo sapiens
MLLTIIPLQRSWRKFPPPVTVMRKTQVPKASLTSQENHLLHQPTLGIHCLLFQVIQAQGYLLKEARTSPGDMELDQNATEKVQTMFTAIDELLYEQKLSVHTKSLQEECQQWTASFPHLRILGRQIITPSEGYRLYPRSPSAVSASYETTLSQERDSTIFGIRGKKLHFSSSYAHKASSIAKSSSFCSMERDEEDSIIVSEGIIEEYLAFDHIDIEEGFHGKKSEAATEKQKLGYPPIAPFYCMKEDVLAYVFDSVWCKVVSCMEQLTRSHWEGFASDDESNVAVTRPDSESSCVLSELHPLVLPRVPQSKMSLCQASRHQPNVNDLLVHGMPLQPRNLSLMDKLLDLDDKLLMRPGSSTILSTRNWPNRAVEFSTSSLSYTVQSTRRRNPPPRTLHPISTSHSCAETPRSVEEILRGARVPVAPDSLSSPSPTPLSRNNLLPPIGTAEVEHVSTVGPQRQMKPHGDSSRAQSAVVDEPNYQQPQERLLLPDFFPRPNTTQSFLVE

SEQ ID NO: 809234 - protein, 514 aa, Homo sapiens [sequence omitted]

SEQ ID NO: 809235 - protein, 514 aa, Homo sapiens [sequence omitted]

SEQ ID NO: 809236 - protein, 514 aa, Homo sapiens [sequence omitted]

SEQ ID NO: 809237 - protein, 514 aa, Homo sapiens [sequence omitted]

SEQ ID NO: 809238 - protein, 429 aa, Homo sapiens [sequence omitted]

SEQ ID NO: 809239 - protein, 485 aa, Homo sapiens
MLLTIIPLQRSWRKFPPPVTVMRKTQVPKASLTSQENHLLHQPTLGIHCLLFQVIQAQGYLLKEARTSPGDMELDQNATEKVQTMFTAIDELLYEQKLSVHTKSLQEECQQWTASFPHLRILGRQIITPSEGYRLYPRSPSAVSASYETTLSQERDSTIFGIRGKKLHFSSSYAHKASSIAKSSSFCSMERDEEDSIIVSEGIIEEYLAFDHIDIEEGFHGKKSEAATEKQKLGYPPIAPFYCMKEDVLAYVFDSVWCKVVSCMEQLTRSHWEGFASDDESNVAVTRPDSESSCVLSELHPLVLPRVPQSKVLYITSNPMSLCQASRHQPNVNDLLVHGMPLQPRNLSLMDKLLDLDDKLLMRPGSSTILSTRNWPNRAVEFSTSSLSYTVQSTRRRNPPPRTLHPISTSHSCAETPRSVEEILRGARVPVAPDSLSSPSPTPLSRNNLLPPIGTAEVEHVSTVGPQRQMVCFFHIASPCTYHTT

SEQ ID NO: 809240 - protein, 419 aa, Homo sapiens
MLLTIIPLQRSWRKFPPPVTVMRKTQVPKASLTSQENHLLHQPTLGIHCLLFQVIQAQGYLLKEARTSPGDMELDQNATEKVQTMFTAIDELLYEQKLSVHTKSLQEECQQWTASFPHLRILGRQIITPSEGYRLYPRSPSAVSASYETTLSQERDSTIFGIRGKKLHFSSSYAHKASSIAKSSSFCSMERDEEDSIIVSEGIIEEYLAFDHIDIEEGFHGKKSEAATEKQKLGYPPIAPFYCMKEDVLAYVFDSVWCKVVSCMEQLTRSHWEGFASDDESNVAVTRPDSESSCVLSELHPLVLPRVPQSKVLYITSNPMSLCQASRHQPNVNDLLVHGMPLQPRNLSLMDKLLDLDDKLLMRPGSSTILSTRNWPNRAVEFSTSSLSYTVQSTRRRNPPPRTLPQWHPTRSPLPHRRP

SEQ ID NO: 809241 - protein, 337 aa, Homo sapiens
MLLTIIPLQRSWRKFPPPVTVMRKTQVPKASLTSQENHLLHQPTLGIHCLLFQVIQAQGYLLKEARTSPGDMELDQNATEKVQTMFTAIDELLYEQKLSVHTKSLQEECQQWTASFPHLRILGRQIITPSEGYRLYPRSPSAVSASYETTLSQERDSTIFGIRGKKLHFSSSYAHKASSIAKSSSFCSMERDEEDSIIVSEGIIEEYLAFDHIDIEEGFHGKKSEAATEKQKLGYPPIAPFYCMKEDVLAYVFDSVWCKVVSCMEQLTRSHWEGFASDDESNVAVTRPDSESSCVLSELHPLVLPRVPQSKVLYITSNPPSGTRLALLSLTDAPESK

SEQ ID NO: 809242 - protein, 63 aa, Homo sapiens
MICGGDKSSTCECNTLKNMPARRVICVHVVCLYSVVGIVCLHHVVCLYRLVVHLWLSLLLETE

SEQ ID NO: 809243 - protein, 200 aa, Homo sapiens
MFRKGKKRHSSSSSQSSEISTKSKSVDSSLGGLSRSSTVASLDTDSTKSSGQSNNNSDTCAEFRIKYVGAIEKLKLSEGKGLEGPLDLINYIDVAQQDGKLPFVPPEEEFIMGVSKYGIKVSTSDQYDVLHRHALYLIIRMVCYDDGLGAGKSLLALKTTDASNEEYSLWVYQCNSLEQAQAICKVLSTAFDSVLTSEKP

SEQ ID NO: 809244 - protein, 193 aa, Homo sapiens
KTGLLQWRFFTCFSVSQSVDSSLGGLSRSSTVASLDTDSTKSSGQSNNNSDTCAEFRIKYVGAIEKLKLSEGKGLEGPLDLINYIDVAQQDGKLPFVPPEEEFIMGVSKYGIKVSTSDQYDVLHRHALYLIIRMVCYDDGLGAGKSLLALKTTDASNEEYSLWVYQCNSLEQAQAICKVLSTAFDSVLTSEKP

SEQ ID NO: 809245 - protein, 150 aa, Homo sapiens
MFRKGKKRHSSSSSQSSEISTKSKSVDSSLGGLSRSSTVASLDTDSTKSSGQSNNNSDTCAEFRIKYVGAIEKLKLSEGKGLEGPLDLINYIDVAQQDGKLPFVPPEEEFIMGVSKYGIKVSTSDQYEQAQAICKVLSTAFDSVLTSEKP

SEQ ID NO: 809246 - protein, 150 aa, Homo sapiens; identical to SEQ ID NO: 809245

SEQ ID NO: 809247 - protein, 106 aa, Homo sapiens
MGPRLRGQSNNNSDTCAEFRIKYVGAIEKLKLSEGKGLEGPLDLINYIDVAQQDGKLPFVPPEEEFIMGVSKYGIKVSTSDQYEQAQAICKVLSTAFDSVLTSEKP

SEQ ID NO: 809248 - protein, 200 aa, Homo sapiens; identical to SEQ ID NO: 809243

SEQ ID NO: 809249 - protein, 200 aa, Homo sapiens; identical to SEQ ID NO: 809243

SEQ ID NO: 809250 - protein, 108 aa, Homo sapiens
ARAWFRAGPRSRGAGGGAWNHADRAWACGLQLPEPLSPRRGGKAGGRGPFPCLFLCPASAASRLSGSGLSVPFAVTSSAPSAWKVLHHGDRQVPSRLASGRNFGAGSP

SEQ ID NO: 809251 - protein, 200 aa, Homo sapiens; identical to SEQ ID NO: 809243

SEQ ID NO: 809252 - protein, 200 aa, Homo sapiens; identical to SEQ ID NO: 809243

SEQ ID NO: 809253 - protein, 200 aa, Homo sapiens; identical to SEQ ID NO: 809243

SEQ ID NO: 809254 - protein, 200 aa, Homo sapiens; identical to SEQ ID NO: 809243

SEQ ID NO: 809255 - protein, 200 aa, Homo sapiens; identical to SEQ ID NO: 809243

SEQ ID NO: 809256 - protein, 200 aa, Homo sapiens; identical to SEQ ID NO: 809243

SEQ ID NO: 809257 - protein, 200 aa, Homo sapiens; identical to SEQ ID NO: 809243

SEQ ID NO: 809258 - protein, 200 aa, Homo sapiens; identical to SEQ ID NO: 809243

SEQ ID NO: 809259 - protein, 200 aa, Homo sapiens; identical to SEQ ID NO: 809243

SEQ ID NO: 809260 - protein, 150 aa, Homo sapiens; identical to SEQ ID NO: 809245

SEQ ID NO: 809261 - protein, 150 aa, Homo sapiens; identical to SEQ ID NO: 809245

SEQ ID NO: 809262 - protein, 136 aa, Homo sapiens
MFRKGKKRHSSSSSQSSEISTKSKSVDSSLGGLSRSSTVASLDTDSTKSSGQSNNNSDTCAEFRIKYVGAIEKLKLSEGKGLEGPLDLINYIDVAQQDGKLPFVPPEEEFIMGVSKYGIKVSTSDQYMFCTGMLST

SEQ ID NO: 809263 - protein, 62 aa, Homo sapiens
MFRKGKKRHSSSSSQSSEISTKSKSVDSSLGGLSRSSTVASLDTDSTKSSDAPSCASGSSRS

SEQ ID NO: 809264 - protein, 112 aa, Homo sapiens
MEFIFTLKQDGKLPFVPPEEEFIMGVSKYGIKVSTSDQYDVLHRHALYLIIRMVCYDDGLGAGKSLLALKTTDASNEEYSLWVYQCNSLEQAQAICKVLSTAFDSVLTSEKP

SEQ ID NO: 809265 - protein, 161 aa, Homo sapiens
ARPGGRGQEGWKSRRWSGNGSSCLGAKGRGTPTRTPKSATRGWARGCEVRSFSEKHHPGQNERKLSVQTAVCGTFEDSQIVFNSIGIFSGSSNGGEKCFARAKNDTVVAVPKVAKSVLRASLWILALGVFHDPALWPASTQIPPKAQDKATIIQIPVQNFE

SEQ ID NO: 809266 - protein, 106 aa, Homo sapiens; identical to SEQ ID NO: 809247

SEQ ID NO: 809267 - protein, 108 aa, Homo sapiens; identical to SEQ ID NO: 809250

SEQ ID NO: 809268 - protein, 104 aa, Homo sapiens
FSVCSNYEWDYVLHLTLCFTARNFCTLILYAKTLLKFISRRSFGAKTMGFSRYRIMSSVNRDSLTSCLFLSSLLYLDALPVLHIQCNVGCGFAMASSHHFGTSD

SEQ ID NO: 809269 - protein, 104 aa, Homo sapiens; identical to SEQ ID NO: 809268

SEQ ID NO: 809270 - protein, 104 aa, Homo sapiens; identical to SEQ ID NO: 809268

SEQ ID NO: 809271 - protein, 104 aa, Homo sapiens; identical to SEQ ID NO: 809268

SEQ ID NO: 809272 - protein, 104 aa, Homo sapiens; identical to SEQ ID NO: 809268

SEQ ID NO: 809273 - protein, 104 aa, Homo sapiens; identical to SEQ ID NO: 809268

SEQ ID NO: 809274 - protein, 104 aa, Homo sapiens; identical to SEQ ID NO: 809268

SEQ ID NO: 809275 - protein, 104 aa, Homo sapiens; identical to SEQ ID NO: 809268

SEQ ID NO: 809276 - protein, 128 aa, Homo sapiens
MAAVGSLLGRLRQSTVKATGPALRRLHTSSWRADSSRASLTRVHRQAYARLYPVLLVKQDGSTIHIRYREPRRMLAMPIDLDTLSPEERRARLRKREAQLQSRKEYEQELSDDLHVERYRQFWTRTKK

SEQ ID NO: 809277 - protein, 128 aa, Homo sapiens; identical to SEQ ID NO: 809276

SEQ ID NO: 809278 - protein, 128 aa, Homo sapiens; identical to SEQ ID NO: 809276

SEQ ID NO: 809279 - protein, 128 aa, Homo sapiens; identical to SEQ ID NO: 809276

SEQ ID NO: 809280 - protein, 128 aa, Homo sapiens; identical to SEQ ID NO: 809276

SEQ ID NO: 809281 - protein, 128 aa, Homo sapiens; identical to SEQ ID NO: 809276

SEQ ID NO: 809282 - protein, 128 aa, Homo sapiens; identical to SEQ ID NO: 809276

SEQ ID NO: 809283 - protein, 128 aa, Homo sapiens; identical to SEQ ID NO: 809276

SEQ ID NO: 809284 - protein, 128 aa, Homo sapiens; identical to SEQ ID NO: 809276

SEQ ID NO: 809285 - protein, 128 aa, Homo sapiens; identical to SEQ ID NO: 809276

SEQ ID NO: 809286 - protein, 128 aa, Homo sapiens; identical to SEQ ID NO: 809276

SEQ ID NO: 809287 - protein, 128 aa, Homo sapiens; identical to SEQ ID NO: 809276

SEQ ID NO: 809288 - protein, 94 aa, Homo sapiens
APASDVVGCSAAAPNAVSTLISCVASSLVLVPPGSGSQDRLSSDPSAATVAAAGLAGKERELSPKTLLDQPQAPVLVRPRERDVGIGHVAGFPF

SEQ ID NO: 809289 - protein, 149 aa, Homo sapiens
APASDVVGCSAAAPNAVSTLISCVASSLVLVPPGSGSQDRLSSDPSAATVAAAGWRLVWAGNRGGRRCTLPVESGGREAGKGTGGCTCNKPLSPCRSSRKGEGAFPEDPPGPAPGSCAGEAEGEGCGHRTRSRISILEAAGPVFRSLPW

SEQ ID NO: 809290 - protein, 164 aa, Homo sapiens
MAAVGSLLGLAASSWLGGQNASDHSLWLLRKPRGSSCPGTGHQLCRLRQSTVKATGPALRRLHTSSWRADSSRASLTRVHRQAYARLYPVLLVKQDGSTIHIRYREPRRMLAMPIDLDTLSPEERRARLRKREAQLQSRKEYEQELSDDLHVERYRQFWTRTKK

SEQ ID NO: 809291 - protein, 108 aa, Homo sapiens [sequence omitted]

SEQ ID NO: 809292 - protein, 115 aa, Homo sapiens
RCSPPAAATVPGVPQRKFCRQVGSPHRSAAAFIHKRLPFRRYFRPGHANGSASFLQSGWTQSSVAVLNFRAATSHGLKRQLSSSKWVSANQMCAKCQIHWMWKKKCQIVSNSSYI

SEQ ID NO: 809293 - protein, 125 aa, Homo sapiens
RCSPPAAATVPGVPQRKFCRQVGSPHRSAAAFIHKRLPFRRYFRPGHANGSASFLQSGWTQSSVAVLNFRAATSHGLKRQLSSSKWCPKEGSLNAPGDKRLITRGTLPDPPSTPVDTSCTPSAAR

SEQ ID NO: 809294 - protein, 61 aa, Homo sapiens
MEDIIVISDDNGSESSEGRPPGPVRGGLRTGPVRRTSGALTRRTRDQGSKLEPIPHRRLTN

SEQ ID NO: 809295 - protein, 1621 aa, Homo sapiens
MAKSGGCGAGAGVGGGNGALTWVNNAAKKEESETANKNDSSKKLSVERVYQKKTQLEHILLRPDTYIGSVEPLTQFMWVYDEDVGMNCREVTFVPGLYKIFDEILVNAADNKQRDKNMTCIKVSIDPESNIISIWNNGKGIPVVEHKVEKVYVPALIFGQLLTSSNYDDDEKKVTGGRNGYGAKLCNIFSTKFTVETACKEYKHSFKQTWMNNMMKTSEAKIKHFDGEDYTCITFQPDLSKFKMEKLDKDIVALMTRRAYDLAGSCRGVKVMFNGKKLPVNGFRSYVDLYVKDKLDETGVALKVIHELANERWDVCLTLSEKGFQQISFVNSIATTKGGRHVDYVVDQVVGKLIEVVKKKNKAGVSVKPFQVKNHIWVFINCLIENPTFDSQTKENMTLQPKSFGSKCQLSEKFFKAASNCGIVESILNWVKFKAQTQLNKKCSSVKYSKIKGIPKLDDANDAGGKHSLECTLILTEGDSAKSLAVSGLGVIGRDRYGVFPLRGKILNVREASHKQIMENAEINNIIKIVGLQYKKSYDDAESLKTLRYGKIMIMTDQDQDGSHIKGLLINFIHHNWPSLLKHGFLEEFITPIVKASKNKQELSFYSIPEFDEWKKHIENQKAWKIKYYKGLGTSTAKEAKEYFADMERHRILFRYAGPEDDAAITLAFSKKKIDDRKEWLTNFMEDRRQRRLHGLPEQFLYGTATKHLTYNDFINKELILFSNSDNERSIPSLVDGFKPGQRKVLFTCFKRNDKREVKVAQLAGSVAEMSAYHHGEQALMMTIVNLAQNFVGSNNINLLQPIGQFGTRLHGGKDAASPRYIFTMLSTLARLLFPAVDDNLLKFLYDDNQRVEPEWYIPIIPMVLINGAEGIGTGWACKLPNYDAREIVNNVRRMLDGLDPHPMLPNYKNFKGTIQELGQNQYAVSGEIFVVDRNTVEITELPVRTWTQVYKEQVLEPMLNGTDKTPALISDYKEYHTDTTVKFVVKMTEEKLAQAEAAGLHKVFKLQTTLTCNSMVLFDHMGCLKKYETVQDILKEFFDLRLSYYGLRKEWLVGMLGAESTKLNNQARFILEKIQGKITIENRSKKDLIQMLVQRGYESDPVKAWKEAQEKAAEEDETQNQHDDSSSDSGTPSGPDFNYILNMSLWSLTKEKVEELIKQRDAKGREVNDLKRKSPSDLWKEDLAAFVEELDKVESQEREDVLAGMSGKAIKGKVGKPKVKKLQLEETMPSPYGRRIIPEITAMKADASKKLLKKKKGDLDTAAVKVEFDEEFSGAPVEGAGEEALTPSVPINKGPKPKREKKEPGTRVRKTPTSSGKPSAKKVKKRNPWSDDESKSESDLEETEPVVIPRDSLLRRAAAERPKYTFDFSEEEDDDADDDDDDNNDLEELKVKASPITNDGEDEFVPSDGLDKDEYTFSPGKSKATPEKSLHDKKSQDFGNLFSFPSYSQKSEDDSAKFDSNEEDSASVFSPSFGLKQTDKVPSKTVAAKKGKPSSDTVPKPKRAPKQKKVVEAVNSDSDSEFGIPKKTTTPKGKGRGAKKRKASGSENEGDYNPGRKTSKTTSKKPKKTSFDQDSDVDIFPSDFPTEPPSLPRTGRARKEVKYFAESDEEEDDVDFAMFN

SEQ ID NO: 809296 - protein, 1621 aa, Homo sapiens; identical to SEQ ID NO: 809295

SEQ ID NO: 809297 - protein, 1621 aa, Homo sapiens; identical to SEQ ID NO: 809295

SEQ ID NO: 809298 - protein, 1621 aa, Homo sapiens; identical to SEQ ID NO: 809295

SEQ ID NO: 809299 - protein, 1545 aa, Homo sapiens
MWVYDEDVGMNCREVTFVPGLYKIFDEILVNAADNKQRDKNMTCIKVSIDPESNIISIWNNGKGIPVVEHKVEKVYVPALIFGQLLTSSNYDDDEKKVTGGRNGYGAKLCNIFSTKFTVETACKEYKHSFKQTWMNNMMKTSEAKIKHFDGEDYTCITFQPDLSKFKMEKLDKDIVALMTRRAYDLAGSCRGVKVMFNGKKLPVNGFRSYVDLYVKDKLDETGVALKVIHELANERWDVCLTLSEKGFQQISFVNSIATTKGGRHVDYVVDQVVGKLIEVVKKKNKAGVSVKPFQVKNHIWVFINCLIENPTFDSQTKENMTLQPKSFGSKCQLSEKFFKAASNCGIVESILNWVKFKAQTQLNKKCSSVKYSKIKGIPKLDDANDAGGKHSLECTLILTEGDSAKSLAVSGLGVIGRDRYGVFPLRGKILNVREASHKQIMENAEINNIIKIVGLQYKKSYDDAESLKTLRYGKIMIMTDQDQDGSHIKGLLINFIHHNWPSLLKHGFLEEFITPIVKASKNKQELSFYSIPEFDEWKKHIENQKAWKIKYYKGLGTSTAKEAKEYFADMERHRILFRYAGPEDDAAITLAFSKKKIDDRKEWLTNFMEDRRQRRLHGLPEQFLYGTATKHLTYNDFINKELILFSNSDNERSIPSLVDGFKPGQRKVLFTCFKRNDKREVKVAQLAGSVAEMSAYHHGEQALMMTIVNLAQNFVGSNNINLLQPIGQFGTRLHGGKDAASPRYIFTMLSTLARLLFPAVDDNLLKFLYDDNQRVEPEWYIPIIPMVLINGAEGIGTGWACKLPNYDAREIVNNVRRMLDGLDPHPMLPNYKNFKGTIQELGQNQYAVSGEIFVVDRNTVEITELPVRTWTQVYKEQVLEPMLNGTDKTPALISDYKEYHTDTTVKFVVKMTEEKLAQAEAAGLHKVFKLQTTLTCNSMVLFDHMGCLKKYETVQDILKEFFDLRLSYYGLRKEWLVGMLGAESTKLNNQARFILEKIQGKITIENRSKKDLIQMLVQRGYESDPVKAWKEAQEKAAEEDETQNQHDDSSSDSGTPSGPDFNYILNMSLWSLTKEKVEELIKQRDAKGREVNDLKRKSPSDLWKEDLAAFVEELDKVESQEREDVLAGMSGKAIKGKVGKPKVKKLQLEETMPSPYGRRIIPEITAMKADASKKLLKKKKGDLDTAAVKVEFDEEFSGAPVEGAGEEALTPSVPINKGPKPKREKKEPGTRVRKTPTSSGKPSAKKVKKRNPWSDDESKSESDLEETEPVVIPRDSLLRRAAAERPKYTFDFSEEEDDDADDDDDDNNDLEELKVKASPITNDGEDEFVPSDGLDKDEYTFSPGKSKATPEKSLHDKKSQDFGNLFSFPSYSQKSEDDSAKFDSNEEDSASVFSPSFGLKQTDKVPSKTVAAKKGKPSSDTVPKPKRAPKQKKVVEAVNSDSDSEFGIPKKTTTPKGKGRGAKKRKASGSENEGDYNPGRKTSKTTSKKPKKTSFDQDSDVDIFPSDFPTEPPSLPRTGRARKEVKYFAESDEEEDDVDFAMFN

SEQ ID NO: 809300 - protein, 1621 aa, Homo sapiens; identical to SEQ ID NO: 809295

SEQ ID NO: 809301 - protein, 975 aa, Homo sapiens
MERHRILFRYAGPEDDAAITLAFSKKKIDDRKEWLTNFMEDRRQRRLHGLPEQFLYGTATKHLTYNDFINKELILFSNSDNERSIPSLVDGFKPGQRKVLFTCFKRNDKREVKVAQLAGSVAEMSAYHHGEQALMMTIVNLAQNFVGSNNINLLQPIGQFGTRLHGGKDAASPRYIFTMLSTLARLLFPAVDDNLLKFLYDDNQRVEPEWYIPIIPMVLINGAEGIGTGWACKLPNYDAREIVNNVRRMLDGLDPHPMLPNYKNFKGTIQELGQNQYAVSGEIFVVDRNTVEITELPVRTWTQVYKEQVLEPMLNGTDKTPALISDYKEYHTDTTVKFVVKMTEEKLAQAEAAGLHKVFKLQTTLTCNSMVLFDHMGCLKKYETVQDILKEFFDLRLSYYGLRKEWLVGMLGAESTKLNNQARFILEKIQGKITIENRSKKDLIQMLVQRGYESDPVKAWKEAQEKAAEEDETQNQHDDSSSDSGTPSGPDFNYILNMSLWSLTKEKVEELIKQRDAKGREVNDLKRKSPSDLWKEDLAAFVEELDKVESQEREDVLAGMSGKAIKGKVGKPKVKKLQLEETMPSPYGRRIIPEITAMKADASKKLLKKKKGDLDTAAVKVEFDEEFSGAPVEGAGEEALTPSVPINKGPKPKREKKEPGTRVRKTPTSSGKPSAKKVKKRNPWSDDESKSESDLEETEPVVIPRDSLLRRAAAERPKYTFDFSEEEDDDADDDDDDNNDLEELKVKASPITNDGEDEFVPSDGLDKDEYTFSPGKSKATPEKSLHDKKSQDFGNLFSFPSYSQKSEDDSAKFDSNEEDSASVFSPSFGLKQTDKVPSKTVAAKKGKPSSDTVPKPKRAPKQKKVVEAVNSDSDSEFGIPKKTTTPKGKGRGAKKRKASGSENEGDYNPGRKTSKTTSKKPKKTSFDQDSDVDIFPSDFPTEPPSLPRTGRARKEVKYFAESDEEEDDVDFAMFN

SEQ ID NO: 809302 - protein, 852 aa, Homo sapiens
MSAYHHGEQALMMTIVNLAQNFVGSNNINLLQPIGQFGTRLHGGKDAASPRYIFTMLSTLARLLFPAVDDNLLKFLYDDNQRVEPEWYIPIIPMVLINGAEGIGTGWACKLPNYDAREIVNNVRRMLDGLDPHPMLPNYKNFKGTIQELGQNQYAVSGEIFVVDRNTVEITELPVRTWTQVYKEQVLEPMLNGTDKTPALISDYKEYHTDTTVKFVVKMTEEKLAQAEAAGLHKVFKLQTTLTCNSMVLFDHMGCLKKYETVQDILKEFFDLRLSYYGLRKEWLVGMLGAESTKLNNQARFILEKIQGKITIENRSKKDLIQMLVQRGYESDPVKAWKEAQEKAAEEDETQNQHDDSSSDSGTPSGPDFNYILNMSLWSLTKEKVEELIKQRDAKGREVNDLKRKSPSDLWKEDLAAFVEELDKVESQEREDVLAGMSGKAIKGKVGKPKVKKLQLEETMPSPYGRRIIPEITAMKADASKKLLKKKKGDLDTAAVKVEFDEEFSGAPVEGAGEEALTPSVPINKGPKPKREKKEPGTRVRKTPTSSGKPSAKKVKKRNPWSDDESKSESDLEETEPVVIPRDSLLRRAAAERPKYTFDFSEEEDDDADDDDDDNNDLEELKVKASPITNDGEDEFVPSDGLDKDEYTFSPGKSKATPEKSLHDKKSQDFGNLFSFPSYSQKSEDDSAKFDSNEEDSASVFSPSFGLKQTDKVPSKTVAAKKGKPSSDTVPKPKRAPKQKKVVEAVNSDSDSEFGIPKKTTTPKGKGRGAKKRKASGSENEGDYNPGRKTSKTTSKKPKKTSFDQDSDVDIFPSDFPTEPPSLPRTGRARKEVKYFAESDEEEDDVDFAMFN

SEQ ID NO: 809303 - protein, 1584 aa, Homo sapiens
MAKSGGCGAGAGVGGGNGALTWVNNAAKKEESETANKNDSSKKLSVERVYQKKTQLEHILLRPDTYIGSVEPLTQFMWVYDEDVGMNCREVTFVPGLYKIFDEILVNAADNKQRDKNMTCIKVSIDPESNIISIWNNGKGIPVVEHKVEKVYVPALIFGQLLTSSNYDDDEKKVTGGRNGYGAKLCNIFSTKFTVETACKEYKHSFKQTWMNNMMKTSEAKIKHFDGEDYTCITFQPDLSKFKMEKLDKDIVALMTRRAYDLAGSCRGVKVMFNGKKLPVNGFRSYVDLYVKDKLDETGVALKVIHELANERWDVCLTLSEKGFQQISFVNSIATTKGGRHVDYVVDQVVGKLIEVVKKKNKAGVSVKPFQVKNHIWVFINCLIENPTFDSQTKENMTLQPKSFGSKCQLSEKFFKAASNCGIVESILNWVKFKAQTQLNKKCSSVKYSKIKGIPKLDDANDAGGKHSLECTLILTEGDSAKSLAVSGLGVIGRDRYGVFPLRGKILNVREASHKQIMENAEINNIIKIVGLQYKKSYDDAESLKTLRYGKIMIMTDQDQDGSHIKGLLINFIHHNWPSLLKHGFLEEFITPIVKASKNKQELSFYSIPEFDEWKKHIENQKAWKIKYYKGLGTSTAKEAKEYFADMERHRILFRYAGPEDDAAITLAFSKKKIDDRKEWLTNFMEDRRQRRLHGLPEQFLYGTATKHLTYNDFINKELILFSNSDNERSIPSLVDGFKPGQRKVLFTCFKRNDKREVKVAQLAGSVAEMSAYHHGEQALMMTIVNLAQNFVGSNNINLLQPIGQFGTRLHGGKDAASPRYIFTMLSTLARLLFPAVDDNLLKFLYDDNQRVEPEWYIPIIPMVLINGAEGIGTGWACKLPNYDAREIVNNVRRMLDGLDPHPMLPNYKNFKGTIQELGQNQYAVSGEIFVVDRNTVEITELPVRTWTQVYKEQVLEPMLNGTDKTPALISDYKEYHTDTTVKFVVKMTEEKLAQAEAAGLHKVFKLQTTLTCNSMVLFDHMGCLKKYETVQDILKEFFDLRLSYYGLRKEWLVGMLGAESTKLNNQARFILEKIQGKITIENRSKKDLIQMLVQRGYESDPVKAWKEAQEKAAEEDETQNQHDDSSSDSGTPSGPDFNYILNMSLWSLTKEKVEELIKQRDAKGREVNDLKRKSPSDLWKEDLAAFVEELDKVESQEREDVLAGMSGKAIKGKVGKPKVKKLQLEETMPSPYGRRIIPEITAMKADASKKLLKKKKGDLDTAAVKVEFDEEFSGAPVEGAGEEALTPSVPINKGPKPKREKKEPGTRVRKTPTSSGKPSAKKVKKRNPWSDDESKSESDLEETEPVVIPRDSLLRRAAAERPKYTFDFSEEEDDDADDDDDDNNDLEELKVKASPITNDGEDEFVPSDGLDKDEYTFSPGKSKATPEKSLHDKKSQDFGNLFSFPSYSQKSEDGKPSSDTVPKPKRAPKQKKVVEAVNSDSDSEFGIPKKTTTPKGKGRGAKKRKASGSENEGDYNPGRKTSKTTSKKPKKTSFDQDSDVDIFPSDFPTEPPSLPRTGRARKEVKYFAESDEEEDDVDFAMFN

SEQ ID NO: 809304 - protein, 478 aa, Homo sapiens
MSLWSLTKEKVEELIKQRDAKGREVNDLKRKSPSDLWKEDLAAFVEELDKVESQEREDVLAGMSGKAIKGKVGKPKVKKLQLEETMPSPYGRRIIPEITAMKADASKKLLKKKKGDLDTAAVKVEFDEEFSGAPVEGAGEEALTPSVPINKGPKPKREKKEPGTRVRKTPTSSGKPSAKKVKKRNPWSDDESKSESDLEETEPVVIPRDSLLRRAAAERPKYTFDFSEEEDDDADDDDDDNNDLEELKVKASPITNDGEDEFVPSDGLDKDEYTFSPGKSKATPEKSLHDKKSQDFGNLFSFPSYSQKSEDDSAKFDSNEEDSASVFSPSFGLKQTDKVPSKTVAAKKGKPSSDTVPKPKRAPKQKKVVEAVNSDSDSEFGIPKKTTTPKGKGRGAKKRKASGSENEGDYNPGRKTSKTTSKKPKKTSFDQDSDVDIFPSDFPTEPPSLPRTGRARKEVKYFAESDEEEDDVDFAMFN

SEQ ID NO: 809305 - protein, 1598 aa, Homo sapiens
MAKSGGCGAGAGVGGGNGALTWVNNAAKKEESETANKNDSSKKLSVERVYQKKTQLEHILLRPDTYIGSVEPLTQFMWVYDEDVGMNCREVTFVPGLYKIFDEILVNAADNKQRDKNMTCIKVSIDPESNIISIWNNGKGIPVVEHKVEKVYVPALIFGQLLTSSNYDDDEKKVTGGRNGYGAKLCNIFSTKFTVETACKEYKHSFKQTWMNNMMKTSEAKIKHFDGEDYTCITFQPDLSKFKMEKLDKDIVALMTRRAYDLAGSCRGVKVMFNGKKLPVNGFRSYVDLYVKDKLDETGVALKVIHELANERWDVCLTLSEKGFQQISFVNSIATTKGGRHVDYVVDQVVGKLIEVVKKKNKAGVSVKPFQVKNHIWVFINCLIENPTFDSQTKENMTLQPKSFGSKCQLSEKFFKAASNCGIVESILNWVKFKAQTQLNKKCSSVKYSKIKGIPKLDDANDAGGKHSLECTLILTEGDSAKSLAVSGLGVIGRDRYGVFPLRGKILNVREASHKQIMENAEINNIIKIVGLQYKKSYDDAESLKTLRYGKIMIMTDQDQDGSHIKGLLINFIHHNWPSLLKHGFLEEFITPIVKASKNKQELSFYSIPEFDEWKKHIENQKAWKIKYYKGLGTSTAKEAKEYFADMERHRILFRYAGPEDDAAITLAFSKKKIDDRKEWLTNFMEDRRQRRLHGLPEQFLYGTATKHLTYNDFINKELILFSNSDNERSIPSLVDGFKPGQRKVLFTCFKRNDKREVKVAQLAGSVAEMSAYHHGEQALMMTIVNLAQNFVGSNNINLLQPIGQFGTRLHGGKDAASPRYIFTMLSTLARLLFPAVDDNLLKFLYDDNQRVEPEWYIPIIPMVLINGAEGIGTGWACKLPNYDAREIVNNVRRMLDGLDPHPMLPNYKNFKGTIQELGQNQYAVSGEIFVVDRNTVEITELPVRTWTQVYKEQVLEPMLNGTDKTPALISDYKEYHTDTTVKFVVKMTEEKLAQAEAAGLHKVFKLQTTLTCNSMVLFDHMGCLKKYETVQDILKEFFDLRLSYYGLRKEWLVGMLGAESTKLNNQARFILEKIQGKITIENRSKKDLIQMLVQRGYESDPVKAWKEAQEKAAEEDETQNQHDDSSSDSGTPSGPDFNYILNMSLWSLTKEKVEELIKQRDAKGREVNDLKRKSPSDLWKEDLAAFVEELDKVESQEREDVLAGMSGKAIKGKVGKPKVKKLQLEETMPSPYGRRIIPEITAMKADASKKLLKKKKGDLDTAAVKVEFDEEFSGAPVEGAGEEALTPSVPINKGPKPKREKKEPGTRVRKTPTSSGKPSAKKVKKRNPWSDDESKSESDLEETEPVVIPRDSLLRRAAAERPKYTFDFSEEEDDDADDDDDDNNDLEELKVKASPITNDGEDEFVPSDGLDKDEYTFSPGKSKATPEKSLHDKKSQDFGNLFSFPSYSQKSEDDSAKFDSNEEDSASVFSPSFGLKQTDKVPSKTVAAKKGKPSSDTVPKPKRAPKQKKVVEAVNSDSDSEFGIPKKTTTPKGKGRGAKKRKASGSENEGDYNPGRKTSKTTSKRLQIQSLKPKRAPKQKKVVEAVNSDSDSELGIP

SEQ ID NO: 809306 - protein, 1574 aa, Homo sapiens
MAKSGGCGAGAGVGGGNGALTWVNNAAKKEESETANKNDSSKKLSVERVYQKKTQLEHILLRPDTYIGSVEPLTQFMWVYDEDVGMNCREVTFVPGLYKIFDEILVNAADNKQRDKNMTCIKVSIDPESNIISIWNNGKGIPVVEHKVEKVYVPALIFGQLLTSSNYDDDEKKVTGGRNGYGAKLCNIFSTKFTVETACKEYKHSFKQTWMNNMMKTSEAKIKHFDGEDYTCITFQPDLSKFKMEKLDKDIVALMTRRAYDLAGSCRGVKVMFNGKKLPVNGFRSYVDLYVKDKLDETGVALKVIHELANERWDVCLTLSEKGFQQISFVNSIATTKGGRHVDYVVDQVVGKLIEVVKKKNKAGVSVKPFQVKNHIWVFINCLIENPTFDSQTKENMTLQPKSFGSKCQLSEKFFKAASNCGIVESILNWVKFKAQTQLNKKCSSVKYSKIKGIPKLDDANDAGGKHSLECTLILTEGDSAKSLAVSGLGVIGRDRYGVFPLRGKILNVREASHKQIMENAEINNIIKIVGLQYKKSYDDAESLKTLRYGKIMIMTDQDQDGSHIKGLLINFIHHNWPSLLKHGFLEEFITPIVKASKNKQELSFYSIPEFDEWKKHIENQKAWKIKYYKGLGTSTAKEAKEYFADMERHRILFRYAGPEDDAAITLAFSKKKIDDRKEWLTNFMEDRRQRRLHGLPEQFLYGTATKHLTYNDFINKELILFSNSDNERSIPSLVDGFKPGQRKVLFTCFKRNDKREVKVAQLAGSVAEMSAYHHGEQALMMTIVNLAQNFVGSNNINLLQPIGQFGTRLHGGKDAASPRYIFTMLSTLARLLFPAVDDNLLKFLYDDNQRVEPEWYIPIIPMVLINGAEGIGTGWACKLPNYDAREIVNNVRRMLDGLDPHPMLPNYKNFKGTIQELGQNQYAVSGEIFVVDRNTVEITELPVRTWTQVYKEQVLEPMLNGTDKTPALISDYKEYHTDTTVKFVVKMTEEKLAQAEAAGLHKVFKLQTTLTCNSMVLFDHMGCLKKYETVQDILKEFFDLRLSYYGLRKEWLVGMLGAESTKLNNQARFILEKIQGKITIENRSKKDLIQMLVQRGYESDPVKAWKEAQEKAAEEDETQNQHDDSSSDSGTPSGPDFNYILNMSLWSLTKEKVEELIKQRDAKGREVNDLKRKSPSDLWKEDLAAFVEELDKVESQEREDVLAGMSGKAIKGKVGKPKVKKLQLEETMPSPYGRRIIPEITAMKADASKKLLKKKKGDLDTAAVKVEFDEEFSGAPVEGAGEEALTPSVPINKGPKPKREKKEPGTRVRKTPTSSGKPSAKKVKKRNPWSDDESKSESDLEETEPVVIPRDSLLRRAAAERPKYTFDFSEEEDDDADDDDDDNNDLEELKVKASPITNDGEDEFVPSDGLDKDEYTFSPGKSKATPEKSLHDKKSQDFGNLFSFPSYSQKSEDDSAKFDSNEEDSASVFSPSFGLKQTDKVPSKTVAAKKGKPSSDTVPKPKRAPKQKKVVEAVNSDSDSEFGIPKKTTTPKGKGRGAKKRKASGSENEGDYNPGRKTSKTTSKKVTGNIIAY

SEQ ID NO: 809307 - protein, 363 aa, Homo sapiens
  misc_feature (12)..(12): Xaa can be any naturally occurring amino acid
CQYNVTDTCQLXRYLCQNGRCIPTPGSYRCECNKGFQLDLRGECIDVCTRVRKTPTSSGKPSAKKVKKRNPWSDDESKSESDLEETEPVVIPRDSLLRRAAAERPKYTFDFSEEEDDDADDDDDDNNDLEELKVKASPITNDGEDEFVPSDGLDKDEYTFSPGKSKATPEKSLHDKKSQDFGNLFSFPSYSQKSEDDSAKFDSNEEDSASVFSPSFGLKQTDKVPSKTVAAKKGKPSSDTVPKPKRAPKQKKVVEAVNSDSDSEFGIPKKTTTPKGKGRGAKKRKASGSENEGDYNPGRKTSKTTSKKPKKTSFDQDSDVDIFPSDFPTEPPSLPRTGRARKEVKYFAESDEEEDDVDFAMFN

SEQ ID NO: 809308 - protein, 350 aa, Homo sapiens
MRYLTSIQVRYRSKGSQILKRDKKELLDSYEYDEIIIHTVSLVKTYVSSEYVTRKRNPWSDDESKSESDLEETEPVVIPRDSLLRRAAAERPKYTFDFSEEEDDDADDDDDDNNDLEELKVKASPITNDGEDEFVPSDGLDKDEYTFSPGKSKATPEKSLHDKKSQDFGNLFSFPSYSQKSEDDSAKFDSNEEDSASVFSPSFGLKQTDKVPSKTVAAKKGKPSSDTVPKPKRAPKQKKVVEAVNSDSDSEFGIPKKTTTPKGKGRGAKKRKASGSENEGDYNPGRKTSKTTSKKPKKTSFDQDSDVDIFPSDFPTEPPSLPRTGRARKEVKYFAESDEEEDDVDFAMFN

SEQ ID NO: 809309 - protein, 1503 aa, Homo sapiens
MAKSGGCGAGAGVGGGNGALTWVNNAAKKEESETANKNDSSKKLSVERVYQKKTQLEHILLRPDTYIGSVEPLTQFMWVYDEDVGMNCREVTFVPGLYKIFDEILVNAADNKQRDKNMTCIKVSIDPESNIISIWNNGKGIPVVEHKVEKVYVPALIFGQLLTSSNYDDDEKKVTGGRNGYGAKLCNIFSTKFTVETACKEYKHSFKQTWMNNMMKTSEAKIKHFDGEDYTCITFQPDLSKFKMEKLDKDIVALMTRRAYDLAGSCRGVKVMFNGKKLPVNGFRSYVDLYVKDKLDETGVALKVIHELANERWDVCLTLSEKGFQQISFVNSIATTKGGRHVDYVVDQVVGKLIEVVKKKNKAGVSVKPFQVKNHIWVFINCLIENPTFDSQTKENMTLQPKSFGSKCQLSEKFFKAASNCGIVESILNWVKFKAQTQLNKKCSSVKYSKIKGIPKLDDANDAGGKHSLECTLILTEGDSAKSLAVSGLGVIGRDRYGVFPLRGKILNVREASHKQIMENAEINNIIKIVGLQYKKSYDDAESLKTLRYGKIMIMTDQDQDGSHIKGLLINFIHHNWPSLLKHGFLEEFITPIVKASKNKQELSFYSIPEFDEWKKHIENQKAWKIKYYKGLGTSTAKEAKEYFADMERHRILFRYAGPEDDAAITLAFSKKKIDDRKEWLTNFMEDRRQRRLHGLPEQFLYGTATKHLTYNDFINKELILFSNSDNERSIPSLVDGFKPGQRKVLFTCFKRNDKREVKVAQLAGSVAEMSAYHHGEQALMMTIVNLAQNFVGSNNINLLQPIGQFGTRLHGGKDAASPRYIFTMLSTLARLLFPAVDDNLLKFLYDDNQRVEPEWYIPIIPMVLINGAEGIGTGWACKLPNYDAREIVNNVRRMLDGLDPHPMLPNYKNFKGTIQELGQNQYAVSGEIFVVDRNTVEITELPVRTWTQVYKEQVLEPMLNGTDKTPALISDYKEYHTDTTVKFVVKMTEEKLAQAEAAGLHKVFKLQTTLTCNSMVLFDHMGCLKKYETVQDILKEFFDLRLSYYGLRKEWLVGMLGAESTKLNNQARFILEKIQGKITIENRSKKDLIQMLVQRGYESDPVKAWKEAQEKAAEEDETQNQHDDSSSDSGTPSGPDFNYILNMSLWSLTKEKVEELIKQRDAKGREVNDLKRKSPSDLWKEDLAAFVEELDKVESQEREDVLAGMSGKAIKGKVGKPKVKKLQLEETMPSPYGRRIIPEITAMKADASKKLLKKKKGDLDTAAVKVEFDEEFSGAPVEGAGEEALTPSVPINKGPKPKREKKEPGTRVRKTPTSSGKPSAKKVKKRNPWSDDESKSESDLEETEPVVIPRDSLLRRAAAERPKYTFDFSEEEDDDADDDDDDNNDLEELKVKASPITNDGEDEFVPSDGLDKDEYTFSPGKSKATPEKSLHDKKSQDFGNLFSFPSYSQKSEDDSAKFDSNEEDSASVFSPSFGLKQTDKVPSKTVAAKKGMYLYLIELSIG

SEQ ID NO: 809310 - protein, 1444 aa, Homo sapiens
MAKSGGCGAGAGVGGGNGALTWVNNAAKKEESETANKNDSSKKLSVERVYQKKTQLEHILLRPDTYIGSVEPLTQFMWVYDEDVGMNCREVTFVPGLYKIFDEILVNAADNKQRDKNMTCIKVSIDPESNIISIWNNGKGIPVVEHKVEKVYVPALIFGQLLTSSNYDDDEKKVTGGRNGYGAKLCNIFSTKFTVETACKEYKHSFKQTWMNNMMKTSEAKIKHFDGEDYTCITFQPDLSKFKMEKLDKDIVALMTRRAYDLAGSCRGVKVMFNGKKLPVNGFRSYVDLYVKDKLDETGVALKVIHELANERWDVCLTLSEKGFQQISFVNSIATTKGGRHVDYVVDQVVGKLIEVVKKKNKAGVSVKPFQVKNHIWVFINCLIENPTFDSQTKENMTLQPKSFGSKCQLSEKFFKAASNCGIVESILNWVKFKAQTQLNKKCSSVKYSKIKGIPKLDDANDAGGKHSLECTLILTEGDSAKSLAVSGLGVIGRDRYGVFPLRGKILNVREASHKQIMENAEINNIIKIVGLQYKKSYDDAESLKTLRYGKIMIMTDQDQDGSHIKGLLINFIHHNWPSLLKHGFLEEFITPIVKASKNKQELSFYSIPEFDEWKKHIENQKAWKIKYYKGLGTSTAKEAKEYFADMERHRILFRYAGPEDDAAITLAFSKKKIDDRKEWLTNFMEDRRQRRLHGLPEQFLYGTATKHLTYNDFINKELILFSNSDNERSIPSLVDGFKPGQRKVLFTCFKRNDKREVKVAQLAGSVAEMSAYHHGEQALMMTIVNLAQNFVGSNNINLLQPIGQFGTRLHGGKDAASPRYIFTMLSTLARLLFPAVDDNLLKFLYDDNQRVEPEWYIPIIPMVLINGAEGIGTGWACKLPNYDAREIVNNVRRMLDGLDPHPMLPNYKNFKGTIQELGQNQYAVSGEIFVVDRNTVEITELPVRTWTQVYKEQVLEPMLNGTDKTPALISDYKEYHTDTTVKFVVKMTEEKLAQAEAAGLHKVFKLQTTLTCNSMVLFDHMGCLKKYETVQDILKEFFDLRLSYYGLRKEWLVGMLGAESTKLNNQARFILEKIQGKITIENRSKKDLIQMLVQRGYESDPVKAWKEAQEKAAEEDETQNQHDDSSSDSGTPSGPDFNYILNMSLWSLTKEKVEELIKQRDAKGREVNDLKRKSPSDLWKEDLAAFVEELDKVESQEREDVLAGMSGKAIKGKVGKPKVKKLQLEETMPSPYGRRIIPEITAMKADASKKLLKKKKGDLDTAAVKVEFDEEFSGAPVEGAGEEALTPSVPINKGPKPKREKKEPGTRVRKTPTSSGKPSAKKVKKRNPWSDDESKSESDLEETEPVVIPRDSLLRRAAAERPKYTFDFSEEEDDDADGTILLPSEMIPSDEEEEDDEEEEEEEEPRLTINQREDEDGMANEDELDNTYTGSGDEDALSDGTKM

SEQ ID NO: 809311 - protein, 173 aa, Homo sapiens
  misc_feature (15)..(15): Xaa can be any naturally occurring amino acid
MWLSPPPMIVEAFPXTYSASVFSPSFGLKQTDKVPSKTVAAKKGKPSSDTVPKPKRAPKQKKVVEAVNSDSDSEFGIPKKTTTPKGKGRGAKKRKASGSENEGDYNPGRKTSKTTSKKPKKTSFDQDSDVDIFPSDFPTEPPSLPRTGRARKEVKYFAESDEEEDDVDFAMFN

SEQ ID NO: 809312 - protein, 1118 aa, Homo sapiens
MAKSGGCGAGAGVGGGNGALTWVNNAAKKEESETANKNDSSKKLSVERVYQKKTQLEHILLRPDTYIGSVEPLTQFMWVYDEDVGMNCREVTFVPGLYKIFDEILVNAADNKQRDKNMTCIKVSIDPESNIISIWNNGKGIPVVEHKVEKVYVPALIFGQLLTSSNYDDDEKKVTGGRNGYGAKLCNIFSTKFTVETACKEYKHSFKQTWMNNMMKTSEAKIKHFDGEDYTCITFQPDLSKFKMEKLDKDIVALMTRRAYDLAGSCRGVKVMFNGKKLPVNGFRSYVDLYVKDKLDETGVALKVIHELANERWDVCLTLSEKGFQQISFVNSIATTKGGRHVDYVVDQVVGKLIEVVKKKNKAGVSVKPFQVKNHIWVFINCLIENPTFDSQTKENMTLQPKSFGSKCQLSEKFFKAASNCGIVESILNWVKFKAQTQLNKKCSSVKYSKIKGIPKLDDANDAGGKHSLECTLILTEGDSAKSLAVSGLGVIGRDRYGVFPLRGKILNVREASHKQIMENAEINNIIKIVGLQYKKSYDDAESLKTLRYGKIMIMTDQDQDGSHIKGLLINFIHHNWPSLLKHGFLEEFITPIVKASKNKQELSFYSIPEFDEWKKHIENQKAWKIKYYKGLGTSTAKEAKEYFADMERHRILFRYAGPEDDAAITLAFSKKKIDDRKEWLTNFMEDRRQRRLHGLPEQFLYGTATKHLTYNDFINKELILFSNSDNERSIPSLVDGFKPGQRKVLFTCFKRNDKREVKVAQLAGSVAEMSAYHHGEQALMMTIVNLAQNFVGSNNINLLQPIGQFGTRLHGGKDAASPRYIFTMLSTLARLLFPAVDDNLLKFLYDDNQRVEPEWYIPIIPMVLINGAEGIGTGWACKLPNYDAREIVNNVRRMLDGLDPHPMLPNYKNFKGTIQELGQNQYAVSGEIFVVDRNTVEITELPVRTWTQVYKEQVLEPMLNGTDKTPALISDYKEYHTDTTVKFVVKMTEEKLAQAEAAGLHKVFKLQTTLTCNSMVLFDHMGCLKKYETVQDILKEFFDLRLSYYGLRKEWLVGMLGAESTKLNNQARFILEKIQGKITIENRSKKDLIQMLVQRGYESDPVKAWKEAQEKVIICRK

SEQ ID NO: 809313 - protein, 1088 aa, Homo sapiens
MAKSGGCGAGAGVGGGNGALTWVNNAAKKEESETANKNDSSKKLSVERVYQKKTQLEHILLRPDTYIGSVEPLTQFMWVYDEDVGMNCREVTFVPGLYKIFDEILVNAADNKQRDKNMTCIKVSIDPESNIISIWNNGKGIPVVEHKVEKVYVPALIFGQLLTSSNYDDDEKKVTGGRNGYGAKLCNIFSTKFTVETACKEYKHSFKQTWMNNMMKTSEAKIKHFDGEDYTCITFQPDLSKFKMEKLDKDIVALMTRRAYDLAGSCRGVKVMFNGKKLPVNGFRSYVDLYVKDKLDETGVALKVIHELANERWDVCLTLSEKGFQQISFVNSIATTKGGRHVDYVVDQVVGKLIEVVKKKNKAGVSVKPFQVKNHIWVFINCLIENPTFDSQTKENMTLQPKSFGSKCQLSEKFFKAASNCGIVESILNWVKFKAQTQLNKKCSSVKYSKIKGIPKLDDANDAGGKHSLECTLILTEGDSAKSLAVSGLGVIGRDRYGVFPLRGKILNVREASHKQIMENAEINNIIKIVGLQYKKSYDDAESLKTLRYGKIMIMTDQDQDGSHIKGLLINFIHHNWPSLLKHGFLEEFITPIVKASKNKQELSFYSIPEFDEWKKHIENQKAWKIKYYKGLGTSTAKEAKEYFADMERHRILFRYAGPEDDAAITLAFSKKKIDDRKEWLTNFMEDRRQRRLHGLPEQFLYGTATKHLTYNDFINKELILFSNSDNERSIPSLVDGFKPGQRKVLFTCFKRNDKREVKVAQLAGSVAEMSAYHHGEQALMMTIVNLAQNFVGSNNINLLQPIGQFGTRLHGGKDAASPRYIFTMLSTLARLLFPAVDDNLLKFLYDDNQRVEPEWYIPIIPMVLINGAEGIGTGWACKLPNYDAREIVNNVRRMLDGLDPHPMLPNYKNFKGTIQELGQNQYAVSGEIFVVDRNTVEITELPVRTWTQVYKEQVLEPMLNGTDKTPALISDYKEYHTDTTVKFVVKMTEEKLAQAEAAGLHKVFKLQTTLTCNSMVLFDHMGCLKKYETVQDILKEFFDLRLSYYGLRKEWLVGMLGAESTKLNNQARFILEKIQGKITIGKIQPLK

SEQ ID NO: 809314 - protein, 1090 aa, Homo sapiens
MAKSGGCGAGAGVGGGNGALTWVNNAAKKEESETANKNDSSKKLSVERVYQKKTQLEHILLRPDTYIGSVEPLTQFMWVYDEDVGMNCREVTFVPGLYKIFDEILVNAADNKQRDKNMTCIKVSIDPESNIISIWNNGKGIPVVEHKVEKVYVPALIFGQLLTSSNYDDDEKKVTGGRNGYGAKLCNIFSTKFTVETACKEYKHSFKQTWMNNMMKTSEAKIKHFDGEDYTCITFQPDLSKFKMEKLDKDIVALMTRRAYDLAGSCRGVKVMFNGKKLPVNGFRSYVDLYVKDKLDETGVALKVIHELANERWDVCLTLSEKGFQQISFVNSIATTKGGRHVDYVVDQVVGKLIEVVKKKNKAGVSVKPFQVKNHIWVFINCLIENPTFDSQTKENMTLQPKSFGSKCQLSEKFFKAASNCGIVESILNWVKFKAQTQLNKKCSSVKYSKIKGIPKLDDANDAGGKHSLECTLILTEGDSAKSLAVSGLGVIGRDRYGVFPLRGKILNVREASHKQIMENAEINNIIKIVGLQYKKSYDDAESLKTLRYGKIMIMTDQDQDGSHIKGLLINFIHHNWPSLLKHGFLEEFITPIVKASKNKQELSFYSIPEFDEWKKHIENQKAWKIKYYKGLGTSTAKEAKEYFADMERHRILFRYAGPEDDAAITLAFSKKKIDDRKEWLTNFMEDRRQRRLHGLPEQFLYGTATKHLTYNDFINKELILFSNSDNERSIPSLVDGFKPGQRKVLFTCFKRNDKREVKVAQLAGSVAEMSAYHHGEQALMMTIVNLAQNFVGSNNINLLQPIGQFGTRLHGGKDAASPRYIFTMLSTLARLLFPAVDDNLLKFLYDDNQRVEPEWYIPIIPMVLINGAEGIGTGWACKLPNYDAREIVNNVRRMLDGLDPHPMLPNYKNFKGTIQELGQNQYAVSGEIFVVDRNTVEITELPVRTWTQVYKEQVLEPMLNGTDKTPALISDYKEYHTDTTVKFVVKMTEEKLAQAEAAGLHKVFKLQTTLTCNSMVLFDHMGCLKKYETVQDILKEFFDLRLSYYGLRKEWLVGMLGAESTKLNNQARFILEKIQGKITIGSRRGLFYL

SEQ ID NO: 809315 - protein, 962 aa, Homo sapiens
MAKSGGCGAGAGVGGGNGALTWVNNAAKKEESETANKNDSSKKLSVERVYQKKTQLEHILLRPDTYIGSVEPLTQFMWVYDEDVGMNCREVTFVPGLYKIFDEILVNAADNKQRDKNMTCIKVSIDPESNIISIWNNGKGIPVVEHKVEKVYVPALIFGQLLTSSNYDDDEKKVTGGRNGYGAKLCNIFSTKFTVETACKEYKHSFKQTWMNNMMKTSEAKIKHFDGEDYTCITFQPDLSKFKMEKLDKDIVALMTRRAYDLAGSCRGVKVMFNGKKLPVNGFRSYVDLYVKDKLDETGVALKVIHELANERWDVCLTLSEKGFQQISFVNSIATTKGGRHVDYVVDQVVGKLIEVVKKKNKAGVSVKPFQVKNHIWVFINCLIENPTFDSQTKENMTLQPKSFGSKCQLSEKFFKAASNCGIVESILNWVKFKAQTQLNKKCSSVKYSKIKGIPKLDDANDAGGKHSLECTLILTEGDSAKSLAVSGLGVIGRDRYGVFPLRGKILNVREASHKQIMENAEINNIIKIVGLQYKKSYDDAESLKTLRYGKIMIMTDQDQDGSHIKGLLINFIHHNWPSLLKHGFLEEFITPIVKASKNKQELSFYSIPEFDEWKKHIENQKAWKIKYYKGLGTSTAKEAKEYFADMERHRILFRYAGPEDDAAITLAFSKKKIDDRKEWLTNFMEDRRQRRLHGLPEQFLYGTATKHLTYNDFINKELILFSNSDNERSIPSLVDGFKPGQRKVLFTCFKRNDKREVKVAQLAGSVAEMSAYHHGEQALMMTIVNLAQNFVGSNNINLLQPIGQFGTRLHGGKDAASPRYIFTMLSTLARLLFPAVDDNLLKFLYDDNQRVEPEWYIPIIPMVLINGAEGIGTGWACKLPNYDAREIVNNVRRMLDGLDPHPMLSKLTKTLNTAPIHELGSKPSMHASGDNIVQRTRTTVEHHKSYPEQQDTGYYRHGNNP

SEQ ID NO: 809316 - protein, 882 aa, Homo sapiens
MAKSGGCGAGAGVGGGNGALTWVNNAAKKEESETANKNDSSKKLSVERVYQKKTQLEHILLRPDTYIGSVEPLTQFMWVYDEDVGMNCREVTFVPGLYKIFDEILVNAADNKQRDKNMTCIKVSIDPESNIISIWNNGKGIPVVEHKVEKVYVPALIFGQLLTSSNYDDDEKKVTGGRNGYGAKLCNIFSTKFTVETACKEYKHSFKQTWMNNMMKTSEAKIKHFDGEDYTCITFQPDLSKFKMEKLDKDIVALMTRRAYDLAGSCRGVKVMFNGKKLPVNGFRSYVDLYVKDKLDETGVALKVIHELANERWDVCLTLSEKGFQQISFVNSIATTKGGRHVDYVVDQVVGKLIEVVKKKNKAGVSVKPFQVKNHIWVFINCLIENPTFDSQTKENMTLQPKSFGSKCQLSEKFFKAASNCGIVESILNWVKFKAQTQLNKKCSSVKYSKIKGIPKLDDANDAGGKHSLECTLILTEGDSAKSLAVSGLGVIGRDRYGVFPLRGKILNVREASHKQIMENAEINNIIKIVGLQYKKSYDDAESLKTLRYGKIMIMTDQDQDGSHIKGLLINFIHHNWPSLLKHGFLEEFITPIVKASKNKQELSFYSIPEFDEWKKHIENQKAWKIKYYKGLGTSTAKEAKEYFADMERHRILFRYAGPEDDAAITLAFSKKKIDDRKEWLTNFMEDRRQRRLHGLPEQFLYGTATKHLTYNDFINKELILFSNSDNERSIPSLVDGFKPGQRKVLFTCFKRNDKREVKVAQLAGSVAEMSAYHHGEQALMMTIVNLAQNFVGSNNINLLQPIGQFGTRLHGGKDAASPRYIFTMLSTLARLLFPAVDDNLLKFLYDDNQRVEPEWYIPISPSSTNALSTIYKPWDYRIYHS

SEQ ID NO: 809317 - protein, 84 aa, Homo sapiens
LVELGGTLGGYGSEVKAIYPGFYIQTIRKPKKTSFDQDSDVDIFPSDFPTEPPSLPRTGRARKEVKYFAESDEEEDDVDFAMFN

SEQ ID NO: 809318 - protein, 673 aa, Homo sapiens
MAKSGGCGAGAGVGGGNGALTWVNNAAKKEESETANKNDSSKKLSVERVYQKKTQLEHILLRPDTYIGSVEPLTQFMWVYDEDVGMNCREVTFVPGLYKIFDEILVNAADNKQRDKNMTCIKVSIDPESNIISIWNNGKGIPVVEHKVEKVYVPALIFGQLLTSSNYDDDEKKVTGGRNGYGAKLCNIFSTKFTVETACKEYKHSFKQTWMNNMMKTSEAKIKHFDGEDYTCITFQPDLSKFKMEKLDKDIVALMTRRAYDLAGSCRGVKVMFNGKKLPVNGFRSYVDLYVKDKLDETGVALKVIHELANERWDVCLTLSEKGFQQISFVNSIATTKGGRHVDYVVDQVVGKLIEVVKKKNKAGVSVKPFQVKNHIWVFINCLIENPTFDSQTKENMTLQPKSFGSKCQLSEKFFKAASNCGIVESILNWVKFKAQTQLNKKCSSVKYSKIKGIPKLDDANDAGGKHSLECTLILTEGDSAKSLAVSGLGVIGRDRYGVFPLRGKILNVREASHKQIMENAEINNIIKIVGLQYKKSYDDAESLKTLRYGKIMIMTDQDQDGSHIKGLLINFIHHNWPSLLKHGFLEEFITPIVKASKNKQELSFYSIPEFDEWKKHIENQKAWKIKYYKGLGTSTAKEAKEYFADMERHRILFRYAGPEDDAAITLVIKLIF

SEQ ID NO: 809319 - protein, 813 aa, Homo sapiens
MAKSGGCGAGAGVGGGNGALTWVNNAAKKEESETANKNDSSKKLSVERVYQKKTQLEHILLRPDTYIGSVEPLTQFMWVYDEDVGMNCREVTFVPGLYKIFDEILVNAADNKQRDKNMTCIKVSIDPESNIISIWNNGKGIPVVEHKVEKVYVPALIFGQLLTSSNYDDDEKKVTGGRNGYGAKLCNIFSTKFTVETACKEYKHSFKQTWMNNMMKTSEAKIKHFDGEDYTCITFQPDLSKFKMEKLDKDIVALMTRRAYDLAGSCRGVKVMFNGKKLPVNGFRSYVDLYVKDKLDETGVALKVIHELANERWDVCLTLSEKGFQQISFVNSIATTKGGRHVDYVVDQVVGKLIEVVKKKNKAGVSVKPFQVKNHIWVFINCLIENPTFDSQTKENMTLQPKSFGSKCQLSEKFFKAASNCGIVESILNWVKFKAQTQLNKKCSSVKYSKIKGIPKLDDANDAGGKHSLECTLILTEGDSAKSLAVSGLGVIGRDRYGVFPLRGKILNVREASHKQIMENAEINNIIKIVGLQYKKSYDDAESLKTLRYGKIMIMTDQDQDGSHIKGLLINFIHHNWPSLLKHGFLEEFITPIVKASKNKQELSFYSIPEFDEWKKHIENQKAWKIKYYKGLGTSTAKEAKEYFADMERHRILFRYAGPEDDAAITLAFSKKKIDDRKEWLTNFMEDRRQRRLHGLPEQFLYGTATKHLTYNDFINKELILFSNSDNERSIPSLVDGFKPGQRKVLFTCFKRNDKREVKVAQLAGSVAEMSAYHHGEQALMMTIVNLAQNFIIVVGLLTFCSYTYSFMLFFTH

SEQ ID NO: 809320 - protein, 163 aa, Homo sapiens
AFSRLNGNPVRGFFPPALKLKLQGFFYLPPVPIFKKLFEEGLNIQKQRLRDLRNYAKEKRDEQRRRHQDELDSMENYYKDQFSLLAEAISQEHQELKAREKSQAQTLHKVKRELRSKMEKEIQQLQDMITQNDDDVFFRELEAERFRSRLQLASFQYSKSPSL

SEQ ID NO: 809321 - protein, 143 aa, Homo sapiens
MLKSALGDRIKEKTDHKEENTGNEEVEDGTEETLSQHSDGIVEYGPKKSRPGLSMRRKPPYRSHSLSPSPVNKHKQFHLERKRQRKPRETDVRQFQAQAFTEAFERELRRHKVQENIGPLRIHEKEEETVGKSLHCNKCHLIR

SEQ ID NO: 809322 - protein, 821 aa, Homo sapiens
MAGSDAEWVTIANNLLFKCHIHLRIHELQDCDANVFIALYQSILGEKVPDLIVIPRSQEDDAHNVQAVIDSLALDYLQVSLSHITGENIVKGDKESIKNLLEIFDGLLEYLTERISETSHEKSETEQYFKESDRGERLEEPESTKESKSSWKRVSFGRCSLSSEMLGPSWDGDEAESTGEIIRLGDTAHTFSLRSNGAQCPNEMLSKKALASPSSKSHEDMLYPPSVLSKSRTSFVEDTETLSVSGIPNARKLGEPIRAAIPLHPPYHPSEPRAPCPIGKEYLHSSHCSPAVNSTGEHTEFSGDLDDGLFLISKLPKGSKWEVYPAQVQGPRTRKPPKGKRNENRATASSCNSPFPQRPRKRLTEQELHDVSEKLSQRLSELDWMLKSALGDRIKEKTDHKEENTGNEEVEDGTEETLSQHSDGIVEYGPKKSRPGLSMRRKPPYRSHSLSPSPVNKHKQFHLERKRQRKPRETDVRQFQAQAFTEAFERELRRHKVQENIGPLRIHEKEEETEKIYRGEAVRKGTPECSQPWKIYSRKTTTQSLRGGLPKPNKAVPMKVSEHSLLPLMLEQFPFLYVSGPTLSKMWKQQIAQVEQLKKEACRENRSKKKLQDEIEEALRRHDLLTTLVKKEYEHNKRLQDFKDCIRRQRLTQSKIKENRQQIVRARKYYDDYRVQLCAKMMRMRTREEMIFKKLFEEGLNIQKQRLRDLRNYAKEKRDEQRRRHQDELDSMENYYKDQFSLLAEAISQEHQELKAREKSQAQTLHKVKRELRSKMEKEIQQLQDMITQNDDDVFFRELEAERFRSRLQLASFQYSKSPSL

SEQ ID NO: 809323 - protein, 583 aa, Homo sapiens
MAGSDAEWVTIANNLLFKCHIHLRIHELQDCDANVFIALYQSILGEKVPDLIVIPRSQEDDAHNVQAVIDSLALDYLQVSLSHITGENIVKGDKESIKNLLEIFDGLLEYLTERISETSHEKSETEQYFKESDRGERLEEPESTKESKSSWKRVSFGRCSLSSEMLGPSWDGDEAESTGEIIRLGDTAHTFSLRSNGAQCPNEMLSKKALASPSSKSHEDMLYPPSVLSKSRTSFVEDTETLSVSGIPNARKLGEPIRAAIPLHPPYHPSEPRAPCPIGKEYLHSSHCSPAVNSTGEHTEFSGDLDDGLFLISKLPKGSKWEVYPAQVQGPRTRKPPKGKRNENRATASSCNSPFPQRPRKRLTEQELHDVSEKLSQRLSELDWMLKSALGDRIKEKTDHKEENTGNEEVEDGTEETLSQHSDGIVEYGPKKSRPGLSMRRKPPYRSHSLSPSPVNKHKQFHLERKRQRKPRETDVRQFQAQAFTEAFERELRRHKVQENIGPLRIHEKEEETEKIYRGEAVRKGTPECSQPWKIYSRKTTTQSLRGGLPKPNKAVPSKNHRIVLYGKLATFESMCNIPRTQH

SEQ ID NO: 809324 - protein, 419 aa, Homo sapiens [sequence omitted]

SEQ ID NO: 809325 - protein, 610 aa, Homo sapiens
TQKRDLLGAQSSPGSQKALKFRGDFHDEQEQGSLWQDCGSVLPGHRRLPGRVGVRRRPASETWQARMLSILGEKVPDLIVIPRSQEDDAHNVQAVIDSLALDYLQVSLSHITGENIVKGDKESIKNLLEIFDGLLEYLTERISETSHEKSETEQYFKESDRGERLEEPESTKESKSSWKRVSFGRCSLSSEMLGPSWDGDEAESTGEIIRLGDTAHTFSLRSNGAQCPNEMLSKKALASPSSKSHEDMLYPPSVLSKSRTSFVEDTETLSVSGIPNARKLGEPIRAAIPLHPPYHPSEPRAPCPIGKEYLHSSHCSPAVNSTGEHTEFSGDLDDGLFLISKLPKGSKWEVYPAQVQGPRTRKPPKGKRNENRATASSCNSPFPQRPRKRLTEQELHDVSEKLSQRLSELDWMLKSALGDRIKEKTDHKEENTGNEEVEDGTEETLSQHSDGIVEYGPKKSRPGLSMRRKPPYRSHSLSPSPVNKHKQFHLERKRQRKPRETDVRQFQAQAFTEAFERELRRHKVQENIGPLRIHEKEEETEKIYRGEAVRKGTPECSQPWKIYSRKTTTQSLRGGLPKPNKAVPSKNHRIVLYGKLATFESMCNIPRTQH

SEQ ID NO: 809326 - protein, 465 aa, Homo sapiens
MLSSKRESLFLFLHPAALQVLRGRALWSGWALSEGGNFSRCSLSSEMLGPSWDGDEAESTGEIIRLGDTAHTFSLRSNGAQCPNEMLSKKALASPSSKSHEDMLYPPSVLSKSRTSFVEDTETLSVSGIPNARKLGEPIRAAIPLHPPYHPSEPRAPCPIGKEYLHSSHCSPAVNSTGEHTEFSGDLDDGLFLISKLPKGSKWEVYPAQVQGPRTRKPPKGKRNENRATASSCNSPFPQRPRKRLTEQELHDVSEKLSQRLSELDWMLKSALGDRIKEKTDHKEENTGNEEVEDGTEETLSQHSDGIVEYGPKKSRPGLSMRRKPPYRSHSLSPSPVNKHKQFHLERKRQRKPRETDVRQFQAQAFTEAFERELRRHKVQENIGPLRIHEKEEETEKIYRGEAVRKGTPECSQPWKIYSRKTTTQSLRGGLPKPNKAVPSKNHRIVLYGKLATFESMCNIPRTQH

SEQ ID NO: 809327 - protein, 552 aa, Homo sapiens
MAGSDAEWVTIANNLLFKCHIHLRIHELQDCDANVFIALYQSILGEKVPDLIVIPRSQEDDAHNVQAVIDSLALDYLQVSLSHITGENIVKGDKESIKNLLEIFDGLLEYLTERISETSHEKSETEQYFKESDRGERLEEPESTKESKSSWKRVSFGRCSLSSEMLGPSWDGDEAESTGEIIRLGDTAHTFSLRSNGAQCPNEMLSKKALASPSSKSHEDMLYPPSVLSKSRTSFVEDTETLSVSGIPNARKLGEPIRAAIPLHPPYHPSEPRAPCPIGKEYLHSSHCSPAVNSTGEHTEFSGDLDDGLFLISKLPKGSKWEVYPAQVQGPRTRKPPKGKRNENRATASSCNSPFPQRPRKRLTEQELHDVSEKLSQRLSELDWMLKSALGDRIKEKTDHKEENTGNEEVEDGTEETLSQHSDGIVEYGPKKSRPGLSMRRKPPYRSHSLSPSPVNKHKQFHLERKRQRKPRETDVRQFQAQEKIYRGEAVRKGTPECSQPWKIYSRKTTTQSLRGGLPKPNKAVPSKNHRIVLYGKLATFESMCNIPRTQH

SEQ ID NO: 809328 - protein, 418 aa, Homo sapiens
MVLLCHPGWSAVAQSRLTATSASASQAAGITSAQCPNEMLSKKALASPSSKSHEDMLYPPSVLSKSRTSFVEDTETLSVSGIPNARKLGEPIRAAIPLHPPYHPSEPRAPCPIGKEYLHSSHCSPAVNSTGEHTEFSGDLDDGLFLISKLPKGSKWEVYPAQVQGPRTRKPPKGKRNENRATASSCNSPFPQRPRKRLTEQELHDVSEKLSQRLSELDWMLKSALGDRIKEKTDHKEENTGNEEVEDGTEETLSQHSDGIVEYGPKKSRPGLSMRRKPPYRSHSLSPSPVNKHKQFHLERKRQRKPRETDVRQFQAQAFTEAFERELRRHKVQENIGPLRIHEKEEETEKIYRGEAVRKGTPECSQPWKIYSRKTTTQSLRGGLPKPNKAVPSKNHRIVLYGKLATFESMCNIPRTQH

SEQ ID NO: 809329 - protein, 583 aa, Homo sapiens; identical to SEQ ID NO: 809323

SEQ ID NO: 809330 - protein, 199 aa, Homo sapiens
MLKSALGDRIKEKTDHKEENTGNEEVEDGTEETLSQHSDGIVEYGPKKSRPGLSMRRKPPYRSHSLSPSPVNKHKQFHLERKRQRKPRETDVRQFQAQAFTEAFERELRRHKVQENIGPLRIHEKEEETEKIYRGEAVRKGTPECSQPWKIYSRKTTTQSLRGGLPKPNKAVPSKNHRIVLYGKLATFESMCNIPRTQH

SEQ ID NO: 809331 - protein, 233 aa, Homo sapiens
MSKSFPQRPRKRLTEQELHDVSEKLSQRLSELDWMLKSALGDRIKEKTDHKEENTGNEEVEDGTEETLSQHSDGIVEYGPKKSRPGLSMRRKPPYRSHSLSPSPVNKHKQFHLERKRQRKPRETDVRQFQAQAFTEAFERELRRHKVQENIGPLRIHEKEEETEKIYRGEAVRKGTPECSQPWKIYSRKTTTQSLRGGLPKPNKAVPSKNHRIVLYGKLATFESMCNIPRTQH

SEQ ID NO: 809332 - protein, 583 aa, Homo sapiens; identical to SEQ ID NO: 809323

SEQ ID NO: 809333 - protein, 583 aa, Homo sapiens; identical to SEQ ID NO: 809323

SEQ ID NO: 809334 - protein, 583 aa, Homo sapiens; identical to SEQ ID NO: 809323

SEQ ID NO: 809335 - protein, 583 aa, Homo sapiens; identical to SEQ ID NO: 809323

SEQ ID NO: 809336 - protein, 583 aa, Homo sapiens; identical to SEQ ID NO: 809323

SEQ ID NO: 809337 - protein, 200 aa, Homo sapiens
AAVRSVRDGSESRIMVDSSTRGSQHEGSELTQSKIKENRQQIVRARKYYDDYRVQLCAKMMRMRTREEMIFKKLFEEGLNIQKQRLRDLRNYAKEKRDEQRRRHQDELDSMENYYKDQFSLLAEAISQEHQELKAREKSQAQTLHKVKRELRSKMEKEIQQLQDMITQNDDDVFFRELEAERFRSRLQLASFQYSKSPSL

SEQ ID NO: 809338 - protein, 583 aa, Homo sapiens; identical to SEQ ID NO: 809323

SEQ ID NO: 809339 - protein, 583 aa, Homo sapiens; identical to SEQ ID NO: 809323

SEQ ID NO: 809340 - protein, 527 aa, Homo sapiens [sequence omitted]

SEQ ID NO: 809341 - protein, 241 aa, Homo sapiens [sequence omitted]

SEQ ID NO: 809342 - protein, 143 aa, Homo sapiens
MAGSDAEWVTIANNLLFKCHIHLRIHELQDCDANVFIALYQSILGEKVPDLIVIPRSQEDDAHNVQAVIDSLALDYLQVSLSHITGENIVKGDKESIKNLLEIFDGLLEYLTERISETSHEKSLIYTYLAIFPRADQVLQNAS

SEQ ID NO: 809343 - protein, 60 aa, Homo sapiens [sequence omitted]

SEQ ID NO: 809344 - protein, 106 aa, Homo sapiens
  misc_feature (103)..(103): Xaa can be any naturally occurring amino acid
MAGVCWSRGAPWGAIDLAPWGQVDCVDHGVSGAAIGESLSVSSTGVSDPRAERMTYVVGTWEHSKFLVHSILMISEYLYARSRILVHASRSYSFGLGSSRHTXSEG

SEQ ID NO: 809345 - protein, 60 aa, Homo sapiens [sequence omitted]

SEQ ID NO: 809346 - protein, 132 aa, Homo sapiens
EGRGKGARTRTRKSRATLDRAWEGAPAFALLLQREGRALPRGGVRLVLTLAAEPKVDRGGGLHIPVVALRFLPLSLRAHGGGQSGGDGGARTTRRPVLFLLRTCPARSVSRRPAPGLCSDLALAAPRPSGRS

SEQ ID NO: 809347 - protein, 132 aa, Homo sapiens; identical to SEQ ID NO: 809346

SEQ ID NO: 809348 - protein, 132 aa, Homo sapiens; identical to SEQ ID NO: 809346

SEQ ID NO: 809349 - protein, 132 aa, Homo sapiens; identical to SEQ ID NO: 809346

SEQ ID NO: 809350 - protein, 132 aa, Homo sapiens; identical to SEQ ID NO: 809346

SEQ ID NO: 809351 - protein, 132 aa, Homo sapiens; identical to SEQ ID NO: 809346

SEQ ID NO: 809352 - protein, 132 aa, Homo sapiens; identical to SEQ ID NO: 809346

SEQ ID NO: 809353 - protein, 132 aa, Homo sapiens; identical to SEQ ID NO: 809346

SEQ ID NO: 809354 - protein, 132 aa, Homo sapiens; identical to SEQ ID NO: 809346

SEQ ID NO: 809355 - protein, 136 aa, Homo sapiens
EGRGKGARTRTRKSRATLDRAWEGAPAFALLLQREGRALPRGGVRLVLTLAAEPKVDRGGGLHIPVVALRFLPLSLRAHGGGQSGGDGGARTTRRPVLFLLRTCPARSVSRRPAPGLCSDLALAAPRPTAPEEAGE

SEQ ID NO: 809356 - protein, 82 aa, Homo sapiens
SFLEQFVCVACLVVSDHGLSCGLRNPGHDNAWILINMEALVRNTMLLTKCQIGDLRIVTESNQLGVQGTSTAKLSLVCKCFF

SEQ ID NO: 809357 - protein, 39 aa, Homo sapiens
  misc_feature (16)..(17): Xaa can be any naturally occurring amino acid
  misc_feature (35)..(35): Xaa can be any naturally occurring amino acid
MNKAIKFDENSCPISXXDLQGMLMGQLSSGVVLQXLYKF

SEQ ID NO: 809358 - protein, 120 aa, Homo sapiens
MVAKQRIRMANEKHSKNITQRGNVAKTSRNAPEEKASVGPWLLALFIFVVCGSGKWLGGSHQVESWVERIWDDVVTGQYESYLRSSQPTCRGLHIILFRLNQITCSTYAQRVVLQKLLPA

SEQ ID NO: 809359 - protein, 89 aa, Homo sapiens
GGDACIYQTEPKVDRGGGLHIPVVALRFLPLSLRAHGGGQSGGDGGARTTRRPVLFLLRTCPARSVSRRPAPGLCSDLALAAPRPSGRS

SEQ ID NO: 809360 - protein, 132 aa, Homo sapiens; identical to SEQ ID NO: 809346

SEQ ID NO: 809361 - protein, 132 aa, Homo sapiens; identical to SEQ ID NO: 809346

SEQ ID NO: 809362 - protein, 142 aa, Homo sapiens
MTVGARLRSKAESSLLRRGPRGRGRTEGDEEAAAILEHLEYADEAEAAAESGTSAADERGPGTRGARRVHFALLPERYEPLEEPAPSEQPRKRYRRKLKKYGKNVGKVIIKGCRYVVIGLQGFAAAYSAPFAVATSVVSFVR

SEQ ID NO: 809363 - protein, 142 aa, Homo sapiens; identical to SEQ ID NO: 809362

SEQ ID NO: 809364 - protein, 142 aa, Homo sapiens; identical to SEQ ID NO: 809362

SEQ ID NO: 809365 - protein, 142 aa, Homo sapiens; identical to SEQ ID NO: 809362

SEQ ID NO: 809366 - protein, 142 aa, Homo sapiens; identical to SEQ ID NO: 809362

SEQ ID NO: 809367 - protein, 101 aa, Homo sapiens
PPPGSAAQARAGGGGGGSGGVGGGNGKAGEGRTQEQRLRVGEAGGEEARRNAAAGFSAALLPLPLLLLLLLPPPAGQRLTGRAALRCRRDASCCCCCCRRP

SEQ ID NO: 809368 - protein, 69 aa, Homo sapiens
AIAGELGSLRSRPAVTWSSGMPRSSLSGCRCPSFVPEYVLNLPARDPEAPSPCLHSDHPPHFQSMREPR

SEQ ID NO: 809369 - protein, 164 aa, Homo sapiens
MLHILSPMYFFLWGSCFFPLSSSDGLSTVTLVGIIVGVLLAIGFIGGIIVVVMRKMSGRYSEVNSLHPCDRQMKAIVSRTQIFELIEISDISWVWWLVPVVSAAGQLQTSLGNIVRPCLKKIISGTMVMFQSSLLGPLECSGSHLESQCFERLRRQEVHLCPGI

SEQ ID NO: 809370 - protein, 162 aa, Homo sapiens
MWKVSALLFVLGSASLWVLAEGASTGQPEDDTETTGLEGGVAMPGAEDDVVTPGTSEDRYKSGLTTLVATSVNSVTGIRIEDLPTSESTVHAQEQSPSATASNVATSHSTEKVDGDTQTTVEKDGLSTVTLVGIIVGVLLAIGFIGGIIVVVMRKMSGRYSP

SEQ ID NO: 809371 - protein, 162 aa, Homo sapiens; identical to SEQ ID NO: 809370

SEQ ID NO: 809372 - protein, 120 aa, Homo sapiens
MPGAEDDVVTPGTSEDRYKSGLTTLVATSVNSVTGIRIEDLPTSESTVHAQEQSPSATASNVATSHSTEKVDGDTQTTVEKDGLSTVTLVGIIVGVLLAIGFIGGIIVVVMRKMSGRYSP

SEQ ID NO: 809373 - protein, 104 aa, Homo sapiens
MNLTPLGTHVATSVNSVTGIRIEDLPTSESTVHAQEQSPSATASNVATSHSTEKVDGDTQTTVEKDGLSTVTLVGIIVGVLLAIGFIGGIIVVVMRKMSGRYSP

SEQ ID NO: 809374 - protein, 251 aa, Homo sapiens
NYTLGTRLGGALFGSALSAAMAQADIALIGLAVMGQNLILNMNDHGFVVCAFNRTVSKVDDFLANEAKGTKVVGAQSLKEMVSKLKKPRRIILLVKAGQAVDDFIEKLVPLLDTGDIIIDGGNSEYRDTTRRCRDLKAKGILFVGSGVSGGEEGARYGPSLMPGGNKEAWPHIKTIFQGIAAKVGTGEPCCDWVGDEGAGHFVKMVHNGIEYGDMQLICEAYHLMKDVLGMAQDEMAQGLEVRLPRLTLPV

SEQ ID NO: 809375 - protein, 109 aa, Homo sapiens
RSFWREPLRVFPSLVLRASPLFGSALSAAMAQADIALIGLAVMGQNLILNMNDHGFVVSGVGALSSLWFPGALAEAGDRFGSLRVSWPCFANVLCCCSWHFCMERRSTL

SEQ ID NO: 809376 - protein, 512 aa, Homo sapiens
RSFWREPLRVFPSLVLRASPLFGSALSAAMAQADIALIGLAVMGQNLILNMNDHGFVVCAFNRTVSKVDDFLANEAKGTKVVGAQSLKEMVSKLKKPRRIILLVKAGQAVDDFIEKLVPLLDTGDIIIDGGNSEYRDTTRRCRDLKAKGILFVGSGVSGGEEGARYGPSLMPGGNKEAWPHIKTIFQGIAAKVGTGEPCCDWVGDEGAGHFVKMVHNGIEYGDMQLICEAYHLMKDVLGMAQDEMAQAFEDWNKTELDSFLIEITANILKFQDTDGKHLLPKIRDSAGQKGTGKWTAISALEYGVPVTLIGEAVFARCLSSLKDERIQASKKLKGPQKFQFDGDKKSFLEDIRKALYASKIISYAQGFMLLRQAATEFGWTLNYGGIALMWRGGCIIRSVFLGKIKDAFDRNPELQNLLLDDFFKSAVENCQDSWRRAVSTGVQAGIPMPCFTTALSFYDGYRHEMLPASLIQAQRDYFGAHTYELLAKPGQFIHTNWTGHGGTVSSSSYNA

SEQ ID NO: 809377 - protein, 512 aa, Homo sapiens; identical to SEQ ID NO: 809376

SEQ ID NO: 809378 - protein, 505 aa, Homo sapiens
QAVPARGVRIASPLFGSALSAAMAQADIALIGLAVMGQNLILNMNDHGFVVCAFNRTVSKVDDFLANEAKGTKVVGAQSLKEMVSKLKKPRRIILLVKAGQAVDDFIEKLVPLLDTGDIIIDGGNSEYRDTTRRCRDLKAKGILFVGSGVSGGEEGARYGPSLMPGGNKEAWPHIKTIFQGIAAKVGTGEPCCDWVGDEGAGHFVKMVHNGIEYGDMQLICEAYHLMKDVLGMAQDEMAQAFEDWNKTELDSFLIEITANILKFQDTDGKHLLPKIRDSAGQKGTGKWTAISALEYGVPVTLIGEAVFARCLSSLKDERIQASKKLKGPQKFQFDGDKKSFLEDIRKALYASKIISYAQGFMLLRQAATEFGWTLNYGGIALMWRGGCIIRSVFLGKIKDAFDRNPELQNLLLDDFFKSAVENCQDSWRRAVSTGVQAGIPMPCFTTALSFYDGYRHEMLPASLIQAQRDYFGAHTYELLAKPGQFIHTNWTGHGGTVSSSSYNA

SEQ ID NO: 809379 - protein, 483 aa, Homo sapiens
MAQADIALIGLAVMGQNLILNMNDHGFVVCAFNRTVSKVDDFLANEAKGTKVVGAQSLKEMVSKLKKPRRIILLVKAGQAVDDFIEKLVPLLDTGDIIIDGGNSEYRDTTRRCRDLKAKGILFVGSGVSGGEEGARYGPSLMPGGNKEAWPHIKTIFQGIAAKVGTGEPCCDWVGDEGAGHFVKMVHNGIEYGDMQLICEAYHLMKDVLGMAQDEMAQAFEDWNKTELDSFLIEITANILKFQDTDGKHLLPKIRDSAGQKGTGKWTAISALEYGVPVTLIGEAVFARCLSSLKDERIQASKKLKGPQKFQFDGDKKSFLEDIRKALYASKIISYAQGFMLLRQAATEFGWTLNYGGIALMWRGGCIIRSVFLGKIKDAFDRNPELQNLLLDDFFKSAVENCQDSWRRAVSTGVQAGIPMPCFTTALSFYDGYRHEMLPASLIQAQRDYFGAHTYELLAKPGQFIHTNWTGHGGTVSSSSYNA

SEQ ID NO: 809380 - protein, 503 aa, Homo sapiens
TRGSTHAVASPLFGSALSAAMAQADIALIGLAVMGQNLILNMNDHGFVVCAFNRTVSKVDDFLANEAKGTKVVGAQSLKEMVSKLKKPRRIILLVKAGQAVDDFIEKLVPLLDTGDIIIDGGNSEYRDTTRRCRDLKAKGILFVGSGVSGGEEGARYGPSLMPGGNKEAWPHIKTIFQGIAAKVGTGEPCCDWVGDEGAGHFVKMVHNGIEYGDMQLICEAYHLMKDVLGMAQDEMAQAFEDWNKTELDSFLIEITANILKFQDTDGKHLLPKIRDSAGQKGTGKWTAISALEYGVPVTLIGEAVFARCLSSLKDERIQASKKLKGPQKFQFDGDKKSFLEDIRKALYASKIISYAQGFMLLRQAATEFGWTLNYGGIALMWRGGCIIRSVFLGKIKDAFDRNPELQNLLLDDFFKSAVENCQDSWRRAVSTGVQAGIPMPCFTTALSFYDGYRHEMLPASLIQAQRDYFGAHTYELLAKPGQFIHTNWTGHGGTVSSSSYNA

SEQ ID NO: 809381 - protein, 512 aa, Homo sapiens; identical to SEQ ID NO: 809376

SEQ ID NO: 809382 - protein, 512 aa, Homo sapiens; identical to SEQ ID NO: 809376

SEQ ID NO: 809383 - protein, 512 aa, Homo sapiens; identical to SEQ ID NO: 809376

SEQ ID NO: 809384 - protein, 512 aa, Homo sapiens; identical to SEQ ID NO: 809376

SEQ ID NO: 809385 - protein, 483 aa, Homo sapiens; identical to SEQ ID NO: 809379

SEQ ID NO: 809386 - protein, 503 aa, Homo sapiens
NYTLGTRLGGALFGSALSAAMAQADIALIGLAVMGQNLILNMNDHGFVVCAFNRTVSKVDDFLANEAKGTKVVGAQSLKEMVSKLKKPRRIILLVKAGQAVDDFIEKLVPLLDTGDIIIDGGNSEYRDTTRRCRDLKAKGILFVGSGVSGGEEGARYGPSLMPGGNKEAWPHIKTIFQGIAAKVGTGEPCCDWVGDEGAGHFVKMVHNGIEYGDMQLICEAYHLMKDVLGMAQDEMAQAFEDWNKTELDSFLIEITANILKFQDTDGKHLLPKIRDSAGQKGTGKWTAISALEYGVPVTLIGEAVFARCLSSLKDERIQASKKLKGPQKFQFDGDKKSFLEDIRKALYASKIISYAQGFMLLRQAATEFGWTLNYGGIALMWRGGCIIRSVFLGKIKDAFDRNPELQNLLLDDFFKSAVENCQDSWRRAVSTGVQAGIPMPCFTTALSFYDGYRHEMLPASLIQAQRDYFGAHTYELLAKPGQFIHTNWTGHGGTVSSSSYNA

SEQ ID NO: 809387 - protein, 506 aa, Homo sapiens
NRKMYEGSYAVCNFSHQGLRRSIVQLADIALIGLAVMGQNLILNMNDHGFVVCAFNRTVSKVDDFLANEAKGTKVVGAQSLKEMVSKLKKPRRIILLVKAGQAVDDFIEKLVPLLDTGDIIIDGGNSEYRDTTRRCRDLKAKGILFVGSGVSGGEEGARYGPSLMPGGNKEAWPHIKTIFQGIAAKVGTGEPCCDWVGDEGAGHFVKMVHNGIEYGDMQLICEAYHLMKDVLGMAQDEMAQAFEDWNKTELDSFLIEITANILKFQDTDGKHLLPKIRDSAGQKGTGKWTAISALEYGVPVTLIGEAVFARCLSSLKDERIQASKKLKGPQKFQFDGDKKSFLEDIRKALYASKIISYAQGFMLLRQAATEFGWTLNYGGIALMWRGGCIIRSVFLGKIKDAFDRNPELQNLLLDDFFKSAVENCQDSWRRAVSTGVQAGIPMPCFTTALSFYDGYRHEMLPASLIQAQRDYFGAHTYELLAKPGQFIHTNWTGHGGTVSSSSYNA

SEQ ID NO: 809388 - protein, 471 aa, Homo sapiens
RSFWREPLRVFPSLVLRASPLFGSALSAAMAQADIALIGLAVMGQNLILNMNDHGFVVCAFNRTVSKVDDFLANEAKGTKVVGAQSLKEMVSKLKKPRRIILLVKAGQAVDDFIEKLVPLLDTGDIIIDGGNSEYRDTTRRCRDLKAKGILFVGSGVSGGEEGARYGPSLMPGGNKEAWPHIKTIFQGIAAKVGTGEPCCDWVGDEGAGHFVKMVHNGIEYGDMQLICEAYHLMKDVLGMAQDEMAQAFEDWNKTELDSFLIEITANILKFQDTDGKHLLPKIRDSAGQKGTGKWTAISALEYGVPVTLIGEAVFARCLSSLKDERIQASKKLKGPQKFQFDGDKKSFLEDIRKALYASKIISYAQGFMLLRQAATEFGWTLNYGGIALMWRGGCIIRSVFLGKIKDAFDRNPELQNLLLDDFFKSAVENCQAQRDYFGAHTYELLAKPGQFIHTNWTGHGGTVSSSSYNA

SEQ ID NO: 809389 - protein, 449 aa, Homo sapiens
PTRRGRVGLANEAKGTKVVGAQSLKEMVSKLKKPRRIILLVKAGQAVDDFIEKLVPLLDTGDIIIDGGNSEYRDTTRRCRDLKAKGILFVGSGVSGGEEGARYGPSLMPGGNKEAWPHIKTIFQGIAAKVGTGEPCCDWVGDEGAGHFVKMVHNGIEYGDMQLICEAYHLMKDVLGMAQDEMAQAFEDWNKTELDSFLIEITANILKFQDTDGKHLLPKIRDSAGQKGTGKWTAISALEYGVPVTLIGEAVFARCLSSLKDERIQASKKLKGPQKFQFDGDKKSFLEDIRKALYASKIISYAQGFMLLRQAATEFGWTLNYGGIALMWRGGCIIRSVFLGKIKDAFDRNPELQNLLLDDFFKSAVENCQDSWRRAVSTGVQAGIPMPCFTTALSFYDGYRHEMLPASLIQAQRDYFGAHTYELLAKPGQFIHTNWTGHGGTVSSSSYNA

SEQ ID NO: 809390 - protein, 490 aa, Homo sapiens
RSFWREPLRVFPSLVLRASPLFGSALSAAMAQADIALIGLAVMGQNLILNMNDHGFVVCAFNRTVSKVDDFLANEAKGTKVVGAQSLKEMVSKLKKPRRIILLVKAGQAVDDFIEKLRRCRDLKAKGILFVGSGVSGGEEGARYGPSLMPGGNKEAWPHIKTIFQGIAAKVGTGEPCCDWVGDEGAGHFVKMVHNGIEYGDMQLICEAYHLMKDVLGMAQDEMAQAFEDWNKTELDSFLIEITANILKFQDTDGKHLLPKIRDSAGQKGTGKWTAISALEYGVPVTLIGEAVFARCLSSLKDERIQASKKLKGPQKFQFDGDKKSFLEDIRKALYASKIISYAQGFMLLRQAATEFGWTLNYGGIALMWRGGCIIRSVFLGKIKDAFDRNPELQNLLLDDFFKSAVENCQDSWRRAVSTGVQAGIPMPCFTTALSFYDGYRHEMLPASLIQAQRDYFGAHTYELLAKPGQFIHTNWTGHGGTVSSSSYNA

SEQ ID NO: 809391 - protein, 528 aa, Homo sapiens
RSFWREPLRVFPSLVLRASPLFGSALSAAMAQADIALIGLAVMGQNLILNMNDHGFVVCAFNRTVSKVDDFLANEAKGTKVVGAQSLKEMVSKLKKPRRIILLVKAGQAVDDFIEKLVPLLDTGDIIIDGGNSEYRDTTRRCRDLKAKGILFVGSGVSGGEEGARYGPSLMPGGNKEAWPHIKTIFQGIAAKVGTGEPCCDWVGDEGAGHFVKMVHNGIEYGDMQLICEAYHLMKDVLGMAQDEMAQAFEDWNKTELDSFLIEITANILKFQDTDGKHLLPKIRDSAGQKGTGKWTAISALEYGVPVTLIGEAVFARCLSSLKDERIQASKKLKGPQKFQFDGDKKSFLEDIRKALYASKIISYAQGFMLLRQAATEFGWTLNYGGIALMWRGGCIIRSVFLGKIKDAFDRNPELQNLLLDDFFKSAVENCQDSWRRAVSTGVQAGIPMPCFTTALSFYDGYRHEMLPASLIQAQRDYFGAHTYELLAKPGQFIHTNWTGHGGTVSSSSYNAFALFSVQFFKSVVRDS

SEQ ID NO: 809392 - protein, 299 aa, Homo sapiens
MVHNGIEYGDMQLICEAYHLMKDVLGMAQDEMAQAFEDWNKTELDSFLIEITANILKFQDTDGKHLLPKIRDSAGQKGTGKWTAISALEYGVPVTLIGEAVFARCLSSLKDERIQASKKLKGPQKFQFDGDKKSFLEDIRKALYASKIISYAQGFMLLRQAATEFGWTLNYGGIALMWRGGCIIRSVFLGKIKDAFDRNPELQNLLLDDFFKSAVENCQDSWRRAVSTGVQAGIPMPCFTTALSFYDGYRHEMLPASLIQAQRDYFGAHTYELLAKPGQFIHTNWTGHGGTVSSSSYNA

SEQ ID NO: 809393 - protein, 367 aa, Homo sapiens
RSFWREPLRVFPSLVLRASPLFGSALSAAMAQADIALIGLAVMGQNLILNMNDHGFVVGDEGAGHFVKMVHNGIEYGDMQLICEAYHLMKDVLGMAQDEMAQAFEDWNKTELDSFLIEITANILKFQDTDGKHLLPKIRDSAGQKGTGKWTAISALEYGVPVTLIGEAVFARCLSSLKDERIQASKKLKGPQKFQFDGDKKSFLEDIRKALYASKIISYAQGFMLLRQAATEFGWTLNYGGIALMWRGGCIIRSVFLGKIKDAFDRNPELQNLLLDDFFKSAVENCQDSWRRAVSTGVQAGIPMPCFTTALSFYDGYRHEMLPASLIQAQRDYFGAHTYELLAKPGQFIHTNWTGHGGTVSSSSYNA

SEQ ID NO: 809394 - protein, 369 aa, Homo sapiens
KDLLRAQGLGDIIDTSMGSLTSSPSSCSLSSQVGLTSVTSIQERIMSTPGGEEAIERLKVGDEGAGHFVKMVHNGIEYGDMQLICEAYHLMKDVLGMAQDEMAQAFEDWNKTELDSFLIEITANILKFQDTDGKHLLPKIRDSAGQKGTGKWTAISALEYGVPVTLIGEAVFARCLSSLKDERIQASKKLKGPQKFQFDGDKKSFLEDIRKALYASKIISYAQGFMLLRQAATEFGWTLNYGGIALMWRGGCIIRSVFLGKIKDAFDRNPELQNLLLDDFFKSAVENCQDSWRRAVSTGVQAGIPMPCFTTALSFYDGYRHEMLPASLIQAQRDYFGAHTYELLAKPGQFIHTNWTGHGGTVSSSSYNA

SEQ ID NO: 809395 - protein, 471 aa, Homo sapiens; identical to SEQ ID NO: 809388

SEQ ID NO: 809396 - protein, 480 aa, Homo sapiens
RSFWREPLRVFPSLVLRASPLFGSALSAAMAQADIALIGLAVMGQNLILNMNDHGFVVCAFNRTVSKVDDFLANEAKGTKVVGAQSLKEMVSKLKKPRRIILLVKAGQAVDDFIEKLVPLLDTGDIIIDGGNSEYRDTTRRCRDLKAKGILFVGSGVSGGEEGARYGPSLMPGGNKEAWPHIKTIFQGIAAKVGTGEPCCDWVGDEGAGHFVKMVHNGIEYGDMQLICEAYHLMKDVLGMAQDEMAQAFEDWNKTELDSFLIEITANILKFQDTDGKHLLPKIRDSAGQKGTGKWTAISALEYGVPVTLIGEAVFARCLSSLKDERIQASKKLKGPQKFQFDGDKKSFLEDIRKALYASKIISYAQGFMLLRQAATEFGWTLNYGGIALMWRGGCIIRSVFWTDPACLDRNENSELLRQTPKLQLVKPARTPGRETQTGRQALNPMPVTHGTRLTKEHKQQGSGSHYGTRKTGDTTNVDK

SEQ ID NO: 809397 - protein, 144 aa, Homo sapiens [sequence omitted]

SEQ ID NO: 809398 - protein, 196 aa, Homo sapiens
GEFGTRERERERTSKKLKGPQKFQFDGDKKSFLEDIRKALYASKIISYAQGFMLLRQAATEFGWTLNYGGIALMWRGGCIIRSVFLGKIKDAFDRNPELQNLLLDDFFKSAVENCQDSWRRAVSTGVQAGIPMPCFTTALSFYDGYRHEMLPASLIQAQRDYFGAHTYELLAKPGQFIHTNWTGHGGTVSSSSYNA

SEQ ID NO: 809399 - protein, 326 aa, Homo sapiens
RSFWREPLRVFPSLVLRASPLFGSALSAAMAQADIALIGLAVMGQNLILNMNDHGFVVCAFNRTVSKVDDFLANEAKGTKVVGAQSLKEMVSKLKKPRRIILLVKAGQAVDDFIEKLVPLLDTGDIIIDGGNSEYRDTTRRCRDLKAKGILFVGSGVSGGEEGARYGPSLMPGGNKEAWPHIKTIFQGIAAKVGTGEPCCDWVGDEGAGHFVKMVHNGIEYGDMQLICEAYHLMKDVLGMAQDEMAQAFEDWNKTELDSFLIEITANILKFQDTDGKHLLPKIRDSAKARNGRIRLDKVRPLGSGWPGSPEGEIRKRAHPVVKPGG

SEQ ID NO: 809400 - protein, 112 aa, Homo sapiens
GVPAEFGIFDRNPELQNLLLDDFFKSAVENCQDSWRRAVSTGVQAGIPMPCFTTALSFYDGYRHEMLPASLIQAQRDYFGAHTYELLAKPGQFIHTNWTGHGGTVSSSSYNA

SEQ ID NO: 809401 - protein, 155 aa, Homo sapiens
RSFWREPLRVFPSLVLRASPLFGSALSAAMAQADIALIGLAVMGQNLILNMNDHGFVPVLPLPSPSMTGTDMRCFQPASSRLSGITSGLTPMNSWPNQGSLSTPTGQAMVAPCHPRHTMPDHAAPVTLHDSTDQDIPCASWHCHLALCPIFCSVF

SEQ ID NO: 809402 - protein, 253 aa, Homo sapiens
RSFWREPLRVFPSLVLRASPLFGSALSAAMAQADIALIGLAVMGQNLILNMNDHGFVVCAFNRTVSKVDDFLANEAKGTKVVGAQSLKEMVSKLKKPRRIILLVKAGQAVDDFIEKLVPLLDTGDIIIDGGNSEYRDTTRRCRDLKAKGILFVGSGVSGGEEGARYGPSLMPGGNKEAWPHIKTIFQGIAAKVGTGEPCCDWVGDEGAGHFVKMVHNGIEYGDMQLICEAYHLMKDVLGMAQDEMAQALASWD

SEQ ID NO: 809403 - protein, 231 aa, Homo sapiens
RSFWREPLRVFPSLVLRASPLFGSALSAAMAQADIALIGLAVMGQNLILNMNDHGFVVCAFNRTVSKVDDFLANEAKGTKVVGAQSLKEMVSKLKKPRRIILLVKAGQAVDDFIEKLRRCRDLKAKGILFVGSGVSGGEEGARYGPSLMPGGNKEAWPHIKTIFQGIAAKVGTGEPCCDWVGDEGAGHFVKMVHNGIEYGDMQLICEAYHLMKDVLGMAQDEMAQALASWD

SEQ ID NO: 809404 - protein, 110 aa, Homo sapiens
MVHNGIEYGDMQLICEAYHLMKDVLGMAQDEMAQGEAPALPLCPFCRECSLCHRHRIFSSFLSPWPFGWPAWTQPNLRETVSNRPIHYASQSLSRKSPQSLGGYHHHHLA

SEQ ID NO: 809405 - protein, 380 aa, Homo sapiens
MGSGCRIECIFFSEFHPTLGPKITYQVPEDFISRELFDTVQVYIITKPELQNKLITVTAMEKKLIGCPVCIEHKKYSRNALLFNLGFVCDAQAKTCALEPIVKKLAGYLTTLELESSFVSMEESKQKLVPIMTILLEELNASGRCTLPIDESNTIHLKVIEQRPDPPVAQEYDVPVFTKDKEDFFNSQWDLTTQQILPYIDGFRHIQKISAEADVELNLVRIAIQNLLYYGVVTLVSILQYSNVYCPTPKVQDLVDDKSLQEACLSYVTKQGHKRASLRDVFQLYCSLSPGTTVRDLIGRHPQQLQHVDERKLIQFGLMKNLIRRLQKYPVRVTREEQSHPARLYTGCHSYDEICCKTGMSYHELDERLENDPNIIICWK

SEQ ID NO: 809406 - protein, 380 aa, Homo sapiens; identical to SEQ ID NO: 809405

SEQ ID NO: 809407 - protein, 334 aa, Homo sapiens
MEESKQKLVPIMTILLEELNASGRCTLPIDESNTIHLKVIEQRPDPPVAQEYDVPVFTKDKEDFFNSQWDLTTQQILPYIDGFRHIQKISAEADVELNLVRIAIQNLLYYGVVTLVSILQYSNVYCPTPKVQDLVDDKSLQEACLSYVTKQGHKRASLRDVFQLYCSLSPGTTVRDLIGRHPQQLQHVDERSEENLLGHLGVTSGKLDPLCLSGALDHGALPIQAGFLEMMGYRDKIEGRLQERVGLPERRPGQGVTPSSDPHPRKLIQFGLMKNLIRRLQKYPVRVTREEQSHPARLYTGCHSYDEICCKTGMSYHELDERLENDPNIIICWK

SEQ ID NO: 809408 - protein, 436 aa, Homo sapiens
MRRSPFVLHPVQMSTDGAHCHSPPQVPEDFISRELFDTVQVYIITKPELQNKLITVTAMEKKLIGCPVCIEHKKYSRNALLFNLGFVCDAQAKTCALEPIVKKLAGYLTTLEICNEMGLGLPTGRVGEGVPMSPKSPKPGTLQTSSGLRAANQPGVLGCAHHAFHALSSLESSFVSMEESKQKLVPIMTILLEELNASGRCTLPIDESNTIHLKVIEQRPDPPVAQEYDVPVFTKDKEDFFNSQWDLTTQQILPYIDGFRHIQKISAEADVELNLVRIAIQNLLYYGVVTLVSILQYSNVYCPTPKVQDLVDDKSLQEACLSYVTKQGHKRASLRDVFQLYCSLSPGTTVRDLIGRHPQQLQHVDERKLIQFGLMKNLIRRLQKYPVRVTREEQSHPARLYTGCHSYDEICCKTGMSYHELDERLENDPNIIICWK

SEQ ID NO: 809409 - protein, 379 aa, Homo sapiens
MRRSPFVLHPVQMSTDGAHCHSPPQVPEDFISRELFDTVQVYIITKPELQNKLITVTAMEKKLIGCPVCIEHKKYSRNALLFNLGFVCDAQAKTCALEPIVKKLAGYLTTLELESSFVSMEESKQKLVPIMTILLEELNASGRCTLPIDESNTIHLKVIEQRPDPPVAQEYDVPVFTKDKEDFFNSQWDLTTQQILPYIDGFRHIQKISAEADVELNLVRIAIQNLLYYGVVTLVSILQYSNVYCPTPKVQDLVDDKSLQEACLSYVTKQGHKRASLRDVFQLYCSLSPGTTVRDLIGRHPQQLQHVDERKLIQFGLMKNLIRRLQKYPVRVTREEQSHPARLYTGCHSYDEICCKTGMSYHELDERLENDPNIIICWK

SEQ ID NO: 809410 - protein, 504 aa, Homo sapiens
MRRSPFVLHPVQMSTDGAHCHSPPQVPEDFISRELFDTVQVYIITKPELQNKLITVTAMEKKLIGCPVCIEHKKYSRNALLFNLGFVCDAQAKTCALEPIVKKLAGYLTTLELESSFVSMEESKQKLVPIMTILLEELNASGRCTLPIGMASLCKDSRGVEERWESEPSYVREKGKTHEHIGGQEIAWAEVPMSRVQCMMELGLGVGGKQSSPALPLGQSFPFVGLRFSLHKKRKISSYPEAPACPKGCWEAWMVIEDLLEEVALRIWMGPPADESNTIHLKVIEQRPDPPVAQEYDVPVFTKDKEDFFNSQWDLTTQQILPYIDGFRHIQKISAEADVELNLVRIAIQNLLYYGVVTLVSILQYSNVYCPTPKVQDLVDDKSLQEACLSYVTKQGHKRASLRDVFQLYCSLSPGTTVRDLIGRHPQQLQHVDERKLIQFGLMKNLIRRLQKYPVRVTREEQSHPARLYTGCHSYDEICCKTGMSYHELDERLENDPNIIICWK

SEQ ID NO: 809411 - protein, 378 aa, Homo sapiens
MEKKLIGCPVCIEHKKYSRNALLFNLGFVCDAQAKTCALEPIVKKLAGYLTTLEICNEMGLGLPTGRVGEGVPMSPKSPKPGTLQTSSGLRAANQPGVLGCAHHAFHALSSLESSFVSMEESKQKLVPIMTILLEELNASGRCTLPIDESNTIHLKVIEQRPDPPVAQEYDVPVFTKDKEDFFNSQWDLTTQQILPYIDGFRHIQKISAEADVELNLVRIAIQNLLYYGVVTLVSILQYSNVYCPTPKVQDLVDDKSLQEACLSYVTKQGHKRASLRDVFQLYCSLSPGTTVRDLIGRHPQQLQHVDERKLIQFGLMKNLIRRLQKYPVRVTREEQSHPARLYTGCHSYDEICCKTGMSYHELDERLENDPNIIICWK

SEQ ID NO: 809412 - protein, 321 aa, Homo sapiens [sequence omitted]

SEQ ID NO: 809413 - protein, 169 aa, Homo sapiens
MRRSPFVLHPVQMSTDGAHCHSPPQVPEDFISRELFDTVQVYIITKPELQNKLITVTAMEKKLIGCPVCIEHKKYSRNALLFNLGFVCDAQAKTCALEPIVKKLAGYLTTLELESSFVSMEESKQKLVPIMTILLEELNASGRCTLPIGMASLCKDSRGVEERWESEPS

SEQ ID NO: 809414 - protein, 436 aa, Homo sapiens; identical to SEQ ID NO: 809408

SEQ ID NO: 809415 - protein, 510 aa, Homo sapiens
MRRSPFVLHPVQMSTDGAHCHSPPQVPEDFISRELFDTVQVYIITKPELQNKLITVTAMEKKLIGCPVCIEHKKYSRNALLFNLGFVCDAQAKTCALEPIVKKLAGYLTTLEICNEMGLGLPTGRVGEGVPMSPKSPKPGTLQTSSGLRAANQPGVLGCAHHAFHALSSLESSFVSMEESKQKLVPIMTILLEELNASGRCTLPIDESNTIHLKVIEQRPDPPVAQEYDVPVFTKDKEDFFNSQWDLTTQQILPYIDGFRHIQKISAEADVELNLVRIAIQNLLYYGVVTLVSILQYSNVYCPTPKVQDLVDDKSLQEACLSYVTKQGHKRASLRDVFQLYCSLSPGTTVRDLIGRHPQQLQHVDERSEENLLGHLGVTSGKLDPLCLSGALDHGALPIQAGFLEMMGYRDKIEGRLQERVGLPERRPGQGVTPSSDPHPRKLIQFGLMKNLIRRLQKYPVRVTREEQSHPARLYTGCHSYDEICCKTGMSYHELDERLENDPNIIICWK

SEQ ID NO: 809416 - protein, 436 aa, Homo sapiens; identical to SEQ ID NO: 809408

SEQ ID NO: 809417 - protein, 277 aa, Homo sapiens
MSTDGAHCHSPPQVPEDFISRELFDTVQVYIITKPELQNKLITVTAMEKKLIGCPVCIEHKKYSRNALLFNLGFVCDAQAKTCALEPIVKKLAGYLTTLELESSFVSMEESKQKLVPIMTILLEELNASGRCTLPIDESNTIHLKVIEQRPDPPVAQEYDVPVFTKDKEDFFNSQWDLTTQQILPYIDGFRHIQKISAEADVELNLVRIAIQNLLYYGVVTLVSILQYSNVYCPTPKVQDLVDDKSLQEACLSYVTKQGSGGFWGKPSWGGQGHMMS

SEQ ID NO: 809418 - protein, 436 aa, Homo sapiens; identical to SEQ ID NO: 809408

SEQ ID NO: 809419 - protein, 324 aa, Homo sapiens
MSTDGAHCHSPPQVPEDFISRELFDTVQVYIITKPELQNKLITVTAMEKKLIGCPVCIEHKKYSRNALLFNLGFVCDAQAKTCALEPIVKKLAGYLTTLEICNEMGLGLPTGRVGEGVPMSPKSPKPGTLQTSSGLRAANQPGVLGCAHHAFHALSSLESSFVSMEESKQKLVPIMTILLEELNASGRCTLPIDESNTIHLKVIEQRPDPPVAQEYDVPVFTKDKEDFFNSQWDLTTQQILPYIDGFRHIQKISAEADVELNLVRIAIQNLLYYGVVTLVSILQEADPVRAYEEPHQATTEVSCAGDSGRAEPPCPALYRLPQL

SEQ ID NO: 809420 - protein, 277 aa, Homo sapiens
MSTDGAHCHSPPQVPEDFISRELFDTVQVYIITKPELQNKLITVTAMEKKLIGCPVCIEHKKYSRNALLFNLGFVCDAQAKTCALEPIVKKLAGYLTTLEICNEMGLGLPTGRVGEGVPMSPKSPKPGTLQTSSGLRAANQPGVLGCAHHAFHALSSLESSFVSMEESKQKLVPIMTILLEELNASGRCTLPIDESNTIHLKVIEQRPDPPVAQEYDVPVFTKDKEDFFNSQWDLTTQQILPYIDGFRHIQKISAEADVELNLVLRRCDTGVHPPGS

SEQ ID NO: 809421 - protein, 435 aa, Homo sapiens
MSTDGAHCHSPPQVPEDFISRELFDTVQVYIITKPELQNKLITVTAMEKKLIGCPVCIEHKKYSRNALLFNLGFVCDAQAKTCALEPIVKKLAGYLTTLEICNEMGLGLPTGRVGEGVPMSPKSPKPGTLQTSSGLRAANQPGVLGCAHHAFHALSSLESSFVSMEESKQKLVPIMTILLEELNASGRCTLPIDESNTIHLKVIEQRPDPPVAQEYDVPVFTKDKEDFFNSQWDLTTQQILPYIDGFRHIQKISAEADVELNLVRIAIQNLLYYGVVTLVSILQYSNVYCPTPKVQDLVDDKSLQEACLSYVTKQGHKRASLRDVFQLYCSLSPGTTVRDLIGRHPQQLQHVDERKLIQFGLMKNLIRRLQKYPVRVTREEQSHPARLYTGCHSYDEICCKTGGGRRAVRVGSGQGGQAKATDLSSTTPPRHELP

SEQ ID NO: 809422 - protein, 277 aa, Homo sapiens; identical to SEQ ID NO: 809417

SEQ ID NO: 809423 - protein, 300 aa, Homo sapiens
MSTDGAHCHSPPQVPEDFISRELFDTVQVYIITKPELQNKLITVTAMEKKLIGCPVCIEHKKYSRNALLFNLGFVCDAQAKTCALEPIVKKLAGYLTTLELESSFVSMEESKQKLVPIMTILLEELNASGRCTLPIDESNTIHLKVIEQRPDPPVAQEYDVPVFTKDKEDFFNSQWDLTTQQILPYIDGFRHIQKISAEADVELNLVRIAIQNLLYYGVVTLVSILQYSNVYCPTPKVQDLVDDKSLQEACLSYVTKQGHKRASLRDVFHYDEICCKTGMSYHELDERLENDPNIIICWK

SEQ ID NO: 809424 - protein, 272 aa, Homo sapiens
MSTDGAHCHSPPQVPEDFISRELFDTVQVYIITKPELQNKLITVTAMEKKLIGCPVCIEHKKYSRNALLFNLGFVCDAQAKTCALEPIVKKLAGYLTTLEICNEMGLGLPTGRVGEGVPMSPKSPKPGTLQTSSGLRAANQPGVLGCAHHAFHALSSLESSFVSMEESKQKLVPIMTILLEELNASGRCTLPIDESNTIHLKVIEQRPDPPVAQEYDVPVFTKDKEDFFNSQWDLTTQQILPYIDGFRHIQKISAEADVELNLVRIAIQNLL

SEQ ID NO: 809425 - protein, 272 aa, Homo sapiens; identical to SEQ ID NO: 809424

SEQ ID NO: 809426 - protein, 311 aa, Homo sapiens
MSNPSAPPPYEDRNPLYPGPLPPGGYGQPSVLPGGYPAYPGYPQPGYGHPAGYPQPMPPTHPMPMNYGPGHGYDGEERAVSDSFGPGEWDDRKVRHTFIRKVYSIISVQLLITVAIIAIFTFVEPVSAFVRRNVAVYYVSYAVFVVTYLILACCQGPRRRFPWNIILLTLFTFAMGFMTGTISSMYQTKAVIIAMIITAVVSISVTIFCFQTKVDFTSCTGLFCVLGIVLLVTGIVTSIVLYFQYVYWLHMLYAALGAICFTLFLAYDTQLVLGNRKHTISPEDYITGALQIYTDIIYIFTFVLQLMGDRN

SEQ ID NO: 809427 - protein, 343 aa, Homo sapiens
MARYEACVYFGRGSPLPPGGYGQPSVLPGGYPAYPGYPQPGYGHPAGYPQPMPPTHPMPMNYGPGHGYDGEERAVSDSFGPGEWDDRKVRHTFIRKVYSIISVQLLITVAIIAIFTFVEPVSAFVRRNVAVYYVSYAVFVVTYLILACCQGPRRRFPWNIILLTLFTFAMGFMTGTISSMYQTKAVIIAMIITAVVSISVTIFCFQTKVDFTSCTGLFCVLGIVLLVTGIVTSIVLYFQYVYWLHMLYAALGAICFTLFLLTTHQLVWAPEATEAGVTYWACGFPASLISLGGVVGSPRGALSRLGPPRRGPGGGVALPWKRAVGGSPGVWGRAPWGGESPAP

SEQ ID NO: 809428 - protein, 309 aa, Homo sapiens
MSNPSAPPPYEDRNPLYPGPLPPGGYGQPSVLPGGYPAYPGYPQPGYGHPAGYPQPMPPTHPMPMNYGPGHGYDGEERAVSDSFGPGEWDDRKVRHTFIRKVYSIISVQLLITVAIIAIFTFVEPVSAFVRRNVAVYYVSYAVFVVTYLILACCQGPRRRYPWNIILLTHYNLYANGHFMTGNHFQYVHTKADHHCNDHTTAGGNPYQSTIITGFKTKGGIHLVTRPLCVLWTWCPSITWHRSHSTRALRPKRPARGTPTRDKTQTGAAHRATPGPGRHKTHRAPWRAAERTMTPRGIIQRGPQQGQPR

SEQ ID NO: 809429 - protein, 178 aa, Homo sapiens
LWVRAGAPGCRIQQCPGTETAEYQLIVRRNVAVYYVSYAVFVVTYLILACCQGPRRRFPWNIILLTLFTFAMGFMTGTISSMYQTKAVIIAMIITAVVSISVTIFCFQTKVDFTSCTGLFCVLGIVLLVTGIVTSIVLYFQYVYWLHMLYAALGAICFTLFLAHYNCAAVSYDSATAL

SEQ ID NO: 809430 - protein, 41 aa, Homo sapiens
MGAEYFGKKDSFIAAEWKLTRNEEEDDDDSYCSGVYKGPCV

SEQ ID NO: 809431 - protein, 122 aa, Homo sapiens
GREHGSGAEEEVHIASEPGISLGSPLGQAAAREGSGVGGKYWGLAASWGRPGVPDGDPCPAVCVQVYSIISVQLLITVAIIAIFTFVEPVSAFVRRNVAVYYVSYAVFVVTYLILACCQGPR

SEQ ID NO: 809432 - protein, 311 aa, Homo sapiens; identical to SEQ ID NO: 809426

SEQ ID NO: 809433 - protein, 311 aa, Homo sapiens; identical to SEQ ID NO: 809426

SEQ ID NO: 809434 - protein, 275 aa, Homo sapiens
RGAEPQPSLALPGPGGLATLRGQERSVWNGAGPGHGYDGEERAVSDSFGPGEWDDRKVRHTFIRKVYSIISVQLLITVAIIAIFTFVEPVSAFVRRNVAVYYVSYAVFVVTYLILACCQGPRRRFPWNIILLTLFTFAMGFMTGTISSMYQTKAVIIAMIITAVVSISVTIFCFQTKVDFTSCTGLFCVLGIVLLVTGIVTSIVLYFQYVYWLHMLYAALGAICFTLFLAYDTQLVLGNRKHTISPEDYITGALQIYTDIIYIFTFVLQLMGDRN

SEQ ID NO: 809435 - protein, 137 aa, Homo sapiens
MGFMTGTISSMYQTKAVIIAMIITAVVSISVTIFCFQTKVDFTSCTGLFCVLGIVLLVTGIVTSIVLYFQYVYWLHMLYAALGAICFTLFLAYDTQLVLGNRKHTISPEDYITGALQIYTDIIYIFTFVLQLMGDRN

SEQ ID NO: 809436 - protein, 208 aa, Homo sapiens
LWVRAGAPGCRIQQCPGTETAEYQLIVRRNVAVYYVSYAVFVVTYLILACCQGPRRRFPWNIILLTLFTFAMGFMTGTISSMYQTKAVIIAMIITAVVSISVTIFCFQTKVDFTSCTGLFCVLGIVLLVTGIVTSIVLYFQYVYWLHMLYAALGAICFTLFLAYDTQLVLGNRKHTISPEDYITGALQIYTDIIYIFTFVLQLMGDRN

SEQ ID NO: 809437 - protein, 81 aa, Homo sapiens
AEVSYTKLFCPLLLQVYWLHMLYAALGAICFTLFLAYDTQLVLGNRKHTISPEDYITGALQIYTDIIYIFTFVLQLMGDRN

SEQ ID NO: 809438 - protein, 87 aa, Homo sapiens
RQAIPHQAVAGIVTSIVLYFNVYWLHMLYAALGAICFTLFLAYDTQLVLGNRKHTISPEDYITGALQIYTDIIYIFTFVLQLMGDRN

SEQ ID NO: 809439 - protein, 82 aa, Homo sapiens
YRCNRCTGSIRMNFTSIYEWAGTLAGPGEPEAHHQPRGLHHWRPADLHRHHLHLHLCAAADGGSQLRSKPPFSPDPGLSLPS

SEQ ID NO: 809440 - protein, 311 aa, Homo sapiens; identical to SEQ ID NO: 809426

SEQ ID NO: 809441 - protein, 311 aa, Homo sapiens; identical to SEQ ID NO: 809426

SEQ ID NO: 809442 - protein, 102 aa, Homo sapiens
DEYAYDIKEPTIMSNACLTATRGGEKCSWSYFFPQQSQRALSPASWTHRPLSCIPLAWHLLAQEGRRDLCPWVSLLQSLLVSVTYVLFIWVRDGGQIIERAK

SEQ ID NO: 809443 - protein, 158 aa, Homo sapiens
  misc_feature (15)..(15): Xaa can be any naturally occurring amino acid
  misc_feature (29)..(29): Xaa can be any naturally occurring amino acid
  misc_feature (43)..(43): Xaa can be any naturally occurring amino acid
TAGTGGWDDGGGARXAPQQSQRAGAPSAXTQSPDLGGRGRGSXERRKGEESGAHGAPGGNPGGGQGQREGGAGGGTDNRTSKVTYTGQHGTASPLGLLLACDAIRQSRPHVAICSPFLKAAGASLQASGSLVRVNSCFLYSGSSEQKVRGRVIRVARK

SEQ ID NO: 809444 - protein, 311 aa, Homo sapiens; identical to SEQ ID NO: 809426

SEQ ID NO: 809445 - protein, 104 aa, Homo sapiens
MSNPSAPPPYEDRNPLYPGPLPPGGYGQPSVLPGGYPAYPGYPQPGYGHPAGYPQPMPPTHPMPMNYECLGVPHLAREIPKPTVVLKTSGFFPSANPGRVLRGR

SEQ ID NO: 809446 - protein, 311 aa, Homo sapiens; identical to SEQ ID NO: 809426

SEQ ID NO: 809447 - protein, 348 aa, Homo sapiens
MSNPSAPPPYEDRNPLYPGPLPPGGYGQPSVLPGGYPAYPGYPQPGYGHPAGYPQPMPPTHPMPMNYGPGHGYDGEERAVSDSFGPGEWDDRKVRHTFIRKVYSIISVQLLITVAIIAIFTFVEPVSAFVRRNVAVYYVSYAVFVVTYLILACCQGPRRRFPWNIILLTLFTFAMGFMTGTISSMYQTKAVIIAMIITAVVSISVTIFCFQTKVDFTSCTGLFCVLGIVLLVTGIVTSIVLYFQYVYWLHMLYAALGAICFTLFLLTTHQLVWAPEATEAGVTYWACGFPASLISLGGVVGSPRGALSRLGPPRRGPGGGVALPWKRAVGGSPGVWGRAPWGGESPAP

SEQ ID NO: 809448 - protein, 282 aa, Homo sapiens
MSNPSAPPPYEDRNPLYPGPLPPGGYGQPSVLPGGYPAYPGYPQPGYGHPAGYPQPMPPTHPMPMNYGPGHGYDGEERAVSDSFGPGEWDDRKVRHTFIRKVYSIISVQLLITVAIIAIFTFVEPVSAFVRRNVAVYYVSYAVFVVTYLILACCQGPRRRFPWNIILLTLFTFAMGFMTGTISSMYQTKAVIIAMIITAVVSISVTIFCFQTKVDFTSCTGLFCVLGIVLLVTGIVTSIVLYFQYVYWLHMLYAALGAICFTLFLAHYNCAAVSYDSATALQ

SEQ ID NO: 809449 - protein, 309 aa, Homo sapiens; identical to SEQ ID NO: 809428

SEQ ID NO: 809450 - protein, 331 aa, Homo sapiens
SRAFERARKSPSKRPLQAAGGPGKRRRLRAKQPPPTQLHTSQTHTSKNANPAAPTSGLSAPAPAAPRGRGDARGRRDSPAPGRPEGAPGREGLQTAASARGNRQTPAFVAPAPRPYPADGCSAPARGGGPRAEDRGGLALFVTGEVRGPLAVGAGGERRPVASREVLQVELDVHVFALLPGRQRHIVGDQLTLQLVFCQDRGVFQELRHLGDLRSPLPTAFAAAAHAGALAPGRGPRCRLRASRLLPGKSAAERNKNSRTQSQARPGHKRPQSRTTNQLRPSWKLAPTPAHTLQAGGEQPASPTPQERAPPLAGDGRKRGGDWRDGSRGFH

SEQ ID NO: 809451 - protein, 331 aa, Homo sapiens; identical to SEQ ID NO: 809450

SEQ ID NO: 809452 - protein, 300 aa, Homo sapiens
SRAFERARKSPSKRPLQAAGGPGKRRRLRAKQPPPTQLHTSQTHTSKNANPAAPTSGLSAPAPAAPRGRGDARGRRDSPAPGRPEGAPGREGLQTAASARGNRQTPAFVAPAPRPYPADGCSAPARGGGPRAEDRGGLALFVTGEVRGPLAVGAGGERRPVASREVLQDRGVFQELRHLGDLRSPLPTAFAAAAHAGALAPGRGPRCRLRASRLLPGKSAAERNKNSRTQSQARPGHKRPQSRTTNQLRPSWKLAPTPAHTLQAGGEQPASPTPQERAPPLAGDGRKRGGDWRDGSRGFH

SEQ ID NO: 809453 - protein, 227 aa, Homo sapiens
SRAFERARKSPSKRPLQAAGGPGKRRRLRAKQPPPTQLHTSQTHTSKNANPAAPTSGLSAPAPAAPRGRGDARGRRDSPAPGRPEGAPGREGLQTAASARGNRQTPAFVAPAPRPYPADGAHAGALAPGRGPRCRLRASRLLPGKSAAERNKNSRTQSQARPGHKRPQSRTTNQLRPSWKLAPTPAHTLQAGGEQPASPTPQERAPPLAGDGRKRGGDWRDGSRGFH

SEQ ID NO: 809454 - protein, 331 aa, Homo sapiens; identical to SEQ ID NO: 809450

SEQ ID NO: 809455 - protein, 234 aa, Homo sapiens
MWAHESIHLSTCTRECSDRYLDIKFGHQVTEKHKHHPGTRRHMPIASHRPRQEVPPQTLPQTLPHPLGPLALAPRFSAEISPGPPAVSLAPTNTGVHTQRTCIETHDTSFHLGVTVGWRQPPPPQHLRPKDTPVPGAQPPPGPRPWPTQLRERPSPEPPPPGLGLPGSKTPALPARPRVGWMGPKAQPHTPFPSTCHLPIPFRFVGFFVFPDCSGHSPRSRAPAPGFCLDIASP

SEQ ID NO: 809456 - protein, 95 aa, Homo sapiens
CCRGLAAGEASPGGGGSVTGPPRQQDPGTPRQAQGGVDGPKGPAPHSFPVHLSPTYPLSVCWVFRLSRLQWTQPPISSPGPRLLSGHCIALVFFL

SEQ ID NO: 809457 - protein, 234 aa, Homo sapiens; identical to SEQ ID NO: 809455

SEQ ID NO: 809458 - protein, 261 aa, Homo sapiens
MIYKCPMCREFFSERADLFMHQKIHTAEKPHKCDKCDKGFFHISELHIHWRDHTGEKVYKCDDCGKDFSTTTKLNRHKKIHTVEKPYKCYECGKAFNWSSHLQIHMRVHTGEKPYVCSECGRGFSNSSNLCMHQRVHTGEKPFKCEECGKAFRHTSSLCMHQRVHTGEKPYKCYECGKAFSQSSSLCIHQRVHTGEKPYRCCGCGKAFSQSSSLCIHQRVHTGEKPFKCDECGKAFSQSTSLCIHQRVHTKERNHLKISVI

SEQ ID NO: 809459 - protein, 261 aa, Homo sapiens; identical to SEQ ID NO: 809458

SEQ ID NO: 809460 - protein, 261 aa, Homo sapiens; identical to SEQ ID NO: 809458

SEQ ID NO: 809461 - protein, 215 aa, Homo sapiens
MIYKCPMCREFFSERADLFMHQKIHTAEKPHKCDKCDKGFFHISELHIHWRDHTGEKVYKCDDCGKDFSTTTKLNRHKKIHTVEKPYKCYECGKAFNWSSHLQIHMRVHTGEKPYVCSECGRGFSNSSNLCMHQRVHTGEKPFKCEECGKAFRHTSSLCMHQRVHTGEKPYKCYECGKAFSQKYEPLHPPESPHKGEKPSQNISYIKRFAKSLKS

SEQ ID NO: 809462 - protein, 261 aa, Homo sapiens; identical to SEQ ID NO: 809458

SEQ ID NO: 809463 - protein, 261 aa, Homo sapiens; identical to SEQ ID NO: 809458

SEQ ID NO: 809464 - protein, 261 aa, Homo sapiens; identical to SEQ ID NO: 809458

SEQ ID NO: 809465 - protein, 261 aa, Homo sapiens; identical to SEQ ID NO: 809458

SEQ ID NO: 809466 - protein, 2254 aa, Homo sapiens
MFRRARLSVKPNVRPGVGARGSTASNPQRGRESPRPPEPATDSASKPAEPTDVPTVDFGGAEPQEKAPRSSTEKTGGDNDVEESSRSSSTVSQRRKRISSTSSLVKSSVSVPSESHPLSTINQEAPQPTATSTKEKQPCSDRYRIYKAQKLREMLKEELRKEKKQWKNKYAINESQRPPDRSKMTMRDFIYYLPDNNPMTSSLEQEKKTEKPSTPVQTREQEGKSTPNAEDNEMEEETDDGPLLVPRVKVAEDGSIILDEESLTVEVLRTKGPCVVEENDPIFERGSTTTYSSFRKNYYSKPWSNKETDMFFLAISMVGTDFSMIGQLFPHRARIEIKNKFKREEKTNGWRIDKAFQEKRPFDFDFFAHLLQKVLAEEEKRKQKSVKNHSLKEKKSTKPRKNVKVKKVACEGVNNDPDESMSSRISDTERSQKDAQTVEEESLTLSREDAEQVALEVDLNQKKRRRKKQDGANELGVNNLLENATVQAGPSKGEKHKNKCQAIRPELKEGECSKEQMLSCTQNIDGIVGFASTEKVEKRTDPILSLSNQQDATSVATESSESSTSDLPSFEVGIRALCEVNNAEGSCIEERNVDLKNNSLEIDQTENVKPMLRGRFQRPKPNLSRAGKKSVLSQGKTESESKNSHSKTSVEKNHVEKDKMNTLDILRMETTERENPEAETVSVLGEKNCLQEGSQLKALRPVQVRGRLQKPKPNAGKAAERKEILISQEEIGANVEKNENESCADRDTPQHMEDQSRKDFEEEDVILQPEKNDSFQNVQPDEPKVLNECLSVQENNKANKLNQVPILRTRFQKPKPNIGRGTGRREISSKEEVLEKILVSGEMAAALRETVRLDTSPKEMVPAEINTKEMQSDLKETGRRAISPREKILDVIDDTIEMETGLKAMGREICLREKTPEVIDATEEIDKDLEEAGRREISPQKNGPEEVKPLGEVETDLKATGNESSPREKTPEVTDATEEIDKNLEETGRRKISPRENGPEEVKPVDEMETDLNATGRESSPREKTPEVIDATEEIDLEETEREVSPQENGLEEVKPLGEMETDLKATGRDSFPRGKTPEVIDAIEEIEIDLEETEREISPQENGLEEVKPLGEMQTDLKATGREISPREKTPEVIDATEEIDKDLEETGRREISPEENGPEEVKPVDEMETDLKTTGREGSSREKTREVIDAAEVIETDLEETEREISPQENGPEEVKPVGKMETDLKEIREEISQREKVLAEFSAIREKEIDLKETGKRDIPMMEKVSGKMAVVEEMEADLKETGKENFRERGSEEICVTEEKVAELKQTGKTDISPRENELEETSTSRQTDTHLMQSGSNDFSAMPSLDIQNISSEVLSMMHTPVEEKRNSEKEVSSHFSHFKISSQTHESDKTEVQGIQSPDVPEQFSDINLSKSLPQEQKPLEIKPAPFVRSRFKRPKPNLARAALKRETTESEKYIYEKKSETKKMETIVMQENNEQTDTLPSQHDEASLMISREKDTLGHRNEEAVILPCTQTERNLSPSNSCEPKEESQSAPVQKNDSVVSVGTNNVNTFQQEMKESVIQTARQVRGRLQRPRPNIRKTGQRQIVDKGEAKGIIKEGRTILPKDETEKKVLTVSNSQIETEIEVPSSAVPEHRMYENQSQVVLVENLHVNKTNETIRHENKPYVPSSAQMTRRKFQKAKPNLGRAHSKKEEPVLEKVTTDQSKEGKPEDHLLQKGASNTQLLLKEKAELLTSLEVSARKDCVGSKESALAKIDAELEEVGPSRRVGEETVGDNSPSSVVEEQYLNKLTSCPQPLNETSYSKIALDGKTTISSTSEYERNRGERRSHKKFKPNVTRGRGSKRVRGKTSKKEPRASKAMLVTLRASQEEDDDADDFESDYEEESYHLAPEEVNKAPVFVPVGLRSPEPVSAQIEETMEELEITVNVPDVGCIAVVEHELPNTDVTTEEMKQEENLSVPFEMTTSEHIQDEPGTNDGSTEAAITLLTMGDLVLQSEISSEQGDVGVCILPHVHSKDKSHIPSSLDNVNHKIVHECQELSSPVITTSPASFEENKIVLEEQSSREEISLMEKVKENATPTRNTISKVTSNLRIRSRLAKPKPNLEKTLGTNRLDDYQEVSSLCVTKGAEMETQRETEKNASKATELENKNLGPVTTAENKDQSKLACVHGIKGTSISSEVNLTERNENQEESSQEVHMLSVAPVASSETGPCTLGLDRGLGENSVEEPQIKDSKGDSVLTLPVPEVKECTV

SEQ ID NO: 809467 - protein, 762 aa, Homo sapiens
MLRGRFQRPKPNLSRAGKKSVLSQGKTESESKNSHSKTSVEKNHVEKDKMNTLDILRMETTERENPEAETVSVLGEKNCLQEGSQLKALRPVQVRGRLQKPKPNAGKAAERKEILISQEEIGANVEKNENESCADRDTPQHMEDQSRKDFEEEDVILQPEKNDSFQNVQPDEPKVLNECLSVQENNKANKLNQVPILRTRFQKPKPNIGRGTGRREISSKEEVLEKILVSGEMAAALRETVRLDTSPKEMVPAEINTKEMQSDLKETGRRAISPREKILDVIDDTIEMETGLKAMGREICLREKTPEVIDATEEIDKDLEEAGRREISPQKNGPEEVKPLGEVETDLKATGNESSPREKTPEVTDATEEIDKNLEETGRRKISPRENGPEEVKPVDEMETDLNATGRESSPREKTPEVIDATEEIDLEETEREVSPQENGLEEVKPLGEMETDLKATGRDSFPRGKTPEVIDAIEEIEIDLEETEREISPQENGLEEVKPLGEMQTDLKATGREISPREKTPEVIDATEEIDKDLEETGRREISPEENGPEEVKPVDEMETDLKTTGREGSSREKTREVIDAAEVIETDLEETEREISPQENGPEEVKPVGKMETDLKEIREEISQREKVLAEFSAIREKEIDLKETGKRDIPMMEKVSGKMAVVEEMEADLKETGKENFRERGSEEICVTEEKVAELKQTGKTDISPRENELEETSTSRQTDTHLMQSGSNDFSAMPSLDIQVCIFLSFKSFLNAFFRGNK

SEQ ID NO: 809468 - protein, 2624 aa, Homo sapiens
MFRRARLSVKPNVRPGVGARGSTASNPQRGRESPRPPEPATDSASKPAEPTDVPTVDFGGAEPQEKAPRSSTEKTGGDNDVEESSRSSSTVSQRRKRISSTSSLVKSSVSVPSESHPLSTINQEAPQPTATSTKEKQPCSDRYRIYKAQKLREMLKEELRKEKKQWKNKYAINESQRPPDRSKMTMRDFIYYLPDNNPMTSSLEQEKKTEKPSTPVQTREQEGKSTPNAEDNEMEEETDDGPLLVPRVKVAEDGSIILDEESLTVEVLRTKGPCVVEENDPIFERGSTTTYSSFRKNYYSKPWSNKETDMFFLAISMVGTDFSMIGQLFPHRARIEIKNKFKREEKTNGWRIDKAFQEKRPFDFDFFAHLLQKVLAEEEKRKQKSVKNHSLKEKKSTKPRKNVKVKKVACEGVNNDPDESMSSRISDTERSQKDAQTVEEESLTLSREDAEQVALEVDLNQKKRRRKKQDGANELGVNNLLENATVQAGPSKGEKHKNKCQAIRPELKEGECSKEQMLSCTQNIDGIVGFASTEKVEKRTDPILSLSNQQDATSVATESSESSTSDLPSFEVGIRALCEVNNAEGSCIEERNVDLKNNSLEIDQTENVKPMLRGRFQRPKPNLSRAGKKSVLSQGKTESESKNSHSKTSVEKNHVEKDKMNTLDILRMETTERENPEAETVSVLGEKNCLQEGSQLKALRPVQVRGRLQKPKPNAGKAAERKEILISQEEIGANVEKNENESCADRDTPQHMEDQSRKDFEEEDVILQPEKNDSFQNVQPDEPKVLNECLSVQENNKANKLNQVPILRTRFQKPKPNIGRGTGRREISSKEEVLEKILVSGEMAAALRETVRLDTSPKEMVPAEINTKEMQSDLKETGRRAISPREKILDVIDDTIEMETGLKAMGREICLREKTPEVIDATEEIDKDLEEAGRREISPQKNGPEEVKPLGEVETDLKATGNESSPREKTPEVTDATEEIDKNLEETGRRKISPRENGPEEVKPVDEMETDLNATGRESSPREKTPEVIDATEEIDLEETEREVSPQENGLEEVKPLGEMETDLKATGRDSFPRGKTPEVIDAIEEIEIDLEETEREISPQENGLEEVKPLGEMQTDLKATGREISPREKTPEVIDATEEIDKDLEETGRREISPEENGPEEVKPVDEMETDLKTTGREGSSREKTREVIDAAEVIETDLEETEREISPQENGPEEVKPVGKMETDLKEIREEISQREKVLAEFSAIREKEIDLKETGKRDIPMMEKVSGKMAVVEEMEADLKETGKENFRERGSEEICVTEEKVAELKQTGKTDISPRENELEETSTSRQTDTHLMQSGSNDFSAMPSLDIQNISSEVLSMMHTPVEEKRNSEKEVSSHFSHFKISSQTHESDKTEVQGIQSPDVPEQFSDINLSKSLPQEQKPLEIKPAPFVRSRFKRPKPNLARAALKRETTESEKYIYEKKSETKKMETIVMQENNEQTDTLPSQHDEASLMISREKDTLGHRNEEAVILPCTQTERNLSPSNSCEPKEESQSAPVQKNDSVVSVGTNNVNTFQQEMKESVIQTARQVRGRLQRPRPNIRKTGQRQIVDKGEAKGIIKEGRTILPKDETEKKVLTVSNSQIETEIEVPSSAVPEHRMYENQSQVVLVENLHVNKTNETIRHENKPYVPSSAQMTRRKFQKAKPNLGRAHSKKEEPVLEKVTTDQSKEGKPEDHLLQKGASNTQLLLKEKAELLTSLEVSARKDCVGSKESALAKIDAELEEVGPSRRVGEETVGDNSPSSVVEEQYLNKLTSCPQPLNETSYSKIALDGKTTISSTSEYERNRGERRSHKKFKPNVTRGRGSKRVRGKTSKKEPRASKAMLVTLRASQEEDDDADDFESDYEEESYHLAPEEVNKAPVFVPVGLRSPEPVSAQIEETMEELEITVNVPDVGCIAVVEHELPNTDVTTEEMKQEENLSVPFEMTTSEHIQDEPGTNDGSTEAAITLLTMGDLVLQSEISSEQGDVGVCILPHVHSKDKSHIPSSLDNVNHKIVHECQELSSPVITTSPASFEENKIVLEEQSSREEISLMEKVKENATPTRNTISKVTSNLRIRSRLAKPKPNLEKTLGTNRLDDYQEVSSLCVTKGAEMETQRETEKNASKATELENKNLGPVTTAENKDQSKLACVHGIKGTSISSEVNLTERNENQEESSQEVHMLSVAPVASSETGPCTLGLDRGLGENSVEEPQIKDSKGDSVLTLPVPEYTPTSIPEVQQENIINPQDLTVNLVANVPQDGEDEQAFILTLVEIPANAVEEFTDATAQFMPNPLLPAPILVKSVNTEERGDMSICLPATSVGQDAMGLSISGRDNSKKPPDNLDLVSRKRFQCRLDKNDHIPPAKKRSLTLRDDCQEYTTEVHSKELTNVFEETGESHKGQDIFLTSGSTLTTPEPQRQQVEAAFQSRGSRSPDACMDKNVPQLPQDEMIVSDKEERTDAAPKSQQMDSRTSSSKASLSRPGRRPLGFLSLICSKNSLESDEPMQVHSKKRLKPLIPGLRKKLKRSNPFNESQEKNRESSDLLPSPSVITTQSENISSSATQVSCDQPLLKEGYKSAQKRAPQGEATTVSEYFFNDIFIEVDETE

SEQ ID NO: 809469 - protein, 1372 aa, Homo sapiens
MFRRARLSVKPNVRPGVGARGSTASNPQRGRESPRPPEPATDSASKPAEPTDVPTVDFGGAEPQEKAPRSSTEKTGGDNDVEESSRSSSTVSQRRKRISSTSSLVKSSVSVPSESHPLSTINQEAPQPTATSTKEKQPCSDRYRIYKAQKLREMLKEELRKEKKQWKNKYAINESQRPPDRSKMTMRDFIYYLPDNNPMTSSLEQEKKTEKPSTPVQTREQEGKSTPNAEDNEMEEETDDGPLLVPRVKVAEDGSIILDEESLTVEVLRTKGPCVVEENDPIFERGSTTTYSSFRKNYYSKPWSNKETDMFFLAISMVGTDFSMIGQLFPHRARIEIKNKFKREEKTNGWRIDKAFQEKRPFDFDFFAHLLQKVLAEEEKRKQKSVKNHSLKEKKSTKPRKNVKVKKVACEGVNNDPDESMSSRISDTERSQKDAQTVEEESLTLSREDAEQVALEVDLNQKKRRRKKQDGANELGVNNLLENATVQAGPSKGEKHKNKCQAIRPELKEGECSKEQMLSCTQNIDGIVGFASTEKVEKRTDPILSLSNQQDATSVATESSESSTSDLPSFEVGIRALCEVNNAEGSCIEERNVDLKNNSLEIDQTENVKPMLRGRFQRPKPNLSRAGKKSVLSQGKTESESKNSHSKTSVEKNHVEKDKMNTLDILRMETTERENPEAETVSVLGEKNCLQEGSQLKALRPVQVRGRLQKPKPNAGKAAERKEILISQEEIGANVEKNENESCADRDTPQHMEDQSRKDFEEEDVILQPEKNDSFQNVQPDEPKVLNECLSVQENNKANKLNQVPILRTRFQKPKPNIGRGTGRREISSKEEVLEKILVSGEMAAALRETVRLDTSPKEMVPAEINTKEMQSDLKETGRRAISPREKILDVIDDTIEMETGLKAMGREICLREKTPEVIDATEEIDKDLEEAGRREISPQKNGPEEVKPLGEVETDLKATGNESSPREKTPEVTDATEEIDKNLEETGRRKISPRENGPEEVKPVDEMETDLNATGRESSPREKTPEVIDATEEIDLEETEREVSPQENGLEEVKPLGEMETDLKATGRDSFPRGKTPEVIDAIEEIEIDLEETEREISPQENGLEEVKPLGEMQTDLKATGREISPREKTPEVIDATEEIDKDLEETGRREISPEENGPEEVKPVDEMETDLKTTGREGSSREKTREVIDAAEVIETDLEETEREISPQENGPEEVKPVGKMETDLKEIREEISQREKVLAEFSAIREKEIDLKETGKRDIPMMEKVSGKMAVVEEMEADLKETGKENFRERGSEEICVTEEKVAELKQTGKTDISPRENELEETSTSRQTDTHLMQSGSNDFSAMPSLDIQVCIFLSFKSFLNAFFRGNK

SEQ ID NO: 809470 - protein, 2624 aa, Homo sapiens; identical to SEQ ID NO: 809468

SEQ ID NO: 809471 - protein, 2624 aa, Homo sapiens; identical to SEQ ID NO: 809468

SEQ ID NO: 809472 - protein, 2624 aa, Homo sapiens; identical to SEQ ID NO: 809468

SEQ ID NO: 809473 - protein, 633 aa, Homo sapiens
MGDLVLQSEISSEQGDVGVCILPHVHSKDKSHIPSSLDNVNHKIVHECQELSSPVITTSPASFEENKIVLEEQSSREEISLMEKVKENATPTRNTISKVTSNLRIRSRLAKPKPNLEKTLGTNRLDDYQEVSSLCVTKGAEMETQRETEKNASKATELENKNLGPVTTAENKDQSKLACVHGIKGTSISSEVNLTERNENQEESSQEVHMLSVAPVASSETGPCTLGLDRGLGENSVEEPQIKDSKGDSVLTLPVPEYTPTSIPEVQQENIINPQDLTVNLVANVPQDGEDEQAFILTLVEIPANAVEEFTDATAQFMPNPLLPAPILVKSVNTEERGDMSICLPATSVGQDAMGLSISGRDNSKKPPDNLDLVSRKRFQCRLDKNDHIPPAKKRSLTLRDDCQEYTTEVHSKELTNVFEETGESHKGQDIFLTSGSTLTTPEPQRQQVEAAFQSRGSRSPDACMDKNVPQLPQDEMIVSDKEERTDAAPKSQQMDSRTSSSKASLSRPGRRPLGFLSLICSKNSLESDEPMQVHSKKRLKPLIPGLRKKLKRSNPFNESQEKNRESSDLLPSPSVITTQSENISSSATQVSCDQPLLKEGYKSAQKRAPQGEATTVSEYFFNDIFIEVDETE

SEQ ID NO: 809474 - protein, 791 aa, Homo sapiens
MFRRARLSVKPNVRPGVGARGSTASNPQRGRESPRPPEPATDSASKPAEPTDVPTVDFGGAEPQEKAPRSSTEKTGGDNDVEESSRSSSTVSQRRKRISSTSSLVKSSVSVPSESHPLSTINQEAPQPTATSTKEKQPCSDRYRIYKAQKLREMLKEELRKEKKQWKNKYAINESQRPPDRSKMTMRDFIYYLPDNNPMTSSLEQEKKTEKPSTPVQTREQEGKSTPNAEDNEMEEETDDGPLLVPRVKVAEDGSIILDEESLTVEVLRTKGPCVVEENDPIFERGSTTTYSSFRKNYYSKPWSNKETDMFFLAISMVGTDFSMIGQLFPHRARIEIKNKFKREEKTNGWRIDKAFQEKRPFDFDFFAHLLQKVLAEEEKRKQKSVKNHSLKEKKSTKPRKNVKVKKVACEGVNNDPDESMSSRISDTERSQKDAQTVEEESLTLSREDAEQVALEVDLNQKKRRRKKQDGANELGVNNLLENATVQAGPSKGEKHKNKCQAIRPELKEGECSKEQMLSCTQNIDGIVGFASTEKVEKRTDPILSLSNQQDATSVATESSESSTSDLPSFEVGIRALCEVNNAEGSCIEERNVDLKNNSLEIDQTENVKPMLRGRFQRPKPNLSRAGKKSVLSQGKTESESKNSHSKTSVEKNHVEKDKMNTLDILRMETTERENPEAETVSVLGEKNCLQEGSQLKALRPVQVRGRLQKPKPNAGKAAERKEILISQEEIGANVEKNENESCADRDTPQHMEDQSRKDFEEEDVILQPEKNDSFQNVQPDEPKVLNECLR

SEQ ID NO: 809475 - protein, 280 aa, Homo sapiens
MDATIAPHRIPPEMPQYGEENHIFELMQNMLEQLLIHQPEDPIPFMIQHLHRDNDNVPRIVILGPPASGKTTIAMWLCKHLNSSLLTLENLILNEFSYTATEARRLYLQRKTVPSALLVQLIQERLAEEDCIKQGWILDGIPETREQALRIQTLGITPRHVIVLSAPDTVLIERNLGKRIDPQTGEIYHTTFDWPPESEIQNRLMVPEDISELETAQKLLEYHRNIVRVIPSYPKILKVISADQPCVDVFYQALTYVQSNHRTNAPFTPRVLLLGPVGSG

SEQ ID NO: 809476 - protein, 76 aa, Homo sapiens
MDATIAPHRIPPEMPQYGEENHIFELMQVTGHPCPSRRWRRLGSLHCDVGCAAGTRSWGRVARPRSSPTRDVRFVC

SEQ ID NO: 809477 - protein, 88 aa, Homo sapiens
MDATIAPHRIPPEMPQYGEENHIFELMQNMLEQLLIHQPEDPIPFMIQHLHRDNDNAALKELTSAPVKLVLGTAEDRAQRCPVWRFRR

SEQ ID NO: 809478 - protein, 117 aa, Homo sapiens
MDATIAPHRIPPEMPQYGEENHIFELMQNMLEQLLIHQPEDPIPFMIQHLHRDNDNVPRIVILGPPASGKTTIAMWLCKHLNSSLLTLENLILNEFSYTATEARRLYLQRKAFPSGF

SEQ ID NO: 809479 - protein, 326 aa, Homo sapiens
MHRTTRIKITELNPHLMCVLCGGYFIDATTIIECLHSFCKTCIVRYLETSKYCPICDVQVHKTRPLLNIRSDKTLQDIVYKLVPGLFKNEMKRRRDFYAAHPSADAANGSNEDRGEVADEDKRIITDDEIISLSIEFFDQNRLDRKVNKDKEKSKEEVNDKRYLRCPAAMTVMHLRKFLRSKMDIPNTFQIDVMYEEEPLKDYYTLMDIAYIYTWRRNGPLPLKYRVRPTCKRMKISHQRDGLTNAGELESDSGSDKANSPAGGIPSTSSCLPSPSTPVQSPHPQFPHISSTMNGTSNSPSGNHQSSFANRPRKSSVNGSSATSSG

SEQ ID NO: 809480 - protein, 326 aa, Homo sapiens; identical to SEQ ID NO: 809479

SEQ ID NO: 809481 - protein, 326 aa, Homo sapiens; identical to SEQ ID NO: 809479

SEQ ID NO: 809482 - protein, 326 aa, Homo sapiens; identical to SEQ ID NO: 809479

SEQ ID NO: 809483 - protein, 368 aa, Homo sapiens
PDAGGSPLLRLQRLHASPPGGIPESAGRPGGRGRVRIFYQAEMHRTTRIKITELNPHLMCVLCGGYFIDATTIIECLHSFCKTCIVRYLETSKYCPICDVQVHKTRPLLNIRSDKTLQDIVYKLVPGLFKNEMKRRRDFYAAHPSADAANGSNEDRGEVADEDKRIITDDEIISLSIEFFDQNRLDRKVNKDKEKSKEEVNDKRYLRCPAAMTVMHLRKFLRSKMDIPNTFQIDVMYEEEPLKDYYTLMDIAYIYTWRRNGPLPLKYRVRPTCKRMKISHQRDGLTNAGELESDSGSDKANSPAGGIPSTSSCLPSPSTPVQSPHPQFPHISSTMNGTSNSPSGNHQSSFANRPRKSSVNGSSATSSG

SEQ ID NO: 809484 - protein, 326 aa, Homo sapiens; identical to SEQ ID NO: 809479

SEQ ID NO: 809485 - protein, 265 aa, Homo sapiens
MHRTTRIKITELNPHLMCVLCGGYFIDATTIIECLHSFCKTCIVRYLETSKYCPICDVQVHKTRPLLNIRSDKTLQDIVYKLVPGLFKNEMKRRRDFYAAHPSADAANGSNEDRGEVADEDKRIITDDEIISLSIEFFDQNRLDRKVNKDKEKSKEEVNDKRYLRCPAAMTVMHLRKFLRSKMDIPNTFQIDVMYEEEPLKDYYTLMDIAYIYTWRRNGPLPLKYRVRPTCKRMKISHQRDGLTNAGELESDSGSDKANSPAGVL

SEQ ID NO: 809486 - protein, 323 aa, Homo sapiens [sequence omitted]

SEQ ID NO: 809487 - protein, 142 aa, Homo sapiens
MHRTTRIKITELNPHLMCVLCGGYFIDATTIIECLHSFCKTCIVRYLETSKYCPICDVQVHKTRPLLNIRSDKTLQDIVYKLVPGLFKNEMKRRRDFYAAHPSADAANGSNEDRGEVADEDKRIITDDEIISLSIEFFDQNR

SEQ ID NO: 809488 - protein, 249 aa, Homo sapiens
MPNVYIFFPHSDEMKRRRDFYAAHPSADAANGSNEDRGEVADEDKRIITDDEIISLSIEFFDQNRLDRKVNKDKEKSKEEVNDKRYLRCPAAMTVMHLRKFLRSKMDIPNTFQIDVMYEEEPLKDYYTLMDIAYIYTWRRNGPLPLKYRVRPTCKRMKISHQRDGLTNAGELESDSGSDKANSPAGGIPSTSSCLPSPSTPVQSPHPQFPHISSTMNGTSNSPSGNHQSSFANRPRKSSVNGSSATSSG

SEQ ID NO: 809489 - protein, 222 aa, Homo sapiens
MAANGSNEDRGEVADEDKRIITDDEIISLSIEFFDQNRLDRKVNKDKEKSKEEVNDKRYLRCPAAMTVMHLRKFLRSKMDIPNTFQIDVMYEEEPLKDYYTLMDIAYIYTWRRNGPLPLKYRVRPTCKRMKISHQRDGLTNAGELESDSGSDKANSPAGGIPSTSSCLPSPSTPVQSPHPQFPHISSTMNGTSNSPSGNHQSSFANRPRKSSVNGSSATSSG

SEQ ID NO: 809490 - protein, 142 aa, Homo sapiens; identical to SEQ ID NO: 809487

SEQ ID NO: 809491 - protein, 926 aa, Homo sapiens
MPVRKQDTQRALHLLEEYRSKLSQTEDRQLRSSIERVINIFQSNLFQALIDIQEFYEVTLLDNPKCIDRSKPSEPIQPVNTWEISSLPSSTVTSETLPSSLSPSVEKYRYQDEDTPPQEHISPQITNEVIGPELVHVSEKNLSEIENVHGFVSHSHISPIKPTEAVLPSPPTVPVIPVLPVPAENTVILPTIPQANPPPVLVNTDSLETPTYVNGTDADYEYEEITLERGNSGLGFSIAGGTDNPHIGDDSSIFITKIITGGAAAQDGRLRVNDCILRVNEVDVRDVTHSKAVEALKEAGSIVRLYVKRRKPVSEKIMEIKLIKGPKGLGFSIAGGVGNQHIPGDNSIYVTKIIEGGAAHKDGKLQIGDKLLAVNNVCLEEVTHEEAVTALKNTSDFVYLKVAKPTSMYMNDGYAPPDITNSSSQPVDNHVSPSSFLGQTPASPARYSPVSKAVLGDDEITREPRKVVLHRGSTGLGFNIVGGEDGEGIFISFILAGGPADLSGELRKGDRIISVNSVDLRAASHEQAAAALKNAGQAVTIVAQYRPEEYSRFEAKIHDLREQMMNSSISSGSGSLRTSQKRSLYVRALFDYDKTKDSGLPSQGLNFKFGDILHVINASDDEWWQARQVTPDGESDEVGVIPSKRRVEKKERARLKTVKFNSKTRDKGQSFNDKRKKNLFSRKFPFYKNKDQSEQETSDADQHVTSNASDSESSYRGQEEYVLSYEPVNQQEVNYTRPVIILGPMKDRINDDLISEFPDKFGSCVPHTTRPKRDYEVDGRDYHFVTSREQMEKDIQEHKFIEAGQYNNHLYGTSVQSVREVAGKGKHCILDVSGNAIKRLQIAQLYPISIFIKPKSMENIMEMNKRLTEEQARKTFERAMKLEQEFTEHFTAIVQGDTLEDIYNQVKQIIEEQSGSYIWVPAKEKL

SEQ ID NO: 809492 - protein, 904 aa, Homo sapiens
MPVRKQDTQRALHLLEEYRSKLSQTEDRQLRSSIERVINIFQSNLFQALIDIQEFYEVTLLDNPKCIDRSKPSEPIQPVNTWEISSLPSSTVTSETLPSSLSPSVEKYRYQDEDTPPQEHISPQITNEVIGPELVHVSEKNLSEIENVHGFVSHSHISPIKPTEAVLPSPPTVPVIPVLPVPAENTVILPTIPQANPPPVLVNTDSLETPTYVNGTDADYEYEEITLERGNSGLGFSIAGGTDNPHIGDDSSIFITKIITGGAAAQDGRLRVNDCILRVNEVDVRDVTHSKAVEALKEAGSIVRLYVKRRKPVSEKIMEIKLIKGPKGLGFSIAGGVGNQHIPGDNSIYVTKIIEGGAAHKDGKLQIGDKLLAVNNVCLEEVTHEEAVTALKNTSDFVYLKVAKPTSMYMNDGYAPPDITNSSSQPVDNHVSPSSFLGQTPASPARYSPVSKAVLGDDEITREPRKVVLHRGSTGLGFNIVGGEDGEGIFISFILAGGPADLSGELRKGDRIISVNSVDLRAASHEQAAAALKNAGQAVTIVAQYRPEEYSRFEAKIHDLREQMMNSSISSGSGSLRTSQKRSLYVRALFDYDKTKDSGLPSQGLNFKFGDILHVINASDDEWWQARQVTPDGESDEVGVIPSKRRVEKKERARLKTVKFNSKTRDKGQSFNDKRKKNLKHVTSNASDSESSYRGQEEYVLSYEPVNQQEVNYTRPVIILGPMKDRINDDLISEFPDKFGSCVPHTTRPKRDYEVDGRDYHFVTSREQMEKDIQEHKFIEAGQYNNHLYGTSVQSVREVAGKGKHCILDVSGNAIKRLQIAQLYPISIFIKPKSMENIMEMNKRLTEEQARKTFERAMKLEQEFTEHFTAIVQGDTLEDIYNQVKQIIEEQSGSYIWVPAKEKL

SEQ ID NO: 809493 - protein, 108 aa, Homo sapiens
MPVRKQDTQRALHLLEEYRSKLSQTEDRQLRSSIERVINIFQSNLFQALIDIQEFYEVTLLDNPKCIDRSKPSEPIQPVNTWEISSLPSSTVTSETLPSSLSPSVEVR

SEQ ID NO: 809494 - protein, 926 aa, Homo sapiens; identical to SEQ ID NO: 809491

SEQ ID NO: 809495 - protein, 529 aa, Homo sapiens
MPVRKQDTQRALHLLEEYRSKLSQTEDRQLRSSIERVINIFQSNLFQALIDIQEFYEVTLLDNPKCIDRSKPSEPIQPVNTWEISSLPSSTVTSETLPSSLSPSVEKYRYQDEDTPPQEHISPQITNEVIGPELVHVSEKNLSEIENVHGFVSHSHISPIKPTEAVLPSPPTVPVIPVLPVPAENTVILPTIPQANPPPVLVNTDSLETPTYVNGTDADYEYEEITLERGNSGLGFSIAGGTDNPHIGDDSSIFITKIITGGAAAQDGRLRVNDCILRVNEVDVRDVTHSKAVEALKEAGSIVRLYVKRRKPVSEKIMEIKLIKGPKGLGFSIAGGVGNQHIPGDNSIYVTKIIEGGAAHKDGKLQIGDKLLAVNNVCLEEVTHEEAVTALKNTSDFVYLKVAKPTSMYMNDGYAPPDITNSSSQPVDNHVSPSSFLGQTPASPARYSPVSKAVLGDDEITREPRKVVLHRGSTGLGFNIVGGEDGEGIFISFILAGGPADLSGELRKGDRIISGKQCLPRELEDTLDS

SEQ ID NO: 809496 - protein, 471 aa, Homo sapiens
MPVRKQDTQRALHLLEEYRSKLSQTEDRQLRSSIERVINIFQSNLFQALIDIQEFYEVTLLDNPKCIDRSKPSEPIQPVNTWEISSLPSSTVTSETLPSSLSPSVEKYRYQDEDTPPQEHISPQITNEVIGPELVHVSEKNLSEIENVHGFVSHSHISPIKPTEAVLPSPPTVPVIPVLPVPAENTVILPTIPQANPPPVLVNTDSLETPTYVNGTDADYEYEEITLERGNSGLGFSIAGGTDNPHIGDDSSIFITKIITGGAAAQDGRLRVNDCILRVNEVDVRDVTHSKAVEALKEAGSIVRLYVKRRKPVSEKIMEIKLIKGPKGLGFSIAGGVGNQHIPGDNSIYVTKIIEGGAAHKDGKLQIGDKLLAVNNVCLEEVTHEEAVTALKNTSDFVYLKVAKPTSMYMNDGYAPPDITNYGVSLLLPRLECSGVISDHHNLCLPDSSHSLASVAGITGMRHHALLILYF

SEQ ID NO: 809497 - protein, 479 aa, Homo sapiens
MPVRKQDTQRALHLLEEYRSKLSQTEDRQLRSSIERVINIFQSNLFQALIDIQEFYEVTLLDNPKCIDRSKPSEPIQPVNTWEISSLPSSTVTSETLPSSLSPSVEKYRYQDEDTPPQEHISPQITNEVIGPELVHVSEKNLSEIENVHGFVSHSHISPIKPTEAVLPSPPTVPVIPVLPVPAENTVILPTIPQANPPPVLVNTDSLETPTYVNGTDADYEYEEITLERGNSGLGFSIAGGTDNPHIGDDSSIFITKIITGGAAAQDGRLRVNDCILRVNEVDVRDVTHSKAVEALKEAGSIVRLYVKRRKPVSEKIMEIKLIKGPKGLGFSIAGGVGNQHIPGDNSIYVTKIIEGGAAHKDGKLQIGDKLLAVNNVCLEEVTHEEAVTALKNTSDFVYLKVAKPTSMYMNDGYAPPDITNSSSQPVDNHVSPSSFLGQTPASPARYSPVSKAVLGDDEITRRRWRRNIYFLYLSRRTC

SEQ ID NO: 809498 - protein, 407 aa, Homo sapiens
MPVRKQDTQRALHLLEEYRSKLSQTEDRQLRSSIERVINIFQSNLFQALIDIQEFYEVTLLDNPKCIDRSKPSEPIQPVNTWEISSLPSSTVTSETLPSSLSPSVEKYRYQDEDTPPQEHISPQITNEVIGPELVHVSEKNLSEIENVHGFVSHSHISPIKPTEAVLPSPPTVPVIPVLPVPAENTVILPTIPQANPPPVLVNTDSLETPTYVNGTDADYEYEEITLERGNSGLGFSIAGGTDNPHIGDDSSIFITKIITGGAAAQDGRLRVNDCILRVNEVDVRDVTHSKAVEALKEAGSIVRLYVKRRKPVSEKIMEIKLIKGPKGLGFSIAGGVGNQHIPGDNSIYVTKIIEGGAAHKDGKLQIGDKLLAVSIRNLLSFKSFCSLFIFLIDTGISPYQKGLNDV

SEQ ID NO: 809499 - protein, 893 aa, Homo sapiens
MPVRKQDTQRALHLLEEYRSKLSQTEDRQLRSSIERVINIFQSNLFQALIDIQEFYEVTLLDNPKCIDRSKPSEPIQPVNTWEISSLPSSTVTSETLPSSLSPSVEKYRYQDEDTPPQEHISPQITNEVIGPELVHVSEKNLSEIENVHGFVSHSHISPIKANPPPVLVNTDSLETPTYVNGTDADYEYEEITLERGNSGLGFSIAGGTDNPHIGDDSSIFITKIITGGAAAQDGRLRVNDCILRVNEVDVRDVTHSKAVEALKEAGSIVRLYVKRRKPVSEKIMEIKLIKGPKGLGFSIAGGVGNQHIPGDNSIYVTKIIEGGAAHKDGKLQIGDKLLAVNNVCLEEVTHEEAVTALKNTSDFVYLKVAKPTSMYMNDGYAPPDITNSSSQPVDNHVSPSSFLGQTPASPARYSPVSKAVLGDDEITREPRKVVLHRGSTGLGFNIVGGEDGEGIFISFILAGGPADLSGELRKGDRIISVNSVDLRAASHEQAAAALKNAGQAVTIVAQYRPEEYSRFEAKIHDLREQMMNSSISSGSGSLRTSQKRSLYVRALFDYDKTKDSGLPSQGLNFKFGDILHVINASDDEWWQARQVTPDGESDEVGVIPSKRRVEKKERARLKTVKFNSKTRDKGQSFNDKRKKNLFSRKFPFYKNKDQSEQETSDADQHVTSNASDSESSYRGQEEYVLSYEPVNQQEVNYTRPVIILGPMKDRINDDLISEFPDKFGSCVPHTTRPKRDYEVDGRDYHFVTSREQMEKDIQEHKFIEAGQYNNHLYGTSVQSVREVAGKGKHCILDVSGNAIKRLQIAQLYPISIFIKPKSMENIMEMNKRLTEEQARKTFERAMKLEQEFTEHFTAIVQGDTLEDIYNQVKQIIEEQSGSYIWVPAKEKL

SEQ ID NO: 809500 - protein, 926 aa, Homo sapiens; identical to SEQ ID NO: 809491

SEQ ID NO: 809501 - protein, 926 aa, Homo sapiens; identical to SEQ ID NO: 809491

SEQ ID NO: 809502 - protein, 893 aa, Homo sapiens; identical to SEQ ID NO: 809499

SEQ ID NO: 809503 - protein, 926 aa, Homo sapiens; identical to SEQ ID NO: 809491

SEQ ID NO: 809504 - protein, 926 aa, Homo sapiens; identical to SEQ ID NO: 809491

SEQ ID NO: 809505 - protein, 932 aa, Homo sapiens
RSLDPPHVGRKQDTQRALHLLEEYRSKLSQTEDRQLRSSIERVINIFQSNLFQALIDIQEFYEVTLLDNPKCIDRSKPSEPIQPVNTWEISSLPSSTVTSETLPSSLSPSVEKYRYQDEDTPPQEHISPQITNEVIGPELVHVSEKNLSEIENVHGFVSHSHISPIKPTEAVLPSPPTVPVIPVLPVPAENTVILPTIPQANPPPVLVNTDSLETPTYVNGTDADYEYEEITLERGNSGLGFSIAGGTDNPHIGDDSSIFITKIITGGAAAQDGRLRVNDCILRVNEVDVRDVTHSKAVEALKEAGSIVRLYVKRRKPVSEKIMEIKLIKGPKGLGFSIAGGVGNQHIPGDNSIYVTKIIEGGAAHKDGKLQIGDKLLAVNNVCLEEVTHEEAVTALKNTSDFVYLKVAKPTSMYMNDGYAPPDITNSSSQPVDNHVSPSSFLGQTPASPARYSPVSKAVLGDDEITREPRKVVLHRGSTGLGFNIVGGEDGEGIFISFILAGGPADLSGELRKGDRIISVNSVDLRAASHEQAAAALKNAGQAVTIVAQYRPEEYSRFEAKIHDLREQMMNSSISSGSGSLRTSQKRSLYVRALFDYDKTKDSGLPSQGLNFKFGDILHVINASDDEWWQARQVTPDGESDEVGVIPSKRRVEKKERARLKTVKFNSKTRDKGQSFNDKRKKNLFSRKFPFYKNKDQSEQETSDADQHVTSNASDSESSYRGQEEYVLSYEPVNQQEVNYTRPVIILGPMKDRINDDLISEFPDKFGSCVPHTTRPKRDYEVDGRDYHFVTSREQMEKDIQEHKFIEAGQYNNHLYGTSVQSVREVAGKGKHCILDVSGNAIKRLQIAQLYPISIFIKPKSMENIMEMNKRLTEEQARKTFERAMKLEQEFTEHFTAIVQGDTLEDIYNQVKQIIEEQSGSYIWVPAKEKL

SEQ ID NO: 809506 - protein, 908 aa, Homo sapiens
MPVRKQDTQRALHLLEEYRSKLSQTEDRQLRSSIERVINIFQSNLFQALIDIQEFYEVTLLDNPEISSLPSSTVTSETLPSSLSPSVEKYRYQDEDTPPQEHISPQITNEVIGPELVHVSEKNLSEIENVHGFVSHSHISPIKPTEAVLPSPPTVPVIPVLPVPAENTVILPTIPQANPPPVLVNTDSLETPTYVNGTDADYEYEEITLERGNSGLGFSIAGGTDNPHIGDDSSIFITKIITGGAAAQDGRLRVNDCILRVNEVDVRDVTHSKAVEALKEAGSIVRLYVKRRKPVSEKIMEIKLIKGPKGLGFSIAGGVGNQHIPGDNSIYVTKIIEGGAAHKDGKLQIGDKLLAVNNVCLEEVTHEEAVTALKNTSDFVYLKVAKPTSMYMNDGYAPPDITNSSSQPVDNHVSPSSFLGQTPASPARYSPVSKAVLGDDEITREPRKVVLHRGSTGLGFNIVGGEDGEGIFISFILAGGPADLSGELRKGDRIISVNSVDLRAASHEQAAAALKNAGQAVTIVAQYRPEEYSRFEAKIHDLREQMMNSSISSGSGSLRTSQKRSLYVRALFDYDKTKDSGLPSQGLNFKFGDILHVINASDDEWWQARQVTPDGESDEVGVIPSKRRVEKKERARLKTVKFNSKTRDKGQSFNDKRKKNLFSRKFPFYKNKDQSEQETSDADQHVTSNASDSESSYRGQEEYVLSYEPVNQQEVNYTRPVIILGPMKDRINDDLISEFPDKFGSCVPHTTRPKRDYEVDGRDYHFVTSREQMEKDIQEHKFIEAGQYNNHLYGTSVQSVREVAGKGKHCILDVSGNAIKRLQIAQLYPISIFIKPKSMENIMEMNKRLTEEQARKTFERAMKLEQEFTEHFTAIVQGDTLEDIYNQVKQIIEEQSGSYIWVPAKEKL

SEQ ID NO: 809507 - protein, 552 aa, Homo sapiens
SCASCPWRRRRRARGGGWEQLAPGRTLAATAPWPWLAARARCAEVAELAGPRRKRGEAGPRQEVALPGPSASGSGGGAPRAADSKLGRGPRAEAAAVAATLGVRWRRPRPGWVPTALGGAMDEAVGDLKQALPCVAESPTVHVEVHQRGSSTAKKEDINLSVRKLLNRHNIVFGDYTWTEFDEPFLTRNVQSVSIIDTELKVKDSQPIDLSACTVALHIFQLNEDGPSSENLEEETENIIAANHWVLPAAEFHGLWDSLVYDVEVKSHLLDYVMTTLLFSDKNVNSNLITWNRVVLLHGPPGTGKTSLCKALAQKLTIRLSSRYRYGQLIEINSHSLFSKWFSESGKLVTKMFQKIQDLIDDKDALVFVLIDEVESLTAARNACRAGTEPSDAIRVVNAVLTQIDQIKRHSNVVILTTSNITEKIDVAFVDRADIKQYIGPPSAAAIFKIYLSCLEELMKCQIIYPRQQLLTLRELEMIGFIENNVSKLSLLLNDISRKSEGLSGRVLRKLPFLAHALYVQAPTVTIEGFLQALSLAVDKQFEERKKLAAYI

SEQ ID NO: 809508 - protein, 475 aa, Homo sapiens
  misc_feature (3)..(3): Xaa can be any naturally occurring amino acid
REXRLRLGTSAGVGAEAAAVAATLGVRWRRPRPGWVPTALGGAMDEAVGDLKQALPCVAESPTVHVEVHQRGSSTAKKEDINLSVRKLLNRHNIVFGDYTWTEFDEPFLTRNVQSVSIIDTELKVKDSQPIDLSACTVALHIFQLNEDGPSSENLEEETENIIAANHWVLPAAEFHGLWDSLVYDVEVKSHLLDYVMTTLLFSDKNVNSNLITWNRVVLLHGPPGTGKTSLCKALAQKLTIRLSSRYRYGQLIEINSHSLFSKWFSESGKLVTKMFQKIQDLIDDKDALVFVLIDEVESLTAARNACRAGTEPSDAIRVVNAVLTQIDQIKRHSNVVILTTSNITEKIDVAFVDRADIKQYIGPPSAAAIFKIYLSCLEELMKCQIIYPRQQLLTLRELEMIGFIENNVSKLSLLLNDISRKSEGLSGRVLRKLPFLAHALYVQAPTVTIEGFLQALSLAVDKQFEERKKLAAYI

SEQ ID NO: 809509 - protein, 431 aa, Homo sapiens
VLLPGVGGTQRRGQTFTDPPYVHGGWIEVSTAKKEDINLSVRKLLNRHNIVFGDYTWTEFDEPFLTRNVQSVSIIDTELKVKDSQPIDLSACTVALHIFQLNEDGPSSENLEEETENIIAANHWVLPAAEFHGLWDSLVYDVEVKSHLLDYVMTTLLFSDKNVNSNLITWNRVVLLHGPPGTGKTSLCKALAQKLTIRLSSRYRYGQLIEINSHSLFSKWFSESGKLVTKMFQKIQDLIDDKDALVFVLIDEVESLTAARNACRAGTEPSDAIRVVNAVLTQIDQIKRHSNVVILTTSNITEKIDVAFVDRADIKQYIGPPSAAAIFKIYLSCLEELMKCQIIYPRQQLLTLRELEMIGFIENNVSKLSLLLNDISRKSEGLSGRVLRKLPFLAHALYVQAPTVTIEGFLQALSLAVDKQFEERKKLAAYI

SEQ ID NO: 809510 - protein, 279 aa, Homo sapiens
MTTLLFSDKNVNSNLITWNRVVLLHGPPGTGKTSLCKALAQKLTIRLSSRYRYGQLIEINSHSLFSKWFSESGKLVTKMFQKIQDLIDDKDALVFVLIDEVESLTAARNACRAGTEPSDAIRVVNAVLTQIDQIKRHSNVVILTTSNITEKIDVAFVDRADIKQYIGPPSAAAIFKIYLSCLEELMKCQIIYPRQQLLTLRELEMIGFIENNVSKLSLLLNDISRKSEGLSGRVLRKLPFLAHALYVQAPTVTIEGFLQALSLAVDKQFEERKKLAAYI

SEQ ID NO: 809511 - protein, 460 aa, Homo sapiens
  misc_feature (3)..(3): Xaa can be any naturally occurring amino acid
REXRLRLGTSAGVGAEAAAVAATLGVRWRRPRPGWVPTALGGAMDEAVGDLKQALPCVAESPTVHVEVHQRGSSTAKKEDINLSVRKLLNRHNIVFGDYTWTEFDEPFLTRNVQSVSIIDTELKVKDSQLNEDGPSSENLEEETENIIAANHWVLPAAEFHGLWDSLVYDVEVKSHLLDYVMTTLLFSDKNVNSNLITWNRVVLLHGPPGTGKTSLCKALAQKLTIRLSSRYRYGQLIEINSHSLFSKWFSESGKLVTKMFQKIQDLIDDKDALVFVLIDEVESLTAARNACRAGTEPSDAIRVVNAVLTQIDQIKRHSNVVILTTSNITEKIDVAFVDRADIKQYIGPPSAAAIFKIYLSCLEELMKCQIIYPRQQLLTLRELEMIGFIENNVSKLSLLLNDISRKSEGLSGRVLRKLPFLAHALYVQAPTVTIEGFLQALSLAVDKQFEERKKLAAYI

SEQ ID NO: 809512 - protein, 295 aa, Homo sapiens
SCASCPWRRRRRARGGGWEQLAPGRTLAATAPWPWLAARARCAEVAELAGPRRKRGEAGPRQEVALPGPSASGSGGGAPRAADSKLGRGPRAEAAAVAATLGVRWRRPRPGWVPTALGGAMDEAVGDLKQALPCVAESPTVHVEVHQRGSSTAKKEDINLSVRKLLNRHNIVFGDYTWTEFDEPFLTRNVQSVSIIDTELKVKDSQPIDLSACTVALHIFQLNEDGPSSENLEEETENIIAANHWVLPAAEFHGLWDSLVYDVEVKSHLLDYVMTTLLFSDKNVNSNLITPPPSP

SEQ ID NO: 809513 - protein, 552 aa, Homo sapiens; identical to SEQ ID NO: 809507

SEQ ID NO: 809514 - protein, 552 aa, Homo sapiens; identical to SEQ ID NO: 809507

SEQ ID NO: 809515 - protein, 81 aa, Homo sapiens
DTRSPVLNTYRYLNCERQSHEGHRLLFSEVSSILCCNTDVLCITVILSFSLFVKDNSDCLSPCEEPSKPVCSQPTPSGWDA

SEQ ID NO: 809516 - protein, 164 aa, Homo sapiens
RPRHPRQAPPLRAGSPAATTHGPVTSGVARRTSRPLARARAPLRPAVAEPAAGARPAQGSGSAPAQRPATPTHRPPPPPAGRRGDSQSWLRPGLGPAPAPAPGQPVLFRVRGAYAPGLSRACGSGQIPDIRVDPVKSFYLVSSYILDPPLSCIFQTTFPLEQLK

SEQ ID NO: 809517 - protein, 105 aa, Homo sapiens
QGRREPQAQGGAAPAEPAPPPQRGLSPRPQLLLGFFVHSGSTPFMHIPDHISTGAVEMREMGMGLTRTRGIFITDPLTEVSKSQEQGCAPQKHRAQWKISLLLFV

SEQ ID NO: 809518 - protein, 148 aa, Homo sapiens
RPRHPRQAPPLRAGSPAATTHGPVTSGVARRTSRPLARARAPLRPAVAEPAAGARPAQGSGSAPAQRPATPTHRPPPPPAGRRGDSQSWLRPGLGPAPAPAPGQPVLFRVRGAYAPGLSRACGSGQIPDIRVDPVKRSPTWAVDRAQG

SEQ ID NO: 809519 - protein, 223 aa, Homo sapiens
MPKKFQGENTKSAAARARRAEAKAAADAKKQKELEDAYWKDDDKHVMRKEQRKEEKEKRRLDQLERKKETQRLLEEEDSKLKGGKAPRVATSSKVTRAQIEDTLRRDHQLREAPDTAEKAKSHLEVPLEENVNRRVLEEGSVEARTIEDAIAVLSVAEEAADRHPERRMRAAFTAFEEAQLPRLKQENPNMRLSQLKQLLKKEWLRSPDNPMNQRAVPFNAPK

SEQ ID NO: 809520 - protein, 223 aa, Homo sapiens; identical to SEQ ID NO: 809519

SEQ ID NO: 809521 - protein, 223 aa, Homo sapiens; identical to SEQ ID NO: 809519

SEQ ID NO: 809522 - protein, 223 aa, Homo sapiens; identical to SEQ ID NO: 809519

SEQ ID NO: 809523 - protein, 223 aa, Homo sapiens; identical to SEQ ID NO: 809519

SEQ ID NO: 809524 - protein, 113 aa, Homo sapiens
MPKKFQGENTKSAAARARRAEAKAAADAKKQKELEDAYWKDDDKHVMRKEQRKEEKEKRRLDQLERKKETQRLLEQENPNMRLSQLKQLLKKEWLRSPDNPMNQRAVPFNAPK

SEQ ID NO: 809525 - protein, 106 aa, Homo sapiens
FGCGRMACCGAGGRRGRYCCDWHPHPADVDGTKVQKLRVTLALQPNMQDSSNPRNDGIALQILKRVLTKSWLTLTSPLQPSSSLSPKPCHGGLWHLSQPLSSPALP

SEQ ID NO: 809526 - protein, 106 aa, Homo sapiens; identical to SEQ ID NO: 809525

SEQ ID NO: 809527 - protein, 106 aa, Homo sapiens; identical to SEQ ID NO: 809525

SEQ ID NO: 809528 - protein, 106 aa, Homo sapiens; identical to SEQ ID NO: 809525

SEQ ID NO: 809529 - protein, 105 aa, Homo sapiens
FGCGRMACCGAGGRRGRYCCDWHPHPADVDGTKVQKLRVTLALQPNMQDSSNPRNDGIALQILKRVLTEKGKCYIVKVPKPFSLKPGTIVQSFFGTSRKEIQILL

SEQ ID NO: 809530 - protein, 117 aa, Homo sapiens
MKFQYKEDHPFEYRKKEGEKIRKKYPDRVPVIVEKAPKARVPDLDKRKYLVPSDLTVGQFYFLIRKRIHLRPEDALFFFVNNTIPPTSATMGQLYEDNHEEDYFLYVAYSDESVYGK

SEQ ID NO: 809531 - protein, 117 aa, Homo sapiens; identical to SEQ ID NO: 809530

SEQ ID NO: 809532 - protein, 120 aa, Homo sapiens
WTHNAWAGWADARGGDVTARRRHPAVFVLPALAKSRRYFSIWLSSTSRQAHPRSPPRTPPAHSAQRCCPRSGRFCSYSEHTLTSAEGAGQGQRRRRQAPRGDLGSPAVHHEVPVQGGPSL

SEQ ID NO: 809533 - protein, 97 aa, Homo sapiens
GSPQVEFWVKVIVEKAPKARVPDLDKRKYLVPSDLTVGQFYFLIRKRIHLRPEDALFFFVNNTIPPTSATMGQLYEDNHEEDYFLYVAYSDESVYGK

SEQ ID NO: 809534 - protein, 95 aa, Homo sapiens
NAGTLGCAVIVEKAPKARVPDLDKRKYLVPSDLTVGQFYFLIRKRIHLRPEDALFFFVNNTIPPTSATMGQLYEDNHEEDYFLYVAYSDESVYGK

SEQ ID NO: 809535 - protein, 117 aa, Homo sapiens; identical to SEQ ID NO: 809530

SEQ ID NO: 809536 - protein, 117 aa, Homo sapiens; identical to SEQ ID NO: 809530

SEQ ID NO: 809537 - protein, 117 aa, Homo sapiens; identical to SEQ ID NO: 809530

SEQ ID NO: 809538 - protein, 117 aa, Homo sapiens; identical to SEQ ID NO: 809530

SEQ ID NO: 809539 - protein, 120 aa, Homo sapiens; identical to SEQ ID NO: 809532

SEQ ID NO: 809540 - protein, 82 aa, Homo sapiens
KVQKLFSNFLALQGVRGAQDSPGLENKVTFSAQQPSCLIVLGSGACVGTASLLVLISDHLVPGRDKAGLRRFFSVLDTGLSS

SEQ ID NO: 809541 - protein, 117 aa, Homo sapiens; identical to SEQ ID NO: 809530

SEQ ID NO: 809542 - protein, 106 aa, Homo sapiens
RWEREPPPPPELTSGTEMQVIVEKAPKARVPDLDKRKYLVPSDLTVGQFYFLIRKRIHLRPEDALFFFVNNTIPPTSATMGQLYEDNHEEDYFLYVAYSDESVYGK

SEQ ID NO: 809543 - protein, 72 aa, Homo sapiens
WTHNAWAGWADARGGDVTARRRHPAVFVLPALAKSRRYFSIWLSSTSRQAHPRSPPRTPPAHSRKETEGEDI

SEQ ID NO: 809544 - protein, 117 aa, Homo sapiens; identical to SEQ ID NO: 809530

SEQ ID NO: 809545 - protein, 117 aa, Homo sapiens; identical to SEQ ID NO: 809530

SEQ ID NO: 809546 - protein, 146 aa, Homo sapiens
MKFQYKEDHPFEYRKKEGEKIRKKYPDRVPVIVEKAPKARVPDLDKRKYLVPSDLTVGQFYFLIRKRIHLRPEDALFFFVNNTIPPTSATMGQLYEVMVLVAQYWMPSSAVWHPLALVLDALITHLRSGAEGVIYPDPLTYGSVRL

SEQ ID NO: 809547 - protein, 78 aa, Homo sapiens
LGLYLAVSNKVGSNSLNKLSVSITYYANQGRALQKLQKGTARGQGHHVLHPHARHLTCSSERNPRNNTRSLSLQPDQF

SEQ ID NO: 809548 - protein, 115 aa, Homo sapiens
HPYRHFRSTGPKKKTFSVTGKHWSTLMKWLHDVINIPGSSFCKQLLLPGSLSVTRLSVSITYYANQGRALQKLQKGTARGQGHHVLHPHARHLTCSSERNPRNNTRSLSLQPDQF

SEQ ID NO: 809549 - protein, 112 aa, Homo sapiens
DIACHQMECTRPWLSKLQTAWSLPVGSGRPMTPEWLLPAPELQGRLGAGKNARSRALFQPLSSLNLGRLRPVKMLHKMFHMVSGARALCEMAREAISTTIPHILTFFCGENI

SEQ ID NO: 809550 - protein, 221 aa, Homo sapiens
MSTADALDDENTFKILVATDIHLGFMEKDAVRGNDTFVTLDEILRLAQENEVDFILLGGDLFHENKPSRKTLHTCLELLRKYCMGDRPVQFEILSDQSVNFGFSKFPWVNYQDGNLNISIPVFSIHGNHDDPTGADALCALDILSCAGFVNHFGRSMSVEKIDISPVLLQKGSTKIALYGLGSIPDERLYRMFVNKKVTMLRPKEDENSWFNLFVIHQNRV

SEQ ID NO: 809551 - protein, 680 aa, Homo sapiens
MSTADALDDENTFKILVATDIHLGFMEKDAVRGNDTFVTLDEILRLAQENEVDFILLGGDLFHENKPSRKTLHTCLELLRKYCMGDRPVQFEILSDQSVNFGFSKFPWVNYQDGNLNISIPVFSIHGNHDDPTGADALCALDILSCAGFVNHFGRSMSVEKIDISPVLLQKGSTKIALYGLGSIPDERLYRMFVNKKVTMLRPKEDENSWFNLFVIHQNRSKHGSTNFIPEQFLDDFIDLVIWGHEHECKIAPTKNEQQLFYISQPGSSVVTSLSPGEAVKKHVGLLRIKGRKMNMHKIPLHTVRQFFMEDIVLANHPDIFNPDNPKVTQAIQSFCLEKIEEMLENAERERLGNSHQPEKPLVRLRVDYSGGFEPFSVLRFSQKFVDRVANPKDIIHFFRHREQKEKTGEEINFGKLITKPSEGTTLRVEDLVKQYFQTAEKNVQLSLLTERGMGEAVQEFVDKEEKDAIEELVKYQLEKTQRFLKERHIDALEDKIDEEVRRFRETRQKNTNEEDDEVREAMTRARALRSQSEESASAFSADDLMSIDLAEQMANDSDDSISAATNKGRGRGRGRRGGRGQNSASRGGSQRGRAFKSTRQQPSRNVTTKNYSEVIEVDESDVEEDIFPTTSKTDQRWSSTSSSKIMSQSQVSKGVDFESSEDDDDDPFMNTSSLRRNRR

SEQ ID NO: 809552 - protein, 632 aa, Homo sapiens
MSTADALDDENTFKILVATDIHLGFMEKDAVRGNDTFVTLDEILRLAQENEVDFILLGGDLFHENKPSRKTLHTCLELLRKYCMGDRPVQFEILSDQSVNFGFSKFPWVNYQDGNLNISIPVFSIHGNHDDPTGADALCALDILSCAGFVNHFGRSMSVEKIDISPVLLQKGSTKIALYGLGSIPDERLYRMFVNKKVTMLRPKEDENSWFNLFVIHQNRSKHGSTNFIPEQFLDDFIDLVIWGHEHECKIAPTKNEQQLFYISQPGSSVVTSLSPGEAVKKHVGLLRIKGRKMNMHKIPLHTVRQFFMEDIVLANHPDIFNPDNPKVTQAIQSFCLEKIEEMLENAERERLGNSHQPEKPLVRLRVDYSGGFEPFSVLRFSQKFVDRVANPKDIIHFFRHREQKEKTGEEINFGKLITKPSEGTTLRVEDLVKQYFQTAEKNVQLSLLTERGMGEAVQEFVDKEEKDAIEELVKYQLEKTQRFLKERHIDALEDKIDEEVRRFRETRQKNTNEEDDEVREAMTRARALRSQSEESASAFSADDLMSIDLAEQMANDSDDSISAATNKGRGRGRGRRGGRGQNSASRGGSQRGRADTGLETSTRSRNSKTAVSASRNMSIIDGEYRLQVIIY

SEQ ID NO: 809553 - protein, 708 aa, Homo sapiens
MSTADALDDENTFKILVATDIHLGFMEKDAVRGNDTFVTLDEILRLAQENEVDFILLGGDLFHENKPSRKTLHTCLELLRKYCMGDRPVQFEILSDQSVNFGFSKFPWVNYQDGNLNISIPVFSIHGNHDDPTGADALCALDILSCAGFVNHFGRSMSVEKIDISPVLLQKGSTKIALYGLGSIPDERLYRMFVNKKVTMLRPKEDENSWFNLFVIHQNRSKHGSTNFIPEQFLDDFIDLVIWGHEHECKIAPTKNEQQLFYISQPGSSVVTSLSPGEAVKKHVGLLRIKGRKMNMHKIPLHTVRQFFMEDIVLANHPDIFNPDNPKVTQAIQSFCLEKIEEMLENAERERLGNSHQPEKPLVRLRVDYSGGFEPFSVLRFSQKFVDRVANPKDIIHFFRHREQKEKTGEEINFGKLITKPSEGTTLRVEDLVKQYFQTAEKNVQLSLLTERGMGEAVQEFVDKEEKDAIEELVKYQLEKTQRFLKERHIDALEDKIDEEVRRFRETRQKNTNEEDDEVREAMTRARALRSQSEESASAFSADDLMSIDLAEQMANDSDDSISAATNKGRGRGRGRRGGRGQNSASRGGSQRGRADTGLETSTRSRNSKTAVSASRNMSIIDAFKSTRQQPSRNVTTKNYSEVIEVDESDVEEDIFPTTSKTDQRWSSTSSSKIMSQSQVSKGVDFESSEDDDDDPFMNTSSLRRNRR

SEQ ID NO: 809554 - protein, 708 aa, Homo sapiens; identical to SEQ ID NO: 809553

SEQ ID NO: 809555 - protein, 1029 aa, Homo sapiens
SQVVEGLKVRGGGQLHRLHPAGRPGNLQGALFPPSLSPTGRLPRARGGEGQRTWARAMCLLSVQTGGEARSRPAGTAGAEARVLGPESRGILDPREALGRGTSGVGSRALDRRGREAALVPRASGSREGAPDPALRRRFPGSFKFESPGGGSAASGTGVAERRAPSGRSGAMEEGAPRQPGPSQWPPEDEKEVIRRAIQKELKIKEGVENLRRVATDRRHLGHVQQLLRSSNRRLEQLHGELRELHARILLPGPGPGPAEPVASGPRPWAEQLRARHLEALRRQLHVELKVKQGAENMTHTCASGTPKERKLLAAAQQMLRDSQLKVALLRMKISSLEASGSPEPGPELLAEELQHRLHVEAAVAEGAKNVVKLLSSRRTQDRKALAEAQAQLQESSQKLDLLRLALEQLLEQLPPAHPLRSRVTRELRAAVPGYPQPSGTPVKPTALTGTLQVRLLGCEQLLTAVPGRSPAAALASSPSEGWLRTKAKHQRGRGELASEVLAVLKVDNRVVGQTGWGQVAEQSWDQTFVIPLERARELEIGVHWRDWRQLCGVAFLRLEDFLDNACHQLSLSLVPQGLLFAQVTFCDPVIERRPRLQRQERIFSKRRGQDFLRASQMNLGMAAWGRLVMNLLPPCSSPSTISPPKGCPRTPTTLREASDPATPSNFLPKKTPLGEEMTPPPKPPRLYLPQEPTSEETPRTKRPHMEPRTRRGPSPPASPTRKPPRLQDFRCLAVLGRGHFGKPVLREADPGGCGLHRAPFPALPPCCFQTSSHACFVTEFVPGGDLMMQIHEDVFPEPQARFYVACVVLGLQFLHEKKIIYRDLKLDNLLLDAQGFLKIADFGLCKEGIGFGDRTSTFCGTPEFLAPEVLTQEAYTRAVDWWGLGVLLYEMLVGECPFPGDTEEEVFDCIVNMDAPYPGFLSVQGLEFIQKLLQKCPEKRLGAGEQDAEEIKVQPFFRTTNWQALLARTIQPPFVPTLCGPADLRYFEGEFTGLPPALTPPAPHSLLTARQQAAFRDFDFVSERFLEP

SEQ ID NO: 809556 - protein, 1086 aa, Homo sapiens
SQVVEGLKVRGGGQLHRLHPAGRPGNLQGALFPPSLSPTGRLPRARGGEGQRTWARAMCLLSVQTGGEARSRPAGTAGAEARVLGPESRGILDPREALGRGTSGVGSRALDRRGREAALVPRASGSREGAPDPALRRRFPGSFKFESPGGGSAASGTGVAERRAPSGRSGAMEEGAPRQPGPSQWPPEDEKEVIRRAIQKELKIKEGVENLRRVATDRRHLGHVQQLLRSSNRRLEQLHGELRELHARILLPGPGPGPAEPVASGPRPWAEQLRARHLEALRRQLHVELKVKQGAENMTHTCASGTPKERKLLAAAQQMLRDSQLKVALLRMKISSLEASGSPEPGPELLAEELQHRLHVEAAVAEGAKNVVKLLSSRRTQDRKALAEAQAQLQESSQKLDLLRLALEQLLEQLPPAHPLRSRVTRELRAAVPGYPQPSGTPVKPTALTGTLQVRLLGCEQLLTAVPGRSPAAALASSPSEGWLRTKAKHQRGRGELASEREGASGGAGDPCFRPALSPGSGPAGEVLAVLKVDNRVVGQTGWGQVAEQSWDQTFVIPLERARELEIGVHWRDWRQLCGVAFLRLEDFLDNACHQLSLSLVPQGLLFAQVTFCDPVIERRPRLQRQERIFSKRRGQDFLRASQMNLGMAAWGRLVMNLLPPCSSPSTISPPKGCPRTPTTLREASDPATPSNFLPKKTPLGEEMTPPPKPPRLYLPQEPTSEETPRTKRPHMEPRTRRGPSPPASPTRKPPRLQDFRCLAVLGRGHFGKVLLVQFKGTGKYYAIKALKKQEVLSRDEIESLYCEKRILEAVGCTGHPFLLSLLACFQTSSHACFVTEFVPGGDLMMQIHEDVFPEPQARFYVACVVLGLQFLHEKKIIYRDLKLDNLLLDAQGFLKIADFGLCKEGIGFGDRTSTFCGTPEFLAPEVLTQEAYTRAVDWWGLGVLLYEMLVGECPFPGDTEEEVFDCIVNMDAPYPGFLSVQGLEFIQKLLQKCPEKRLGAGEQDAEEIKVQPFFRTTNWQALLARTIQPPFVPTLCGPADLRYFEGEFTGLPPALTPPAPHSLLTARQQAAFRDFDFVSERFLEP

SEQ ID NO: 809557 - protein, 354 aa, Homo sapiens
MGQDWGPHHMSREDLICGGGKGSLVWPTWSTTSLWPQVLLVQFKGTGKYYAIKALKKQEVLSRDEIESLYCEKRILEAVGCTGHPFLLSLLACFQTSSHACFVTEFVPGGDLMMQIHEDVFPEPQARFYVACVVLGLQFLHEKKIIYRDLKLDNLLLDAQGFLKIADFGLCKEGIGFGDRTSTFCGTPEFLAPEVLTQEAYTRAVDWWGLGVLLYEMLVGECPFPGDTEEEVFDCIVNMDAPYPGFLSVQGLEFIQKLLQKCPEKRLGAGEQDAEEIKVQPFFRTTNWQALLARTIQPPFVPTLCGPADLRYFEGEFTGLPPALTPPAPHSLLTARQQAAFRDFDFVSERFLEP

SEQ ID NO: 809558 - protein, 660 aa, Homo sapiens
SQVVEGLKVRGGGQLHRLHPAGRPGNLQGALFPPSLSPTGRLPRARGGEGQRTWARAMCLLSVQTGGEARSRPAGTAGAEARVLGPESRGILDPREALGRGTSGVGSRALDRRGREAALVPRASGSREGAPDPALRRRFPGSFKFESPGGGSAASGTGVAERRAPSGRSGAMEEGAPRQPGPSQWPPEDEKEVIRRAIQKELKIKEGVENLRRVATDRRHLGHVQQLLRSSNRRLEQLHGELRELHARILLPGPGPGPAEPVASGPRPWAEQLRARHLEALRRQLHVELKVKQGAENMTHTCASGTPKERKLLAAAQQMLRDSQLKVALLRMKISSLEASGSPEPGPELLAEELQHRLHVEAAVAEGAKNVVKLLSSRRTQDRKALAEAQAQLQESSQKLDLLRLALEQLLEQLPPAHPLRSRVTRELRAAVPGYPQPSGTPVKPTALTGTLQVRLLGCEQLLTAVPGRSPAAALASSPSEGWLRTKAKHQRGRGELASEVLAVLKVDNRVVGQTGWGQVAEQSWDQTFVIPLERARELEIGVHWRDWRQLCGVAFLRLEDFLDNACHQLSLSLVPQGLLFAQVTFCDPVIERRPRLQRQERIFSKRRGRLPGLRLCVRAIPGTLRASPGTSVPFPHRLLEPLLVHPCALPGGPGLAGYF

SEQ ID NO: 809559 - protein, 592 aa, Homo sapiens
SQVVEGLKVRGGGQLHRLHPAGRPGNLQGALFPPSLSPTGRLPRARGGEGQRTWARAMCLLSVQTGGEARSRPAGTAGAEARVLGPESRGILDPREALGRGTSGVGSRALDRRGREAALVPRASGSREGAPDPALRRRFPGSFKFESPGGGSAASGTGVAERRAPSGRSGAMEEGAPRQPGPSQWPPEDEKEVIRRAIQKELKIKEGVENLRRVATDRRHLGHVQQLLRSSNRRLEQLHGELRELHARILLPGPGPGPAEPVASGPRPWAEQLRARHLEALRRQLHVELKVKQGAENMTHTCASGTPKERKLLAAAQQMLRDSQLKVALLRMKISSLEASGSPEPGPELLAEELQHRLHVEAAVAEGAKNVVKLLSSRRTQDRKALAEAQAQLQESSQKLDLLRLALEQLLEQLPPAHPLRSRVTRELRAAVPGYPQPSGTPVKPTALTGTLQVRLLGCEQLLTAVPGRSPAAALASSPSEGWLRTKAKHQRGRGELASEVLAVLKVDNRVVGQTGWGQVAEQSWDQTFVIPLERARELEIGVHWRDWRQLCGVAFLRLEDFLDNACHQLSLSLVPQGLLFAQSVCLGVPGS

SEQ ID NO: 809560 - protein, 286 aa, Homo sapiens
VEAGCKIETRKAGCAQAQLQESSQKLDLLRLALEQLLEQLPPAHPLRSRVTRELRAAVPGYPQPSGTPVKPTALTGTLQVRLLGCEQLLTAVPGRSPAAALASSPSEGWLRTKAKHQRGRGELASEVLAVLKVDNRVVGQTGWGQVAEQSWDQTFVIPLERARELEIGVHWRDWRQLCGVAFLRLEDFLDNACHQLSLSLVPQGLLFAQVTFCDPVIERRPRLQRQERIFSKRRGRLPGLRLCVRAIPGTLRASPGTSVPFPHRLLEPLLVHPCALPGGPGLAGYF

SEQ ID NO: 809561 - protein, 1060 aa, Homo sapiens
SQVVEGLKVRGGGQLHRLHPAGRPGNLQGALFPPSLSPTGRLPRARGGEGQRTWARAMCLLSVQTGGEARSRPAGTAGAEARVLGPESRGILDPREALGRGTSGVGSRALDRRGREAALVPRASGSREGAPDPALRRRFPGSFKFESPGGGSAASGTGVAERRAPSGRSGAMEEGAPRQPGPSQWPPEDEKEVIRRAIQKELKIKEGVENLRRVATDRRHLGHVQQLLRSSNRRLEQLHGELRELHARILLPGPGPGPAEPVASGPRPWAEQLRARHLEALRRQLHVELKVKQGAENMTHTCASGTPKERKLLAAAQQMLRDSQLKVALLRMKISSLEASGSPEPGPELLAEELQHRLHVEAAVAEGAKNVVKLLSSRRTQDRKALAEAQAQLQESSQKLDLLRLALEQLLEQLPPAHPLRSRVTRELRAAVPGYPQPSGTPVKPTALTGTLQVRLLGCEQLLTAVPGRSPAAALASSPSEGWLRTKAKHQRGRGELASEVLAVLKVDNRVVGQTGWGQVAEQSWDQTFVIPLERARELEIGVHWRDWRQLCGVAFLRLEDFLDNACHQLSLSLVPQGLLFAQVTFCDPVIERRPRLQRQERIFSKRRGQDFLRASQMNLGMAAWGRLVMNLLPPCSSPSTISPPKGCPRTPTTLREASDPATPSNFLPKKTPLGEEMTPPPKPPRLYLPQEPTSEETPRTKRPHMEPRTRRGPSPPASPTRKPPRLQDFRCLAVLGRGHFGKVLLVQFKGTGKYYAIKALKKQEVLSRDEIESLYCEKRILEAVGCTGHPFLLSLLACFQTSSHACFVTEFVPGGDLMMQIHEDVFPEPQARFYVACVVLGLQFLHEKKIIYRDLKLDNLLLDAQGFLKIADFGLCKEGIGFGDRTSTFCGTPEFLAPEVLTQEAYTRAVDWWGLGVLLYEMLVGECPFPGDTEEEVFDCIVNMDAPYPGFLSVQGLEFIQKLLQKCPEKRLGAGEQDAEEIKVQPFFRTTNWQALLARTIQPPFVPTLCGPADLRYFEGEFTGLPPALTPPAPHSLLTARQQAAFRDFDFVSERFLEP

SEQ ID NO: 809562 - protein, 1104 aa, Homo sapiens
SQVVEGLKVRGGGQLHRLHPAGRPGNLQGALFPPSLSPTGRLPRARGGEGQRTWARAMCLLSVQTGGEARSRPAGTAGAEARVLGPESRGILDPREALGRGTSGVGSRALDRRGREAALVPRASGSREGAPDPALRRRFPGSFKFESPGGGSAASGTGVAERRAPSGRSGAMEEGAPRQPGPSQWPPEDEKEVIRRAIQKELKIKEGVENLRRVATDRRHLGHVQQLLRSSNRRLEQLHGELRELHARILLPGPGPGPAEPVASGPRPWAEQLRARHLEALRRQLHVELKVKQGAENMTHTCASGTPKERKLLAAAQQMLRDSQLKVALLRMKISSLEASGSPEPGPELLAEELQHRLHVEAAVAEGAKNVVKLLSSRRTQDRKALAEAQAQLQESSQKLDLLRLALEQLLEQLPPAHPLRSRVTRELRAAVPGYPQPSGTPVKPTALTGTLQVRLLGCEQLLTAVPGRSPAAALASSPSEGWLRTKAKHQRGRGELASEVLAVLKVDNRVVGQTGWGQVAEQSWDQTFVIPLERARELEIGVHWRDWRQLCGVAFLRLEDFLDNACHQLSLSLVPQGLLFAQVTFCDPVIERRPRLQRQERIFSKRRGQDFLRASQMNLGMAAWGRLVMNLLPPCSSPSTISPPKGCPRTPTTLREASDPATPSNFLPKKTPLGEEMTPPPKPPRLYLPQEPTSEETPRTKRPHMEPRTRRGPSPPASPTRKPPRLQDFRCLAVLGRGHFGKEWAEEGGMGQDWGPHHMSREDLICGGGKGSLVWPTWSTTSLWPQVLLVQFKGTGKYYAIKALKKQEVLSRDEIESLYCEKRILEAVGCTGHPFLLSLLACFQTSSHACFVTEFVPGGDLMMQIHEDVFPEPQARFYVACVVLGLQFLHEKKIIYRDLKLDNLLLDAQGFLKIADFGLCKEGIGFGDRTSTFCGTPEFLAPEVLTQEAYTRAVDWWGLGVLLYEMLVGECPFPGDTEEEVFDCIVNMDAPYPGFLSVQGLEFIQKLLQKCPEKRLGAGEQDAEEIKVQPFFRTTNWQALLARTIQPPFVPTLCGPADLRYFEGEFTGLPPALTPPAPHSLLTARQQAAFRDFDFVSERFLEP

SEQ ID NO: 809563 - protein, 1028 aa, Homo sapiens
SQVVEGLKVRGGGQLHRLHPAGRPGNLQGALFPPSLSPTGRLPRARGGEGQRTWARAMCLLSVQTGGEARSRPAGTAGAEARVLGPESRGILDPREALGRGTSGVGSRALDRRGREAALVPRASGSREGAPDPALRRRFPGSFKFESPGGGSAASGTGVAERRAPSGRSGAMEEGAPRQPGPSQWPPEDEKEVIRRAIQKELKIKEGVENLRRVATDRRHLGHVQQLLRSSNRRLEQLHGELRELHARILLPGPGPGPAEPVASGPRPWAEQLRARHLEALRRQLHVELKVKQGAENMTHTCASGTPKERKLLAAAQQMLRDSQLKVALLRMKISSLEASGSPEPGPELLAEELQHRLHVEAAVAEGAKNVVKLLSSRRTQDRKALAEAQAQLQESSQKLDLLRLALEQLLEQLPPAHPLRSRVTRELRAAVPGYPQPSGTPVKPTALTGTLQVRLLGCEQLLTAVPGRSPAAALASSPSEGWLRTKAKHQRGRGELASEVLAVLKVDNRVVGQTGWGQVAEQSWDQTFVIPLERARELEIGVHWRDWRQLCGVAFLRLEDFLDNACHQLSLSLVPQGLLFAQVTFCDPVIERRPRLQRQERIFSKRRGQDFLRASQMNLGMAAWGRLVMNLLPPCSSPSTISPPKGCPRTPTTLREASDPATPSNFLPKKTPLGEEMTPPPKPPRLYLPQEPTSEETPRTKRPHMEPRTRRGPSPPASPTRKPPRLQDFRCLAVLGRGHFGKVLLVQFKGTGKYYAIKALKKQEVLSRDEIESLYCEKRILEAVGCTGHPFLLSLLACFQTSSHACFVTEFVPGGDLMMQIHEDVFPEPQARFYVACVVLGLQFLHEKKIIYRDLKLDNLLLDAQGFLKIADFGLCKEGIGFGDRTSTFCGTPEFLAPEVLTQEAYTRAVDWWGLGVLLYEMLVGELCPLPPQTVRASARSPVRPAWRSRPCWVLLSPWDSKWQPWGHCCGLCSVSLGKVCPFPLQLALFYLPARPGPERVPQQGVIWFVFLRLDLLYIKFVKVKKK

SEQ ID NO: 809564 - protein, 364 aa, Homo sapiens
LESWVRIGRGEPRTRRGPSPPASPTRKPPRLQDFRCLAVLGRGHFGKVLLVQFKGTGKYYAIKALKKQEVLSRDEIESLYCEKRILEAVGCTGHPFLLSLLACFQTSSHACFVTEFVPGGDLMMQIHEDVFPEPQARFYVACVVLGLQFLHEKKIIYRDLKLDNLLLDAQGFLKIADFGLCKEGIGFGDRTSTFCGTPEFLAPEVLTQEAYTRAVDWWGLGVLLYEMLVGECPFPGDTEEEVFDCIVNMDAPYPGFLSVQGLEFIQKLLQKCPEKRLGAGEQDAEEIKVQPFFRTTNWQALLARTIQPPFVPTLCGPADLRYFEGEFTGLPPALTPPAPHSLLTARQQAAFRDFDFVSERFLEP

SEQ ID NO: 809565 - protein, 235 aa, Homo sapiens
FSHNHPCSFYVACVVLGLQFLHEKKIIYRDLKLDNLLLDAQGFLKIADFGLCKEGIGFGDRTSTFCGTPEFLAPEVLTQEAYTRAVDWWGLGVLLYEMLVGECPFPGDTEEEVFDCIVNMDAPYPGFLSVQGLEFIQKLLQKCPEKRLGAGEQDAEEIKVQPFFRTTNWQALLARTIQPPFVPTLCGPADLRYFEGEFTGLPPALTPPAPHSLLTARQQAAFRDFDFVSERFLEP

SEQ ID NO: 809566 - protein, 168 aa, Homo sapiens
LQPHLLRLCSGGEEASRSDGGAGAGAEPGSGSSRDPPEAGPVGPLWAWRSRPSPPETEGHSPRRAKRVWCTTQECSKMGRSLIHPETETNLSSSELANRKSSKVLKRVQPSWVLFLLSPSAPIPARMSLGQRAKLTCTPDVAYGATGHPGVIPPNATLIFDVELLNLE

SEQ ID NO: 809567 - protein, 108 aa, Homo sapiens
MGVEIETISPGDGRTFPKKGQTCVVHYTGMLQNGKKFDSSRDRNKPFKFRIGKQEVIKGFEEGAAQMSLGQRAKLTCTPDVAYGATGHPGVIPPNATLIFDVELLNLE

SEQ ID NO: 809568 - protein, 113 aa, Homo sapiens
DSSRTSSGSAVAARRRAGRTFPKKGQTCVVHYTGMLQNGKKFDSSRDRNKPFKFRIGKQEVIKGFEEGAAQMSLGQRAKLTCTPDVAYGATGHPGVIPPNATLIFDVELLNLE

SEQ ID NO: 809569 - protein, 125 aa, Homo sapiens
TPAAPPPALQWRRGGEPERRRGWGRSRAGVGQQQGPPRGGACGTAMGVEIETISPGDGRTFPKKGQTCVVHYTGMLQNGKKFDSSRDRNKPFKFRIGKQEVIKGFEEGAAQLGPLSPLPICPHPC

SEQ ID NO: 809570 - protein, 102 aa, Homo sapiens
TPAAPPPALQWRRGGEPERRRGWGRSRAGVGQQQGPPRGGACGTAMGVEIETISPGDGRTFPKKGQTCVVHYTASLVGMIKEAWKANSFPLLPARAIHGASF

SEQ ID NO: 809571 - protein, 155 aa, Homo sapiens
DSSRTSSGSAVAARRRAGATAGLGPEPSRGRAAAGTPQRRGLWDRYGRGDRDHLPRRRKDIPQEGPNVCGALHSQSSGNDKGGLEGQLFPSSTSKGHPWCQLLGMLQNGKKFDSSRDRNKPFKFRIGKQEVIKGFEEGAAQLGPLSPLPICPHPC

SEQ ID NO: 809572 - protein, 77 aa, Homo sapiens
TPAAPPPALQWRRGGEPERRRGWGRSRAGVGQQQGPPRGGACGTAMGVEIETISPGDGRTFPKKGQTCVVHYTGEVE

SEQ ID NO: 809573 - protein, 109 aa, Homo sapiens
MSSKRTKTKTKKRPQRATSNVFAMFDQSQIQEFKEAFNMIDQNRDGFIDKEDLHDMLASLGKNPTDEYLDAMMNEAPGPINFTMFLTMFGEKLNGTDPEDVIRNALCLL

SEQ ID NO: 809574 - protein, 109 aa, Homo sapiens; identical to SEQ ID NO: 809573

SEQ ID NO: 809575 - protein, 135 aa, Homo sapiens
MSSEMPCACFDEEATGTIQEDYLRELLTTMGDRFTDEEVDELYREAPIDKVDHTPQGNFNYIEFTRILKTMEPKTKMTEITSKFQPNVPCCHFGYSEIFLLHALSFTAFAFPVVFILSHFGHMYLYNQTGNGTFY

SEQ ID NO: 809576 - protein, 109 aa, Homo sapiens; identical to SEQ ID NO: 809573

SEQ ID NO: 809577 - protein, 122 aa, Homo sapiens
GRVGDPRVRLRELLTTMGDRFTDEEVDELYREAPIDKVDHTPQGNFNYIEFTRILKTMEPKTKMTEITSKFQPNVPCCHFGYSEIFLLHALSFTAFAFPVVFILSHFGHMYLYNQTGNGTFY

SEQ ID NO: 809578 - protein, 109 aa, Homo sapiens; identical to SEQ ID NO: 809573

SEQ ID NO: 809579 - protein, 109 aa, Homo sapiens; identical to SEQ ID NO: 809573

SEQ ID NO: 809580 - protein, 109 aa, Homo sapiens; identical to SEQ ID NO: 809573

SEQ ID NO: 809581 - protein, 109 aa, Homo sapiens; identical to SEQ ID NO: 809573

SEQ ID NO: 809582 - protein, 109 aa, Homo sapiens; identical to SEQ ID NO: 809573

SEQ ID NO: 809583 - protein, 109 aa, Homo sapiens; identical to SEQ ID NO: 809573

SEQ ID NO: 809584 - protein, 109 aa, Homo sapiens; identical to SEQ ID NO: 809573

SEQ ID NO: 809585 - protein, 109 aa, Homo sapiens; identical to SEQ ID NO: 809573

SEQ ID NO: 809586 - protein, 149 aa, Homo sapiens
ALRRALECAARQSHRTDATICGKDRGEEDLTLQQQDLTTTMSSKRTKTKTKKRPQRATSNVFAMFDQSQIQEFKEAFNMIDQNRDGFIDKEDLHDMLASLGKNPTDEYLDAMMNEAPGPINFTMFLTMFGEKLNGTDPEDVIRNALCLL

SEQ ID NO: 809587 - protein, 140 aa, Homo sapiens
RVGSLVRSQLCWNFVLTGEVQLRESEDLTTTMSSKRTKTKTKKRPQRATSNVFAMFDQSQIQEFKEAFNMIDQNRDGFIDKEDLHDMLASLGKNPTDEYLDAMMNEAPGPINFTMFLTMFGEKLNGTDPEDVIRNALCLL

SEQ ID NO: 809588 - protein, 109 aa, Homo sapiens; identical to SEQ ID NO: 809573

SEQ ID NO: 809589 - protein, 109 aa, Homo sapiens; identical to SEQ ID NO: 809573

SEQ ID NO: 809590 - protein, 109 aa, Homo sapiens; identical to SEQ ID NO: 809573

SEQ ID NO: 809591 - protein, 109 aa, Homo sapiens; identical to SEQ ID NO: 809573

SEQ ID NO: 809592 - protein, 145 aa, Homo sapiens
KERLMSLKDCRWVLLVLEAAPGLNEGYVYLMDLTTTMSSKRTKTKTKKRPQRATSNVFAMFDQSQIQEFKEAFNMIDQNRDGFIDKEDLHDMLASLGKNPTDEYLDAMMNEAPGPINFTMFLTMFGEKLNGTDPEDVIRNALCLL

SEQ ID NO: 809593 - protein, 141 aa, Homo sapiens
MAQILKMSSEMPCACFDEEATGTIQEDYLRELLTTMGDRFTDEEVDELYREAPIDKVDHTPQGNFNYIEFTRILKTMEPKTKMTEITSKFQPNVPCCHFGYSEIFLLHALSFTAFAFPVVFILSHFGHMYLYNQTGNGTFY

SEQ ID NO: 809594 - protein, 117 aa, Homo sapiens
TSRFTSTVAVVLELSCLRVRYSYENPSNVFAMFDQSQIQEFKEAFNMIDQNRDGFIDKEDLHDMLASLGKNPTDEYLDAMMNEAPGPINFTMFLTMFGEKLNGTDPEDVIRNALCLL

SEQ ID NO: 809595 - protein, 147 aa, Homo sapiens
YCAARTLIWILKMSSEMPCACFDEEATGTIQEDYLRELLTTMGDRFTDEEVDELYREAPIDKVDHTPQGNFNYIEFTRILKTMEPKTKMTEITSKFQPNVPCCHFGYSEIFLLHALSFTAFAFPVVFILSHFGHMYLYNQTGNGTFY

SEQ ID NO: 809596 - protein, 172 aa, Homo sapiens
SWTRHLLSESKPRSEVWFPALSLMHIFRIQIMIWILKMSSEMPCACFDEEATGTIQEDYLRELLTTMGDRFTDEEVDELYREAPIDKVDHTPQGNFNYIEFTRILKTMEPKTKMTEITSKFQPNVPCCHFGYSEIFLLHALSFTAFAFPVVFILSHFGHMYLYNQTGNGTFY

SEQ ID NO: 809597 - protein, 109 aa, Homo sapiens; identical to SEQ ID NO: 809573

SEQ ID NO: 809598 - protein, 109 aa, Homo sapiens; identical to SEQ ID NO: 809573

SEQ ID NO: 809599 - protein, 109 aa, Homo sapiens; identical to SEQ ID NO: 809573

SEQ ID NO: 809600 - protein, 109 aa, Homo sapiens; identical to SEQ ID NO: 809573

SEQ ID NO: 809601 - protein, 109 aa, Homo sapiens; identical to SEQ ID NO: 809573

SEQ ID NO: 809602 - protein, 109 aa, Homo sapiens; identical to SEQ ID NO: 809573

SEQ ID NO: 809603 - protein, 109 aa, Homo sapiens; identical to SEQ ID NO: 809573

SEQ ID NO: 809604 - protein, 109 aa, Homo sapiens; identical to SEQ ID NO: 809573

SEQ ID NO: 809605 - protein, 109 aa, Homo sapiens; identical to SEQ ID NO: 809573

SEQ ID NO: 809606 - protein, 109 aa, Homo sapiens; identical to SEQ ID NO: 809573

SEQ ID NO: 809607 - protein, 135 aa, Homo sapiens; identical to SEQ ID NO: 809575

SEQ ID NO: 809608 - protein, 109 aa, Homo sapiens; identical to SEQ ID NO: 809573

SEQ ID NO: 809609 - protein, 109 aa, Homo sapiens; identical to SEQ ID NO: 809573

SEQ ID NO: 809610 - protein, 109 aa, Homo sapiens; identical to SEQ ID NO: 809573

SEQ ID NO: 809611 - protein, 148 aa, Homo sapiens
ISLSSGSEPSMPPRSCATSGSWGRSQRARGPLSRAWPATATQASVLASPPSGDAQLRMGPRVDADLGTPPFRGHHRDASRMPLCQPDTRTFVKNSNRQERQRVTRLCPVIGWHMLTSCQTTSTRVIHVHLQQPARYSLCDFSVCVCVS

SEQ ID NO: 809612 - protein, 429 aa, Homo sapiens
RGAGGGLGAAATARHDAAAPAPDMLLLKKHTEDISSVYEIRERLGSGAFSEVVLAQERGSAHLVALKCIPKKALRGKEALVENEIAVLRRISHPNIVALEDVHESPSHLYLAMELVTGGELFDRIMERGSYTEKDASHLVGQVLGAVSYLHSLGIVHRDLKPENLLYATPFEDSKIMVSDFGLSKIQAGNMLGTACGTPGYVGEGRHPEACWEWGGLGDPRQPGRLLCPLPLCGPFLGLSEAEPVTLSGMAACVPVRASVCLWPPAPELLEQKPYGKAVDVWALGVISYILLCGYPPFYDESDPELFSQILRASYEFDSPFWDDISESAKDFIRHLLERDPQKRFTCQQALRHLWISGDTAFDRDILGSVSEQIRKNFARTHWKRAFNATSFLRHIRKLGQIPEGEGASEQGMARHSHSGLRAGQPPKW

SEQ ID NO: 809613 - protein, 372 aa, Homo sapiens
RGAGGGLGAAATARHDAAAPAPDMLLLKKHTEDISSVYEIRERLGSGAFSEVVLAQERGSAHLVALKCIPKKALRGKEALVENEIAVLRRISHPNIVALEDVHESPSHLYLAMELVTGGELFDRIMERGSYTEKDASHLVGQVLGAVSYLHSLGIVHRDLKPENLLYATPFEDSKIMVSDFGLSKIQAGNMLGTACGTPGYVAPELLEQKPYGKAVDVWALGVISYILLCGYPPFYDESDPELFSQILRASYEFDSPFWDDISESAKDFIRHLLERDPQKRFTCQQALRHLWISGDTAFDRDILGSVSEQIRKNFARTHWKRAFNATSFLRHIRKLGQIPEGEGASEQGMARHSHSGGPQGLSFLHGCCVLR

SEQ ID NO: 809614 - protein, 180 aa, Homo sapiens [sequence omitted]

SEQ ID NO: 809615 - protein, 421 aa, Homo sapiens
RGGGAPDPARGRRSLARPQHTCHAWRAPCPHALGPRSSGRGRPRLPGPPAPRRRGLGCVCGRVGGRGLGRWLRAGVADMLLLKKHTEDISSVYEIRERLGSGAFSEVVLAQERGSAHLVALKCIPKKALRGKEALVENEIAVLRRISHPNIVALEDVHESPSHLYLAMELVTGGELFDRIMERGSYTEKDASHLVGQVLGAVSYLHSLGIVHRDLKPENLLYATPFEDSKIMVSDFGLSKIQAGNMLGTACGTPGYVAPELLEQKPYGKAVDVWALGVISYILLCGYPPFYDESDPELFSQILRASYEFDSPFWDDISESAKDFIRHLLERDPQKRFTCQQALRHLWISGDTAFDRDILGSVSEQIRKNFARTHWKRAFNATSFLRHIRKLGQIPEGEGASEQGMARHSHSGLRAGQPPKW

SEQ ID NO: 809616 - protein, 433 aa, Homo sapiens
MEAAFGQVAGSACPRRGGEGRDWKAESLADLWPKSSPGDSHRWCKGPGAGPAGPQLREAARASSGLGGGGRHPSRIPAIALQDMLLLKKHTEDISSVYEIRERLGSGAFSEVVLAQERGSAHLVALKCIPKKALRGKEALVENEIAVLRRRFLAIDRISHPNIVALEDVHESPSHLYLAMELVTGGELFDRIMERGSYTEKDASHLVGQVLGAVSYLHSLGIVHRDLKPENLLYATPFEDSKIMVSDFGLSKIQAGNMLGTACGTPGYVAPELLEQKPYGKAVDVWALGVISYILLCGYPPFYDESDPELFSQILRASYEFDSPFWDDISESAKDFIRHLLERDPQKRFTCQQALRHLWISGDTAFDRDILGSVSEQIRKNFARTHWKRAFNATSFLRHIRKLGQIPEGEGASEQGMARHSHSGLRAGQPPKW

SEQ ID NO: 809617 - protein, 180 aa, Homo sapiens [sequence omitted]

SEQ ID NO: 809618 - protein, 180 aa, Homo sapiens [sequence omitted]

SEQ ID NO: 809619 - protein, 304 aa, Homo sapiens
MERGSYTEKDASHLVGQVLGAVSYLHSLGIVHRDLKPENLLYATPFEDSKIMVSDFGLSKIQAGNMLGTACGTPGYVGEGRHPEACWEWGGLGDPRQPGRLLCPLPLCGPFLGLSEAEPVTLSGMAACVPVRASVCLWPPAPELLEQKPYGKAVDVWALGVISYILLCGYPPFYDESDPELFSQILRASYEFDSPFWDDISESAKDFIRHLLERDPQKRFTCQQALRHLWISGDTAFDRDILGSVSEQIRKNFARTHWKRAFNATSFLRHIRKLGQIPEGEGASEQGMARHSHSGLRAGQPPKW

SEQ ID NO: 809620 - protein, 366 aa, Homo sapiens
RGAGGGLGAAATARHDAAAPAPDMLLLKKHTEDISSVYEIRERLGSGAFSEVVLAQERGSAHLVALKCIPKKALRGKEALVENEIAVLRRISHPNIVALEDVHESPSHLYLAMELVTGGELFDRIMERGSYTEKDASHLVGQVLGAVSYLHSLGIVHRDLKPENLLYATPFEDSKIMVSDFGLSKIQAGNMLGTACGTPGYVAPELLEQKPYGKAVDVWALGVISYILLCGYPPFYDESDPELFSQILRASYEFDSPFWDDISESAKDFIRHLLERDPQKRFTCQQALRHLWISGDTAFDRDILGSVSEQIRKNFARTHWKRAFNATSFLRHIRKLGQIPEGEGASEQGMARHSHSGLRAGQPPKW

SEQ ID NO: 809621 - protein, 460 aa, Homo sapiens
RGAGGGLGAAATARHDAAAPAPDMLLLKKHTEDISSVYEIRERLGSGAFSEVVLAQERGSAHLVALKCIPKKALRGKEALVENEIAVLRRISHPNIVALEDVHESPSHLYLAMELVTGGELFDRIMERGSYTEKDASHLVGQVLGAVSYLHSLGIVHRDLKPENLLYATPFEDSKIMVSDFGLSKIQAGNMLGTACGTPGYVGEGRHPEACWEWGGLGDPRQPGRLLCPLPLCGPFLGLSGRASDTERHGCVCACACVCLSLAPSPRALGAETLREGRRCVGPGRHLLHPVSDRWEGLSPACLPLLGVGRVGQLDDSSVGARLCGYPPFYDESDPELFSQILRASYEFDSPFWDDISESAKDFIRHLLERDPQKRFTCQQALRHLWISGDTAFDRDILGSVSEQIRKNFARTHWKRAFNATSFLRHIRKLGQIPEGEGASEQGMARHSHSGLRAGQPPKW

SEQ ID NO: 809622 - protein, 369 aa, Homo sapiens
GAFWKAAGCVEAERQHPGAGRLRGADMLLLKKHTEDISSVYEIRERLGSGAFSEVVLAQERGSAHLVALKCIPKKALRGKEALVENEIAVLRRISHPNIVALEDVHESPSHLYLAMELVTGGELFDRIMERGSYTEKDASHLVGQVLGAVSYLHSLGIVHRDLKPENLLYATPFEDSKIMVSDFGLSKIQAGNMLGTACGTPGYVAPELLEQKPYGKAVDVWALGVISYILLCGYPPFYDESDPELFSQILRASYEFDSPFWDDISESAKDFIRHLLERDPQKRFTCQQALRHLWISGDTAFDRDILGSVSEQIRKNFARTHWKRAFNATSFLRHIRKLGQIPEGEGASEQGMARHSHSGLRAGQPPKW

SEQ ID NO: 809623 - protein, 426 aa, Homo sapiens
MEAAFGQVAGSACPRRGGEGRDWKAESLADLWPKSSPGDSHRWCKGPGAGPAGPQLREAARASSGLGGGGRHPSRIPAIALQDMLLLKKHTEDISSVYEIRERLGSGAFSEVVLAQERGSAHLVALKCIPKKALRGKEALVENEIAVLRRISHPNIVALEDVHESPSHLYLAMELVTGGELFDRIMERGSYTEKDASHLVGQVLGAVSYLHSLGIVHRDLKPENLLYATPFEDSKIMVSDFGLSKIQAGNMLGTACGTPGYVAPELLEQKPYGKAVDVWALGVISYILLCGYPPFYDESDPELFSQILRASYEFDSPFWDDISESAKDFIRHLLERDPQKRFTCQQALRHLWISGDTAFDRDILGSVSEQIRKNFARTHWKRAFNATSFLRHIRKLGQIPEGEGASEQGMARHSHSGLRAGQPPKW

SEQ ID NO: 809624 - protein, 180 aa, Homo sapiens [sequence omitted]

SEQ ID NO: 809625 - protein, 375 aa, Homo sapiens
LRPAWQGVEEEAALAPGGAGRDPHHLSPAPADMLLLKKHTEDISSVYEIRERLGSGAFSEVVLAQERGSAHLVALKCIPKKALRGKEALVENEIAVLRRISHPNIVALEDVHESPSHLYLAMELVTGGELFDRIMERGSYTEKDASHLVGQVLGAVSYLHSLGIVHRDLKPENLLYATPFEDSKIMVSDFGLSKIQAGNMLGTACGTPGYVAPELLEQKPYGKAVDVWALGVISYILLCGYPPFYDESDPELFSQILRASYEFDSPFWDDISESAKDFIRHLLERDPQKRFTCQQALRHLWISGDTAFDRDILGSVSEQIRKNFARTHWKRAFNATSFLRHIRKLGQIPEGEGASEQGMARHSHSGLRAGQPPKW

SEQ ID NO: 809626 - protein, 180 aa, Homo sapiens [sequence omitted]

SEQ ID NO: 809627 - protein, 176 aa, Homo sapiens
SNSLRGGHSVSTATNEARRCKSRSRKSSTGVGTTRPDASAAKTQSPRCSSRSPFRSPLHRRTVAFPGKQPPARTANAAQKGVGVAPENNGLLVRIWGAPCRVATRGKGHNVPRPRRKEGMPLFPSLGRRKASGQKQKELFLPWTGFPNKVTWKTMAINQRKSVPLPLPPPPHSIHN

SEQ ID NO: 809628 - protein, 377 aa, Homo sapiens
NSGDLPAPSPPRCSPQFPSIGQEPPEMNLYYENFFHPQGVPSPQRPSFEGGGEYGATPNPYLWFNGPTMTPPPYLPGPNASPFLPQAYGVQRPLLPSVSGLGGSDLGWLPIPSQEELMKLVRPPYSYSALIAMAIHGAPDKRLTLSQIYQYVADNFPFYNKSKAGWQNSIRHNLSLNDCFKKVPRDEDDPGKGNYWTLDPNCEKMFDNGNFRRKRKRKSDVSSSTASLALEKTESSLPVDSPKTTEPQDILDGASPGGTTSSPEKRPSPPPSGAPCLNSFLSSMTAYVSGGSPTSHPLVTPGLSPEPSDKTGQNSLTFNSFSPLTNLSNHSGGGDWANPMPTNMLSYGGSVLSQFSPHFYNSVNTSGVLYPREGTEV

SEQ ID NO: 809629 - protein, 108 aa, Homo sapiens
MGFTGMLQSRTVVFYVPCMVILVAICCKILEAKCLQYRFLATVYAVISLCLSWAVLENTLVFTIWFTNTIIILPGLKCRIWHIDACNGKKKNLLKFVNVQLNLRYTVG

SEQ ID NO: 809630 - protein, 108 aa, Homo sapiens; identical to SEQ ID NO: 809629

SEQ ID NO: 809631 - protein, 122 aa, Homo sapiens
IDCPHPATVLAQPIFIDACSVLGAYQGAQNWIRRRPCLPSGCLKMNREIGPLHEARLLIIPDIFSCYTQNKHSKYEQDGEPDLSNHGGVDVNFLQSISKEIPVPHVYLVSHLSSDPHQIRGR

SEQ ID NO: 809632 - protein, 406 aa, Homo sapiens
MSGAPTAGAALMLCAATAVLLSAQGGPVQSKSPRFASWDEMNVLAHGLLQLGQGLREHAERTRSQLSALERRLSACGSACQGTEGSTDLPLAPESRVDPEVLHSLQTQLKAQNSRIQQLFHKVAQQQRHLEKQHLRIQHLQSQFGLLDHKHLDHEVAKPARRKRLPEMAQPVDPAHNVSRLHRLPRDCQELFQVGERQSGLFEIQPQGSPPFLVNCKMTSDGGWTVIQRRHDGSVDFNRPWEAYKAGFGDPHGEFWLGLEKVHSITGDRNSRLAVQLRDWDGNAELLQFSVHLGGEDTAYSLQLTAPVAGQLGATTVPPSGLSVPFSTWDQDHDLRRDKNCAKSLSGGWWFGTCSHSNLNGQYFRSIPQQRQKLKKGIFWKTWRGRYYPLQATTMLIQPMAAEAAS

SEQ ID NO: 809633 - protein, 406 aa, Homo sapiens; identical to SEQ ID NO: 809632

SEQ ID NO: 809634 - protein, 171 aa, Homo sapiens
MSGAPTAGAALMLCAATAVLLSAQGGPVQSKSPRFASWDEMNVLAHGLLQLGQGLREHAERTRSQLSALERRLSACGSACQGTEGSTDLPLAPESRVDPEVLHSLQTQLKAQNSRIQQLFHKVAQQQRHLEKQHLRIQHLQSQFGLLDHKHLDHLETCGQRRRPRLEKPPF

SEQ ID NO: 809635 - protein, 154 aa, Homo sapiens
MSGAPTAGAALMLCAATAVLLSAQGGPVQSKSPRFASWDEMNVLAHGLLQLGQGLREHAERTRSQLSALERRLSACGSACQGTEGSTDLPLAPESRVDPEVLHSLQTQLKAQNSRIQQLFHKVAQQQRHLEKQHLRIQHLQSQTGLNGGLSHID

SEQ ID NO: 809636 - protein, 164 aa, Homo sapiens
  misc_feature (13)..(13): Xaa can be any naturally occurring amino acid
MAIAEAQEMGTGXEYDYILKVVLIGDSGVGKSNLLSRFTRNEFNLESKSTIGVEFATRSIQVDGKTIKAQIWDTAGQERYRAITSAYYRGAVGALLVYDIAKHLTYENVERWLKELRDHADSNIVIMLVGNKSDLRHLRAVPTDEARAFAERTIVFIETQLDHK

SEQ ID NO: 809637 - protein, 218 aa, Homo sapiens
MGTRDDEYDYLFKVVLIGDSGVGKSNLLSRFTRNEFNLESKSTIGVEFATRSIQVDGKTIKAQIWDTAGQERYRAITSAYYRGAVGALLVYDIAKHLTYENVERWLKELRDHADSNIVIMLVGNKSDLRHLRAVPTDEARAFAEKNNLSFIETSALDSTNVEEAFKNILTEIYRIVSQKQIADRAAHDESPGNNVVDISVPPTTDGQKPNKLQCCQNL

SEQ ID NO: 809638 - protein, 241 aa, Homo sapiens
GNYQATRVRLCGGVADPAGSARTMGTRDDEYDYLFKVVLIGDSGVGKSNLLSRFTRNEFNLESKSTIGVEFATRSIQVDGKTIKAQIWDTAGQERYRAITSAYYRGAVGALLVYDIAKHLTYENVERWLKELRDHADSNIVIMLVGNKSDLRHLRAVPTDEARAFAEKNNLSFIETSALDSTNVEEAFKNILTEIYRIVSQKQIADRAAHDESPGNNVVDISVPPTTDGQKPNKLQCCQNL

SEQ ID NO: 809639 - protein, 245 aa, Homo sapiens
NPHPNRVTLTVTLPRGGVADPAGSARTMGTRDDEYDYLFKVVLIGDSGVGKSNLLSRFTRNEFNLESKSTIGVEFATRSIQVDGKTIKAQIWDTAGQERYRAITSAYYRGAVGALLVYDIAKHLTYENVERWLKELRDHADSNIVIMLVGNKSDLRHLRAVPTDEARAFAEKNNLSFIETSALDSTNVEEAFKNILTEIYRIVSQKQIADRAAHDESPGNNVVDISVPPTTDGQKPNKLQCCQNL

SEQ ID NO: 809640 - protein, 218 aa, Homo sapiens; identical to SEQ ID NO: 809637

SEQ ID NO: 809641 - protein, 218 aa, Homo sapiens; identical to SEQ ID NO: 809637

SEQ ID NO: 809642 - protein, 179 aa, Homo sapiens
MGTRDDEYDYLFKVVLIGDSGVGKSNLLSRFTRNEFNLESKSTIGVEFATRSIQVDGKTIKAQIWDTAGQERYRAITSAYYRGAVGALLVYDIAKHLTYENVERWLKELRDHADSNIVIMLVGNKSDLRHLRAVPTDEARAFAEKNNLSFIETSALDSTNVEEAFKNILTGGRGPDGCG

SEQ ID NO: 809643 - protein, 178 aa, Homo sapiens
LGTRGSRFATRSIQVDGKTIKAQIWDTAGQERYRAITSAYYRGAVGALLVYDIAKHLTYENVERWLKELRDHADSNIVIMLVGNKSDLRHLRAVPTDEARAFAEKNNLSFIETSALDSTNVEEAFKNILTEIYRIVSQKQIADRAAHDESPGNNVVDISVPPTTDGQKPNKLQCCQNL

SEQ ID NO: 809644 - protein, 139 aa, Homo sapiens
LGTRGSRFATRSIQVDGKTIKAQIWDTAGQERYRAITSAYYRGAVGALLVYDIAKHLTYENVERWLKELRDHADSNIVIMLVGNKSDLRHLRAVPTDEARAFAEKNNLSFIETSALDSTNVEEAFKNILTGGRGPDGCG

SEQ ID NO: 809645 - protein, 406 aa, Homo sapiens; identical to SEQ ID NO: 809632

SEQ ID NO: 809646 - protein, 368 aa, Homo sapiens
MSGAPTAGAALMLCAATAVLLSAQGGPVQSKSPRFASWDEMNVLAHGLLQLGQGLREHAERTRSQLSALERRLSACGSACQGTEGSTDLPLAPESRVDPEVLHSLQTQLKAQNSRIQQLFHKVAQQQRHLEKQHLRIQHLQSQFGLLDHKHLDHEVAKPARRKRLPEMAQPVDPAHNVSRLHHGGWTVIQRRHDGSVDFNRPWEAYKAGFGDPHGEFWLGLEKVHSITGDRNSRLAVQLRDWDGNAELLQFSVHLGGEDTAYSLQLTAPVAGQLGATTVPPSGLSVPFSTWDQDHDLRRDKNCAKSLSGGWWFGTCSHSNLNGQYFRSIPQQRQKLKKGIFWKTWRGRYYPLQATTMLIQPMAAEAAS

SEQ ID NO: 809647 - protein, 187 aa, Homo sapiens
MTGLVTEADNGTQQDRNRSPVILGVASLQEVQTACVSGYTDCDWPPKNISKPLDSWDEMSILNQRATSPRSLKNFPFLLVWGNQRLGPRKPDKCWPQYGAPGAWVLQGKNQRFPIRLEDQCAQRRGHIQTLEQGRLPRTEWAREHALKHQENRDGRDAGTNRKFSVNPNTNVDTVFDPGPGPRRTKR

SEQ ID NO: 809648 - protein, 406 aa, Homo sapiens; identical to SEQ ID NO: 809632

SEQ ID NO: 809649 - protein, 179 aa, Homo sapiens; identical to SEQ ID NO: 809642

SEQ ID NO: 809650 - protein, 377 aa, Homo sapiens
MSGAPTAGAALMLCAATAVLLSAQGGPVQSKSPRFASWDEMNVLAHGLLQLGQGLREHAERTRSQLSALERRLSACGSACQGTEGSTDLPLAPESRVDPEVLHSLQTQLKAQNSRIQQLFHKVAQQQRHLEKQHLRIQHLQSQFGLLDHKHLDHEVAKPARRKRLPEMAQPVDPAHNVSRLHRLPRDCQELFQVGERQSGLFEIQPQGSPPFLVNCKMTSDGGWTVIQRRHDGSVDFNRPWEAYKAGFGDPHGEVFLVGTEAGEEEGPSEVALPHGVASPTPGEFWLGLEKVHSITGDRNSRLAVQLRDWDGNAELLQFSVHLGGEDTAYSLQLTAPVAGQLGATTVPPSGLSVPFSTWDQDHDLCQGTLRVGSLPE

SEQ ID NO: 809651 - protein, 146 aa, Homo sapiens
  misc_feature (112)..(112): Xaa can be any naturally occurring amino acid
  misc_feature (116)..(116): Xaa can be any naturally occurring amino acid
MGTRDDEYDYLFKVVLIGDSGVGKSNLLSRFTRNEFNLESKSTIGVEFATRSIQVDGKTIKAQIWDTAGQERYRAITSAYYRGAVGALLVYDIAKHLTYENVERWLKEGGEXGERXRGRRGGGKKREGGEGGGGGGRRGGGGEKRR

SEQ ID NO: 809652 - protein, 156 aa, Homo sapiens
MGTRDDEYDYLFKVVLIGDSGVGKSNLLSRFTRNEFNLESKSTIGVEFATRSIQVDGKTIKAQIWDTAGQERYRAITSACVSAAWAGTLRFGGVGLQRVGLEGCVGVGQEKGRVCSQDQGVRLEEHFSHAPWDPQADQRPAFATPGYLWVPSAVRT

SEQ ID NO: 809653 - protein, 559 aa, Homo sapiens
MAASEDGSGCLVSRGRSQSDPSVLTDSSATSSADAGENPDEMDQTPPARPEYLVSGIRTPPVRRNSKLATLGRIFKPWKWRKKKNEKLKQTTSALEKKMAGRQGREELIKKGLLEMMEQDAESKTCNPDGGPRSVQSEPPTPKSETLTSEDAQPGSPLATGTDQVSLDKPLSSAAHLDDAAKMPSASSGEEADAGSLLPTTNELSQALAGADSLDSPPRPLERSVGQLPSPPLLPTPPPKASSKTTKNVTGQATLFQASSMKSADPSLRGQLSTPTGSPHLTTVHRPLPPSRVIEELHRALATKHRQDSFQGRESKGSPKKRLDVRLSRTSSVERGKEREEAWSFDGALENKRTAAKESEENKENLIINSELKDDLLLYQDEEALNDSIISGTLPRKCKKELLAVKLRNRPSKQELEDRNIFPRRTDEERQEIRQQIEMKLSKRLSQRPAVEELERRNILKQRNDQTEQEERREIKQRLTRKLNQRPTVDELRDRKILIRFSDYVEVAKAQDYDRRADKPWTRLSAADKAAIRKELNEYKSNEMEVHASSKHLTRFHRP

SEQ ID NO: 809654 - protein, 183 aa, Homo sapiens
MVQNVILVFFRRRLSQRPAVEELERRNILKQRNDQTEQEERREIKQRLTRKLNQRPTVDELRDRKILIRFSDYVEVAKAQDYDRRADKPWTRLSAADKAAIRKELNEYKSNEMEVHASSKHLTSITPWSHCSNNHQFRLRSSWSIEHAACCLCSSHFPFFLIDLELCASTPRLPAYCKHYSTW

SEQ ID NO: 809655 - protein, 128 aa, Homo sapiens
MVQNVILVFFRRRLSQRPAVEELERRNILKQRNDQTEQEERREIKQRLTRKLNQRPTVDELRDRKILIRFSDYVEVAKAQDYDRRADKPWTRLSAADKAAIRKELNEYKSNEMEVHASSKHLTRFHRP

SEQ ID NO: 809656 - protein, 128 aa, Homo sapiens; identical to SEQ ID NO: 809655

SEQ ID NO: 809657 - protein, 550 aa, Homo sapiens
MAFSKLLEQAGGVGLFQTLQVLTFILPCLMIPSQMLLENFSAAIPGHRCWTHMLDNGSAVSTNMTPKALLTISIPPGPNQGPHQCRRFRQPQWQLLDPNATATSWSEADTEPCVDGWVYDRSVFTSTIVAKWDLVCSSQGLKPLSQSIFMSGILVGSFIWGLLSYRFGRKPMLSWCCLQLAVAGTSTIFAPTFVIYCGLRFVAAFGMAGIFLSSLTLMVEWTTTSRRAVTMTVVGCAFSAGQAALGGLAFALRDWRTLQLAASVPFFAISLISWWLPESARWLIIKGKPDQALQELRKVARINGHKEAKNLTIEVLMSSVKEEVASAKEPRSVLDLFCVPVLRWRSCAMLVVNFSLLISYYGLVFDLQSLGRDIFLLQALFGAVDFLGRATTALLLSFLGRRTIQAGSQAMAGLAILANMLVPQDLQTLRVVFAVLGKGCFGISLTCLTIYKAELFPTPVRMTADGILHTVGRLGAMMGPLILMSRQALPLLPPLLYGVISIASSLVVLFFLPETQGLPLPDTIQDLESQKSTAAQGNRQEAVTVESTSL

SEQ ID NO: 809658 - protein, 547 aa, Homo sapiens
MAFSKLLEQAGGVGLFQTLQVLTFILPCLMIPSQMLLENFSAAIPGHRCWTHMLDNGSAVSTNMTPKALLTISIPPGPNQGPHQCRRFRQPQWQLLDPNATATSWSEADTEPCVDGWVYDRSVFTSTIVAKWDLVCSSQGLKPLSQSIFMSGILVGSFIWGLLSYRFGRKPMLSWCCLQLAVAGTSTIFAPTFVIYCGLRFVAAFGMAGIFLSSLTLMVEWTTTSRRAVTMTVVGCAFSAGQAALGGLAFALRDWRTLQLAASVPFFAISLISWWLPESARWLIIKGKPDQALQELRKVARINGHKEAKNLTIEVLMSSVKEEVASAKEPRSVLDLFCVPVLRWRSCAMLVVNFSLLISYYGLVFDLSPNPSPGQPRTKPAGPGTCREPRVPSAPGWLAATLTSPWVPSRANPTLTPFLYPDLQTLRVVFAVLGKGCFGISLTCLTIYKAELFPTPVRMTADGILHTVGRLGAMMGPLILMSRQALPLLPPLLYGVISIASSLVVLFFLPETQGLPLPDTIQDLESQKSTAAQGNRQEAVTVESTSL

SEQ ID NO: 809659 - protein, 401 aa, Homo sapiens
MSGILVGSFIWGLLSYRFGRKPMLSWCCLQLAVAGTSTIFAPTFVIYCGLRFVAAFGMAGIFLSSLTLMVEWTTTSRRAVTMTVVGCAFSAGQAALGGLAFALRDWRTLQLAASVPFFAISLISWWLPESARWLIIKGKPDQALQELRKVARINGHKEAKNLTIEVLMSSVKEEVASAKEPRSVLDLFCVPVLRWRSCAMLVVNFSLLISYYGLVFDLQSLGRDIFLLQALFGAVDFLGRATTALLLSFLGRRTIQAGSQAMAGLAILANMLVPQDLQTLRVVFAVLGKGCFGISLTCLTIYKAELFPTPVRMTADGILHTVGRLGAMMGPLILMSRQALPLLPPLLYGVISIASSLVVLFFLPETQGLPLPDTIQDLESQKSTAAQGNRQEAVTVESTSL

SEQ ID NO: 809660 - protein, 140 aa, Homo sapiens
MAGLAILANMLVPQDLQTLRVVFAVLGKGCFGISLTCLTIYKAELFPTPVRMTADGILHTVGRLGAMMGPLILMSRQALPLLPPLLYGVISIASSLVVLFFLPETQGLPLPDTIQDLESQKSTAAQGNRQEAVTVESTSL

SEQ ID NO: 809661 - protein, 390 aa, Homo sapiens
MAFSKLLEQAGGVGLFQTLQVLTFILPCLMIPSQMLLENFSAAIPGHRCWTHMLDNGSAVSTNMTPKALLTISIPPGPNQGPHQCRRFRQPQWQLLDPNATATSWSEADTEPCVDGWVYDRSVFTSTIVAKWDLVCSSQGLKPLSQSIFMSGILVGSFIWGLLSYRFGRKPMLSWCCLQLAVAGTSTIFAPTFVIYCGLRFVAAFGMAGIFLSSLTLMVEWTTTSRRAVTMTVVGCAFSAGQAALGGLAFALRDWRTLQLAASVPFFAISLISWWLPESARWLIIKGKPDQALQELRKVARINGHKEAKNLTIEVRCCCLRDLTWDRTCTEGSSVWPPTAPPTPAPPPPAPPPASPQTPPTPPSPPPHRHHHHHHQSRYHHQQHHHCPHP

SEQ ID NO: 809662 - protein, 96 aa, Homo sapiens
GGVDHDQQEGGHHDGGGMCLQRRPGGAGRPGLCPAGLEDSPAGSISALLCHLPDILVSMMWDLFLRRPRVGGGLFTFTSLAGSRSRDLECHRRAMA

SEQ ID NO: 809663 - protein, 410 aa, Homo sapiens [sequence omitted]

SEQ ID NO: 809664 - protein, 98 aa, Homo sapiens
LPRYPRVGQEVGFQIPSIPGRVCFCSLGKGGGRPITQPTLNALVLPVPSPQWVNKHTPALDSTDSKTTSTQKSCFFPISLNFPTSTYRSFFPPRPTQA

SEQ ID NO: 809665 - protein, 457 aa, Homo sapiens
MYKYDAAFNSRGRVAGWQVDRRARTAPRAPYNSFPSVHLRRAATGGAMDLTGLLLDEEGTFSLAGFQDFTFLPGHQKLSARIRRRLYYGWDWEADCSLEELSSPVADIAVELLQKAAPSPIRRLQKKYVAHVSREACISPCAMMLALVYIERLRHRNPDYLQHVSSSDLFLISMMVASKYLYDEGEEEEVFNDEWGAAGGVAVPTLNALERGFLSAMDWHLYTDPREIFEVLSWLESCVAEQQGRWRGWYTYTDLCVLLEQPTWQLALGSLCQRLVKLSCLLAVAYVSSVALAVASVAVIHQSLGLSCIPTPGPPDLGLTSRCLLEPCIPSVPQCLPSPANVSSCLEGSMGLRSLWGSLLASLTPPPLPPPDPPAPPTLLHNCHLCQKLQRDSPTCHACLHPNRTVPTALSSPWYHTYGLAPPWPWSPVPLSLPQPQQCSLFSVMELARLKSFVFPG

SEQ ID NO: 809666 - protein, 410 aa, Homo sapiens [sequence omitted]

SEQ ID NO: 809667 - protein, 410 aa, Homo sapiens [sequence omitted]

SEQ ID NO: 809668 - protein, 410 aa, Homo sapiens [sequence omitted]

SEQ ID NO: 809669 - protein, 410 aa, Homo sapiens [sequence omitted]

SEQ ID NO: 809670 - protein, 410 aa, Homo sapiens [sequence omitted]

SEQ ID NO: 809671 - protein, 337 aa, Homo sapiens
GRVGDHASVAHVSREACISPCAMMLALVYIERLRHRNPDYLQHVSSSDLFLISMMVASKYLYDEGEEEEVFNDEWGAAGGVAVPTLNALERGFLSAMDWHLYTDPREIFEVLSWLESCVAEQQGRWRGWYTYTDLCVLLEQPTWQLALGSLCQRLVKLSCLLAVAYVSSVALAVASVAVIHQSLGLSCIPTPGPPDLGLTSRCLLEPCIPSVPQCLPSPANVSSCLEGSMGLRSLWGSLLASLTPPPLPPPDPPAPPTLLHNCHLCQKLQRDSPTCHACLHPNRTVPTALSSPWYHTYGLAPPWPWSPVPLSLPQPQQCSLFSVMELARLKSFVFPG

SEQ ID NO: 809672 - protein, 410 aa, Homo sapiens [sequence omitted]

SEQ ID NO: 809673 - protein, 410 aa, Homo sapiens [sequence omitted]

SEQ ID NO: 809674 - protein, 308 aa, Homo sapiens
MSDRDGSQVSLSKHVSSSDLFLISMMVASKYLYDEGEEEEVFNDEWGAAGGVAVPTLNALERGFLSAMDWHLYTDPREIFEVLSWLESCVAEQQGRWRGWYTYTDLCVLLEQPTWQLALGSLCQRLVKLSCLLAVAYVSSVALAVASVAVIHQSLGLSCIPTPGPPDLGLTSRCLLEPCIPSVPQCLPSPANVSSCLEGSMGLRSLWGSLLASLTPPPLPPPDPPAPPTLLHNCHLCQKLQRDSPTCHACLHPNRTVPTALSSPWYHTYGLAPPWPWSPVPLSLPQPQQCSLFSVMELARLKSFVFPG

SEQ ID NO: 809675 - protein, 410 aa, Homo sapiens [sequence omitted]

SEQ ID NO: 809676 - protein, 172 aa, Homo sapiens
MDLTGLLLDEEGTFSLAGFQDFTFLPGHQKLSARIRRRLYYGWDWEADCSLEELSSPVADIAVELLQKAAPSPIRRLQKKYVAHVSREACISPCAMMLALVYIERLRHRNPDYLQHVSSSDLFLISMMVASKYLYDEGEEEEVFNDEWGAAGGVAVPTLNALERGFLSAMCG

SEQ ID NO: 809677 - protein, 410 aa, Homo sapiens [sequence omitted]

SEQ ID NO: 809678 - protein, 410 aa, Homo sapiens [sequence omitted]

SEQ ID NO: 809679 - protein, 410 aa, Homo sapiens [sequence omitted]

SEQ ID NO: 809680 - protein, 108 aa, Homo sapiens
MGLRSLWGSLLASLTPPPLPPPDPPAPPTLLHNCHLCQKLQRDSPTCHACLHPNRTVPTALSSPWYHTYGLAPPWPWSPVPLSLPQPQQCSLFSVMELARLKSFVFPG

SEQ ID NO: 809681 - protein, 180 aa, Homo sapiens
TLEDLCFGTAGKDSSASPLQLVSFRSPSQGGDWRRDGPDLGLTSRCLLEPCIPSVPQCLPSPANVSSCLEGSMGLRSLWGSLLASLTPPPLPPPDPPAPPTLLHNCHLCQKLQRDSPTCHACLHPNRTVPTALSSPWYHTYGLAPPWPWSPVPLSLPQPQQCSLFSVMELARLKSFVFPG

SEQ ID NO: 809682 - protein, 190 aa, Homo sapiens
AGVLEDPFLCWRVFSGVAEQQGRWRGWYTYTDLCVLLEQPTWQLALGSLCQRLVKLSCLLAVAYVSKCLPSPANVSSCLEGSMGLRSLWGSLLASLTPPPLPPPDPPAPPTLLHNCHLCQKLQRDSPTCHACLHPNRTVPTALSSPWYHTYGLAPPWPWSPVPLSLPQPQQCSLFSVMELARLKSFVFPG

SEQ ID NO: 809683 - protein, 135 aa, Homo sapiens
MDLTGLLLDEEGTFSLAGFQDFTFLPGHQKLSARIRRRLYYGWDWEADCSLEELSSPVADIAVELLQKAAPSPIRRLQKKYVAHVSREACISPCAMMLALVYIERLRHRNPDYLQHVSSSDLFLISMIVPLSATR

SEQ ID NO: 809684 - protein, 691 aa, Homo sapiens
ARGSPEAAERGAGSAGSAGRRRRGRTGAQTAGARRGYHGRAVSSRSGRLPRLRGARAELPGRRCVPTVTMKDDFAEEEEVQSFGYKRFGIQEGTQCTKCKNNWALKFSIILLYILCALLTITVAILGYKVVEKMDNVTGGMETSRQTYDDKLTAVESDLKKLGDQTGKKAISTNSELSTFRSDILDLRQQLREITEKTSKNKDTLEKLQASGDALVDRQSQLKETLENNSFLITTVNKTLQAYNGYVTNLQQDTSVLQGNLQNQMYSHNVVIMNLNNLNLTQVQQRNLITNLQRSVDDTSQAIQRIKNDFQNLQQVFLQAKKDTDWLKEKVQSLQTLAANNSALAKANNDTLEDMNSQLNSFTGQMENITTISQANEQNLKDLQDLHKDAENRTAIKFNQLEERFQLFETDIVNIISNISYTAHHLRTLTSNLNEVRTTCTDTLTKHTDDLTSLNNTLANIRLDSVSLRMQQDLMRSRLDTEVANLSVIMEEMKLVDSKHGQLIKNFTILQGPPGPRGPRGDRGSQGPPGPTGNKGQKGEKGEPGPPGPAGERGPIGPAGPPGERGGKGSKGSQGPKGSRGSPGKPGPQGPSGDPGPPGPPGKEGLPGPQGPPGFQGLQGTVGEPGVPGPRGLPGLPGVPGMPGPKGPPGPPGPSGAVVPLALQNEPTPAPEDNGKSKPSLQPGGQGSACA

SEQ ID NO: 809685 - protein, 143 aa, Homo sapiens
KSWKRSSSWLNLMAVLFSASLCKSCRSFRFYYFSVEKEIFEDAKLFCEDKSSHLVFINTREEQQWIKKQMVGRESHWIGLTDSERENEWKWLDGTSPDYKNWKAGQPDNWNLQNEPTPAPEDNSCPPHLEELHRQMLLFFSET

SEQ ID NO: 809686 - protein, 811 aa, Homo sapiens
ARGSPEAAERGAGSAGSAGRRRRGRTGAQTAGARRGYHGRAVSSRSGRLPRLRGARAELPGRRCVPTVTMKDDFAEEEEVQSFGYKRFGIQEGTQCTKCKNNWALKFSIILLYILCALLTITVAILGYKVVEKMDNVTGGMETSRQTYDDKLTAVESDLKKLGDQTGKKAISTNSELSTFRSDILDLRQQLREITEKTSKNKDTLEKLQASGDALVDRQSQLKETLENNSFLITTVNKTLQAYNGYVTNLQQDTSVLQGNLQNQMYSHNVVIMNLNNLNLTQVQQRNLITNLQRSVDDTSQAIQRIKNDFQNLQQVFLQAKKDTDWLKEKVQSLQTLAANNSALAKANNDTLEDMNSQLNSFTGQMENITTISQANEQNLKDLQDLHKDAENRTAIKFNQLEERFQLFETDIVNIISNISYTAHHLRTLTSNLNEVRTTCTDTLTKHTDDLTSLNNTLANIRLDSVSLRMQQDLMRSRLDTEVANLSVIMEEMKLVDSKHGQLIKNFTILQGPPGPRGPRGDRGSQGPPGPTGNKGQKGEKGEPGPPGPAGERGPIGPAGPPGERGGKGSKGSQGPKGSRGSPGKPGPQGPSGDPGPPGPPGKEGLPGPQGPPGFQGLQGTVGEPGVPGPRGLPGLPGVPGMPGPKGPPGPPGPSGAVVPLALQNEPTPAPEDNGCPPHWKNFTDKCYYFSVEKEIFEDAKLFCEDKSSHLVFINTREEQQWIKKQMVGRESHWIGLTDSERENEWKWLDGTSPDYKNWKAGQPDNWGHGHGPGEDCAGLIYAGQWNDFQCEDVNNFICEKDRETVLSSAL

SEQ ID NO: 809687 - protein, 811 aa, Homo sapiens; identical to SEQ ID NO: 809686

SEQ ID NO: 809688 - protein, 811 aa, Homo sapiens; identical to SEQ ID NO: 809686

SEQ ID NO: 809689 - protein, 742 aa, Homo sapiens
MKDDFAEEEEVQSFGYKRFGIQEGTQCTKCKNNWALKFSIILLYILCALLTITVAILGYKVVEKMDNVTGGMETSRQTYDDKLTAVESDLKKLGDQTGKKAISTNSELSTFRSDILDLRQQLREITEKTSKNKDTLEKLQASGDALVDRQSQLKETLENNSFLITTVNKTLQAYNGYVTNLQQDTSVLQGNLQNQMYSHNVVIMNLNNLNLTQVQQRNLITNLQRSVDDTSQAIQRIKNDFQNLQQVFLQAKKDTDWLKEKVQSLQTLAANNSALAKANNDTLEDMNSQLNSFTGQMENITTISQANEQNLKDLQDLHKDAENRTAIKFNQLEERFQLFETDIVNIISNISYTAHHLRTLTSNLNEVRTTCTDTLTKHTDDLTSLNNTLANIRLDSVSLRMQQDLMRSRLDTEVANLSVIMEEMKLVDSKHGQLIKNFTILQGPPGPRGPRGDRGSQGPPGPTGNKGQKGEKGEPGPPGPAGERGPIGPAGPPGERGGKGSKGSQGPKGSRGSPGKPGPQGPSGDPGPPGPPGKEGLPGPQGPPGFQGLQGTVGEPGVPGPRGLPGLPGVPGMPGPKGPPGPPGPSGAVVPLALQNEPTPAPEDNGCPPHWKNFTDKCYYFSVEKEIFEDAKLFCEDKSSHLVFINTREEQQWIKKQMVGRESHWIGLTDSERENEWKWLDGTSPDYKNWKAGQPDNWGHGHGPGEDCAGLIYAGQWNDFQCEDVNNFICEKDRETVLSSAL

SEQ ID NO: 809690 - protein, 178 aa, Homo sapiens
MPKYSIILGSKGDRQKQGQIKRGNSLIMTDSLASNILRKAVHSVKSSTCRGLQFECLSVTMKDDFAEEEEVQSFGYKRFGIQEGTQCTKCKNNWALKFSIILLYILCALLTITVAILGYKVVEKMDNVTGGMETSRQTYDDKLTAVESDLKKLGDQTGKKAISTNSELSTFRSDILDI

SEQ ID NO: 809691 - protein, 1224 aa, Homo sapiens
MEPLLLGRGLIVYLMFLLLKFSKAIEIPSSVQQVPTIIKQSKVQVAFPFDEYFQIECEAKGNPEPTFSWTKDGNPFYFTDHRIIPSNNSGTFRIPNEGHISHFQGKYRCFASNKLGIAMSEEIEFIVPSVPKFPKEKIDPLEVEEGDPIVLPCNPPKGLPPLHIYWMNIELEHIEQDERVYMSQKGDLYFANVEEKDSRNDYCCFAAFPRLRTIVQKMPMKLTVNSLKHANDSSSSTEIGSKANSIKQRKPKLLLPPTESGSESSITILKGEILLLECFAEGLPTPQVDWNKIGGDLPKGREAKENYGKTLKIENVSYQDKGNYRCTASNFLGTATHDFHVIVEEPPRWTKKPQSAVYSTGSNGILLCEAEGEPQPTIKWRVNGSPVDNHPFAGDVVFPREISFTNLQPNHTAVYQCEASNVHGTILANANIDVVDVRPLIQTKDGENYATVVGYSAFLHCEFFASPEAVVSWQKVEEVKPLEGRRYHIYENGTLQINRTTEEDAGSYSCWVENAIGKTAVTANLDIRNATKLRVSPKNPRIPKLHMLELHCESKCDSHLKHSLKLSWSKDGEAFEINGTEDGRIIIDGANLTISNVTLEDQGIYCCSAHTALDSAADITQVTVLDVPDPPENLHLSERQNRSVRLTWEAGADHNSNISEYIVEFEGNKEEPGRWEELTRVQGKKTTVILPLAPFVRYQFRVIAVNEVGRSQPSQPSDHHETPPAAPDRNPQNIRVQASQPKEMIIKWEPLKSMEQNGPGLEYRVTWKPQGAPVEWEEETVTNHTLRVMTPAVYAPYDVKVQAINQLGSGPDPQSVTLYSGEDYPDTAPVIHGVDVINSTLVKVTWSTVPKDRVHGRLKGYQINWWKTKSLLDGRTHPKEVNILRFSGQRNSGMVPSLDAFSEFHLTVLAYNSKGAGPESEPYIFQTPEGVPEQPTFLKVIKVDKDTATLSWGLPKKLNGNLTGYLLQYQIINDTYEIGELNDINITTPSKPSWHLSNLNATTKYKFYLRACTSQGCGKPITEESSTLGEGSKGIGKISGVNLTQKTHPVEVFEPGAEHIVRLMTKNWGDNDSIFQDVIETRGREYAGLYDDISTQGWFIGLMCAIALLTLLLLTVCFVKRNRGGKYSVKEKEDLHPDPEIQSVKDETFGEYSDSDEKPLKGSLRSLNRDMQPTESADSLVEYGEGDHGLFSEDGSFIGAYAGSKEKGSVESNGSSTATFPLRA

SEQ ID NO: 809692 - protein, 104 aa, Homo sapiens
RKGAEARASLRQEGVDPGASQNGSSLPAAREPAAGGDGRDLRGQPRVRTSGQRPARPSLDPPRAYRTLRAPVPAPGRLGGEGARGEAPDRSRFGGGAGAVNCKP

SEQ ID NO: 809693 - protein, 864 aa, Homo sapiens
MEPLLLGRGLIVYLMFLLLKFSKAIEIPSSVQQVPTIIKQSKVQVAFPFDEYFQIECEAKGNPEPTFSWTKDGNPFYFTDHRIIPSNNSGTFRIPNEGHISHFQGKYRCFASNKLGIAMSEEIEFIVPSVPKFPKEKIDPLEVEEGDPIVLPCNPPKGLPPLHIYWMNIELEHIEQDERVYMSQKGDLYFANVEEKDSRNDYCCFAAFPRLRTIVQKMPMKLTVNSLKHANDSSSSTEIGSKANSIKQRKPKLLLPPTESGSESSITILKGEILLLECFAEGLPTPQVDWNKIGGDLPKGREAKENYGKTLKIENVSYQDKGNYRCTASNFLGTATHDFHVIVEEPPRWTKKPQSAVYSTGSNGILLCEAEGEPQPTIKWRVNGSPVDNHPFAGDVVFPREISFTNLQPNHTAVYQCEASNVHGTILANANIDVVDVRPLIQTKDGENYATVVGYSAFLHCEFFASPEAVVSWQKVEEVKPLEGRRYHIYENGTLQINRTTEEDAGSYSCWVENAIGKTAVTANLDIRNATKLRVSPKNPRIPKLHMLELHCESKCDSHLKHSLKLSWSKDGEAFEINGTEDGRIIIDGANLTISNVTLEDQGIYCCSAHTALDSAADITQVTVLDVPDPPENLHLSERQNRSVRLTWEAGADHNSNISEYIVEFEGNKEEPGRWEELTRVQGKKTTVILPLAPFVRYQFRVIAVNEVGRSQPSQPSDHHETPPAAPDRNPQNIRVQASQPKEMIIKWEPLKSMEQNGPGLEYRVTWKPQGAPVEWEEETVTNHTLRVMTPAVYAPYDVKVQAINQLGSGPDPQSVTLYSGEDYPDTAPVIHGVDVINNNICKQRYWFTPTFHIYLFKGARTFI

SEQ ID NO: 809694 - protein, 662 aa, Homo sapiens
LKWLRKQAAAAVGLAAPPPGARIIIDGANLTISNVTLEDQGIYCCSAHTALDSAADITQVTVLDVPDPPENLHLSERQNRSVRLTWEAGADHNSNISEYIVEFEGNKEEPGRWEELTRVQGKKTTVILPLAPFVRYQFRVIAVNEVGRSQPSQPSDHHETPPAAPDRNPQNIRVQASQPKEMIIKWEPLKSMEQNGPGLEYRVTWKPQGAPVEWEEETVTNHTLRVMTPAVYAPYDVKVQAINQLGSGPDPQSVTLYSGEDYPDTAPVIHGVDVINSTLVKVTWSTVPKDRVHGRLKGYQINWWKTKSLLDGRTHPKEVNILRFSGQRNSGMVPSLDAFSEFHLTVLAYNSKGAGPESEPYIFQTPEGVPEQPTFLKVIKVDKDTATLSWGLPKKLNGNLTGYLLQYQIINDTYEIGELNDINITTPSKPSWHLSNLNATTKYKFYLRACTSQGCGKPITEESSTLGEGSKGIGKISGVNLTQKTHPVEVFEPGAEHIVRLMTKNWGDNDSIFQDVIETRGREYAGLYDDISTQGWFIGLMCAIALLTLLLLTVCFVKRNRGGKYSVKEKEDLHPDPEIQSVKDETFGEYSDSDEKPLKGSLRSLNRDMQPTESADSLVEYGEGDHGLFSEDGSFIGAYAGSKEKGSVESNGSSTATFPLRA

SEQ ID NO: 809695 - protein, 143 aa, Homo sapiens
RCGRLYTDPPTVFTQGWFIGLMCAIALLTLLLLTVCFVKRNRGGKYSVKEKEDLHPDPEIQSVKDETFGEYSDSDEKPLKGSLRSLNRDMQPTESADSLVEYGEGDHGLFSEDGSFIGAYAGSKEKGSVESNGSSTATFPLRA

SEQ ID NO: 809696 - protein, 1112 aa, Homo sapiens
MEPLLLGRGLIVYLMFLLLKFSKAIEIPSSVQQVPTIIKQSKVQVAFPFDEYFQIECEAKGNPEPTFSWTKDGNPFYFTDHRIIPSNNSGTFRIPNEGHISHFQGKYRCFASNKLGIAMSEEIEFIVPSVPKFPKEKIDPLEVEEGDPIVLPCNPPKGLPPLHIYWMNIELEHIEQDERVYMSQKGDLYFANVEEKDSRNDYCCFAAFPRLRTIVQKMPMKLTVNSLKHANDSSSSTEIGSKANSIKQRKPKLLLPPTESGSESSITILKGEILLLECFAEGLPTPQVDWNKIGGDLPKGREAKENYGKTLKIENVSYQDKGNYRCTASNFLGTATHDFHVIVEEPPRWTKKPQSAVYSTGSNGILLCEAEGEPQPTIKWRVNGSPVDNHPFAGDVVFPREISFTNLQPNHTAVYQCEASNVHGTILANANIDVVDVRPLIQTKDGENYATVVGYSAFLHCEFFASPEAVVSWQKVEEVKPLEGRRYHIYENGTLQINRTTEEDAGSYSCWVENAIGKTAVTANLDIRNATKLRVSPKNPRIPKLHMLELHCESKCDSHLKHSLKLSWSKDGEAFEINGTEDGRIIIDGANLTISNVTLEDQGIYCCSAHTALDSAADITQVTVLDVPDPPENLHLSERQNRSVRLTWEAGADHNSNISEYIVEFEGNKEEPGRWEELTRVQGKKTTVILPLAPFVRYQFRVIAVNEVGRSQPSQPSDHHETPPAAPDRNPQNIRVQASQPKEMIIKWEPLKSMEQNGPGLEYRVTWKPQGAPVEWEEETVTNHTLRVMTPAVYAPYDVKVQAINQLGSGPDPQSVTLYSGEDYPDTAPVIHGVDVINSTLVKVTWSTVPKDRVHGRLKGYQINWWKTKSLLDGRTHPKEVNILRFSGQRNSGMVPSLDAFSEFHLTVLAYNSKGAGPESEPYIFQTPEGVPEQPTFLKVIKVDKDTATLSWGLPKKLNGNLTGYLLQYQIINDTYEIGELNDINITTPSKPSWHLSNLNATTKYKFYLRACTSQGCGKPITEESSTLGEGKYAGLYDDISTQGWFIGLMCAIALLTLLLLTVCFVKRNRGGKYSVKEKEDLHPDPEIQSVKDETFGEYRIKNNKEKERKRE

SEQ ID NO: 809697 - protein, 1036 aa, Homo sapiens
MEPLLLGRGLIVYLMFLLLKFSKAIEIPSSVQQVPTIIKQSKVQVAFPFDEYFQIECEAKGNPEPTFSWTKDGNPFYFTDHRIIPSNNSGTFRIPNEGHISHFQGKYRCFASNKLGIAMSEEIEFIVPSVPKFPKEKIDPLEVEEGDPIVLPCNPPKGLPPLHIYWMNIELEHIEQDERVYMSQKGDLYFANVEEKDSRNDYCCFAAFPRLRTIVQKMPMKLTVNSLKHANDSSSSTEIGSKANSIKQRKPKLLLPPTESGSESSITILKGEILLLECFAEGLPTPQVDWNKIGGDLPKGREAKENYGKTLKIENVSYQDKGNYRCTASNFLGTATHDFHVIVEEPPRWTKKPQSAVYSTGSNGILLCEAEGEPQPTIKWRVNGSPVDNHPFAGDVVFPREISFTNLQPNHTAVYQCEASNVHGTILANANIDVVDVRPLIQTKDGENYATVVGYSAFLHCEFFASPEAVVSWQKVEEVKPLEGRRYHIYENGTLQINRTTEEDAGSYSCWVENAIGKTAVTANLDIRNATKLRVSPKNPRIPKLHMLELHCESKCDSHLKHSLKLSWSKDGEAFEINGTEDGRIIIDGANLTISNVTLEDQGIYCCSAHTALDSAADITQVTVLDVPDPPENLHLSERQNRSVRLTWEAGADHNSNISEYIVEFEGNKEEPGRWEELTRVQGKKTTVILPLAPFVRYQFRVIAVNEVGRSQPSQPSDHHETPPAAPDRNPQNIRVQASQPKEMIIKWEPLKSMEQNGPGLEYRVTWKPQGAPVEWEEETVTNHTLRVMTPAVYAPYDVKVQAINQLGSGPDPQSVTLYSGEDYPDTAPVIHGVDVINSTLVKVTWSTVPKDRVHGRLKGYQINWWKTKSLLDGRTHPKEVNILRFSGQRNSGMVPSLDAFSEFHLTVLAYNSKGAGPESEPYIFQTPEGVPEQPTFLKVIKVDKDTATLSWGLPKKLNGNLTGYLLQYQIINDTYEIGELNDINITTPSKPSWHLSNLNATTKYKFYLRACTSQGCGKPITEESSTLGEGSKYMR

SEQ ID NO: 809698 - protein, 556 aa, Homo sapiens
MEPLLLGRGLIVYLMFLLLKFSKAIEIPSSVQQVPTIIKQSKVQVAFPFDEYFQIECEAKGNPEPTFSWTKDGNPFYFTDHRIIPSNNSGTFRIPNEGHISHFQGKYRCFASNKLGIAMSEEIEFIVPSVPKFPKEKIDPLEVEEGDPIVLPCNPPKGLPPLHIYWMNIELEHIEQDERVYMSQKGDLYFANVEEKDSRNDYCCFAAFPRLRTIVQKMPMKLTVNSLKHANDSSSSTEIGSKANSIKQRKPKLLLPPTESGSESSITILKGEILLLECFAEGLPTPQVDWNKIGGDLPKGREAKENYGKTLKIENVSYQDKGNYRCTASNFLGTATHDFHVIVEEPPRWTKKPQSAVYSTGSNGILLCEAEGEPQPTIKWRVNGSPVDNHPFAGDVVFPREISFTNLQPNHTAVYQCEASNVHGTILANANIDVVDVRPLIQTKDGENYATVVGYSAFLHCEFFASPEAVVSWQKVEEVKPLEGRRYHIYENGTLQINRTTEEDAGSYSCWVENAIGKTAVTANLDIRSIFISLLLCMNCHMGSVCLHLPKWNNTI

SEQ ID NO: 809699 - protein, 749 aa, Homo sapiens
MEPLLLGRGLIVYLMFLLLKFSKAIEIPSSVQQVPTIIKQSKVQVAFPFDEYFQIECEAKGNPEPTFSWTKDGNPFYFTDHRIIPSNNSGTFRIPNEGHISHFQGKYRCFASNKLGIAMSEEIEFIVPSVPKFPKEKIDPLEVEEGDPIVLPCNPPKGLPPLHIYWMNIELEHIEQDERVYMSQKGDLYFANVEEKDSRNDYCCFAAFPRLRTIVQKMPMKLTVNSLKHANDSSSSTEIGSKANSIKQRKPKLLLPPTESGSESSITILKGEILLLECFAEGLPTPQVDWNKIGGDLPKGREAKENYGKTLKIENVSYQDKGNYRCTASNFLGTATHDFHVIVEEPPRWTKKPQSAVYSTGSNGILLCEAEGEPQPTIKWRVNGSPVDNHPFAGDVVFPREISFTNLQPNHTAVYQCEASNVHGTILANANIDVVDVRPLIQTKDGENYATVVGYSAFLHCEFFASPEAVVSWQKVEEVKPLEGRRYHIYENGTLQINRTTEEDAGSYSCWVENAIGKTAVTANLDIRNATKLRVSPKNPRIPKLHMLELHCESKCDSHLKHSLKLSWSKDGEAFEINGTEDGRIIIDGANLTISNVTLEDQGIYCCSAHTALDSAADITQVTVLDVPDPPENLHLSERQNRSVRLTWEAGADHNSNISEYIVEFEGNKEEPGRWEELTRVQGKKTTVILPLAPFVRYQFRVIAVNEVGRSQPSQPSDHHETPPAAPDRNPQNIRVQASQPKEMIIKWE

SEQ ID NO: 809700 - protein, 141 aa, Homo sapiens [sequence omitted]

SEQ ID NO: 809701 - protein, 82 aa, Homo sapiens
WPRPHARDADQGAGARSAPNRPYLKVISIREETEVQAPQTHWASTFPGSRTSDEETDAWGSQKYLQIVGVSAGNKCFGRGCL

SEQ ID NO: 809702 - protein, 120 aa, Homo sapiens [sequence omitted]

SEQ ID NO: 809703 - protein, 120 aa, Homo sapiens [sequence omitted]

SEQ ID NO: 809704 - protein, 518 aa, Homo sapiens
MPTVVVMDVSLSMTRPVSIEGSEEYQRKHLAAHGLTMLFEHMATNYKLEFTALVVFSSLWELMVPFTRDYNTLQEALSNMDDYDKTCLESALVGVCNIVQQEWGGAIPCQVVLVTDGCLGIGRGSLRHSLATQNQRSESNRFPLPFPFPSKLYIMCMANLEELQSTDSLECLERLIDLNNGEGQIFTIDGPLCLKNVQSMFGKLIDLAYTPFHAVLKCGHLTADVQVFPRPEPFVVDEEIDPIPKVINTDLEIVGFIDIADISSPPVLSRHLVLPIALNKEGDEVGTGITDDNEDENSANQIAGKIPNFCVLLHGSLKVEGMVAIVQLGPEWHGMLYSQADSKKKSNLMMSLFEPGPEPLPWLGKMAQLGPISDAKENPYGEDDNKSPFPLQPKNKRSYAQNVTVWIKPSGLQTDVQKILRNARKLPEKTQTFYKELNRLRKAALAFGFLDLLKGVADMLERECTLLPETAHPDAAFQLTHAAQQLKLASTGTSEYAAYDQNITPLHTDFSGSSTERI

SEQ ID NO: 809705 - protein, 518 aa, Homo sapiens; identical to SEQ ID NO: 809704

SEQ ID NO: 809706 - protein, 518 aa, Homo sapiens; identical to SEQ ID NO: 809704

SEQ ID NO: 809707 - protein, 518 aa, Homo sapiens; identical to SEQ ID NO: 809704

SEQ ID NO: 809708 - protein, 439 aa, Homo sapiens
MDDYDKTCLESALVGVCNIVQQEWGGAIPCQVVLVTDGCLGIGRGSLRHSLATQNQRSESNRFPLPFPFPSKLYIMCMANLEELQSTDSLECLERLIDLNNGEGQIFTIDGPLCLKNVQSMFGKLIDLAYTPFHAVLKCGHLTADVQVFPRPEPFVVDEEIDPIPKVINTDLEIVGFIDIADISSPPVLSRHLVLPIALNKEGDEVGTGITDDNEDENSANQIAGKIPNFCVLLHGSLKVEGMVAIVQLGPEWHGMLYSQADSKKKSNLMMSLFEPGPEPLPWLGKMAQLGPISDAKENPYGEDDNKSPFPLQPKNKRSYAQNVTVWIKPSGLQTDVQKILRNARKLPEKTQTFYKELNRLRKAALAFGFLDLLKGVADMLERECTLLPETAHPDAAFQLTHAAQQLKLASTGTSEYAAYDQNITPLHTDFSGSSTERI

SEQ ID NO: 809709 - protein, 439 aa, Homo sapiens; identical to SEQ ID NO: 809708

SEQ ID NO: 809710 - protein, 461 aa, Homo sapiens
MPTESLCRRTVSGDGHGEALSNMDDYDKTCLESALVGVCNIVQQEWGGAIPCQVVLVTDGCLGIGRGSLRHSLATQNQRSESNRFPLPFPFPSKLYIMCMANLEELQSTDSLECLERLIDLNNGEGQIFTIDGPLCLKNVQSMFGKLIDLAYTPFHAVLKCGHLTADVQVFPRPEPFVVDEEIDPIPKVINTDLEIVGFIDIADISSPPVLSRHLVLPIALNKEGDEVGTGITDDNEDENSANQIAGKIPNFCVLLHGSLKVEGMVAIVQLGPEWHGMLYSQADSKKKSNLMMSLFEPGPEPLPWLGKMAQLGPISDAKENPYGEDDNKSPFPLQPKNKRSYAQNVTVWIKPSGLQTDVQKILRNARKLPEKTQTFYKELNRLRKAALAFGFLDLLKGVADMLERECTLLPETAHPDAAFQLTHAAQQLKLASTGTSEYAAYDQNITPLHTDFSGSSTERI

SEQ ID NO: 809711 - protein, 518 aa, Homo sapiens; identical to SEQ ID NO: 809704

SEQ ID NO: 809712 - protein, 157 aa, Homo sapiens
MWKRSEQMKIKSDAKENPYGEDDNKSPFPLQPKNKRSYAQNVTVWIKPSGLQTDVQKILRNARKLPEKTQTFYKELNRLRKAALAFGFLDLLKGVADMLERECTLLPETAHPDAAFQLTHAAQQLKLASTGTSEYAAYDQNITPLHTDFSGSSTERI

SEQ ID NO: 809713 - protein, 518 aa, Homo sapiens; identical to SEQ ID NO: 809704

SEQ ID NO: 809714 - protein, 80 aa, Homo sapiens
LLSRGLIVPAVARGRKVYADGKFMPTDCVRRWARGEWGGRGPGTAFRCLLGLQVKGLWVKNNPGPALGLPATVAAAPRCL

SEQ ID NO: 809715 - protein, 431 aa, Homo sapiens
MGSPGATTGWGLLDYKTEKYVMTRNWRVGALQRLLQFGIVVYVVGWALLAKKGYQERDLEPQFSIITKLKGVSVTQIKELGNRLWDVADFVKPPQGENVFFLVTNFLVTPAQVQGRCPEHPSVPLANCWVDEDCPEGEGGTHSHGVKTGQCVVFNGTHRTCEIWSWCPVESGVVPSRPLLAQAQNFTLFIKNTVTFSKFNFSKSNALETWDPTYFKHCRYEPQFSPYCPVFRIGDLVAKAGGTFEDLALLGGSVGIRVHWDCDLDTGDSGCWPHYSFQLQEKSYNFRTATHWWEQPGVEARTLLKLYGIRFDILVTGQAGKFGLIPTAVTLGTGAAWLGVVTFFCDLLLLYVDREAHFYWRTKYEEAKAPKATANSVWRELALASQARLAECLRRSSAPAPTATAAGSQTQTPGWPCPSSDTHLPTHSGSL

SEQ ID NO: 809716 - protein, 382 aa, Homo sapiens
MGSPGATTGWGLLDYKTEKYVMTRNWRVGALQRLLQFGIVVYVVGWALLAKKGYQERDLEPQFSIITKLKGVSVTQIKELGNRLWDVADFVKPPQVYKTGQCVVFNGTHRTCEIWSWCPVESGVVPSRPLLAQAQNFTLFIKNTVTFSKFNFSKSNALETWDPTYFKHCRYEPQFSPYCPVFRIGDLVAKAGGTFEDLALLGGSVGIRVHWDCDLDTGDSGCWPHYSFQLQEKSYNFRTATHWWEQPGVEARTLLKLYGIRFDILVTGQAGKFGLIPTAVTLGTGAAWLGVVTFFCDLLLLYVDREAHFYWRTKYEEAKAPKATANSVWRELALASQARLAECLRRSSAPAPTATAAGSQTQTPGWPCPSSDTHLPTHSGSL

SEQ ID NO: 809717 - protein, 356 aa, Homo sapiens
MGSPGATTGWGLLDYKTEKWALLAKKGYQERDLEPQFSIITKLKGVSVTQIKELGNRLWDVADFVKPPQVYKTGQCVVFNGTHRTCEIWSWCPVESGVVPSRPLLAQAQNFTLFIKNTVTFSKFNFSKSNALETWDPTYFKHCRYEPQFSPYCPVFRIGDLVAKAGGTFEDLALLGGSVGIRVHWDCDLDTGDSGCWPHYSFQLQEKSYNFRTATHWWEQPGVEARTLLKLYGIRFDILVTGQAGKFGLIPTAVTLGTGAAWLGVVTFFCDLLLLYVDREAHFYWRTKYEEAKAPKATANSVWRELALASQARLAECLRRSSAPAPTATAAGSQTQTPGWPCPSSDTHLPTHSGSL

SEQ ID NO: 809718 - protein, 82 aa, Homo sapiens
PLPLPPARSLARRALSSSYKLSGSAVDKKPGRPSASLPRAGWGELKGTGRRRGFSMLARMVLNSRPPVICLPRPSKVLGLHA

SEQ ID NO: 809719 - protein, 115 aa, Homo sapiens
PLPLPPARSLARRALSSSYKLSGSAVDKKPGRPSASLPRAGWGELKGTGRVSRPRGQDREGSGLRGPASARGGKRGCGSGNPCKDPETGKSARAKVSAPSPGSHKVATTKRRGEE

SEQ ID NO: 809720 - protein, 1200 aa, Homo sapiens
MGDQQLYKTNHVAHGSENLFYQQPPLGVHSGLNHNYGNAVTGGGMDAPQASPISPHFPQDTRDGLGLPVGSKNLGQMDTSRQGGWGSHAGPGNHVQLRGNLANSNMMWGAPAQAEPTDGYQYTYSQASEIRTQKLTSGVLHKLDSFTQVFANQNLRIQVNNMAQVLHTQSAVMDGAPDSALRQLLSQKPMEPPAPAIPSRYQQVPQQPHPGFTGGLSKPALQVGQHPTQGHLYYDYQQPLAQVPVQGGQPLQAPQMLSQHMQQMQQHQYYPPQQQQQAGQQRISMQEIQTQPQQIRPSQPQPPPQQQQPQQLQLQQRQGSMQIPQYYQPQPMMQHLQEQQQQQMHLQPPSYHRDPHQYTPEQAHTVQLIPLGSMSQYYYQEPQQPYSHPLYQQSHLSQHQQREDSQLKTYSSDRQAQAMLSSHGDLGPPDTGMGDPASSDLTRVSSTLPHRPLLSPSGIHLNNMGPQHQQLSPSAMWPQMHLPDGRAQPGSPESSGQPKGAFGEQFDAKNKLTCSICLKEFKNLPALNGHMRSHGGMRASPNLKQEEGEKVLPPQPQPPLPPPPPPPPPPQLPPEAESLTPMVMPVSVPVKLLPPKPSSQGFTNSTVAAPSARDKPASSMSDDEMPVLEIPRKHQPSVPKAEEPLKTVQEKKKFRHRPEPLFIPPPPSYNPNPAASYSGATLYQSQLRSPRVLGDHLLLDPTHELPPYTPPPMLSPVRQGSGLFSNVLISGHGPGAHPQLPLTPLTPTPRVLLCRSNSIDGSNVTVTPGPGEQTVDVEPRINIGLRFQAEIPELQDISALAQDTHKATLVWKPWPELENHDLQQRVENLLNLCCSSALPGGGTNSEFALHSLFEAKGDVMVALEMLLLRKPVRLKCHPLANYHYAGSDKWTSLERKLFNKALATYSKDFIFVQKMVKSKTVAQCVEYYYTWKKIMRLGRKHRTRLAEIIDDCVTSEEEEELEEEEEEDPEEDRKSTKEEESEVPKSPEPPPVPVLAPTEGPPLQALGQPSGSFICEMPNCGAVFSSRQALNGHARIHGGTNQVTKARGAIPSGKQKPGGTQSGYCSVKSSPSHSTTSGETDPTTIFPCKECGKVFFKIKSRNAHMKTHRQQEEQQRQKAQKAAFAAEMAATIERTTGPVGAPGLLPLDQLSLIKPIKDVDILDDDVVQQLGGVMEEAEVVDTDLLLDDQDSVLLQGDAEL

SEQ ID NO: 809721 - protein, 956 aa, Homo sapiens
MAQVLHTQSAVMDGAPDSALRQLLSQKPMEPPAPAIPSRYQQVPQQPHPGFTGGLSKPALQVGQHPTQGHLYYDYQQPLAQVPVQGGQPLQAPQMLSQHMQQMQQHQYYPPQQQQQAGQQRISMQEIQTQPQQIRPSQPQPPPQQQQPQQLQLQQRQGSMQIPQYYQPQPMMQHLQEQQQQQMHLQPPSYHRDPHQYTPEQAHTVQLIPLGSMSQYYYQEPQQPYSHPLYQQSHLSQHQQREDSQLKTYSSDRQAQAMLSSHGDLGPPDTGMGDPASSDLTRVSSTLPHRPLLSPSGIHLNNMGPQHQQLSPSAMWPQMHLPDGRAQPGSPESSGQPKGAFGEQFDAKNKLTCSICLKEFKNLPALNGHMRSHGGMRASPNLKQEIPRKHQPSVPKAEEPLKTVQEKKKFRHRPEPLFIPPPPSYNPNPAASYSGATLYQSQLRSPRVLGDHLLLDPTHELPPYTPPPMLSPVRQGSGLFSNVLISGHGPGAHPQLPLTPLTPTPRVLLCRSNSIDGSNVTVTPGPGEQTVDVEPRINIGLRFQAEIPELQDISALAQDTHKATLVWKPWPELENHDLQQRVENLLNLCCSSALPGGGTNSEFALHSLFEAKGDVMVALEMLLLRKPVRLKCHPLANYHYAGSDKWTSLERKLFNKALATYSKDFIFVQKMVKSKTVAQCVEYYYTWKKIMRLGRKHRTRLAEIIDDCVTSEEEEELEEEEEEDPEEDRKSTKEEESEVPKSPEPPPVPVLAPTEGPPLQALGQPSGSFICEMPNCGAVFSSRQALNGHARIHGGTNQVTKARGAIPSGKQKPGGTQSGYCSVKSSPSHSTTSGETDPTTIFPCKECGKVFFKIKSRNAHMKTHRQQEEQQRQKAQKAAFAAEMAATIERTTGPVGAPGLLPLDQLSLIKPIKDVDILDDDVVQQLGGVMEEAEVVDTDLLLDDQDSVLLQGDAEL

SEQ ID NO: 809722 - protein, 968 aa, Homo sapiens
MAQVLHTQSAVMDGAPDSALRQLLSQKPMEPPAPAIPSRYQQVPQQPHPGFTGGLSKPALQVGQHPTQGHLYYDYQQPLAQVPVQGGQPLQAPQMLSQHMQQMQQHQYYPPQQQQQAGQQRISMQEIQTQPQQIRPSQPQPPPQQQQPQQLQLQQRQGSMQIPQYYQPQPMMQHLQEQQQQQMHLQPPSYHRDPHQYTPEQAHTVQLIPLGSMSQYYYQEPQQPYSHPLYQQSHLSQHQQREDSQLKTYSSDRQAQAMLSSHGDLGPPDTGMGDPASSDLTRVSSTLPHRPLLSPSGIHLNNMGPQHQQLSPSAMWPQMHLPDGRAQPGSPESSGQPKGAFGEQFDAKNKLTCSICLKEFKNLPALNGHMRSHGGMRASPNLKQEIPRKHQPSVPKAEEPLKTVQEKKKFRHRPEPLFIPPPPSYNPNPAASYSGATLYQSQLRSPRVLGDHLLLDPTHELPPYTPPPMLSPVRQGSGLFSNVLISGHGPGAHPQLPLTPLTPTPRVLLCRSNSIDGSNVTVTPGPGEQTVDVEPRINIGLRFQAEIPELQDISALAQDTHKATLVWKPWPELENHDLQQRVENLLNLCCSSALPGGGTNSEFALHSLFEAKGDVMVALEMLLLRKPVRLKCHPLANYHYAGSDKWTSLERKLFNKALATYSKDFIFVQKMVKSKTVAQCVEYYYTWKKIMRLGRKHRTRLAEIIDDCVTSEEEEELEEEEEEDPEEDRKSTKEEESEVPKSPEPPPVPVLAPTEGPPLQALGQPSGSFICEMPNCGADCRCHVTPFLPQVFSSRQALNGHARIHGGTNQVTKARGAIPSGKQKPGGTQSGYCSVKSSPSHSTTSGETDPTTIFPCKECGKVFFKIKSRNAHMKTHRQQEEQQRQKAQKAAFAAEMAATIERTTGPVGAPGLLPLDQLSLIKPIKDVDILDDDVVQQLGGVMEEAEVVDTDLLLDDQDSVLLQGDAEL

SEQ ID NO: 809723 - protein, 184 aa, Homo sapiens
MPNCGAVFSSRQALNGHARIHGGTNQVTKARGAIPSGKQKPGGTQSGYCSVKSSPSHSTTSGETDPTTIFPCKECGKVFFKIKSRNAHMKTHRQQEEQQRQKAQKAAFAAEMAATIERTTGPVGAPGLLPLDQLSLIKPIKDVDILDDDVVQQLGGVMEEAEVVDTDLLLDDQDSVLLQGDAEL

SEQ ID NO: 809724 - protein, 109 aa, Homo sapiens
PVPPPLTSTVLTAFPLWVDDLHRTHRPVADSCLFSPLGLQVALEMLLLRKPVRLKCHPLANYHYAGRLARSPVSCCLLTTGCLHVRLCHFLAMDNTGSVLITTCDLKAS

SEQ ID NO: 809725 - protein, 273 aa, Homo sapiens
AAAAVPPAAAANHHHHHHHALHEAPKFTVETLEHTVNNDSEIWGLLQPYQHLICGKNASGVLCLPDSLNLHRDPQRSNKPGELPMFSQSELRTIEQSLLATRVGSIAELSDLVSRAMHHLQPLNAKHHGNGTPLHHKQGALYWEPEALYTLCYFMHCPQMEWENPNVEPSKVNLQVEKRPFLVLPPLMEWIRVAVAHAGHRRSFSMDSDDVRQAARLLLPGVDCEPRQLRADDCFCASRKLDAVAIEAKFKQDLGFRMLNCGRTDLVKQAVSL

SEQ ID NO: 809726 - protein, 170 aa, Homo sapiens
AAAAVPPAAAANHHHHHHHALHEAPKFTVETLEHTVNNDSEIWGLLQPYQHLICGKNASGDLVSRAMHHLQPLNARPFLVLPPLMEWIRVAVAHAGHRRSFSMDSDDVRQAARLLLPGVDCEPRQLRADDCFCASRKLDAVAIEAKFKQDLGFRMLNCGRTDLVKQAVSL

SEQ ID NO: 809727 - protein, 92 aa, Homo sapiens
PAAAANHHHHHHHALHEAPKFTVETLEHTVNNDSEIWGLLQPYQHLICGKNASGKCLRGCHSLSPNLANSWRKFASRPPPASSQPRAAVPSR

SEQ ID NO: 809728 - protein, 449 aa, Homo sapiens
MSPESKKLFNIIILGVAFMFMFTAFQTCGNVAQTVIRSLNRTDFHGSGYTSMAIIYGVFSASNLITPSVVAIVGPQLSMFASGLFYSMYIAVFIQPFPWSFYTASVFIGIAAAVLWTAQGNCLTINSDEHSIGRNSGIFWALLQSSLFFGNLYIYFAWQGKTQISESDRRTVFIALTVISLVGTVLFFLIRKPDSENVLGEDESSDDQDMEVNESAQNNLTKAVDAFKKSFKLCVTKEMLLLSITTAYTGLELTFFSGVYGTCIGATNKFGAEEKSLIGLSGSFIGIGEILGGSLFGLLSKNNRFGRNPVVLLGILVHFIAFYLIFLNMPGDAPIAPVKGTDSSAYIKSSKEVAILCSFLLGLGDSCFNTQLLSILGFLYSEDSAPAFAIFKFVQSICAAVAFFYSNYLLLHWQLLVMVIFGFFGTISFFTVEWEAAAFVARGSDYRSI

SEQ ID NO: 809729 - protein, 449 aa, Homo sapiens; identical to SEQ ID NO: 809728

SEQ ID NO: 809730 - protein, 449 aa, Homo sapiens; identical to SEQ ID NO: 809728

SEQ ID NO: 809731 - protein, 449 aa, Homo sapiens; identical to SEQ ID NO: 809728

SEQ ID NO: 809732 - protein, 449 aa, Homo sapiens; identical to SEQ ID NO: 809728

SEQ ID NO: 809733 - protein, 449 aa, Homo sapiens; identical to SEQ ID NO: 809728

SEQ ID NO: 809734 - protein, 283 aa, Homo sapiens
MSPESKKLFNIIILGVAFMFMFTAFQTCGNVAQTVIRSLNRTDFHGSGYTSMAIIYGVFSASNLITPSVVAIVGPQLSMFASGLFYSMYIAVFIQPFPWSFYTASVFIGIAAAVLWTAQGNCLTINSDEHSIGRNSGIFWALLQSSLFFGNLYIYFAWQGKTQISESDRRTVFIALTVISLVGTVLFFLIRKPDSENVLGEDESSDDQDMEVNESAQNNLTKAVDAFKKSFKLCVTKEMLLLSITTAYTGLELTFFSGVYGTCIGATNKFGAEEKSVEASSAC

SEQ ID NO: 809735 - protein, 302 aa, Homo sapiens
MSTALGETVGFSGHFCSLESDRRTVFIALTVISLVGTVLFFLIRKPDSENVLGEDESSDDQDMEVNESAQNNLTKAVDAFKKSFKLCVTKEMLLLSITTAYTGLELTFFSGVYGTCIGATNKFGAEEKSLIGLSGSFIGIGEILGGSLFGLLSKNNRFGRNPVVLLGILVHFIAFYLIFLNMPGDAPIAPVKGTDSSAYIKSSKEVAILCSFLLGLGDSCFNTQLLSILGFLYSEDSAPAFAIFKFVQSICAAVAFFYSNYLLLHWQLLVMVIFGFFGTISFFTVEWEAAAFVARGSDYRSI

SEQ ID NO: 809736 - protein, 235 aa, Homo sapiens
MSPESKKLFNIIILGVAFMFMFTAFQTCGNVAQTVIRSLNRTDFHGSGYTSMAIIYGVFSASNLITPSVVAIVGPQLSMFASGLFYSMYIAVFIQPFPWSFYTASVFIGIAAAVLWTAQGNCLTINSDEHSIGRNSGIFWALLQSSLFFGNLYIYFAWQGKTQISESDRRTVFIALTVISLVGTVLFFLIRKPDSENVLGEDESSDDQDMEVNEHWVFYKLKACGNPASSLPRTI

SEQ ID NO: 809737 - protein, 397 aa, Homo sapiens
MSPESKKLFNIIILGVAFMFMFTAFQTCGNVAQTVIRSLNRTDFHGSGYTSMAIIYGVFSASNLITPSVVAIVGPQLSMFASGLFYSMYIAVFIQPFPWSFYTASVFIGIAAAESDRRTVFIALTVISLVGTVLFFLIRKPDSENVLGEDESSDDQDMEVNESAQNNLTKAVDAFKKSFKLCVTKEMLLLSITTAYTGLELTFFSGVYGTCIGATNKFGAEEKSLIGLSGSFIGIGEILGGSLFGLLSKNNRFGRNPVVLLGILVHFIAFYLIFLNMPGDAPIAPVKGTDSSAYIKSSKEVAILCSFLLGLGDSCFNTQLLSILGFLYSEDSAPAFAIFKFVQSICAAVAFFYSNYLLLHWQLLVMVIFGFFGTISFFTVEWEAAAFVARGSDYRSI

SEQ ID NO: 809738 - protein, 270 aa, Homo sapiens
MSPESKKLFNIIILGVAFMFMFTAFQTCGNVAQTVIRSLNRTDFHGSGYTSMAIIYGVFSASNLITPSVVAIVGPQLSMFASGLFYSMYIAVFIQPFPWSFYTASVFIGIAAAVLWTAQGNCLTINSDEHSIGRNSGIFWALLQSSLFFGNLYIYFAWQGKTQISESDRRTVFIALTVISLVGTVLFFLIRKPDSENVLGEDESSDDQDMEVNESAQNNLTKAVDAFKKSFKLCVTKEMLLLSITTAYTVSELLSISTTPSIRSPCDLAG

SEQ ID NO: 809739 - protein, 319 aa, Homo sapiens
  misc_feature (7)..(7): Xaa can be any naturally occurring amino acid
QLCEIRXRKGALLQSSLFFGNLYIYFAWQGKTQISESDRRTVFIALTVISLVGTVLFFLIRKPDSENVLGEDESSDDQDMEVNESAQNNLTKAVDAFKKSFKLCVTKEMLLLSITTAYTGLELTFFSGVYGTCIGATNKFGAEEKSLIGLSGSFIGIGEILGGSLFGLLSKNNRFGRNPVVLLGILVHFIAFYLIFLNMPGDAPIAPVKGTDSSAYIKSSKEVAILCSFLLGLGDSCFNTQLLSILGFLYSEDSAPAFAIFKFVQSICAAVAFFYSNYLLLHWQLLVMVIFGFFGTISFFTVEWEAAAFVARGSDYRSI

SEQ ID NO: 809740 - protein, 116 aa, Homo sapiens [sequence omitted]

SEQ ID NO: 809741 - protein, 211 aa, Homo sapiens
MLLLSITTAYTGLELTFFSGVYGTCIGATNKFGAEEKSLIGLSGSFIGIGEILGGSLFGLLSKNNRFGRNPVVLLGILVHFIAFYLIFLNMPGDAPIAPVKGTDSSAYIKSSKEVAILCSFLLGLGDSCFNTQLLSILGFLYSEDSAPAFAIFKFVQSICAAVAFFYSNYLLLHWQLLVMVIFGFFGTISFFTVEWEAAAFVARGSDYRSI

SEQ ID NO: 809742 - protein, 116 aa, Homo sapiens
MSPESKKLFNIIILGVAFMFMFTAFQTCGNVAQTVIRSLNRTDFHGSGYTSMAIIYGVFLCFQILDLTNTVPKDLAFGPVTWGFNSVPPFKLSSIRFAQVSLILQHVHCRFHPAFP

SEQ ID NO: 809743 - protein, 69 aa, Homo sapiens
VILILELFGRYYLVSSFFSVESDRRTVFIALTVISLVGTVLFFLIRKPDSENVLGEDESSDDQDMEVNE

SEQ ID NO: 809744 - protein, 96 aa, Homo sapiens
PLLPLQETWGDSSIATWIWIPSWTLGEDSWTETGTWTANEIWRPTRTWTWTFVRIWTWRSTEIENECGTETSSGCSEIGCETWNGSDSGIGCGDAA

SEQ ID NO: 809745 - protein, 763 aa, Homo sapiens
MVACRAIGILSRFSAFRILRSRGYICRNFTGSSALLTRTHINYGVKGDVAVVRINSPNSKVNTLSKELHSEFSEVMNEIWASDQIRSAVLISSKPGCFIAGADINMLAACKTLQEVTQLSQEAQRIVEKLEKSTKPIVAAINGSCLGGGLEVAISCQYRIATKDRKTVLGTPEVLLGALPGAGGTQRLPKMVGVPAALDMMLTGRSIRADRAKKMGLVDQLVEPLGPGLKPPEERTIEYLEEVAITFAKGLADKKISPKRDKGLVEKLTAYAMTIPFVRQQVYKKVEEKVRKQTKGLYPAPLKIIDVVKTGIEQGSDAGYLCESQKFGELVMTKESKALMGLYHGQVLCKKNKFGAPQKDVKHLAILGAGLMGAGIAQVSVDKGLKTILKDATLTALDRGQQQVFKGLNDKVKKKALTSFERDSIFSNLTGQLDYQGFEKADMVIEAVFEDLSLKHRVLKEVEAVIPDHCIFASNTSALPISEIAAVSKRPEKVIGMHYFSPVDKMQLLEIITTEKTSKDTSASAVAVGLKQGKVIIVVKDGPGFYTTRCLAPMMSEVIRILQEGVDPKKLDSLTTSFGFPVGAATLVDEVGVDVAKHVAEDLGKVFGERFGGGNPELLTQMVSKGFLGRKSGKGFYIYQEGVKRKDLNSDMDSILASLKLPPKSEVSSDEDIQFRLVTRFVNEAVMCLQEGISATPAEGDIGAVFGLGFPPCLGGPFRFVDLYGAQKIVDRLKKYEAAYGKQFTPCQLLADHANSPNKKFYQ

SEQ ID NO: 809746 - protein, 763 aa, Homo sapiens
MVACRAIGILSRFSAFRILRSRGYICRNFTGSSALLTRTHINYGVKGDVAVVRINSPNSKVNTLSKELHSEFSEVMNEIWASDQIRSAVLISSKPGCFIAGADINMLAACKTLQEVTQLSQEAQRIVEKLEKSTKPIVAAINGSCLGGGLEVAISCQYRIATKDRKTVLGTPEVLLGALPGAGGTQRLPKMVGVPAALDMMLTGRSIRADRAKKMGLVDQLVEPLGPGLKPPEERTIEYLEEVAITFAKGLADKKISPKRDKGLVEKLTAYAMTIPFVRQQVYKKVEEKVRKQTKGLYPAPLKIIDVVKTGIEQGSDAGYLCESQKFGELVMTKESKALMGLYHGQVLCKKNKFGAPQKDVKHLAILGAGLMGAGIAQVSVDKGLKTILKDATLTALDRGQQQVFKGLNDKVKKKALTSFERDSIFSNLTGQLDYQGFEKADMVIEAVFEDLSLKHRVLKEVEAVIPDHCIFASNTSALPISEIAAVSKRPEKVIGMHYFSPVDKMQLLEIITTEKTSKDTSASAVAVGLKQGKVIIVVKDGPGFYTTRCLAPMMSEVIRILQEGVDPKKLDSLTTSFGFPVGAATLVDEVGVDVAKHVAEDLGKVFGERFGGGNPELLTQMVSKGFLGRKSGKGFYIYQEGVKRKDLNSDMDSILASLKLPPKSEVSSDEDIQFRLVTRFVNEAVMCLQEGILATPAEGDIGAVFGLGFPPCLGGPFRFVDLYGAQKIVDRLKKYEAAYGKQFTPCQLLADHANSPNKKFYQ

SEQ ID NO: 809747 - protein, 778 aa, Homo sapiens
AKKMALVFGRGLQLKMVACRAIGILSRFSAFRILRSRGYICRNFTGSSALLTRTHINYGVKGDVAVVRINSPNSKVNTLSKELHSEFSEVMNEIWASDQIRSAVLISSKPGCFIAGADINMLAACKTLQEVTQLSQEAQRIVEKLEKSTKPIVAAINGSCLGGGLEVAISCQYRIATKDRKTVLGTPEVLLGALPGAGGTQRLPKMVGVPAALDMMLTGRSIRADRAKKMGLVDQLVEPLGPGLKPPEERTIEYLEEVAITFAKGLADKKISPKRDKGLVEKLTAYAMTIPFVRQQVYKKVEEKVRKQTKGLYPAPLKIIDVVKTGIEQGSDAGYLCESQKFGELVMTKESKALMGLYHGQVLCKKNKFGAPQKDVKHLAILGAGLMGAGIAQVSVDKGLKTILKDATLTALDRGQQQVFKGLNDKVKKKALTSFERDSIFSNLTGQLDYQGFEKADMVIEAVFEDLSLKHRVLKEVEAVIPDHCIFASNTSALPISEIAAVSKRPEKVIGMHYFSPVDKMQLLEIITTEKTSKDTSASAVAVGLKQGKVIIVVKDGPGFYTTRCLAPMMSEVIRILQEGVDPKKLDSLTTSFGFPVGAATLVDEVGVDVAKHVAEDLGKVFGERFGGGNPELLTQMVSKGFLGRKSGKGFYIYQEGVKRKDLNSDMDSILASLKLPPKSEVSSDEDIQFRLVTRFVNEAVMCLQEGILATPAEGDIGAVFGLGFPPCLGGPFRFVDLYGAQKIVDRLKKYEAAYGKQFTPCQLLADHANSPNKKFYQ

SEQ ID NO: 809748 - protein, 763 aa, Homo sapiens; identical to SEQ ID NO: 809746

SEQ ID NO: 809749 - protein, 772 aa, Homo sapiens
GLQLVITWTVGLTISIGILSRFSAFRILRSRGYICRNFTGSSALLTRTHINYGVKGDVAVVRINSPNSKVNTLSKELHSEFSEVMNEIWASDQIRSAVLISSKPGCFIAGADINMLAACKTLQEVTQLSQEAQRIVEKLEKSTKPIVAAINGSCLGGGLEVAISCQYRIATKDRKTVLGTPEVLLGALPGAGGTQRLPKMVGVPAALDMMLTGRSIRADRAKKMGLVDQLVEPLGPGLKPPEERTIEYLEEVAITFAKGLADKKISPKRDKGLVEKLTAYAMTIPFVRQQVYKKVEEKVRKQTKGLYPAPLKIIDVVKTGIEQGSDAGYLCESQKFGELVMTKESKALMGLYHGQVLCKKNKFGAPQKDVKHLAILGAGLMGAGIAQVSVDKGLKTILKDATLTALDRGQQQVFKGLNDKVKKKALTSFERDSIFSNLTGQLDYQGFEKADMVIEAVFEDLSLKHRVLKEVEAVIPDHCIFASNTSALPISEIAAVSKRPEKVIGMHYFSPVDKMQLLEIITTEKTSKDTSASAVAVGLKQGKVIIVVKDGPGFYTTRCLAPMMSEVIRILQEGVDPKKLDSLTTSFGFPVGAATLVDEVGVDVAKHVAEDLGKVFGERFGGGNPELLTQMVSKGFLGRKSGKGFYIYQEGVKRKDLNSDMDSILASLKLPPKSEVSSDEDIQFRLVTRFVNEAVMCLQEGILATPAEGDIGAVFGLGFPPCLGGPFRFVDLYGAQKIVDRLKKYEAAYGKQFTPCQLLADHANSPNKKFYQ

SEQ ID NO: 809750 - protein, 774 aa, Homo sapiens
QLRQKQRSAAAASEKCAWVRTQPHSAFRILRSRGYICRNFTGSSALLTRTHINYGVKGDVAVVRINSPNSKVNTLSKELHSEFSEVMNEIWASDQIRSAVLISSKPGCFIAGADINMLAACKTLQEVTQLSQEAQRIVEKLEKSTKPIVAAINGSCLGGGLEVAISCQYRIATKDRKTVLGTPEVLLGALPGAGGTQRLPKMVGVPAALDMMLTGRSIRADRAKKMGLVDQLVEPLGPGLKPPEERTIEYLEEVAITFAKGLADKKISPKRDKGLVEKLTAYAMTIPFVRQQVYKKVEEKVRKQTKGLYPAPLKIIDVVKTGIEQGSDAGYLCESQKFGELVMTKESKALMGLYHGQVLCKKNKFGAPQKDVKHLAILGAGLMGAGIAQVSVDKGLKTILKDATLTALDRGQQQVFKGLNDKVKKKALTSFERDSIFSNLTGQLDYQGFEKADMVIEAVFEDLSLKHRVLKEVEAVIPDHCIFASNTSALPISEIAAVSKRPEKVIGMHYFSPVDKMQLLEIITTEKTSKDTSASAVAVGLKQGKVIIVVKDGPGFYTTRCLAPMMSEVIRILQEGVDPKKLDSLTTSFGFPVGAATLVDEVGVDVAKHVAEDLGKVFGERFGGGNPELLTQMVSKGFLGRKSGKGFYIYQEGVKRKDLNSDMDSILASLKLPPKSEVSSDEDIQFRLVTRFVNEAVMCLQEGILATPAEGDIGAVFGLGFPPCLGGPFRFVDLYGAQKIVDRLKKYEAAYGKQFTPCQLLADHANSPNKKFYQ

SEQ ID NO: 809751 - protein, 762 aa, Homo sapiens
MAVADNQMDPQPHFCLQDPPLPRYICRNNRVSALLTRTHINYGVKGDVAVVRINSPNSKVNTLSKELHSEFSEVMNEIWASDQIRSAVLISSKPGCFIAGADINMLAACKTLQEVTQLSQEAQRIVEKLEKSTKPIVAAINGSCLGGGLEVAISCQYRIATKDRKTVLGTPEVLLGALPGAGGTQRLPKMVGVPAALDMMLTGRSIRADRAKKMGLVDQLVEPLGPGLKPPEERTIEYLEEVAITFAKGLADKKISPKRDKGLVEKLTAYAMTIPFVRQQVYKKVEEKVRKQTKGLYPAPLKIIDVVKTGIEQGSDAGYLCESQKFGELVMTKESKALMGLYHGQVLCKKNKFGAPQKDVKHLAILGAGLMGAGIAQVSVDKGLKTILKDATLTALDRGQQQVFKGLNDKVKKKALTSFERDSIFSNLTGQLDYQGFEKADMVIEAVFEDLSLKHRVLKEVEAVIPDHCIFASNTSALPISEIAAVSKRPEKVIGMHYFSPVDKMQLLEIITTEKTSKDTSASAVAVGLKQGKVIIVVKDGPGFYTTRCLAPMMSEVIRILQEGVDPKKLDSLTTSFGFPVGAATLVDEVGVDVAKHVAEDLGKVFGERFGGGNPELLTQMVSKGFLGRKSGKGFYIYQEGVKRKDLNSDMDSILASLKLPPKSEVSSDEDIQFRLVTRFVNEAVMCLQEGILATPAEGDIGAVFGLGFPPCLGGPFRFVDLYGAQKIVDRLKKYEAAYGKQFTPCQLLADHANSPNKKFYQ

SEQ ID NO: 809752 - protein, 256 aa, Homo sapiens
  misc_feature (228)..(228): Xaa can be any naturally occurring amino acid
  misc_feature (253)..(253): Xaa can be any naturally occurring amino acid
  misc_feature (256)..(256): Xaa can be any naturally occurring amino acid
MVACRAIGILSRFSAFRILRSRGYICRNFTGSSALLTRTHINYGVKGDVAVVRINSPNSKVNTLSKELHSEFSEVMNEIWASDQIRSAVLISSKPGCFIAGADINMLAACKTLQEVTQLSQEAQRIVEKLEKSTKPIVAAINGSCLGGGLEVAISCQYRIATKDRKTVLGTPEVLLGALPGAGGTQRLPKMVGVPAALDMMLTGRSIRADRAKKMGLVDQLVEPLGFXARMQVAVDIMHSFCVCYILHSTQKXEAX

SEQ ID NO: 809753 - protein, 658 aa, Homo sapiens
MLAACKTLQEVTQLSQEAQRIVEKLEKSTKPIVAAINGSCLGGGLEVAISCQYRIATKDRKTVLGTPEVLLGALPGAGGTQRLPKMVGVPAALDMMLTGRSIRADRAKKMGLVDQLVEPLGPGLKPPEERTIEYLEEVAITFAKGLADKKISPKRDKGLVEKLTAYAMTIPFVRQQVYKKVEEKVRKQTKGLYPAPLKIIDVVKTGIEQGSDAGYLCESQKFGELVMTKESKALMGLYHGQVLCKKNKFGAPQKDVKHLAILGAGLMGAGIAQVSVDKGLKTILKDATLTALDRGQQQVFKGLNDKVKKKALTSFERDSIFSNLTGQLDYQGFEKADMVIEAVFEDLSLKHRVLKEVEAVIPDHCIFASNTSALPISEIAAVSKRPEKVIGMHYFSPVDKMQLLEIITTEKTSKDTSASAVAVGLKQGKVIIVVKDGPGFYTTRCLAPMMSEVIRILQEGVDPKKLDSLTTSFGFPVGAATLVDEVGVDVAKHVAEDLGKVFGERFGGGNPELLTQMVSKGFLGRKSGKGFYIYQEGVKRKDLNSDMDSILASLKLPPKSEVSSDEDIQFRLVTRFVNEAVMCLQEGISATPAEGDIGAVFGLGFPPCLGGPFRFVDLYGAQKIVDRLKKYEAAYGKQFTPCQLLADHANSPNKKFYQ

SEQ ID NO: 809754 - protein, 745 aa, Homo sapiens
MVACRAIGILSRFSAFRILRSRGYICRNFTGSSALLTRTHINYGVKGDVAVVRINSPNSKVNTLSKELHSEFSEVMNEIWASDQIRSAVLISSKPGCFIAGADINMLAACKTLQEVTQLSQEAQRIVEKLEKSTKPIVAAINGSCLGGGLEVAISCQYRIATKDRKTVLGTPEVLLGALPGAGGTQRLPKMEGVPAALDMMLTGRQHSSRQGKAQERTIEYLEEVAITFAKGLADKKISPKRDKGLVEKLTAYAMTIPFVRQQVYKKVEEKVRKQTKGLYPAPLKIIDVVKTGIEQGSDAGYLCESQKFGELVMTKESKALMGLYHGQVLCKKNKFGAPQKDVKHLAILGAGLMGAGIAQVSVDKGLKTILKDATLTALDRGQQQVFKGLNDKVKKKALTSFERDSIFSNLTGQLDYQGFEKADMVIEAVFEDLSLKHRVLKEVEAVIPDHCIFASNTSALPISEIAAVSKRPEKVIGMHYFSPVDKMQLLEIITTEKTSKDTSASAVAVGLKQGKVIIVVKDGPGFYTTRCLAPMMSEVIRILQEGVDPKKLDSLTTSFGFPVGAATLVDEVGVDVAKHVAEDLGKVFGERFGGGNPELLTQMVSKGFLGRKSGKGFYIYQEGVKRKDLNSDMDSILASLKLPPKSEVSSDEDIQFRLVTRFVNEAVMCLQEGISATPAEGDIGAVFGLGFPPCLGGPFRFVDLYGAQKIVDRLKKYEAAYGKQFTPCQLLADHANSPNKKFYQ

SEQ ID NO: 809755 - protein, 637 aa, Homo sapiens
GRVGRPTRRPIVAAINGSCLGGGLEVAISCQYRIATKDRKTVLGTPEVLLGALPGAGGTQRLPKMVGVPAALDMMLTGRSIRADRAKKMGLVDQLVEPLGPGLKPPEERTIEYLEEVAITFAKGLADKKISPKRDKGLVEKLTAYAMTIPFVRQQVYKKVEEKVRKQTKGLYPAPLKIIDVVKTGIEQGSDAGYLCESQKFGELVMTKESKALMGLYHGQVLCKKNKFGAPQKDVKHLAILGAGLMGAGIAQVSVDKGLKTILKDATLTALDRGQQQVFKGLNDKVKKKALTSFERDSIFSNLTGQLDYQGFEKADMVIEAVFEDLSLKHRVLKEVEAVIPDHCIFASNTSALPISEIAAVSKRPEKVIGMHYFSPVDKMQLLEIITTEKTSKDTSASAVAVGLKQGKVIIVVKDGPGFYTTRCLAPMMSEVIRILQEGVDPKKLDSLTTSFGFPVGAATLVDEVGVDVAKHVAEDLGKVFGERFGGGNPELLTQMVSKGFLGRKSGKGFYIYQEGVKRKDLNSDMDSILASLKLPPKSEVSSDEDIQFRLVTRFVNEAVMCLQEGISATPAEGDIGAVFGLGFPPCLGGPFRFVDLYGAQKIVDRLKKYEAAYGKQFTPCQLLADHANSPNKKFYQ

SEQ ID NO: 809756 - protein, 415 aa, Homo sapiens
MPIQNSNKRQKDVKHLAILGAGLMGAGIAQVSVDKGLKTILKDATLTALDRGQQQVFKGLNDKVKKKALTSFERDSIFSNLTGQLDYQGFEKADMVIEAVFEDLSLKHRVLKEVEAVIPDHCIFASNTSALPISEIAAVSKRPEKVIGMHYFSPVDKMQLLEIITTEKTSKDTSASAVAVGLKQGKVIIVVKDGPGFYTTRCLAPMMSEVIRILQEGVDPKKLDSLTTSFGFPVGAATLVDEVGVDVAKHVAEDLGKVFGERFGGGNPELLTQMVSKGFLGRKSGKGFYIYQEGVKRKDLNSDMDSILASLKLPPKSEVSSDEDIQFRLVTRFVNEAVMCLQEGISATPAEGDIGAVFGLGFPPCLGGPFRFVDLYGAQKIVDRLKKYEAAYGKQFTPCQLLADHANSPNKKFYQ

SEQ ID NO: 809757 - protein, 77 aa, Homo sapiens
RDAGSGIESHGPAGPRTLKGPGGSSSRGARGAVSPRRFRDCTRASEQPRQQLASRPPSSRSRSPPSKRTKARGRRSQ

SEQ ID NO: 809758 - protein, 279 aa, Homo sapiens
QTWLKRCRCRYCRCRENAEPSRAGWAAAARAATGTRFPSAAAAAMARLADYFIVVGYDHEKPGSGEGLGKIIQRFPQKDWDDTPFPQGIELFCQPGGWQLSRERKQPTFFVVVLTDIDSDRHYCSCLTFYEAEINLQGTKKEEIEGEAKVSGLIQPAEVFAPKSLVLVSRLYYPEIFRACLGLIYTVYVDSLNVSLESLIANLCACLVPAAGGSQKLFSLGAGDRQLIQTPLHDSLPITGTSVALLFQQLGTVAHACNLSTLGGRGGQLTRSGDRDHPG

SEQ ID NO: 809759 - protein, 1196 aa, Homo sapiens
QTWLKRCRCRYCRCRENAEPSRAGWAAAARAATGTRFPSAAAAAMARLADYFIVVGYDHEKPGSGEGLGKIIQRFPQKDWDDTPFPQGIELFCQPGGWQLSRERKQPTFFVVVLTDIDSDRHYCSCLTFYEAEINLQGTKKEEIEGEAKVSGLIQPAEVFAPKSLVLVSRLYYPEIFRACLGLIYTVYVDSLNVSLESLIANLCACLVPAAGGSQKLFSLGAGDRQLIQTPLHDSLPITGTSVALLFQQLGIQNVLSLFCAVLTENKVLFHSASFQRLSDACRALESLMFPLKYSYPYIPILPAQLLEVLSSPTPFIIGVHSVFKTDVHELLDVIIADLDGGTIKIPECIHLSSLPEPLLHQTQSALSLILHPDLEVADHAFPPPRTALSHSKMLDKEVRAVFLRLFAQLFQGYRSCLQLIRIHAEPVIHFHKTAFLGQRGLVENDFLTKVLSGMAFAGFVSERGPPYRSCDLFDELVAFEVERIKVEENNPVKMIKHVRELAEQLFKNENPNPHMAFQKVPRPTEGSHLRVHILPFPEINEARVQELIQENVAKNQNAPPATRIEKKCVVPAGPPVVSIMDKVTTVFNSAQRLEVVRNCISFIFENKILETEKTLPAALRALKGKAARQCLTDELGLHVQQNRAILDHQQFDYIIRMMNCTLQDCSSLEEYNIAAALLPLTSAFYRKLAPGVSQFAYTCVQDHPIWTNQQFWETTFYNAVQEQVRSLYLSAKEDNHAPHLKQKDKLPDDHYQEKTAMDLAAEQLRLWPTLSKSTQQELVQHEESTVFSQAIHFANLMVNLLVPLDTSKNKLLRTSAPGDWESGSNSIVTNSIAGSVAESYDTESGFEDSENTDIANSVVRFITRFIDKVCTESGVTQDHIKSLHCMIPGIVAMHIETLEAVHRESRRLPPIQKPKILRPALLPGEEIVCEGLRVLLDPDGREEATGGLLGGPQLLPAEGALFLTTYRILFRGTPHDQLVGEQTVVRSFPIASITKEKKITMQNQLQQNMQEGLQITSASFQLIKVAFDEEVSPEVVEIFKKQLMKFRYPQSIFSTFAFAAGQTTPQIILPKQKEKNTSFRTFSKTIVKGAKRAGKMTIGRQYLLKKKTGTIVEERVNRPGWNEDDDVSVSDESELPTSTTLKASEKSTMEQLVEKACFRDYQRLGLGTISGSSSRSRPEYFRITASNRMYSLCRR

SEQ ID NO: 809760 - protein, 170 aa, Homo sapiens
QTWLKRCRCRYCRCRENAEPSRAGWAAAARAATGTRFPSAAAAAMARLADYFIVVGYDHEKPGSGEGLGKIIQRFPQKDWDDTPFPQGIELFCQPGGWQLSRERKQPTFFVVVLTDIDSDRHYCSCLTFYEAEINLQGTKKEEIEGEAKVSGLIQPAEVFAPKSLVLAWV

SEQ ID NO: 809761 - protein, 54 aa, Homo sapiens
DPRNTRLLQPAIYTRGEARPSGARRQEGSAKVNAHQVHVLMQQHLINAASVEGD

SEQ ID NO: 809762 - protein, 71 aa, Homo sapiens
PRRRASPRLRKLALPASGPDCTGSAAALAQAASAGQRPGNPVLRGAAEGRAWPGEYRGFGPLPCASRVLHR

SEQ ID NO: 809763 - protein, 117 aa, Homo sapiens
MKWMFKEDHSLEHRCVESAKIRAKYPDRVPVIVEKVSGSQIVDIDKRKYLVPSDITVAQFMWIIRKRIQLPSEKAIFLFVDKTVPQSSLTMGQLYEKEKDEDGFLYVAYSGENTFGF

SEQ ID NO: 809764 - protein, 117 aa, Homo sapiens; identical to SEQ ID NO: 809763

SEQ ID NO: 809765 - protein, 91 aa, Homo sapiens
LLGSDSRKSRLPCSRRRRCRCRCRRRCCCARCAELRGSASRFRPLPAAAMKWMFKEDHSLEHRCVESAKIRAKYPDRVPPNYGTALREGKR

SEQ ID NO: 809766 - protein, 117 aa, Homo sapiens; identical to SEQ ID NO: 809763

SEQ ID NO: 809767 - protein, 152 aa, Homo sapiens
GDQRFIRYIQRRCCCARCAELRGSASRFRPLPAAAMKWMFKEDHSLEHRCVESAKIRAKYPDRVPVIVEKVSGSQIVDIDKRKYLVPSDITVAQFMWIIRKRIQLPSEKAIFLFVDKTVPQSSLTMGQLYEKEKDEDGFLYVAYSGENTFGF

SEQ ID NO: 809768 - protein, 82 aa, Homo sapiens
PQRFLSITIDKRKYLVPSDITVAQFMWIIRKRIQLPSEKAIFLFVDKTVPQSSLTMGQLYEKEKDEDGFLYVAYSGENTFGF

SEQ ID NO: 809769 - protein, 141 aa, Homo sapiens
MKWMFKEDHSLEHRCVESAKIRAKYPDRVPVIVEKVSGSQIVDIDKRKYLVPSDITVAQFMWIIRKRIQLPSEKAIFLFVDKTVPQSRIISTQQVLTPEVLLNSCPQAILFLLKPGLQFSMTFLFFSFKPNYGTALREGKR

SEQ ID NO: 809770 - protein, 148 aa, Homo sapiens
LLGSDSRKSRLPCSRRRRCRCRCRRRCCCARCAELRGSASRFRPLPAAAMKWMFKEDHSLEHRCVESAKIRAKYPDRVPVIVEKVSGSQIVDIDKRKYLVPSDITVAQFMWIIRKRIQLPSEKAIFLFVDKTVPQSSLTMGQLYEKDF

SEQ ID NO: 809771 - protein, 837 aa, Homo sapiens
QCAGAAADASVYVRARRWRRRGKQREQPEDRGVPMKRAAMALHSPQYIFGDFSPDEFNQFFVTPRSSVELPPYSGTVLCGTQAVDKLPDGQEYQRIEFGVDEVIEPSDTLPRTPSYSISSTLNPQAPEFILGCTASKITPDGITKEASYGSIDCQYPGSALALDGSSNVEAEVLENDGVSGGLGQRERKKKKKRPPGYYSYLKDGGDDSISTEALVNGHANSAVPNSVSAEDAEFMGDMPPSVTPRTCNSPQNSTDSVSDIVPDSPFPGALGSDTRTAGQPEGGPGADFGQSCFPAEAGRDTLSRTAGAQPCVGTDTTENLGVANGQILESSGEGTATNGVELHTTESIDLDPTKPESASPPADGTGSASGTLPVSQPKSWASLFHDSKPSSSSPVAYVETKYSPPAISPLVSEKQVEVKEGLVPVSEDPVAIKIAELLENVTLIHKPVSLQPRGLINKGNWCYINATLQALVACPPMYHLMKFIPLYSKVQRPCTSTPMIDSFVRLMNEFTNMPVPPKPRQALGDKIVRDIRPGAAFEPTYIYRLLTVNKSSLSEKGRQEDAEEYLGFILNGLHEEMLNLKKLLSPSNEKLTISNGPKNHSVNEEEQEEQGEGSEDEWEQVGPRNKTSVTRQADFVQTPITGIFGGHIRSVVYQQSSKESATLQPFFTLQLDIQSDKIRTVQDALESLVARESVQGYTTKTKQEVEISRRVTLEKLPPVLVLHLKRFVYEKTGGCQKLIKNIEYPVDLEISKELLSPGVKNKNFKCHRTYRLFAVVYHHGNSATGGHYTTDVFQIGLNGWLRIDDQTVKVINQYQVVKPTAERTAYLLYYRRVDLL

SEQ ID NO: 809772 - protein, 837 aa, Homo sapiens; identical to SEQ ID NO: 809771

SEQ ID NO: 809773 - protein, 837 aa, Homo sapiens; identical to SEQ ID NO: 809771

SEQ ID NO: 809774 - protein, 808 aa, Homo sapiens
MFGRESGNGGSGMSQQKYIFGDFSPDEFNQFFVTPRSSVELPPYSGTVLCGTQAVDKLPDGQEYQRIEFGVDEVIEPSDTLPRTPSYSISSTLNPQAPEFILGCTASKITPDGITKEASYGSIDCQYPGSALALDGSSNVEAEVLENDGVSGGLGQRERKKKKKRPPGYYSYLKDGGDDSISTEALVNGHANSAVPNSVSAEDAEFMGDMPPSVTPRTCNSPQNSTDSVSDIVPDSPFPGALGSDTRTAGQPEGGPGADFGQSCFPAEAGRDTLSRTAGAQPCVGTDTTENLGVANGQILESSGEGTATNGVELHTTESIDLDPTKPESASPPADGTGSASGTLPVSQPKSWASLFHDSKPSSSSPVAYVETKYSPPAISPLVSEKQVEVKEGLVPVSEDPVAIKIAELLENVTLIHKPVSLQPRGLINKGNWCYINATLQALVACPPMYHLMKFIPLYSKVQRPCTSTPMIDSFVRLMNEFTNMPVPPKPRQALGDKIVRDIRPGAAFEPTYIYRLLTVNKSSLSEKGRQEDAEEYLGFILNGLHEEMLNLKKLLSPSNEKLTISNGPKNHSVNEEEQEEQGEGSEDEWEQVGPRNKTSVTRQADFVQTPITGIFGGHIRSVVYQQSSKESATLQPFFTLQLDIQSDKIRTVQDALESLVARESVQGYTTKTKQEVEISRRVTLEKLPPVLVLHLKRFVYEKTGGCQKLIKNIEYPVDLEISKELLSPGVKNKNFKCHRTYRLFAVVYHHGNSATGGHYTTDVFQIGLNGWLRIDDQTVKVINQYQVVKPTAERTAYLLYYRRVDLL

SEQ ID NO: 809775 - protein, 845 aa, Homo sapiens
RYSSAPRSLFIGTLPVSQPKSWASLFHDSKPSSSSPVAYVETKYSPPAISPLVSEKQVEVKEGLVPVSEDPVAKRFQLPPYSGTVLCGTQAVDKLPDGQEYQRIEFGVDEVIEPSDTLPRTPSYSISSTLNPQAPEFILGCTASKITPDGITKEASYGSIDCQYPGSALALDGSSNVEAEVLENDGVSGGLGQRERKKKKKRPPGYYSYLKDGGDDSISTEALVNGHANSAVPNSVSAEDAEFMGDMPPSVTPRTCNSPQNSTDSVSDIVPDSPFPGALGSDTRTAGQPEGGPGADFGQSCFPAEAGRDTLSRTAGAQPCVGTDTTENLGVANGQILESSGEGTATNGVELHTTESIDLDPTKPESASPPADGTGSASGTLPVSQPKSWASLFHDSKPSSSSPVAYVETKYSPPAISPLVSEKQVEVKEGLVPVSEDPVAIKIAELLENVTLIHKPVSLQPRGLINKGNWCYINATLQALVACPPMYHLMKFIPLYSKVQRPCTSTPMIDSFVRLMNEFTNMPVPPKPRQALGDKIVRDIRPGAAFEPTYIYRLLTVNKSSLSEKGRQEDAEEYLGFILNGLHEEMLNLKKLLSPSNEKLTISNGPKNHSVNEEEQEEQGEGSEDEWEQVGPRNKTSVTRQADFVQTPITGIFGGHIRSVVYQQSSKESATLQPFFTLQLDIQSDKIRTVQDALESLVARESVQGYTTKTKQEVEISRRVTLEKLPPVLVLHLKRFVYEKTGGCQKLIKNIEYPVDLEISKELLSPGVKNKNFKCHRTYRLFAVVYHHGNSATGGHYTTDVFQIGLNGWLRIDDQTVKVINQYQVVKPTAERTAYLLYYRRVDLL

SEQ ID NO: 809776 - protein, 481 aa, Homo sapiens
QCAGAAADASVYVRARRWRRRGKQREHLFHDSKPSSSSPVAYVETKYSPPAISPLVSEKQVEVKEGLVPVSEDPVAIKIAELLENVTLIHKPVSLQPRGLINKGNWCYINATLQALVACPPMYHLMKFIPLYSKVQRPCTSTPMIDSFVRLMNEFTNMPVPPKPRQALGDKIVRDIRPGAAFEPTYIYRLLTVNKSSLSEKGRQEDAEEYLGFILNGLHEEMLNLKKLLSPSNEKLTISNGPKNHSVNEEEQEEQGEGSEDEWEQVGPRNKTSVTRQADFVQTPITGIFGGHIRSVVYQQSSKESATLQPFFTLQLDIQSDKIRTVQDALESLVARESVQGYTTKTKQEVEISRRVTLEKLPPVLVLHLKRFVYEKTGGCQKLIKNIEYPVDLEISKELLSPGVKNKNFKCHRTYRLFAVVYHHGNSATGGHYTTDVFQIGLNGWLRIDDQTVKVINQYQVVKPTAERTAYLLYYRRVDLL

SEQ ID NO: 809777 - protein, 360 aa, Homo sapiens
MYHLMKFIPLYSKVQRPCTSTPMIDSFVRLMNEFTNMPVPPKPRQALGDKIVRDIRPGAAFEPTYIYRLLTVNKSSLSEKGRQEDAEEYLGFILNGLHEEMLNLKKLLSPSNEKLTISNGPKNHSVNEEEQEEQGEGSEDEWEQVGPRNKTSVTRQADFVQTPITGIFGGHIRSVVYQQSSKESATLQPFFTLQLDIQSDKIRTVQDALESLVARESVQGYTTKTKQEVEISRRVTLEKLPPVLVLHLKRFVYEKTGGCQKLIKNIEYPVDLEISKELLSPGVKNKNFKCHRTYRLFAVVYHHGNSATGGHYTTDVFQIGLNGWLRIDDQTVKVINQYQVVKPTAERTAYLLYYRRVDLL

SEQ ID NO: 809778 - protein, 490 aa, Homo sapiens
QCAGAAADASVYVRARRWRRRGKQREQPEDRGVPMKRAAMALHSPQYIFGDFSPDEFNQFFVTPRSSVELPPYSGTVLCGTQAVDKLPDELLENVTLIHKPVSLQPRGLINKGNWCYINATLQALVACPPMYHLMKFIPLYSKVQRPCTSTPMIDSFVRLMNEFTNMPVPPKPRQALGDKIVRDIRPGAAFEPTYIYRLLTVNKSSLSEKGRQEDAEEYLGFILNGLHEEMLNLKKLLSPSNEKLTISNGPKNHSVNEEEQEEQGEGSEDEWEQVGPRNKTSVTRQADFVQTPITGIFGGHIRSVVYQQSSKESATLQPFFTLQLDIQSDKIRTVQDALESLVARESVQGYTTKTKQEVEISRRVTLEKLPPVLVLHLKRFVYEKTGGCQKLIKNIEYPVDLEISKELLSPGVKNKNFKCHRTYRLFAVVYHHGNSATGGHYTTDVFQIGLNGWLRIDDQTVKVINQYQVVKPTAERTAYLLYYRRVDLL

SEQ ID NO: 809779 - protein, 360 aa, Homo sapiens; identical to SEQ ID NO: 809777

SEQ ID NO: 809780 - protein, 349 aa, Homo sapiens
QCAGAAADASVYVRARRWRRRGKQREQPEDRGVPMKRAAMALHSPQYIFGDFSPDEFNQFFVTPRSSVEGRQEDAEEYLGFILNGLHEEMLNLKKLLSPSNEKLTISNGPKNHSVNEEEQEEQGEGSEDEWEQVGPRNKTSVTRQADFVQTPITGIFGGHIRSVVYQQSSKESATLQPFFTLQLDIQSDKIRTVQDALESLVARESVQGYTTKTKQEVEISRRVTLEKLPPVLVLHLKRFVYEKTGGCQKLIKNIEYPVDLEISKELLSPGVKNKNFKCHRTYRLFAVVYHHGNSATGGHYTTDVFQIGLNGWLRIDDQTVKVINQYQVVKPTAERTAYLLYYRRVDLL

SEQ ID NO: 809781 - protein, 252 aa, Homo sapiens
MLSFSELTISNGPKNHSVNEEEQEEQGEGSEDEWEQVGPRNKTSVTRQADFVQTPITGIFGGHIRSVVYQQSSKESATLQPFFTLQLDIQSDKIRTVQDALESLVARESVQGYTTKTKQEVEISRRVTLEKLPPVLVLHLKRFVYEKTGGCQKLIKNIEYPVDLEISKELLSPGVKNKNFKCHRTYRLFAVVYHHGNSATGGHYTTDVFQIGLNGWLRIDDQTVKVINQYQVVKPTAERTAYLLYYRRVDLL

SEQ ID NO: 809782 - protein, 189 aa, Homo sapiens
RDYFSLSLSSKESATLQPFFTLQLDIQSDKIRTVQDALESLVARESVQGYTTKTKQEVEISRRVTLEKLPPVLVLHLKRFVYEKTGGCQKLIKNIEYPVDLEISKELLSPGVKNKNFKCHRTYRLFAVVYHHGNSATGGHYTTDVFQIGLNGWLRIDDQTVKVINQYQVVKPTAERTAYLLYYRRVDLL

SEQ ID NO: 809783 - protein, 201 aa, Homo sapiens
QCAGAAADASVYVRARRWRRRGKQREQPEDRGVPMKRAAMALHSPQYIFGDFSPDEFNQFFVTPRSSVELPPYSGTVLCGTQAVDKLPDERFVYEKTGGCQKLIKNIEYPVDLEISKELLSPGVKNKNFKCHRTYRLFAVVYHHGNSATGGHYTTDVFQIGLNGWLRIDDQTVKVINQYQVVKPTAERTAYLLYYRRVDLL

SEQ ID NO: 809784 - protein, 202 aa, Homo sapiens
MPMLTLLHAVEYPRSGAKSTASGPWNAPGYERRLAKRYPVQGSHSLQQTQTHNHAGSAGIMTRQAVHVMGKDNFHLLVFSLTADHAHTYLDYHEQQHCGGCQKLIKNIEYPVDLEISKELLSPGVKNKNFKCHRTYRLFAVVYHHGNSATGGHYTTDVFQIGLNGWLRIDDQTVKVINQYQVVKPTAERTAYLLYYRRVDLL

SEQ ID NO: 809785 - protein, 259 aa, Homo sapiens
RYSSAPRSLFIGTLPVSQPKSWASLFHDSKPSSSSPVAYVETKYSPPAISPLVSEKQVEVKEGLVPVSEDPVAKRFQLPPYSGTVLCGTQAVDKLPDGQEYQRIEFGVDEVIEPSDTLPRTPSYSISSTLNPQAPEFILGCTASKITPDGITKEASYGSIDCQYPGSALALDGSSNVEAEVLENDGVSGGLGQRERKKKKKRPPGYYSYLKDGGDDSISTEAWLRIDDQTVKVINQYQVVKPTAERTAYLLYYRRVDLL

SEQ ID NO: 809786 - protein, 777 aa, Homo sapiens
QCAGAAADASVYVRARRWRRRGKQREQPEDRGVPMKRAAMALHSPQYIFGDFSPDEFNQFFVTPRSSVELPPYSGTVLCGTQAVDKLPDGQEYQRIEFGVDEVIEPSDTLPRTPSYSISSTLNPQAPEFILGCTASKITPDGITKEASYGSIDCQYPGSALALDGSSNVEAEVLENDGVSGGLGQRERKKKKKRPPGYYSYLKDGGDDSISTEALVNGHANSAVPNSVSAEDAEFMGDMPPSVTPRTCNSPQNSTDSVSDIVPDSPFPGALGSDTRTAGQPEGGPGADFGQSCFPAEAGRDTLSRTAGAQPCVGTDTTENLGVANGQILESSGEGTATNGVELHTTESIDLDPTKPESASPPADGTGSASGTLPVSQPKSWASLFHDSKPSSSSPVAYVETKYSPPAISPLVSEKQVEVKEGLVPVSEDPVAIKIAELLENVTLIHKPVSLQPRGLINKGNWCYINATLQALVACPPMYHLMKFIPLYSKVQRPCTSTPMIDSFVRLMNEFTNMPVPPKPRQALGDKIVRDIRPGAAFEPTYIYRLLTVNKSSLSEKGRQEDAEEYLGFILNGLHEEMLNLKKLLSPSNEKLTISNGPKNHSVNEEEQEEQGEGSEDEWEQVGPRNKTSVTRQADFVQTPITGIFGGHIRSVVYQQSSKESATLQPFFTLQLDIQSDKIRTVQDALESLVARESVQGYTTKTKQEVEISRRVTLEKLPPVLVLHLKRFVYEKTGGCQKLIKNIEYPVDLEISKELLCPGLLTTPDNYPGQDLPYKYT

SEQ ID NO: 809787 - protein, 720 aa, Homo sapiens
QCAGAAADASVYVRARRWRRRGKQREQPEDRGVPMKRAAMALHSPQYIFGDFSPDEFNQFFVTPRSSVELPPYSGTVLCGTQAVDKLPDGQEYQRIEFGVDEVIEPSDTLPRTPSYSISSTLNPQAPEFILGCTASKITPDGITKEASYGSIDCQYPGSALALDGSSNVEAEVLENDGVSGGLGQRERKKKKKRPPGYYSYLKDGGDDSISTEALVNGHANSAVPNSVSAEDAEFMGDMPPSVTPRTCNSPQNSTDSVSDIVPDSPFPGALGSDTRTAGQPEGGPGADFGQSCFPAEAGRDTLSRTAGAQPCVGTDTTENLGVANGQILESSGEGTATNGVELHTTESIDLDPTKPESASPPADGTGSASGTLPVSQPKSWASLFHDSKPSSSSPVAYVETKYSPPAISPLVSEKQVEVKEGLVPVSEDPVAIKIAELLENVTLIHKPVSLQPRGLINKGNWCYINATLQALVACPPMYHLMKFIPLYSKVQRPCTSTPMIDSFVRLMNEFTNMPVPPKPRQALGDKIVRDIRPGAAFEPTYIYRLLTVNKSSLSEKGRQEDAEEYLGFILNGLHEEMLNLKKLLSPSNEKLTISNGPKNHSVNEEEQEEQGEGSEDEWEQVGPRNKTSVTRQADFVQTPITGIFGGHIRSVVYQQSSKESATLQPFFTLQLDIQSDKIRTVQDALESLVARESVQGYTTKTKQELRKLESDSGGVGYRA

SEQ ID NO: 809788 - protein, 444 aa, Homo sapiens
QCAGAAADASVYVRARRWRRRGKQREQPEDRGVPMKRAAMALHSPQYIFGDFSPDEFNQFFVTPRSSVELPPYSGTVLCGTQAVDKLPDGQEYQRIEFGVDEVIEPSDTLPRTPSYSISSTLNPQAPEFILGCTASKITPDGITKEASYGSIDCQYPGSALALDGSSNVEAEVLENDGVSGGLGQRERKKKKKRPPGYYSYLKDGGDDSISTEALVNGHANSAVPNSVSAEDAEFMGDMPPSVTPRTCNSPQNSTDSVSDIVPDSPFPGALGSDTRTAGQPEGGPGADFGQSCFPAEAGRDTLSRTAGAQPCVGTDTTENLGVANGQILESSGEGTATNGVELHTTESIDLDPTKPESASPPADGTGSASGTLPVSQPKSWASLFHDSKPSSSSPVAYVETKYSPPAISPLVSEKQVEVKEGLVPVSEDPVAIKIAGIVEKIQI

SEQ ID NO: 809789 - protein, 263 aa, Homo sapiens
LESLRRFAFPGLPFAPPRTRRPCASRGNHPRAPGREDAEQGVLRAGTGAATSRRCRMAAEPQPSSLSYRTTGSTYLHPLSELLGIPLDQVNFVVCQLVALFAAFWFRIYLRPGTTSSDVRHAVATIFGIYFVIFCFGWYSVHLFVLVLMCYAIMVTASVSNIHRYSFFVAMGYLTICHISRIYIFHYGILTTDFSGPLMIVTQKITTLAFQVHDGLGRRAEDLSAEQHRLAIKVKPSFLEYLSYLLNFMSVIAGPCNNFKDYI

SEQ ID NO: 809790 - protein, 3981 aa, Homo sapiens
EDGGGGGGDGASRAAEDDPPVSAETASTSGGGAPDRIGSLGRGACRPTSVQIDLSFLSPTTPQPLFSPAFLAEAMEDEERQKKLEAGKAKLAQFRQRKAQSDGQSPSKKQKKKRKTSSSKHDVSAHHDLNIDQSQCNEMYINSSQRVESTVIPESTIMRTLHSGEITSHEQGFSVELESEISTTADDCSSEVNGCSFVMRTGKPTNLLREEEFGVDDSYSEQGAQDSPTHLEMMESELAGKQHEIEELNRELEEMRVTYGTEGLQQLQEFEAAIKQRDGIITQLTANLQQARREKDETMREFLELTEQSQKLQIQFQQLQASETLRNSTHSSTAADLLQAKQQILTHQQQLEEQDHLLEDYQKKKEDFTMQISFLQEKIKVYEMEQDKKVENSNKEEIQEKETIIEELNTKIIEEEKKTLELKDKLTTADKLLGELQEQIVQKNQEIKNMKLELTNSKQKERQSSEEIKQLMGTVEELQKRNHKDSQFETDIVQRMEQETQRKLEQLRAELDEMYGQQIVQMKQELIRQHMAQMEEIKTRHKGEMENALRSYSNITVNEDQIKLMNVAINELNIKLQDTNSQKEKLKEELGLILEEKCALQRQLEDLVEELSFSREQIQRARQTIAEQESKLNEAHKSLSTVEDLKAEIVSASESRKELELKHEAEVTNYKIKLEMLEKEKNAVLDRMAESQEAELERLRTQLLFSHEEELSKLKEDLEIEHRINIEKLKDNLGIHYKQQIDGLQNEMSQKIETMQFEKDNLITKQNQLILEISKLKDLQQSLVNSKSEEMTLQINELQKEIEILRQEEKEKGTLEQEVQELQLKTELLEKQMKEKENDLQEKFAQLEAENSILKDEKKTLEDMLKIHTPVSQEERLIFLDSIKSKSKDSVWEKEIEILIEENEDLKQQCIQLNEEIEKQRNTFSFAEKNFEVNYQELQEEYACLLKVKDDLEDSKNKQELEYKSKLKALNEELHLQRINPTTVKMKSSVFDEDKTFVAETLEMGEVVEKDTTELMEKLEVTKREKLELSQRLSDLSEQLKQKHGEISFLNEEVKSLKQEKEQVSLRCRELEIIINHNRAENVQSCDTQVSSLLDGVVTMTSRGAEGSVSKVNKSFGEESKIMVEDKVSFENMTVGEESKQEQLILDHLPSVTKESSLRATQPSENDKLQKELNVLKSEQNDLRLQMEAQRICLSLVYSTHVDQVREYMENEKDKALCSLKEELIFAQEEKIKELQKIHQLELQTMKTQETGDEGKPLHLLIGKLQKAVSEECSYFLQTLCSVLGEYYTPALKCEVNAEDKENSGDYISENEDPELQDYRYEVQDFQENMHTLLNKVTEEYNKLLVLQTRLSKIWGQQTDGMKLEFGEENLPKEETEFLSIHSQMTNLEDIDVNHKSKLSSLQDLEKTKLEEQVQELESLISSLQQQLKETEQNYEAEIHCLQKRLQAVSESTVPPSLPVDSVVITESDAQRTMYPGSCVKKNIDGTIEFSGEFGVKEETNIVKLLEKQYQEQLEEEVAKVIVSMSIAFAQQTELSRISGGKENTASSKQAHAVCQQEQHYFNEMKLSQDQIGFQTFETVDVKFKEEFKPLSKELGEHGKEILLSNSDPHDIPESKDCVLTISEEMFSKDKTFIVRQSIHDEISVSSMDASRQLMLNEEQLEDMRQELVRQYQEHQQATELLRQAHMRQMERQREDQEQLQEEIKRLNRQLAQRSSIDNENLVSERERVLLEELEALKQLSLAGREKLCCELRNSSTQTQNGNENQGEVEEQTFKEKELDRKPEDVPPEILSNERYALQKANNRLLKILLEVVKTTAAVEETIGRHVLGILDRSSKSQSSASLIWRSEAEASVKSCVHEEHTRVTDESIPSYSGSDMPRNDINMWSKVTEEGTELSQRLVRSGFAGTEIDPENEELMLNISSRLQAAVEKLLEAISETSSQLEHAKVTQTELMRESFRQKQEATESLKCQEELRERLHEESRAREQLAVELSKAEGVIDGYADEKTLFERQIQEKTDIIDRLEQELLCASNRLQELEAEQQQIQEERELLSRQKEAMKAEAGPVEQQLLQETEKLMKEKLEVQCQAEKVRDDLQKQVKALEIDVEEQVSRFIELEQEKNTELMDLRQQNQALEKQLEKMRKFLDEQAIDREHERDVFQQEIQKLEQQLKVVPRFQPISEHQTREVEQLANHLKEKTDKCSELLLSKEQLQRDIQERNEEIEKLEFRVRELEQALLVSADTFQKVEDRKHFGAVEAKPELSLEVQLQAERDAIDRKEKEITNLEEQLEQFREELENKNEEVQQLHMQLEIQKKESTTRLQELEQENKLFKDDMEKLGLAIKESDAMSTQDQHVLFGKFAQIIQEKEVEIDQLNEQVTKLQQQLKITTDNKVIEEKNELIRDLETQIECLMSDQECVKRNREEEIEQLNEVIEKLQQELANIGQKTSMNAHSLSEEADSLKHQLDVVIAEKLALEQQVETANEEMTFMKNVLKETNFKMNQLTQELFSLKRERESVEKIQSIPENSVNVAIDHLSKDKPELEVVLTEDALKSLENQTYFKSFEENGKGSIINLETRLLQLESTVSAKDLELTQCYKQIKDMQEQGQFETEMLQKKIVNLQKIVEEKVAAALVSQIQLEAVQEYAKFCQDNQTISSEPERTNIQNLNQLREDELGSDISALTLRISELESQVVEMHTSLILEKEQVEIAEKNVLEKEKKLLELQKLLEGNEKKQREKEKKRSPQDVEVLKTTTELFHSNEESGFFNELEALRAESVATKAELASYKEKAEKLQEELLVKETNMTSLQKDLSQVRDHLAEAKEKLSILEKEDETEVQESKKACMFEPLPIKLSKSIASQTDGTLKISSSNQTPQILVKNAGIQINLQSECSSEEVTEIISQFTEKIEKMQELHAAEILDMESRHISETETLKREHYVAVQLLKEECGTLKAVIQCLRSKEGSSIPELAHSDAYQTREICSSDSGSDWGQGIYLTHSQGFDIASEGRGEESESATDSFPKKIKGLLRAVHNEGMQVLSLTESPYSDGEDHSIQQVSESWLEERKAYINTISSLKDLITKMQLQREAEVYDSSQSHESFSDWRGELLLALQQVFLEERSVLLAAFRTELTALGTTDAVGLLNCLEQRIQEQGVEYQAAMECLQKADRRSLLSEIQALHAQMNGRKITLKREQESEKPSQELLEYNIQQKQSQMLEMQVELSSMKDRATELQEQLSSEKMVVAELKSELAQTKLELETTLKAQHKHLKELEAFRLEVKDKTDEVHLLNDTLASEQKKSRELQWALEKEKAKLGRSEERDKEELEDLKFSLESQKQRNLQLNLLLEQQKQLLNESQQKIESQRMLYDAQLSEEQGRNLELQVLLESEKVRIREMSSTLDRERELHAQLQSSDGTGQSRPPLPSEDLLKELQKQLEEKHSRIVELLNETEKYKLDSLQTRQQMEKDRQVHRKTLQTEQEANTEGQKKMHELQSKVEDLQRQLEEKRQQVYKLDLEGQRLQGIMQEFQKQELEREEKRESRRILYQNLNEPTTWSLTSDRTRNWVLQQKIEGETKESNYAKLIEMNGGGTGCNHELEMIRQKLQCVASKLQVLPQKASERLQFETADDEDFIWVQENIDEIILQLQKLTGQQGEEPSLVSPSTSCGSLTERLLRQNAELTGHISQLTEEKNDLRNMVMKLEEQIRWYRQTGAGRDNSSRFSLNGGANIEAIIASEKEVWNREKLTLQKSLKRAEAEVYKLKAELRNDSLLQTLSPDSEHVTLKRIYGKYLRAESFRKALIYQKKYLLLLLGGFQECEDATLALLARMGGQPAFTDLEVITNRPKGFTRFRSAVRVSIAISRMKFLVRRWHRVTGSVSININRDGFGLNQGAEKTDSFYHSSGGLELYGEPRHTTYRSRSDLDYIRSPLPFQNRYPGTPADFNPGSLACSQLQNYDPDRALTDYITRLEALQRRLGTIQSGSTTQFHAGMRR

SEQ ID NO: 809791 - protein, 3973 aa, Homo sapiens
EDGGGGGGDGASRAAEDDPPVSAETASTSGGGAPDRIGSLGRGACRPTSVQIDLSFLSPTTPQPLFSPAFLAEAMEDEERQKKLEAGKAKLAQFRQRKAQSDGQSPSKKQKKKRKTSSSKHDVSAHHDLNIDQSQCNEMYINSSQRVESTVIPESTIMRTLHSGEITSHEQGFSVELESEISTTADDCSSEVNGCSFVMRTGKPTNLLREEEFGVDDSYSEQGAQDSPTHLEMMESELAGKQHEIEELNRELEEMRVTYGTEGLQQLQEFEAAIKQRDGIITQLTANLQQARREKDETMREFLELTEQSQKLQIQFQQLQASETLRNSTHSSTAADLLQAKQQILTHQQQLEEQDHLLEDYQKKKEDFTMQISFLQEKIKVYEMEQDKKVENSNKEEIQEKETIIEELNTKIIEEEKKTLELKDKLTTADKLLGELQEQIVQKNQEIKNMKLELTNSKQKERQSSEEIKQLMGTVEELQKRNHKDSQFETDIVQRMEQETQRKLEQLRAELDEMYGQQIVQMKQELIRQHMAQMEEIKTRHKGEMENALRSYSNITVNEDQIKLMNVAINELNIKLQDTNSQKEKLKEELGLILEEKCALQRQLEDLVEELSFSREQIQRARQTIAEQESKLNEAHKSLSTVEDLKAEIVSASESRKELELKHEAEVTNYKIKLEMLEKEKNAVLDRMAESQEAELERLRTQLLFSHEEELSKLKEDLEIEHRINIEKLKDNLGIHYKQQIDGLQNEMSQKIETMQFEKDNLITKQNQLILEISKLKDLQQSLVNSKSEEMTLQINELQKEIEILRQEEKEKGTLEQEVQELQLKTELLEKQMKEKENDLQEKFAQLEAENSILKDEKKTLEDMLKIHTPVSQEERLIFLDSIKSKSKDSVWEKEIEILIEENEDLKQQCIQLNEEIEKQRNTFSFAEKNFEVNYQELQEEYACLLKVKDDLEDSKNKQELEYKSKLKALNEELHLQRINPTTVKMKSSVFDEDKTFVAETLEMGEVVEKDTTELMEKLEVTKREKLELSQRLSDLSEQLKQKHGEISFLNEEVKSLKQEKEQVSLRCRELEIIINHNRAENVQSCDTQVSSLLDGVVTMTSRGAEGSVSKVNKSFGEESKIMVEDKVSFENMTVGEESKQEQLILDHLPSVTKESSLRATQPSENDKLQKELNVLKSEQNDLRLQMEAQRICLSLVYSTHVDQVREYMENEKDKALCSLKEELIFAQEEKIKELQKIHQLELQTMKTQETGDEGKPLHLLIGKLQKAVSEECSYFLQTLCSVLGEYYTPALKCEVNAEDKENSGDYISENEDPELQDYRYEVQDFQENMHTLLNKVTEEYNKLLVLQTRLSKIWGQQTDGMKLEFGEENLPKEETEFLSIHSQMTNLEDIDVNHKSKLSSLQDLEKTKLEEQVQELESLISSLQQQLKETEQNYEAEIHCLQKRLQAVSESTVPPSLPVDSVVITESDAQRTMYPGSCVKKNIDGTIEFSGEFGVKEETNIVKLLEKQYQEQLEEEVAKVIVSMSIAFAQQTELSRISGGKENTASSKQAHAVCQQEQHYFNEMKLSQDQIGFQTFETVDVKFKEEFKPLSKELGEHGKEILLSNSDPHDIPESKDCVLTISEEMFSKDKTFIVRQSIHDEISVSSMDASRQLMLNEEQLEDMRQELVRQYQEHQQATELLRQAHMRQMERQREDQEQLQEEIKRLNRQLAQRSSIDNENLVSERERVLLEELEALKQLSLAGREKLCCELRNSSTQTQNGNENQGEVEEQTFKEKELDRKPEDVPPEILSNERYALQKANNRLLKILLEVVKTTAAVEETIGRHVLGILDRSSKSQSSASLIWRSEAEASVKSCVHEEHTRVTDESIPSYSGSDMPRNDINMWSKVTEEGTELSQRLVRSGFAGTEIDPENEELMLNISSRLQAAVEKLLEAISETSSQLEHAKVTQTELMRESFRQKQEATESLKCQEELRERLHEESRAREQLAVELSKAEGVIDGYADEKTLFERQIQEKTDIIDRLEQELLCASNRLQELEAEQQQIQEERELLSRQKEAMKAEAGPVEQQLLQETEKLMKEKLEVQCQAEKVRDDLQKQVKALEIDVEEQVSRFIELEQEKNTELMDLRQQNQALEKQLEKMRKFLDEQAIDREHERDVFQQEIQKLEQQLKVVPRFQPISEHQTREVEQLANHLKEKTDKCSELLLSKEQLQRDIQERNEEIEKLEFRVRELEQALLVEDRKHFGAVEAKPELSLEVQLQAERDAIDRKEKEITNLEEQLEQFREELENKNEEVQQLHMQLEIQKKESTTRLQELEQENKLFKDDMEKLGLAIKESDAMSTQDQHVLFGKFAQIIQEKEVEIDQLNEQVTKLQQQLKITTDNKVIEEKNELIRDLETQIECLMSDQECVKRNREEEIEQLNEVIEKLQQELANIGQKTSMNAHSLSEEADSLKHQLDVVIAEKLALEQQVETANEEMTFMKNVLKETNFKMNQLTQELFSLKRERESVEKIQSIPENSVNVAIDHLSKDKPELEVVLTEDALKSLENQTYFKSFEENGKGSIINLETRLLQLESTVSAKDLELTQCYKQIKDMQEQGQFETEMLQKKIVNLQKIVEEKVAAALVSQIQLEAVQEYAKFCQDNQTISSEPERTNIQNLNQLREDELGSDISALTLRISELESQVVEMHTSLILEKEQVEIAEKNVLEKEKKLLELQKLLEGNEKKQREKEKKRSPQDVEVLKTTTELFHSNEESGFFNELEALRAESVATKAELASYKEKAEKLQEELLVKETNMTSLQKDLSQVRDHLAEAKEKLSILEKEDETEVQESKKACMFEPLPIKLSKSIASQTDGTLKISSSNQTPQILVKNAGIQINLQSECSSEEVTEIISQFTEKIEKMQELHAAEILDMESRHISETETLKREHYVAVQLLKEECGTLKAVIQCLRSKEGSSIPELAHSDAYQTREICSSDSGSDWGQGIYLTHSQGFDIASEGRGEESESATDSFPKKIKGLLRAVHNEGMQVLSLTESPYSDGEDHSIQQVSESWLEERKAYINTISSLKDLITKMQLQREAEVYDSSQSHESFSDWRGELLLALQQVFLEERSVLLAAFRTELTALGTTDAVGLLNCLEQRIQEQGVEYQAAMECLQKADRRSLLSEIQALHAQMNGRKITLKREQESEKPSQELLEYNIQQKQSQMLEMQVELSSMKDRATELQEQLSSEKMVVAELKSELAQTKLELETTLKAQHKHLKELEAFRLEVKDKTDEVHLLNDTLASEQKKSRELQWALEKEKAKLGRSEERDKEELEDLKFSLESQKQRNLQLNLLLEQQKQLLNESQQKIESQRMLYDAQLSEEQGRNLELQVLLESEKVRIREMSSTLDRERELHAQLQSSDGTGQSRPPLPSEDLLKELQKQLEEKHSRIVELLNETEKYKLDSLQTRQQMEKDRQVHRKTLQTEQEANTEGQKKMHELQSKVEDLQRQLEEKRQQVYKLDLEGQRLQGIMQEFQKQELEREEKRESRRILYQNLNEPTTWSLTSDRTRNWVLQQKIEGETKESNYAKLIEMNGGGTGCNHELEMIRQKLQCVASKLQVLPQKASERLQFETADDEDFIWVQENIDEIILQLQKLTGQQGEEPSLVSPSTSCGSLTERLLRQNAELTGHISQLTEEKNDLRNMVMKLEEQIRWYRQTGAGRDNSSRFSLNGGANIEAIIASEKEVWNREKLTLQKSLKRAEAEVYKLKAELRNDSLLQTLSPDSEHVTLKRIYGKYLRAESFRKALIYQKKYLLLLLGGFQECEDATLALLARMGGQPAFTDLEVITNRPKGFTRFRSAVRVSIAISRMKFLVRRWHRVTGSVSININRDGFGLNQGAEKTDSFYHSSGGLELYGEPRHTTYRSRSDLDYIRSPLPFQNRYPGTPADFNPGSLACSQLQNYDPDRALTDYITRLEALQRRLGTIQSGSTTQFHAGMRR

SEQ ID NO: 809792 - protein, 803 aa, Homo sapiens
MSCLIMFQILIMFCVELLEYNIQQKQSQMLEMQVELSSMKDRATELQEQLSSEKMVVAELKSELAQTKLELETTLKAQHKHLKELEAFRLEVKDKTDEVHLLNDTLASEQKKSRELQWALEKEKAKLGRSEERDKEELEDLKFSLESQKQRNLQLNLLLEQQKQLLNESQQKIESQRMLYDAQLSEEQGRNLELQVLLESEKVRIREMSSTLDRERELHAQLQSSDGTGQSRPPLPSEDLLKELQKQLEEKHSRIVELLNETEKYKLDSLQTRQQMEKDRQVHRKTLQTEQEANTEGQKKMHELQSKVEDLQRQLEEKRQQVYKLDLEGQRLQGIMQEFQKQELEREEKRESRRILYQNLNEPTTWSLTSDRTRNWVLQQKIEGETKESNYAKLIEMNGGGTGCNHELEMIRQKLQCVASKLQVLPQKASERLQFETADDEDFIWVQENIDEIILQLQKLTGQQGEEPSLVSPSTSCGSLTERLLRQNAELTGHISQLTEEKNDLRNMVMKLEEQIRWYRQTGAGRDNSSRFSLNGGANIEAIIASEKEVWNREKLTLQKSLKRAEAEVYKLKAELRNDSLLQTLSPDSEHVTLKRIYGKYLRAESFRKALIYQKKYLLLLLGGFQECEDATLALLARMGGQPAFTDLEVITNRPKGFTRFRSAVRVSIAISRMKFLVRRWHRVTGSVSININRDGFGLNQGAEKTDSFYHSSGGLELYGEPRHTTYRSRSDLDYIRSPLPFQNRYPGTPADFNPGSLACSQLQNYDPDRALTDYITRLEALQRRLGTIQSGSTTQFHAGMRR

SEQ ID NO: 809793 - protein, 388 aa, Homo sapiens
EDGGGGGGDGASRAAEDDPPVSAETASTSGGGAPDRIGSLGRGACRPTSVQIDLSFLSPTTPQPLFSPAFLAEAMEDEERQKKLEAGKAKLAQFRQRKAQSDGQSPSKKQKKKRKTSSSKHDVSAHHDLNIDQSQCNEMYINSSQRVESTVIPESTIMRTLHSGEITSHEQGFSVELESEISTTADDCSSEVNGCSFVMRTGKPTNLLREEEFGVDDSYSEQGAQDSPTHLEMMESELAGKQHEIEELNRELEEMRVTYGTEGLQQLQEFEAAIKQRDGIITQLTANLQQARREKDETMREFLELTEQSQKLQIQFQQLQASETLRNSTHSSTAADLLQAKQQILTHQQQLEEQDHLLEDYQKKKEDFTMQISFLQEKIKVYEMVCLF

SEQ ID NO: 809794 - protein, 3843 aa, Homo sapiens
MYINSSQRVESTVIPESTIMRTLHSGEITSHEQGFSVELESEISTTADDCSSEVNGCSFVMRTGKPTNLLREEEFGVDDSYSEQGAQDSPTHLEMMESELAGKQHEIEELNRELEEMRVTYGTEGLQQLQEFEAAIKQRDGIITQLTANLQQARREKDETMREFLELTEQSQKLQIQFQQLQASETLRNSTHSSTAADLLQAKQQILTHQQQLEEQDHLLEDYQKKKEDFTMQISFLQEKIKVYEMEQDKKVENSNKEEIQEKETIIEELNTKIIEEEKKTLELKDKLTTADKLLGELQEQIVQKNQEIKNMKLELTNSKQKERQSSEEIKQLMGTVEELQKRNHKDSQFETDIVQRMEQETQRKLEQLRAELDEMYGQQIVQMKQELIRQHMAQMEEIKTRHKGEMENALRSYSNITVNEDQIKLMNVAINELNIKLQDTNSQKEKLKEELGLILEEKCALQRQLEDLVEELSFSREQIQRARQTIAEQESKLNEAHKSLSTVEDLKAEIVSASESRKELELKHEAEVTNYKIKLEMLEKEKNAVLDRMAESQEAELERLRTQLLFSHEEELSKLKEDLEIEHRINIEKLKDNLGIHYKQQIDGLQNEMSQKIETMQFEKDNLITKQNQLILEISKLKDLQQSLVNSKSEEMTLQINELQKEIEILRQEEKEKGTLEQEVQELQLKTELLEKQMKEKENDLQEKFAQLEAENSILKDEKKTLEDMLKIHTPVSQEERLIFLDSIKSKSKDSVWEKEIEILIEENEDLKQQCIQLNEEIEKQRNTFSFAEKNFEVNYQELQEEYACLLKVKDDLEDSKNKQELEYKSKLKALNEELHLQRINPTTVKMKSSVFDEDKTFVAETLEMGEVVEKDTTELMEKLEVTKREKLELSQRLSDLSEQLKQKHGEISFLNEEVKSLKQEKEQVSLRCRELEIIINHNRAENVQSCDTQVSSLLDGVVTMTSRGAEGSVSKVNKSFGEESKIMVEDKVSFENMTVGEESKQEQLILDHLPSVTKESSLRATQPSENDKLQKELNVLKSEQNDLRLQMEAQRICLSLVYSTHVDQVREYMENEKDKALCSLKEELIFAQEEKIKELQKIHQLELQTMKTQETGDEGKPLHLLIGKLQKAVSEECSYFLQTLCSVLGEYYTPALKCEVNAEDKENSGDYISENEDPELQDYRYEVQDFQENMHTLLNKVTEEYNKLLVLQTRLSKIWGQQTDGMKLEFGEENLPKEETEFLSIHSQMTNLEDIDVNHKSKLSSLQDLEKTKLEEQVQELESLISSLQQQLKETEQNYEAEIHCLQKRLQAVSESTVPPSLPVDSVVITESDAQRTMYPGSCVKKNIDGTIEFSGEFGVKEETNIVKLLEKQYQEQLEEEVAKVIVSMSIAFAQQTELSRISGGKENTASSKQAHAVCQQEQHYFNEMKLSQDQIGFQTFETVDVKFKEEFKPLSKELGEHGKEILLSNSDPHDIPESKDCVLTISEEMFSKDKTFIVRQSIHDEISVSSMDASRQLMLNEEQLEDMRQELVRQYQEHQQATELLRQAHMRQMERQREDQEQLQEEIKRLNRQLAQRSSIDNENLVSERERVLLEELEALKQLSLAGREKLCCELRNSSTQTQNGNENQGEVEEQTFKEKELDRKPEDVPPEILSNERYALQKANNRLLKILLEVVKTTAAVEETIGRHVLGILDRSSKSQSSASLIWRSEAEASVKSCVHEEHTRVTDESIPSYSGSDMPRNDINMWSKVTEEGTELSQRLVRSGFAGTEIDPENEELMLNISSRLQAAVEKLLEAISETSSQLEHAKVTQTELMRESFRQKQEATESLKCQEELRERLHEESRAREQLAVELSKAEGVIDGYADEKTLFERQIQEKTDIIDRLEQELLCASNRLQELEAEQQQIQEERELLSRQKEAMKAEAGPVEQQLLQETEKLMKEKLEVQCQAEKVRDDLQKQVKALEIDVEEQVSRFIELEQEKNTELMDLRQQNQALEKQLEKMRKFLDEQAIDREHERDVFQQEIQKLEQQLKVVPRFQPISEHQTREVEQLANHLKEKTDKCSELLLSKEQLQRDIQERNEEIEKLEFRVRELEQALLVSADTFQKVEDRKHFGAVEAKPELSLEVQLQAERDAIDRKEKEITNLEEQLEQFREELENKNEEVQQLHMQLEIQKKESTTRLQELEQENKLFKDDMEKLGLAIKESDAMSTQDQHVLFGKFAQIIQEKEVEIDQLNEQVTKLQQQLKITTDNKVIEEKNELIRDLETQIECLMSDQECVKRNREEEIEQLNEVIEKLQQELANIGQKTSMNAHSLSEEADSLKHQLDVVIAEKLALEQQVETANEEMTFMKNVLKETNFKMNQLTQELFSLKRERESVEKIQSIPENSVNVAIDHLSKDKPELEVVLTEDALKSLENQTYFKSFEENGKGSIINLETRLLQLESTVSAKDLELTQCYKQIKDMQEQGQFETEMLQKKIVNLQKIVEEKVAAALVSQIQLEAVQEYAKFCQDNQTISSEPERTNIQNLNQLREDELGSDISALTLRISELESQVVEMHTSLILEKEQVEIAEKNVLEKEKKLLELQKLLEGNEKKQREKEKKRSPQDVEVLKTTTELFHSNEESGFFNELEALRAESVATKAELASYKEKAEKLQEELLVKETNMTSLQKDLSQVRDHLAEAKEKLSILEKEDETEVQESKKACMFEPLPIKLSKSIASQTDGTLKISSSNQTPQILVKNAGIQINLQSECSSEEVTEIISQFTEKIEKMQELHAAEILDMESRHISETETLKREHYVAVQLLKEECGTLKAVIQCLRSKEGSSIPELAHSDAYQTREICSSDSGSDWGQGIYLTHSQGFDIASEGRGEESESATDSFPKKIKGLLRAVHNEGMQVLSLTESPYSDGEDHSIQQVSESWLEERKAYINTISSLKDLITKMQLQREAEVYDSSQSHESFSDWRGELLLALQQVFLEERSVLLAAFRTELTALGTTDAVGLLNCLEQRIQEQGVEYQAAMECLQKADRRSLLSEIQALHAQMNGRKITLKREQESEKPSQELLEYNIQQKQSQMLEMQVELSSMKDRATELQEQLSSEKMVVAELKSELAQTKLELETTLKAQHKHLKELEAFRLEVKDKTDEVHLLNDTLASEQKKSRELQWALEKEKAKLGRSEERDKEELEDLKFSLESQKQRNLQLNLLLEQQKQLLNESQQKIESQRMLYDAQLSEEQGRNLELQVLLESEKVRIREMSSTLDRERELHAQLQSSDGTGQSRPPLPSEDLLKELQKQLEEKHSRIVELLNETEKYKLDSLQTRQQMEKDRQVHRKTLQTEQEANTEGQKKMHELQSKVEDLQRQLEEKRQQVYKLDLEGQRLQGIMQEFQKQELEREEKRESRRILYQNLNEPTTWSLTSDRTRNWVLQQKIEGETKESNYAKLIEMNGGGTGCNHELEMIRQKLQCVASKLQVLPQKASERLQFETADDEDFIWVQENIDEIILQLQKLTGQQGEEPSLVSPSTSCGSLTERLLRQNAELTGHISQLTEEKNDLRNMVMKLEEQIRWYRQTGAGRDNSSRFSLNGGANIEAIIASEKEVWNREKLTLQKSLKRAEAEVYKLKAELRNDSLLQTLSPDSEHVTLKRIYGKYLRAESFRKALIYQKKYLLLLLGGFQECEDATLALLARMGGQPAFTDLEVITNRPKGFTRFRSAVRVSIAISRMKFLVRRWHRVTGSVSININRDGFGLNQGAEKTDSFYHSSGGLELYGEPRHTTYRSRSDLDYIRSPLPFQNRYPGTPADFNPGSLACSQLQNYDPDRALTDYITRLEALQRRLGTIQSGSTTQFHAGMRR

SEQ ID NO: 809795 - protein, 3630 aa, Homo sapiens
KGPLSPIPSAQKKKEDFTMQISFLQEKIKVYEMEQDKKVENSNKEEIQEKETIIEELNTKIIEEEKKTLELKDKLTTADKLLGELQEQIVQKNQEIKNMKLELTNSKQKERQSSEEIKQLMGTVEELQKRNHKDSQFETDIVQRMEQETQRKLEQLRAELDEMYGQQIVQMKQELIRQHMAQMEEIKTRHKGEMENALRSYSNITVNEDQIKLMNVAINELNIKLQDTNSQKEKLKEELGLILEEKCALQRQLEDLVEELSFSREQIQRARQTIAEQESKLNEAHKSLSTVEDLKAEIVSASESRKELELKHEAEVTNYKIKLEMLEKEKNAVLDRMAESQEAELERLRTQLLFSHEEELSKLKEDLEIEHRINIEKLKDNLGIHYKQQIDGLQNEMSQKIETMQFEKDNLITKQNQLILEISKLKDLQQSLVNSKSEEMTLQINELQKEIEILRQEEKEKGTLEQEVQELQLKTELLEKQMKEKENDLQEKFAQLEAENSILKDEKKTLEDMLKIHTPVSQEERLIFLDSIKSKSKDSVWEKEIEILIEENEDLKQQCIQLNEEIEKQRNTFSFAEKNFEVNYQELQEEYACLLKVKDDLEDSKNKQELEYKSKLKALNEELHLQRINPTTVKMKSSVFDEDKTFVAETLEMGEVVEKDTTELMEKLEVTKREKLELSQRLSDLSEQLKQKHGEISFLNEEVKSLKQEKEQVSLRCRELEIIINHNRAENVQSCDTQVSSLLDGVVTMTSRGAEGSVSKVNKSFGEESKIMVEDKVSFENMTVGEESKQEQLILDHLPSVTKESSLRATQPSENDKLQKELNVLKSEQNDLRLQMEAQRICLSLVYSTHVDQVREYMENEKDKALCSLKEELIFAQEEKIKELQKIHQLELQTMKTQETGDEGKPLHLLIGKLQKAVSEECSYFLQTLCSVLGEYYTPALKCEVNAEDKENSGDYISENEDPELQDYRYEVQDFQENMHTLLNKVTEEYNKLLVLQTRLSKIWGQQTDGMKLEFGEENLPKEETEFLSIHSQMTNLEDIDVNHKSKLSSLQDLEKTKLEEQVQELESLISSLQQQLKETEQNYEAEIHCLQKRLQAVSESTVPPSLPVDSVVITESDAQRTMYPGSCVKKNIDGTIEFSGEFGVKEETNIVKLLEKQYQEQLEEEVAKVIVSMSIAFAQQTELSRISGGKENTASSKQAHAVCQQEQHYFNEMKLSQDQIGFQTFETVDVKFKEEFKPLSKELGEHGKEILLSNSDPHDIPESKDCVLTISEEMFSKDKTFIVRQSIHDEISVSSMDASRQLMLNEEQLEDMRQELVRQYQEHQQATELLRQAHMRQMERQREDQEQLQEEIKRLNRQLAQRSSIDNENLVSERERVLLEELEALKQLSLAGREKLCCELRNSSTQTQNGNENQGEVEEQTFKEKELDRKPEDVPPEILSNERYALQKANNRLLKILLEVVKTTAAVEETIGRHVLGILDRSSKSQSSASLIWRSEAEASVKSCVHEEHTRVTDESIPSYSGSDMPRNDINMWSKVTEEGTELSQRLVRSGFAGTEIDPENEELMLNISSRLQAAVEKLLEAISETSSQLEHAKVTQTELMRESFRQKQEATESLKCQEELRERLHEESRAREQLAVELSKAEGVIDGYADEKTLFERQIQEKTDIIDRLEQELLCASNRLQELEAEQQQIQEERELLSRQKEAMKAEAGPVEQQLLQETEKLMKEKLEVQCQAEKVRDDLQKQVKALEIDVEEQVSRFIELEQEKNTELMDLRQQNQALEKQLEKMRKFLDEQAIDREHERDVFQQEIQKLEQQLKVVPRFQPISEHQTREVEQLANHLKEKTDKCSELLLSKEQLQRDIQERNEEIEKLEFRVRELEQALLVSADTFQKVEDRKHFGAVEAKPELSLEVQLQAERDAIDRKEKEITNLEEQLEQFREELENKNEEVQQLHMQLEIQKKESTTRLQELEQENKLFKDDMEKLGLAIKESDAMSTQDQHVLFGKFAQIIQEKEVEIDQLNEQVTKLQQQLKITTDNKVIEEKNELIRDLETQIECLMSDQECVKRNREEEIEQLNEVIEKLQQELANIGQKTSMNAHSLSEEADSLKHQLDVVIAEKLALEQQVETANEEMTFMKNVLKETNFKMNQLTQELFSLKRERESVEKIQSIPENSVNVAIDHLSKDKPELEVVLTEDALKSLENQTYFKSFEENGKGSIINLETRLLQLESTVSAKDLELTQCYKQIKDMQEQGQFETEMLQKKIVNLQKIVEEKVAAALVSQIQLEAVQEYAKFCQDNQTISSEPERTNIQNLNQLREDELGSDISALTLRISELESQVVEMHTSLILEKEQVEIAEKNVLEKEKKLLELQKLLEGNEKKQREKEKKRSPQDVEVLKTTTELFHSNEESGFFNELEALRAESVATKAELASYKEKAEKLQEELLVKETNMTSLQKDLSQVRDHLAEAKEKLSILEKEDETEVQESKKACMFEPLPIKLSKSIASQTDGTLKISSSNQTPQILVKNAGIQINLQSECSSEEVTEIISQFTEKIEKMQELHAAEILDMESRHISETETLKREHYVAVQLLKEECGTLKAVIQCLRSKEGSSIPELAHSDAYQTREICSSDSGSDWGQGIYLTHSQGFDIASEGRGEESESATDSFPKKIKGLLRAVHNEGMQVLSLTESPYSDGEDHSIQQVSESWLEERKAYINTISSLKDLITKMQLQREAEVYDSSQSHESFSDWRGELLLALQQVFLEERSVLLAAFRTELTALGTTDAVGLLNCLEQRIQEQGVEYQAAMECLQKADRRSLLSEIQALHAQMNGRKITLKREQESEKPSQELLEYNIQQKQSQMLEMQVELSSMKDRATELQEQLSSEKMVVAELKSELAQTKLELETTLKAQHKHLKELEAFRLEVKDKTDEVHLLNDTLASEQKKSRELQWALEKEKAKLGRSEERDKEELEDLKFSLESQKQRNLQLNLLLEQQKQLLNESQQKIESQRMLYDAQLSEEQGRNLELQVLLESEKVRIREMSSTLDRERELHAQLQSSDGTGQSRPPLPSEDLLKELQKQLEEKHSRIVELLNETEKYKLDSLQTRQQMEKDRQVHRKTLQTEQEANTEGQKKMHELQSKVEDLQRQLEEKRQQVYKLDLEGQRLQGIMQEFQKQELEREEKRESRRILYQNLNEPTTWSLTSDRTRNWVLQQKIEGETKESNYAKLIEMNGGGTGCNHELEMIRQKLQCVASKLQVLPQKASERLQFETADDEDFIWVQENIDEIILQLQKLTGQQGEEPSLVSPSTSCGSLTERLLRQNAELTGHISQLTEEKNDLRNMVMKLEEQIRWYRQTGAGRDNSSRFSLNGGANIEAIIASEKEVWNREKLTLQKSLKRAEAEVYKLKAELRNDSLLQTLSPDSEHVTLKRIYGKYLRAESFRKALIYQKKYLLLLLGGFQECEDATLALLARMGGQPAFTDLEVITNRPKGFTRFRSAVRVSIAISRMKFLVRRWHRVTGSVSININRDGFGLNQGAEKTDSFYHSSGGLELYGEPRHTTYRSRSDLDYIRSPLPFQNRYPGTPADFNPGSLACSQLQNYDPDRALTDYITRLEALQRRLGTIQSGSTTQFHAGMRR

SEQ ID NO: 809796 - protein, 2122 aa, Homo sapiens [sequence omitted]

SEQ ID NO: 809797 - protein, 3989 aa, Homo sapiens
EDGGGGGGDGASRAAEDDPPVSAETASTSGGGAPDRIGSLGRGACRPTSVQIDLSFLSPTTPQPLFSPAFLAEAMEDEERQKKLEAGKAKLAQFRQRKAQSDGQSPSKKQKKKRKTSSSKHDVSAHHDLNIDQSQCNEMYINSSQRVESTVIPESTIMRTLHSGEITSHEQGFSVELESEISTTADDCSSEVNGCSFVMRTGKPTNLLREEEFGVDDSYSEQGAQDSPTHLEMMESELAGKQHEIEELNRELEEMRVTYGTEGLQQLQEFEAAIKQRDGIITQLTANLQQARREKDETMREFLELTEQSQKLQIQFQQLQASETLRNSTHSSTAADLLQAKQQILTHQQQLEEQDHLLEDYQKKKEDFTMQISFLQEKIKVYEMEQDKKVENSNKEEIQEKETIIEELNTKIIEEEKKTLELKDKLTTADKLLGELQEQIVQKNQEIKNMKLELTNSKQKERQSSEEIKQLMGTVEELQKRNHKDSQFETDIVQRMEQETQRKLEQLRAELDEMYGQQIVQMKQELIRQHMAQMEEIKTRHKGEMENALRSYSNITVNEDQIKLMNVAINELNIKLQDTNSQKEKLKEELGLILEEKCALQRQLEDLVEELSFSREQIQRARQTIAEQESKLNEAHKSLSTVEDLKAEIVSASESRKELELKHEAEVTNYKIKLEMLEKEKNAVLDRMAESQEAELERLRTQLLFSHEEELSKLKEDLEIEHRINIEKLKDNLGIHYKQQIDGLQNEMSQKIETMQFEKDNLITKQNQLILEISKLKDLQQSLVNSKSEEMTLQINELQKEIEILRQEEKEKGTLEQEVQELQLKTELLEKQMKEKENDLQEKFAQLEAENSILKDEKKTLEDMLKIHTPVSQEERLIFLDSIKSKSKDSVWEKEIEILIEENEDLKQQCIQLNEEIEKQRNTFSFAEKNFEVNYQELQEEYACLLKVKDDLEDSKNKQELEYKSKLKALNEELHLQRINPTTVKMKSSVFDEDKTFVAETLEMGEVVEKDTTELMEKLEVTKREKLELSQRLSDLSEQLKQKHGEISFLNEEVKSLKQEKEQVSLRCRELEIIINHNRAENVQSCDTQVSSLLDGVVTMTSRGAEGSVSKVNKSFGEESKIMVEDKVSFENMTVGEESKQEQLILDHLPSVTKESSLRATQPSENDKLQKELNVLKSEQNDLRLQMEAQRICLSLVYSTHVDQVREYMENEKDKALCSLKEELIFAQEEKIKELQKIHQLELQTMKTQETGDEGKPLHLLIGKLQKAVSEECSYFLQTLCSVLGEYYTPALKCEVNAEDKENSGDYISENEDPELQDYRYEVQDFQENMHTLLNKVTEEYNKLLVLQTRLSKIWGQQTDGMKLEFGEENLPKEETEFLSIHSQMTNLEDIDVNHKSKLSSLQDLEKTKLEEQVQELESLISSLQQQLKETEQNYEAEIHCLQKRLQAVSESTVPPSLPVDSVVITESDAQRTMYPGSCVKKNIDGTIEFSGEFGVKEETNIVKLLEKQYQEQLEEEVAKVIVSMSIAFAQQTELSRISGGKENTASSKQAHAVCQQEQHYFNEMKLSQDQIGFQTFETVDVKFKEEFKPLSKELGEHGKEILLSNSDPHDIPESKDCVLTISEEMFSKDKTFIVRQSIHDEISVSSMDASRQLMLNEEQLEDMRQELVRQYQEHQQATELLRQAHMRQMERQREDQEQLQEEIKRLNRQLAQRSSIDNENLVSERERVLLEELEALKQLSLAGREKLCCELRNSSTQTQNGNENQGEVEEQTFKEKELDRKPEDVPPEILSNERYALQKANNRLLKILLEVVKTTAAVEETIGRHVLGILDRSSKSQSSASLIWRSEAEASVKSCVHEEHTRVTDESIPSYSGSDMPRNDINMWSKVTEEGTELSQRLVRSGFAGTEIDPENEELMLNISSRLQAAVEKLLEAISETSSQLEHAKVTQTELMRESFRQKQEATESLKCQEELRERLHEESRAREQLAVELSKAEGVIDGYADEKTLFERQIQEKTDIIDRLEQELLCASNRLQELEAEQQQIQEERELLSRQKEAMKAEAGPVEQQLLQETEKLMKEKLEVQCQAEKVRDDLQKQVKALEIDVEEQVSRFIELEQEKNTELMDLRQQNQALEKQLEKMRKFLDEQAIDREHERDVFQQEIQKLEQQLKVVPRFQPISEHQTREVEQLANHLKEKTDKCSELLLSKEQLQRDIQERNEEIEKLEFRVRELEQALLVEDRKHFGAVEAKPELSLEVQLQAERDAIDRKEKEITNLEEQLEQFREELENKNEEVQQLHMQLEIQKKESTTRLQELEQENKLFKDDMEKLGLAIKESDAMSTQDQHVLFGKFAQIIQEKEVEIDQLNEQVTKLQQQLKITTDNKVIEEKNELIRDLETQIECLMSDQECVKRNREEEIEQLNEVIEKLQQELANIGQKTSMNAHSLSEEADSLKHQLDVVIAEKLALEQQVETANEEMTFMKNVLKETNFKMNQLTQELFSLKRERESVEKIQSIPENSVNVAIDHLSKDKPELEVVLTEDALKSLENQTYFKSFEENGKGSIINLETRLLQLESTVSAKDLELTQCYKQIKDMQEQGQFETEMLQKKIVNLQKIVEEKVAAALVSQIQLEAVQEYAKFCQDNQTISSEPERTNIQNLNQLREDELGSDISALTLRISELESQVVEMHTSLILEKEQVEIAEKNVLEKEKKLLELQKLLEGNEKKQREKEKKRSPQDVEVLKTTTELFHSNEESGFFNELEALRAESVATKAELASYKEKAEKLQEELLVKETNMTSLQKDLSQVRDHLAEAKEKLSILEKEDETEVQESKKACMFEPLPIKLSKSIASQTDGTLKISSSNQTPQILVKNAGIQINLQSECSSEEVTEIISQFTEKIEKMQELHAAEILDMESRHISETETLKREHYVAVQLLKEECGTLKAVIQCLRSKEGSSIPELAHSDAYQTREICSSDSGSDWGQGIYLTHSQGFDIASEGRGEESESATDSFPKKIKGLLRAVHNEGMQVLSLTESPYSDGEDHSIQQVSESWLEERKAYINTISSLKDLITKMQLQREAEVYDSSQSHESFSDWRGELLLALQQVFLEERSVLLAAFRTELTALGTTDAVGLLNCLEQRIQEQGVEYQAAMECLQKADRRSLLSEIQALHAQMNGRKITLKREQESEKPSQELLEYNIQQKQSQMLEMQVELSSMKDRATELQEQLSSEKMVVAELKSELAQTKLELETTLKAQHKHLKELEAFRLEVKDKTDEVHLLNDTLASEQKKSRELQWALEKEKAKLGRSEERDKEELEDLKFSLESQKQRNLQLNLLLEQQKQLLNESQQKIESQRMLYDAQLSEEQGRNLELQVLLESEKVRIREMSSTLDRERELHAQLQSSDGTGQSRPPLPSEDLLKELQKQLEEKHSRIVELLNETEKYKLDSLQTRQQMEKDRQVHRKTLQTEQEANTEGQKKMHELQSKVEDLQRQLEEKRQQVYKLDLEGQRLQGIMQEFQKQELEREEKRESRRILYQNLNEPTTWSLTSDRTRNWVLQQKIEGETKESNYAKLIEMNGGGTGCNHELEMIRQKLQCVASKLQVLPQKASERLQFETADDEDFIWVQENIDEIILQLQKLTGQQGEEPSLVSPSTSCGSLTERLLRQNAELTGHISQLTEEKNDLRNMVMKLEEQIRWYRQTGAGRDNSSRFSLNGGANIEAIIASEKEVWNREKLTLQKSLKRAEAEVYKLKAELRNDSLLQTLSPDSEHVTLKRIYGKYLRAESFRKALIYQKKYLLLLLGGFQECEDATLALLARMGGQPAFTDLEVITNRPKGFTRFRSAVRVSIAISRMKFLVRRWHRVTGSVSININRDGFGLNQGAEKTDSFYHSSGGLELYGEPRHTTYRSRSDLDYIRSPLPFQNRYPGTPADFNPGSLACSQLQNYDPDRALTDYITRLEALQRRLGTIQSGALSLTTSWQHHSARPTAPLSLKFFHTH

SEQ ID NO: 809798 - protein, 2652 aa, Homo sapiens
MHTLLNKVTEEYNKLLVLQTRLSKIWGQQTDGMKLEFGEENLPKEETEFLSIHSQMTNLEDIDVNHKSKLSSLQDLEKTKLEEQVQELESLISSLQQQLKETEQNYEAEIHCLQKRLQAVSESTVPPSLPVDSVVITESDAQRTMYPGSCVKKNIDGTIEFSGEFGVKEETNIVKLLEKQYQEQLEEEVAKVIVSMSIAFAQQTELSRISGGKENTASSKQAHAVCQQEQHYFNEMKLSQDQIGFQTFETVDVKFKEEFKPLSKELGEHGKEILLSNSDPHDIPESKDCVLTISEEMFSKDKTFIVRQSIHDEISVSSMDASRQLMLNEEQLEDMRQELVRQYQEHQQATELLRQAHMRQMERQREDQEQLQEEIKRLNRQLAQRSSIDNENLVSERERVLLEELEALKQLSLAGREKLCCELRNSSTQTQNGNENQGEVEEQTFKEKELDRKPEDVPPEILSNERYALQKANNRLLKILLEVVKTTAAVEETIGRHVLGILDRSSKSQSSASLIWRSEAEASVKSCVHEEHTRVTDESIPSYSGSDMPRNDINMWSKVTEEGTELSQRLVRSGFAGTEIDPENEELMLNISSRLQAAVEKLLEAISETSSQLEHAKVTQTELMRESFRQKQEATESLKCQEELRERLHEESRAREQLAVELSKAEGVIDGYADEKTLFERQIQEKTDIIDRLEQELLCASNRLQELEAEQQQIQEERELLSRQKEAMKAEAGPVEQQLLQETEKLMKEKLEVQCQAEKVRDDLQKQVKALEIDVEEQVSRFIELEQEKNTELMDLRQQNQALEKQLEKMRKFLDEQAIDREHERDVFQQEIQKLEQQLKVVPRFQPISEHQTREVEQLANHLKEKTDKCSELLLSKEQLQRDIQERNEEIEKLEFRVRELEQALLVSADTFQKVEDRKHFGAVEAKPELSLEVQLQAERDAIDRKEKEITNLEEQLEQFREELENKNEEVQQLHMQLEIQKKESTTRLQELEQENKLFKDDMEKLGLAIKESDAMSTQDQHVLFGKFAQIIQEKEVEIDQLNEQVTKLQQQLKITTDNKVIEEKNELIRDLETQIECLMSDQECVKRNREEEIEQLNEVIEKLQQELANIGQKTSMNAHSLSEEADSLKHQLDVVIAEKLALEQQVETANEEMTFMKNVLKETNFKMNQLTQELFSLKRERESVEKIQSIPENSVNVAIDHLSKDKPELEVVLTEDALKSLENQTYFKSFEENGKGSIINLETRLLQLESTVSAKDLELTQCYKQIKDMQEQGQFETEMLQKKIVNLQKIVEEKVAAALVSQIQLEAVQEYAKFCQDNQTISSEPERTNIQNLNQLREDELGSDISALTLRISELESQVVEMHTSLILEKEQVEIAEKNVLEKEKKLLELQKLLEGNEKKQREKEKKRSPQDVEVLKTTTELFHSNEESGFFNELEALRAESVATKAELASYKEKAEKLQEELLVKETNMTSLQKDLSQVRDHLAEAKEKLSILEKEDETEVQESKKACMFEPLPIKLSKSIASQTDGTLKISSSNQTPQILVKNAGIQINLQSECSSEEVTEIISQFTEKIEKMQELHAAEILDMESRHISETETLKREHYVAVQLLKEECGTLKAVIQCLRSKEGSSIPELAHSDAYQTREICSSDSGSDWGQGIYLTHSQGFDIASEGRGEESESATDSFPKKIKGLLRAVHNEGMQVLSLTESPYSDGEDHSIQQVSESWLEERKAYINTISSLKDLITKMQLQREAEVYDSSQSHESFSDWRGELLLALQQVFLEERSVLLAAFRTELTALGTTDAVGLLNCLEQRIQEQGVEYQAAMECLQKADRRSLLSEIQALHAQMNGRKITLKREQESEKPSQELLEYNIQQKQSQMLEMQVELSSMKDRATELQEQLSSEKMVVAELKSELAQTKLELETTLKAQHKHLKELEAFRLEVKDKTDEVHLLNDTLASEQKKSRELQWALEKEKAKLGRSEERDKEELEDLKFSLESQKQRNLQLNLLLEQQKQLLNESQQKIESQRMLYDAQLSEEQGRNLELQVLLESEKVRIREMSSTLDRERELHAQLQSSDGTGQSRPPLPSEDLLKELQKQLEEKHSRIVELLNETEKYKLDSLQTRQQMEKDRQVHRKTLQTEQEANTEGQKKMHELQSKVEDLQRQLEEKRQQVYKLDLEGQRLQGIMQEFQKQELEREEKRESRRILYQNLNEPTTWSLTSDRTRNWVLQQKIEGETKESNYAKLIEMNGGGTGCNHELEMIRQKLQCVASKLQVLPQKASERLQFETADDEDFIWVQENIDEIILQLQKLTGQQGEEPSLVSPSTSCGSLTERLLRQNAELTGHISQLTEEKNDLRNMVMKLEEQIRWYRQTGAGRDNSSRFSLNGGANIEAIIASEKEVWNREKLTLQKSLKRAEAEVYKLKAELRNDSLLQTLSPDSEHVTLKRIYGKYLRAESFRKALIYQKKYLLLLLGGFQECEDATLALLARMGGQPAFTDLEVITNRPKGFTRFRSAVRVSIAISRMKFLVRRWHRVTGSVSININRDGFGLNQGAEKTDSFYHSSGGLELYGEPRHTTYRSRSDLDYIRSPLPFQNRYPGTPADFNPGSLACSQLQNYDPDRALTDYITRLEALQRRLGTIQSGSTTQFHAGMRR

SEQ ID NO: 809799 - protein, 2795 aa, Homo sapiens
MEAQRICLSLVYSTHVDQVREYMENEKDKALCSLKEELIFAQEEKIKELQKIHQLELQTMKTQETGDEGKPLHLLIGKLQKAVSEECSYFLQTLCSVLGEYYTPALKCEVNAEDKENSGDYISENEDPELQDYRYEVQDFQENMHTLLNKVTEEYNKLLVLQTRLSKIWGQQTDGMKLEFGEENLPKEETEFLSIHSQMTNLEDIDVNHKSKLSSLQDLEKTKLEEQVQELESLISSLQQQLKETEQNYEAEIHCLQKRLQAVSESTVPPSLPVDSVVITESDAQRTMYPGSCVKKNIDGTIEFSGEFGVKEETNIVKLLEKQYQEQLEEEVAKVIVSMSIAFAQQTELSRISGGKENTASSKQAHAVCQQEQHYFNEMKLSQDQIGFQTFETVDVKFKEEFKPLSKELGEHGKEILLSNSDPHDIPESKDCVLTISEEMFSKDKTFIVRQSIHDEISVSSMDASRQLMLNEEQLEDMRQELVRQYQEHQQATELLRQAHMRQMERQREDQEQLQEEIKRLNRQLAQRSSIDNENLVSERERVLLEELEALKQLSLAGREKLCCELRNSSTQTQNGNENQGEVEEQTFKEKELDRKPEDVPPEILSNERYALQKANNRLLKILLEVVKTTAAVEETIGRHVLGILDRSSKSQSSASLIWRSEAEASVKSCVHEEHTRVTDESIPSYSGSDMPRNDINMWSKVTEEGTELSQRLVRSGFAGTEIDPENEELMLNISSRLQAAVEKLLEAISETSSQLEHAKVTQTELMRESFRQKQEATESLKCQEELRERLHEESRAREQLAVELSKAEGVIDGYADEKTLFERQIQEKTDIIDRLEQELLCASNRLQELEAEQQQIQEERELLSRQKEAMKAEAGPVEQQLLQETEKLMKEKLEVQCQAEKVRDDLQKQVKALEIDVEEQVSRFIELEQEKNTELMDLRQQNQALEKQLEKMRKFLDEQAIDREHERDVFQQEIQKLEQQLKVVPRFQPISEHQTREVEQLANHLKEKTDKCSELLLSKEQLQRDIQERNEEIEKLEFRVRELEQALLVSADTFQKVEDRKHFGAVEAKPELSLEVQLQAERDAIDRKEKEITNLEEQLEQFREELENKNEEVQQLHMQLEIQKKESTTRLQELEQENKLFKDDMEKLGLAIKESDAMSTQDQHVLFGKFAQIIQEKEVEIDQLNEQVTKLQQQLKITTDNKVIEEKNELIRDLETQIECLMSDQECVKRNREEEIEQLNEVIEKLQQELANIGQKTSMNAHSLSEEADSLKHQLDVVIAEKLALEQQVETANEEMTFMKNVLKETNFKMNQLTQELFSLKRERESVEKIQSIPENSVNVAIDHLSKDKPELEVVLTEDALKSLENQTYFKSFEENGKGSIINLETRLLQLESTVSAKDLELTQCYKQIKDMQEQGQFETEMLQKKIVNLQKIVEEKVAAALVSQIQLEAVQEYAKFCQDNQTISSEPERTNIQNLNQLREDELGSDISALTLRISELESQVVEMHTSLILEKEQVEIAEKNVLEKEKKLLELQKLLEGNEKKQREKEKKRSPQDVEVLKTTTELFHSNEESGFFNELEALRAESVATKAELASYKEKAEKLQEELLVKETNMTSLQKDLSQVRDHLAEAKEKLSILEKEDETEVQESKKACMFEPLPIKLSKSIASQTDGTLKISSSNQTPQILVKNAGIQINLQSECSSEEVTEIISQFTEKIEKMQELHAAEILDMESRHISETETLKREHYVAVQLLKEECGTLKAVIQCLRSKEGSSIPELAHSDAYQTREICSSDSGSDWGQGIYLTHSQGFDIASEGRGEESESATDSFPKKIKGLLRAVHNEGMQVLSLTESPYSDGEDHSIQQVSESWLEERKAYINTISSLKDLITKMQLQREAEVYDSSQSHESFSDWRGELLLALQQVFLEERSVLLAAFRTELTALGTTDAVGLLNCLEQRIQEQGVEYQAAMECLQKADRRSLLSEIQALHAQMNGRKITLKREQESEKPSQELLEYNIQQKQSQMLEMQVELSSMKDRATELQEQLSSEKMVVAELKSELAQTKLELETTLKAQHKHLKELEAFRLEVKDKTDEVHLLNDTLASEQKKSRELQWALEKEKAKLGRSEERDKEELEDLKFSLESQKQRNLQLNLLLEQQKQLLNESQQKIESQRMLYDAQLSEEQGRNLELQVLLESEKVRIREMSSTLDRERELHAQLQSSDGTGQSRPPLPSEDLLKELQKQLEEKHSRIVELLNETEKYKLDSLQTRQQMEKDRQVHRKTLQTEQEANTEGQKKMHELQSKVEDLQRQLEEKRQQVYKLDLEGQRLQGIMQEFQKQELEREEKRESRRILYQNLNEPTTWSLTSDRTRNWVLQQKIEGETKESNYAKLIEMNGGGTGCNHELEMIRQKLQCVASKLQVLPQKASERLQFETADDEDFIWVQENIDEIILQLQKLTGQQGEEPSLVSPSTSCGSLTERLLRQNAELTGHISQLTEEKNDLRNMVMKLEEQIRWYRQTGAGRDNSSRFSLNGGANIEAIIASEKEVWNREKLTLQKSLKRAEAEVYKLKAELRNDSLLQTLSPDSEHVTLKRIYGKYLRAESFRKALIYQKKYLLLLLGGFQECEDATLALLARMGGQPAFTDLEVITNRPKGFTRFRSAVRVSIAISRMKFLVRRWHRVTGSVSININRDGFGLNQGAEKTDSFYHSSGGLELYGEPRHTTYRSRSDLDYIRSPLPFQNRYPGTPADFNPGSLACSQLQNYDPDRALTDYITRLEALQRRLGTIQSGSTTQFHAGMRR

SEQ ID NO: 809800 - protein, 3981 aa, Homo sapiens; identical to SEQ ID NO: 809790

SEQ ID NO: 809801 - protein, 3247 aa, Homo sapiens
EDGGGGGGDGASRAAEDDPPVSAETASTSGGGAPDRIGSLGRGACRPTSVQIDLSFLSPTTPQPLFSPAFLAEAMEDEERQKKLEAGKAKLAQFRQRKAQSDGQSPSKKQKKKRKTSSSKHDVSAHHDLNIDQSQCNEMYINSSQRVESTVIPESTIMRTLHSGEITSHEQGFSVELESEISTTADDCSSEVNGCSFVMRTGKPTNLLREEEFGVDDSYSEQGAQDSPTHLEMMESELAGKQHEIEELNRELEEMRVTYGTEGLQQLQEFEAAIKQRDGIITQLTANLQQARREKDETMREFLELTEQSQKLQIQFQQLQASETLRNSTHSSTAADLLQAKQQILTHQQQLEEQDHLLEDYQKKKEDFTMQISFLQEKIKVYEMEQDKKVENSNKEEIQEKETIIEELNTKIIEEEKKTLELKDKLTTADKLLGELQEQIVQKNQEIKNMKLELTNSKQKERQSSEEIKQLMGTVEELQKRNHKDSQFETDIVQRMEQETQRKLEQLRAELDEMYGQQIVQMKQELIRQHMAQMEEIKTRHKGEMENALRSYSNITVNEDQIKLMNVAINELNIKLQDTNSQKEKLKEELGLILEEKCALQRQLEDLVEELSFSREQIQRARQTIAEQESKLNEAHKSLSTVEDLKAEIVSASESRKELELKHEAEVTNYKIKLEMLEKEKNAVLDRMAESQEAELERLRTQLLFSHEEELSKLKEDLEIEHRINIEKLKDNLGIHYKQQIDGLQNEMSQKIETMQFEKDNLITKQNQLILEISKLKDLQQSLVNSKSEEMTLQINELQKEIEILRQEEKEKGTLEQEVQELQLKTELLEKQMKEKENDLQEKFAQLEAENSILKDEKKTLEDMLKIHTPVSQEERLIFLDSIKSKSKDSVWEKEIEILIEENEDLKQQCIQLNEEIEKQRNTFSFAEKNFEVNYQELQEEYACLLKVKDDLEDSKNKQELEYKSKLKALNEELHLQRINPTTVKMKSSVFDEDKTFVAETLEMGEVVEKDTTELMEKLEVTKREKLELSQRLSDLSEQLKQKHGEISFLNEEVKSLKQEKEQVSLRCRELEIIINHNRAENVQSCDTQVSSLLDGVVTMTSRGAEGSVSKVNKSFGEESKIMVEDKVSFENMTVGEESKQEQLILDHLPSVTKESSLRATQPSENDKLQKELNVLKSEQNDLRLQMEAQRICLSLVYSTHVDQVREYMENEKDKALCSLKEELIFAQEEKIKELQKIHQLELQTMKTQETGDEGKPLHLLIGKLQKAVSEECSYFLQTLCSVLGEYYTPALKCEVNAEDKENSGDYISENEDPELQDYRYEVQDFQENMHTLLNKVTEEYNKLLVLQTRLSKIWGQQTDGMKLEFGEENLPKEETEFLSIHSQMTNLEDIDVNHKSKLSSLQDLEKTKLEEQVQELESLISSLQQQLKETEQNYEAEIHCLQKRLQAVSESTVPPSLPVDSVVITESDAQRTMYPGSCVKKNIDGTIEFSGEFGVKEETNIVKLLEKQYQEQLEEEVAKVIVSMSIAFAQQTELSRISGGKENTASSKQAHAVCQQEQHYFNEMKLSQDQIGFQTFETVDVKFKEEFKPLSKELGEHGKEILLSNSDPHDIPESKDCVLTISEEMFSKDKTFIVRQSIHDEISVSSMDASRQLMLNEEQLEDMRQELVRQYQEHQQATELLRQAHMRQMERQREDQEQLQEEIKRLNRQLAQRSSIDNENLVSERERVLLEELEALKQLSLAGREKLCCELRNSSTQTQNGNENQGEVEEQTFKEKELDRKPEDVPPEILSNERYALQKANNRLLKILLEVVKTTAAVEETIGRHVLGILDRSSKSQSSASLIWRSEAEASVKSCVHEEHTRVTDESIPSYSGSDMPRNDINMWSKVTEEGTELSQRLVRSGFAGTEIDPENEELMLNISSRLQAAVEKLLEAISETSSQLEHAKVTQTELMRESFRQKQEATESLKCQEELRERLHEESRAREQLAVELSKAEGVIDGYADEKTLFERQIQEKTDIIDRLEQELLCASNRLQELEAEQQQIQEERELLSRQKEAMKAEAGPVEQQLLQETEKLMKEKLEVQCQAEKVRDDLQKQVKALEIDVEEQVSRFIELEQEKNTELMDLRQQNQALEKQLEKMRKFLDEQAIDREHERDVFQQEIQKLEQQLKVVPRFQPISEHQTREVEQLANHLKEKTDKCSELLLSKEQLQRDIQERNEEIEKLEFRVRELEQALLVSADTFQKVEDRKHFGAVEAKPELSLEVQLQAERDAIDRKEKEITNLEEQLEQFREELENKNEEVQQLHMQLEIQKKESTTRLQELEQENKLFKDDMEKLGLAIKESDAMSTQDQHVLFGKFAQIIQEKEVEIDQLNEQVTKLQQQLKITTDNKVIEEKNELIRDLETQIECLMSDQECVKRNREEEIEQLNEVIEKLQQELANIGQKTSMNAHSLSEEADSLKHQLDVVIAEKLALEQQVETANEEMTFMKNVLKETNFKMNQLTQELFSLKRERESVEKIQSIPENSVNVAIDHLSKDKPELEVVLTEDALKSLENQTYFKSFEENGKGSIINLETRLLQLESTVSAKDLELTQCYKQIKDMQEQGQFETEMLQKKIVNLQKIVEEKVAAALVSQIQLEAVQEYAKFCQDNQTISSEPERTNIQNLNQLREDELGSDISALTLRISELESQVVEMHTSLILEKEQVEIAEKNVLEKEKKLLELQKLLEGNEKKQREKEKKRSPQDVEVLKTTTELFHSNEESGFFNELEALRAESVATKAELASYKEKAEKLQEELLVKETNMTSLQKDLSQVRDHLAEAKEKLSILEKEDETEVQESKKACMFEPLPIKLSKSIASQTDGTLKISSSNQTPQILVKNAGIQINLQSECSSEEVTEIISQFTEKIEKMQELHAAEILDMESRHISETETLKREHYVAVQLLKEECGTLKAVIQCLRSKEGSSIPELAHSDAYQTREICSSDSGSDWGQGIYLTHSQGFDIASEGRGEESESATDSFPKKIKGLLRAVHNEGMQVLSLTESPYSDGEDHSIQQVSESWLEERKAYINTISSLKDLITKMQLQREAEVYDSSQSHESFSDWRGELLLALQQVFLEERSVLLAAFRTELTALGTTDAVGLLNCLEQRIQEQGVEYQAAMECLQKADRRSLLSEIQALHAQMNGRKITLKREQESEKPSQGMLYDKLIWLHKQVKRFHFVFFLIIIKLKHIFLVTFSSHSHNVKDTIYINYSRG

SEQ ID NO: 809802 - protein, 3981 aa, Homo sapiens; identical to SEQ ID NO: 809790

SEQ ID NO: 809803 - protein, 803 aa, Homo sapiens; identical to SEQ ID NO: 809792

SEQ ID NO: 809804 - protein, 3923 aa, Homo sapiens
EDGGGGGGDGASRAAEDDPPVSAETASTSGGGAPDRIGSLGRGACRPTSVQIDLSFLSPTTPQPLFSPAFLAEAMEDEERQKKLEAGKAKLAQFRQRKAQSDGQSPSKKQKKKRKTSSSKHDVSAHHDLNIDQSQCNEMYINSSQRVESTVIPESTIMRTLHSGEITSHEQGFSVELESEISTTADDCSSEVNGCSFVMRTGKPTNLLREEEFGVDDSYSEQGAQDSPTHLEMMESELAGKQHEIEELNRELEEMRVTYGTEGLQQLQEFEAAIKQRDGIITQLTANLQQARREKDETMREFLELTEQSQKLQIQFQQLQASETLRNSTHSSTAADLLQAKQQILTHQQQLEEQDHLLEDYQKKKEDFTMQISFLQEKIKVYEMEQDKKVENSNKEEIQEKETIIEELNTKIIEEEKKTLELKDKLTTADKLLGELQEQIVQKNQEIKNMKLELTNSKQKERQSSEEIKQLMGTVEELQKRNHKDSQFETDIVQRMEQETQRKLEQLRAELDEMYGQQIVQMKQELIRQHMAQMEEIKTRHKGEMENALRSYSNITVNEDQIKLMNVAINELNIKLQDTNSQKEKLKEELGLILEEKCALQRQLEDLVEELSFSREQIQRARQTIAEQESKLNEAHKSLSTVEDLKAEIVSASESRKELELKHEAEVTNYKIKLEMLEKEKNAVLDRMAESQEAELERLRTQLLFSHEEELSKLKEDLEIEHRINIEKLKDNLGIHYKQQIDGLQNEMSQKIETMQFEKDNLITKQNQLILEISKLKDLQQSLVNSKSEEMTLQINELQKEIEILRQEEKEKGTLEQEVQELQLKTELLEKQMKEKENDLQEKFAQLEAENSILKDEKKTLEDMLKIHTPVSQEERLIFLDSIKSKSKDSVWEKEIEILIEENEDLKQQCIQLNEEIEKQRNTFSFAEKNFEVNYQELQEEYACLLKVKDDLEDSKNKQELEYKSKLKALNEELHLQRINPTTVKMKSSVFDEDKTFVAETLEMGEVVEKDTTELMEKLEVTKREKLELSQRLSDLSEQLKQKHGEISFLNEEVKSLKQEKEQVSLRCRELEIIINHNRAENVQSCDTQVSSLLDGVVTMTSRGAEGSVSKVNKSFGEESKIMVEDKVSFENMTVGEESKQEQLILDHLPSVTKESSLRATQPSENDKLQKELNVLKSEQNDLRLQMEAQRICLSLVYSTHVDQVREYMENEKDKALCSLKEELIFAQEEKIKELQKIHQLELQTMKTQETGDEGKPLHLLIGKLQKAVSEECSYFLQTLCSVLGEYYTPALKCEVNAEDKENSGDYISENEDPELQDYRYEVQDFQENMHTLLNKVTEEYNKLLVLQTRLSKIWGQQTDGMKLEFGEENLPKEETEFLSIHSQMTNLEDIDVNHKSKLSSLQDLEKTKLEEQVQELESLISSLQQQLKETEQNYEAEIHCLQKRLQAVSESTVPPSLPVDSVVITESDAQRTMYPGSCVKKNIDGTIEFSGEFGVKEETNIVKLLEKQYQEQLEEEVAKVIVSMSIAFAQQTELSRISGGKENTASSKQAHAVCQQEQHYFNEMKLSQDQIGFQTFETVDVKFKEEFKPLSKELGEHGKEILLSNSDPHDIPESKDCVLTISEEMFSKDKTFIVRQSIHDEISVSSMDASRQLMLNEEQLEDMRQELVRQYQEHQQATELLRQAHMRQMERQREDQEQLQEEIKRLNRQLAQRSSIDNENLVSERERVLLEELEALKQLSLAGREKLCCELRNSSTQTQNGNENQGEVEEQTFKEKELDRKPEDVPPEILSNERYALQKANNRLLKILLEVVKTTAAVEETIGRHVLGILDRSSKSQSSASLIWRSEAEASVKSCVHEEHTRVTDESIPSYSGSDMPRNDINMWSKVTEEGTELSQRLVRSGFAGTEIDPENEELMLNISSRLQAAVEKLLEAISETSSQLEHAKVTQTELMRESFRQKQEATESLKCQEELRERLHEESRAREQLAVELSKAEGVIDGYADEKTLFERQIQEKTDIIDRLEQELLCASNRLQELEAEQQQIQEERELLSRQKEAMKAEAGPVEQQLLQETEKLMKEKLEVQCQAEKVRDDLQKQVKALEIDVEEQVSRFIELEQEKNTELMDLRQQNQALEKQLEKMRKFLDEQAIDREHERDVFQQEIQKLEQQLKVVPRFQPISEHQTREVEQLANHLKEKTDKCSELLLSKEQLQRDIQERNEEIEKLEFRVRELEQALLVSADTFQKVEDRKHFGAVEAKPELSLEVQLQAERDAIDRKEKEITNLEEQLEQFREELENKNEEVQQLHMQLEIQKKESTTRLQELEQENKLFKDDMEKLGLAIKESDAMSTQDQHVLFGKFAQIIQEKEVEIDQLNEQVTKLQQQLKITTDNKVIEEKNELIRDLETQIECLMSDQECVKRNREEEIEQLNEVIEKLQQELANIGQKTSMNAHSLSEEADSLKHQLDVVIAEKLALEQQVETANEEMTFMKNVLKETNFKMNQLTQELFSLKRERESVEKIQSIPENSVNVAIDHLSKDKPELEVVLTEDALKSLENQTYFKSFEENGKGSIINLETRLLQLESTVSAKDLELTQCYKQIKDMQEQGQFETEMLQKKIVNLQKIVEEKVAAALVSQIQLEAVQEYAKFCQDNQTISSEPERTNIQNLNQLREDELGSDISALTLRISELESQVVEMHTSLILEKEQVEIAEKNVLEKEKKLLELQKLLEGNEKKQREKEKKRSPQDVEVLKTTTELFHSNEESGFFNELEALRAESVATKAELASYKEKAEKLQEELLVKETNMTSLQKDLSQVRDHLAEAKEKLSILEKEDETEVQESKKACMFEPLPIKLSKSIASQTDGTLKISSSNQTPQILVKNAGIQINLQSECSSEEVTEIISQFTEKIEKMQELHAAEILDMESRHISETETLKREHYVAVQLLKEECGTLKAVIQCLRSKEGSSIPELAHSDAYQTREICSSDSGSDWGQGIYLTHSQGFDIASEGRGEESESATDSFPKKIKGLLRAVHNEGMQVLSLTESPYSDGEDHSIQQVSESWLEERKAYINTISSLKDLITKMQLQREAEVYDSSQSHESFSDWRGELLLALQQVFLEERSVLLAAFRTELTALGTTDAVGLLNCLEQRIQEQGVEYQAAMECLQKADRRSLLSEIQALHAQMNGRKITLKREQESEKPSQELLEYNIQQKQSQMLEMQVELSSMKDRATELQEQLSSEKMVVAELKSELAQTKLELETTLKAQHKHLKELEAFRLEVKDKTDEVHLLNDTLASEQKKSRELQWALEKEKAKLGRSEERDKEELEDLKFSLESQKQRNLQLNLLLEQQKQLLNESQQKIESQRMLYDAQLSEEQGRNLELQVLLESEKVRIREMSSTLDRERELHAQLQSSDGTGQSRPPLPSEDLLKELQKQLEEKHSRIVELLNETEKYKLDSLQTRQQMEKDRQVHRKTLQTEQEANTEGQKKMHELQSKVEDLQRQLEEKRQQVYKLDLEGQRLQGIMQEFQKQELEREEKRESRRILYQNLNEPTTWSLTSDRTRNWVLQQKIEGETKESNYAKLIEMNGGGTGCNHELEMIRQKLQCVASKLQVLPQKASERLQFETADDEDFIWVQENIDEIILQLQKLTGQQGEEPSLVSPSTSCGSLTERLLRQNAELTGHISQLTEEKNDLRNMVMKLEEQIRWYRQTGAGRDNSSRFSLNGGANIEAIIASEKEVWNREKLTLQKSLKRAEAEVYKLKAELRNDSLLQTLSPDSEHVTLKRIYGKYLRAESFRKALIYQKKYLLLLLGGFQECEDATLALLARMGGQPAFTDLEVITNRPKGFTRFRSAVRVSIAISRMKFLVRRWHRVTGSVSININRDGFGLNQGAEKTDSFYHSSGGLELYGEPRHTTYRSRSDLDYIRSPLPFQNR

SEQ ID NO: 809805 - protein, 2294 aa, Homo sapiens
EDGGGGGGDGASRAAEDDPPVSAETASTSGGGAPDRIGSLGRGACRPTSVQIDLSFLSPTTPQPLFSPAFLAEAMEDEERQKKLEAGKAKLAQFRQRKAQSDGQSPSKKQKKKRKTSSSKHDVSAHHDLNIDQSQCNEMYINSSQRVESTVIPESTIMRTLHSGEITSHEQGFSVELESEISTTADDCSSEVNGCSFVMRTGKPTNLLREEEFGVDDSYSEQGAQDSPTHLEMMESELAGKQHEIEELNRELEEMRVTYGTEGLQQLQEFEAAIKQRDGIITQLTANLQQARREKDETMREFLELTEQSQKLQIQFQQLQASETLRNSTHSSTAADLLQAKQQILTHQQQLEEQDHLLEDYQKKKEDFTMQISFLQEKIKVYEMEQDKKVENSNKEEIQEKETIIEELNTKIIEEEKKTLELKDKLTTADKLLGELQEQIVQKNQEIKNMKLELTNSKQKERQSSEEIKQLMGTVEELQKRNHKDSQFETDIVQRMEQETQRKLEQLRAELDEMYGQQIVQMKQELIRQHMAQMEEIKTRHKGEMENALRSYSNITVNEDQIKLMNVAINELNIKLQDTNSQKEKLKEELGLILEEKCALQRQLEDLVEELSFSREQIQRARQTIAEQESKLNEAHKSLSTVEDLKAEIVSASESRKELELKHEAEVTNYKIKLEMLEKEKNAVLDRMAESQEAELERLRTQLLFSHEEELSKLKEDLEIEHRINIEKLKDNLGIHYKQQIDGLQNEMSQKIETMQFEKDNLITKQNQLILEISKLKDLQQSLVNSKSEEMTLQINELQKEIEILRQEEKEKGTLEQEVQELQLKTELLEKQMKEKENDLQEKFAQLEAENSILKDEKKTLEDMLKIHTPVSQEERLIFLDSIKSKSKDSVWEKEIEILIEENEDLKQQCIQLNEEIEKQRNTFSFAEKNFEVNYQELQEEYACLLKVKDDLEDSKNKQELEYKSKLKALNEELHLQRINPTTVKMKSSVFDEDKTFVAETLEMGEVVEKDTTELMEKLEVTKREKLELSQRLSDLSEQLKQKHGEISFLNEEVKSLKQEKEQVSLRCRELEIIINHNRAENVQSCDTQVSSLLDGVVTMTSRGAEGSVSKVNKSFGEESKIMVEDKVSFENMTVGEESKQEQLILDHLPSVTKESSLRATQPSENDKLQKELNVLKSEQNDLRLQMEAQRICLSLVYSTHVDQVREYMENEKDKALCSLKEELIFAQEEKIKELQKIHQLELQTMKTQETGDEGKPLHLLIGKLQKAVSEECSYFLQTLCSVLGEYYTPALKCEVNAEDKENSGDYISENEDPELQDYRYEVQDFQENMHTLLNKVTEEYNKLLVLQTRLSKIWGQQTDGMKLEFGEENLPKEETEFLSIHSQMTNLEDIDVNHKSKLSSLQDLEKTKLEEQVQELESLISSLQQQLKETEQNYEAEIHCLQKRLQAVSESTVPPSLPVDSVVITESDAQRTMYPGSCVKKNIDGTIEFSGEFGVKEETNIVKLLEKQYQEQLEEEVAKVIVSMSIAFAQQTELSRISGGKENTASSKQAHAVCQQEQHYFNEMKLSQDQIGFQTFETVDVKFKEEFKPLSKELGEHGKEILLSNSDPHDIPESKDCVLTISEEMFSKDKTFIVRQSIHDEISVSSMDASRQLMLNEEQLEDMRQELVRQYQEHQQATELLRQAHMRQMERQREDQEQLQEEIKRLNRQLAQRSSIDNENLVSERERVLLEELEALKQLSLAGREKLCCELRNSSTQTQNGNENQGEVEEQTFKEKELDRKPEDVPPEILSNERYALQKANNRLLKILLEVVKTTAAVEETIGRHVLGILDRSSKSQSSASLIWRSEAEASVKSCVHEEHTRVTDESIPSYSGSDMPRNDINMWSKVTEEGTELSQRLVRSGFAGTEIDPENEELMLNISSRLQAAVEKLLEAISETSSQLEHAKVTQTELMRESFRQKQEATESLKCQEELRERLHEESRAREQLAVELSKAEGVIDGYADEKTLFERQIQEKTDIIDRLEQELLCASNRLQELEAEQQQIQEERELLSRQKEAMKAEAGPVEQQLLQETEKLMKEKLEVQCQAEKVRDDLQKQVKALEIDVEEQVSRFIELEQEKNTELMDLRQQNQALEKQLEKMRKFLDEQAIDREHERDVFQQEIQKLEQQLKVVPRFQPISEHQTREVEQQQMIEKIDMTGREGRTKVQARIAQLSDIHAVKELNLQEYRQHPCAQDNGGCSHICLVKGDGTTRCSCPMHLVLLQDELSCGEPPTCSPQQLTCFTGEIDCILCLTKG

SEQ ID NO: 809806 - protein, 1760 aa, Homo sapiens
EDGGGGGGDGASRAAEDDPPVSAETASTSGGGAPDRIGSLGRGACRPTSVQIDLSFLSPTTPQPLFSPAFLAEAMEDEERQKKLEAGKAKLAQFRQRKAQSDGQSPSKKQKKKRKTSSSKHDVSAHHDLNIDQSQCNEMYINSSQRVESTVIPESTIMRTLHSGEITSHEQGFSVELESEISTTADDCSSEVNGCSFVMRTGKPTNLLREEEFGVDDSYSEQGAQDSPTHLEMMESELAGKQHEIEELNRELEEMRVTYGTEGLQQLQEFEAAIKQRDGIITQLTANLQQARREKDETMREFLELTEQSQKLQIQFQQLQASETLRNSTHSSTAADLLQAKQQILTHQQQLEEQDHLLEDYQKKKEDFTMQISFLQEKIKVYEMEQDKKVENSNKEEIQEKETIIEELNTKIIEEEKKTLELKDKLTTADKLLGELQEQIVQKNQEIKNMKLELTNSKQKERQSSEEIKQLMGTVEELQKRNHKDSQFETDIVQRMEQETQRKLEQLRAELDEMYGQQIVQMKQELIRQHMAQMEEIKTRHKGEMENALRSYSNITVNEDQIKLMNVAINELNIKLQDTNSQKEKLKEELGLILEEKCALQRQLEDLVEELSFSREQIQRARQTIAEQESKLNEAHKSLSTVEDLKAEIVSASESRKELELKHEAEVTNYKIKLEMLEKEKNAVLDRMAESQEAELERLRTQLLFSHEEELSKLKEDLEIEHRINIEKLKDNLGIHYKQQIDGLQNEMSQKIETMQFEKDNLITKQNQLILEISKLKDLQQSLVNSKSEEMTLQINELQKEIEILRQEEKEKGTLEQEVQELQLKTELLEKQMKEKENDLQEKFAQLEAENSILKDEKKTLEDMLKIHTPVSQEERLIFLDSIKSKSKDSVWEKEIEILIEENEDLKQQCIQLNEEIEKQRNTFSFAEKNFEVNYQELQEEYACLLKVKDDLEDSKNKQELEYKSKLKALNEELHLQRINPTTVKMKSSVFDEDKTFVAETLEMGEVVEKDTTELMEKLEVTKREKLELSQRLSDLSEQLKQKHGEISFLNEEVKSLKQEKEQVSLRCRELEIIINHNRAENVQSCDTQVSSLLDGVVTMTSRGAEGSVSKVNKSFGEESKIMVEDKVSFENMTVGEESKQEQLILDHLPSVTKESSLRATQPSENDKLQKELNVLKSEQNDLRLQMEAQRICLSLVYSTHVDQVREYMENEKDKALCSLKEELIFAQEEKIKELQKIHQLELQTMKTQETGDEGKPLHLLIGKLQKAVSEECSYFLQTLCSVLGEYYTPALKCEVNAEDKENSGDYISENEDPELQDYRYEVQDFQENMHTLLNKVTEEYNKLLVLQTRLSKIWGQQTDGMKLEFGEENLPKEETEFLSIHSQMTNLEDIDVNHKSKLSSLQDLEKTKLEEQVQELESLISSLQQQLKETEQNYEAEIHCLQKRLQAVSESTVPPSLPVDSVVITESDAQRTMYPGSCVKKNIDGTIEFSGEFGVKEETNIVKLLEKQYQEQLEEEVAKVIVSMSIAFAQQTELSRISGGKENTASSKQAHAVCQQEQHYFNEMKLSQDQIGFQTFETVDVKFKEEFKPLSKELGEHGKEILLSNSDPHDIPESKDCVLTISEEMFSKDKTFIVRQSIHDEISVSSMDASRQLMLNEEQLEDMRQELVRQYQEHQQATELLRQAHMRQMERQREDQEQLQEEIKRLNRQLAQNGNENQGEVEEQTFKEKELDRKPEDVPPEILSNERYTKCVLFQCKVN

SEQ ID NO: 809807 - protein, 385 aa, Homo sapiens
EDGGGGGGDGASRAAEDDPPVSAETASTSGGGAPDRIGSLGRGACRPTSVQIDLSFLSPTTPQPLFSPAFLAEAMEDEERQKKLEAGKAKLAQFRQRKAQSDGQSPSKKQKKKRKTSSSKHDVSAHHDLNIDQSQCNEMYINSSQRVESTVIPESTIMRTLHSGEITSHEQGFSVELESEISTTADDCSSEVNGCSFVMRTGKPTNLLREEEFGVDDSYSEQGAQDSPTHLEMMESELAGKQHEIEELNRELEEMRVTYGTEGLQQLQEFEAAIKQRDGIITQLTANLQQARREKDETMREFLELTEQSQKLQIQFQQLQASETLRNSTHSSTAADLLQAKQQILTHQQQLEEQDHLLEDYQKKKEDFTMQISFLQEKIKVYEMD

SEQ ID NO: 809808 - protein, 688 aa, Homo sapiens
MGSENSALKSYTLREPPFTLPSGLAVYPAVLQDGKFASVFVYKRENEDKVNKAAKHLKTLRHPCLLRFLSCTVEADGIHLVTERVQPLEVALETLSSAEVCAGIYDILLALIFLHDRGHLTHNNVCLSSVFVSEDGHWKLGGMETVCKVSQATPEFLRSIQSIRDPASIPPEEMSPEFTTLPECHGHARDAFSFGTLVESLLTILNEQVSADVLSSFQQTLHSTLLNPIPKCRPALCTLLSHDFFRNDFLEVVNFLKSLTLKSEEEKTEFFKFLLDRVSCLSEELIASRLVPLLLNQLVFAEPVAVKSFLPYLLGPKKDHAQGETPCLLSPALFQSRVIPVLLQLFEVHEEHVRMVLLSHIEAYVEHFTQEQLKKVILPQVLLGLRDTSDSIVAITLHSLAVLVSLLGPEVVVGGERTKIFKRTAPSFTKNTDLSLEGDPFSQPIKFPINGLSDVKNTSEDSENFPSSSKKSEEWPDWSEPEEPENQTVNIQIWPREPCDDVKSQCTTLDVEESSWDDCEPSSLDTKVNPGGGITATKPVTSGEQKPIPALLSLTEESMPWKSSLPQKISLVQRGDDADQIEPPKVSSQERPLKVPSELGLGEEFTIQVKKKPVKDPEMDWFADMIPEIKPSAAFLILPELRTEMVPKKDDVSPVMQFSSKFAAAEITEGEAEGWEEEGELNWEDNNW

SEQ ID NO: 809809 - protein, 291 aa, Homo sapiens
MHGYFQVIRPILLHFLNAILPISVVLTFNQYFMRIIIFPTGDPFSQPIKFPINGLSDVKNTSEDSENFPSSSKKSEEWPDWSEPEEPENQTVNIQIWPREPCDDVKSQCTTLDVEESSWDDCEPSSLDTKVNPGGGITATKPVTSGEQKPIPALLSLTEESMPWKSSLPQKISLVQRGDDADQIEPPKVSSQERPLKVPSELGLGEEFTIQVKKKPVKDPEMDWFADMIPEIKPSAAFLILPELRTEMVPKKDDVSPVMQFSSKFAAAEITEGEAEGWEEEGELNWEDNNW

SEQ ID NO: 809810 - protein, 88 aa, Homo sapiens
AAASVSLAVKRGRWRSMPRETPGSAGPSGTGSSFRFGHPAASTRGERGDGIGPCCAQPRFRYPSAPGAAKSADEPPARLRPTHCGRNS

SEQ ID NO: 809811 - protein, 86 aa, Homo sapiens
ASVSLAVKRGRWRSMPRETPGSAGPSGTGSSFRFGHPAASTRGERGDGIGPCCAQPRFRYPSAPGAAKSADEPPARLRPTHCGRNS

SEQ ID NO: 809812 - protein, 357 aa, Homo sapiens
MAPPPPLPLGTRKFLPDAGSPTALPPQIPLSPPRRGENLLLDPGGCRLGSPCLPERWPGSTVLPDASARSSDRGCTGRAPIWVRGRCGAMNGTANPLLDREEHCLRLGESFEKRPRASFHTIRYDFKPASIDTSCEGELQVGKGDEVTITLPHIPGSTPPMTVFKGNKRPYQKDCVLIINHDTGEYVLEKLSSSIQVKKTRAEGSSKIQARMEQQPTRPPQTSQPPPPPPPMPFRAPTKPPVGPKTSPLKDNPSPEPQLDDIKRELRAEVDIIEQMSSSSGSSSSDSESSSGSDDDSSSSGGEDNGPASPPQPSHQQPYNSRPAVANGTSRPQGSNQLMNTLRNDLQLSESGSDSDD

SEQ ID NO: 809813 - protein, 68 aa, Homo sapiens
FLFSAHFQYTLKSVCVSSGGVKLNEDTPITVAYLTVSAYISRPNGRQAISRVIPRMLGMAGLTSFKYN

SEQ ID NO: 809814 - protein, 377 aa, Homo sapiens
MAPPPPLPLGTRKFLPDAGSPTALPPQIPLSPPRRGENLLLDPGGCRLGSPCLPERWPGSTVLPDASARSSDRGCTGRAPIWVRGRCGAMNGTANPLLDREEHCLRLGESFEKRPRASFHTIRYDFKPASIDTSCEGELQVGKGDEVTITLPHIPGSTPPMTVFKGNKRPYQKDCVLIINHDTGEYVLEKLSSSIQVKKTRAEGSSKIQARMEQQPTRPPQTSQPPPPPPPMPFRAPTKPPVGPKTSPLKDNPSPEPQLDDIKRELRAEVDIIEQMSSSSGSSSSDSESSSGSDDDSSSSGGEDNGPASPPQPSHQQPYNSRPAVANGTSRPQGSNQLMNTLNVTSAMIVRLPQPRGTKPQCDGGSSMKTTSPQASQ

SEQ ID NO: 809815 - protein, 167 aa, Homo sapiens
MKSQLHCHISLAEGSSKIQARMEQQPTRPPQTSQPPPPPPPMPFRAPTKPPVGPKTSPLKDNPSPEPQLDDIKRELRAEVDIIEQMSSSSGSSSSDSESSSGSDDDSSSSGGEDNGPASPPQPSHQQPYNSRPAVANGTSRPQGSNQLMNTLRNDLQLSESGSDSDD

SEQ ID NO: 809816 - protein, 163 aa, Homo sapiens [sequence omitted]

SEQ ID NO: 809817 - protein, 151 aa, Homo sapiens
AAAIGTDFWYIIDTERLERTGPGAQDLLGSINRSQPEPLSSHSGLWRTCRVQSPCTPLMNPFRLENVTVSESSRQLLKIASCCVAQAGLKFLASSDPLASASQSAGITGCTRSTAASASGEPSGNLQSWRKVKARTLILIAIQNKYWLYQN

SEQ ID NO: 809818 - protein, 120 aa, Homo sapiens
AAAIGTDFWYIIDTERLERTGPGAQDLLGSINRSQPEPLSSHSGLWRTCRVQSPCTPLMNPFRLENVTVSESSRQLLSCTRSTAASASGEPSGNLQSWRKVKARTLILIAIQNKYWLYQN

SEQ ID NO: 809819 - protein, 124 aa, Homo sapiens
MRQAGRAALLAALLLLVQLCPGSSQRSPEAAGVQDPSLRWSPGARNQGGGARALLLLLAERFPRRAGPGRLGLGTAGERPRRDNPSLSIDLTFHLLRTLLELARTQSQRERAEQNRIIFDSVGK

SEQ ID NO: 809820 - protein, 124 aa, Homo sapiens; identical to SEQ ID NO: 809819

SEQ ID NO: 809821 - protein, 227 aa, Homo sapiens
AKNGGGSSSRSSPVSGPPAVCETLAVASASPMAAAAEGPQQSAEGSASGGGMQAAAPPSSQPHPQQLQEQEEMQEEMEKLREENETLKNEIDELRTEMDEMRDTFFEEDACQLQEMRHELERANKNCRILQYRLRKAERKRLRYAQTGEIDGELLRSLEQDLKVAKDVSVRLHHELENVEEKRTTTEDENEKLRQQLIEVEIAKQALQNELEKMKELSLKRKGSKDL

SEQ ID NO: 809822 - protein, 164 aa, Homo sapiens
MGCVRCVSEGLEASLILTRGLSPPQNEIDELRTEMDEMRDTFFEEDACQLQEMRHELERANKNCRILQYRLRKAERKRLRYAQTGEIDGELLRSLEQDLKVAKDVSVRLHHELENVEEKRTTTEDENEKLRQQLIEVEIAKQALQNELEKMKELSLKRKGSKDL

SEQ ID NO: 809823 - protein, 502 aa, Homo sapiens
AGFPSAASRRVPGDCRRLHRPVACRYCEIYREDAGTPKSWEMGLLAFRDVALEFSPEEWECLDPAQRSLYRDVMLENYRNLISLGEDSFNMQFLFHSLAMSKPELIICLEARKEPWNVNTEKTAKHSALSSYLTEDILPEQGLQVSFQKVMLRRYERCCLEKLRLRNDWEIVGEWKGQKASYNGLDLCSATTHSKNFQCNKCVKGFSKFANLNKCKISHTGEKPFKCKECGNVSCMSLIMTQQQRIHIGENPYQCKKCGKAFNECSCFTDCKRIHVGEKHCKCEECNNIFKSCSSLAVVEKNHTEKKTYRCEECGKAFNLCSVLTKHKKIHTGEKPYKCEECGKSFKLFPYLTQHKRIHSREKPYKCEECGKVFKLLSYLTQHRRIHTGEKTFRCEECGKAFNQSSHLTEHRRIHTGEKPYKCEECGKAFTWFSYLIQHKRIHTGQKPYKCEECGKAFTWFSYLTQHKRIHTGEKPYKCDECGKAFNWFSYLTNHKRIHTGE

SEQ ID NO: 809824 - protein, 180 aa, Homo sapiens
VRLRCSFPLSLGGPSGPAAASVALGPAGPGRSLGRTPDTGDWEMGLLAFRDVALEFSPEEWECLDPAQRSLYRDVMLENYRNLISLGLAMSKPELIICLEARKEPWNVNTEKTAKHSALSSYLTEDILPEQGLQVSFQKVMLRRYERCCLEKLRLRNDWEIVVETGFHRVSQDGLDLLTS

SEQ ID NO: 809825 - protein, 174 aa, Homo sapiens
AGFPSAASRRVPGDCRRLHRPVACRYCEIYREDAGTPKSWEMGLLAFRDVALEFSPEEWECLDPAQRSLYRDVMLENYRNLISLGEDSFNMQFLFHSLAMSKPELIICLEARKEPWNVNTEKTAKHSALSSYLTEDILPEQGLQVSFQKVMLRRYERCCLEKLRLRNDWEIVAM

SEQ ID NO: 809826 - protein, 162 aa, Homo sapiens
AGFPSAASRRVPGDCRRLHRPVACRYCEIYREDAGTPKSWEMGLLAFRDVALEFSPEEWECLDPAQRSLYRDVMLENYRNLISLGLAMSKPELIICLEARKEPWNVNTEKTAKHSALSSYLTEDILPEQGLQVSFQKVMLRRYERCCLEKLRLRNDWEIVAM

SEQ ID NO: 809827 - protein, 129 aa, Homo sapiens
AGFPSAASRRVPGDCRRLHRPVACRYCEIYREDAGTPKSWEMGLLAFRDVALEFSPEEWECLDPAQRSLYRDVMLENYRNLISLGEDSFNMQFLFHSLAMSKPELIICLEARKEPWNVNTEKTAKHSAM

SEQ ID NO: 809828 - protein, 162 aa, Homo sapiens
VRLRCSFPLSLGGPSGPAAASVALGPAGPGRSLGRTPDTGDWEMGLLAFRDVALEFSPEEWECLDPAQRSLYRDVMLENYRNLISLGEDSFNMQFLFHSLAMSKPELIICLEARKEPWNVNTEKTAKHSESQLCHPGWNAMVRSRLTANCVPGSGHSPASAS

SEQ ID NO: 809829 - protein, 164 aa, Homo sapiens
VRLRCSFPLSLGGPSGPAAASVALGPAGPGRSLGRTPDTGDWEMGLLAFRDVALEFSPEEWECLDPAQRSLYRDVMLENYRNLISLGLAMSKPELIICLEARKEPWNVNTEKTAKHSALSSYLTEDILPEQGLQVSFQKVMLRRYERCCLEKLRLRNDWEIVAM

SEQ ID NO: 809830 - protein, 109 aa, Homo sapiens
PYKCEECGKAFTWFSYLTQHKRIHTGEKPYKCDECGKAFNWFSYLTNHKRIHTGEKPYKCEECGKAFGQSSHLSKHKTIHTREKPYKCEECGKAFNHSAQLAVHEKTHT

SEQ ID NO: 809831 - protein, 114 aa, Homo sapiens
STLPFPDKVPHSLYNSGQNATSPVKPLLISTEELWGHVLPSPPQTTPACSTVTRWLSACLSASIWLSVLSSHQEQESNLTSLSIPSSQESVWTMMIGVCICWIKQKSNSFIPVI

SEQ ID NO: 809832 - protein, 50 aa, Homo sapiens
MSQRPPSMYWCVGPEESAVCPERAMETLNGAGDTGGKPSTRGGDPAARSR

SEQ ID NO: 809833 - protein, 104 aa, Homo sapiens
AAAEGTPRDGSWESWRRPCSARSSRRPPRPPASGLRKCVWARPRRGGQTAVGRPGPGPASVSARPRVPERPHPAPPPPQSKKAFCSAMATSPRLNAPHSQRQWQ

SEQ ID NO: 809834 - protein, 189 aa, Homo sapiens
MALLSRPALTLLLLLMAAVVRCQEQAQTTDWRATLKTIRNGVHKIDTYLNAALDLLGGEDGLCQYKCSDGSKPFPRYGYKPSPPNGCGSPLFGVHLNIGIPSLTKCCNQHDRCYETCGKSKNDCDEEFQYCLSKICRDVQKTLGLTQHVQACETTVELLFDSVIHLGCKPYLDSQRAACRCHYEEKTDL

SEQ ID NO: 809835 - protein, 189 aa, Homo sapiens; identical to SEQ ID NO: 809834

SEQ ID NO: 809836 - protein, 189 aa, Homo sapiens; identical to SEQ ID NO: 809834

SEQ ID NO: 809837 - protein, 189 aa, Homo sapiens; identical to SEQ ID NO: 809834

SEQ ID NO: 809838 - protein, 222 aa, Homo sapiens
QLGGPSRPRQRWGISGSSFLTSSLFSTSLNSRLIRCTAMLAMSPPAADSYPPPPPPLQTTATAATSSSTASSLGDSDLSTRTLPLPPRPPRSPQCGITSAPGHQNGAGSAHAHDVDPAGRRSRSCWSPHTPEPRARVSAGAAAAWLRPAGVWGREGAASKLAGPSRPPRPFPAPPLLFKPGCCGLGFQRWPLTEGSGATERVSDAALGWNAALTQLDPEPGG

SEQ ID NO: 809839 - protein, 1066 aa, Homo sapiens
MPVFHTRTIESILEPVAQQISHLVIMHEEGEVDGKAIPDLTAPVAAVQAAVSNLVRVGKETVQTTEDQILKRDMPPAFIKVENACTKLVQAAQMLQSDPYSVPARDYLIDGSRGILSGTSDLLLTFDEAEVRKIIRVCKGILEYLTVAEVVETMEDLVTYTKNLGPGMTKMAKMIDERQQELTHQEHRVMLVNSMNTVKELLPVLISAMKIFVTTKNSKNQGIEEALKNRNFTVEKMSAEINEIIRVLQLTSWDEDAWASKDTEAMKRALASIDSKLNQAKGWLRDPSASPGDAGEQAIRQILDEAGKVGELCAGKERREILGTCKMLGQMTDQVADLRARGQGSSPVAMQKAQQVSQGLDVLTAKVENAARKLEAMTNSKQSIAKKIDAAQNWLADPNGGPEGEEQIRGALAEARKIAELCDDPKERDDILRSLGEISALTSKLADLRRQGKGDSPEARALAKQVATALQNLQTKTNRAVANSRPAKAAVHLEGKIEQAQRWIDNPTVDDRGVGQAAIRGLVAEGHRLANVMMGPYRQDLLAKCDRVDQLTAQLADLAARGEGESPQARALASQLQDSLKDLKARMQEAMTQEVSDVFSDTTTPIKLLAVAATAPPDAPNREEVFDERAANFENHSGKLGATAEKAAAVGTANKSTVEGIQASVKTARELTPQVVSAARILLRNPGNQAAYEHFETMKNQWIDNVEKMTGLVDEAIDTKSLLDASEEAIKKDLDKCKVAMANIQPQMLVAGATSIARRANRILLVAKREVENSEDPKFREAVKAASDELSKTISPMVMDAKAVAGNISDPGLQKSFLDSGYRILGAVAKVREAFQPQEPDFPPPPPDLEQLRLTDELAPPKPPLPEGEVPPPRPPPPEEKDEEFPEQKAGEVINQPMMMAARQLHDEARKWSSKGNDIIAAAKRMALLMAEMSRLVRGGSGTKRALIQCAKDIAKASDEVTRLAKEVAKQCTDKRIRTNLLQVCERIPTISTQLKILSTVKATMLGRTNISDEESEQATEMLVHNAQNLMQSVKETVREAEAASIKIRTDAGFTLRWVRKTPWYQ

SEQ ID NO: 809840 - protein, 1134 aa, Homo sapiens
MPVFHTRTIESILEPVAQQISHLVIMHEEGEVDGKAIPDLTAPVAAVQAAVSNLVRVGKETVQTTEDQILKRDMPPAFIKVENACTKLVQAAQMLQSDPYSVPARDYLIDGSRGILSGTSDLLLTFDEAEVRKIIRVCKGILEYLTVAEVVETMEDLVTYTKNLGPGMTKMAKMIDERQQELTHQEHRVMLVNSMNTVKELLPVLISAMKIFVTTKNSKNQGIEEALKNRNFTVEKMSAEINEIIRVLQLTSWDEDAWASKDTEAMKRALASIDSKLNQAKGWLRDPSASPGDAGEQAIRQILDEAGKVGELCAGKERREILGTCKMLGQMTDQVADLRARGQGSSPVAMQKAQQVSQGLDVLTAKVENAARKLEAMTNSKQSIAKKIDAAQNWLADPNGGPEGEEQIRGALAEARKIAELCDDPKERDDILRSLGEISALTSKLADLRRQGKGDSPEARALAKQVATALQNLQTKTNRAVANSRPAKAAVHLEGKIEQAQRWIDNPTVDDRGVGQAAIRGLVAEGHRLANVMMGPYRQDLLAKCDRVDQLTAQLADLAARGEGESPQARALASQLQDSLKDLKARMQEAMTQEVSDVFSDTTTPIKLLAVAATAPPDAPNREEVFDERAANFENHSGKLGATAEKAAAVGTANKSTVEGIQASVKTARELTPQVVSAARILLRNPGNQAAYEHFETMKNQWIDNVEKMTGLVDEAIDTKSLLDASEEAIKKDLDKCKVAMANIQPQMLVAGATSIARRANRILLVAKREVENSEDPKFREAVKAASDELSKTISPMVMDAKAVAGNISDPGLQKSFLDSGYRILGAVAKVREAFQPQEPDFPPPPPDLEQLRLTDELAPPKPPLPEGEVPPPRPPPPEEKDEEFPEQKAGEVINQPMMMAARQLHDEARKWSSKPGIPAAEVGIGVVAEADAADAAGFPVPPDMEDDYEPELLLMPSNQPVNQPILAAAQSLHREATKWSSKGNDIIAAAKRMALLMAEMSRLVRGGSGTKRALIQCAKDIAKASDEVTRLAKEVAKQCTDKRIRTNLLQVCERIPTISTQLKILSTVKATMLGRTNISDEESEQATEMLVHNAQNLMQSVKETVREAEAASIKIRTDAGFTLRWVRKTPWYQ

SEQ ID NO: 809841 - protein, 79 aa, Homo sapiens
HASRTAWVTQRRTCRCLFICNSKRSFLNSVLRKRSACPLRVFNGKAALSEGHFLPKGEWYLQTRILVLLKMNQWEILLL

SEQ ID NO: 809842 - protein, 103 aa, Homo sapiens
MPVFHTRTIESILEPVAQQISHLVIMHEEGEVDGKAIPDLTAPVAAVQAAVSNLVRVGKETVQTTEDQILKRDMPPAFIKHSGLSEDGPRTHTPGGLGCSYLT

SEQ ID NO: 809843 - protein, 123 aa, Homo sapiens
TVLSPLSSSQPFPTYSFMILKCPLSLIPDFPPPPPDLEQLRLTDELAPPKPPLPEGEVPPPRPPPPEEKDEEFPEQKAGEVINQPMMMAARQLHDEARKWSSKVSSEAFLVEKGCLLGKDEGP

SEQ ID NO: 809844 - protein, 1037 aa, Homo sapiens
ATIFAMLCFELVMASSLRAAFSTFAVSNPDPEIPAELSAWPPVRILVLWHGGQPLDQSSALHFASSQNLPYSVPARDYLIDGSRGILSGTSDLLLTFDEAEVRKIIRVCKGILEYLTVAEVVETMEDLVTYTKNLGPGMTKMAKMIDERQQELTHQEHRVMLVNSMNTVKELLPVLISAMKIFVTTKNSKNQGIEEALKNRNFTVEKMSAEINEIIRVLQLTSWDEDAWASKDTEAMKRALASIDSKLNQAKGWLRDPSASPGDAGEQAIRQILDEAGKVGELCAGKERREILGTCKMLGQMTDQVADLRARGQGSSPVAMQKAQQVSQGLDVLTAKVENAARKLEAMTNSKQSIAKKIDAAQNWLADPNGGPEGEEQIRGALAEARKIAELCDDPKERDDILRSLGEISALTSKLADLRRQGKGDSPEARALAKQVATALQNLQTKTNRAVANSRPAKAAVHLEGKIEQAQRWIDNPTVDDRGVGQAAIRGLVAEGHRLANVMMGPYRQDLLAKCDRVDQLTAQLADLAARGEGESPQARALASQLQDSLKDLKARMQEAMTQEVSDVFSDTTTPIKLLAVAATAPPDAPNREEVFDERAANFENHSGKLGATAEKAAAVGTANKSTVEGIQASVKTARELTPQVVSAARILLRNPGNQAAYEHFETMKNQWIDNVEKMTGLVDEAIDTKSLLDASEEAIKKDLDKCKVAMANIQPQMLVAGATSIARRANRILLVAKREVENSEDPKFREAVKAASDELSKTISPMVMDAKAVAGNISDPGLQKSFLDSGYRILGAVAKVREAFQPQEPDFPPPPPDLEQLRLTDELAPPKPPLPEGEVPPPRPPPPEEKDEEFPEQKAGEVINQPMMMAARQLHDEARKWSSKGNDIIAAAKRMALLMAEMSRLVRGGSGTKRALIQCAKDIAKASDEVTRLAKEVAKQCTDKRIRTNLLQVCERIPTISTQLKILSTVKATMLGRTNISDEESEQATEMLVHNAQNLMQSVKETVREAEAASIKIRTDAGFTLRWVRKTPWYQ

SEQ ID NO: 809845 - protein, 717 aa, Homo sapiens
MQKAQQVSQGLDVLTAKVENAARKLEAMTNSKQSIAKKIDAAQNWLADPNGGPEGEEQIRGALAEARKIAELCDDPKERDDILRSLGEISALTSKLADLRRQGKGDSPEARALAKQVATALQNLQTKTNRAVANSRPAKAAVHLEGKIEQAQRWIDNPTVDDRGVGQAAIRGLVAEGHRLANVMMGPYRQDLLAKCDRVDQLTAQLADLAARGEGESPQARALASQLQDSLKDLKARMQEAMTQEVSDVFSDTTTPIKLLAVAATAPPDAPNREEVFDERAANFENHSGKLGATAEKAAAVGTANKSTVEGIQASVKTARELTPQVVSAARILLRNPGNQAAYEHFETMKNQWIDNVEKMTGLVDEAIDTKSLLDASEEAIKKDLDKCKVAMANIQPQMLVAGATSIARRANRILLVAKREVENSEDPKFREAVKAASDELSKTISPMVMDAKAVAGNISDPGLQKSFLDSGYRILGAVAKVREAFQPQEPDFPPPPPDLEQLRLTDELAPPKPPLPEGEVPPPRPPPPEEKDEEFPEQKAGEVINQPMMMAARQLHDEARKWSSKGNDIIAAAKRMALLMAEMSRLVRGGSGTKRALIQCAKDIAKASDEVTRLAKEVAKQCTDKRIRTNLLQVCERIPTISTQLKILSTVKATMLGRTNISDEESEQATEMLVHNAQNLMQSVKETVREAEAASIKIRTDAGFTLRWVRKTPWYQ

SEQ ID NO: 809846 - protein, 419 aa, Homo sapiens
IQASVEGRPENSHPRWSRAASVFFEPFKGGKNPPPFGAKIQQAAYEHFETMKNQWIDNVEKMTGLVDEAIDTKSLLDASEEAIKKDLDKCKVAMANIQPQMLVAGATSIARRANRILLVAKREVENSEDPKFREAVKAASDELSKTISPMVMDAKAVAGNISDPGLQKSFLDSGYRILGAVAKVREAFQPQEPDFPPPPPDLEQLRLTDELAPPKPPLPEGEVPPPRPPPPEEKDEEFPEQKAGEVINQPMMMAARQLHDEARKWSSKGNDIIAAAKRMALLMAEMSRLVRGGSGTKRALIQCAKDIAKASDEVTRLAKEVAKQCTDKRIRTNLLQVCERIPTISTQLKILSTVKATMLGRTNISDEESEQATEMLVHNAQNLMQSVKETVREAEAASIKIRTDAGFTLRWVRKTPWYQ

SEQ ID NO: 809847 - protein, 401 aa, Homo sapiens
MEEEFELKKRILDVILSHEKFEWITVFWSFCSSKLKLNSISVFLTGLVDEAIDTKSLLDASEEAIKKDLDKCKVAMANIQPQMLVAGATSIARRANRILLVAKREVENSEDPKFREAVKAASDELSKTISPMVMDAKAVAGNISDPGLQKSFLDSGYRILGAVAKVREAFQPQEPDFPPPPPDLEQLRLTDELAPPKPPLPEGEVPPPRPPPPEEKDEEFPEQKAGEVINQPMMMAARQLHDEARKWSSKGNDIIAAAKRMALLMAEMSRLVRGGSGTKRALIQCAKDIAKASDEVTRLAKEVAKQCTDKRIRTNLLQVCERIPTISTQLKILSTVKATMLGRTNISDEESEQATEMLVHNAQNLMQSVKETVREAEAASIKIRTDAGFTLRWVRKTPWYQ

SEQ ID NO: 809848 - protein, 1066 aa, Homo sapiens; identical to SEQ ID NO: 809839

SEQ ID NO: 809849 - protein, 1066 aa, Homo sapiens; identical to SEQ ID NO: 809839

SEQ ID NO: 809850 - protein, 141 aa, Homo sapiens
MALLMAEMSRLVRGGSGTKRALIQCAKDIAKASDEVTRLAKEVAKQCTDKRIRTNLLQVCERIPTISTQLKILSTVKATMLGRTNISDEESEQATEMLVHNAQNLMQSVKETVREAEAASIKIRTDAGFTLRWVRKTPWYQ

SEQ ID NO: 809851 - protein, 97 aa, Homo sapiens
LRFPWLADQGTVLQVCERIPTISTQLKILSTVKATMLGRTNISDEESEQATEMLVHNAQNLMQSVKETVREAEAASIKIRTDAGFTLRWVRKTPWYQ

SEQ ID NO: 809852 - protein, 918 aa, Homo sapiens
MPVFHTRTIESILEPVAQQISHLVIMHEEGEVDGKAIPDLTAPVAAVQAAVSNLVRVGKETVQTTEDQILKRDMPPAFIKVENACTKLVQAAQMLQSDPYSVPARDYLIDGSRGILSGTSDLLLTFDEAEVRKIIRVCKGILEYLTVAEVVETMEDLVTYTKNLGPGMTKMAKMIDERQQELTHQEHRVMLVNSMNTVKELLPVLISAMKIFVTTKNSKNQGIEEALKNRNFTVEKMSAEINEIIRVLQLTSWDEDAWASKDTEAMKRALASIDSKLNQAKGWLRDPSASPGDAGEQAIRQILDEAGKVGELCAGKERREILGTCKMLGQMTDQVADLRARGQGSSPVAMQKAQQVSQGLDVLTAKVENAARKLEAMTNSKQSIAKKIDAAQNWLADPNGGPEGEEQIRGALAEARKIAELCDDPKERDDILRSLGEISALTSKLADLRRQGKGDSPEARALAKQVATALQNLQTKTNRAVANSRPAKAAVHLEGKIEQAQRWIDNPTVDDRGVGQAAIRGLVAEGHRLANVMMGPYRQDLLAKCDRVDQLTAQLADLAARGEGESPQARALASQLQDSLKDLKARMQEAMTQEVSDVFSDTTTPIKLLAVAATAPPDAPNREEVFDERAANFENHSGKLGATAEKAAAVGTANKSTVEGIQASVKTARELTPQVVSAARILLRNPGNQAAYEHFETMKNQWIDNVEKMTGLVDEAIDTKSLLDASEEAIKKDLDKCKVAMANIQPQMLVAGATSIARRANRILLVAKREVENSEDPKFREAVKAASDELSKTISPMVMDAKAVAGNISDPGLQKSFLDSGYRILGAVAKVREAFQPQEPDFPPPPPDLEQLRLTDELAPPKPPLPEGEVPPPRPPPPEEKDEEFPEQKAGEVINQPMMLLPTIPSFPGLCYLGPFQK

SEQ ID NO: 809853 - protein, 1066 aa, Homo sapiens; identical to SEQ ID NO: 809839

SEQ ID NO: 809854 - protein, 1066 aa, Homo sapiens; identical to SEQ ID NO: 809839

SEQ ID NO: 809855 - protein, 1066 aa, Homo sapiens; identical to SEQ ID NO: 809839

SEQ ID NO: 809856 - protein, 1019 aa, Homo sapiens
MPVFHTRTIESILEPVAQQISHLVIMHEEGEVDGKAIPDLTAPVAAVQAAVSNLVRVGKETVQTTEDQILKRDMPPAFIKVENACTKLVQAAQMLQSDPYSVPARDYLIDGSRGILSGTSDLLLTFDEAEVRKIIRVCKGILEYLTVAEVVETMEDLVTYTKNLGPGMTKMAKMIDERQQELTHQEHRVMLVNSMNTVKELLPVLISAMKIFVTTKNSKNQGIEEALKNRNFTVEKMSAEINEIIRVLQLTSWDEDAWASKDTEAMKRALASIDSKLNQAKGWLRDPSASPGDAGEQAIRQILDEAGKVGELCAGKERREILGTCKMLGQMTDQVADLRARGQGSSPVAMQKAQQVSQGLDVLTAKVENAARKLEAMTNSKQSIAKKIDAAQNWLADPNGGPEGEEQIRGALAEARKIAELCDDPKERDDILRSLGEISALTSKLADLRRQGKGDSPEARALAKQVATALQNLQTKTNRAVANSRPAKAAVHLEGKIEQAQRWIDNPTVDDRGVGQAAIRGLVAEGHRLANVMMGPYRQDLLAKCDRVDQLTAQLADLAARGEGESPQARALASQLQDSLKDLKARMQEAMTQEVSDVFSDTTTPIKLLAVAATAPPDAPNREEVFDERAANFENHSGKLGATAEKAAAVGTANKSTVEGIQASVKTARELTPQVVSAARILLRNPGNQAAYEHFETMKNQWIDNVEKMTGLVDEAIDTKSLLDASEEAIKKDLDKCKVAMANIQPQMLVAGATSIARRANRILLVAKREVENSEDPKFREAVKAASDELSKTISPMVMDAKAVAGNISDPGLQKSFLDSGYRILGAVAKVREAFQPQEPDFPPPPPDLEQLRLTDELAPPKPPLPEGEVPPPRPPPPEEKDEEFPEQKAGEVINQPMMMAARQLHDEARKWSSKGNDIIAAAKRMALLMAEMSRLVRGGSGTKRALIQCAKDIAKASDEVTRLAKEVAKQCTDKRIRTNLLQVLGERGCVCVCVCVCACVCVCVGGEGMRGRKAGEKN

SEQ ID NO: 809857 - protein, 935 aa, Homo sapiens
MPVFHTRTIESILEPVAQQISHLVIMHEEGEVDGKAIPDLTAPVAAVQAAVSNLVRVGKETVQTTEDQILKRDMPPAFIKVENACTKLVQAAQMLQSDPYSVPARDYLIDGSRGILSGTSDLLLTFDEAEVRKIIRVCKGILEYLTVAEVVETMEDLVTYTKNLGPGMTKMAKMIDERQQELTHQEHRVMLVNSMNTVKELLPVLISAMKIFVTTKNSKNQGIEEALKNRNFTVEKMSAEINEIIRVLQLTSWDEDAWASKDTEAMKRALASIDSKLNQAKGWLRDPSASPGDAGEQAIRQILDEAGKVGELCAGKERREILGTCKMLGQMTDQVADLRARGQGSSPVAMQKAQQVSQGLDVLTAKVENAARKLEAMTNSKQSIAKKIDAAQNWLADPNGGPEGEEQIRGALAEARKIAELCDDPKERDDILRSLGEISALTSKLADLRRQGKGDSPEARALAKQVATALQNLQTKTNRAVANSRPAKAAVHLEGKIEQAQRWIDNPTVDDRGVGQAAIRGLVAEGHRLANVMMGPYRQDLLAKCDRVDQLTAQLADLAARGEGESPQARALASQLQDSLKDLKARMQEAMTQEVSDVFSDTTTPIKLLAVAATAPPDAPNREEVFDERAANFENHSGKLGATAEKAAAVGTANKSTVEGIQASVKTARELTPQVVSAARILLRNPGNQAAYEHFETMKNQWIDNVEKMTGLVDEAIDTKSLLDASEEAIKKDLDKCKVAMANIQPQMLVAGATSIARRANRILLVAKREVENSEDPKFREAVKAASDELSKTISPMVMDAKAVAGNISDPGLQKSFLDSGYRILGAVAKVREAFQPQEPDFPPPPPDLEQLRLTDELAPPKPPLPEGEVPPPRPPPPEEKDEEFPEQKAGEVINQPMMMAARQLHDEARKWSSKVSSEAFLVEKGCLLGKDEGP

SEQ ID NO: 809858 - protein, 627 aa, Homo sapiens
MPVFHTRTIESILEPVAQQISHLVIMHEEGEVDGKAIPDLTAPVAAVQAAVSNLVRVGKETVQTTEDQILKRDMPPAFIKVENACTKLVQAAQMLQSDPYSVPARDYLIDGSRGILSGTSDLLLTFDEAEVRKIIRVCKGILEYLTVAEVVETMEDLVTYTKNLGPGMTKMAKMIDERQQELTHQEHRVMLVNSMNTVKELLPVLISAMKIFVTTKNSKNQGIEEALKNRNFTVEKMSAEINEIIRVLQLTSWDEDAWASKDTEAMKRALASIDSKLNQAKGWLRDPSASPGDAGEQAIRQILDEAGKVGELCAGKERREILGTCKMLGQMTDQVADLRARGQGSSPVAMQKAQQVSQGLDVLTAKVENAARKLEAMTNSKQSIAKKIDAAQNWLADPNGGPEGEEQIRGALAEARKIAELCDDPKERDDILRSLGEISALTSKLADLRRQGKGDSPEARALAKQVATALQNLQTKTNRAVANSRPAKAAVHLEGKIEQAQRWIDNPTVDDRGVGQAAIRGLVAEGHRLANVMMGPYRQDLLAKCDRVDQLTAQLADLAARGEGESPQARALASQLQDSLKDLKARMQEAMTQEVSDVFSDTTTPIKLLAVAATAPPDAPNREEVGI

SEQ ID NO: 809859 - protein, 521 aa, Homo sapiens
MPVFHTRTIESILEPVAQQISHLVIMHEEGEVDGKAIPDLTAPVAAVQAAVSNLVRVGKETVQTTEDQILKRDMPPAFIKVENACTKLVQAAQMLQSDPYSVPARDYLIDGSRGILSGTSDLLLTFDEAEVRKIIRVCKGILEYLTVAEVVETMEDLVTYTKNLGPGMTKMAKMIDERQQELTHQEHRVMLVNSMNTVKELLPVLISAMKIFVTTKNSKNQGIEEALKNRNFTVEKMSAEINEIIRVLQLTSWDEDAWASKDTEAMKRALASIDSKLNQAKGWLRDPSASPGDAGEQAIRQILDEAGKVGELCAGKERREILGTCKMLGQMTDQVADLRARGQGSSPVAMQKAQQVSQGLDVLTAKVENAARKLEAMTNSKQSIAKKIDAAQNWLADPNGGPEGEEQIRGALAEARKIAELCDDPKERDDILRSLGEISALTSKLADLRRQGKGDSPEARALAKQVATALQNLQTKTNRAVANSRPAKAAVHLEGKIEQAQRWIDNPTVDDRGVGKGSSAL

SEQ ID NO: 809860 - protein, 341 aa, Homo sapiens
MPVFHTRTIESILEPVAQQISHLVIMHEEGEVDGKAIPDLTAPVAAVQAAVSNLVRVGKETVQTTEDQILKRDMPPAFIKVENACTKLVQAAQMLQSDPYSVPARDYLIDGSRGILSGTSDLLLTFDEAEVRKIIRVCKGILEYLTVAEVVETMEDLVTYTKNLGPGMTKMAKMIDERQQELTHQEHRVMLVNSMNTVKELLPVLISAMKIFVTTKNSKNQGIEEALKNRNFTVEKMSAEINEIIRVLQLTSWDEDAWASKDTEAMKRALASIDSKLNQAKGWLRDPSASPGDAGEQAIRQILDEAGKVGELCAGKERREILGTCKMLGQMTDQVADLRAR

SEQ ID NO: 809861 - protein, 107 aa, Homo sapiens
MPVFHTRTIESILEPVAQQISHLVIMHEEGEVDGKAIPDLTAPVAAVQAAVSNLVRVGKETVQTTEDQILKRDMPPAFIKLLLEEILKNVLQTSPLIPDVSLKYKRE

SEQ ID NO: 809862 - protein, 84 aa, Homo sapiens
MLVAGATSIARRANRILLVAKREVENSEDPKFREAVKAASDELSKTISPMVMDAKAVAGNISDPGKQCMALCLTSTERLTQERS

SEQ ID NO: 809863 - protein, 154 aa, Homo sapiens
MSPTLASGDFPFSPCDISPFGPCLSPPLDPRALQSPPLRPPDVPPPEQYWKEVADQNQRALGDALVENNQLHVTLTQKQEEIASLKERNVQLKELASRTRHLASVLDKLMITQSRDCGAAAEPFLLKAKAKRSLEELVSAAGQDCAEVDAILRE

SEQ ID NO: 809864 - protein, 335 aa, Homo sapiens
PSAPSRSRACPNLWLASEPAGTEGSAGCGSLPQPGPPPPSSRHPEAGGTMQACGGGAAGRRAFDSICPNRMLALPGRALLCKPGKPERKFAPPRKFFPGCTGGSPVSVYEDPPDAEPTALPALTTIDLQDLADCSSLLGSDAPPGGDLAASQNHSHQTEADFNLQDFRDTVDDLISDSSSMMSPTLASGDFPFSPCDISPFGPCLSPPLDPRALQSPPLRPPDVPPPEQYWKEVADQNQRALGDALVENNQLHVTLTQKQEEIASLKERNVQLKELASRTRHLASVLDKLMITQSRDCGAAAEPFLLKAKAKRSLEELVSAAGQDCAEVDAILRE

SEQ ID NO: 809865 - protein, 185 aa, Homo sapiens
PSAPSRSRACPNLWLASEPAGTEGSAGCGSLPQPGPPPPSSRHPEAGGTMQACGGGAAGRRAFDSICPNRMLALPGRALLCKPGKPERKFAPPRKFFPGCTGGSPVSVYEDPPDAEPTALPALTTIDLQDLADCSSLLGSDAPPGGDLAASQNHSHQTEADFNLQDFRDTVDDLISGKCSLLAVK

SEQ ID NO: 809866 - protein, 682 aa, Homo sapiens
SHGVRAQTPTRRRNRQCSPKPRSPRARVAMRPLRPRAALLALLASLLAAPPVAPAEAPHLVQVDAARALWPLRRFWRSTGFCPPLPHSQADQYVLSWDQQLNLAYVGAVPHRGIKQVRTHWLLELVTTRGSTGRGLSYNFTHLDGYLDLLRENQLLPGFELMGSASGHFTDFEDKQQVFEWKDLVSSLARRYIGRYGLAHVSKWNFETWNEPDHHDFDNVSMTMQGFLNYYDACSEGLRAASPALRLGGPGDSFHTPPRSPLSWGLLRHCHDGTNFFTGEAGVRLDYISLHRKGARSSISILEQEKVVAQQIRQLFPKFADTPIYNDEADPLVGWSLPQPWRADVTYAAMVVKVIAQHQNLLLANTTSAFPYALLSNDNAFLSYHPHPFAQRTLTARFQVNNTRPPHVQLLRKPVLTAMGLLALLDEEQLWAEVSQAGTVLDSNHTVGVLASAHRPQGPADAWRAAVLIYASDDTRAHPNRSVAVTLRLRGVPPGPGLVYVTRYLDNGLCSPDGEWRRLGRPVFPTAEQFRRMRAAEDPVAAAPRPLPAGGRLTLRPALRLPSLLLVHVCARPEKPPGQVTRLRALPLTQGQLVLVWSDEHVGSKCLWTYEIQFSQDGKAYTPVSRKPSTFNLFVFSPDTGAVSGSYRVRALDYWARPGPFSDPVPYLEVPVPRGPPSPGNP

SEQ ID NO: 809867 - protein, 162 aa, Homo sapiens
SHGVRAQTPTRRRNRQCSPKPRSPRARVAMRPLRPRAALLALLASLLAAPPVAPAEAPHLVQVDAARALWPLRRFWRSTGFCPPLPHSQADQYVLSWDQQLNLAYVGAVPHRGIKQVRTHWLLELVTTRAFALAMPSAAWMSSCWLVPLHGSLRCLLREVPR

SEQ ID NO: 809868 - protein, 185 aa, Homo sapiens
SHGVRAQTPTRRRNRQCSPKPRSPRARVAMRPLRPRAALLALLASLLAAPPVAPAEAPHLVQVDAARALWPLRRFWRSTGFCPPLPHSQADQYVLSWDQQLNLAYVGAVPHRGIKQVRTHWLLELVTTRGSTGRGLSYNFTHLDGYLDLLRENQLLPGELWALPSQPACTPLPWPPSPSPSPSES

SEQ ID NO: 809869 - protein, 167 aa, Homo sapiens
AGTVGSLRCVAMRPLRPRAALLALLASLLAAPPVAPAEAPHLVQVDAARALWPLRRFWRSTGFCPPLPHSQADQYVLSWDQQLNLAYVGAVPHRGIKQVRTHWLLELVTTRGSTGRGLSYNFTHLDGYLDLLRENQLLPGELWALPSQPACTPLPWPPSPSPSPSES

SEQ ID NO: 809870 - protein, 661 aa, Homo sapiens
SHGVRAQTPTRRRNRQCSPKPRSPRARVAMRPLRPRAALLALLASLLAAPPVAPAEAPHLVQVDAARALWPLRRFWRSTGFCPPLPHSQADQYVLSWDQQLNLAYVGAVPHRGIKQVRTHWLLELVTTRGSTGRGLSYNFTHLDGYLDLLRENQLLPGFELMGSASGHFTDFEDKQQVFEWKDLVSSLARRYIGRYGLAHVSKWNFETWNEPDHHDFDNVSMTMQGFLNYYDACSEGLRAASPALRLGGPGDSFHTPPRSPLSWGLLRHCHDGTNFFTGEAGVRLDYISLHRKGARSSISILEQEKVVAQQIRQLFPKFADTPIYNDEADPLVGWSLPQPWRADVTYAAMVVKVIAQHQNLLLANTTSAFPYALLSNDNAFLSYHPHPFAQRTLTARFQVNNTRPPHVQLLRKPVLTAMGLLALLDEEQLWAEVSQAGTVLDSNHTVGVLASAHRPQGPADAWRAAVLIYASDDTRAHPNRSVAVTLRLRGVPPGPGLVYVTRYLDNGLCSPDGEWRRLGRPVFPTAEQFRRMRAAEVGGPRRGEGPGRAGVPGGWGPGRGLRGGVGGRWSGGPGAFALRSGRASPAPLENPEDRPLRPGPGGRGAPPLTRRRPPDPAPRAAAAVAFAGARVCAPREAARAGHAAPRPAPDPRAAGSGLVG

SEQ ID NO: 809871 - protein, 688 aa, Homo sapiens
AAVHARQPRRSPEARSVPMRSRCLRPCCNVGIAVCCVHVRSASVCLPPSWCAPVPDVPLRPLVHGCDAGTALHVCPVLCASGVSTGFCPPLPHSQADQYVLSWDQQLNLAYVGAVPHRGIKQVRTHWLLELVTTRGSTGRGLSYNFTHLDGYLDLLRENQLLPGFELMGSASGHFTDFEDKQQVFEWKDLVSSLARRYIGRYGLAHVSKWNFETWNEPDHHDFDNVSMTMQGFLNYYDACSEGLRAASPALRLGGPGDSFHTPPRSPLSWGLLRHCHDGTNFFTGEAGVRLDYISLHRKGARSSISILEQEKVVAQQIRQLFPKFADTPIYNDEADPLVGWSLPQPWRADVTYAAMVVKVIAQHQNLLLANTTSAFPYALLSNDNAFLSYHPHPFAQRTLTARFQVNNTRPPHVQLLRKPVLTAMGLLALLDEEQLWAEVSQAGTVLDSNHTVGVLASAHRPQGPADAWRAAVLIYASDDTRAHPNRSVAVTLRLRGVPPGPGLVYVTRYLDNGLCSPDGEWRRLGRPVFPTAEQFRRMRAAEDPVAAAPRPLPAGGRLTLRPALRLPSLLLVHVCARPEKPPGQVTRLRALPLTQGQLVLVWSDEHVGSKCLWTYEIQFSQDGKAYTPVSRKPSTFNLFVFSPDTGAVSGSYRVRALDYWARPGPFSDPVPYLEVPVPRGPPSPGNP

SEQ ID NO: 809872 - protein, 584 aa, Homo sapiens
MCLPSECHSHWTQVQASLSPAAPCPPPWLPRGSTGRGLSYNFTHLDGYLDLLRENQLLPGFELMGSASGHFTDFEDKQQVFEWKDLVSSLARRYIGRYGLAHVSKWNFETWNEPDHHDFDNVSMTMQGFLNYYDACSEGLRAASPALRLGGPGDSFHTPPRSPLSWGLLRHCHDGTNFFTGEAGVRLDYISLHRKGARSSISILEQEKVVAQQIRQLFPKFADTPIYNDEADPLVGWSLPQPWRADVTYAAMVVKVIAQHQNLLLANTTSAFPYALLSNDNAFLSYHPHPFAQRTLTARFQVNNTRPPHVQLLRKPVLTAMGLLALLDEEQLWAEVSQAGTVLDSNHTVGVLASAHRPQGPADAWRAAVLIYASDDTRAHPNRSVAVTLRLRGVPPGPGLVYVTRYLDNGLCSPDGEWRRLGRPVFPTAEQFRRMRAAEDPVAAAPRPLPAGGRLTLRPALRLPSLLLVHVCARPEKPPGQVTRLRALPLTQGQLVLVWSDEHVGSKCLWTYEIQFSQDGKAYTPVSRKPSTFNLFVFSPDTGAVSGSYRVRALDYWARPGPFSDPVPYLEVPVPRGPPSPGNP

SEQ ID NO: 809873 - protein, 592 aa, Homo sapiens
LAHPGPGIGAGPSPGSAGPSPLPGMDGRWALLDPESIVRGSTGRGLSYNFTHLDGYLDLLRENQLLPGFELMGSASGHFTDFEDKQQVFEWKDLVSSLARRYIGRYGLAHVSKWNFETWNEPDHHDFDNVSMTMQGFLNYYDACSEGLRAASPALRLGGPGDSFHTPPRSPLSWGLLRHCHDGTNFFTGEAGVRLDYISLHRKGARSSISILEQEKVVAQQIRQLFPKFADTPIYNDEADPLVGWSLPQPWRADVTYAAMVVKVIAQHQNLLLANTTSAFPYALLSNDNAFLSYHPHPFAQRTLTARFQVNNTRPPHVQLLRKPVLTAMGLLALLDEEQLWAEVSQAGTVLDSNHTVGVLASAHRPQGPADAWRAAVLIYASDDTRAHPNRSVAVTLRLRGVPPGPGLVYVTRYLDNGLCSPDGEWRRLGRPVFPTAEQFRRMRAAEDPVAAAPRPLPAGGRLTLRPALRLPSLLLVHVCARPEKPPGQVTRLRALPLTQGQLVLVWSDEHVGSKCLWTYEIQFSQDGKAYTPVSRKPSTFNLFVFSPDTGAVSGSYRVRALDYWARPGPFSDPVPYLEVPVPRGPPSPGNP

SEQ ID NO: 809874 - protein, 501 aa, Homo sapiens
RFTCAGGTARLLCRYGLAHVSKWNFETWNEPDHHDFDNVSMTMQGFLNYYDACSEGLRAASPALRLGGPGDSFHTPPRSPLSWGLLRHCHDGTNFFTGEAGVRLDYISLHRKGARSSISILEQEKVVAQQIRQLFPKFADTPIYNDEADPLVGWSLPQPWRADVTYAAMVVKVIAQHQNLLLANTTSAFPYALLSNDNAFLSYHPHPFAQRTLTARFQVNNTRPPHVQLLRKPVLTAMGLLALLDEEQLWAEVSQAGTVLDSNHTVGVLASAHRPQGPADAWRAAVLIYASDDTRAHPNRSVAVTLRLRGVPPGPGLVYVTRYLDNGLCSPDGEWRRLGRPVFPTAEQFRRMRAAEDPVAAAPRPLPAGGRLTLRPALRLPSLLLVHVCARPEKPPGQVTRLRALPLTQGQLVLVWSDEHVGSKCLWTYEIQFSQDGKAYTPVSRKPSTFNLFVFSPDTGAVSGSYRVRALDYWARPGPFSDPVPYLEVPVPRGPPSPGNP

SEQ ID NO: 809875 - protein, 641 aa, Homo sapiens
PVEDLFIHRPRRAVLGLNVCVSRAASHAEARELSRPFVVPSPPLPHSQADQYVLSWDQQLNLAYVGAVPHRGIKQVRTHWLLELVTTRGSTGRGLSYNFTHLDGYLDLLRENQLLPGFELMGSASGHFTDFEDKQQVFEWKDLVSSLARRYIGRYGLAHVSKWNFETWNEPDHHDFDNVSMTMQGFLNYYDACSEGLRAASPALRLGGPGDSFHTPPRSPLSWGLLRHCHDGTNFFTGEAGVRLDYISLHRKGARSSISILEQEKVVAQQIRQLFPKFADTPIYNDEADPLVGWSLPQPWRADVTYAAMVVKVIAQHQNLLLANTTSAFPYALLSNDNAFLSYHPHPFAQRTLTARFQVNNTRPPHVQLLRKPVLTAMGLLALLDEEQLWAEVSQAGTVLDSNHTVGVLASAHRPQGPADAWRAAVLIYASDDTRAHPNRSVAVTLRLRGVPPGPGLVYVTRYLDNGLCSPDGEWRRLGRPVFPTAEQFRRMRAAEDPVAAAPRPLPAGGRLTLRPALRLPSLLLVHVCARPEKPPGQVTRLRALPLTQGQLVLVWSDEHVGSKCLWTYEIQFSQDGKAYTPVSRKPSTFNLFVFSPDTGAVSGSYRVRALDYWARPGPFSDPVPYLEVPVPRGPPSPGNP

SEQ ID NO: 809876 - protein, 409 aa, Homo sapiens
SIRARTRTVMRLDYISLHRKGARSSISILEQEKVVAQQIRQLFPKFADTPIYNDEADPLVGWSLPQPWRADVTYAAMVVKVIAQHQNLLLANTTSAFPYALLSNDNAFLSYHPHPFAQRTLTARFQVNNTRPPHVQLLRKPVLTAMGLLALLDEEQLWAEVSQAGTVLDSNHTVGVLASAHRPQGPADAWRAAVLIYASDDTRAHPNRSVAVTLRLRGVPPGPGLVYVTRYLDNGLCSPDGEWRRLGRPVFPTAEQFRRMRAAEDPVAAAPRPLPAGGRLTLRPALRLPSLLLVHVCARPEKPPGQVTRLRALPLTQGQLVLVWSDEHVGSKCLWTYEIQFSQDGKAYTPVSRKPSTFNLFVFSPDTGAVSGSYRVRALDYWARPGPFSDPVPYLEVPVPRGPPSPGNP

SEQ ID NO: 809877 - protein, 261 aa, Homo sapiens
RHEEFSQDGKAYTPVSRTVLDSNHTVGVLASAHRPQGPADAWRAAVLIYASDDTRAHPNRSVAVTLRLRGVPPGPGLVYVTRYLDNGLCSPDGEWRRLGRPVFPTAEQFRRMRAAEDPVAAAPRPLPAGGRLTLRPALRLPSLLLVHVCARPEKPPGQVTRLRALPLTQGQLVLVWSDEHVGSKCLWTYEIQFSQDGKAYTPVSRKPSTFNLFVFSPDTGAVSGSYRVRALDYWARPGPFSDPVPYLEVPVPRGPPSPGNP

SEQ ID NO: 809878 - protein, 273 aa, Homo sapiens
AGTVGSLRCVAMRPLRPRAALLALLASLLTVLDSNHTVGVLASAHRPQGPADAWRAAVLIYASDDTRAHPNRSVAVTLRLRGVPPGPGLVYVTRYLDNGLCSPDGEWRRLGRPVFPTAEQFRRMRAAEDPVAAAPRPLPAGGRLTLRPALRLPSLLLVHVCARPEKPPGQVTRLRALPLTQGQLVLVWSDEHVGSKCLWTYEIQFSQDGKAYTPVSRKPSTFNLFVFSPDTGAVSGSYRVRALDYWARPGPFSDPVPYLEVPVPRGPPSPGNP

SEQ ID NO: 809879 - protein, 617 aa, Homo sapiens
SHGVRAQTPTRRRNRQCSPKPRSPRARVAMRPLRPRAALLALLASLLAAPPVAPAEAPHLVQVDAARALWPLRRFWRSTGFCPPLPHSQADQYVLSWDQQLNLAYVGAVPHRGIKQVRTHWLLELVTTRGSTGRGLSYNFTHLDGYLDLLRENQLLPGFELMGSASGHFTDFEDKQQVFEWKDLVSSLARRYIGRYGLAHVSKWNFETWNEPDHHDFDNVSMTMQGFLNYYDACSEGLRAASPALRLGGPGDSFHTPPRSPLSWGLLRHCHDGTNFFTGEAGVRLDYISLHRKGARSSISILEQEKVVAQQIRQLFPKFADTPIYNDEADPLVGWSLPQPWRADVTYAAMVVKVIAQHQNLLLANTTSAFPYALLSNDNAFLSYHPHPFAQRTLTARFQVNNTRPPHVQLLRKPVLTAMGLLALLDEEQLWAEVSQAGTVLDSNHTVGVLASAHRPQGPADAWRAAVLIYASDDTRAHPNRSVAVTLRLRGVPPGPGLVYVTRYLDNGLCSPDGEWRRLGRPVFPTAEQFRRMRAAEDPVAAAPRPLPAGGRLTLRPALRLPSLLLVHVCARPEKPPGQVTRLRALPLTQGQLVLVWSDEHVGSKCVSGAAPPSAWS

SEQ ID NO: 809880 - protein, 242 aa, Homo sapiens
SHGVRAQTPTRRRNRQCSPKPRSPRARVAMRPLRPRAALLALLASLLAAPPVAPAEAPHLVQVDAARALWPLRRFWRSTGFCPPLPHSQADQYVLSWDQQLNLAYVGAVPHRGIKQVRTHWLLELVTTRGSTGRGLSYNFTHLDGYLDLLRENQLLPGFELMGSASGHFTDFEDKQQVFEWKDLVSSLARRYIGGRAQALGPWPGRGYSWAGCTPITQAAAWSGDTLVGRRRPLWGDGGDKG

SEQ ID NO: 809881 - protein, 259 aa, Homo sapiens
SHGVRAQTPTRRRNRQCSPKPRSPRARVAMRPLRPRAALLALLASLLAAPPVAPAEAPHLVQVDAARALWPLRRFWRSTGFCPPLPHSQADQYVLSWDQQLNLAYVGAVPHRGIKQVRTHWLLELVTTSHAPCVQPREAVEWLQEEVLVGIVQRPPKAEHPHAGLRDEALELCGILVEGRVPDAGQQGGAWALGAAGQAEQREDDASQQPGLCADQHTGGRGACPDQRVSRAHPPQPREVPHLAQGPPQADHDDAGQHA

SEQ ID NO: 809882 - protein, 220 aa, Homo sapiens
MVWDSVHRSRPSTYYELLGVHPGASTEEVKRAFFSKSKELHPDRDPGNPSLHSRFVELSEAYRVLSREQSRRSYDDQLRSGSPPKSPRTTVHDKSAHQTHSSWTPPNAQYWSQFHSVRPQGPQLRQQQHKQNKQVLGYCLLLMLAGMGLHYIAFRKVKQMHLNFMDEKDRIITAFYNEARARARANRGILQQERQRLGQRQPPPSEPTQGPEIVPRGAGP

SEQ ID NO: 809883 - protein, 135 aa, Homo sapiens
MGPGEGQAKGDKGSPAPPQLHPDRDPGNPSLHSRFVELSEAYRVLSREQSRRSYDDQLRSGSPPKSPRTTVHDKSAHQTHSSWTPPNAQYWSQFHSVRPQGPQLRQQQHKQNKQVLGYCLLLMLAGMGLHYIAFR

SEQ ID NO: 809884 - protein, 71 aa, Homo sapiens
SKGGMAAGGQLGKEATKSALDQVGLDFKHPGAEGRANRGILQQERQRLGQRQPPPSEPTQGPEIVPRGAGP

SEQ ID NO: 809885 - protein, 241 aa, Homo sapiens
MPPLLPLRLCRLWPRNPPSRLLGAAAGQRSRPSTYYELLGVHPGASTEEVKRAFFSKSKELHPDRDPGNPSLHSRFVELSEAYRVLSREQSRRSYDDQLRSGSPPKSPRTTVHDKSAHQTHSSWTPPNAQYWSQFHSVRPQGPQLRQQQHKQNKQVLGYCLLLMLAGMGLHYIAFRKVKQMHLNFMDEKDRIITAFYNEARARARANRGILQQERQRLGQRQPPPSEPTQGPEIVPRGAGP

SEQ ID NO: 809886 - protein, 241 aa, Homo sapiens; identical to SEQ ID NO: 809885

SEQ ID NO: 809887 - protein, 241 aa, Homo sapiens; identical to SEQ ID NO: 809885

SEQ ID NO: 809888 - protein, 248 aa, Homo sapiens
MPPLLPLRLCRLWPRNPPSRLLGAAAGQRSRPSTYYELLGVHPGASTEEVKRAFFSKSKELHPDRDPGNPSLHSRFVELSEAYRVLSREQSRRSYDDQLRSGSPPKSPRTTVHDKSAHQTHSSWTPPNAQYWSQFHSVRPQGPQLRQQQHKQNKQVLGYCLLLMLAGMGLHYIAFRKVKQMHLNFMDEKDRIITAFYNEARARARSVPALFCSLLPVQEPHFGIPIPTTQVPSPPGPTEASFSRSDNG

SEQ ID NO: 809889 - protein, 200 aa, Homo sapiens
MGPGEGQAKGDKGSPAPPQLHPDRDPGNPSLHSRFVELSEAYRVLSREQSRRSYDDQLRSGSPPKSPRTTVHDKSAHQTHSSWTPPNAQYWSQFHSVRPQGPQLRQQQHKQNKQVLGYCLLLMLAGMGLHYIAFRKVKQMHLNFMDEKDRIITAFYNEARARARANRGILQQERQRLGQRQPPPSEPTQGPEIVPRGAGP

SEQ ID NO: 809890 - protein, 179 aa, Homo sapiens
MNCWGCILVPALRKLNELSSPSPKSREQSRRSYDDQLRSGSPPKSPRTTVHDKSAHQTHSSWTPPNAQYWSQFHSVRPQGPQLRQQQHKQNKQVLGYCLLLMLAGMGLHYIAFRKVKQMHLNFMDEKDRIITAFYNEARARARANRGILQQERQRLGQRQPPPSEPTQGPEIVPRGAGP

SEQ ID NO: 809891 - protein, 234 aa, Homo sapiens
MIEKTPKVIHRFKRQRRKFESRSRPSTYYELLGVHPGASTEEVKRAFFSKSKELHPDRDPGNPSLHSRFVELSEAYRVLSREQSRRSYDDQLRSGSPPKSPRTTVHDKSAHQTHSSWTPPNAQYWSQFHSVRPQGPQLRQQQHKQNKQVLGYCLLLMLAGMGLHYIAFRKVKQMHLNFMDEKDRIITAFYNEARARARANRGILQQERQRLGQRQPPPSEPTQGPEIVPRGAGP

SEQ ID NO: 809892 - protein, 254 aa, Homo sapiens
MPPLLPLRLCRLWPRNPPSRLLGAAAGQRSRPSTYYELLGVHPGASTEEVKRAFFSKSKELHPDRDPGNPSLHSRFVELSEAYRVLSREQSRRSYDDQLRSGSPPKSPRTTVHDKSAHQTHSSWTPPNAQYWSQFHSVRPQGPQLRQQQHKQNKQVLGYCLLLMLAGMGLHYIAFRKVKQMHLNFMDEKDRIITAFYNEARARARPNTVRWPNTVRWPNTVRWPNTVRWPNTVRWPNTVRGANTVRGANMVRMT

SEQ ID NO: 809893 - protein, 176 aa, Homo sapiens
MPPLLPLRLCRLWPRNPPSRLLGAAAGQRSRPSTYYELLGVHPGASTEEVKRAFFSKSKELHPDRDPGNPSLHSRFVELSEAYRVLSREQSRRSYDDQLRSGSPPKSPRTTVHDKSAHQTHSSWTPPNAQYWSQFHSVRPQGPQLRQQQHKQNKQVLGYCLLLMLAGMGLHYIAFR

SEQ ID NO: 809894 - protein, 176 aa, Homo sapiens; identical to SEQ ID NO: 809893

SEQ ID NO: 809895 - protein, 223 aa, Homo sapiens
MPPLLPLRLCRLWPRNPPSRLLGAAAGQRSRPSTYYELLGVHPGASTEEVKRAFFSKSKELHPDRDPGNPSLHSRFVELSEAYRVLSREQSRRSYDDQLRSGSPPKSPRTTVHDKSAHQTHRQGPQLRQQQHKQNKQVLGYCLLLMLAGMGLHYIAFRKVKQMHLNFMDEKDRIITAFYNEARARARANRGILQQERQRLGQRQPPPSEPTQGPEIVPRGAGP

SEQ ID NO: 809896 - protein, 113 aa, Homo sapiens
MPPLLPLRLCRLWPRNPPSRLLGAAAGQRSRPSTYYELLGVHPGASTEEVKRAFFSKSKELHPDRDPGNPSLHSRFVELSEAYRVLSREQSRRSYDDQLRSGSPPKSPHRGPS

SEQ ID NO: 809897 - protein, 140 aa, Homo sapiens
MNCWGCILVPALRKLNELSSPSPKSCTQTGTLGTQACTAQGPQLRQQQHKQNKQVLGYCLLLMLAGMGLHYIAFRKVKQMHLNFMDEKDRIITAFYNEARARARANRGILQQERQRLGQRQPPPSEPTQGPEIVPRGAGP

SEQ ID NO: 809898 - protein, 67 aa, Homo sapiens
MPPLLPLRLCRLWPRNPPSRLLGAAAGQRSRPSTYYELLGVHPGASTEEVKRAFFSKSKEEGEADAP

SEQ ID NO: 809899 - protein, 180 aa, Homo sapiens
MPPLLPLRLCRLWPRNPPSRLLGAAAGQRSRPSTYYELLGVHPGASTEEVKRAFFSKSKEQAKGDKGSPAPPQLHPDRDPGNPSLHSQHKQNKQVLGYCLLLMLAGMGLHYIAFRKVKQMHLNFMDEKDRIITAFYNEARARARANRGILQQERQRLGQRQPPPSEPTQGPEIVPRGAGP

SEQ ID NO: 809900 - protein, 189 aa, Homo sapiens
MPPLLPLRLCRLWPRNPPSRLLGAAAGQRSRPSTYYELLGVHPGASTEEVKRAFFSKSKEQAKGDKGSPAPPQLHPDRDPGNPSLHSRFVELSEAYRVLSREQSRRSYDDQLRSGSPPKSPRTTVHDKSAHQTHSSWTPPNAQYWSQFHSVRPQGPQLRQQQHKQNKQVLGYCLLLMLAGMGLHYIAFR

SEQ ID NO: 809901 - protein, 189 aa, Homo sapiens; identical to SEQ ID NO: 809900

SEQ ID NO: 809902 - protein, 107 aa, Homo sapiens
MKPERRHLQSALDGRGALEPRMPGKPHVGGTSQLEIIVMQGQIREMAFPYIKMAPLTNEDILSIFANGIFPELDLPHDRLIQGTENKCPFQFTLFTHFARACVNIFR

SEQ ID NO: 809903 - protein, 342 aa, Homo sapiens
MALFAVFQTTFFLTLLSLRTYQSEVLAERLPLTPVSLKVSTNSTRQSLHLQWTVHNLPYHQELKMVFQIQISRIETSNVIWVGNYSTTVKWNQVLHWSWESELPLECATHFVRIKSLVDDAKFPEPNFWSNWSSWEEVSVQDSTGQDILFVFPKDKLVEEGTNVTICYVSRNIQNNVSCYLEGKQIHGEQLDPHVTAFNLNSVPFIRNKGTNIYCEASQGNVSEGMKGIVLFVSKVLEEPKDFSCETEDFKTLHCTWDPGTDTALGWSKQPSQSYTLFESFSGEKKLCTHKNWCNWQITQDSQETYNFTLIAENYLRKRSVNILFNLTHRGETRVVTAHRGH

SEQ ID NO: 809904 - protein, 231 aa, Homo sapiens
WDTDTHTTGILVPIADEVPCTWGVVLVLVFSSATGIQRAILSSFDRGPPQVQFISCISCIPFDGVRDEEIRSSSRDIDRSWSFDQSWPNLVTGIHSVILGLASASSCGLRPRPRPSCLVLIPGPRIAILPELSCGSHSRFPIPGPSRAPGPPPLHRCVIRSICWDIADKKELVSVAYCIWQPPARPRQGLPPRSADSGALDPTRCPRIPAAHAEARCMRPTGLTCFGIFFI

SEQ ID NO: 809905 - protein, 979 aa, Homo sapiens
MALFAVFQTTFFLTLLSLRTYQSEVLAERLPLTPVSLKVSTNSTRQSLHLQWTVHNLPYHQELKMVFQIQISRIETSNVIWVGNYSTTVKWNQVLHWSWESELPLECATHFVRIKSLVDDAKFPEPNFWSNWSSWEEVSVQDSTGQDILFVFPKDKLVEEGTNVTICYVSRNIQNNVSCYLEGKQIHGEQLDPHVTAFNLNSVPFIRNKGTNIYCEASQGNVSEGMKGIVLFVSKVLEEPKDFSCETEDFKTLHCTWDPGTDTALGWSKQPSQSYTLFESFSGEKKLCTHKNWCNWQITQDSQETYNFTLIAENYLRKRSVNILFNLTHRVYLMNPFSVNFENVNATNAIMTWKVHSIRNNFTYLCQIELHGEGKMMQYNVSIKVNGEYFLSELEPATEYMARVRCADASHFWKWSEWSGQNFTTLEAAPSEAPDVWRIVSLEPGNHTVTLFWKPLSKLHANGKILFYNVVVENLDKPSSSELHSIPAPANSTKLILDRCSYQICVIANNSVGASPASVIVISADPENKEVEEERIAGTEGGFSLSWKPQPGDVIGYVVDWCDHTQDVLGDFQWKNVGPNTTSTVISTDAFRPGVRYDFRIYGLSTKRIACLLEKKTGYSQELAPSDNPHVLVDTLTSHSFTLSWKDYSTESQPGFIQGYHVYLKSKARQCHPRFEKAVLSDGSECCKYKIDNPEEKALIVDNLKPESFYEFFITPFTSAGEGPSATFTKVTTPDEHSSMLIHILLPMVFCVLLIMVMCYLKSQWIKETCYPDIPDPYKSSILSLIKFKENPHLIIMNVSDCIPDAIEVVSKPEGTKIQFLGTRKSLTETELTKPNYLYLLPTEKNHSGPGPCICFENLTYNQAASDSGSCGHVPVSPKAPSMLGLMTSPENVLKALEKNYMNSLGEIPAGETSLNYVSQLASPMFGDKDSLPTNPVEAPHCSEYKMQMAVSLRLALPPPTENSSLSSITLLDPGEHYC

SEQ ID NO: 809906 - protein, 979 aa, Homo sapiens; identical to SEQ ID NO: 809905

SEQ ID NO: 809907 - protein, 498 aa, Homo sapiens
RQAPVTIEVEVCYLLDTVHVCIYFLPYTLKTIYSELNLEHCSICLYTEEVEEERIAGTEGGFSLSWKPQPGDVIGYVVDWCDHTQDVLGDFQWKNVGPNTTSTVISTDAFRPGVRYDFRIYGLSTKRIACLLEKKTGYSQELAPSDNPHVLVDTLTSHSFTLSWKDYSTESQPGFIQGYHVYLKSKARQCHPRFEKAVLSDGSECCKYKIDNPEEKALIVDNLKPESFYEFFITPFTSAGEGPSATFTKVTTPDEHSSMLIHILLPMVFCVLLIMVMCYLKSQWIKETCYPDIPDPYKSSILSLIKFKENPHLIIMNVSDCIPDAIEVVSKPEGTKIQFLGTRKSLTETELTKPNYLYLLPTEKNHSGPGPCICFENLTYNQAASDSGSCGHVPVSPKAPSMLGLMTSPENVLKALEKNYMNSLGEIPAGETSLNYVSQLASPMFGDKDSLPTNPVEAPHCSEYKMQMAVSLRLALPPPTENSSLSSITLLDPGEHYC

SEQ ID NO: 809908 - protein, 799 aa, Homo sapiens
MALFAVFQTTFFLTLLSLRTYQSEVLAERLPLTPVSLKVSTNSTRQSLHLQWTVHNLPYHQELKMVFQIQISRIETSNVIWVGNYSTTVKWNQVLHWSWESELPLECATHFVRIKSLVDDAKFPEPNFWSNWSSWEEVSVQDSTGQDILFVFPKDKLVEEGTNVTICYVSRNIQNNVSCYLEGKQIHGEQLDPHVTAFNLNSVPFIRNKGTNIYCEASQGNVSEGMKGIVLFVSKVLEEPKDFSCETEDFKTLHCTWDPGTDTALGWSKQPSQSYTLFESFSGEKKLCTHKNWCNWQITQDSQETYNFTLIAENYLRKRSVNILFNLTHRVYLMNPFSVNFENVNATNAIMTWKVHSIRNNFTYLCQIELHGEGKMMQYNVSIKVNGEYFLSELEPATEYMARVRCADASHFWKWSEWSGQNFTTLEAAPSEAPDVWRIVSLEPGNHTVTLFWKPLSKLHANGKILFYNVVVENLDKPSSSELHSIPAPANSTKLILDRCSYQICVIANNSVGASPASVIVISADPENKEVEEERIAGTEGGFSLSWKPQPGDVIGYVVDWCDHTQDVLGDFQWKNVGPNTTSTVISTDAFRPGVRYDFRIYGLSTKRIACLLEKKTGYSQELAPSDNPHVLVDTLTSHSFTLSWKDYSTESQPGFIQGYHVYLKSKARQCHPRFEKAVLSDGSECCKYKIDNPEEKALIVDNLKPESFYEFFITPFTSAGEGPSATFTKVTTPDEHSSMLIHILLPMVFCVLLIMVMCYLKSQWIKETCYPDIPDPYKSSILSLIKFKISSKVWLNRR

SEQ ID NO: 809909 - protein, 581 aa, Homo sapiens
MALFAVFQTTFFLTLLSLRTYQSEVLAERLPLTPVSLKVSTNSTRQSLHLQWTVHNLPYHQELKMVFQIQISRIETSNVIWVGNYSTTVKWNQVLHWSWESELPLECATHFVRIKSLVDDAKFPEPNFWSNWSSWEEVSVQDSTGQDILFVFPKDKLVEEGTNVTICYVSRNIQNNVSCYLEGKQIHGEQLDPHVTAFNLNSVPFIRNKGTNIYCEASQGNVSEGMKGIVLFVSKVLEEPKDFSCETEDFKTLHCTWDPGTDTALGWSKQPSQSYTLFESFSGEKKLCTHKNWCNWQITQDSQETYNFTLIAENYLRKRSVNILFNLTHRVYLMNPFSVNFENVNATNAIMTWKVHSIRNNFTYLCQIELHGEGKMMQYNVSIKVNGEYFLSELEPATEYMARVRCADASHFWKWSEWSGQNFTTLEAAPSEAPDVWRIVSLEPGNHTVTLFWKPLSKLHANGKILFYNVVVENLDKPSSSELHSIPAPANSTKLILDRCSYQICVIANNSVGASPASVIVISADPENSVSTCFSGTVPSVWGEGDFSHGSGHFCPGDSSTYMGNYLKFIQVTATLTNSHH

SEQ ID NO: 809910 - protein, 84 aa, Homo sapiens
QPGDVIGYVVDWCDHTQDVLGDFQWKNVGPNTTSTVISTGKKKLPYHRIAIFTLKKVQVGFLDYFTDFDCAKLVILKRQIQHGC

SEQ ID NO: 809911 - protein, 68 aa, Homo sapiens
IRGRVDREDDRTGPVVLLRGREDSRSRPGSSISEETEFPAFAAWESQAPTHRCWKGMRNKGRTRAPKA

SEQ ID NO: 809912 - protein, 104 aa, Homo sapiens [sequence omitted]

SEQ ID NO: 809913 - protein, 234 aa, Homo sapiens
RPAWAGLGPFWHLRRSRRQDGLCCPGPRPPSSTVASHCKKAWIRNLIRATLLCEARRLRTSGLVPKSLSRGQALWEHGLPATHPLTGLPHPCSSRHLSPSPSSGGPVVEKVPRPTDWRLTPHSRPEKRAGLGCRQEAMTLPRRCILAPGHKRLSALTLMLVWLPVLWHQNTRRWWRTLWPGLPHLIRSRLERPEDQKTRSLSERLEAGSSQQPRASASTRVTWVTRRLGSAPSR

SEQ ID NO: 809914 - protein, 104 aa, Homo sapiens [sequence omitted]

SEQ ID NO: 809915 - protein, 102 aa, Homo sapiens
LSGKACKVRPRARVGGRVVGTAWNRRAPTGTRASLTVRPLGSIDPSLPPRSGLIQLGGPEVVQSHLDVRMTQPVIKRNLQGIPCMLRNEGCEKEINCLPLSS

SEQ ID NO: 809916 - protein, 136 aa, Homo sapiens
MAGAGSAAVSGAGTPVAGPTGRDLFAEGLLEFLRPAVQQLDSHVHAVRESQVELREQIDNLATELCRINEDQKVALDLDPYVKKLLNARRRVVLVNNILQNAQERLRRLNHSVAKETARRRAMLDSGIYPPGSPGK

SEQ ID NO: 809917 - protein, 136 aa, Homo sapiens; identical to SEQ ID NO: 809916

SEQ ID NO: 809918 - protein, 136 aa, Homo sapiens; identical to SEQ ID NO: 809916

SEQ ID NO: 809919 - protein, 136 aa, Homo sapiens; identical to SEQ ID NO: 809916

SEQ ID NO: 809920 - protein, 94 aa, Homo sapiens
PGRLGWVRGLVSNRPRGAGQCGAAPVPGGPRGRFRASGQFVMAGAGSAAVSGAGTPVAGPTGRDLFAEGLLEFLRPAVQQLDSHVHAVRTVPHK

SEQ ID NO: 809921 - protein, 137 aa, Homo sapiens
  misc_feature (9)..(9): Xaa can be any naturally occurring amino acid
MIFGGSSDXSVEWCSNSGSQNLCLTREGLVEIFLRPAVQQLDSHVHAVRESQVELREQIDNLATELCRINEDQKVALDLDPYVKKLLNARRRVVLVNNILQNAQERLRRLNHSVAKETARRRAMLDSGIYPPGSPGK

SEQ ID NO: 809922 - protein, 110 aa, Homo sapiens [sequence omitted]

SEQ ID NO: 809923 - protein, 136 aa, Homo sapiens; identical to SEQ ID NO: 809916

SEQ ID NO: 809924 - protein, 104 aa, Homo sapiens
PGRLGWVRGLVSNRPRGAGQCGAAPVPGGPRGRFRASGQFVMAGAGSAAVSGAGTPVAGPTGRDLFAEGLLEFLRPAVQQLDSHVHAVRCPGGKLGAGPVSLAL

SEQ ID NO: 809925 - protein, 89 aa, Homo sapiens
QESIKASRVELDKLATELCRINEDQKVALDLDPYVKKLLNARRRVVLVNNILQNAQERLRRLNHSVAKETARRRAMLDSGIYPPGSPGK

SEQ ID NO: 809926 - protein, 143 aa, Homo sapiens
QNLQKTRFEVTGLMEDTQYQFRVYAVNKIGYSDPSDVPDKHYPKDILIPPEGELDADLRKTLILRAGVTMRLYVPVKGRPPPKITWSKPNVNLRDRIGLDIKSTDFDTFLRCENVNKYDAGKYILTLENSCGKKEYTIVVKVL

SEQ ID NO: 809927 - protein, 725 aa, Homo sapiens
MSFPKAPLKRFNDPSGCAPSPGAYDVKTLEVLKGPVSFQKSQRFKQQKESKQNLNVDKDTTLPASARKVKSSESKKESQKNDKDLKILEKEIRVLLQERGAQDRRIQDLETELEKMEARLNAALREKTSLSANNATLEKQLIELTRTNELLKSKFSENGNQKNLRILSLELMKLRNKRETKMRGMMAKQEGMEMKLQVTQRSLEESQGKIAQLEGKLVSIEKEKIDEKSETEKLLEYIEEISCASDQVEKYKLDIAQLEENLKEKNDEILSLKQSLEENIVILSKQVEDLNVKCQLLEKEKEDHVNRNREHNENLNAEMQNLKQKFILEQQEREKLQQKELQIDSLLQQEKELSSSLHQKLCSFQEEMVKEKNLFEEELKQTLDELDKLQQKEEQAERLVKQLEEEAKSRAEELKLLEEKLKGKEAELEKSSAAHTQATLLLQEKYDSMVQSLEDVTAQFESYKALTASEIEDLKLENSSLQEKAAKAGKNAEDVQHQILATESSNQEYVRMLLDLQTKSALKETEIKEITVSFLQKITDLQNQLKQQEEDFRKQLEDEEGRKAEKENTTAELTEEINKWRLLYEELYNKTKPFQLQLDAFEVEKQALLNEHGAAQEQLNKIRDSYAKLLGHQNLKQKIKHVVKLKDENSQLKSEVSKLRCQLAKKKQSETKLQEELNKVLGIKHFDPSKAFHHESKENFALKTPLKEGNTNCYRAPMECQESWK

SEQ ID NO: 809928 - protein, 709 aa, Homo sapiens
MSFPKAPLKRFNDPSGCAPSPGAYDVKTLEVLKGPVSFQKSQRFKQQKESKQNLNVDKDTTLPASARKVKSSESKIRVLLQERGAQDRRIQDLETELEKMEARLNAALREKTSLSANNATLEKQLIELTRTNELLKSKFSENGNQKNLRILSLELMKLRNKRETKMRGMMAKQEGMEMKLQVTQRSLEESQGKIAQLEGKLVSIEKEKIDEKSETEKLLEYIEEISCASDQVEKYKLDIAQLEENLKEKNDEILSLKQSLEENIVILSKQVEDLNVKCQLLEKEKEDHVNRNREHNENLNAEMQNLKQKFILEQQEREKLQQKELQIDSLLQQEKELSSSLHQKLCSFQEEMVKEKNLFEEELKQTLDELDKLQQKEEQAERLVKQLEEEAKSRAEELKLLEEKLKGKEAELEKSSAAHTQATLLLQEKYDSMVQSLEDVTAQFESYKALTASEIEDLKLENSSLQEKAAKAGKNAEDVQHQILATESSNQEYVRMLLDLQTKSALKETEIKEITVSFLQKITDLQNQLKQQEEDFRKQLEDEEGRKAEKENTTAELTEEINKWRLLYEELYNKTKPFQLQLDAFEVEKQALLNEHGAAQEQLNKIRDSYAKLLGHQNLKQKIKHVVKLKDENSQLKSEVSKLRCQLAKKKQSETKLQEELNKVLGIKHFDPSKAFHHESKENFALKTPLKEGNTNCYRAPMECQESWK

SEQ ID NO: 809929 - protein, 725 aa, Homo sapiens; identical to SEQ ID NO: 809927

SEQ ID NO: 809930 - protein, 610 aa, Homo sapiens [sequence omitted]

SEQ ID NO: 809931 - protein, 610 aa, Homo sapiens [sequence omitted]

SEQ ID NO: 809932 - protein, 427 aa, Homo sapiens
MSFPKAPLKRFNDPSGCAPSPGAYDVKTLEVLKGPVSFQKSQRFKQQKESKQNLNVDKDTTLPASARKVKSSESKKESQKNDKDLKILEKEIRVLLQERGAQDRRIQDLETELEKMEARLNAALREKTSLSANNATLEKQLIELTRTNELLKSKFSENGNQKNLRILSLELMKLRNKRETKMRGMMAKQEGMEMKLQVTQRSLEESQGKIAQLEGKLVSIEKEKIDEKSETEKLLEYIEEISCASDQVEKYKLDIAQLEENLKEKNDEILSLKQSLEENIVILSKQVEDLNVKCQLLEKEKEDHVNRNREHNENLNAEMQNLKQKFILEQQEREKLQQKELQIDSLLQQEKELSSSLHQKLCSFQEEMVKEKNLFEEELKQTLDELDKLQQKEEQAERLVKQLEEEAKSRAEELKLLEEKLKGNRTA

SEQ ID NO: 809933 - protein, 434 aa, Homo sapiens
MSFPKAPLKRFNDPSGCAPSPGAYDVKTLEVLKGPVSFQKSQRFKQQKESKQNLNVDKDTTLPASARKVKSSESKKESQKNDKDLKILEKEIRVLLQERGAQDRRIQDLETELEKMEARLNAALREKTSLSANNATLEKQLIELTRTNELLKSKFSENGNQKNLRILSLELMKLRNKRETKMRGMMAKQEGMEMKLQVTQRSLEESQGKIAQLEGKLVSIEKEKIDEKSETEKLLEYIEEISCASDQVEKYKLDIAQLEENLKEKNDEILSLKQSLEENIVILSKQVEDLNVKCQLLEKEKEDHVNRNREHNENLNAEMQNLKQKFILEQQEREKLQQKELQIDSLLQQEKELSSSLHQKLCSFQEEMVKEKNLFEEELKQTLDELDKLQQKEEQAERLVKQLEEEAKSRAEELKLLEEKLKGKQGGLGMDYVL

SEQ ID NO: 809934 - protein, 228 aa, Homo sapiens
MSMAVETFGFFMATVGLLMLGVTLPNSYWRVSTVHGNVITTNTIFENLWFSCATDSLGVYNCWEFPSMLALSGYIQACRALMITAILLGFLGLLLGIAGLRCTNIGGLELSRKAKLAATAGALHILAGICGMVAISWYAFNITRDFFDPLYPGTKYELGPALYLGWSASLISILGGLCLCSACCCGSDEDPAASARRPYQAPVSVMPVATSDQEGDSSFGKYGRNAYV

SEQ ID NO: 809935 - protein, 125 aa, Homo sapiens
AGITSASHHTRLALILNLTAYLLYPHLQPTTFSQNSTIIQFQMPTVNNSITVVKGESLEPGMVRGCWAGSVAEGRWERLTTVPTPRVYSGLPGTHDHRHPPGLPRPLARHSGPALHPPLNSYSPE

SEQ ID NO: 809936 - protein, 275 aa, Homo sapiens
MSMAVETFGFFMATVGLLMLGVTLPNSYWRVSTVHGNVITTNTIFENLWFSCATDSLGVYNCWEFPSMLALSGSTDSPASLSGGTGLLVRLMSIKGPCEGRRLASCRLSVRCKEAVLCAGYIQACRALMITAILLGFLGLLLGIAGLRCTNIGGLELSRKAKLAATAGALHILAGICGMVAISWYAFNITRDFFDPLYPGTKYELGPALYLGWSASLISILGGLCLCSACCCGSDEDPAASARRPYQAPVSVMPVATSDQEGDSSFGKYGRNAYV

SEQ ID NO: 809937 - protein, 275 aa, Homo sapiens; identical to SEQ ID NO: 809936

SEQ ID NO: 809938 - protein, 228 aa, Homo sapiens; identical to SEQ ID NO: 809934

SEQ ID NO: 809939 - protein, 258 aa, Homo sapiens
MSMAVETFGFFMATVGLLMLGVTLPNSYWRVSTVHGNVITTNTIFENLWFSCATDSLGVYNCWEFPSMLALSGSTDSPASLSGGTGLLVRLMSIKGPCEGRRLASCRLSVRCKEAVLCAGYIQACRALMITAILLGFLGLLLGIAGLRCTNIGGLELSRKAKLAATAGALHILAGNWGKVMGRGSPSTADFRLLCPHLISSPIPTPHAHLPYPAAWTPAHPCLICTPQISWLQISPSAVFLELPVGAGHGQVWEGLRR

SEQ ID NO: 809940 - protein, 258 aa, Homo sapiens; identical to SEQ ID NO: 809939

SEQ ID NO: 809941 - protein, 140 aa, Homo sapiens [sequence omitted]

SEQ ID NO: 809942 - protein, 534 aa, Homo sapiens
RPQVPHAPGRAAASWASWGQTQPFPAASARPGALGAVRAPLPRESLKREPASCLPGAMEAVELARKLQEEATCSICLDYFTDPVMTTCGHNFCRACIQLSWEKARGKKGRRKRKGSFPCPECREMSPQRNLLPNRLLTKVAEMAQQHPGLQKQDLCQEHHEPLKLFCQKDQSPICVVCRESREHRLHRVLPAEEAVQGYKLKLEEDMEYLREQITRTGNLQAREEQSLAEWQGKVKERRERIVLEFEKMNLYLVEEEQRLLQALETEEEETASRLRESVACLDRQGHSLELLLLQLEERSTQGPLQMLQDMKEPLSRKNNVSVQCPEVAPPTRPRTVCRVPGQIEVLRGFLEDVVPDATSAYPYLLLYESRQRRYLGSSPEGSGFCSKDRFVAYPCAVGQTAFSSGRHYWEVGMNITGDALWALGVCRDNVSRKDRVPKCPENGFWVVQLSKGTKYLSTFSALTPVMLMEPPSHMGIFLDFEAGEVSFYSVSDGSHLHTYSQATFPGPLQPFFCLGAPKSGQMVISTVTMWVKG

SEQ ID NO: 809943 - protein, 144 aa, Homo sapiens
VLRLSRGSRLGSSHGERHYWEVGMNITGDALWALGVCRDNVSRKDRVPKCPENGFWVVQLSKGTKYLSTFSALTPVMLMEPPSHMGIFLDFEAGEVSFYSVSDGSHLHTYSQATFPGPLQPFFCLGAPKSGQMVISTVTMWVKG

SEQ ID NO: 809944 - protein, 56 aa, Homo sapiens
MEAVELARKLQEEATCSICLDYFTDPVMTTCGHNFCRACIQLTVVQARQVNSEEDS

SEQ ID NO: 809945 - protein, 522 aa, Homo sapiens
RPQVPHAPGRAAASWASWGQTQPFPAASARPGALGAVRAPLPRGAMEAVELARKLQEEATCSICLDYFTDPVMTTCGHNFCRACIQLSWEKARGKKGRRKRKGSFPCPECREMSPQRNLLPNRLLTKVAEMAQQHPGLQKQDLCQEHHEPLKLFCQKDQSPICVVCRESREHRLHRVLPAEEAVQGYKLKLEEDMEYLREQITRTGNLQAREEQSLAEWQGKVKERRERIVLEFEKMNLYLVEEEQRLLQALETEEEETASRLRESVACLDRQGHSLELLLLQLEERSTQGPLQMLQDMKEPLSRKNNVSVQCPEVAPPTRPRTVCRVPGQIEVLRGFLEDVVPDATSAYPYLLLYESRQRRYLGSSPEGSGFCSKDRFVAYPCAVGQTAFSSGRHYWEVGMNITGDALWALGVCRDNVSRKDRVPKCPENGFWVVQLSKGTKYLSTFSALTPVMLMEPPSHMGIFLDFEAGEVSFYSVSDGSHLHTYSQATFPGPLQPFFCLGAPKSGQMVISTVTMWVKG

SEQ ID NO: 809946 - protein, 496 aa, Homo sapiens
RPQVPHAPGRAAASWASWGQTQPFPAASARPGALGAVRAPLPRDPVMTTCGHNFCRACIQLSWEKARGKKGRRKRKGSFPCPECREMSPQRNLLPNRLLTKVAEMAQQHPGLQKQDLCQEHHEPLKLFCQKDQSPICVVCRESREHRLHRVLPAEEAVQGYKLKLEEDMEYLREQITRTGNLQAREEQSLAEWQGKVKERRERIVLEFEKMNLYLVEEEQRLLQALETEEEETASRLRESVACLDRQGHSLELLLLQLEERSTQGPLQMLQDMKEPLSRKNNVSVQCPEVAPPTRPRTVCRVPGQIEVLRGFLEDVVPDATSAYPYLLLYESRQRRYLGSSPEGSGFCSKDRFVAYPCAVGQTAFSSGRHYWEVGMNITGDALWALGVCRDNVSRKDRVPKCPENGFWVVQLSKGTKYLSTFSALTPVMLMEPPSHMGIFLDFEAGEVSFYSVSDGSHLHTYSQATFPGPLQPFFCLGAPKSGQMVISTVTMWVKG

SEQ ID NO: 809947 - protein, 272 aa, Homo sapiens
MKGKKGIVAASGSETEDEDSMDIPLDLSSSAGSGKRRRRGNLPKESVQILRDWLYEHRYNAYPSEQEKALLSQQTHLSTLQVCNWFINARRRLLPDMLRKDGKDPNQFTISRRGAKISETSSVESVMGIKNFMPALEETPFHSCTAGPNPTLGRPLSPKPSSPGSVLARPSVICHTTVTALKDVPFSLCQSVGVGQNTDIQQIAAKNFTDTSLMYPEDTCKSGPSTNTQSGLFNTPPPTPPDLNQDFSGFQLLVDVALKRAAEMELQAKLTA

SEQ ID NO: 809948 - protein, 228 aa, Homo sapiens
MDIPLDLSSSAGSGKRRRRGNLPKESVQILRDWLYEHRYNAYPSEQEKALLSQQTHLSTLQVCNWFINARRRLLPDMLRKDGKDPNQFTISRRGAKISETSSVESVMGIKNFMPALEETPFHSCTAGPNPTLGRPLSPKPSSPGSVLARPSVICHTTVTALKDVPFSLCQSVGVGQNTDIQQIAAKNFTDTSLMYPEDTCKSGPSTNTQSGLSNSPLIHGLPDSVGSV

SEQ ID NO: 809949 - protein, 167 aa, Homo sapiens
MDIPLDLSSSAGSGKRRRRGNLPKESVQILRDWLYEHRYNAYPSEQEKALLSQQTHLSTLQVCNWFINARRRLLPDMLRKDGKDPNQFTISRRGAKISETSSVESVMGIKNFMPALEETPFHSCTAGPNPTLGRPLSPKPSSPGSVLARPSVICHTTVTALKDVPFS

SEQ ID NO: 809950 - protein, 167 aa, Homo sapiens; identical to SEQ ID NO: 809949

SEQ ID NO: 809951 - protein, 167 aa, Homo sapiens; identical to SEQ ID NO: 809949

SEQ ID NO: 809952 - protein, 50 aa, Homo sapiens
TPPPTPPDLNQDFSGFQLLVDVALKRAAEMELQASGVGQASGVGQASGVG

SEQ ID NO: 809953 - protein, 272 aa, Homo sapiens; identical to SEQ ID NO: 809947

SEQ ID NO: 809954 - protein, 272 aa, Homo sapiens; identical to SEQ ID NO: 809947

SEQ ID NO: 809955 - protein, 443 aa, Homo sapiens
SPPPHPRRPPTVAAGGRAPGGEGCAAPRPRVNGSRAFWKNFRTKRTLASPGKKGPREKPGALGWCPHRRARDAGGPCAAGGKDRVSGPGHPPRPHRRPRGTSDSGRRARSSLPGWKRAPGIRASCLAITAGARPTSYGRVGCEGDVRLSPVSPLLAPPDPRLASRWEGRSRMKGKKGIVAASGSETEDEDSMDIPLDLSSSAGSGKRRRRGNLPKESVQILRDWLYEHRYNAYPSEQEKALLSQQTHLSTLQVCNWFINARRRLLPDMLRKDGKDPNQFTISRRGAKISETSSVESVMGIKNFMPALEETPFHSCTAGPNPTLGRPLSPKPSSPGSVLARPSVICHTTVTALKDVPFSLCQSVGVGQNTDIQQIAAKNFTDTSLMYPEDTCKSGPSTNTQSGLFNTPPPTPPDLNQDFSGFQLLVDVALKRAAEMELQAKLTA

SEQ ID NO: 809956 - protein, 252 aa, Homo sapiens; identical to SEQ ID NO: 743368

SEQ ID NO: 809957 - protein, 252 aa, Homo sapiens; identical to SEQ ID NO: 743368

SEQ ID NO: 809958 - protein, 323 aa, Homo sapiens
QWGCIYGSGWAVSFRYITELCQCFSLECLASFNNRLDMTCSGKSCALARSSLTSSQGIVAASGSETEDEDSMDIPLDLSSSAGSGKRRRRGNLPKESVQILRDWLYEHRYNAYPSEQEKALLSQQTHLSTLQVCNWFINARRRLLPDMLRKDGKDPNQFTISRRGAKISETSSVESVMGIKNFMPALEETPFHSCTAGPNPTLGRPLSPKPSSPGSVLARPSVICHTTVTALKDVPFSLCQSVGVGQNTDIQQIAAKNFTDTSLMYPEDTCKSGPSTNTQSGLFNTPPPTPPDLNQDFSGFQLLVDVALKRAAEMELQAKLTA

SEQ ID NO: 809959 - protein, 175 aa, Homo sapiens
MRKDGKDPNQFTISRRGAKISETSSVESVMGIKNFMPALEETPFHSCTAGPNPTLGRPLSPKPSSPGSVLARPSVICHTTVTALKDVPFSLCQSVGVGQNTDIQQIAAKNFTDTSLMYPEDTCKSGPSTNTQSGLFNTPPPTPPDLNQDFSGFQLLVDVALKRAAEMELQAKLTA

SEQ ID NO: 809960 - protein, 320 aa, Homo sapiens
MVLAQSRVSAGVGSPHCSGSGGGGSDSFPWPASHPGNPQCSFSTAFLASPRLSRGTLAYLPPAPWSSLATPSALLGSSCAPPPPPARCPQPRALSPELGTKLGPAGRIGGNFRGPHPRAHRVQLLGADSWKQGKVLLQHLAVRLRMRKDGKDPNQFTISRRGAKISETSSVESVMGIKNFMPALEETPFHSCTAGPNPTLGRPLSPKPSSPGSVLARPSVICHTTVTALKDVPFSLCQSVGVGQNTDIQQIAAKNFTDTSLMYPEDTCKSGPSTNTQSGLFNTPPPTPPDLNQDFSGFQLLVDVALKRAAEMELQAKLTA

SEQ ID NO: 809961 - protein, 360 aa, Homo sapiens
MVTQILGAMESQVGGGPAGPALPNGPLLGTNGATDDSKTNLIVNYLPQNMTQDEFKSLFGSIGDIESCKLVRDKITGQSLGYGFVNYSDPNDADKAINTLNGLKLQTKTIKVSYARPSSASIRDANLYVSGLPKTMSQKEMEQLFSQYGRIITSRILVDQVTGVSRGVGFIRFDKRIEAEEAIKGLNGQKPLGAAEPITVKFANNPSQKTGQALLTHLYQSSARRYAGPLHHQTQRFRLDNLLNMAYGVKRFSPIAIDGMSGLAGVGLSGGAAGAGWCIFVYNLSPEADESVLWQLFGPFGAVTNVKVIRDFTTNKCKGFGFVTMTNYDEAAMAIASLNGYRLGERVLQVSFKTSKQHKA

SEQ ID NO: 809962 - protein, 367 aa, Homo sapiens
MVTQILGAMESQVGGGPAGPALPNGPLLGTNGATDDSKTNLIVNYLPQNMTQDEFKSLFGSIGDIESCKLVRDKITGQSLGYGFVNYSDPNDADKAINTLNGLKLQTKTIKVSYARPSSASIRDANLYVSGLPKTMSQKEMEQLFSQYGRIITSRILVDQVTGVSRGVGFIRFDKRIEAEEAIKGLNGQKPLGAAEPITVKFANNPSQKTGQALLTHLYQSSARRYAGPLHHQTQRFRLDNLLNMAYGVKSPLSLIARFSPIAIDGMSGLAGVGLSGGAAGAGWCIFVYNLSPEADESVLWQLFGPFGAVTNVKVIRDFTTNKCKGFGFVTMTNYDEAAMAIASLNGYRLGERVLQVSFKTSKQHKA

SEQ ID NO: 809963 - protein, 367 aa, Homo sapiens; identical to SEQ ID NO: 809962

SEQ ID NO: 809964 - protein, 350 aa, Homo sapiens
MVTQILGAMESQVGGGPAGPALPNGPLLGTNGATDDSKTNLIVNYLPQNMTQDEFKSLFGSIGDIESCKLVRDKITDKAINTLNGLKLQTKTIKVSYARPSSASIRDANLYVSGLPKTMSQKEMEQLFSQYGRIITSRILVDQVTGVSRGVGFIRFDKRIEAEEAIKGLNGQKPLGAAEPITVKFANNPSQKTGQALLTHLYQSSARRYAGPLHHQTQRFRLDNLLNMAYGVKSPLSLIARFSPIAIDGMSGLAGVGLSGGAAGAGWCIFVYNLSPEADESVLWQLFGPFGAVTNVKVIRDFTTNKCKGFGFVTMTNYDEAAMAIASLNGYRLGERVLQVSFKTSKQHKA

SEQ ID NO: 809965 - protein, 135 aa, Homo sapiens
APPHVTPTAPWPLIGRSWQSRASRAPGSMQPAPCGCRVLGNSGSACKAVVSRNENEGRPGIGSPKREQHGLSRWLMPVFPALWEAKAGRSLEPRSLRPSWTSLQASGKQAIVWQRPRWQGTKGGFWPTASEDLRP

SEQ ID NO: 809966 - protein, 243 aa, Homo sapiens
RGGRRLLGGSAAPGPRAAMLGLDACELGAQLLELLRLALCARVLLADKEGGPPAVDEVLDEAVPEYRAPGRKSLLEIRQLDPDDRSLAKYKRVLLGPLPPAVDPSLPNVQVTRLTLLSEQAPGPVVMDLTGDLAVLKDQVFVLKEGVDYRVKISFKVHREIVSGLKCLHHTYRRGLRVDKTVYMVGSYGPSAQEYEFVTPVEEAPRGALVRGPYLVVSLFTDDDRTHHLSWEWGLCICQDWKD

SEQ ID NO: 809967 - protein, 176 aa, Homo sapiens
MRLCPSTGRRGGRASWRSGSWTRTTGAWPSTSGCCWGPCHRPWVTRLTLLSEQAPGPVVMDLTGDLAVLKDQVFVLKEGVDYRVKISFKVHREIVSGLKCLHHTYRRGLRVDKTVYMVGSYGPSAQEYEFVTPVEEAPRGALVRGPYLVVSLFTDDDRTHHLSWEWGLCICQDWKD

SEQ ID NO: 809968 - protein, 227 aa, Homo sapiens
AAPTPRLGSGRGGGLHPGSSPVGKGPVLLADKEGGPPAVDEVLDEAVPEYRAPGRKSLLEIRQLDPDDRSLAKYKRVLLGPLPPAVDPSLPNVQVTRLTLLSEQAPGPVVMDLTGDLAVLKDQVFVLKEGVDYRVKISFKVHREIVSGLKCLHHTYRRGLRVDKTVYMVGSYGPSAQEYEFVTPVEEAPRGALVRGPYLVVSLFTDDDRTHHLSWEWGLCICQDWKD

SEQ ID NO: 809969 - protein, 328 aa, Homo sapiens
NFLLTPPAPTTSSCFPSMRQRADRRSMVSTSGAATASSAAGPSRGAAHSPSSAPHASRHRPPFSSRATGLLQQRQHCVHHCTQLCPRVQTPCLPPPPAPATELHSYLQQGGERGLLDTTPVQGSRLAKNVQLTENEIRGLCLKSREIFLDQPILLELEAPLKICGDIYTATYYEPSCRLIELWPRFPPESNYLFLGDYVGQEAKQFLGDHLPACWPYKIKVPRRTLFLLRGNHECARIPPRSMGYVRMQCKEDATTIHTCWQQPVQLTLLSTCTCPIRGPLAGRITILLGCQRRACSPGNCSSTWSQTQTGLHAGAHDASYTVRLLCY

SEQ ID NO: 809970 - protein, 357 aa, Homo sapiens
PYQSRKPAVRALTSPQSQPPTPGHLGPRVPPALSPPPRGSDKMYQVPLPLDRDGTLVRLRFTMVALVTVCCPLVAFLFCILWSLLFHFKETTATHCGATPCRMFSAASQPLDPDGTLFRLRFTAMVWWAITFPVFGFFFCIIWSLVFHFEYTVATDCGVPNYLPSVSSAIGGEVPQRYVWRFCIGLHSAPRFLVAFAYWNHYLSCTSPCSCYRPLCRLNFGLNVVENLALLVLTYVSSSEDFTIHENAFIVFIASSLGHMLLTCILWRLTKKHTVSQEDRKSYSWKQRLFIINFISFFSALAVYFRHNMYCEAGVYTIFAILEYTVVLTNMAFHMTAWWDFGNKELLITSQPEEKRF

SEQ ID NO: 809971 - protein, 311 aa, Homo sapiens
MARLGSTGGVSGRVVTQHRDSAPFLGAARLGLRELGPIRGTAPEWHGRWNAAERSDKMYQVPLPLDRDGTLVRLRFTMVALVTVCCPLVAFLFCILWSLLFHFKETTATHCGVPNYLPSVSSAIGGEVPQRYVWRFCIGLHSAPRFLVAFAYWNHYLSCTSPCSCYRPLCRLNFGLNVVENLALLVLTYVSSSEDFTIHENAFIVFIASSLGHMLLTCILWRLTKKHTVSQEDRKSYSWKQRLFIINFISFFSALAVYFRHNMYCEAGVYTIFAILEYTVVLTNMAFHMTAWWDFGNKELLITSQPEEKRF

SEQ ID NO: 809972 - protein, 231 aa, Homo sapiens
MLLHKSQDSWGMRIQHFGPRTWKERSFGRGMGTSEGGLLGRGGAGAEARVILSDGEKVLHMGGAGRGRCPDRSQLSVPNYLPSVSSAIGGEVPQRYVWRFCIGLHSAPRFLVAFAYWNHYLSCTSPCSCYRPLCRLNFGLNVVENLALLVLTYVSSSEDFSGCLDEGGVGKCSLRGRACPYHIRTFLLRGVGTPCNVAPNPLSLQPSTKMLSLCSLPHPSGTCSSPAFSGG

SEQ ID NO: 809973 - protein, 294 aa, Homo sapiens
MVDGTQLRGLTRCTRSHYHWIGMGPWYGSASPWWPWSRSAVHLSPSSSASSGPCSSTSRRQRPHTVGTEASIGVPGIKMDGGDAQEHGHFLRLPQVPNYLPSVSSAIGGEVPQRYVWRFCIGLHSAPRFLVAFAYWNHYLSCTSPCSCYRPLCRLNFGLNVVENLALLVLTYVSSSEDFTIHENAFIVFIASSLGHMLLTCILWRLTKKHTVSQEDRKSYSWKQRLFIINFISFFSALAVYFRHNMYCEAGVYTIFAILEYTVVLTNMAFHMTAWWDFGNKELLITSQPEEKRF

SEQ ID NO: 809974 - protein, 161 aa, Homo sapiens
MVDGTQLRGAQLPALGELSHRRGGAPALRVAFLHRPALGASLLGGLRLLEPLPQLHLPVFLLSPALPPQLRPQCRGEPRVASAHLCLLLRGLHHPRKCFHCVHCLIPRAHAPHLHSLAVDQEAHSKSGGSQVLQLETAALHHQLHLLLLGAGCLLSAQHVL

SEQ ID NO: 809975 - protein, 277 aa, Homo sapiens
RTHASGTAPEWHGRWNAAERSDKMYQVPLPLDRDGTLVRLRFTMVALVTVCCPLVAFLFCILWSLLFHFKETTATHCGVPNYLPSVSSAIGGEVPQRYVWRFCIGLHSAPRFLVAFAYWNHYLSCTSPCSCYRPLCRLNFGLNVVENLALLVLTYVSSSEDFTIHENAFIVFIASSLGHMLLTCILWRLTKKHTVSQEDRKSYSWKQRLFIINFISFFSALAVYFRHNMYCEAGVYTIFAILEYTVVLTNMAFHMTAWWDFGNKELLITSQPEEKRF

SEQ ID NO: 809976 - protein, 234 aa, Homo sapiens
PYQSRKPAVRALTSPQSQPPTPGHLGPRVPPALSPPPRGQVPVCGGDGEGATMLLHKSQDSWGMRIQHFGPRTWKERSFGRGAQLPALGELSHRRGGAPALRVAFLHRPALGASLLGGLRLLEPLPQLHLPVFLLSPALPPQLRPQCRGEPRVASAHLCLLLRGLHHPRKCFHCVHCLIPRAHAPHLHSLAVDQEAHSKSGGSQVLQLETAALHHQLHLLLLGAGCLLSAQHVL

SEQ ID NO: 809977 - protein, 296 aa, Homo sapiens
PYQSRKPAVRALTSPQSQPPTPGHLGPRVPPALSPPPRGSDKMYQVPLPLDRDGTLVRLRFTMVALVTVCCPLVAFLFCILWSLLFHFKETTATHCGVPNYLPSVSSAIGGEVPQRYVWRFCIGLHSAPRFLVAFAYWNHYLSCTSPCSCYRPLCRLNFGLNVVENLALLVLTYVSSSEDFTIHENAFIVFIASSLGHMLLTCILWRLTKKHTVSQEDRKSYSWKQRLFIINFISFFSALAVYFRHNMYCEAGVYTIFAILEYTVVLTNMAFHMTAWWDFGNKELLITSQPEEKRF

SEQ ID NO: 809978 - protein, 211 aa, Homo sapiens
MVEMHKNMVISLDYPRQVPVCGGDGEGATMLLHKSQDSWGMRIQHFGPRTWKERSFGRGAQLPALGELSHRRGGAPALRVAFLHRPALGASLLGGLRLLEPLPQLHLPVFLLSPALPPQLRPQCRGEPRVASAHLCLLLRGLHHPRKCFHCVHCLIPRAHAPHLHSLAVDQEAHSKSGGSQVLQLETAALHHQLHLLLLGAGCLLSAQHVL

SEQ ID NO: 809979 - protein, 255 aa, Homo sapiens
MFSAASQPLDPDGTLFRLRFTAMVWWAITFPVFGFFFCIIWSLVFHFEYTVATDCGVPNYLPSVSSAIGGEVPQRYVWRFCIGLHSAPRFLVAFAYWNHYLSCTSPCSCYRPLCRLNFGLNVVENLALLVLTYVSSSEDFTIHENAFIVFIASSLGHMLLTCILWRLTKKHTVSQEDRKSYSWKQRLFIINFISFFSALAVYFRHNMYCEAGVYTIFAILEYTVVLTNMAFHMTAWWDFGNKELLITSQPEEKRF

SEQ ID NO: 809980 - protein, 308 aa, Homo sapiens
MARLGSTGGVSGRVVTQHRDSAPFLGAARLGLRELGPIRGTAPEWHGRWNAAERSDKMYQVPLPLDRDGTLVRLRFTMVALVTVCCPLVAFLFCILWSLLFHFKETTATHCGVPNYLPSVSSAIGGEVPQRYVWRFCIGLHSAPRFLVAFAYWNHYLSCTSPCSCYRPLCRLNFGLNVVENLALLVLTYVSSSEDFTIHENAFIVFIASSLGHMLLTCILWRLTKKHTVSQEEVRSIPSGGSKAAQKKIKDICPQDSGKIASPTAGNSGSSSSTSSPSSRRWLSTFGTTCIVRLECTPSLPSWSTLLS

SEQ ID NO: 809981 - protein, 138 aa, Homo sapiens
MARLGSTGGVSGRVVTQHRDSAPFLGAARLGLRELGPIRGTAPEWHGRWNAAERSDKMYQVPLPLDRDGTLVRLRFTMVALVTVCCPLVAFLFCILWSLLFHFKETTATHCGPSTKMLSLCSLPHPSGTCSSPAFSGG

SEQ ID NO: 809982 - protein, 331 aa, Homo sapiens
MGPWYGSASPWWPWSRSAVHLSPSSSASSGPCSSTSRRQRPHTVGQVPVCGGDGEGATMLLHKSQDSWGMRIQHFGPRTWKERSFGRGAQLPALGELSHRRGGAPALRVAFLHRPALGASLLGGLRLLEPLPQLHLPVFLLSPALPPQLRPQCRGEPRVASAHLCLLLRGLQWVPGGGRSGEVFPEGTGLPLPHSDLPTSWCGHSLQCGSQSSFPPAIHENAFIVFIASSLGHMLLTCILWRLTKKHTVSQEDRKSYSWKQRLFIINFISFFSALAVYFRHNMYCEAGVYTIFAILEYTVVLTNMAFHMTAWWDFGNKELLITSQPEEKRF

SEQ ID NO: 809983 - protein, 135 aa, Homo sapiens
  misc_feature (1)..(1): Xaa can be any naturally occurring amino acid
XGPTRPGRPQNGMVDGTQLRAIHENAFIVFIASSLGHMLLTCILWRLTKKHTVSQEDRKSYSWKQRLFIINFISFFSALAVYFRHNMYCEAGVYTIFAILEYTVVLTNMAFHMTAWWDFGNKELLITSQPEEKRF

SEQ ID NO: 809984 - protein, 137 aa, Homo sapiens
MARLGSTGGVSGRVVTQHRDSAPFLGAARLGLRELGPIRGTAPEWHAWNAAERSDKMYQVPLPLDRDGTLVRLRFTMVALVTVCCPLVAFLFCILWSLLFHFKETTATHCGPSTKMLSLCSLPHPSGTCSSPAFSGG

SEQ ID NO: 809985 - protein, 265 aa, Homo sapiens
MARLGSTGGVSGRVVTQHRDSAPFLGAARLGLRELGPIRGTAPEWHAWNAAERSDKMYQVPLPLDRDGTLVRLRFTMVALVTVCCPLVAFLFCILWSLLFHFKETTATHCGVPNYLPSVSSAIGGEVPQRYVWRFCIGLHSAPRFLVAFAYWNHYLSCTSPCSCYRPLCRLNFGLNVVENLALLVLTYVSSSEDFTIHENAFIVFIASSLGHMLLTCILWRLTKKHTVSQEEVRSIPSGGSKAAQKKIKDICPQDSGNGEVGTEF

SEQ ID NO: 809986 - protein, 193 aa, Homo sapiens
ALPIAKTRRSRSDQPAEPAPDPGPPGPPGSAGTLATTAWVPNYLPSVSSAIGGEVPQRYVWRFCIGLHSAPRFLVAFAYWNHYLSCTSPCSCYRPLCRLNFGLNVVENLALLVLTYVSSSEDFTIHENAFIVFIASSLGHMLLTCILWRLTKKHTVSQEEVRSIPSGGSKAAQKKIKDICPQDSGNGEVGTEF

SEQ ID NO: 809987 - protein, 197 aa, Homo sapiens
MVPNYLPSVSSAIGGEVPQRYVWRFCIGLHSAPRFLVAFAYWNHYLSCTSPCSCYRPLCRLNFGLNVVENLALLVLTYVSSSEDFTIHENAFIVFIASSLGHMLLTCILWRLTKKHTVSQEEVRSIPSGGSKAAQKKIKDICPQDSGKIASPTAGNSGSSSSTSSPSSRRWLSTFGTTCIVRLECTPSLPSWSTLLS

SEQ ID NO: 809988 - protein, 120 aa, Homo sapiens
HEDGTQLRAIHENAFIVFIASSLGHMLLTCILWRLTKKHTVSQEEVRSIPSGGSKAAQKKIKDICPQDSGKIASPTAGNSGSSSSTSSPSSRRWLSTFGTTCIVRLECTPSLPSWSTLLS

SEQ ID NO: 809989 - protein, 311 aa, Homo sapiens; identical to SEQ ID NO: 809971

SEQ ID NO: 809990 - protein, 311 aa, Homo sapiens; identical to SEQ ID NO: 809971

SEQ ID NO: 809991 - protein, 311 aa, Homo sapiens; identical to SEQ ID NO: 809971

SEQ ID NO: 809992 - protein, 138 aa, Homo sapiens; identical to SEQ ID NO: 809981

SEQ ID NO: 809993 - protein, 251 aa, Homo sapiens
RVTVKGAAMARLWGALSLWPLWAAVPWGGAAAVGVRACSSTAAPDGVEGPALRRSYWRHLRRLVLGPPEPPFSHVCQVGDPVLRGVAAPVERAQLGGPELQRLTQRLVQVMRRRRCVGLSAPQLGVPRQVLALELPEALCRECPPRQRALRQMEPFPLRVFVNPSLRVLDSRLVTFPEGCESVAGFLACVPRFQAVQISGLDPNGEQVVWQASGWAARIIQHEMDHLQGCLFIDKMDSRTFTNVYWMKVND

SEQ ID NO: 809994 - protein, 85 aa, Homo sapiens
  misc_feature (4)..(4): Xaa can be any naturally occurring amino acid
  misc_feature (32)..(32): Xaa can be any naturally occurring amino acid
GKRXQPPPTHPHPTPTPNPPPSPPTHPPLPPXRGLDPNGEQVVWQASGWAARIIQHEMDHLQGCLFIDKMDSRTFTNVYWMKVND

SEQ ID NO: 809995 - protein, 631 aa, Homo sapiens
SSESAPLVVRKGSDVVAGKMATAATIPSVATATAAALGEVEDEGLLASLFRDRFPEAQWRERPDVGRYLRELSGSGLERLRREPERLAEERAQLLQQTRDLAFANYKTFIRGAECTERIHRLFGDVEASLGRLLDRLPSFQQSCRNFVKEAEEISSNRRMNSLTLNRHTEILEILEIPQLMDTCVRNSYYEEALELAAYVRRLERKYSSIPVIQGIVNEVRQSMQLMLSQLIQQLRTNIQLPACLRVIGYLRRMDVFTEAELRVKFLQARDAWLRSILTAIPNDDPYFHITKTIEASRVHLFDIITQYRAIFSDEDPLLPPAMGEHTVNESAIFHGWVLQKVSQFLQVLETDLYRGIGGHLDSLLGQCMYFGLSFSRVGADFRGQLAPVFQRVAISTFQKAIQETVEKFQEEMNSYMLISAPAILGTSNMPAAVPATQPGTLQPPMVLLDFPPLACFLNNILVAFNDLRLCCPVALAQDVTGALEDALAKVTKIILAFHRAEEAAFSSGEQELFVQFCTVFLEDLVPYLNRCLQVLFPPAQIAQTLGIPPTQLSKYGNLGHVNIGAIQEPLAFILPKRETLFTLDDQALGPELTAPAPEPPAEEPRLEPAGPACPEGGRAETQAEPPSVGP

SEQ ID NO: 809996 - protein, 472 aa, Homo sapiens
MNSLTLNRHTEILEILEIPQLMDTCVRNSYYEEALELAAYVRRLERKYSSIPVIQGIVNEVRQSMQLMLSQLIQQLRTNIQLPACLRVIGYLRRMDVFTEAELRVKFLQARDAWLRSILTAIPNDDPYFHITKTIEASRVHLFDIITQYRAIFSDEDPLLPPAMGEHTVNESAIFHGWVLQKVSQFLQVLETDLYRGIGGHLDSLLGQCMYFGLSFSRVGADFRGQLAPVFQRVAISTFQKAIQETVEKFQEEMNSYMLISAPAILGTSNMPAAVPATQPGTLQPPMVLLDFPPLACFLNNILVAFNDLRLCCPVALAQDVTGALEDALAKVTKIILAFHRAEEAAFSSGEQELFVQFCTVFLEDLVPYLNRCLQVLFPPAQIAQTLGIPPTQLSKYGNLGHVNIGAIQEPLAFILPKRETLFTLDDQALGPELTAPAPEPPAEEPRLEPAGPACPEGGRAETQAEPPSVGP

SEQ ID NO: 809997 - protein, 537 aa, Homo sapiens
SSESAPLVVRKGSDVVAGKMATAATIPSVATATAAALGEVEDEGLLASLFRDRFPEAQWRERPDVGRYLRELSGSGLERLRREPERLAEERAQLLQQTRDLAFANYKTFIRGAECTERIHRLFGDVEASLGRLLDRLPSFQQSCRNFVKEAEEISSNRRMNSLTLNRHTEILEILEIPQLMDTCVRNSYYEEALELAAYVRRLERKYSSIPVIQGIVNEVRQSMQLMLSQLIQQLRTNIQLPACLRVIGYLRRMDVFTEAELRVKFLQARDAWLRSILTAIPNDDPYFHITKTIEASRVHLFDIITQYRAIFSDEDPLLPPAMGEHTVNESAIFHGWVLQKVSQFLQVLETDLYRGIGGHLDSLLGQCMYFGLSFSRVGADFRGQLAPVFQRVAISTFQKAIQETVEKFQEEMNSYMLISAPAILGTSNMPAAVPATQPGTLQPPMVLLDFPPLACFLNNILVAFNDLRLCCPVALAQDVTGALEDALAKGWTPMENRWCGRRAGGQPASSSTRWTTCRAACLLTKWTAGRSQTSIG

SEQ ID NO: 809998 - protein, 472 aa, Homo sapiens; identical to SEQ ID NO: 809996

SEQ ID NO: 809999 - protein, 553 aa, Homo sapiens
SSESAPLVVRKGSDVVAGKMATAATIPSVATATAAALGEVEDEGLLASLFRDRFPEAQWRERPDVGRYLRELSGSGLERLRREPERLAEERAQLLQQTRDLAFANYKTFIRGAECTERIHRLFGDVEASLGRLLDRLPSFQQSCRNFVKEAEEISSNRRMNSLTLNRHTEILEILEIPQLMDTCVRNSYYEEALELAAYVRRLERKYSSIPVIQGIVNEVRQSMQLMLSQLIQQLRTNIQLPACLRVIGYLRRMDVFTEAELRVKFLQARDAWLRSILTAIPNDDPYFHITKTIEASRVHLFDIITQYRAIFSDEDPLLPPAMGEHTVNESAIFHGWVLQKVSQFLQVLETDLYRGIGGHLDSLLGQCMYFGLSFSRVGADFRGQLAPVFQRVAISTFQKAIQETVEKFQEEMNSYMLISAPAILGTSNMPAAVPATQPGTLQPPMVLLDFPPLACFLNNILVAFNDLRLCCPVALAQDVTGALEDALAKVTKIILAFHRAEEAAFSSGEQELFVQFCTVFLEDLVPYLNRCLQVLFPPAQIAQTLGKRMKIL

SEQ ID NO: 810000 - protein, 553 aa, Homo sapiens; identical to SEQ ID NO: 809999

SEQ ID NO: 810001 - protein, 505 aa, Homo sapiens
SSESAPLVVRKGSDVVAGKMATAATIPSVATATAAALGEVEDEGLLASLFRDRFPEAQWRERPDVGRYLRELSGSGLERLRREPERLAEERAQLLQQTRDLAFANYKTFIRGAECTERIHRLFGDVEASLGRLLDRLPSFQQSCRNFVKEAEEISSNRRMNSLTLNRHTEILEILEIPQLMDTCVRNSYYEEALELAAYVRRLERKYSSIPVIQGIVNEVRQSMQLMLSQLIQQLRTNIQLPACLRVIGYLRRMDVFTEAELRVKFLQARDAWLRSILTAIPNDDPYFHITKTIEASRVHLFDIITQYRAIFSDEDPLLPPAMGEHTVNESAIFHGWVLQKVSQFLQVLETDLYRGIGGHLDSLLGQCMYFGLSFSRVGADFRGQLAPVFQRVAISTFQKAIQETVEKFQEEMNSYMLISAPAILGTSNMPAAVPATQPGTLQPPMVLLDFPPLACFLNNILVAFNDLRLCCPVALAQDVTGALEDALAKVSTFCWFSATLGLLW

SEQ ID NO: 810002 - protein, 424 aa, Homo sapiens
SSESAPLVVRKGSDVVAGKMATAATIPSVATATAAALGEVEDEGLLASLFRDRFPEAQWRERPDVGRYLRELSGSGLERLRREPERLAEERAQLLQQTRDLAFANYKTFIRGAECTERIHRLFGDVEASLGRLLDRLPSFQQSCRNFVKEAEEISSNRRMNSLTLNRHTEILEILEIPQLMDTCVRNSYYEEALELAAYVRRLERKYSSIPVIQGIVNEVRQSMQLMLSQLIQQLRTNIQLPACLRVIGYLRRMDVFTEAELRVKFLQARDAWLRSILTAIPNDDPYFHITKTIEASRVHLFDIITQYRAIFSDEDPLLPPAMGEHTVNESAIFHGWVLQKVSQFLQVLETDLYRGIGGHLDSLLGQCMYFGLSFSRVGADFRGQLAPVFQRVAISTFQKANLTWHQLGWLAYDRKLDCQGMAD

SEQ ID NO: 810003 - protein, 273 aa, Homo sapiens
SSESAPLVVRKGSDVVAGKMATAATIPSVATATAAALGEVEDEGLLASLFRDRFPEAQWRERPDVGRYLRELSGSGLERLRREPERLAEERAQLLQQTRDLAFANYKTFIRGAECTERIHRLFGDVEASLGRLLDRLPSFQQSCRNFVKEAEEISSNRRMNSLTLNRHTEILEILEIPQLMDTCVRNSYYEEALELAAYVRRLERKYSSIPVIQGIVNEVRQSMQLMLSQLIQQLRTNIQLPACLRVIGYLRRMDVFTIAQVKQLLTLLPKVL

SEQ ID NO: 810004 - protein, 109 aa, Homo sapiens
MTGSFLRPPKKLSRCQHCASCTACRTGTSGGIPSPSGWVQAVPLVPWICNSRRKIMSQHCGKMSLCPSDQSLRLGREVKLETAEWIFSSRSTFKENKGFCDQYFMSNIL

SEQ ID NO: 810005 - protein, 79 aa, Homo sapiens
VNATSSYSHLRAVTETVSSVPPLQPFNARLPDRITCSVPAANWGGPMAVTDKGCGVRGQWARASHAACTSAGSESQRPP

SEQ ID NO: 810006 - protein, 79 aa, Homo sapiens; identical to SEQ ID NO: 810005

SEQ ID NO: 810007 - protein, 79 aa, Homo sapiens; identical to SEQ ID NO: 810005

SEQ ID NO: 810008 - protein, 105 aa, Homo sapiens
MCWIHTLEKQEIRLPEKRAVYFYRRVHPHRWTNVSGEFSHTQSRRCGRPDAQDGHSAPPSSPPLLASRVAASTRETIVPVEAARMSVIYAPSCSCKRTRASAGPT

SEQ ID NO: 810009 - protein, 79 aa, Homo sapiens; identical to SEQ ID NO: 810005

SEQ ID NO: 810010 - protein, 79 aa, Homo sapiens; identical to SEQ ID NO: 810005

SEQ ID NO: 810011 - protein, 386 aa, Homo sapiens
APPTTLPNGKSEGSVRLVGGANLCQGRVEILHSGLWGTVCDDDWGLPDAAVVCRQLGCGAAMAATTNAFFGYGTGHILLDNVHCEGGEPRLAACQSLGWGVHNCGHHEDAGALCAGLGPPTLTALPSSATREDWAWQTDPSATGVGPQPSRETALLTTAAWAAGKKSGRLRLVGGPGPCRGRVEVLHAGGWGTVCDDDWDFADARVAAAKRAAGLRWALRDEARLSDCFHLGWGQHNCGHHEDAGALCAGEADSEGPEELGLQVQQDGSETTRVPTPRPRDGHLRLVNGAHRCEGRVELYLGQRWGTVCDDAWDLRAAGVLCRQLGCGQALAAPGEAHFGPGRGPILLDNVKCRGEESALLLCSHIRWDAHNCDHSEDASVLCQPS

SEQ ID NO: 810012 - protein, 190 aa, Homo sapiens
MTGTLRTRAWPAAKRAAGLRWALRDEARLSDCFHLGWGQHNCGHHEDAGALCAGEADSEGPEELGLQVQQDGSETTRVPTPRPRDGHLRLVNGAHRCEGRVELYLGQRWGTVCDDAWDLRAAGVLCRQLGCGQALAAPGEAHFGPGRGPILLDNVKCRGEESALLLCSHIRWDAHNCDHSEDASVLCQPS

SEQ ID NO: 810013 - protein, 246 aa, Homo sapiens
APPTTLPNGKSEGSVRLVGGANLCQGRVEILHSGLWGTVCDDDWGLPDAAVVCRQLGCGAAMAATTNAFFGYGTGHILLDNVHCEGGEPRLAACQSLGWGVHNCGHHEDAGALCAGPEELGLQVQQDGSETTRVPTPRPRDGHLRLVNGAHRCEGRVELYLGQRWGTVCDDAWDLRAAGVLCRQLGCGQALAAPGEAHFGPGRGPILLDNVKCRGEESALLLCSHIRWDAHNCDHSEDASVLCQPS

SEQ ID NO: 810014 - protein, 100 aa, Homo sapiens
CDDDWDFADARVACREAGCGPALGATGLGHFGYGRGPVLLDNVGCAGTEARLSDCFHLGWGQHNCGHHEDAGALCAGEADSEGEADSGAAHCGVGGAGRR

SEQ ID NO: 810015 - protein, 515 aa, Homo sapiens
QIHITKQIFSIIWAESSLESGKGAAAENPNPKADITKYHFSKLGAQRGVIMSDVTIVKEGWVQKRGEYIKNWRPRYFLLKTDGSFIGYKEKPQDVDLPYPLNNFSVAKCQLMKTERPKPNTFIIRCLQWTTVIERTFHVDTPEEREEWTEAIQAVADRLQRQEEERMNCSPTSQIDNIGEEEMDASTTHHKRKTMNDFDYLKLLGKGTFGKVILVREKASGKYYAMKILKKEVIIAKDEVAHTLTESRVLKNTRHPFLTSLKYSFQTKDRLCFVMEYVNGGELFFHLSRERVFSEDRTRFYGAEIVSALDYLHSGKIVYRDLKLENLMLDKDGHIKITDFGLCKEGITDAATMKTFCGTPEYLAPEVLEDNDYGRAVDWWGLGVVMYEMMCGRLPFYNQDHEKLFELILMEDIKFPRTLSSDAKSLLSGLLIKDPNKRLGGGPDDAKEIMRHSFFSGVNWQDVYDKKLVPPFKPQVTSETDTRYFDEEFTAQTITITPPEKCQQSDCGMLGNWKK

SEQ ID NO: 810016 - protein, 161 aa, Homo sapiens
MGNFTHFYREEWTEAIQAVADRLQRQEEERMNCSPTSQIDNIGEEEMDASTTHHKRKTMNDFDYLKLLGKGTFGKVILVREKASGKYYAMKILKKEVIIAKDEVAHTLTESRVLKNTRHPFLTSLKYSFQTKDRLCFVMEYVNGGEMEFRSVVRLECSSTI

SEQ ID NO: 810017 - protein, 594 aa, Homo sapiens
MCGRLPFYNQDHEKLFELILMEDIKFPRTLSSDAKSLLSGLLIKDPNKRLGGGPDDAKEIMRHSFFSGVNWQDVYDKKAESSLESGKGAAAENPNPKADITKYHFSKLGAQRGVIMSDVTIVKEGWVQKRGEYIKNWRPRYFLLKTDGSFIGYKEKPQDVDLPYPLNNFSVAKCQLMKTERPKPNTFIIRCLQWTTVIERTFHVDTPEEREEWTEAIQAVADRLQRQEEERMNCSPTSQIDNIGEEEMDASTTHHKRKTMNDFDYLKLLGKGTFGKVILVREKASGKYYAMKILKKEVIIAKDEVAHTLTESRVLKNTRHPFLTSLKYSFQTKDRLCFVMEYVNGGELFFHLSRERVFSEDRTRFYGAEIVSALDYLHSGKIVYRDLKLENLMLDKDGHIKITDFGLCKEGITDAATMKTFCGTPEYLAPEVLEDNDYGRAVDWWGLGVVMYEMMCGRLPFYNQDHEKLFELILMEDIKFPRTLSSDAKSLLSGLLIKDPNKRLGGGPDDAKEIMRHSFFSGVNWQDVYDKKLVPPFKPQVTSETDTRYFDEEFTAQTITITPPEKYDEDGMDCMDNERRPHFPQFSYSASGRE

SEQ ID NO: 810018 - protein, 551 aa, Homo sapiens
MCGRLPFYNQDHEKLFELILMEDIKFPRTLSSDAKSLLSGLLIKDPNKRLGGGPDDAKEIMRHSFFSGVNWQDVYDKKAESSLESGKGAAAENPNPKADITKYHFSKLGAQRGVIMSDVTIVKEGWVQKRGEYIKNWRPRYFLLKTDGSFIGYKEKPQDVDLPYPLNNFSVAKCQLMKTERPKPNTFIIRCLQWTTVIERTFHVDTPEEREEWTEAIQAVADRLQRQEEERMNCSPTSQIDNIGEEEMDASTTHHKRKTMNDFDYLKLLGKGTFGKVILVREKASGKYYAMKILKKEVIIAKDEVAHTLTESRVLKNTRHPFLTSLKYSFQTKDRLCFVMEYVNGGELFFHLSRERVFSEDRTRFYGAEIVSALDYLHSGKIVYRDLKLENLMLDKDGHIKITDFGLCKEGITDAATMKTFCGTPEYLAPEVLEDNDYGRAVDWWGLGVVMYEMMCGRLPFYNQDHEKLFELILMEDIKFPRTLSSDAKSLLSGLLIKDPNKRLGGGPDDAKEIMRHSFFSGVNWQDVYDKKLVPPFKPQVTSWRKLAISA

SEQ ID NO: 810019 - protein, 580 aa, Homo sapiens
MCGRLPFYNQDHEKLFELILMEDIKFPRTLSSDAKSLLSGLLIKDPNKRLGGGPDDAKEIMRHSFFSGVNWQDVYDKKAESSLESGKGAAAENPNPKADITKYHFSKLGAQRGVIMSDVTIVKEGWVQKRGEYIKNWRPRYFLLKTDGSFIGYKEKPQDVDLPYPLNNFSVAKCQLMKTERPKPNTFIIRCLQWTTVIERTFHVDTPEEREEWTEAIQAVADRLQRQEEERMNCSPTSQIDNIGEEEMDASTTHHKRKTMNDFDYLKLLGKGTFGKVILVREKASGKYYAMKILKKEVIIAKDEVAHTLTESRVLKNTRHPFLTSLKYSFQTKDRLCFVMEYVNGGELFFHLSRERVFSEDRTRFYGAEIVSALDYLHSGKIVYRDLKLENLMLDKDGHIKITDFGLCKEGITDAATMKTFCGTPEYLAPEVLEDNDYGRAVDWWGLGVVMYEMMCGRLPFYNQDHEKLFELILMEDIKFPRTLSSDAKSLLSGLLIKDPNKRLGGGPDDAKEIMRHSFFSGVNWQDVYDKKLVPPFKPQVTSETDTRYFDEEFTAQTITITPPEKCQQSDCGMLGNWKK

SEQ ID NO: 810020 - protein, 362 aa, Homo sapiens
MCGRLPFYNQDHEKLFELILMEDIKFPRTLSSDAKSLLSGLLIKDPNKRLGGGPDDAKEIMRHSFFSGVNWQDVYDKKAESSLESGKGAAAENPNPKADITKYHFSKLGAQRGVIMSDVTIVKEGWVQKRGEYIKNWRPRYFLLKTDGSFIGYKEKPQDVDLPYPLNNFSVAKCQLMKTERPKPNTFIIRCLQWTTVIERTFHVDTPEEREEWTEAIQAVADRLQRQEEERMNCSPTSQIDNIGEEEMDASTTHHKRKTMNDFDYLKLLGKGTFGKVILVREKASGKYYAMKILKKEVIIAKDEVAHTLTESRVLKNTRHPFLTSLKYSFQTKDRLCFVMEYVNGGEMEFRSVVRLECSSTI

SEQ ID NO: 810021 - protein, 138 aa, Homo sapiens
MCGRLPFYNQDHEKLFELILMEDIKFPRTLSSDAKSLLSGLLIKDPNKRLGGGPDDAKEIMRHSFFSGVNWQDVYDKKAESSLESGKGAAAENPNPKADITKYHFSKLGAQRGVIMSDVTIVKEGWVQKRGKCSANQK

SEQ ID NO: 810022 - protein, 219 aa, Homo sapiens
MPRGRKSRRRRNARAAEENRNNRKIQASEASETPMAASVVASTPEDDLSGPEEDPSTPEEASTTPEEASSTAQAQKPSVPRSNFQGTKKSLLMSILALIFIMGNSAKEALVWKVLGKLGMQPGRQHSIFGDPKKIVTEEFVRRGYLIYKPVPRSSPVEYEFFWGPRAHVESSKLKVMHFVARVRNRCSKDWPCNYDWDSDDDAEVEAILNSGARGYSAP

SEQ ID NO: 810023 - protein, 219 aa, Homo sapiens; identical to SEQ ID NO: 810022

SEQ ID NO: 810024 - protein, 219 aa, Homo sapiens; identical to SEQ ID NO: 810022

SEQ ID NO: 810025 - protein, 190 aa, Homo sapiens
MREPQKRTATIASTPEDDLSGPEEDPSTPEEASTTPEEASSTAQAQKPSVPRSNFQGTKKSLLMSILALIFIMGNSAKEALVWKVLGKLGMQPGRQHSIFGDPKKIVTEEFVRRGYLIYKPVPRSSPVEYEFFWGPRAHVESSKLKVMHFVARVRNRCSKDWPCNYDWDSDDDAEVEAILNSGARGYSAP

SEQ ID NO: 810026 - protein, 134 aa, Homo sapiens
MSAEFLLMSILALIFIMGNSAKEALVWKVLGKLGMQPGRQHSIFGDPKKIVTEEFVRRGYLIYKPVPRSSPVEYEFFWGPRAHVESSKLKVMHFVARVRNRCSKDWPCNYDWDSDDDAEVEAILNSGARGYSAP

SEQ ID NO: 810027 - protein, 219 aa, Homo sapiens; identical to SEQ ID NO: 810022

SEQ ID NO: 810028 - protein, 106 aa, Homo sapiens
MRQVPQVPWGRNNGWPEPYYLAPAFCYRSFAVTNNRVSNSNTAATSSFPQCTSESTHTALRSQPFRFLFFPPTNPERKEIDLAAVLQYFYIIGQALPRPCLMQPMG

SEQ ID NO: 810029 - protein, 117 aa, Homo sapiens
  misc_feature (8)..(8): Xaa can be any naturally occurring amino acid
TTTKFAAXLELATSILTRMAAAAASRGVGAKLGLREIRIHLCQRSPGSQGVRDFIEKRYVELKKANPDLPILIRECSDVQPKLWARYAFGQETNVPLNNFSADQVTRALENVLSGKA

SEQ ID NO: 810030 - protein, 106 aa, Homo sapiens; identical to SEQ ID NO: 810028

SEQ ID NO: 810031 - protein, 106 aa, Homo sapiens; identical to SEQ ID NO: 810028

SEQ ID NO: 810032 - protein, 106 aa, Homo sapiens; identical to SEQ ID NO: 810028

SEQ ID NO: 810033 - protein, 106 aa, Homo sapiens; identical to SEQ ID NO: 810028

SEQ ID NO: 810034 - protein, 106 aa, Homo sapiens; identical to SEQ ID NO: 810028

SEQ ID NO: 810035 - protein, 106 aa, Homo sapiens; identical to SEQ ID NO: 810028

SEQ ID NO: 810036 - protein, 106 aa, Homo sapiens; identical to SEQ ID NO: 810028

SEQ ID NO: 810037 - protein, 117 aa, Homo sapiens; identical to SEQ ID NO: 810029
  misc_feature (8)..(8): Xaa can be any naturally occurring amino acid

SEQ ID NO: 810038 - protein, 106 aa, Homo sapiens; identical to SEQ ID NO: 810028

SEQ ID NO: 810039 - protein, 106 aa, Homo sapiens; identical to SEQ ID NO: 810028

SEQ ID NO: 810040 - protein, 106 aa, Homo sapiens; identical to SEQ ID NO: 810028

SEQ ID NO: 810041 - protein, 106 aa, Homo sapiens; identical to SEQ ID NO: 810028

SEQ ID NO: 810042 - protein, 107 aa, Homo sapiens
LGSDLPSSSSGVANGTGTRAGGRRPPPRGGSRPRCPALTSPAAPRRPRSCFLGGAWRRGPSRRSPLSASRTAAAARRTRRTRCTAALRMAAAAGTGRWAGAPAGRSW

SEQ ID NO: 810043 - protein, 559 aa, Homo sapiens
GRRAGPSRRRRHASPAAAAPGQWAGGTEGRRGRARRGDRASAVPSGRANMPRGFLVKRSKKSTPVSYRVRGGEDGDRALLLSPSCGGARAEPPAPSPVPGPLPPPPPAERAHAALAAALACAPGPQPPPQGPRAAHFGNPEAAHPAPLYSPTRPVSREHEKHKYFERSFNLGSPVSAESFPTPAALLGGGGGGGASGAGGGGTCGGDPLLFAPAELKMGTAFSAGAEAARGPGPGPPLPPAAALRPPGKRPPPPTAAEPPAKAVKAPGAKKPKAIRKLHFEDEVTTSPVLGLKIKEGPVEAPRGRAGGAARPLGEFICQLCKEEYADPFALAQHKCSRIVRVEYRCPECAKVFSCPANLASHRRWHKPRPAPAAARAPEPEAAARAEAREAPGGGSDRDTPSPGGVSESGSEDGLYECHHCAKKFRRQAYLRKHLLAHHQALQAKGAPLAPPAEDLLALYPGPDEKAPQEAAGDGEGAGVLGLSASAECHLCPVCGESFASKGAQERHLRLLHAAQVFPCKYCPATFYSSPGLTRHINKCHPSENRQVILLQVPVRPAC

SEQ ID NO: 810044 - protein, 202 aa, Homo sapiens
MALLTNLLPLCCLALLALPAQSCGPGRGPVGRRRYARKQLVPLLYKQFVPGVPERTLGASGPAEGRVARGSERFRDLVPNYNPDIIFKDEENSGADRLMTERCKERVNALAIAVMNMWPGVRLRVTEGWDEDGHHAQDSLHYEGRALDITTSDRDRNKYGLLARLAVEAGFDWVYYESRNHVHVSVKADNSLAVRAGGCFPG

SEQ ID NO: 810045 - protein, 118 aa, Homo sapiens
PNLRVHICVPSLIQDSREGPVSVYPTSLGAGSFEPIHPLPWHQAAGLGPTTHPTSSSSGSGGRGELGEHSRSRTEGLLRIQARQIGYSGVFSLNWAKSTLRSNSLITYVSGKVGMGGV

SEQ ID NO: 810046 - protein, 193 aa, Homo sapiens
MEQHFLGCVKRAWDSAEVAPEPQPPPIVSSEDRGPWPLPLYPVLGEYSLDSCDLGLLSSPCWRLPGVYWQNGLSPGVQSTLEPSTAKPTEFSWPGTQKQQEAPVEEVGQAEEPDRLRLQQLPWSSPLHPWDRQQDTEVCDSGCLLERRHPPALQPWRHLPGFSDCLEWILRVGFAAFSVLWACCSRICGAKQP

SEQ ID NO: 810047 - protein, 193 aa, Homo sapiens; identical to SEQ ID NO: 810046

SEQ ID NO: 810048 - protein, 193 aa, Homo sapiens; identical to SEQ ID NO: 810046

SEQ ID NO: 810049 - protein, 587 aa, Homo sapiens
RDAPSGGCFKMADVAGPSRPSAAAFWSRDFSDEEQSVVYVPGISAEGNVRSRHKLMSPKADVKLKTSRVTDASISMESLKGTGDSVDEQNSCRGEIKSASLKDLCLEDKRRIANLIKELARVSEEKEVTEERLKAEQESFEKKIRQLEEQNELIIKEREALQLQYRECQELLSLYQKYLSEQQEKLTMSLSELGAARMQEQQVSSRKSTLQCSSVELDGSYLSIARPQTYYQTKQRPKSAVQDSASESLIAFRNNSLKPVTLHHPKDDLDKIPSETTTCNCESPGRKPAVPTEKMPQEELHMKECPHLKPTPSQCCGHRLAADRVHDSHPTNMTPQHPKTHPESCSYCRLSWASLVHGGGALQPIETLKKQISEDRKQQLMLQKMELEIEKERLQHLLAQQETKLLLKQQQLHQSRLDYNCLLKSNCDGWLLGTSSSIKKHQDPPNSGENRKERKTVGFHSHMKDDAQWSCQKKDTCRPQRGTVTGVRKDASTSPMPTGSLKDFVTTASPSLQHTTSRYETSLLDLVQSLSPNSAPKPQRYPSREAGAWNHGTFRLSPLKSTRKKMGMHRTPEELEENQILEDIFFI

SEQ ID NO: 810050 - protein, 173 aa, Homo sapiens
RDAPSGGCFKMADVAGPSRPSAAAFWSRDFSDEEQSVVYVPGISAEGNVRSRHKLMSPKADVKLKTSRVTDASISMESLKGTGDSVDEQNSCRGEIKSASLKDLCLEDKRRIANLIKELARVSEEKEVTEERLKAEQESFEKKIRQLEEQNELIIKEREDILLKVLFFNVQEV

SEQ ID NO: 810051 - protein, 587 aa, Homo sapiens; identical to SEQ ID NO: 810049

SEQ ID NO: 810052 - protein, 129 aa, Homo sapiens
MPQEELHMKECPHLKPTPSQCCGHRLAADRVHDSHPTNMTPQHPKTHPESCSYCRLSWASLVHGGGALQPIETLKKQISEDRKQQLMLQKMELEIEKERLQHLLAQQETKLLLKQQQLHQSRLDYNCSE

SEQ ID NO: 810053 - protein, 457 aa, Homo sapiens
RDAPSGGCFKMADVAGPSRPSAAAFWSRDFSDEEQSVVYVPGISAEGNVRSRHKLMSPKADVKLKTSRVTDASISMESLKGTGDSVDEQNSCRGEIKSASLKDLCLEDKRRIANLIKELARVSEEKEVTEERLKAEQESFEKKIRQLEEQNELIIKEREALQLQYRECQELLSLYQKYLSEQQEKLTMSLSELGAARMQEQQVSSRKSTLQCSSVELDGSYLSIARPQTYYQTKQRPKSAVQDSASESLIAFRNNSLKPVTLHHPKDDLDKIPSETTTCNCESPGRKPAVPTEKMPQEELHMKECPHLKPTPSQCCGHRLAADRVHDSHPTNMTPQHPKTHPESCSYCRLSWASLVHGGGALQPIETLKKQISEDRKQQLMLQKMELEIEKERLQHLLAQQETKLLLKQQQLHQSRLDYNWLKAQALFKSRELVAEKQLTKPQELKLDMNGSDSGPR

SEQ ID NO: 810054 - protein, 209 aa, Homo sapiens
MLGALVWMLVAGFLLALPPSWAAGAPRAGRRPARPRGCADRPEELLEQLYGRLAAGVLSAFHHTLQLGPREQARNASCPAGGRPADRRFRPPTNLRSVSPWAYRISYDPARYPRYLPEAYCLCRGCLTGLFGEEDVRFRSAPVYMPTVVLRRTPACAGGRSVYTEAYVTIPVGCTCVPEPEKDADSINSSIDKQGAKLLLGPNDAPAGP

SEQ ID NO: 810055 - protein, 300 aa, Homo sapiens
MLGALVWMLVAGFLLALPPSWAAGAPRAGRRPARPRGCADRPEELLEQLYGRLAAGVLSAFHHTLQLGPREQARNASCPAGGRPADRRFRPPTNLRSVSPWAYSSVSITSESSLEDSSFVPGLSRATCHSLKPSFPRGQGHFCDPIRGENLMCFKNALVPSFCRAARRKCEDKRMTAHRRRGTGQNSARLLVRVGISYDPARYPRYLPEAYCLCRGCLTGLFGEEDVRFRSAPVYMPTVVLRRTPACAGGRSVYTEAYVTIPVGCTCVPEPEKDADSINSSIDKQGAKLLLGPNDAPAGP

SEQ ID NO: 810056 - protein, 202 aa, Homo sapiens
MLVAGFLLALPPSWAAGAPRAGRRPARPRGCADRPEELLEQLYGRLAAGVLSAFHHTLQLGPREQARNASCPAGGRPADRRFRPPTNLRSVSPWAYRISYDPARYPRYLPEAYCLCRGCLTGLFGEEDVRFRSAPVYMPTVVLRRTPACAGGRSVYTEAYVTIPVGCTCVPEPEKDADSINSSIDKQGAKLLLGPNDAPAGP

SEQ ID NO: 810057 - protein, 514 aa, Homo sapiens
MSISSDEVNFLVYRYLQESGFSHSAFTFGIESHISQSNINGALVPPAALISIIQKGLQYVEAEVSINEDGTLFDGRPIESLSLIDAVMPDVVQTRQQAYRDKLAQQQAAAAAAAAAAASQQGSAKNGENTANGEENGAHTIANNHTDMMEVDGDVEIPPNKAVVLRGHESEVFICAWNPVSDLLASGSGDSTARIWNLSENSTSGSTQLVLRHCIREGGQDVPSNKDVTSLDWNSEGTLLATGSYDGFARIWTKDGNLASTLGQHKGPIFALKWNKKGNFILSAGVDKTTIIWDAHTGEAKQQFPFHSAPALDVDWQSNNTFASCSTDMCIHVCKLGQDRPIKTFQGHTNEVNAIKWDPTGNLLASCSDDMTLKIWSMKQDNCVHDLQAHNKEIYTIKWSPTGPGTNNPNANLMLASASFDSTVRLWDVDRGICIHTLTKHQEPVYSVAFSPDGRYLASGSFDKCVHIWNTQTGALVHSYRGTGGIFEVCWNAAGDKVGASASDGSVCVLDLRK

SEQ ID NO: 810058 - protein, 514 aa, Homo sapiens; identical to SEQ ID NO: 810057

SEQ ID NO: 810059 - protein, 514 aa, Homo sapiens; identical to SEQ ID NO: 810057

SEQ ID NO: 810060 - protein, 514 aa, Homo sapiens; identical to SEQ ID NO: 810057

SEQ ID NO: 810061 - protein, 148 aa, Homo sapiens
MASTRPVLIWSMKQDNCVHDLQAHNKEIYTIKWSPTGPGTNNPNANLMLASASFDSTVRLWDVDRGICIHTLTKHQEPVYSVAFSPDGRYLASGSFDKCVHIWNTQTGALVHSYRGTGGIFEVCWNAAGDKVGASASDGSVCVLDLRK

SEQ ID NO: 810062 - protein, 514 aa, Homo sapiens; identical to SEQ ID NO: 810057

SEQ ID NO: 810063 - protein, 514 aa, Homo sapiens; identical to SEQ ID NO: 810057

SEQ ID NO: 810064 - protein, 331 aa, Homo sapiens
HEGERTVPVKIDKVRIFLLGLADNEAAIVQAESEETKERLFESMLSECRDAIQVVREELKPDQKQRDYILEGEPGKVSNLQYLHSYLTYIKLSTAIKRNENMAKGLQRALLQQQPEDDSKRSPRPQDLIRLYDIILQNLVELLQLPGLEEDKAFQKEIGLKTLVFKAYRCFFIAQSYVLVKKWSEALVLYDRVLKYANEVNSDAGAFKNSLKDLPDVQELITQVRSEKCSLQAAAILDANDAHQTETSSSQVKDNKPLVERFETFCLDPSLVTKQANLVHFPPGFQPIPCKPLFFDLALNHVAFPPLEDKLEQKTKSGLTGYIKGIFGFRS

SEQ ID NO: 810065 - protein, 127 aa, Homo sapiens
PPTTTKFAAASMQTTLIKQRPPPPKSRTISLWLNGLRHSAWTLPLSPSKPTLCTSHQASSPFPASLCSLTWPSTMWLSHPLRTSWNRRPRVASLDTSRASLDSGANQALPRGRGLVDAAANLVVVVD

SEQ ID NO: 810066 - protein, 287 aa, Homo sapiens
HEGERTVPVKIDKVRIFLLGLADNEAAIVQAESEETKERLFESMLSECRDAIQVVREELKPDQKQRDYILEGEPGKVSNLQYLHSYLTYIKLSTAIKRNENMAKGLQRALLQQQPEDDSKRSPRPQDLIRLYDIILQNLVELLQLPGLEEDKAFQKEIGLKTLVFKAYRCFFIAQSYVLVKKWSEALVLYDRVLKYANEVNSDAGAFKNSLKDLPDVQELITQVRSEKCSLQAAAILDANDAHQTETSSSQVKDNKPLVERFETFCLDPSLVTKQANLVHFPPGFQL

SEQ ID NO: 810067 - protein, 128 aa, Homo sapiens
REYTFSESYQDLPDVQELITQVRSEKCSLQAAAILDANDAHQTETSSSQVKDNKPLVERFETFCLDPSLVTKRHTAFMSCNTHHEDLQLQLLKPARPQAHREERTAPDALLEALDCILPPTRPTDKPP

SEQ ID NO: 810068 - protein, 331 aa, Homo sapiens; identical to SEQ ID NO: 810064

SEQ ID NO: 810069 - protein, 331 aa, Homo sapiens; identical to SEQ ID NO: 810064

SEQ ID NO: 810070 - protein, 331 aa, Homo sapiens; identical to SEQ ID NO: 810064

SEQ ID NO: 810071 - protein, 331 aa, Homo sapiens; identical to SEQ ID NO: 810064

SEQ ID NO: 810072 - protein, 893 aa, Homo sapiens
TTQPRPGRLFTRQALGIQGRLQKNQGTRDLLADARPHTRASGSHEVDGLRLGGAASGTRARRGAAVGTAQAPRQTPPTPPRRRRVAPRGSRRRGFQANMAVLLLLLRALRRGPGPGPRPLWGPGPAWSPGFPARPGRGRPYMASRPPGDLAEAGGRALQSLQLRLLTPTFEGINGLLLKQHLVQNPVRLWQLLGGTFYFNTSRLKQKNKEKDKSKGKAPEEDEEERRRRERDDQMYRERLRTLLVIAVVMSLLNALSTSGGSISWNDFVHEMLAKGEVQRVQVVPESDVVEVYLHPGAVVFGRPRLALMYRMQVANIDKFEEKLRAAEDELNIEAKDRIPVSYKRTGFFGNALYSVGMTAVGLAILWYVFRLAGMTGREGGFSAFNQLKMARFTIVDGKMGKGVSFKDVAGMHEAKLEVREFVDYLKSPERFLQLGAKVPKGALLLGPPGCGKTLLAKAVATEAQVPFLAMAGPEFVEVIGGLGAARVRSLFKEARARAPCIVYIDEIDAVGKKRSTTMSGFSNTEEEQTLNQLLVEMDGMGTTDHVIVLASTNRADILDGALMRPGRLDRHVFIDLPTLQERREIFEQHLKSLKLTQSSTFYSQRLAELTPGFSGADIANICNEAALHAAREGHTSVHTLNFEYAVERVLAGTAKKSKILSKEEQKVVAFHESGHALVGWMLEHTEAVMKVSITPRTNAALGFAQMLPRDQHLFTKEQLFERMCMALGGRASEALSFNEVTSGAQDDLRKVTRIAYSMVKQFGMAPGIGPISFPEAQEGLMGIGRRPFSQGLQQMMDHEARLLVAKAYRHTEKVLQDNLDKLQALANALLEKEVINYEDIEALIGPPPHGPKKMIAPQRWIDAQREKQDLGEEETEETQQPPLGGEEPTWPK

SEQ ID NO: 810073 - protein, 127 aa, Homo sapiens
MGTTDHVIVLASTNRADILDGALMRPGRLDRHVFIDLPTLQERREIFEQHLKSLKLTQSSTFYSQRLAELTPGFSGADIANICNEAALHAAREGHTSVHTLNFEYAVERVLAGTGGAPWVKALLSRA

SEQ ID NO: 810074 - protein, 298 aa, Homo sapiens
TTQPRPGRLFTRQALGIQGRLQKNQGTRDLLADARPHTRASGSHEVDGLRLGGAASGTRARRGAAVGTAQAPRQTPPTPPRRRRVAPRGSRRRGFQANMAVLLLLLRALRRGPGPGPRPLWGPGPAWSPGFPARPGRGRPYMASRPPGDLAEAGGRALQSLQLRLLTPTFEGINGLLLKQHLVQNPVRLWQLLGGTFYFNTSRLKQKNKEKDKSKGKAPEEDEESHSVAPAGVQWCDLSSMQPPPPGFKQFSCLSLRSSWDYRCSPPHPANFLFFVRLFVFETESRSVAQAGVQWHNL

SEQ ID NO: 810075 - protein, 86 aa, Homo sapiens
LEERLTCLGGLREDCGLACGGHCWEPVWLQDYSPPGPWTVGSDPCGHFAQWPSWLSFSPPCPPQRRLPGFAAWRCLPRLLAGLHEE

SEQ ID NO: 810076 - protein, 561 aa, Homo sapiens
TTQPRPGRLFTRQALGIQGRLQKNQGTRDLLADARPHTRASGSHEVDGLRLGGAASGTRARRGAAVGTAQAPRQTPPTPPRRRRVAPRGSRRRGFQANMAVLLLLLRALRRGPGPGPRPLWGPGPAWSPGFPARPGRGRPYMASRPPGDLAEAGGRALQSLQLRLLTPTFEGINGLLLKQHLVQNPVRLWQLLGGTFYFNTSRLKQKNKEKDKSKGKAPEEDEEERRRRERDDQMYRERLRTLLVIAVVMSLLNALSTSGGSISWNDFVHEMLAKGEVQRVQVVPESDVVEVYLHPGAVVFGRPRLALMYRMQVANIDKFEEKLRAAEDELNIEAKDRIPVSYKRTGFFGNALYSVGMTAVGLAILWYVFRLAGMTGREGGFSAFNQLKMARFTIVDGKMGKGVSFKDVAGMHEAKLEVREFVDYLKSPERFLQLGAKVPKGALLLGPPGCGKTLLAKAVATEAQVPFLAMAGPEFVEVIGGLGAARVRSLFKEARARAPCIVYIDEIDAVGKKRSTTMSGFSNTEEEQTLNQLLVEMDVFYAEIEELKLVYPYHGVLHSN

SEQ ID NO: 810077 - protein, 358 aa, Homo sapiens
MSPVSVAHVFVSPFCFSAGSEERRRRERDDQMYRERLRTLLVIAVVMSLLNALSTSGGSISWNDFVHEMLAKGEVQRVQVVPESDVVEVYLHPGAVVFGRPRLALMYRMQVANIDKFEEKLRAAEDELNIEAKDRIPVSYKRTGFFGNALYSVGMTAVGLAILWYVFRLAGMTGREGGFSAFNQLKMARFTIVDGKMGKGVSFKDVAGMHEAKLEVREFVDYLKSPERFLQLGAKVPKGALLLGPPGCGKTLLAKAVATEAQVPFLAMAGPEFVEVIGGLGAARVRSLFKEARARAPCIVYIDEIDAVGKKRSTTMSGFSNTEEEQTLNQLLVEMDVFYAEIEELKLVYPYHGVLHSN

SEQ ID NO: 810078 - protein, 667 aa, Homo sapiens
TTQPRPGRLFTRQALGIQGRLQKNQGTRDLLADARPHTRASGSHEVDGLRLGGAASGTRARRGAAVGTAQAPRQTPPTPPRRRRVAPRGSRRRGFQANMAVLLLLLRALRRGPGPGPRPLWGPGPAWSPGFPARPGRGRPYMASRPPGDLAEAGGRALQSLQLRLLTPTFEGINGLLLKQHLVQNPVRLWQLLGGTFYFNTSRLKQKNKEKDKSKGKAPEEDEEERRRRERDDQMYRERLRTLLVIAVVMSLLNALSTSGGSISWNDFVHEMLAKGEVQRVQVVPESDVVEVYLHPGAVVFGRPRLALMYRMQVANIDKFEEKLRAAEDELNIEAKDRIPVSYKRTGFFGNALYSVGMTAVGLAILWYVFRLAGMTGREGGFSAFNQLKMARFTIVDGKMGKGVSFKDVAGMHEAKLEVREFVDYLKSPERFLQLGAKVPKGALLLGPPGCGKTLLAKAVATEAQVPFLAMAGPEFVEVIGGLGAARVRSLFKEARARAPCIVYIDEIDAVGKKRSTTMSGFSNTEEEQTLNQLLVEMDGMGTTDHVIVLASTNRADILDGALMRPGRLDRHVFIDLPTLQERREIFEQHLKSLKLTQSSTFYSQRLAELTPGFSGADIANICNEAALHAAREGHTSVHTLNFEYAVERVLAGTGGAPWVKALLSRA

SEQ ID NO: 810079 - protein, 1131 aa, Homo sapiens
TTQPRPGRLFTRQALGIQGRLQKNQGTRDLLADARPHTRASGSHEVDGLRLGGAASGTRARRGAAVGTAQAPRQTPPTPPRRRRVAPRGSRRRGFQANMAVLLLLLRALRRGPGPGPRPLWGPGPAWSPGFPARPGRGRPYMASRPPGDLAEAGGRALQSLQLRLLTPTFEGINGLLLKQHLVQNPVRLWQLLGGTFYFNTSRLKQKNKEKDKSKGKAPEEDEEERRRRERDDQMYRERLRTLLVIAVVMSLLNALSTSGGSISWNDFVHEMLAKGEVQRVQVVPESDVVEVYLHPGAVVFGRPRLALMYRMQVANIDKFEEKLRAAEDELNIEAKDRIPVSYKRTGFFGNALYSVGMTAVGLAILWYVFRLAGMTGREGGFSAFNQLKMARFTIVDGKMGKGVSFKDVAGMHEAKLEVREFVDYLKSPERFLQLGAKVPKGALLLGPPGCGKTLLAKAVATEAQVPFLAMAGPEFVEVIGGLGAARVRSLFKEARARAPCIVYIDEIDAVGKKRSTTMSGFSNTEEEQTLNQLLVEMDVFYAEIEELKLVYPYHGVLHSNYEELKLVYPYHGVYAEIEELKLVYPYHGVVRRNRRAETGVSFITVFYAEIEELKLVYPYHGVLRRNRRAETGVSFITVFYAAIEELKLVYPYHGVLCSSRRKLSSCSNKEMTQRMGTTDHVIVLASTNRADILDGALMRPGRLDRHVFIDLPTLQRKGVRCHPGWSAVLRSPLTAASTFRAQAEELGLLWACAAVLVNFVTESRCVAKAGVKPLASSDPHPPLLPRAFSFFFFETVSLYPPGWSAAARSRLTATTISQERREIFEQHLKSLKLTQSSTFYSQRLAELTPGFSGADIANICNEAALHAAREGHTSVHTLNFEYAVERVLAGTAKKSKILSKEEQKVVAFHESGHALVGWMLEHTEAVMKVSITPRTNAALGFAQMLPRDQHLFTKEQLFERMCMALGGRASEALSFNEVTSGAQDDLRKVTRIAYSMVKQFGMAPGIGPISFPEAQEGLMGIGRRPFSQGLQQMMDHEARLLVAKAYRHTEKVLQDNLDKLQALANALLEKEVINYEDIEALIGPPPHGPKKMIAPQRWIDAQREKQDLGEEETEETQQPPLGGEEPTWPK

SEQ ID NO: 810080 - protein, 996 aa, Homo sapiens
TTQPRPGRLFTRQALGIQGRLQKNQGTRDLLADARPHTRASGSHEVDGLRLGGAASGTRARRGAAVGTAQAPRQTPPTPPRRRRVAPRGSRRRGFQANMAVLLLLLRALRRGPGPGPRPLWGPGPAWSPGFPARPGRGRPYMASRPPGDLAEAGGRALQSLQLRLLTPTFEGINGLLLKQHLVQNPVRLWQLLGGTFYFNTSRLKQKNKEKDKSKGKAPEEDEEERRRRERDDQMYRERLRTLLVIAVVMSLLNALSTSGGSISWNDFVHEMLAKGEVQRVQVVPESDVVEVYLHPGAVVFGRPRLALMYRMQVANIDKFEEKLRAAEDELNIEAKDRIPVSYKRTGFFGNALYSVGMTAVGLAILWYVFRLAGMTGREGGFSAFNQLKMARFTIVDGKMGKGVSFKDVAGMHEAKLEVREFVDYLKSPERFLQLGAKVPKGALLLGPPGCGKTLLAKAVATEAQVPFLAMAGPEFVEVIGGLGAARVRSLFKEARARAPCIVYIDEIDAVGKKRSTTMSGFSNTEEEQTLNQLLVEMDGMGTTDHVIVLASTNRADILDGALMRPGRLDRHVFIDLPTLQRKGVALSPRLECSAAITTHCGLNLQGSAEELGLLWACAAVLVNFEQSLAVLPRLVSNPWPQVIPTHLSFQERSLFFFFETVSLYPPGWSAAARSRLTATTISQERREIFEQHLKSLKLTQSSTFYSQRLAELTPGFSGADIANICNEAALHAAREGHTSVHTLNFEYAVERVLAGTAKKSKILSKEEQKVVAFHESGHALVGWMLEHTEAVMKVSITPRTNAALGFAQMLPRDQHLFTKEQLFERMCMALGGRASEALSFNEVTSGAQDDLRKVTRIAYSMVKQFGMAPGIGPISFPEAQEGLMGIGRRPFSQGLQQMMDHEARLLVAKAYRHTEKVLQDNLDKLQALANALLEKEVINYEDIEALIGPPPHGPKKMIAPQRWIDAQREKQDLGEEETEETQQPPLGGEEPTWPK

SEQ ID NO: 810081 - protein, 480 aa, Homo sapiens
TTQPRPGRLFTRQALGIQGRLQKNQGTRDLLADARPHTRASGSHEVDGLRLGGAASGTRARRGAAVGTAQAPRQTPPTPPRRRRVAPRGSRRRGFQANMAVLLLLLRALRRGPGPGPRPLWGPGPAWSPGFPARPGRGRPYMASRPPGDLAEAGGRALQSLQLRLLTPTFEGINGLLLKQHLVQNPVRLWQLLGGTFYFNTSRLKQKNKEKDKSKGKAPEEDEEERRRRERDDQMYRERLRTLLVIAVVMSLLNALSTSGGSISWNDFVHEMLAKGEVQRVQVVPESDVVEVYLHPGAVVFGRPNQLKMARFTIVDGKMGKGVSFKDVAGMHEAKLEVREFVDYLKSPERFLQLGAKVPKGALLLGPPGCGKTLLAKAVATEAQVPFLAMAGPEFVEVIGGLGAARVRSLFKEARARAPCIVYIDEIDAVGKKRSTTMSGFSNTEEEQTLNQLLVEMDVFYAEIEELKLVYPYHGVLHSN

SEQ ID NO: 810082 - protein, 481 aa, Homo sapiens
STSFPALGVSSRPKADGGRGRGGGGPRAPGSPRGTLPGPGGRTLKRTEPLPKLPDGASPLPTMGSRSGRGRTEARSASESLQLRLLTPTFEGINGLLLKQHLVQNPVRLWQLLGGTFYFNTSRLKQKNKEKDKSKGKAPEEDEEERRRRERDDQMYRERLRTLLVIAVVMSLLNALSTSGGSISWNDFVHEMLAKGEVQRVQVVPESDVVEVYLHPGAVVFGRPRLALMYRMQVANIDKFEEKLRAAEDELNIEAKDRIPVSYKRTGFFGNALYSVGMTAVGLAILWYVFRLAGMTGREGGFSAFNQLKMARFTIVDGKMGKGVSFKDVAGMHEAKLEVREFVDYLKSPERFLQLGAKVPKGALLLGPPGCGKTLLAKAVATEAQVPFLAMAGPEFVEVIGGLGAARVRSLFKEARARAPCIVYIDEIDAVGKKRSTTMSGFSNTEEEQTLNQLLVEMDVFYAEIEELKLVYPYHGVLHSN

SEQ ID NO: 810083 - protein, 212 aa, Homo sapiens
MLEHTEAVMKVSITPRTNAALGFAQMLPRDQHLFTKEQLFERMCMALGGRASEALSFNEVTSGAQDDLRKVTRIAYSMVKQFGMAPGIGPISFPEAQEGLMGIGRRPFSQGLQQMMDHEARLLVAKAYRHTEKVLQDNLDKLQALANALLEKEVINYEDIEALIGPPPHGPKKMIAPQRWIDAQREKQDLGEEETEETQQPPLGGEEPTWPK

SEQ ID NO: 810084 - protein, 212 aa, Homo sapiens; identical to SEQ ID NO: 810083

SEQ ID NO: 810085 - protein, 212 aa, Homo sapiens; identical to SEQ ID NO: 810083

SEQ ID NO: 810086 - protein, 212 aa, Homo sapiens; identical to SEQ ID NO: 810083

SEQ ID NO: 810087 - protein, 212 aa, Homo sapiens; identical to SEQ ID NO: 810083

SEQ ID NO: 810088 - protein, 875 aa, Homo sapiens
TTQPRPGRLFTRQALGIQGRLQKNQGTRDLLADARPHTRASGSHEVDGLRLGGAASGTRARRGAAVGTAQAPRQTPPTPPRRRRVAPRGSRRRGFQANMAVLLLLLRALRRGPGPGPRPLWGPGPAWSPGFPARPGRGRPYMASRPPGDLAEAGGRALQSLQLRLLTPTFEGINGLLLKQHLVQNPVRLWQLLGGTFYFNTSRLKQKNKEKDKSKGKAPEEDEEERRRRERDDQMYRERLRTLLVIAVVMSLLNALSTSGGSISWNDFVHEMLAKGEVQRVQVVPESDVVEVYLHPGAVVFGRPRLALMYRMQVANIDKFEEKLRAAEDELNIEAKDRIPVSYKRTGFFGNALYSVGMTAVGLAILWYVFRLAGMTGREGGFSAFNQLKMARFTIVDGKMGKGVSFKDVAGMHEAKLEVREFVDYLKSPERFLQLGAKVPKGALLLGPPGCGKTLLAKAVATEAQVPFLAMAGPEFVEVIGGLGAARVRSLFKEARARAPCIVYIDEIDAVGKKRSTTMSGFSNTEEEQTLNQLLVEMDGMGTTDHVIVLASTNRADILDGALMRPGRLDRHVFIDLPTLQERREIFEQHLKSLKLTQSSTFYSQRLAELTPGFSGADIANICNEAALHAAREGHTSVHTLNFEYAVERVLAGTAKKSKILSKEEQKVVAFHESGHALVGWMLEHTEAVMKVSITPRTNAALGFAQMLPRDQHLFTKEQLFERMCMALGGRASEALSFNEVTSGAQDDLRKVTRIAYSMVKQFGMAPGIGPISFPEAQEGLMGIGRRPFSQGLQQMMDHEARLLVAKAYRHTEKVLQDNLDKLQALANALLEKEVINYEDIEALIGPPPHGPKGEEETEETQQPPLGGEEPTWPK

SEQ ID NO: 810089 - protein, 880 aa, Homo sapiens
TTQPRPGRLFTRQALGIQGRLQKNQGTRDLLADARPHTRASGSHEVDGLRLGGAASGTRARRGAAVGTAQAPRQTPPTPPRRRRVAPRGSRRRGFQANMAVLLLLLRALRRGPGPGPRPLWGPGPAWSPGFPARPGRGRPYMASRPPGDLAEAGGRALQSLQLRLLTPTFEGINGLLLKQHLVQNPVRLWQLLGGTFYFNTSRLKQKNKEKDKSKGKAPEEDEEERRRRERDDQMYRERLRTLLVIAVVMSLLNALSTSGGSISWNDFVHEMLAKGEVQRVQVVPESDVVEVYLHPGAVVFGRPRLALMYRMQVANIDKFEEKLRAAEDELNIEAKDRIPVSYKRTGFFGNALYSVGMTAVGLAILWYVFRLAGMTGREGGFSAFNQLKMARFTIVDGKMGKGVSFKDVAGMHEAKLEVREFVDYLKSPERFLQLGAKVPKGALLLGPPGCGKTLLAKAVATEAQVPFLAMAGPEFVEVIGGLGAARVRSLFKEARARAPCIVYIDEIDAVGKKRSTTMSGFSNTEEEQTLNQLLVEMDGMGTTDHVIVLASTNRADILDGALMRPGRLDRHVFIDLPTLQERREIFEQHLKSLKLTQSSTFYSQRLAELTPGFSGADIANICNEAALHAAREGHTSVHTLNFEYAVERVLAGTAKKSKILSKEEQKVVAFHESGHALVGWMLEHTEAVMKVSITPRTNAALGFAQMLPRDQHLFTKEQLFERMCMALGGRASEALSFNEVTSGAQDDLRKVTRIAYSMVKQFGMAPGIGPISFPEAQEGLMGIGRRPFSQGLQQMMDHEARLLVAKAYRHTEKVLQDNLDKLQALANALLEKEVINYEDIEALIGPPPHGPKKMIAPQRWIDALSCFSAEVCTSSRGPQ

SEQ ID NO: 810090 - protein, 516 aa, Homo sapiens
GGELGTRHNQLKMARFTIVDGKMGKGVSFKDVAGMHEAKLEVREFVDYLKSPERFLQLGAKVPKGALLLGPPGCGKTLLAKAVATEAQVPFLAMAGPEFVEVIGGLGAARVRSLFKEARARAPCIVYIDEIDAVGKKRSTTMSGFSNTEEEQTLNQLLVEMDGMGTTDHVIVLASTNRADILDGALMRPGRLDRHVFIDLPTLQERREIFEQHLKSLKLTQSSTFYSQRLAELTPGFSGADIANICNEAALHAAREGHTSVHTLNFEYAVERVLAGTAKKSKILSKEEQKVVAFHESGHALVGWMLEHTEAVMKVSITPRTNAALGFAQMLPRDQHLFTKEQLFERMCMALGGRASEALSFNEVTSGAQDDLRKVTRIAYSMVKQFGMAPGIGPISFPEAQEGLMGIGRRPFSQGLQQMMDHEARLLVAKAYRHTEKVLQDNLDKLQALANALLEKEVINYEDIEALIGPPPHGPKKMIAPQRWIDAQREKQDLGEEETEETQQPPLGGEEPTWPK

SEQ ID NO: 810091 - protein, 212 aa, Homo sapiens; identical to SEQ ID NO: 810083

SEQ ID NO: 810092 - protein, 311 aa, Homo sapiens
LISDRGRRQIIGLWYQSSTFYSQRLAELTPGFSGADIANICNEAALHAAREGHTSVHTLNFEYAVERVLAGTAKKSKILSKEEQKVVAFHESGHALVGWMLEHTEAVMKVSITPRTNAALGFAQMLPRDQHLFTKEQLFERMCMALGGRASEALSFNEVTSGAQDDLRKVTRIAYSMVKQFGMAPGIGPISFPEAQEGLMGIGRRPFSQGLQQMMDHEARLLVAKAYRHTEKVLQDNLDKLQALANALLEKEVINYEDIEALIGPPPHGPKKMIAPQRWIDAQREKQDLGEEETEETQQPPLGGEEPTWPK

SEQ ID NO: 810093 - protein, 212 aa, Homo sapiens; identical to SEQ ID NO: 810083

SEQ ID NO: 810094 - protein, 187 aa, Homo sapiens [sequence omitted]

SEQ ID NO: 810095 - protein, 893 aa, Homo sapiens; identical to SEQ ID NO: 810072

SEQ ID NO: 810096 - protein, 893 aa, Homo sapiens; identical to SEQ ID NO: 810072

SEQ ID NO: 810097 - protein, 893 aa, Homo sapiens; identical to SEQ ID NO: 810072

SEQ ID NO: 810098 - protein, 833 aa, Homo sapiens
TTQPRPGRLFTRQALGIQGRLQKNQGTRDLLADARPHTRASGSHEVDGLRLGGAASGTRARRGAAVGTAQAPRQTPPTPPRRRRVAPRGSRRRGFQANMAVLLLLLRALRRGPGPGPRPLWGPGPAWSPGFPARPGRGRPYMASRPPGDLAEAGGRALQSLQLRLLTPTFEGINGLLLKQHLVQNPVRLWQLLGGTFYFNTSRLKQKNKEKDKSKGKAPEEDEEERRRRERDDQMYRERLRTLLVIAVVMSLLNALSTSGGSISWNDFVHEMLAKGEVQRVQVVPESDVVEVYLHPGAVVFGRPRLALMYRMQVANIDKFEEKLRAAEDELNIEAKDRIPVSYKRTGFFGNALYSVGMTAVGLAILWYVFRLAGMTGREGGFSAFNQLKMARFTIVDGKMGKGVSFKDVAGMHEAKLEVREFVDYLKSPERFLQLGAKVPKGALLLGPPGCGKTLLAKAVATEAQVPFLAMAGPEFVEVIGGLGAARVRSLFKEARARAPCIVYIDEIDAVGKKRSTTMSGFSNTEEEQTLNQLLVEMDGMGTTDHVIVLASTNRADILDGALMRPGRLDRHVFIDLPTLQERREIFEQHLKSLKLTQSSTFYSQRLAELTPGFSGADIANICNEAALHAAREGHTSVHTLNFEYAVERVLAGTAKKSKILSKEEQKVVAFHESGHALVGWMLEHTEAVMKVSITPRTNAALGFAQMLPRDQHLFTKEQLFERMCMALGGRASEALSFNEVTSGAQDDLRKVTRIAYSMVKQFGMAPGIGPISFPEAQEGLMGIGRRPFSQGLQQMMDHEARLLVAKAYRHTEKVLQDNLDKLQAKSSVSSLK

SEQ ID NO: 810099 - protein, 775 aa, Homo sapiens
TTQPRPGRLFTRQALGIQGRLQKNQGTRDLLADARPHTRASGSHEVDGLRLGGAASGTRARRGAAVGTAQAPRQTPPTPPRRRRVAPRGSRRRGFQANMAVLLLLLRALRRGPGPGPRPLWGPGPAWSPGFPARPGRGRPYMASRPPGDLAEAGGRALQSLQLRLLTPTFEGINGLLLKQHLVQNPVRLWQLLGGTFYFNTSRLKQKNKEKDKSKGKAPEEDEEERRRRERDDQMYRERLRTLLVIAVVMSLLNALSTSGGSISWNDFVHEMLAKGEVQRVQVVPESDVVEVYLHPGAVVFGRPRLALMYRMQVANIDKFEEKLRAAEDELNIEAKDRIPVSYKRTGFFGNALYSVGMTAVGLAILWYVFRLAGMTGREGGFSAFNQLKMARFTIVDGKMGKGVSFKDVAGMHEAKLEVREFVDYLKSPERFLQLGAKVPKGALLLGPPGCGKTLLAKAVATEAQVPFLAMAGPEFVEVIGGLGAARVRSLFKEARARAPCIVYIDEIDAVGKKRSTTMSGFSNTEEEQTLNQLLVEMDGMGTTDHVIVLASTNRADILDGALMRPGRLDRHVFIDLPTLQERREIFEQHLKSLKLTQSSTFYSQRLAELTPGFSGADIANICNEAALHAAREGHTSVHTLNFEYAVERVLAGTAKKSKILSKEEQKVVAFHESGHALVGWMLEHTEAVMKVSITPRTNAALGFAQMLPRDQHLFTKEQLFERMCMALGGRASEALSFNEVTSGARATVEVPWLSWGPLVGLVAPSPGAGQGGGP

SEQ ID NO: 810100 - protein, 667 aa, Homo sapiens; identical to SEQ ID NO: 810078

SEQ ID NO: 810101 - protein, 667 aa, Homo sapiens; identical to SEQ ID NO: 810078

SEQ ID NO: 810102 - protein, 561 aa, Homo sapiens; identical to SEQ ID NO: 810076

SEQ ID NO: 810103 - protein, 421 aa, Homo sapiens
TTQPRPGRLFTRQALGIQGRLQKNQGTRDLLADARPHTRASGSHEVDGLRLGGAASGTRARRGAAVGTAQAPRQTPPTPPRRRRVAPRGSRRRGFQANMAVLLLLLRALRRGPGPGPRPLWGPGPAWSPGFPARPGRGRPYMASRPPGDLAEAGGRALQSLQLRLLTPTFEGINGLLLKQHLVQNPVRLWQLLGGTFYFNTSRLKQKNKEKDKSKGKAPEEDEEERRRRERDDQMYRERLRTLLVIAVVMSLLNALSTSGGSISWNDFVHEMLAKGEVQRVQVVPESDVVEVYLHPGAVVFGRPRLALMYRMQVANIDKFEEKLRAAEDELNIEAKDRIPVSYKRTGFFGNALYSVGMTAVGLAILWYVFRLAGMTGREGGFSAFVSSVNQSSLNSFWFVFAEYFSHKLYDEYTGKTCCRE

SEQ ID NO: 810104 - protein, 357 aa, Homo sapiens
TTQPRPGRLFTRQALGIQGRLQKNQGTRDLLADARPHTRASGSHEVDGLRLGGAASGTRARRGAAVGTAQAPRQTPPTPPRRRRVAPRGSRRRGFQANMAVLLLLLRALRRGPGPGPRPLWGPGPAWSPGFPARPGRGRPYMASRPPGDLAEAGGRALQSLQLRLLTPTFEGINGLLLKQHLVQNPVRLWQLLGGTFYFNTSRLKQKNKEKDKSKGKAPEEDEEERRRRERDDQMYRERLRTLLVIAVVMSLLNALSTSGGSISWNDFVHEMLAKGEVQRVQVVPESDVVEVYLHPGAVVFGRPRLALMYRMQVANIDKFEEKLRAAEDELNIEAKDRIPVSYKRTGFFGKYVGCIC

SEQ ID NO: 810105 - protein, 136 aa, Homo sapiens [sequence omitted]

SEQ ID NO: 810106 - protein, 355 aa, Homo sapiens
RAMASHLRPPSPLLVRVYKSGPRVRRKLESYFQSSKSSGGGECTVSTQEHEAPGTFRVEFSERAAKERVLKKGEHQILVDEKPVPIFLVPTDNSIKKNTRPQISSLTQSQAETPSGDMHQHEGHIPNAVDSCLQKIFLTVTADLNCNLFSKEQRAYITTLCPSIRKMEGHDGIEKVCGDFQDIERIHQFLSEQFLESEQKQQFSPSMTERKPLSQQERDSCISPSEPETKAEQKSNYFEVPLPYFEYFKYICPDKINSIEKRFGVNIEIQESSPNMVCLDFTSSRSGDLEAARESFASEFQKNTEPLKQECVSLADSKQANKFKQELNHQFTKLLIKEKGGELTLLGTQDDISAA

SEQ ID NO: 810107 - protein, 69 aa, Homo sapiens
REIRASRLVEGARSFAVVCECVQGQSPEQGNLEGREEYHGIESCLVALTDTVASHPHATLSCHGKEQQL

SEQ ID NO: 810108 - protein, 451 aa, Homo sapiens
MPREIITLQLGQCGNQIGFEFWKQLCAEHGISPEGIVEEFATEGTDRKDVFFYQADDEHYIPRAVLLDLEPRVIHSILNSPYAKLYNPENIYLSEHGGGAGNNWASGFSQGEKIHEDIFDIIDREADGSDSLEGFVLCHSIAGGTGSGLGSYLLERLNDRYPKKLVQTYSVFPYQDEMSDVVVQPYNSLLTLKRLTQNADCVVVLDNTALNRIATDRLHIQNPSFSQINQLVSTIMSASTTTLRYPGYMNNDLIGLIASLIPTPRLHFLMTGYTPLTTDQSVASVRKTTVLDVMRRLLQPKNVMVSTGRDRQTNHCYIAILNIIQGEVDPTQVHKSLQRIRERKLANFIPWGPASIQVALSRKSPYLPSAHRVSGLMMANHTSISSLFESSCQQFDKLRKRDAFLEQFRKEDMFKDNFDEMDRSREVVQELIDEYHAATQPDYISWGTQEQ

SEQ ID NO: 810109 - protein, 280 aa, Homo sapiens
YVESLVVNRPREGKERALPTSCAPGCRAFVSAVTLAREIITLQLGQCGNQIGFEFWKQLCAEHGISPEGIVEEFATEGTDRKDVFFYQADDEHYIPRAVLLDLEPRVIHSILNSPYAKLYNPENIYLSEHGGGAGNNWASGFSQGEKIHEDIFDIIDREADGSDSLEGFVLCHSIAGGTGSGLGSYLLERLNDRYPKKLVQTYSVFPYQDEMSDVVVQPYNSLLTLKRLTQNADCVRGCWTMTSTLYRIATGSPATYRTRPCYQIQPVGVHIDGRQSHHL

SEQ ID NO: 810110 - protein, 451 aa, Homo sapiens; identical to SEQ ID NO: 810108

SEQ ID NO: 810111 - protein, 451 aa, Homo sapiens; identical to SEQ ID NO: 810108

SEQ ID NO: 810112 - protein, 460 aa, Homo sapiens
MPREIITLQLGQCGNQIGFEFWKQLCAEHGISPEGIVEEFATEGTDRKDVFFYQADDEHYIPRAVLLDLEPRVIHSILNSPYAKLYNPENIYLSEHGGGAGNNWASGFSQGEKIHEDIFDIIDREADGSDSLELQNSSRVIKGFVLCHSIAGGTGSGLGSYLLERLNDRYPKKLVQTYSVFPYQDEMSDVVVQPYNSLLTLKRLTQNADCVVVLDNTALNRIATDRLHIQNPSFSQINQLVSTIMSASTTTLRYPGYMNNDLIGLIASLIPTPRLHFLMTGYTPLTTDQSVASVRKTTVLDVMRRLLQPKNVMVSTGRDRQTNHCYIAILNIIQGEVDPTQVHKSLQRIRERKLANFIPWGPASIQVALSRKSPYLPSAHRVSGLMMANHTSISSLFESSCQQFDKLRKRDAFLEQFRKEDMFKDNFDEMDRSREVVQELIDEYHAATQPDYISWGTQEQ

SEQ ID NO: 810113 - protein, 451 aa, Homo sapiens; identical to SEQ ID NO: 810108

SEQ ID NO: 810114 - protein, 298 aa, Homo sapiens
MEVTVWRYPKKLVQTYSVFPYQDEMSDVVVQPYNSLLTLKRLTQNADCVVVLDNTALNRIATDRLHIQNPSFSQINQLVSTIMSASTTTLRYPGYMNNDLIGLIASLIPTPRLHFLMTGYTPLTTDQSVASVRKTTVLDVMRRLLQPKNVMVSTGRDRQTNHCYIAILNIIQGEVDPTQVHKSLQRIRERKLANFIPWGPASIQVALSRKSPYLPSAHRVSGLMMANHTSISSLFESSCQQFDKLRKRDAFLEQFRKEDMFKDNFDEMDRSREVVQELIDEYHAATQPDYISWGTQEQ

SEQ ID NO: 810115 - protein, 451 aa, Homo sapiens; identical to SEQ ID NO: 810108

SEQ ID NO: 810116 - protein, 274 aa, Homo sapiens
MSDVVVQPYNSLLTLKRLTQNADCVVVLDNTALNRIATDRLHIQNPSFSQINQLVSTIMSASTTTLRYPGYMNNDLIGLIASLIPTPRLHFLMTGYTPLTTDQSVASVRKTTVLDVMRRLLQPKNVMVSTGRDRQTNHCYIAILNIIQGEVDPTQVHKSLQRIRERKLANFIPWGPASIQVALSRKSPYLPSAHRVSGLMMANHTSISSLFESSCQQFDKLRKRDAFLEQFRKEDMFKDNFDEMDRSREVVQELIDEYHAATQPDYISWGTQEQ

SEQ ID NO: 810117 - protein, 298 aa, Homo sapiens; identical to SEQ ID NO: 810114

SEQ ID NO: 810118 - protein, 274 aa, Homo sapiens; identical to SEQ ID NO: 810116

SEQ ID NO: 810119 - protein, 394 aa, Homo sapiens
MPREIITLQLGQCGNQIGFEFWKQLCAEHGISPEGIVEEFATEGTDRKDVFFYQADDEHYIPRAVLLDLEPRVIHSILNSPYAKLYNPENIYLSEHGGGAGNNWASGFSQGEKIHEDIFDIIDREADGSDSLEGFVLCHSIAGGTGSGLGSYLLERLNDRYPKKLVQTYSVFPYQDEMSDVVVQPYNSLLTLKRLTQNADCVVVLDNTALNRIATDRLHIQNPSFSQINQLVSTIMSASTTTLRYPGYMNNDLIGLIASLIPTPRLHFLMTGYTPLTTDQSVASVRKTTVLDVMRRLLQPKNVMVSTGRDRQTNHCYIAILNIIQGEVDPTQVHKSLQRIRERKLANFIPWGPASIQVALSRKSPYLPSAHRVSGLMMANHTSISSVSLGFYSS

SEQ ID NO: 810120 - protein, 343 aa, Homo sapiens
GRGSTEFEAFRLILFGSEDSVLPSPLLYKMAHMGSDGGVLPVHYATILFSLRYPKKLVQTYSVFPYQDEMSDVVVQPYNSLLTLKRLTQNADCVVVLDNTALNRIATDRLHIQNPSFSQINQLVSTIMSASTTTLRYPGYMNNDLIGLIASLIPTPRLHFLMTGYTPLTTDQSVASVRKTTVLDVMRRLLQPKNVMVSTGRDRQTNHCYIAILNIIQGEVDPTQVHKSLQRIRERKLANFIPWGPASIQVALSRKSPYLPSAHRVSGLMMANHTSISSLFESSCQQFDKLRKRDAFLEQFRKEDMFKDNFDEMDRSREVVQELIDEYHAATQPDYISWGTQEQ

SEQ ID NO: 810121 - protein, 306 aa, Homo sapiens
TGRLYSRQMVVTVWRYPKKLVQTYSVFPYQDEMSDVVVQPYNSLLTLKRLTQNADCVVVLDNTALNRIATDRLHIQNPSFSQINQLVSTIMSASTTTLRYPGYMNNDLIGLIASLIPTPRLHFLMTGYTPLTTDQSVASVRKTTVLDVMRRLLQPKNVMVSTGRDRQTNHCYIAILNIIQGEVDPTQVHKSLQRIRERKLANFIPWGPASIQVALSRKSPYLPSAHRVSGLMMANHTSISSLFESSCQQFDKLRKRDAFLEQFRKEDMFKDNFDEMDRSREVVQELIDEYHAATQPDYISWGTQEQ

SEQ ID NO: 810122 - protein, 312 aa, Homo sapiens
MSDVVVQPYNSLLTLKRLTQNADCVVVLDNTALNRIATDRLHIQNPSFSQINQLVGPHSRTPLDWKPSLLEGHLGKEGPTQAEPHDMAACPQVSTIMSASTTTLRYPGYMNNDLIGLIASLIPTPRLHFLMTGYTPLTTDQSVASVRKTTVLDVMRRLLQPKNVMVSTGRDRQTNHCYIAILNIIQGEVDPTQVHKSLQRIRERKLANFIPWGPASIQVALSRKSPYLPSAHRVSGLMMANHTSISSLFESSCQQFDKLRKRDAFLEQFRKEDMFKDNFDEMDRSREVVQELIDEYHAATQPDYISWGTQEQ

SEQ ID NO: 810123 - protein, 296 aa, Homo sapiens
MPREIITLQLGQCGNQIGFEFWKQLCAEHGISPEGIVEEFATEGTDRKDVFFYQADDEHYIPRAVLLDLEPRVIHSILNSPYAKLYNPENIYLSEHGGGAGNNWASGFSQGEKIHEDIFDIIDREADGSDSLEGFVLCHSIAGGTGSGLGSYLLERLNDRYPKKLVQTYSVFPYQDEMSDVVVQPYNSLLTLKRLTQNADCVVVLDNTALNRIATDRLHIQNPSFSQINQLVSTIMSASTTTLRYPGYMNNDLIGLIASLIPTPRLHFLMTGYTPQTTFPGAPRSSDFPPHYSFSF

SEQ ID NO: 810124 - protein, 112 aa, Homo sapiens
MPREIITLQLGQCGNQIGFEFWKQLCAEHGISPEGIVEEFATEGTDRKDVFFYQADDEHYIPRAVLLDLEPRVIHSILNSPYAKLYNPENIYLSEHGGGAGNNWASGFSQVS

SEQ ID NO: 810125 - protein, 194 aa, Homo sapiens
RGGPFIPRPGPAGVEERPPPLLLCPPQVHKSLQRIRERKLANFIPWGPASIQVALSRKSPYLPSAHRVSGLMMANHTSISSVSLGFYFFLEESVPLATFIIFPKFTPNPLARILEIFISFSSLKVPASSLTSCGSGMPSSSSSVRRTCSRTTLMRWTGLGRLFRSSLMSTMRPPSQTTFPGAPRSSDFPPHYSF

SEQ ID NO: 810126 - protein, 106 aa, Homo sapiens
GEACAAHAQTEHPRQEAKRARAPHVLRSWLPGIRLSRDSRQAGAGAPTSEERCPGRSSPCSWASAATRVSKRAPAPPVSGSAPSGPTQVPGFHQSPFPFHEPPALL

SEQ ID NO: 810127 - protein, 124 aa, Homo sapiens
KLTNLLPGFGVQQGLSQYLISMPILSSRCCDALLSPQVVLDNTALNRIATDRLHIQNPSFSQINQLVGPHSRTPLDWKPSLLEGHLGKEGPTQAEPHDMARLSPGVHHHVGQHHHPALPRLHEQ

SEQ ID NO: 810128 - protein, 468 aa, Homo sapiens
MAARGSGPRALRLLLLVQLVAGRCGLAGAAGGAQRGLSEPSSIAKHEDSLLKDLFQDYERWVRPVEHLNDKIKIKFGLAISQLVDVDEKNQLMTTNVWLKQEWIDVKLRWNPDDYGGIKVIRVPSDSVWTPDIVLFDNADGRFEGTSTKTVIRYNGTVTWTPPANYKSSCTIDVTFFPFDLQNCSMKFGSWTYDGSQVDIILEDQDVDKRDFFDNGEWEIVSATGSKGNRTDSCCWYPYVTYSFVIKRLPLFYTLFLIIPCIGLSFLTVLVFYLPSNEGEKICLCTSVLVSLTVFLLVIEEIIPSSSKVIPLIGEYLVFTMIFVTLSIMVTVFAINIHHRSSSTHNAMAPLVRKIFLHTLPKLLCMRSHVDRYFTQKEETESGSGPKSSRNTLEAALDSIRYITRHIMKENDVREVVEDWKFIAQVLDRMFLWTFLFVSIVGSLGLFVPVIYKWANILIPVHIGNANK

SEQ ID NO: 810129 - protein, 243 aa, Homo sapiens
MAARGSGPRALRLLLLVQLVAGRCGLAGAAGGAQRGLSEPSSIAKHEDSLLKDLFQDYERWVRPVEHLNDKIKIKFGLAISQLVDVDEKNQLMTTNVWLKQEWIDVKLRWNPDDYGGIKVIRVPSDSVWTPDIVLFDNADGRFEGTSTKTVIRYNGTVTWTPPANYKSSCTIDVTFFPFDLQNCSMKFGSWTYDGSQVDIILEDQDVDKRDFFDNGEWEIVSATGSKGNRTDSCCWLLKIGNS

SEQ ID NO: 810130 - protein, 436 aa, Homo sapiens
MAARGSGPRALRLLLLVQLVAGRCGLAGAAGGAQRGLSEPSSIAKHEDSLLKDLFQDYERWVRPVEHLNDKIKIKFGLAISQLVDVDEKNQLMTTNVWLKQEWIDVKLRWNPDDYGGIKVIRVPSDSVWTPDIVLFDNADGRFEGTSTKTVIRYNGTVTWTPPANYKSSCTIDVTFFPFDLQNCSMKFGSWTYDGSQVDIILEDQDVDKRDFFDNGEWEIVSATGSKGNRTDSCCWYPYVTYSFVIKRLPLFYTLFLIIPCIGLSFLTVLVFYLPSNEGEKICLCTSVLVSLTVFLLVIEEIIPSSSKVIPLIGEYLVFTMIFVTLSIMVTVFAINIHHRSSSTHNAMAPLVRKIFLHTLPKLLCMRSHVDRYFTQKEETESGSGPKSSRNTLEAALDSIRYITRHIMKENDVREVCDVYLQMQIFFHFKFRSYFH

SEQ ID NO: 810131 - protein, 210 aa, Homo sapiens
APPPRPAQLCPRSLAGCRALWFARAAGPLLGVSLRACADSSPSLQDNSFSSTTVTECDEDPVSLHEDQTDCSSLRDENNKENYPDAGALVEEHAPPSWEPQQQNVEATVLVDSVLRPSMGNFKSRKPKSIFKAESGRSHGESQETEHVVSSQSECQVRAGTPAHESPQNNAFKCQETVRLQPRIDQRTAISPKDAFETRQDLNEGVNYID

SEQ ID NO: 810132 - protein, 620 aa, Homo sapiens
APPPRPAQLCPRSLAGCRALWFARAAGPLLGVSLRACADSSPSLQDNSFSSTTVTECDEDPVSLHEDQTDCSSLRDENNKENYPDAGALVEEHAPPSWEPQQQNVEATVLVDSVLRPSMGNFKSRKPKSIFKAESGRSHGESQETEHVVSSQSECQVRAGTPAHESPQNNAFKCQETVRLQPRIDQRTAISPKDAFETRQDLNEEEAAQVHGVKDPAPASTQSVLADGTDSADPSPVHKDGQNEADSAPEDLHSVGTSRLLYHITDGDNPLLSPRCSIFSQSQRFNLDPESAPSPPSTQQFMMPRSSSRCSCGDGKEPQTITQLTKHIQSLKRKIRKFEEKFEQEKKYRPSHGDKTSNPEVLKWMNDLAKGRKQLKELKLKLSEEQGSAPKGPPRNLLCEQPTVPRENGKPEAAGPEPSSSGEETPDAALTCLKERREQLPPQEDSKVTKQDKNLIKPLYDRYRIIKQILSTPSLIPTIQEEEDSDEDRPQGSQQPSLADPASHLPVGDHLTYSNETEPVRALLPDEKKEVKPPALSMSNLHEATMPVLLDHLRETRADKKRLRKALREFEEQFFKQTGRSPQKEDRIPMADEYYEYKHIKAKLRLLEVLISKQDVAKTI

SEQ ID NO: 810133 - protein, 424 aa, Homo sapiens
MTLQGILKEEAAQVHGVKDPAPASTQSVLADGTDSADPSPVHKDGQNEADSAPEDLHSVGTSRLLYHITDGDNPLLSPRCSIFSQSQRFNLDPESAPSPPSTQQFMMPRSSSRCSCGDGKEPQTITQLTKHIQSLKRKIRKFEEKFEQEKKYRPSHGDKTSNPEVLKWMNDLAKGRKQLKELKLKLSEEQGSAPKGPPRNLLCEQPTVPRENGKPEAAGPEPSSSGEETPDAALTCLKERREQLPPQEDSKVTKQDKNLIKPLYDRYRIIKQILSTPSLIPTIQEEEDSDEDRPQGSQQPSLADPASHLPVGDHLTYSNETEPVRALLPDEKKEVKPPALSMSNLHEATMPVLLDHLRETRADKKRLRKALREFEEQFFKQTGRSPQKEDRIPMADEYYEYKHIKAKLRLLEVLISKQDVAKTI

SEQ ID NO: 810134 - protein, 493 aa, Homo sapiens
APPPRPAQLCPRSLAGCRALWFARAAGPLLGVSLRACADSSPSLQDNSFSSTTVTECDEDPVSLHEDQTDCSSLRDENNKENYPDAGALVEEHAPPSWEPQQQNVEATVLVDSVLRPSMGNFKSRKPKSIFKAESGRSHGESQETEHVVSSQSECQVRAGTPAHESPQNNAFKCQETVRLQPRIDQRTAISPKDAFETRQDLNEEEAAQVHGVKDPAPASTQSVLADGTDSADPSPVHKDGQNEADSAPEDLHSVGTSRLLYHITDGDNPLLSPRCSIFSQSQRFNLDPESAPSPPSTQQFMMPRSSSRCSCGDGKEPQTITQLTKHIQSLKRKIRKFEEKFEQEKKYRPSHGDKTSNPEVLKWMNDLAKGRKQLKELKLKLSEEQGSAPKGPPRNLLCEQPTVPRENGKPEAAGPEPSSSGEETPDAALTCLKERREQLPPQEDSKVTKQDKNLIKPLYDRYRIIKQILSTPSLIPTIVSQDTCMLLLCTDV

SEQ ID NO: 810135 - protein, 405 aa, Homo sapiens
APPPRPAQLCPRSLAGCRALWFARAAGPLLGVSLRACADSSPSLQDNSFSSTTVTECDEDPVSLHEDQTDCSSLRDENNKENYPDAGALVEEHAPPSWEPQQQNVEATVLVDSVLRPSMGNFKSRKPKSIFKAESGRSHGESQETEHVVSSQSECQVRAGTPAHESPQNNAFKCQETVRLQPRIDQRTAISPKDAFETRQDLNEEEAAQVHGVKDPAPASTQSVLADGTDSAGTKQDKNLIKPLYDRYRIIKQILSTPSLIPTIQEEEDSDEDRPQGSQQPSLADPASHLPVGDHLTYSNETEPVRALLPDEKKEVKPPALSMSNLHEATMPVLLDHLRETRADKKRLRKALREFEEQFFKQTGRSPQKEDRIPMADEYYEYKHIKAKLRLLEVLISKQDVAKTI

SEQ ID NO: 810136 - protein, 493 aa, Homo sapiens; identical to SEQ ID NO: 810134

SEQ ID NO: 810137 - protein, 546 aa, Homo sapiens
APPPRPAQLCPRSLAGCRALWFARAAGPLLGVSLRACADSSPSLQDNSFSSTTVTECDEDPVSLHEDQTDCSSLRDENNKENYPDAGALVEEHAPPSWEPQQQNVEATVLVDSVLRPSMGNFKSRKPKSIFKAESGRSHGESQETEHVVSSQSECQVRAGTPAHESPQNNAFKCQETVRLQPRIDQRTAISPKDAFETRQDLNEEEAAQVHGVKDPAPASTQSVLADGTDSADPSPVHKDGQNEADSAPEDLHSVGTSRLLYHITDGDNPLLSPRCSIFSQSQRFNLDPESAPSPPSTQQFMMPRSSSRCSCGDGKEPQTITQLTKHIQSLKRKIRKFEEKFEQEKKYRPSHGDKTSNPEVLKWMNDLAKGRKQLKELKLKLSEEQGSAPKGPPRNLLCEQPTVPRENGKPEAAGPEPSSSGEETPDAALTCLKERREQLPPQEDSKVTKQDKNLIKPLYDRYRIIKQILSTPSLIPTIQEEEDSDEDRPQGSQQPSLADPASHLPVGDHLTYSNETEPVRALLPDEKKEVKPPALSMSNLHEATM

SEQ ID NO: 810138 - protein, 391 aa, Homo sapiens
APPPRPAQLCPRSLAGCRALWFARAAGPLLGVSLRACADSSPSLQDNSFSSTTVTECDEDPVSLHEDQTDCSSLRDENNKENYPDAGALVEEHAPPSWEPQQQNVEATVLVDSVLRPSMGNFKSRKPKSIFKAESGRSHGESQETEHVVSSQSECQVRAGTPAHESPQNNAFKCQETVRLQPRIDQRTAISPKDAFETRQDLNEEEAAQVHGVKDPAPASTQSVLADGTDSADPSPVHKDGQNEADSAPEDLHSVGTSRLLYHITDGDNPLLSPRCSIFSQSQRFNLDPESAPSPPSTQQFMMPRSSSRCSCGDGKEPQTITQLTKHIQSLKRKIRKFEEKFEQEKKYRPSHGDKTSNPEVLKWMNDLAKGRKQLKGKSQPKIFFPHKGSS

SEQ ID NO: 810139 - protein, 247 aa, Homo sapiens
APPPRPAQLCPRSLAGCRALWFARAAGPLLGVSLRACADSSPSLQDNSFSSTTVTECDEDPVSLHEDQTDCSSLRDENNKENYPDAGALVEEHAPPSWEPQQQNVEATVLVDSVLRPSMGNFKSRKPKSIFKAESGRSHGESQETEHVVSSQSECQVRAGTPAHESPQNNAFKCQETVRLQPRIDQRTAISPKDAFETRQDLNEEEAAQVHGVKDPAPASTQSVLADGTDSAGKIQGWGLSQIVLSR

SEQ ID NO: 810140 - protein, 1997 aa, Homo sapiens
MLSHGAGLALWITLSLLQTGLAEPERCNFTLAESKASSHSVSIQWRILGSPCNFSLIYSSDTLGAALCPTFRIDNTTYGCNLQDLQAGTIYNFKIISLDEERTVVLQTDPLPPARFGVSKEKTTSTGLHVWWTPSSGKVTSYEVQLFDENNQKIQGVQIQESTSWNEYTFFNLTAGSKYNIAITAVSGGKRSFSVYTNGSTVPSPVKDIGISTKANSLLISWSHGSGNVERYRLMLMDKGILVHGGVVDKHATSYAFHGLTPGYLYNLTVMTEAAGLQNYRWKLVRTAPMEVSNLKVTNDGSLTSLKVKWQRPPGNVDSYNITLSHKGTIKESRVLAPWITETHFKELVPGRLYQVTVSCVSGELSAQKMAVGRTFPDKVANLEANNNGRMRSLVVSWSPPAGDWEQYRILLFNDSVVLLNITVGKEETQYVMDDTGLVPGRQYEVEVIVESGNLKNSERCQGRTVPLAVLQLRVKHANETSLSIMWQTPVAEWEKYIISLADRDLLLIHKSLSKDAKEFTFTDLVPGRKYMATVTSISGDLKNSSSVKGRTVPAQVTDLHVANQGMTSSLFTNWTQAQGDVEFYQVLLIHENVVIKNESISSETSRYSFHSLKSGSLYSVVVTTVSGGISSRQVVVEGRTVPSSVSGVTVNNSGRNDYLSVSWLLAPGDVDNYEVTLSHDGKVVQSLVIAKSVRECSFSSLTPGRLYTVTITTRSGKYENHSFSQERTVPDKVQGVSVSNSARSDYLRVSWVHATGDFDHYEVTIKNKNNFIQTKSIPKSENECVFVQLVPGRLYSVTVTTKSGQYEANEQGNGRTIPEPVKDLTLRNRSTEDLHVTWSGANGDVDQYEIQLLFNDMKVFPPFHLVNTATEYRFTSLTPGRQYKILVLTISGDVQQSAFIEGFTVPSAVKNIHISPNGATDSLTVNWTPGGGDVDSYTVSAFRHSQKVDSQTIPKHVFEHTFHRLEAGEQYQIMIASVSGSLKNQINVVGRTVPASVQGVIADNAYSSYSLIVSWQKAAGVAERYDILLLTENGILLRNTSEPATTKQHKFEDLTPGKKYKIQILTVSGGLFSKEAQTEGRTVPAAVTDLRITENSTRHLSFRWTASEGELSWYNIFLYNPDGNLQERAQVDPLVQSFSFQNLLQGRMYKMVIVTHSGELSNESFIFGRTVPASVSHLRGSNRNTTDSLWFNWSPASGDFDFYELILYNPNGTKKENWKDKDLTEWRFQGLVPGRKYVLWVVTHSGDLSNKVTAESRTAPSPPSLMSFADIANTSLAITWKGPPDWTDYNDFELQWLPRDALTVFNPYNNRKSEGRIVYGLRPGRSYQFNVKTVSGDSWKTYSKPIFGSVRTKPDKIQNLHCRPQNSTAIACSWIPPDSDFDGYSIECRKMDTQEVEFSRKLEKEKSLLNIMMLVPHKRYLVSIKVQSAGMTSEVVEDSTITMIDRPPPPPPHIRVNEKDVLISKSSINFTVNCSWFSDTNGAVKYFTVVVREADGSDELKPEQQHPLPSYLEYRHNASIRVYQTNYFASKCAENPNSNSKSFNIKLGAEMESLGGKRDPTQQKFCDGPLKPHTAYRISIRAFTQLFDEDLKEFTKPLYSDTFFSLPITTESEPLFGAIEGVSAGLFLIGMLVAVVALLICRQKVSHGRERPSARLSIRRDRPLSVHLNLGQKGNRTTFAPIKINQFEGHFMKLQADSNYLLSKEYEELKDVGRNQSCDIALLPENRGKNRYNNILPYDATRVKLSNVDDDPCSDYINASYIPGNNFRREYIVTQGPLPGTKDDFWKMVWEQNVHNIVMVTQCVEKGRVKCDHYWPADQDSLYYGDLILQMLSESVLPEWTIREFKICGEEQLDAHRLIRHFHYTVWPDHGVPETTQSLIQFVRTVRDYINRSPGAGPTVVHCSAGVGRTGTFIALDRILQQLDSKDSVDIYGAVHDLRLHRVHMVQTECQYVYLHQCVRDVLRARKLRSEQENPLFPIYENVNPEYHRDPVYSRH

SEQ ID NO: 810141 - protein, 344 aa, Homo sapiens
MVEKDPLPVCALSVHLNLGQKGNRKTSCPIKINQFEGHFMKLQADSNYLLSKEYEELKDVGRNQSCDIALLPENRGKNRYNNILPYDATRVKLSNVDDDPCSDYINASYIPGNNFRREYIVTQGPLPGTKDDFWKMVWEQNVHNIVMVTQCVEKGRVKCDHYWPADQDSLYYGDLILQMLSESVLPEWTIREFKICGEEQLDAHRLIRHFHYTVWPDHGVPETTQSLIQFVRTVRDYINRSPGAGPTVVHCSAGVGRTGTFIALDRILQQLDSKDSVDIYGAVHDLRLHRVHMVQTECQYVYLHQCVRDVLRARKLRSEQENPLFPIYENVNPEYHRDPVYSRH

SEQ ID NO: 810142 - protein, 912 aa, Homo sapiens [sequence omitted]

SEQ ID NO: 810143 - protein, 294 aa, Homo sapiens
MLSHGAGLALWITLSLLQTGLAEPERCNFTLAESKASSHSVSIQWRILGSPCNFSLIYSSDTLGAALCPTFRIDNTTYGCNLQDLQAGTIYNFKIISLDEERTVVLQTDPLPPARFGVSKEKTTSTGLHVWWTPSSGKVTSYEVQLFDENNQKIQGVQIQESTSWNEYTFFNLTAGSKYNIAITAVSGGKRSFSVYTNGSTVPSPVKDIGISTKANSLLISWSHGSGNVERYRLMLMDKGILVHGGVVDKHATSYAFHGLTPGYLYNLTVMTEAAGLQNYRWKLVRTGKFPLAS

SEQ ID NO: 810144 - protein, 100 aa, Homo sapiens
MEVSNLKVTNDGSLTSLKVKWQRPPGNVDSYNITLSHKGTIKESRVLAPWITETHFKELVPGRLYQVTVSCVSGELSAQKMAVGRTCESWAPECSLVAQI

SEQ ID NO: 810145 - protein, 94 aa, Homo sapiens
NSAQGCHCPSAVTFSSPRLAASEAPDPMEEWDVPQMKKEVESLKYQLAFQREMASKTIPELLKWIEDGIPKDPFLNPDLMKNNPWVEKGKCTIL

SEQ ID NO: 810146 - protein, 140 aa, Homo sapiens
SGVRFFTHPSPSFNQWKAANWPAQHTAAQGHGRRSQSSTRVCTHMCTDQCQKHRPASSQSWEQSTHAHPEWLWKLQGARDTGSPCSHGKAGTGDLKATNRKIGEKREMVVTVGHYFLAKPWKNTFYTSRWQIVAAICVCK

SEQ ID NO: 810147 - protein, 142 aa, Homo sapiens
EETGPGPAVEGSELARSAHRGPGPRQALTIEHTRVHTHVHRSVSEASTCELTELGAEHPRTPRMAMEAAGRQGHWESLLSWQSRDGGLKSHQQENRGKKGDGGNSWTLFLGKTVEKHVLHQQVANCGRHLCLQIKFNWSLKK

SEQ ID NO: 810148 - protein, 189 aa, Homo sapiens
MSGQSLTDRITAAQHSVTGSAVSKTVCKATTHEIMGPKKKHLDYLIQCTNEMNVNIPQLADSLFERTTNSSWVVVFKSLITTHHLMVYGNERFIQYLASRNTLFNLSNFLDKSGLQGYDMSTFIRRYSRYLNEKAVSYRQVAFDFTKVKRGADGVMRTMNTEKLLKTVPIIQNQMDALLDFNVSYAFVI

SEQ ID NO: 810149 - protein, 610 aa, Homo sapiens
MSGQSLTDRITAAQHSVTGSAVSKTVCKATTHEIMGPKKKHLDYLIQCTNEMNVNIPQLADSLFERTTNSSWVVVFKSLITTHHLMVYGNERFIQYLASRNTLFNLSNFLDKSGLQGYDMSTFIRRYSRYLNEKAVSYRQVAFDFTKVKRGADGVMRTMNTEKLLKTVPIIQNQMDALLDFNVNSNELTNGVINAAFMLLFKDAIRLFAAYNEGIINLLEKYFDMKKNQCKEGLDIYKKFLTRMTRISEFLKVAEQVGIDRGDIPDLSQAPSSLLDALEQHLASLEGKKIKDSTAASRATTLSNAVSSLASTGLSLTKVDEREKQAALEEEQARLKALKEQRLKELAKKPHTSLTTAASPVSTSAGGIMTAPAIDIFSTPSSSNSTSKLPNDLLDLQQPTFHPSVHPMSTASQVASTWGGFTPSPVAQPHPSAGLNVDFESVFGNKSTNVIVDSGGFDELGGLLKPTVASQNQNLPVAKLPPSKLVSDDLDSSLANLVGNLGIGNGTTKNDVNWSQPGEKKLTGGSNWQPKVAPTTAWNAATMNGMHFPQYAPPVMAYPATTPTGMIGYGIPPQMGSVPVMTQPTLIYSQPVMRPPNPFGPVSGAQIQFM

SEQ ID NO: 810150 - protein, 613 aa, Homo sapiens
GRTRGRPTRPRTRGAAQHSVTGSAVSKTVCKATTHEIMGPKKKHLDYLIQCTNEMNVNIPQLADSLFERTTNSSWVVVFKSLITTHHLMVYGNERFIQYLASRNTLFNLSNFLDKSGLQGYDMSTFIRRYSRYLNEKAVSYRQVAFDFTKVKRGADGVMRTMNTEKLLKTVPIIQNQMDALLDFNVNSNELTNGVINAAFMLLFKDAIRLFAAYNEGIINLLEKYFDMKKNQCKEGLDIYKKFLTRMTRISEFLKVAEQVGIDRGDIPDLSQAPSSLLDALEQHLASLEGKKIKDSTAASRATTLSNAVSSLASTGLSLTKVDEREKQAALEEEQARLKALKEQRLKELAKKPHTSLTTAASPVSTSAGGIMTAPAIDIFSTPSSSNSTSKLPNDLLDLQQPTFHPSVHPMSTASQVASTWGGFTPSPVAQPHPSAGLNVDFESVFGNKSTNVIVDSGGFDELGGLLKPTVASQNQNLPVAKLPPSKLVSDDLDSSLANLVGNLGIGNGTTKNDVNWSQPGEKKLTGGSNWQPKVAPTTAWNAATMNGMHFPQYAPPVMAYPATTPTGMIGYGIPPQMGSVPVMTQPTLIYSQPVMRPPNPFGPVSGAQIQFM

SEQ ID NO: 810151 - protein, 491 aa, Homo sapiens [sequence omitted]

SEQ ID NO: 810152 - protein, 586 aa, Homo sapiens
PLTSSHPMSTASQVASTWGDLIQCTNEMNVNIPQLADSLFERTTNSSWVVVFKSLITTHHLMVYGNERFIQYLASRNTLFNLSNFLDKSGLQGYDMSTFIRRYSRYLNEKAVSYRQVAFDFTKVKRGADGVMRTMNTEKLLKTVPIIQNQMDALLDFNVNSNELTNGVINAAFMLLFKDAIRLFAAYNEGIINLLEKYFDMKKNQCKEGLDIYKKFLTRMTRISEFLKVAEQVGIDRGDIPDLSQAPSSLLDALEQHLASLEGKKIKDSTAASRATTLSNAVSSLASTGLSLTKVDEREKQAALEEEQARLKALKEQRLKELAKKPHTSLTTAASPVSTSAGGIMTAPAIDIFSTPSSSNSTSKLPNDLLDLQQPTFHPSVHPMSTASQVASTWGGFTPSPVAQPHPSAGLNVDFESVFGNKSTNVIVDSGGFDELGGLLKPTVASQNQNLPVAKLPPSKLVSDDLDSSLANLVGNLGIGNGTTKNDVNWSQPGEKKLTGGSNWQPKVAPTTAWNAATMNGMHFPQYAPPVMAYPATTPTGMIGYGIPPQMGSVPVMTQPTLIYSQPVMRPPNPFGPVSGAQIQFM

SEQ ID NO: 810153 - protein, 660 aa, Homo sapiens
MSGQSLTDRITAAQHSVTGSAVSKTVCKATTHEIMGPKKKHLDYLIQCTNEMNVNIPQLADSLFERTTNSSWVVVFKSLITTHHLMVYGNERFIQYLASRNTLFNLSNFLDKSGLQGYDMSTFIRRYSRYLNEKAVSYRQVAFDFTKVKRGADGVMRTMNTEKLLKTVPIIQNQMDALLDFNVNSNELTNGVINAAFMLLFKDAIRLFAAYNEGIINLLEKYFDMKKNQCKEGLDIYKKFLTRMTRISEFLKVAEQVGIDRGDIPDLSQAPSSLLDALEQHLASLEGKKIKDSTAASRATTLSNAVSSLASTGLSLTKVDEREKQAALEEEQARLKALKEQRLKELAKKPHTSLTTAASPVSTSAGGIMTAPAIDIFSTPSSSNSTSKLPNDLLDLQQPTFHPSVHPMSTASQVASTWGDPFSATVDAVDDAIPSLNPFLTKSSGDVHLSISSDVSTFTTRTPTHEMFVGFTPSPVAQPHPSAGLNVDFESVFGNKSTNVIVDSGGFDELGGLLKPTVASQNQNLPVAKLPPSKLVSDDLDSSLANLVGNLGIGNGTTKNDVNWSQPGEKKLTGGSNWQPKVAPTTAWNAATMNGMHFPQYAPPVMAYPATTPTGMIGYGIPPQMGSVPVMTQPTLIYSQPVMRPPNPFGPVSGAQIQFM

SEQ ID NO: 810154 - protein, 652 aa, Homo sapiens
MSGQSLTDRITAAQHSVTGSAVSKTVCKATTHEIMGPKKKHLDYLIQCTNEMNVNIPQLADSLFERTTNSSWVVVFKSLITTHHLMVYGNERFIQYLASRNTLFNLSNFLDKSGLQGYDMSTFIRRYSRYLNEKAVSYRQVAFDFTKVKRGADGVMRTMNTEKLLKTVPIIQNQMDALLDFNVNSNELTNGVINAAFMLLFKDAIRLFAAYNEGIINLLEKYFDMKKNQCKEGLDIYKKFLTRMTRISEFLKVAEQVGIDRGDIPDLSQAPSSLLDALEQHLASLEGKKIKDSTAASRATTLSNAVSSLASTGLSLTKVDEREKQAALEEEQARLKALKEQRLKELAKKPHTSLTTAASPVSTSAGGIMTAPAIDIFSTPSSSNSTSKLPNDLLDLQQPTFHPSVHPMSTASQVASTWGDPFSATVDAVDDAIPSLNPFLTKSSGDVHLSISSDVSTFTTRTPTHEMFVGFTPSPVAQPHPSAGLNVDFESVFGNKSTNVIVDSGGFDELGGLLKPTVASQNQNLPVAKLPPSKLVSDDLDSSLANLVGNLGIGNGTTKNDVNWSQPGEKKLTGGSNWQPKVAPTTAWNAATMAPPVMAYPATTPTGMIGYGIPPQMGSVPVMTQPTLIYSQPVMRPPNPFGPVSGAQIQFM

SEQ ID NO: 810155 - protein, 379 aa, Homo sapiens
MSFFQILFIKYFYYNLLNTMLFLQQVGIDRGDIPDLSQAPSSLLDALEQHLASLEGKKIKDSTAASRATTLSNAVSSLASTGLSLTKVDEREKQAALEEEQARLKALKEQRLKELAKKPHTSLTTAASPVSTSAGGIMTAPAIDIFSTPSSSNSTSKLPNDLLDLQQPTFHPSVHPMSTASQVASTWGGFTPSPVAQPHPSAGLNVDFESVFGNKSTNVIVDSGGFDELGGLLKPTVASQNQNLPVAKLPPSKLVSDDLDSSLANLVGNLGIGNGTTKNDVNWSQPGEKKLTGGSNWQPKVAPTTAWNAATMNGMHFPQYAPPVMAYPATTPTGMIGYGIPPQMGSVPVMTQPTLIYSQPVMRPPNPFGPVSGAQIQFM

SEQ ID NO: 810156 - protein, 351 aa, Homo sapiens
MKFLIFVQLQAPSSLLDALEQHLASLEGKKIKDSTAASRATTLSNAVSSLASTGLSLTKVDEREKQAALEEEQARLKALKEQRLKELAKKPHTSLTTAASPVSTSAGGIMTAPAIDIFSTPSSSNSTSKLPNDLLDLQQPTFHPSVHPMSTASQVASTWGGFTPSPVAQPHPSAGLNVDFESVFGNKSTNVIVDSGGFDELGGLLKPTVASQNQNLPVAKLPPSKLVSDDLDSSLANLVGNLGIGNGTTKNDVNWSQPGEKKLTGGSNWQPKVAPTTAWNAATMNGMHFPQYAPPVMAYPATTPTGMIGYGIPPQMGSVPVMTQPTLIYSQPVMRPPNPFGPVSGAQIQFM

SEQ ID NO: 810157 - protein, 632 aa, Homo sapiens
MSGQSLTDRITAAQHSVTGSAVSKTVCKATTHEIMGPKKKHLDYLIQCTNEMNVNIPQLADSLFERTTNSSWVVVFKSLITTHHLMVYGNERFIQYLASRNTLFNLSNFLDKSGLQGYDMSTFIRRYSRYLNEKAVSYRQVAFDFTKVKRGADGVMRTMNTEKLLKTVPIIQNQMDALLDFNVNSNELTNGVINAAFMLLFKDAIRLFAAYNEGIINLLEKYFDMKKNQCKEGLDIYKKFLTRMTRISEFLKVAEQVGIDRGDIPDLSQAPSSLLDALEQHLASLEGKKIKDSTAASRATTLSNAVSSLASTGLSLTKVDEREKQAALEEEQARLKALKEQRLKELAKKPHTSLTTAASPVSTSAGGIMTAPAIDIFSTPSSSNSTSKLPNDLLDLQQPTFHPSVHPMSTASQVASTWGDPFSATVDAVDDAIPSLNPFLTKSSGDVHLSISSDVSTFTTRTPTHEMFVGFTPSPVAQPHPSAGLNVDFESVFGNKSTNVIVDSGGFDELGGLLKPTVASQNQNLPVAKLPPSKLVSDDLDSSLANLVGNLGIGNGTTKNDVNWSQPGEKKLTGGSNWQPKVAPTTAWNAATMPPQMGSVPVMTQPTLIYSQPVMRPPNPFGPVSGAQIQFM

SEQ ID NO: 810158 - protein, 230 aa, Homo sapiens
GGRVGDPRVRGRVASPVSTSAGGIMTAPAIDIFSTPSSSNSTSKLPNDLLDLQQPTFHPSVHPMSTASQVASTWGGFDELGGLLKPTVASQNQNLPVAKLPPSKLVSDDLDSSLANLVGNLGIGNGTTKNDVNWSQPGEKKLTGGSNWQPKVAPTTAWNAATMNGMHFPQYAPPVMAYPATTPTGMIGYGIPPQMGSVPVMTQPTLIYSQPVMRPPNPFGPVSGAQIQFM

SEQ ID NO: 810159 - protein, 597 aa, Homo sapiens
MSGQSLTDRITAAQHSVTGSAVSKTVCKATTHEIMGPKKKHLDYLIQCTNEMNVNIPQLADSLFERTTNSSWVVVFKSLITTHHLMVYGNERFIQYLASRNTLFNLSNFLDKSGLQGYDMSTFIRRYSRYLNEKAVSYRQVAFDFTKVKRGADGVMRTMNTEKLLKTVPIIQNQMDALLDFNVNSNELTNGVINAAFMLLFKDAIRLFAAYNEGIINLLEKYFDMKKNQCKEGLDIYKKFLTRMTRISEFLKVAEQVGIDRGDIPDLSQAPSSLLDALEQHLASLEGKKIKDSTAASRATTLSNAVSSLASTGLSLTKVDEREKQAALEEEQARLKALKEQRLKELAKKPHTSLTTAASPVSTSAGGIMTAPAIDIFSTPSSSNSTSKLPNDLLDLQQPTFHPSVHPMSTASQVASTWGDPFSATVDAVDDAIPSLNPFLTKSSGDVHLSISSDVSTFTTRTPTHEMFVGFTPSPVAQPHPSAGLNVDFESVFGNKSTNVIVDSGGFDELGGLLKPTVASQNQNLPVAKLPPSKLVSDDLDSSLANLVGNLGIGNGTTKNDVNWSQPGEKKLTGGSNWQPKVAPTTAWNAATMIQFM

SEQ ID NO: 810160 - protein, 104 aa, Homo sapiens
ENPLVYCDGHGCSVAVHQACYGIVQVPTGPWFCRKCESQERAARVAPPVMAYPATTPTGMIGYGIPPQMGSVPVMTQPTLIYSQPVMRPPNPFGPVSGAQIQFM

SEQ ID NO: 810161 - protein, 84 aa, Homo sapiens
ENPLVYCDGHGCSVAVHQACYGIVQVPTGPWFCRKCESQERAARVPPQMGSVPVMTQPTLIYSQPVMRPPNPFGPVSGAQIQFM

SEQ ID NO: 810162 - protein, 610 aa, Homo sapiens; identical to SEQ ID NO: 810149

SEQ ID NO: 810163 - protein, 610 aa, Homo sapiens; identical to SEQ ID NO: 810149

SEQ ID NO: 810164 - protein, 610 aa, Homo sapiens; identical to SEQ ID NO: 810149

SEQ ID NO: 810165 - protein, 610 aa, Homo sapiens; identical to SEQ ID NO: 810149

SEQ ID NO: 810166 - protein, 610 aa, Homo sapiens; identical to SEQ ID NO: 810149

SEQ ID NO: 810167 - protein, 610 aa, Homo sapiens; identical to SEQ ID NO: 810149

SEQ ID NO: 810168 - protein, 610 aa, Homo sapiens; identical to SEQ ID NO: 810149

SEQ ID NO: 810169 - protein, 610 aa, Homo sapiens; identical to SEQ ID NO: 810149

SEQ ID NO: 810170 - protein, 170 aa, Homo sapiens
GRTRGRPTRPRTRGAAQHSVTGSAVSKTVCKATTHEIMGPKKKHLDYLIQCTNEMNVNIPQLADSLFERTTNSSWVVVFKSLITTHHLMVYGNERFIQYLASRNTLFNLSNFLDKSGLQGYDMSTFIRRYSRYLNEKAVSYRQVAFDFTKVKRGKTLEGVTRGREGGQSP

SEQ ID NO: 810171 - protein, 652 aa, Homo sapiens; identical to SEQ ID NO: 810154

SEQ ID NO: 810172 - protein, 610 aa, Homo sapiens; identical to SEQ ID NO: 810149

SEQ ID NO: 810173 - protein, 632 aa, Homo sapiens; identical to SEQ ID NO: 810157

SEQ ID NO: 810174 - protein, 622 aa, Homo sapiens
MSGQSLTDRITAAQHSVTGSAVSKTVCKATTHEIMGPKKKHLDYLIQCTNEMNVNIPQLADSLFERTTNSSWVVVFKSLITTHHLMVYGNERFIQYLASRNTLFNLSNFLDKSGLQGYDMSTFIRRYSRYLNEKAVSYRQVAFDFTKVKRGADGVMRTMNTEKLLKTVPIIQNQMDALLDFNVNSNELTNGVINAAFMLLFKDAIRLFAAYNEGIINLLEKYFDMKKNQCKEGLDIYKKFLTRMTRISEFLKVAEQVGIDRGDIPDLSQAPSSLLDALEQHLASLEGKKIKDSTAASRATTLSNAVSSLASTGLSLTKVDEREKQAALEEEQARLKALKEQRLKELAKKPHTSLTTAASPVSTSAGGIMTAPAIDIFSTPSSSNSTSKLPNDLLDLQQPTFHPSVHPMSTASQVASTWGDPFSATVDAVDDAIPSLNPFLTKSSGDVHLSISSDVSTFTTRTPTHEMFVGFTPSPVAQPHPSAGLNVDFESVFGNKSTNVIVDSGGFDELGGLLKPTVASQNQNLPVAKLPPSKLVSDDLDSSLANLVGNLGIGNGTTKNDVNWSQPGEKKLTGGSNWQPKVAPTTAWNAATMNGMLFPQYAPPVWLFCLENNRLIGLEFPK

SEQ ID NO: 810175 - protein, 294 aa, Homo sapiens
MSGQSLTDRITAAQHSVTGSAVSKTVCKATTHEIMGPKKKHLDYLIQCTNEMNVNIPQLADSLFERTTNSSWVVVFKSLITTHHLMVYGNERFIQYLASRNTLFNLSNFLDKSGLQGYDMSTFIRRYSRYLNEKAVSYRQVAFDFTKVKRGADGVMRTMNTEKLLKTVPIIQNQMDALLDFNVNSNELTNGVINAAFMLLFKDAIRLFAAYNEGIINLLEKYFDMKKNQCKEGLDIYKKFLTRMTRISEFLKVAEQVGIDRGDIPDLSQVSLLLKYQSTICCVQVVKSIKISNI

SEQ ID NO: 810176 - protein, 259 aa, Homo sapiens
MSGQSLTDRITAAQHSVTGSAVSKTVCKATTHEIMGPKKKHLDYLIQCTNEMNVNIPQLADSLFERTTNSSWVVVFKSLITTHHLMVYGNERFIQYLASRNTLFNLSNFLDKSGLQGYDMSTFIRRYSRYLNEKAVSYRQVAFDFTKVKRGADGVMRTMNTEKLLKTVPIIQNQMDALLDFNVNSNELTNGVINAAFMLLFKDAIRLFAAYNEGIINLLEKYFDMKKNQCKEGLDIYKKFLTRMTRISEFLKVAEVNCL

SEQ ID NO: 810177 - protein, 47 aa, Homo sapiens
PAGDISILLLLLAACVTLGKGLGLQASVTAPVKQGCRCLPPGALRGH

SEQ ID NO: 810178 - protein, 273 aa, Homo sapiens
MKRSAFLLCEEHPRRPDHGRRGRGEGRRSVRYPVPQPQAPRSRKRGGKGSRLLTQTSEGRSARRGVWLPSGDSRAHYGWPCVAKFKLSLRECLPRRRNTASSGHSAKRGGGDLRAEERRPSWERGGRASGGCALGAPGRRGSGESSLGRASGGAPGGSSPGACGPGPGVCKKPWNEADPPVQRWPRQGSPFWAGYQLGAEGGAETVVPAARCRRVHAAKPHTAPKPRGSPALAASFPRETWRLGGEKRTRCCSDPTVRRSQSHALRAVGRVQD

SEQ ID NO: 810179 - protein, 1004 aa, Homo sapiens
MLVWLVASGIVFYGELWVCAGLDYDYTFDGNEEDKTETIDYKDPCKAAVFWGDIALDDEDLNIFQIDRTIDLTQNPFGNLGHTTGGLGDHAMSKKRGALYQLIDRIRRIGFGLEQNNTVKGKVPLQFSGQNEKNRVPRAATSRTERIWPGGVIPYVIGGNFTGSQRAMFKQAMRHWEKHTCVTFIERSDEESYIVFTYRPCGCCSYVGRRGNGPQAISIGKNCDKFGIVVHELGHVIGFWHEHTRPDRDNHVTIIRENIQPGQEYNFLKMEPGEVNSLGERYDFDSIMHYARNTFSRGMFLDTILPSRDDNGIRPAIGQRTRLSKGDIAQARKLYRCPACGETLQESNGNLSSPGFPNGYPSYTHCIWRVSVTPGEKIVLNFTTMDLYKSSLCWYDYIEVRDGYWRKSPLLGRFCGDKLPEVLTSTDSRMWIEFRSSSNWVGKGFAAVYEAICGGEIRKNEGQIQSPNYPDDYRPMKECVWKITVSESYHVGLTFQSFEIERHDNCAYDYLEVRDGTSENSPLIGRFCGYDKPEDIRSTSNTLWMKFVSDGTVNKAGFAANFFKEEDECAKPDRGGCEQRCLNTLGSYQCACEPGYELGPDRRSCEAACGGLLTKLNGTITTPGWPKEYPPNKNCVWQVVAPTQYRISVKFEFFELEGNEVCKYDYVEIWSGLSSESKLHGKFCGAEVPEVITSQFNNMRIEFKSDNTVSKKGFKAHFFSDKDECSKDNGGCQHECVNTMGSYMCQCRNGFVLHDNKHDCKEAECEQKIHSPSGLITSPNWPDKYPSRKECTWEISATPGHRIKLAFSEFEIEQHQECAYDHLEVFDGETEKSPILGRLCGNKIPDPLVATGNKMFVRFVSDASVQRKGFQATHSTECGGRLKAESKPRDLYSHAQFGDNNYPGQVDCEWLLVSERGSRLELSFQTFEVEEEADCGYDYVELFDGLDSTAVGLGRFCGSGPPEEIYSIGDSVLIHFHTDDTINKKGFHIRYKSIRYPDTTHTKK

SEQ ID NO: 810180 - protein, 1004 aa, Homo sapiens; identical to SEQ ID NO: 810179

SEQ ID NO: 810181 - protein, 387 aa, Homo sapiens
MLVWLVASGIVFYGELWVCAGLDYDYTFDGNEEDKTETIDYKDPCKAAVFWGDIALDDEDLNIFQIDRTIDLTQNPFGNLGHTTGGLGDHAMSKKRGALYQLIDRIRRIGFGLEQNNTVKGKVPLQFSGQNEKNRVPRAATSRTERIWPGGVIPYVIGGNFTGSQRAMFKQAMRHWEKHTCVTFIERSDEESYIVFTYRPCGCCSYVGRRGNGPQAISIGKNCDKFGIVVHELGHVIGFWHEHTRPDRDNHVTIIRENIQPGQEYNFLKMEPGEVNSLGERYDFDSIMHYARNTFSRGMFLDTILPSRDDNGIRPAIGQRTRLSKGDIAQARKLYRCPACGETLQESNGNLSSPGFPNGYPSYTHCIWRVSVTPGEKVVYTVKPTIL

SEQ ID NO: 810182 - protein, 158 aa, Homo sapiens
MNQEKLAKLQAQVRIGGKGTARRKKKVVHRTATADDKKLQSSLKKLAVNNIAGIEEVNMIKDDGTVIHFNNPKVQASLSANTFAITGHAEAKPITEMLPGILSQLGADSLTSLRKLAEQFPRQVLDSKAPKPEDIDEEDDDVPDLVENFDEASKNEAN

SEQ ID NO: 810183 - protein, 163 aa, Homo sapiens
SPRMPRGHLHLPPLALRGMRKAGGGWSSDVRSRDRLPRRGRGGVGCITWICSRRRRRRRRLSLSRLRQPSFSCRVLVLEDPPCFRFTNSMNQEKLAKLQAQVRIGGKGTARRKKKVVHRTATADDKKLQSSLKKLAVNNIAGIEEHYLQEPRFGRNLFPSTDE

SEQ ID NO: 810184 - protein, 158 aa, Homo sapiens; identical to SEQ ID NO: 810182

SEQ ID NO: 810185 - protein, 143 aa, Homo sapiens
SPRMPRGHLHLPPLALRGMRKAGGGWSSDVRSRDRLPRRGRGGVGCITWICSRRRRRRRRLSLSRLRQPSFSCRVLVLEDPPCFRFTNSMNQEKLAKLQAQVRIGGKVFLTNSYLFFHVGEYEYQLSYSLYFLKPKEELVVSN

SEQ ID NO: 810186 - protein, 101 aa, Homo sapiens
AADYYYYIRGRVDNPKVQASLSANTFAITGHAEAKPITEMLPGILSQLGADSLTSLRKLAEQFPRQVLDSKAPKPEDIDEEDDDVPDLVENFDEASKNEAN

SEQ ID NO: 810187 - protein, 167 aa, Homo sapiens
SPRMPRGHLHLPPLALRGMRKAGGGWSSDVRSRDRLPRRGRGGVGCITWICSRRRRRRRRLSLSRLRQPSFSCRVLVLEDPPCFRFTNSMNQEKLAKLQAQVRIGGKGTARRKKKVVHRTATADDKKLQSSLKKLAVNNIAGIEESWTVKHQNQKTLMRKMMMFQIL

SEQ ID NO: 810188 - protein, 158 aa, Homo sapiens; identical to SEQ ID NO: 810182

SEQ ID NO: 810189 - protein, 2089 aa, Homo sapiens
MEDTQAIDWDVEEEEETEQSSESLRCNVEPVGRLHIFSGAHGPEKDFPLHLGKNVVGRMPDCSVALPFPSISKQHAEIEILAWDKAPILRDCGSLNGTQILRPPKVLSPGVSHRLRDQELILFADLLCQYHRLDVSLPFVSRGPLTVEETPRVQGETQPQRLLLAEDSEEEVDFLSERRMVKKSRTTSSSVIVPESDEEGHSPVLGGLGPPFAFNLNSDTDVEEGQQPATEEASSAARRGATVEAKQSEAEVVTEIQLEKDQPLVKERDNDTKVKRGAGNGVVPAGVILERSQPPGEDSDTDVDDDSRPPGRPAEVHLERAQPFGFIDSDTDAEEERIPATPVVIPMKKRKIFHGVGTRGPGAPGLAHLQESQAGSDTDVEEGKAPQAVPLEKSQASMVINSDTDDEEEVSAALTLAHLKESQPAIWNRDAEEDMPQRVVLLQRSQTTTERDSDTDVEEEELPVENREAVLKDHTKIRALVRAHSEKDQPPFGDSDDSVEADKSSPGIHLERSQASTTVDINTQVEKEVPPGSAIIHIKKHQVSVEGTNQTDVKAVGGPAKLLVVSLEEAWPLHGDCETDAEEGTSLTASVVADVRKSQLPAEGDAGAEWAAAVLKQERAHEVGAQGGPPVAQVEQDLPISRENLTDLVVDTDTLGESTQPQREGAQVPTGREREQHVGGTKDSEDNYGDSEDLDLQATQCFLENQGLEAVQSMEDEPTQAFMLTPPQELGPSHCSFQTTGTLDEPWEVLATQPFCLRESEDSETQPFDTHLEAYGPCLSPPRAIPGDQHPESPVHTEPMGIQGRGRQTVDKVMGIPKETAERVGPERGPLERETEKLLPERQTDVTGEEELTKGKQDREQKQLLARDTQRQESDKNGESASPERDRESLKVEIETSEEIQEKQVQKQTLPSKAFEREVERPVANRECDPAELEEKVPKVILERDTQRGEPEGGSQDQKGQASSPTPEPGVGAGDLPGPTSAPVPSGSQSGGRGSPVSPRRHQKGLLNCKMPPAEKASRIRAAEKVSRGDQESPDACLPPTVPEAPAPPQKPLNSQSQKHLAPPPLLSPLLPSIKPTVRKTRQDGSQEAPEAPLSSELEPFHPKPKIRTRKSSRMTPFPATSAAPEPHPSTSTAQPVTPKPTSQATRSRTNRSSVKTPEPVVPTAPELQPSTSTDQPVTSEPTSQVTRGRKSRSSVKTPETVVPTALELQPSTSTDRPVTSEPTSQATRGRKNRSSVKTPEPVVPTAPELQPSTSTDQPVTSEPTYQATRGRKNRSSVKTPEPVVPTAPELRPSTSTDRPVTPKPTSRTTRSRTNMSSVKTPETVVPTAPELQISTSTDQPVTPKPTSRTTRSRTNMSSVKNPESTVPIAPELPPSTSTEQPVTPEPTSRATRGRKNRSSGKTPETLVPTAPKLEPSTSTDQPVTPEPTSQATRGRTNRSSVKTPETVVPTAPELQPSTSTDQPVTPEPTSQATRGRTDRSSVKTPETVVPTAPELQASASTDQPVTSEPTSRTTRGRKNRSSVKTPETVVPAAPELQPPTSTDQPVTPEPTSRATRGRTNRSSVKTPESIVPIAPELQPSTSRNQLVTPEPTSRATRCRTNRSSVKTPEPVVPTAPEPHPTTSTDQPVTPKLTSRATRRKTNRSSVKTPKPVEPAASDLEPFTPTDQSVTPEAIAQGGQSKTLRSSTVRAMPVPTTPEFQSPVTTDQPISPEPITQPSCIKRQRAAGNPGSLAAPIDHKPCSAPLEPKSQASRNQRWGAVRAAESLTAIPEPASPQLLETPIHASQIQKVEPAGRSRFTPELQPKASQSRKRSLATMDSPPHQKQPQRGEVSQKTVIIKEEEEDTAEKPGKEEDVVTPKPGKRKRDQAEEEPNRIPSRSLRRTKLNQESTAPKVLFTGVVDARGERAVLALGGSLAGSAAEASHLVTDRIRRTVKFLCALGRGIPILSLDWLHQSRKAGFFLPPDEYVVTDPEQEKNFGFSLQDALSRARERRLLEGYEIYVTPGVQPPPPQMGEIISCCGGTYLPSMPRSYKPQRVVITCPQDFPHCSIPLRVGLPLLSPEFLLTGVLKQEAKPEAFVLSPLEMSST

SEQ ID NO: 810190 - protein, 1825 aa, Homo sapiens
MEDTQAIDWDVEEEEETEQSSESLRCNVEPVGRLHIFSGAHGPEKDFPLHLGKNVVGRMPDCSVALPFPSISKQHAEIEILAWDKAPILRDCGSLNGTQILRPPKVLSPGVSHRLRDQELILFADLLCQYHRLDVSLPFVSRGPLTVEETPRVQGETQPQRLLLAEDSEEEVDFLSERRMVKKSRTTSSSVIVPESDEEGHSPVLGGLGPPFAFNLNSDTDVEEGQQPATEEASSAARRGATVEAKQSEAEVVTEIQLEKDQPLVKERDNDTKVKRGAGNGVVPAGVILERSQPPGEDSDTDVDDDSRPPGRPAEVHLERAQPFGFIDSDTDAEEERIPATPVVIPMKKRKIFHGVGTRGPGAPGLAHLQESQAGSDTDVEEGKAPQAVPLEKSQASMVINSDTDDEEEVSAALTLAHLKESQPAIWNRDAEEDMPQRVVLLQRSQTTTERDSDTDVEEEELPVENREAVLKDHTKIRALVRAHSEKDQPPFGDSDDSVEADKSSPGIHLERSQASTTVDINTQVEKEVPPGSAIIHIKKHQVSVEGTNQTDVKAVGGPAKLLVVSLEEAWPLHGDCETDAEEGTSLTASVVADVRKSQLPAEGDAGAEWAAAVLKQERAHEVGAQGGPPVAQVEQDLPISRENLTDLVVDTDTLGESTQPQREGAQVPTGREREQHVGGTKDSEDNYGDSEDLDLQATQCFLENQGLEAVQSMEDEPTQAFMLTPPQELGPSHCSFQTTGLLNCKMPPAEKASRIRAAEKVSRGDQESPDACLPPTVPEAPAPPQKPLNSQSQKHLAPPPLLSPLLPSIKPTVRKTRQDGSQEAPEAPLSSELEPFHPKPKIRTRKSSRMTPFPATSAAPEPHPSTSTAQPVTPKPTSQATRSRTNRSSVKTPEPVVPTAPELQPSTSTDQPVTSEPTSQVTRGRKSRSSVKTPETVVPTALELQPSTSTDRPVTSEPTSQATRGRKNRSSVKTPEPVVPTAPELQPSTSTDQPVTSEPTYQATRGRKNRSSVKTPEPVVPTAPELRPSTSTDRPVTPKPTSRTTRSRTNMSSVKTPETVVPTAPELQISTSTDQPVTPKPTSRTTRSRTNMSSVKNPESTVPIAPELPPSTSTEQPVTPEPTSRATRGRKNRSSGKTPETLVPTAPKLEPSTSTDQPVTPEPTSQATRGRTNRSSVKTPETVVPTAPELQPSTSTDQPVTPEPTSQATRGRTDRSSVKTPETVVPTAPELQASASTDQPVTSEPTSRTTRGRKNRSSVKTPETVVPAAPELQPPTSTDQPVTPEPTSRATRGRTNRSSVKTPESIVPIAPELQPSTSRNQLVTPEPTSRATRCRTNRSSVKTPEPVVPTAPEPHPTTSTDQPVTPKLTSRATRRKTNRSSVKTPKPVEPAASDLEPFTPTDQSVTPEAIAQGGQSKTLRSSTVRAMPVPTTPEFQSPVTTDQPISPEPITQPSCIKRQRAAGNPGSLAAPIDHKPCSAPLEPKSQASRNQRWGAVRAAESLTAIPEPASPQLLETPIHASQIQKVEPAGRSRFTPELQPKASQSRKRSLATMDSPPHQKQPQRGEVSQKTVIIKEEEEDTAEKPGKEEDVVTPKPGKRKRDQAEEEPNRIPSRSLRRTKLNQESTAPKVLFTGVVDARGERAVLALGGSLAGSAAEASHLVTDRIRRTVKFLCALGRGIPILSLDWLHQSRKAGFFLPPDEYVVTDPEQEKNFGFSLQDALSRARERRLLEGYEIYVTPGVQPPPPQMGEIISCCGGTYLPSMPRSYKPQRVVITCPQDFPHCSIPLRVGLPLLSPEFLLTGVLKQEAKPEAFVLSPLEMSST

SEQ ID NO: 810191 - protein, 2089 aa, Homo sapiens; identical to SEQ ID NO: 810189

SEQ ID NO: 810192 - protein, 2089 aa, Homo sapiens; identical to SEQ ID NO: 810189

SEQ ID NO: 810193 - protein, 721 aa, Homo sapiens
MEDTQAIDWDVEEEEETEQSSESLRCNVEPVGRLHIFSGAHGPEKDFPLHLGKNVVGRMPDCSVALPFPSISKQHAEIEILAWDKAPILRDCGSLNGTQILRPPKVLSPGVSHRLRDQELILFADLLCQYHRLDVSLPFVSRGPLTVEETPRVQGETQPQRLLLAEDSEEEVDFLSERRMVKKSRTTSSSVIVPESDEEGHSPVLGGLGPPFAFNLNSDTDVEEGQQPATEEASSAARRGATVEAKQSEAEVVTEIQLEKDQPLVKERDNDTKVKRGAGNGVVPAGVILERSQPPGEDSDTDVDDDSRPPGRPAEVHLERAQPFGFIDSDTDAEEERIPATPVVIPMKKRKIFHGVGTRGPGAPGLAHLQESQAGSDTDVEEGKAPQAVPLEKSQASMVINSDTDDEEEVSAALTLAHLKESQPAIWNRDAEEDMPQRVVLLQRSQTTTERDSDTDVEEEELPVENREAVLKDHTKIRALVRAHSEKDQPPFGDSDDSVEADKSSPGIHLERSQASTTVDINTQVEKEVPPGSAIIHIKKHQVSVEGTNQTDVKAVGGPAKLLVVSLEEAWPLHGDCETDAEEGTSLTASVVADVRKSQLPAEGDAGAEWAAAVLKQERAHEVGAQGGPPVAQVEQDLPISRENLTDLVVDTDTLGESTQPQREGAQVPTGREREQHVGGTKDSEDNYGDSEDLDLQATQCFLENQGLEVQSMEDEPTQDN

SEQ ID NO: 810194 - protein, 112 aa, Homo sapiens
PVGVEDAQLAQRGQRARGERLQEVVPQVQLFQPRELLEGLGVQRADLVVLQVQPSELPQTVEVEGRDVGYEVAAEAVGATLREVWAARSPPAFYRKFGGAQGCLQKAIRRGE

SEQ ID NO: 810195 - protein, 146 aa, Homo sapiens
RGAQRQALGLLLQRHRQLHGASWTAAPAPRGPGCKEVSVRGGAHSGGEERVSVSWDPTESSAGSAPRWAPSAASVPQSCSSSRSLSYSTKALEQIPALPPTSSVSLDKRECSMAAFSLEQIKKIVTNNRRNTSTHIFSMGNKQISI

SEQ ID NO: 810196 - protein, 1722 aa, Homo sapiens [sequence omitted]

SEQ ID NO: 810197 - protein, 1336 aa, Homo sapiens
MYTFRKLSPYLNKISVCKSPVDVLQIFRVGRVNETTEFLSKLGNVRPLLHGSPVQNIVGILCRGLLLPKVVEDRGVQRTDVGNLGSGIYFSDSLSTSIKYSHPGETDGTRLLLICDVALGKCMDLHEKDFSLTEAPPGYDSVHGVSQTASVTTDFEDDEFVVYKTNQVKMKYIIKFSMPGDQIKDFHPSDHTELEEYRPEFSNFSKVEDYQLPDAKTSSSTKAGLQDASGNLVPLEDVHIKGRIIDTVAQVIVFQTYTNKSHVPIEAKYIFPLDDKAAVCGFEAFINGKHIVGEIKEKEEAQQEYLEAVTQGHGAYLMSQDAPDVFTVSVGNLPPKAKVLIKITYITELSILGTVGVFFMPATVAPWQQDKALNENLQDTVEKICIKEIGTKQSFSLTMSIEMPYVIEFIFSDTHELKQKRTDCKAVISTMEGSSLDSSGFSLHIGLSAAYLPRMWVEKHPEKESEACMLVFQPDLDVDLPDLASESEVIICLDCSSSMEGVTFLQAKQIALHALSLVGEKQKVNIIQFGTGYKELFSYPKHITSNTTAAEFIMSATPTMGNTDFWKTLRYLSLLYPARGSRNILLVSDGHLQDESLTLQLVKRSRPHTRLFACGIGSTANRHVLRILSQCGAGVFEYFNAKSKHSWRKQIEDQMTRLCSPSCHSVSVKWQQLNPDAPEALQAPAQVPSLFRNDRLLVYGFIPHCTQATLCALIQEKEFCTMVSTTELQKTTGTMIHKLAARALIRDYEDGILHENETSHEMKKQTLKSLIIKLSKENSLITQFTSFVAVEKRDENESPFPDIPKVSELIAKEDVDFLPYMSWQGEPQEAVRNQSLLASSEWPELRLSKRKHRKIPFSKRKMELSQPEVSEDFEEDGLGVLPAFTSNLERGGVEKLLDLSWTESCKPTATEPLFKKVSPWETSTSSFFPILAPAVGSYLPPTARAHSPASLSFASYRQVASFGSAAPPRQFDASQFSQGPVPGTCADWIPQSASCPTGPPQNPPSAPYCGIVFSGSSLSSAQSAPLQHPGGFTTRPSAGTFPELDSPQLHFSLPTDPDPIRGFGSYHPSAYSPFHFQPSAASLTANLRLPMASALPEALCSQSRTTPVDLCLLEESVGSLEGSRCPVFAFQSSDTESDELSEVLQDSCFLQIKCDTKDDSIPCFLEVKEEDEIVCTQHWQDAVPWTELLSLQTEDGFWKLTPELGLILNLNTNGLHSFLKQKGIQSLGVKGRECLLDLIATMLVLQFIRTRLEKEGIVFKSLMKMDDPSISRNIPWAFEAIKQASEWVRRTEGQYPSICPRLELGNDWDSATKQLLGLQPISTVSPLHRVLHYSQG

SEQ ID NO: 810198 - protein, 938 aa, Homo sapiens
MSIEMPYVIEFIFSDTHELKQKRTDCKAVISTMEGSSLDSSGFSLHIGLSAAYLPRMWVEKHPEKESEACMLVFQPDLDVDLPDLASESEVIICLDCSSSMEGVTFLQAKQIALHALSLVGEKQKVNIIQFGTGYKELFSYPKHITSNTTAAEFIMSATPTMGNTDFWKTLRYLSLLYPARGSRNILLVSDGHLQDESLTLQLVKRSRPHTRLFACGIGSTANRHVLRILSQCGAGVFEYFNAKSKHSWRKQIEDQMTRLCSPSCHSVSVKWQQLNPDAPEALQAPAQVPSLFRNDRLLVYGFIPHCTQATLCALIQEKEFCTMVSTTELQKTTGTMIHKLAARALIRDYEDGILHENETSHEMKKQTLKSLIIKLSKENSLITQFTSFVAVEKRDENESPFPDIPKVSELIAKEDVDFLPYMSWQGEPQEAVRNQSLLASSEWPELRLSKRKHRKIPFSKRKMELSQPEVSEDFEEDGLGVLPAFTSNLERGGVEKLLDLSWTESCKPTATEPLFKKVSPWETSTSSFFPILAPAVGSYLPPTARAHSPASLSFASYRQVASFGSAAPPRQFDASQFSQGPVPGTCADWIPQSASCPTGPPQNPPSAPYCGIVFSGSSLSSAQSAPLQHPGGFTTRPSAGTFPELDSPQLHFSLPTDPDPIRGFGSYHPSAYSPFHFQPSAASLTANLRLPMASALPEALCSQSRTTPVDLCLLEESVGSLEGSRCPVFAFQSSDTESDELSEVLQDSCFLQIKCDTKDDSIPCFLEVKEEDEIVCTQHWQDAVPWTELLSLQTEDGFWKLTPELGLILNLNTNGLHSFLKQKGIQSLGVKGRECLLDLIATMLVLQFIRTRLEKEGIVFKSLMKMDDPSISRNIPWAFEAIKQASEWVRRTEGQYPSICPRLELGNDWDSATKQLLGLQPISTVSPLHRVLHYSQG

SEQ ID NO: 810199 - protein, 1722 aa, Homo sapiens [sequence omitted]

SEQ ID NO: 810200 - protein, 1297 aa, Homo sapiens
MGIFANCIFCLKVKYLPQQQKKKLQTDIKENGGKFSFSLNPQCTHIILDNADVLSQYQLNSIQKNHVHIANPDFIWKSIREKRLLDVKNYDPYKPLDITPPPDQKASSSEVKTEGLCPDSATEEEDTVELTEFGMQNVEIPHLPQDFEVAKYNTLEKVGMEGGQEAVVVELQCSRDSRDCPFLISSHFLLDDGMETRRQFAIKKTSEDASEYFENYIEELKKQGFLLREHFTPEATQLASEQLQALLLEEVMNSSTLSQEVSDLVEMIWAEALGHLEHMLLKPVNRISLNDVSKAEGILLLVKAALKNGETAEQLQKMMTEFYRLIPHKGTMPKEVNLGLLAKKADLCQLIRDMVNVCETNLSKPNPPSLAKYRALRCKIEHVEQNTEEFLRVRKEVLQNHHSKSPVDVLQIFRVGRVNETTEFLSKLGNVRPLLHGSPVQNIVGILCRGLLLPKVVEDRGVQRTDVGNLGSGIYFSDSLSTSIKYSHPGETDGTRLLLICDVALGKCMDLHEKDFSLTEAPPGYDSVHGVSQTASVTTDFEDDEFVVYKTNQVKMKYIIKFSMPGDQIKDFHPSDHTELEEYRPEFSNFSKVEDYQLPDAKTSSSTKAGLQDASGNLVPLEDVHIKGRIIDTVAQVIVFQTYTNKSHVPIEAKYIFPLDDKAAVCGFEAFINGKHIVGEIKEKEEAQQEYLEAVTQGHGAYLMSQDAPDVFTVSVGNLPPKAKVLIKITYITELSILGTVGVFFMPATVAPWQQDKALNENLQDTVEKICIKEIGTKQSFSLTMSIEMPYVIEFIFSDTHELKQKRTDCKAVISTMEGSSLDSSGFSLHIGLSAAYLPRMWVEKHPEKESEACMLVFQPDLDVDLPDLASESEVIICLDCSSSMEGVTFLQAKQIALHALSLVGEKQKVNIIQFGTGYKELFSYPKHITSNTTAAEFIMSATPTMGNTDFWKTLRYLSLLYPARGSRNILLVSDGHLQDESLTLQLVKRSRPHTRLFACGIGSTANRHVLRILSQCGAGVFEYFNAKSKHSWRKQIEDQMTRLCSPSCHSVSVKWQQLNPDAPEALQAPAQVPSLFRNDRLLVYGFIPHCTQATLCALIQEKEFCTMVSTTELQKTTGTMIHKLAARALIRDYEDGILHENETSHEMKKQTLKSLIIKLSKENSLITQFTSFVAVEKRDENESPFPDIPKVSELIAKEDVDFLPYMSWQGEPQEAVRNQSLLASSEWPELRLSKRKHRKIPFSKRKMELSQPEVSEDFEEDGLGVLPAFTSNLERGVLTQKVMSYQKYFKTAAFYK

SEQ ID NO: 810201 - protein, 1722 aa, Homo sapiens [sequence omitted]

SEQ ID NO: 810202 - protein, 246 aa, Homo sapiens [sequence omitted]

SEQ ID NO: 810203 - protein, 1003 aa, Homo sapiens
MGIFANCIFCLKVKYLPQQQKKKLQTDIKENGGKFSFSLNPQCTHIILDNADVLSQYQLNSIQKNHVHIANPDFIWKSIREKRLLDVKNYDPYKPLDITPPPDQKASSSEVKTEGLCPDSATEEEDTVELTEFGMQNVEIPHLPQDFEVAKYNTLEKVGMEGGQEAVVVELQCSRDSRDCPFLISSHFLLDDGMETRRQFAIKKTSEDASEYFENYIEELKKQGFLLREHFTPEATQLASEQLQALLLEEVMNSSTLSQEVSDLVEMIWAEALGHLEHMLLKPVNRISLNDVSKAEGILLLVKAALKNGETAEQLQKMMTEFYRLIPHKGTMPKEVNLGLLAKKADLCQLIRDMVNVCETNLSKPNPPSLAKYRALRCKIEHVEQNTEEFLRVRKEVLQNHHSKSPVDVLQIFRVGRVNETTEFLSKLGNVRPLLHGSPVQNIVGILCRGLLLPKVVEDRGVQRTDVGNLGSGIYFSDSLSTSIKYSHPGETDGTRLLLICDVALGKCMDLHEKDFSLTEAPPGYDSVHGVSQTASVTTDFEDDEFVVYKTNQVKMKYIIKFSMPGDQIKDFHPSDHTELEEYRPEFSNFSKVEDYQLPDAKTSSSTKAGLQDASGNLVPLEDVHIKGRIIDTVAQVIVFQTYTNKSHVPIEAKYIFPLDDKAAVCGFEAFINGKHIVGEIKEKEEAQQEYLEAVTQGHGAYLMSQDAPDVFTVSVGNLPPKAKVLIKITYITELSILGTVGVFFMPATVAPWQQDKALNENLQDTVEKICIKEIGTKQSFSLTMSIEMPYVIEFIFSDTHELKQKRTDCKAVISTMEGSSLDSSGFSLHIGLSAAYLPRMWVEKHPEKESEACMLVFQPDLDVDLPDLASESEVIICLDCSSSMEGVTFLQAKQIALHALSLVGEKQKVNIIQFGTGYKELFSYPKHITSNTTAAEFIMSATPTMGNTDFWKTLRYLSLLYPARGSRNILLVSDGHLQDESLTLQLVKRSRPHTRLFACGIG

SEQ ID NO: 810204 - protein, 1003 aa, Homo sapiens; identical to SEQ ID NO: 810203

SEQ ID NO: 810205 - protein, 864 aa, Homo sapiens
MGIFANCIFCLKVKYLPQQQKKKLQTDIKENGGKFSFSLNPQCTHIILDNADVLSQYQLNSIQKNHVHIANPDFIWKSIREKRLLDVKNYDPYKPLDITPPPDQKASSSEVKTEGLCPDSATEEEDTVELTEFGMQNVEIPHLPQDFEVAKYNTLEKVGMEGGQEAVVVELQCSRDSRDCPFLISSHFLLDDGMETRRQFAIKKTSEDASEYFENYIEELKKQGFLLREHFTPEATQLASEQLQALLLEEVMNSSTLSQEVSDLVEMIWAEALGHLEHMLLKPVNRISLNDVSKAEGILLLVKAALKNGETAEQLQKMMTEFYRLIPHKGTMPKEVNLGLLAKKADLCQLIRDMVNVCETNLSKPNPPSLAKYRALRCKIEHVEQNTEEFLRVRKEVLQNHHSKSPVDVLQIFRVGRVNETTEFLSKLGNVRPLLHGSPVQNIVGILCRGLLLPKVVEDRGVQRTDVGNLGSGIYFSDSLSTSIKYSHPGETDGTRLLLICDVALGKCMDLHEKDFSLTEAPPGYDSVHGVSQTASVTTDFEDDEFVVYKTNQVKMKYIIKFSMPGDQIKDFHPSDHTELEEYRPEFSNFSKVEDYQLPDAKTSSSTKAGLQDASGNLVPLEDVHIKGRIIDTVAQVIVFQTYTNKSHVPIEAKYIFPLDDKAAVCGFEAFINGKHIVGEIKEKEEAQQEYLEAVTQGHGAYLMSQDAPDVFTVSVGNLPPKAKVLIKITYITELSILGTVGVFFMPATVAPWQQDKALNENLQDTVEKICIKEIGTKQSFSLTMSIEMPYVIEFIFSDTHELKQKRTDCKAVISTMEGSSLDSSGFSLHIGLSAAYLPRMWVEKHPEKESEVYSFLLRHRRHY

SEQ ID NO: 810206 - protein, 525 aa, Homo sapiens
MAVPGEAEEEATVYLVVSGIPSVLRSAHLRSYFSQFREERGGGFLCFHYRHRPERAPPQAAPNSALIPTDPAAEGQLLSQTSATDVRPLSTRDSTPIQTRTCCCVISVRGLAQAQRLIRMYSGRRWLDSHGTWLPGRCLIRRLRLPTEASGLGSFPFKTRKELQSWKAENEAFTLADLKQLPELNPPVLMPRGNVGTPLRVFLELIRACRLPPRIITQLQLQFPKTGSSRRYGNVPFEYEDSETVEQEELVYTAEGEEIPQGTYLADIPASPCGEPEEEVGKEEEEESHSDEDDDRGEEWERHEALHEDVTGQERTTEQLFEEEIELKWEKGGSGLVFYTDAQFWQEEEGDFDEQTADDWDVDMSVYYDRDGGDKDARDSVQMRLEQRLRDGQEDGSVIERQVGTFERHTKGIGRKVMERQGWAEGQGLGCRCSGVPEALDSDGQHPRCKRGLGYHGEKLQPFGQLKRPRRNGLGLISTIYDEPLPQDQTESLLRRQPPTSMKFRTDMAFVRGSSCASDSPSLPD

SEQ ID NO: 810207 - protein, 334 aa, Homo sapiens
MSGLSPLETLLQSRPAPAAASSRIITQLQLQFPKTGSSRRYGNVPFEYEDSETVEQEELVYTAEGEEIPQGTYLADIPASPCGEPEEEVGKEEEEESHSDEDDDRGEEWERHEALHEDVTGQERTTEQLFEEEIELKWEKGGSGLVFYTDAQFWQEEEGDFDEQTADDWDVDMSVYYDRDGGDKDARDSVQMRLEQRLRDGQEDGSVIERQVGTFERHTKGIGRKVMERQGWAEGQGLGCRCSGVPEALDSDGQHPRCKRGLGYHGEKLQPFGQLKRPRRNGLGLISTIYDEPLPQDQTESLLRRQPPTSMKFRTDMAFVRGSSCASDSPSLPD

SEQ ID NO: 810208 - protein, 324 aa, Homo sapiens
MGNLLKVLTCTDLEQGPNFFLDFENAQPTESEKEIYNQVNVVLKDAEGILEDLQSYRGAGHEIREAIQHPADEKLQEKAWGAVVPLVGKLKKFYEFSQRLEAALRGLLGALTSTPYSPTQHLEREQALAKQFAEILHFTLRFDELKMTNPAIQNDFSYYRRTLSRMRINNVPAEGENEVNNELANRMSLFYAEATPMLKTLSDATTKFVSENKNLPIENTTDCLSTMASVCRVMLETPEYRSRFTNEETVSFCLRVMVGVIILYDHVHPVGAFAKTSKIDMKGCIKVLKDQPPNSVEGLLNALRYTTKHLNDETTSKQIKSMLQ

SEQ ID NO: 810209 - protein, 324 aa, Homo sapiens; identical to SEQ ID NO: 810208

SEQ ID NO: 810210 - protein, 107 aa, Homo sapiens
MTNPAIQNDFSYYRRTLSRMRINNVPAEGENEVNNELANRMSLFYAEATPMLKTLSDATTKFVSENKNLPIENTTDCLSTMASVCRVMLETPEYRSRLPPGGDAVIC

SEQ ID NO: 810211 - protein, 324 aa, Homo sapiens; identical to SEQ ID NO: 810208

SEQ ID NO: 810212 - protein, 324 aa, Homo sapiens; identical to SEQ ID NO: 810208

SEQ ID NO: 810213 - protein, 324 aa, Homo sapiens; identical to SEQ ID NO: 810208

SEQ ID NO: 810214 - protein, 324 aa, Homo sapiens; identical to SEQ ID NO: 810208

SEQ ID NO: 810215 - protein, 324 aa, Homo sapiens; identical to SEQ ID NO: 810208

SEQ ID NO: 810216 - protein, 324 aa, Homo sapiens; identical to SEQ ID NO: 810208

SEQ ID NO: 810217 - protein, 324 aa, Homo sapiens; identical to SEQ ID NO: 810208

SEQ ID NO: 810218 - protein, 324 aa, Homo sapiens; identical to SEQ ID NO: 810208

SEQ ID NO: 810219 - protein, 324 aa, Homo sapiens; identical to SEQ ID NO: 810208

SEQ ID NO: 810220 - protein, 351 aa, Homo sapiens
MGNLIKVLTRGHRPQCSTFFLGLWYLNMGNLLKVLTCTDLEQGPNFFLDFENAQPTESEKEIYNQVNVVLKDAEGILEDLQSYRGAGHEIREAIQHPADEKLQEKAWGAVVPLVGKLKKFYEFSQRLEAALRGLLGALTSTPYSPTQHLEREQALAKQFAEILHFTLRFDELKMTNPAIQNDFSYYRRTLSRMRINNVPAEGENEVNNELANRMSLFYAEATPMLKTLSDATTKFVSENKNLPIENTTDCLSTMASVCRVMLETPEYRSRFTNEETVSFCLRVMVGVIILYDHVHPVGAFAKTSKIDMKGCIKVLKDQPPNSVEGLLNALRYTTKHLNDETTSKQIKSMLQ

SEQ ID NO: 810221 - protein, 324 aa, Homo sapiens; identical to SEQ ID NO: 810208

SEQ ID NO: 810222 - protein, 351 aa, Homo sapiens; identical to SEQ ID NO: 810220

SEQ ID NO: 810223 - protein, 178 aa, Homo sapiens
MTNPAIQNDFSYYRRTLSRMRINNVPAEGENEVNNELANRMSLFYAEATPMLKTLSDATTKFVSENKNLPIENTTDCLSTMASVCRVMLETPEYRSRFTNEETVSFCLRVMVGVIILYDHVHPVGAFAKTSKIDMKGCIKVLKDQPPNSVEGLLNALRYTTKHLNDETTSKQIKSMLQ

SEQ ID NO: 810224 - protein, 178 aa, Homo sapiens; identical to SEQ ID NO: 810223

SEQ ID NO: 810225 - protein, 178 aa, Homo sapiens; identical to SEQ ID NO: 810223

SEQ ID NO: 810226 - protein, 324 aa, Homo sapiens; identical to SEQ ID NO: 810208

SEQ ID NO: 810227 - protein, 324 aa, Homo sapiens; identical to SEQ ID NO: 810208

SEQ ID NO: 810228 - protein, 324 aa, Homo sapiens; identical to SEQ ID NO: 810208

SEQ ID NO: 810229 - protein, 310 aa, Homo sapiens
MGNLLKVLTCTDLEQGPNFFLDFENAQPTESEKEIYNQVNVVLKDAEGILEDLQSYRGAGHEIREAIQHPADEKLQEKAWGAVVPLVGKLKKFYEFSQRLEAALRGLLGALTSTPYSPTQHLEREQALAKQFAEILHFTLRFDELKMTNPAIQNDFSYYRRTLSRMRINNVPAEGENEVNNELANRMSLFYAEATPMLKTLSDATTKFVSENKNLPIENTTDCLSTMASVCRVMLETPEYRSRFTNEETVSFCLRVMVGVIILYDHVHPVGAFAKTSKIDMKGCIKVLKDQPPNSVEGLLNALSAITILE

SEQ ID NO: 810230 - protein, 296 aa, Homo sapiens
MGNLLKVLTCTDLEQGPNFFLDFENAQPTESEKEIYNQVNVVLKDAEGILEDLQSYRGAGHEIREAIQHPADEKLQEKAWGAVVPLVGKLKKFYEFSQRLEAALRGLLGALTSTPYSPTQHLEREQALAKQFAEILHFTLRFDELKMTNPAIQNDFSYYRRTLSRMRINNVPAEGENEVNNELANRMSLFYAEATPMLKTLSDATTKFVSENKNLPIENTTDCLSTMASVCRVMLETPEYRSRFTNEETVSFCLRVMVGVIILYDHVHPVGAFAKTSKIDCGRSSKCSQVHNKTFE

SEQ ID NO: 810231 - protein, 324 aa, Homo sapiens; identical to SEQ ID NO: 810208

SEQ ID NO: 810232 - protein, 298 aa, Homo sapiens
MGNLLKVLTCTDLEQGPNFFLDFENAQPTESEKEIYNQVNVVLKDAEGILEDLQSYRGAGHEIREAIQHPADEKLQEKAWGAVVPLVGKLKKFYEFSQRLEAALRGLLGALTSTPYSPTQHLEREQALAKQFAEILHFTLRFDELKMTNPAIQNDFSYYRRTLSRMRINNVPAEGENEVNNELANRMSLFYAEATPMLKTLSDATTKFVSENKNLPIENTTDCLSTMASVCRVMLETPEYRSRFTNEETVSFCLRVMVGVIILYDHVHPVGAFAKTSKIDCKLLFYINNFKRVSPWKP

SEQ ID NO: 810233 - protein, 241 aa, Homo sapiens
MGNLLKVLTCTDLEQGPNFFLDFENAQPTESEKEIYNQVNVVLKDAEGILEDLQSYRGAGHEIREAIQHPADEKLQEKAWGAVVPLVGKLKKFYEFSQRLEAALRGLLGALTSTPYSPTQHLEREQALAKQFAEILHFTLRFDELKMTNPAIQNDFSYYRRTLSRMRINNVPAEGENEVNNELANRMSLFYAEATPMLKTLSDATTKFVSEQYTISLEIPDCVSPRFVFQVFWEPGYNALH

SEQ ID NO: 810234 - protein, 966 aa, Homo sapiens
MCPLAHPAQDLPLLPSQLSLDPSGPEWDCPLGSKDLEEEGPWGGGSGLPPTGCFPGSWRQDVGLDCKGSPEGAEARAWTVYYYSLLQSCLQQAGLPETQDRGQVPRTGCPGAEVTLCVLGSPSTFLPVLLEGGVQSPGNMLLCLSPAWLMKVPAPGQPGEAALLVSKAVSFHPGGLTFLDDFVPPRRATYFLAGLGLGPGRGREAAELARDLTCPTGASAELARLLEDRLLTRQLLAQQGGVAVPATLAFTYKPPGLLRGGDASLGLRLVELSGKEGQETLVKEEVEAFLRSEALGDILQVAVKLSGWRWRGRQAWRLHPRAELGAVVDTVLALLEKLEEEESVLVEAVYPPAQLPCSDGPSPGPGLAVRICAVVCRTQGDRPLLSKVVCGVGRGDRPLRHHNSLPRTLEVALAQCGLGEEAQVAAVRQRVKAAAEAALAAVLALEAGLSAEQRGGRRAHTDFLGVDFALTAAGGVLTPVALELNGGLCLEACGALEGLWAAPRLGPAADEAVAAPLVETMLRRSARCLMEGKQLLVVGAGGVSKKFVWEAARDYGLQLHLVESDPNHFASQLVQTFIHFDMTEHRRDEENARLLAELVRARGLKLDGCFSYWDDCLVLTALLCQELGLPCSSPAAMRLAKQKSLTQLHLLHHHGPPWPAPSLHAVPCCPLESEADVERAVHQVPLPGVMKLEFGAGAVGVRLVEDAPQCHEHFSRITRDLQGEADHPGIGLGWGNAMLLMEFVEGTEHDVDLVLFGGRLLAAFVSDNGPTRLPGFTETAACMPTGLAPEQEAQMVQAAFRCCLGCGLLDGVFNVELKLTGAGPRLIEINPRMGGFYLRDWILELYGVDLLLAAVMVACGLRPALPTRPRARGHLVGVMCLVSQHLQALSSTASRETLQALHDRGLLRLNLLEEALVPGEYEEPYCSVACAGPSPTEARLRLLGLCQGLGIDGPSYPVAHFLSHFK

SEQ ID NO: 810235 - protein, 126 aa, Homo sapiens
MAPQGAHLLGDGTEALALANWDSMPSGLRPSPLPSGPQHTISQQPRDSLRPSLISPQGMGEGRHQATRSKETSRLAQGGRACPLEDRLSCQACPGLGTAKNKNSIHTKPPSSPILGGRQPQRGEGR

SEQ ID NO: 810236 - protein, 385 aa, Homo sapiens
MTEHRRDEENARLLAELVRARGLKLDGCFSYWDDCLVLTALLCQELGLPCSSPAAMRLAKQKSLTQLHLLHHHGPPWPAPSLHAVPCCPLESEADVERAVHQVPLPGVMKLEFGAGAVGVRLVEDAPQCHEHFSRITRDLQGEADHPGIGLGWGNAMLLMEFVEGTEHDVDLVLFGGRLLAAFVSDNGPTRLPGFTETAACMPTGLAPEQEAQMVQAAFRCCLGCGLLDGVFNVELKLTGAGPRLIEINPRMGGFYLRDWILELYGVDLLLAAVMVACGLRPALPTRPRARGHLVGVMCLVSQHLQALSSTASRETLQALHDRGLLRLNLLEEALVPGEYEEPYCSVACAGPSPTEARLRLLGLCQGLGIDGPSYPVAHFLSHFK

SEQ ID NO: 810237 - protein, 979 aa, Homo sapiens
GRCATATAAAAASRPVRIRPPRPPSRCRRQLSLDPSGPEWDCPLGSKDLEEEGPWGGGSGLPPTGCFPGSWRQDVGLDCKGSPEGAEARAWTVYYYSLLQSCLQQAGLPETQDRGQVPRTGCPGAEVTLCVLGSPSTFLPVLLEGGVQSPGNMLLCLSPAWLMKVPAPGQPGEAALLVSKAVSFHPGGLTFLDDFVPPRRATYFLAGLGLGPGRGREAAELARDLTCPTGASAELARLLEDRLLTRQLLAQQGGVAVPATLAFTYKPPGLLRGGDASLGLRLVELSGKEGQETLVKEEVEAFLRSEALGDILQVAVKLSGWRWRGRQAWRLHPRAELGAVVDTVLALLEKLEEEESVLVEAVYPPAQLPCSDGPSPGPGLAVRICAVVCRTQGDRPLLSKVVCGVGRGDRPLRHHNSLPRTLEVALAQCGLGEEAQVAAVRQRVKAAAEAALAAVLALEAGLSAEQRGGRRAHTDFLGVDFALTAAGGVLTPVALELNGGLCLEACGALEGLWAAPRLGPAADEAVAAPLVETMLRRSARCLMEGKQLLVVGAGGVSKKFVWEAARDYGLQLHLVESDPNHFASQLVQTFIHFDMTEHRRDEENARLLAELVRARGLKLDGCFSYWDDCLVLTALLCQELGLPCSSPAAMRLAKQKSLTQLHLLHHHGPPWPAPSLHAVPCCPLESEADVERAVHQVPLPGVMKLEFGAGAVGVRLVEDAPQCHEHFSRITRDLQGEADHPGIGLGWGNAMLLMEFVEGTEHDVDLVLFGGRLLAAFVSDNGPTRLPGFTETAACMPTGLAPEQEAQMVQAAFRCCLGCGLLDGVFNVELKLTGAGPRLIEINPRMGGFYLRDWILELYGVDLLLAAVMVACGLRPALPTRPRARGHLVGVMCLVSQHLQALSSTASRETLQALHDRGLLRLNLLEEALVPGEYEEPYCSVACAGPSPTEARLRLLGLCQGLGIDGPSYPVAHFLSHFK

SEQ ID NO: 810238 - protein, 966 aa, Homo sapiens; identical to SEQ ID NO: 810234

SEQ ID NO: 810239 - protein, 977 aa, Homo sapiens
AARAWLGPGEREGRSEGAKEQAERPSPKPSRAANPPARPRSCPPCLAAGPSMVMADGPRHLQRGPVRVGFYDIEGTLGKGNFAVVKLGRHRITKTEVAIKIIDKSQLDAVNLEKIYREVQIMKMLDHPHIIKLYQVMETKSMLYLVTEYAKNGEIFDYLANHGRLNESEARRKFWQILSAVDYCHGRKIVHRDLKAENLLLDNNMNIKIADFGFGNFFKSGELLATWCGSPPYAAPEVFEGQQYEGPQLDIWSMGVVLYVLVCGALPFDGPTLPILRQRVLEGRFRIPYFMSEDCEHLIRRMLVLDPSKRLTIAQIKEHKWMLIEVPVQRPVLYPQEQENEPSIGEFNEQVLRLMHSLGIDQQKTIESLQNKSYNHFAAIYFLLVERLKSHRSSFPVEQRLDGRQRRPSTIAEQTVAKAQTVGLPVTMHSPNMRLLRSALLPQASNVEAFSFPASGCQAEAAFMEEECVDTPKVNGCLLDPVPPVLVRKGCQSLPSNMMETSIDEGLETEGEAEEDPAHAFEAFQSTRSGQRRHTLSEVTNQLVVMPGAGKIFSMNDSPSLDSVDSEYDMGSVQRDLNFLEDNPSLKDIMLANQPSPRMTSPFISLRPTNPAMQALSSQKREVHNRSPVSFREGRRASDTSLTQGIVAFRQHLQNLARTKGILELNKVQLLYEQIGPEADPNLAPAAPQLQDLASSCPQEEVSQQQESVSTLPASVHPQLSPRQSLETQYLQHRLQKPSLLSKAQNTCQLYCKEPPRSLEQQLQEHRLQQKRLFLQKQSQLQAYFNQMQIAESSYPQPSQQLPLPRQETPPPSQQAPPFSLTQPLSPVLEPSSEQMQYSPFLSQYQEMQLQPLPSTSGPRAAPPLPTQLQQQQPPPPPPPPPPRQPGAAPAPLQFSYQTCELPSAASPAPDYPTPCQYPVDGAQQSDLTGPDCPRSPGLQEAPSSYDPLALSELPGLFDCEMLDAVDPQHNGYVLVN

SEQ ID NO: 810240 - protein, 617 aa, Homo sapiens
AARAWLGPGEREGRSEGAKEQAERPSPKPSRAANPPARPRSCPPCLAAGPSMVMADGPRHLQRGPVRVGFYDIEGTLGKGNFAVVKLGRHRITKTEVAIKIIDKSQLDAVNLEKIYREVQIMKMLDHPHIIKLYQVMETKSMLYLVTEYAKNGEIFDYLANHGRLNESEARRKFWQILSAVDYCHGRKIVHRDLKAENLLLDNNMNIKIADFGFGNFFKSGELLATWCGSPPYAAPEVFEGQQYEGPQLDIWSMGVVLYVLVCGALPFDGPTLPILRQRVLEGRFRIPYFMSEDCEHLIRRMLVLDPSKRLTIAQIKEHKWMLIEVPVQRPVLYPQEQENEPSIGEFNEQVLRLMHSLGIDQQKTIESLQNKSYNHFAAIYFLLVERLKSHRSSFPVEQRLDGRQRRPSTIAEQTVAKAQTVGLPVTMHSPNMRLLRSALLPQASNVEAFSFPASGCQAEAAFMEEECVDTPKVNGCLLDPVPPVLVRKGCQSLPSNMMETSIDEGLETEGEAEEDPAHAFEAFQSTRSGQRRHTLSEVTNQLVVMPGAGKIFSMNDSPSLDSVDSEYDMGSVQRDLNFLEDNPSLKDIMLANQPSPKSLKGKEVERKVCFTSGTAV

SEQ ID NO: 810241 - protein, 977 aa, Homo sapiens; identical to SEQ ID NO: 810239

SEQ ID NO: 810242 - protein, 977 aa, Homo sapiens; identical to SEQ ID NO: 810239

SEQ ID NO: 810243 - protein, 977 aa, Homo sapiens; identical to SEQ ID NO: 810239

SEQ ID NO: 810244 - protein, 977 aa, Homo sapiens; identical to SEQ ID NO: 810239

SEQ ID NO: 810245 - protein, 1023 aa, Homo sapiens
AARAWLGPGEREGRSEGAKEQAERPSPKPSRAANPPARPRSCPPCLAAGPSMVMADGPRHLQRGPVRVGFYDIEGTLGKGNFAVVKLGRHRITKTEVAIKIIDKSQLDAVNLEKIYREVQIMKMLDHPHIIKLYQVMETKSMLYLVTEYAKNGEIFDYLANHGRLNESEARRKFWQILSAVDYCHGRKIVHRDLKAENLLLDNNMNIKIADFGFGNFFKSGELLATWCGSPPYAAPEVFEGQQYEGPQLDIWSMGVVLYVLVCGALPFDGPTLPILRQRVLEGRFRIPYFMSEDCEHLIRRMLVLDPSKRLTIAQIKEHKWMLIEVPVQRPVLYPQEQENEPSIGEFNEQVLRLMHSLGIDQQKTIESLQNKSYNHFAAIYFLLVERLKSHRSSFPVEQRLDGRQRRPSTIAEQTVAKAQTVGLPVTMHSPNMRLLRSALLPQASNVEAFSFPASGCQAEAAFMEEECVDTPKVNGCLLDPVPPVLVRKGCQSLPSNMMETSIDEGLETEGEAEEDPAHAFEAFQSTRSGQRRHTLSEVTNQLVVMPGAGKIFSMNDSPSLDSVDSEYDMGSVQRDLNFLEDNPSLKDIMLANQPSPRMTSPFISLRPTNPAMQALSSQKREVHNRSPVSFREGRRASDTSLTQGEHFLLCFLKLSVVGEQFLAMLVWSPVVTERPCILVKLFGLGAFFSGIVAFRQHLQNLARTKGILELNKVQLLYEQIGPEADPNLAPAAPQLQDLASSCPQEEVSQQQESVSTLPASVHPQLSPRQSLETQYLQHRLQKPSLLSKAQNTCQLYCKEPPRSLEQQLQEHRLQQKRLFLQKQSQLQAYFNQMQIAESSYPQPSQQLPLPRQETPPPSQQAPPFSLTQPLSPVLEPSSEQMQYSPFLSQYQEMQLQPLPSTSGPRAAPPLPTQLQQQQPPPPPPPPPPRQPGAAPAPLQFSYQTCELPSAASPAPDYPTPCQYPVDGAQQSDLTGPDCPRSPGLQEAPSSYDPLALSELPGLFDCEMLDAVDPQHNGYVLVN

SEQ ID NO: 810246 - protein, 657 aa, Homo sapiens
AARAWLGPGEREGRSEGAKEQAERPSPKPSRAANPPARPRSCPPCLAAGPSMVMADGPRHLQRGPVRVGFYDIEGTLGKGNFAVVKLGRHRITKTEVAIKIIDKSQLDAVNLEKIYREVQIMKMLDHPHIIKLYQVMETKSMLYLVTEYAKNGEIFDYLANHGRLNESEARRKFWQILSAVDYCHGRKIVHRDLKAENLLLDNNMNIKIADFGFGNFFKSGELLATWCGSPPYAAPEVFEGQQYEGPQLDIWSMGVVLYVLVCGALPFDGPTLPILRQRVLEGRFRIPYFMSEDCEHLIRRMLVLDPSKRLTIAQIKEHKWMLIEVPVQRPVLYPQEQENEPSIGEFNEQVLRLMHSLGIDQQKTIESLQNKSYNHFAAIYFLLVERLKSHRSSFPVEQRLDGRQRRPSTIAEQTVAKAQTVGLPVTMHSPNMRLLRSALLPQASNVEAFSFPASGCQAEAAFMEEECVDTPKVNGCLLDPVPPVLVRKGCQSLPSNMMETSIDEGLETEGEAEEDPAHAFEAFQSTRSGQRRHTLSEVTNQLVVMPGAGKIFSMNDSPSLDSVDSEYDMGSVQRDLNFLEDNPSLKDIMLANQPSPRMTSPFISLRPTNPAMQALSSQKREVHNRSPVSFREGRRASDTSLTQGEHFLLCFLKLAS

SEQ ID NO: 810247 - protein, 1023 aa, Homo sapiens; identical to SEQ ID NO: 810245

SEQ ID NO: 810248 - protein, 190 aa, Homo sapiens [sequence omitted]

SEQ ID NO: 810249 - protein, 359 aa, Homo sapiens
SLLYDEPFDCGLRVQAQTHQTASLTQGIVAFRQHLQNLARTKGILELNKVQLLYEQIGPEADPNLAPAAPQLQDLASSCPQEEVSQQQESVSTLPASVHPQLSPRQSLETQYLQHRLQKPSLLSKAQNTCQLYCKEPPRSLEQQLQEHRLQQKRLFLQKQSQLQAYFNQMQIAESSYPQPSQQLPLPRQETPPPSQQAPPFSLTQPLSPVLEPSSEQMQYSPFLSQYQEMQLQPLPSTSGPRAAPPLPTQLQQQQPPPPPPPPPPRQPGAAPAPLQFSYQTCELPSAASPAPDYPTPCQYPVDGAQQSDLTGPDCPRSPGLQEAPSSYDPLALSELPGLFDCEMLDAVDPQHNGYVLVN

SEQ ID NO: 810250 - protein, 1023 aa, Homo sapiens; identical to SEQ ID NO: 810245

SEQ ID NO: 810251 - protein, 339 aa, Homo sapiens
EKPHECRDCGKAFKTRNRLCMHQLIHTGEKPYKCNCCGKAFQFKHSLTIHGRIHTGEKPYECEECGKAFSGSSDLTKHIRIHTGERPYECSKCGRAFSRSSDLSKHKRIHTREKHYGCPQCGKDFSIKAELTKHRRIHTEEKRYRCEECGKAFRHNCKRRAHEREHTGEKPYQCRDCGKTFQDKHCLTIHQRIHTGEKPYKCLECGKAFSGKSNLTNHRRIHTGEKPHKCEVCGMAFHHSSVLRQHKRIHTGEKPYTCSECGTSFRQGSALIGHKRVHTGEKPYECEECGKAFRVSSNLTGHKKRKHQVWSTHELDGSRKSLSPVTVSQTSVVSILTSA

SEQ ID NO: 810252 - protein, 1064 aa, Homo sapiens
SESLENEPENLVRVESRDDHLSLPDVTCENFISKVQDVISINHDESLLPESLESMMYGKKVLSQEPSSFQESPSTNTESRKDVITISISKDGNCQSGGPEAEIASGPTFMGSLEAGGVAQANIKNGKHLLMSISKEGELCCSEAGQRPENIGQLEAKCLASPSLNPGNESGFVDMCSLSVCDSKRNLSSDQQLIDLLENKSLESKLILSQNHSDEEEEEEENEEENLAMAVGMGERPEVLHLTEPTTNISREKNQGFQDETKKGSLEVANQTPGLQRAFPAPAACQCHCKHMERWMHGLENDEFEIEKPKAYIPDLFKSKTNTIAMEGEPTAIPSQPFKVKHELLKEPWKESAEGQNVFPTYPLEGSELKSEDMDFENKDDYDRDGNCHSQDYPGKYSEEESKSSTSGITGDIGDELQEARAPTIAQLLQEKTLYSFSEWPKDRVIINRLDNICHVVLKGKWPSSQQYEPSGTLPTPVLTSSAGSRTSLSEPEAAEHSFSNGAALAAQIHKESFLAPVFTKDEQKHRRPYEFEVERDAKARGLEQFSATHGHTPIILNGWHGESAMDLSCSSEGSPGATSPFPVSASTPKIGAISSLQGALGMDLSGILQAGLIHPVTGQIVNGSLRRDDAATRRRRGRRKHVEGGMDLIFLKEQTLQAGILEVHEDPGQATLSTTHPEGPGPATSAPEPATAASSQAEKSIPSKSLLDWLRQQADYSLEVPGFGANFSDKPKQRRPRCKEPGKLDVSSLSGEERVPAIPKEPGLRGFLPENKFNHTLAEPILRDTGPRRRGRRPRSELLKAPSIVADSPSGMGPLFMNGLIAGMDLVGLQNMRNMPGIPLTGLVGFPAGFATMPTGEEVKSTLSMLPMMLPGMAAVPQMFGVGGLLSPPMATTCTSTAPASLSSTTKSGTAVTEKTAEDKPSSHDVKTDTLAEDKPGPGPFSDQSEPAITTSSPVAFNPFLIPGVSPGLIYPSMFLSPGMGMALPAMQQARHSEIVGLESQKRKKKKTKGDNPNSHPEPAPSCEREPSGDENCAEPSAPLPAEREHGAQAGEGALKDSNNDTN

SEQ ID NO: 810253 - protein, 252 aa, Homo sapiens [sequence omitted]

SEQ ID NO: 810254 - protein, 234 aa, Homo sapiens
MGPLFMNGLIAGMDLVGLQNMRNMPGIPLTGLVGFPAGFATMPTGEEVKSTLSMLPMMLPGMAAVPQMFGVGGLLSPPMATTCTSTAPASLSSTTKSGTAVTEKTAEDKPSSHDVSEPAITTSSPVAFNPFLIPGVSPGLIYPSMFLSPGMGMALPAMQQARHSEIVGLESQKRKKKKTKGDNPNSHPEPAPSCEREPSGDENCAEPSAPLPAEREHGAQAGEGALKDSNNDTN

SEQ ID NO: 810255 - protein, 252 aa, Homo sapiens [sequence omitted]

SEQ ID NO: 810256 - protein, 240 aa, Homo sapiens
MDLVGLQNMRNMPGIPLTGLVGFPAGFATMPTGEEVKSTLSMLPMMLPGMAAVPQMFGVGGLLSPPMATTCTSTAPASLSSTTKSGTAVTEKTAEDKPSSHDVKTDTLAEDKPGPGPFSDQSEPAITTSSPVAFNPFLIPGVSPGLIYPSMFLSPGMGMALPAMQQARHSEIVGLESQKRKKKKTKGDNPNSHPEPAPSCEREPSGDENCAEPSAPLPAEREHGAQAGEGALKDSNNDTN

SEQ ID NO: 810257 - protein, 363 aa, Homo sapiens
MQAFLKGTSISTKPPLTKDRGVAASAGSSGENKKAKPVPWVEKYRPKCVDEVAFQEEVVAVLKKSLEGADLPNLLFYGPPGTGKTSTILAAARELFGPELFRLRVLELNASDERGIQVVREKVKNFAQLTVSGSRSDGKPCPPFKIVILDEADSMTSAAQAALRRTMEKESKTTRFCLICNYVSRIIEPLTSRCSKFRFKPLSDKIQQQRLLDIAKKENVKISDEGIAYLVKVSEGDLRKAITFLQSATRLTGGKEITEKVITDIAGVIPAEKIDGVFAACQSGSFDKLEAVVKDLIDEGHAATQLVNQLHDVVVENNLSDKQKSIITEKLAEVDKCLADGADEHLQLISLCATVMQQLSQNC

SEQ ID NO: 810258 - protein, 363 aa, Homo sapiens; identical to SEQ ID NO: 810257

SEQ ID NO: 810259 - protein, 363 aa, Homo sapiens; identical to SEQ ID NO: 810257

SEQ ID NO: 810260 - protein, 336 aa, Homo sapiens
MQAFLKGTSISTKPPLTKDRGVAASAGSSGENKKAKPVPWVEKYRPKCVDEVAFQEEVVAVLKKSLEGADLPNLLFYGPPGTGKTSTILAAARELFGPELFRLRVLELNASDERGIQVVREKVKNFAQLTVSGSRSDGKPCPPFKIVILDEADSMTSAAQAALRRTMEKESKTTRFCLICNYVSRIIEPLTSRCSKFRFKPLSDKIQQQRLLDIAKKENVKISDEGIAYLVKVSEGDLRKAITFLQSATRLTGGKEITEKVITDIAGDLIDEGHAATQLVNQLHDVVVENNLSDKQKSIITEKLAEVDKCLADGADEHLQLISLCATVMQQLSQNC

SEQ ID NO: 810261 - protein, 299 aa, Homo sapiens [sequence omitted]

SEQ ID NO: 810262 - protein, 505 aa, Homo sapiens
MGSGPLSLPLALSPPRLLLLLLLSLLPVARASEAEHRLFERLFEDYNEIIRPVANVSDPVIIHFEVSMSQLVKVDEVNQIMETNLWLKQIWNDYKLKWNPSDYGGAEFMRVPAQKIWKPDIVLYNNAVGDFQVDDKTKALLKYTGEVTWIPPAIFKSSCKIDVTYFPFDYQNCTMKFGSWSYDKAKIDLVLIGSSMNLKDYWESGEWAIIKAPGYKHDIKYNCCEEIYPDITYSLYIRRLPLFYTINLIIPCLLISFLTVLVFYLPSDCGEKVTLCISVLLSLTVFLLVITETIPSTSLVIPLIGEYLLFTMIFVTLSIVITVFVLNVHYRTPTTHTMPSWVKTVFLNLLPRVMFMTRPTSNEGNAQKPRPLYGAELSNLNCFSRAESKGCKEGYPCQDGMCGYCHHRRIKISNFSANLTRSSSSESVDAVLSLSALSPEIKEAIQSVKYIAENMKAQNEAKEIQDDWKYVAMVIDRIFLWVFTLVCILGTAGLFLQPLMAREDA

SEQ ID NO: 810263 - protein, 676 aa, Homo sapiens
EVHLAGPAPPVSLYGACTSPGGPNPLRELHTPRKPGTETESLSFLVVVTAPAQIWSDAAGRSTQPGGEGARPALGTGTWSPFPYRTYAPPRARPPARPRLAQLQLRMVPVLPRVRGRWKPSGGEAERSPARLRPHGSRSGVCAGAARGEAVSATAAPAPDRPGPRPARPPAMGSGPLSLPLALSPPRLLLLLLLSLLPVARASEAEHRLFERLFEDYNEIIRPVANVSDPVIIHFEVSMSQLVKVDEVNQIMETNLWLKQIWNDYKLKWNPSDYGGAEFMRVPAQKIWKPDIVLYNNAVGDFQVDDKTKALLKYTGEVTWIPPAIFKSSCKIDVTYFPFDYQNCTMKFGSWSYDKAKIDLVLIGSSMNLKDYWESGEWAIIKAPGYKHDIKYNCCEEIYPDITYSLYIRRLPLFYTINLIIPCLLISFLTVLVFYLPSDCGEKVTLCISVLLSLTVFLLVITETIPSTSLVIPLIGEYLLFTMIFVTLSIVITVFVLNVHYRTPTTHTMPSWVKTVFLNLLPRVMFMTRPTSNEGNAQKPRPLYGAELSNLNCFSRAESKGCKEGYPCQDGMCGYCHHRRIKISNFSANLTRSSSSESVDAVLSLSALSPEIKEAIQSVKYIAENMKAQNEAKEIQDDWKYVAMVIDRIFLWVFTLVCILGTAGLFLQPLMAREDA

SEQ ID NO: 810264 - protein, 505 aa, Homo sapiens; identical to SEQ ID NO: 810262

SEQ ID NO: 810265 - protein, 505 aa, Homo sapiens; identical to SEQ ID NO: 810262

SEQ ID NO: 810266 - protein, 505 aa, Homo sapiens; identical to SEQ ID NO: 810262

SEQ ID NO: 810267 - protein, 505 aa, Homo sapiens; identical to SEQ ID NO: 810262

SEQ ID NO: 810268 - protein, 489 aa, Homo sapiens
MGSGPLSLPLALSPPRLLLLLLLSLLPVARASEAEHRLFERLFEDYNEIIRPVANVSDPVIIHFEVSMSQLVKVDEVNQIMETNLWLKQIWNDYKLKWNPSDYGGAEFMRVPAQKIWKPDIVLYNNAVGDFQVDDKTKALLKYTGEVTWIPPAIFKSSCKIDVTYFPFDYQNCTMKFGSWSYDKAKIDLVLIGSSMNLKDYWESGEWAIIKAPGYKHDIKYNCCEEIYPDITYSLYIRRLPLFYTINLIIPCLLISFLTVLVFYLPSDCGEKVTLCISVLLSLTVFLLVITETIPSTSLVIPLIGEYLLFTMIFVTLSIVITVFVLNVHYRTPTTHTMPSWVKTVFLNLLPRVMFMTRPTSNEGNAQKPRPLYGAELSNLNCFSRAESKGCKEGYPCQDGMCGYCHHRRIKISNFSANLTRSSSSESVDAVLSLSALSPEIKEAIQSVKYIAENMKAQNEAKEEQKAQEIQQLKRKEKSTETSDQEPGL

SEQ ID NO: 810269 - protein, 298 aa, Homo sapiens
EAGGNRTRKHDIKYNCCEEIYPDITYSLYIRRLPLFYTINLIIPCLLISFLTVLVFYLPSDCGEKVTLCISVLLSLTVFLLVITETIPSTSLVIPLIGEYLLFTMIFVTLSIVITVFVLNVHYRTPTTHTMPSWVKTVFLNLLPRVMFMTRPTSNEGNAQKPRPLYGAELSNLNCFSRAESKGCKEGYPCQDGMCGYCHHRRIKISNFSANLTRSSSSESVDAVLSLSALSPEIKEAIQSVKYIAENMKAQNEAKEIQDDWKYVAMVIDRIFLWVFTLVCILGTAGLFLQPLMAREDA

SEQ ID NO: 810270 - protein, 202 aa, Homo sapiens
RPLTVKPVGGGTACRRFSTVFVLNVHYRTPTTHTMPSWVKTVFLNLLPRVMFMTRPTSNEGNAQKPRPLYGAELSNLNCFSRAESKGCKEGYPCQDGMCGYCHHRRIKISNFSANLTRSSSSESVDAVLSLSALSPEIKEAIQSVKYIAENMKAQNEAKEIQDDWKYVAMVIDRIFLWVFTLVCILGTAGLFLQPLMAREDA

SEQ ID NO: 810271 - protein, 831 aa, Homo sapiens
MMKDCKHPNIVAYFGSYLRRDKLWICMEFCGGGSLQDIYHVTGPLSELQIAYVSRETLQGLYYLHSKGKMHRDIKGANILLTDNGHVKLADFGVSAQITATIAKRKSFIGTPYWMAPEVAAVERKGGYNQLCDLWAVGITAIELAELQPPMFDLHPMRALFLMTKSNFQPPKLKDKMKWSNSFHHFVKMALTKNPKKRPTAEKLLQHPFVTQHLTRSLAIELLDKVNNPDHSTYHDFDDDDPEPLVAVPHRIHSTSRNVREEKTRSEITFGQVKFDPPLRKETEPHHELPDSDGFLDSSEEIYYTARSNLDLQLEYGQGHQGGYFLGANKSLLKSVEEELHQRGHVAHLEDDEGDDDESKHSTLKAKIPPPLPPKPKSIFIPQEMHSTEDENQGTIKRCPMSGSPAKPSQVPPRPPPPRLPPHKPVALGNGMSSFQLNGERDGSLCQQQNEHRGTNLSRKEKKDVPKPISNGLPPTPKVHMGACFSKVFNGCPLKIHCASSWINPDTRDQYLIFGAEEGIYTLNLNELHETSMEQLFPRRCTWLYVMNNCLLSISGKASQLYSHNLPGLFDYARQMQKLPVAIPAHKLPDRILPRKFSVSAKIPETKWCQKCCVVRNPYTGHKYLCGALQTSIVLLEWVEPMQKFMLIKHIDFPIPCPLRMFEMLVVPEQEYPLVCVGVSRGRDFNQVVRFETVNPNSTSSWFTESDTPQTNVTHVTQLERDTILVCLDCCIKIVNLQGRLKSSRKLSSELTFDFQIESIVCLQDSVLAFWKHGMQGRSFRSNEVTQEISDSTRIFRLLGSDRVVVLESRPTDNPTANSNLYILAGHENSY

SEQ ID NO: 810272 - protein, 133 aa, Homo sapiens
LLFLFNTFVWKENNTLHKLSKLNCSTKTISKGMVATNTILTDALGFETVNPNSTSSWFTESDTPQTNVTHVTQLERDTILVCLDCCIKIVNLQGRLKSSRKLSSELTFDFQIESIVCLQDSVLAFYLAFHVSS

SEQ ID NO: 810273 - protein, 79 aa, Homo sapiens
MNPGFDLSRRNPQEDFELIQRIGSGTYGDVYKARNVNTGELAAIKVIKLEPGEDFAVVQQEIISDKYPVKNHLHKTPCK

SEQ ID NO: 810274 - protein, 894 aa, Homo sapiens
MNPGFDLSRRNPQEDFELIQRIGSGTYGDVYKARNVNTGELAAIKVIKLEPGEDFAVVQQEIIMMKDCKHPNIVAYFGSYLRRDKLWICMEFCGGGSLQDIYHVTGPLSELQIAYVSRETLQGLYYLHSKGKMHRDIKGANILLTDNGHVKLADFGVSAQITATIAKRKSFIGTPYWMAPEVAAVERKGGYNQLCDLWAVGITAIELAELQPPMFDLHPMRALFLMTKSNFQPPKLKDKMKWSNSFHHFVKMALTKNPKKRPTAEKLLQHPFVTQHLTRSLAIELLDKVNNPDHSTYHDFDDDDPEPLVAVPHRIHSTSRNVREEKTRSEITFGQVKFDPPLRKETEPHHELPDSDGFLDSSEEIYYTARSNLDLQLEYGQGHQGGYFLGANKSLLKSVEEELHQRGHVAHLEDDEGDDDESKHSTLKAKIPPPLPPKPKSIFIPQEMHSTEDENQGTIKRCPMSGSPAKPSQVPPRPPPPRLPPHKPVALGNGMSSFQLNGERDGSLCQQQNEHRGTNLSRKEKKDVPKPISNGLPPTPKVHMGACFSKVFNGCPLKIHCASSWINPDTRDQYLIFGAEEGIYTLNLNELHETSMEQLFPRRCTWLYVMNNCLLSISGKASQLYSHNLPGLFDYARQMQKLPVAIPAHKLPDRILPRKFSVSAKIPETKWCQKCCVVRNPYTGHKYLCGALQTSIVLLEWVEPMQKFMLIKHIDFPIPCPLRMFEMLVVPEQEYPLVCVGVSRGRDFNQVVRFETVNPNSTSSWFTESDTPQTNVTHVTQLERDTILVCLDCCIKIVNLQGRLKSSRKLSSELTFDFQIESIVCLQDSVLAFWKHGMQGRSFRSNEVTQEISDSTRIFRLLGSDRVVVLESRPTDNPTANSNLYILAGHENSY

SEQ ID NO: 810275 - protein, 873 aa, Homo sapiens
MNPGFDLSRRNPQEDFELIQRIGSGTYGDVYKARNVNTGELAAIKVIKLEPGEDFAVVQQEIIMMKDCKHPNIVAYFGSYLRRDKLWICMEFCGGGSLQDIYHVTGPLSELQIAYVSRETLQGLYYLHSKGKMHRDIKGANILLTDNGHVKLADFGVSAQITATIAKRKSFIGTPYWMAPEVAAVERKGGYNQLCDLWAVGITAIELAELQPPMFDLHPMRALFLMTKSNFQPPKLKDKMKWSNSFHHFVKMALTKNPKKRPTAEKLLQHPFVTQHLTRSLAIELLDKVNNPDHSTYHDFDDDDPEPLVAVPHRIHSTSRNVREEKTRSEITFGQVKFDPPLRKETEPHHELDLQLEYGQGHQGGYFLGANKSLLKSVEEELHQRGHVAHLEDDEGDDDESKHSTLKAKIPPPLPPKPKSIFIPQEMHSTEDENQGTIKRCPMSGSPAKPSQVPPRPPPPRLPPHKPVALGNGMSSFQLNGERDGSLCQQQNEHRGTNLSRKEKKDVPKPISNGLPPTPKVHMGACFSKVFNGCPLKIHCASSWINPDTRDQYLIFGAEEGIYTLNLNELHETSMEQLFPRRCTWLYVMNNCLLSISGKASQLYSHNLPGLFDYARQMQKLPVAIPAHKLPDRILPRKFSVSAKIPETKWCQKCCVVRNPYTGHKYLCGALQTSIVLLEWVEPMQKFMLIKHIDFPIPCPLRMFEMLVVPEQEYPLVCVGVSRGRDFNQVVRFETVNPNSTSSWFTESDTPQTNVTHVTQLERDTILVCLDCCIKIVNLQGRLKSSRKLSSELTFDFQIESIVCLQDSVLAFWKHGMQGRSFRSNEVTQEISDSTRIFRLLGSDRVVVLESRPTDNPTANSNLYILAGHENSY

SEQ ID NO: 810276 - protein, 859 aa, Homo sapiens
MNPGFDLSRRNPQEDFELIQRIGSGTYGDVYKARNVNTGELAAIKVIKLEPGEDFAVVQQEIIMMKDCKHPNIVAYFGSYLRRDKLWICMEFCGGGSLQDIYHVTGPLSELQIAYVSRETLQGLYYLHSKGKMHRDIKLILEYLHRYTATIAKRKSFIGTPYWMAPEVAAVERKGGYNQLCDLWAVGITAIELAELQPPMFDLHPMRALFLMTKSNFQPPKLKDKMKWSNSFHHFVKMALTKNPKKRPTAEKLLQHPFVTQHLTRSLAIELLDKVNNPDHSTYHDFDDDDPEPLVAVPHRIHSTSRNVREEKTRSEITFGQVKFDPPLRKETEPHHELDLQLEYGQGHQGGYFLGANKSLLKSVEEELHQRGHVAHLEDDEGDDDESKHSTLKAKIPPPLPPKPKSIFIPQEMHSTEDENQGTIKRCPMSGSPAKPSQVPPRPPPPRLPPHKPVALGNGMSSFQLNGERDGSLCQQQNEHRGTNLSRKEKKDVPKPISNGLPPTPKVHMGACFSKVFNGCPLKIHCASSWINPDTRDQYLIFGAEEGIYTLNLNELHETSMEQLFPRRCTWLYVMNNCLLSISGKASQLYSHNLPGLFDYARQMQKLPVAIPAHKLPDRILPRKFSVSAKIPETKWCQKCCVVRNPYTGHKYLCGALQTSIVLLEWVEPMQKFMLIKHIDFPIPCPLRMFEMLVVPEQEYPLVCVGVSRGRDFNQVVRFETVNPNSTSSWFTESDTPQTNVTHVTQLERDTILVCLDCCIKIVNLQGRLKSSRKLSSELTFDFQIESIVCLQDSVLAFWKHGMQGRSFRSNEVTQEISDSTRIFRLLGSDRVVVLESRPTDNPTANSNLYILAGHENSY

SEQ ID NO: 810277 - protein, 937 aa, Homo sapiens
RGRSGESGSHVGVSPRARGCEGSPLLVGVTRFGAAAGRGGRGRLAACRRPQRREGSGGGGGGGRSVEPGDCDRRNPQEDFELIQRIGSGTYGDVYKARNVNTGELAAIKVIKLEPGEDFAVVQQEIIMMKDCKHPNIVAYFGSYLRRDKLWICMEFCGGGSLQDIYHVTGPLSELQIAYVSRETLQGLYYLHSKGKMHRDIKGANILLTDNGHVKLADFGVSAQITATIAKRKSFIGTPYWMAPEVAAVERKGGYNQLCDLWAVGITAIELAELQPPMFDLHPMRALFLMTKSNFQPPKLKDKMKWSNSFHHFVKMALTKNPKKRPTAEKLLQHPFVTQHLTRSLAIELLDKVNNPDHSTYHDFDDDDPEPLVAVPHRIHSTSRNVREEKTRSEITFGQVKFDPPLRKETEPHHELDLQLEYGQGHQGGYFLGANKSLLKSVEEELHQRGHVAHLEDDEGDDDESKHSTLKAKIPPPLPPKPKSIFIPQEMHSTEDENQGTIKRCPMSGSPAKPSQVPPRPPPPRLPPHKPVALGNGMSSFQLNGERDGSLCQQQNEHRGTNLSRKEKKDVPKPISNGLPPTPKVHMGACFSKVFNGCPLKIHCASSWINPDTRDQYLIFGAEEGIYTLNLNELHETSMEQLFPRRCTWLYVMNNCLLSISGKASQLYSHNLPGLFDYARQMQKLPVAIPAHKLPDRILPRKFSVSAKIPETKWCQKCCVVRNPYTGHKYLCGALQTSIVLLEWVEPMQKFMLIKHIDFPIPCPLRMFEMLVVPEQEYPLVCVGVSRGRDFNQVVRFETVNPNSTSSWFTESDTPQTNVTHVTQLERDTILVCLDCCIKIVNLQGRLKSSRKLSSELTFDFQIESIVCLQDSVLAFWKHGMQGRSFRSNEVTQEISDSTRIFRLLGSDRVVVLESRPTDNPTANSNLYILAGHENSY

SEQ ID NO: 810278 - protein, 297 aa, Homo sapiens
AVIELGPGCSVYVMNNAAINIGKASQLYSHNLPGLFDYARQMQKLPVAIPAHKLPDRILPRKFSVSAKIPETKWCQKCCVVRNPYTGHKYLCGALQTSIVLLEWVEPMQKFMLIKHIDFPIPCPLRMFEMLVVPEQEYPLVCVGVSRGRDFNQVVRFETVNPNSTSSWFTESDTPQTNVTHVTQLERDTILVCLDCCIKIVNLQGRLKSSRKLSSELTFDFQIESIVCLQDSVLAFWKHGMQGRSFRSNEVTQEISDSTRIFRLLGSDRVVVLESRPTDNPTANSNLYILAGHENSY

SEQ ID NO: 810279 - protein, 190 aa, Homo sapiens
MQKFMLIKHIDFPIPCPLRMFEMLVVPEQEYPLVCVGVSRGRDFNQVVRFETVNPNSTSSWFTESDTPQTNVTHVTQLERDTILVCLDCCIKIVNLQGRLKSSRKLSSELTFDFQIESIVCLQDSVLAFWKHGMQGRSFRSNEVTQEISDSTRIFRLLGSDRVVVLESRPTDNPTANSNLYILAGHENSY

SEQ ID NO: 810280 - protein, 820 aa, Homo sapiens
MNPGFDLSRRNPQEDFELIQRIGSGTYGDVYKARNVNTGELAAIKVIKLEPGEDFAVVQQEIIMMKDCKHPNIVAYFGSYLRRDKLWICMEFCGGGSLQDIYHVTGPLSELQIAYVSRETLQGLYYLHSKGKMHRDIKGANILLTDNGHVKLADFGVSAQITATIAKRKSFIGTPYWMAPEVAAVERKGGYNQLCDLWAVGITAIELAELQPPMFDLHPMRALFLMTKSNFQPPKLKDKMKWSNSFHHFVKMALTKNPKKRPTAEKLLQHPFVTQHLTRSLAIELLDKVNNPDHSTYHDFDDDDPEPLVAVPHRIHSTSRNVREEKTRSEITFGQVKFDPPLRKETEPHHELDLQLEYGQGHQGGYFLGANKSLLKSVEEELHQRGHVAHLEDDEGDDDESKHSTLKAKIPPPLPPKPKSIFIPQEMHSTEDENQGTIKRCPMSGSPAKPSQVPPRPPPPRLPPHKPVALGNGMSSFQLNGERDGSLCQQQNEHRGTNLSRKEKKDVPKPISNGLPPTPKVHMGACFSKVFNGCPLKIHCASSWINPDTRDQYLIFGAEEGIYTLNLNELHETSMEQLFPRRCTWLYVMNNCLLSISGKASQLYSHNLPGLFDYARQMQKLPVAIPAHKLPDRILPRKFSVSAKIPETKWCQKCCVVRNPYTGHKYLCGALQTSIVLLEWVEPMQKFMLIKHIDFPIPCPLRMFEMLVVPEQEYPLVCVGVSRGRDFNQVVRFETVNPNSTSSWFTESDTPQTNVTHVTQLERDTILVCLDCCIKIVNLQGRLKSSRKLSSELTFDFQIESIVCLQDSVLAFYLAFHVSS

SEQ ID NO: 810281 - protein, 750 aa, Homo sapiens
MNPGFDLSRRNPQEDFELIQRIGSGTYGDVYKARNVNTGELAAIKVIKLEPGEDFAVVQQEIIMMKDCKHPNIVAYFGSYLRRDKLWICMEFCGGGSLQDIYHVTGPLSELQIAYVSRETLQGLYYLHSKGKMHRDIKGANILLTDNGHVKLADFGVSAQITATIAKRKSFIGTPYWMAPEVAAVERKGGYNQLCDLWAVGITAIELAELQPPMFDLHPMRALFLMTKSNFQPPKLKDKMKWSNSFHHFVKMALTKNPKKRPTAEKLLQHPFVTQHLTRSLAIELLDKVNNPDHSTYHDFDDDDPEPLVAVPHRIHSTSRNVREEKTRSEITFGQVKFDPPLRKETEPHHELDLQLEYGQGHQGGYFLGANKSLLKSVEEELHQRGHVAHLEDDEGDDDESKHSTLKAKIPPPLPPKPKSIFIPQEMHSTEDENQGTIKRCPMSGSPAKPSQVPPRPPPPRLPPHKPVALGNGMSSFQLNGERDGSLCQQQNEHRGTNLSRKEKKDVPKPISNGLPPTPKVHMGACFSKVFNGCPLKIHCASSWINPDTRDQYLIFGAEEGIYTLNLNELHETSMEQLFPRRCTWLYVMNNCLLSISGKASQLYSHNLPGLFDYARQMQKLPVAIPAHKLPDRILPRKFSVSAKIPETKWCQKCCVVRNPYTGHKYLCGALQTSIVLLEWVEPMQKFMLIKHIDFPIPCPLRMFEMLVVPEQEYPLVCVGVSRGRDFNQVVRPVKPYSGWEWFWVLKTRR

SEQ ID NO: 810282 - protein, 316 aa, Homo sapiens
MNPGFDLSRRNPQEDFELIQRIGSGTYGDVYKARNVNTGELAAIKVIKLEPGEDFAVVQQEIIMMKDCKHPNIVAYFGSYLRRDKLWICMEFCGGGSLQDIYHVTGPLSELQIAYVSRETLQGLYYLHSKGKMHRDIKGANILLTDNGHVKLADFGVSAQITATIAKRKSFIGTPYWMAPEVAAVERKGGYNQLCDLWAVGITAIELAELQPPMFDLHPMRALFLMTKSNFQPPKLKDKMKWSNSFHHFVKMALTKNPKKRPTAEKLLQHPFVTQHLTRSLAIELLDKVNNPDHSTYHDFDDDDPEVGIAFTSGHI

SEQ ID NO: 810283 - protein, 199 aa, Homo sapiens
RGRSGESGSHVGVSPRARGCEGSPLLVGVTRFGAAAGRGGRGRLAACRRPQRREGSAAAAAAAAAWSRVIVTAGGAGSRPRRPLSVWPPERPPSPAREGGGGHLGPAMNPGFDLSRRNPQEDFELIQRIGSGTYGDVYKARNVNTGELAAIKVIKLEPGEDFAVVQQEIIMMKDCKHPNIVAYFGSYLRYTVCFPFEKQ

SEQ ID NO: 810284 - protein, 143 aa, Homo sapiens
SRQCPSPARGYRPEGEGATTAAAGPLAPTSGLTGSSSRRCLRLQPHCPQASSPPLAPSVQARAPALEQFENGAEGRSGPTRRRRRGCPGNGSGGRLAARGGDALGDDGGAPVPGNATARTARGHGAPWRSAPAASKCQTSAGA

SEQ ID NO: 810285 - protein, 143 aa, Homo sapiens; identical to SEQ ID NO: 810284

SEQ ID NO: 810286 - protein, 143 aa, Homo sapiens; identical to SEQ ID NO: 810284

SEQ ID NO: 810287 - protein, 82 aa, Homo sapiens
DLVLLAHRPRCYLRDLQLLEAHALLPAGATVLADHVLFPGAPRFLQYAKSCGRYRCRLHHTGLPDFPAIKDGIAQLTYAGPG

SEQ ID NO: 810288 - protein, 103 aa, Homo sapiens
DATEPMQQPQGRAHWGPGFQFLLCKVSMLCPERRPPAPAGSTTSTMLCDSRCITGCLWPSPRQREKKAQESVETAGTPPLVPWKRLHSPPPALQLEFHLRLHS

SEQ ID NO: 810289 - protein, 344 aa, Homo sapiens
MQSISFASGGDPDTTDYVAYVAKDPVNQRACHIWECHKGMAQDVISTIGQAFELRFKQYLKNPSLNTSGESEEVHIDSHAEEREDHEYYNEIPGKQPPVGGVSDMRIKVQATEQMAYCPIQCEKLCYLPGNSKCSSVYENCLEQSRAIGNVHPRGVQSQRDTSLLKHTCRVDLFDDPCYINTQALQSTPGSAGNQRSAQPLGSPWHCGKAPETVQPGATAQPASSHSLPHIKQQLWSEECYHGKLSRKAAESLLVKDGDFLVRESATSPGQYVLSGLQGGQAKHLLLVDPEGKVRTKDHVFDNVGHLIRYHMDNSLPIISSGSEVSLKQPVRKDNNPALLHSNK

SEQ ID NO: 810290 - protein, 344 aa, Homo sapiens; identical to SEQ ID NO: 810289

SEQ ID NO: 810291 - protein, 105 aa, Homo sapiens
MTGSWAAPPRPAWAGLGPFWHLRRSRRQDGLCCPGPRPPSSTVASHCKKAWIRNLIRATLLCEARRLRTSGLVPKSLSRGQALWEHGLPATHPDQAEKERLEKEE

SEQ ID NO: 810292 - protein, 105 aa, Homo sapiens; identical to SEQ ID NO: 810291

SEQ ID NO: 810293 - protein, 155 aa, Homo sapiens
MSLCEDMLLCNYRKCRIKLSGYAWVTACSHIFCDQHGSGEFSRSPAICPACNSTLSGKLDIVRTELSPSEEYKAMVLAGLRPEIVLDISSRALAFWTYQVLQERLYQEYNFSKAEGHLNRWGRYFPESKQGGNGPMKGGSRERSKTEKRSRNRGR

SEQ ID NO: 810294 - protein, 102 aa, Homo sapiens
MSLCEDMLLCNYRKCRIKLSGYAWVTACSHIFCDQHGSGEFSRSPAICPACNSTLSGKLDIVRTELSPSEEYKAMVLAGLRPEIVLDISSRALAFWTYQYFL

SEQ ID NO: 810295 - protein, 158 aa, Homo sapiens
MSLCEDMLLCNYRKCRIKLSGYAWVTACSHIFCDQHGSGEFSRSPAICPACNSTLSGKLDIVRTELSPSEEYKAMVLAGLRPEIVLDISSRALAFWTYQVHQEQSSNQGNTKSSSAGAEGPSETRWRRYILSKYQAKDVDIEPAMKRGRVTIPCTKSS

SEQ ID NO: 810296 - protein, 102 aa, Homo sapiens; identical to SEQ ID NO: 810294

SEQ ID NO: 810297 - protein, 102 aa, Homo sapiens; identical to SEQ ID NO: 810294

SEQ ID NO: 810298 - protein, 138 aa, Homo sapiens
MPEDLFGAVNPGYTVDEYCVFLLWTLFSFWRPHYPIMSLCEDMLLCNYRKCRIKLSGYAWVTACSHIFCDQHGSGEFSRSPAICPACNSTLSGKLDIVRTELSPSEEYKAMVLAGLRPEIVLDISSRALAFWTYQYFL

SEQ ID NO: 810299 - protein, 115 aa, Homo sapiens [sequence omitted]

SEQ ID NO: 810300 - protein, 220 aa, Homo sapiens
AFLYSDGQSETILGGLGLRMGSSDCRVKIATKANPWIGNSLKPDSVRSQLETSLKRLQFPEWTSSIYMHLTTAPRWKRHCVPATSCTRRASSWSLASPTMPPGKWPRSVPSARATAGSCPLCTSFWKEHHFEGIALVEKALQAAYGASAPSMTSAALRWMYHHSQLQGAHGDAVILGMSSLEQLEQNLAAAEEGPLEPAVVDAFNQAWHLFAHECPNYFI

SEQ ID NO: 810301 - protein, 811 aa, Homo sapiens
MEAARALRLLLVVCGCLALPPLAEPVCPERCDCQHPQHLLCTNRGLRVVPKTSSLPSPHDVLTYSLGGNFITNITAFDFHRLGQLRRLDLQYNQIRSLHPKTFEKLSRLEELYLGNNLLQALAPGTLAPLRKLRILYANGNEISRLSRGSFEGLESLVKLRLDGNALGALPDAVFAPLGNLLYLHLESNRIRFLGKNAFAQLGKLRFLNLSANELQPSLRHAATFAPLRSLSSLILSANSLQHLGPRIFQHLPRLGLLSLRGNQLTHLAPEAFWGLEALRELRLEGNRLSQLPTALLEPLHSLEALDLSGNELSALHPATFGHLGRLRELSLRNNALSALSGDIFAASPALYRLDLDGNGWTCDCRLRGLKRWMGDWHSQGRLLTVFVQCRHPPALRGKYLDYLDDQQLQNGSCADPSPSASLTADRRRQPLPTAAGEEMTPPAGLAEELPPQPQLQQQGRFLAGVAWDGAARELVGNRSALRLSRRGPGLQQPSPSVAAAAGPAPQSLDLHKKPQRGRPTRADPALAEPTPTASPGSAPSPAGDPWQRATKHRLGTEHQERAAQSDGGAGLPPLVSDPCDFNKFILCNLTVEAVGADSASVRWAVREHRSPRPLGGARFRLLFDRFGQQPKFHRFVYLPESSDSATLRELRGDTPYLVCVEGVLGGRVCPVAPRDHCAGLVTLPEAGSRGGVDYQLLTLALLTVNALLVLLALAAWASRWLRRKLRARRKGGAPVHVRHMYSTRRPLRSMGTGVSADFSGFQSHRPRTTVCALSEADLIEFPCDRFMDSAGGGAGGSLRREDRLLQRFAD

SEQ ID NO: 810302 - protein, 811 aa, Homo sapiens; identical to SEQ ID NO: 810301

SEQ ID NO: 810303 - protein, 811 aa, Homo sapiens; identical to SEQ ID NO: 810301

SEQ ID NO: 810304 - protein, 452 aa, Homo sapiens
AEGGRTAQLTAVLRKILDPRLISTEENTQGAETMGPLSAPPCTQHITWKGLLLTASLLNFWNPPTTAQVTIEAQPPKVSEGKDVLLLVHNLPQNLTGYIWYKGQIRDLYHYVTSYVVDGQIIKYGPAYSGRETVYSNASLLIQNVTQEDTGSYTLHIIKRGDGTGGVTGRFTFTLYLETPKPSISSSNFNPREATEAVILTCDPETPDASYLWWMNGQSLPMTHSLQLSETNRTLYLFGVTNYTAGPYECEIRNPVSASRSDPVTLNLLPKLPKPYITINNLNPRENKDVSTFTCEPKSENYTYIWWLNGQSLPVSPRVKRRIENRILILPSVTRNETGPYQCEIRDRYGGIRSDPVTLNVLYGPDLPRIYPSFTYYHSGQNLYLSCFADSNPPAQYSWTINGKFQLSGQKLSIPQITTKHSGLYACSVRNSATGKESSKSVTVRVSDWTLP

SEQ ID NO: 810305 - protein, 261 aa, Homo sapiens
MITGVPWPPKVSEGKDVLLLVHNLPQNLTGYIWYKGQIRDLYHYVTSYVVDGQIIKYGPAYSGRETVYSNASLLIQNVTQEDTGSYTLHIIKRGDGTGGVTGRFTFTLYLETPKPSISSSNFNPREATEAVILTCDPETPDASYLWWMNGQSLPMTHSLQLSETNRTLYLFGVTNYTAGPYECEIRNPVSASRSDPVTLNLLREYLLFLCEPGCHPKYKWPEARPLSPSQVQVQRPLSLNIKAGHDFLLQANQSRPRLDQQ

SEQ ID NO: 810306 - protein, 67 aa, Homo sapiens
AEGGRTAQLTAVLRKILDPRLISTEENTQGAETMGPLSAPPCTQHITWKGLLLTASLLNFWNPPTTV

SEQ ID NO: 810307 - protein, 141 aa, Homo sapiens
VRQDTVGGSAVILTCDPETPDASYLWWMNGQSLPMTHSLQLSETNRTLYLFGVTNYTAGPYECEIRNPVSASRSDPVTLNLLREYLLFLCEPGCHPKYKWPEARPLSPSQVQVQRPLSLNIKAGHDFLLQANQSRPRLDQQ

SEQ ID NO: 810308 - protein, 81 aa, Homo sapiens
SVRGSPADRHALYLSCFADSNPPAQYSWTINGKFQLSGQKLSIPQITTKHSGLYACSVRNSATGKESSKSVTVRVSDWTLP

SEQ ID NO: 810309 - protein, 217 aa, Homo sapiens
MITGVPWPPKVSEGKDVLLLVHNLPQNLTGYIWYKGQIRDLYHYVTSYVVDGQIIKYGPAYSGRETVYSNASLLIQNVTQEDTGSYTLHIIKRGDGTGGVTGRFTFTLYLETPKPSISSSNFNPREATEAVILTCDPETPDASYLWWMNGQSLPMTHSLQLSETNRTLYLFGVTNYTAGPYECEIRNPVSASRSDPVTLNLLREYLLFLCEPGCHPV

SEQ ID NO: 810310 - protein, 146 aa, Homo sapiens
SGGVSGGQAALLGAHVRPAPDRAARCAPRAKKAGANAGARGQGRGAAAGPERPPHVQGRRPAPRGAVGARRALLGAVGKAGGLTRARETRRRGEEGVPAAGTPRCLQQEGATQVAVRLPLVSVLVRHDGPLPLSAAALGAPGLRTA

SEQ ID NO: 810311 - protein, 146 aa, Homo sapiens; identical to SEQ ID NO: 810310

SEQ ID NO: 810312 - protein, 1185 aa, Homo sapiens
MMCEVMPTISEAEGPPGGGGGHGSGSPSQPDADSHFEQLMVSMLEERDRLLDTLRETQETLALTQGKLHEVGHERDSLQRQLNTALPQEFAALTKELNVCREQLLEREEEIAELKAERNNTRLLLEHLECLVSRHERSLRMTVVKRQAQSPAGVSSEVEVLKALKSLFEHHKALDEKVRERLRVALERCSLLEEELGATHKELMILKEQNNQKKTLTDGVLDINHEQENTPSTSGKRSSDGSLSHEEDLAKVIELQEIISKQSREQSQMKERLASLSSHVTELEEDLDTARKDLIKSEEMNTKLQRDVREAMAQKEDMEERITTLEKRYLAAQREATSVHDLNDKLENEIANKDSMHRQTEDKNRQLQERLELAEQKLQQTLRKAETLPEVEAELAQRVAALSKAEERHGNIEERLRQMEAQLEEKNQELQRARQREKMNEEHNKRLSDTVDKLLSESNERLQLHLKERMAALEDKNSLLREVESAKKQLEETQHDKDQLVLNIEALRAELDHMRLRGASLHHGRPHLGSVPDFRFPMADGHTDSYSTSAVLRRPQKGRLAALRDEPSKVQTLNEQDWERAQQASVLANVAQAFESDADVSDGEDDRDTLLSSVDLLSPSGQADAHTLAMMLQEQLDAINKEIRLIQEEKENTEQRAEEIESRVGSGSLDNLGRFRSMSSIPPYPASSLASSSPPGSGRSTPRRIPHSPAREVDRLGVMTLLPPSREEVRDDKTTIKCETSPPSSPRALRLDRLHKGALHTVSHEDIRDIRNSTGSQDGPVSNPSSSNSSQDSLHKAPKKKGIKSSIGRLFGKKEKGRPGQTGKEALGQAGVSETDNSSQDALGLSKLGGQAEKNRKLQKKHELLEEARRQGLPFAQWDGPTVVVWLELWVGMPAWYVAACRANVKSGAIMSALSDTEIQREIGISNPLHRLKLRLAIQEIMSLTSPSAPPTSRTTLAYGDMNHEWIGNEWLPSLGLPQYRSYFMECLVDARMLDHLTKKDLRGQLKMVDSFHRNSFQCGIMCLRRLNYDRKELERKREESQSEIKDVLVWSNDRVIRWILSIGLKEYANNLIESGVHGALLALDETFDFSALALLLQIPTQNTQARAVLEREFNNLLVMGTDRRFDEDDDKSFRRAPSWRKKFRPKDIRGLAAGSAETLPANFRVTSSMSSPSMQPKKMQMDGM

SEQ ID NO: 810313 - protein, 208 aa, Homo sapiens
MMLQEQLDAINKEIRLIQEEKENTEQRAEEIESRVGSGSLDNLGRFRSMSSIPPYPASSLASSSPPGSGRSTPRRIPHSPAREVDRLGVMTLLPPSREEVRDDKTTIKCETSPPSSPRALRLDRLHKGALHTVSHEDIRDIRNSTGSQDGPVSNPSSSNSSQDSLHKAPKKKGIKSSIGRLFGKKEKGRPGQTGKEALGQGWLVFRTL

SEQ ID NO: 810314 - protein, 1202 aa, Homo sapiens
MMCEVMPTISEAEGPPGGGGGHGSGSPSQPDADSHFEQLMVSMLEERDRLLDTLRETQETLALTQGKLHEVGHERDSLQRQLNTALPQEFAALTKELNVCREQLLEREEEIAELKAERNNTRLLLEHLECLVSRHERSLRMTVVKRQAQSPAGVSSEVEVLKALKSLFEHHKALDEKVRERLRVALERCSLLEEELGATHKELMILKEQNNQKKTLTDGVLDINHEQENTPSTSGKRSSDGSLSHEEDLAKVIELQEIISKQSREQSQMKERLASLSSHVTELEEDLDTARKDLIKSEEMNTKLQRDVREAMAQKEDMEERITTLEKRYLAAQREATSVHDLNDKLENEIANKDSMHRQTEDKNRQLQERLELAEQKLQQTLRKAETLPEVEAELAQRVAALSKAEERHGNIEERLRQMEAQLEEKNQELQRARQREKMNEEHNKRLSDTVDKLLSESNERLQLHLKERMAALEDKNSLLREVESAKKQLEETQHDKDQLVLNIEALRAELDHMRLRGASLHHGRPHLGSVPDFRFPMADGHTDSYSTSAVLRRPQKGRLAALRDEPSKVQTLNEQDWERAQQASVLANVAQAFESDADVSDGEDDRDTLLSSVDLLSPSGQADAHTLAMMLQEQLDAINKEIRLIQEEKENTEQRAEEIESRVGSGSLDNLGRFRSMSSIPPYPASSLASSSPPGSGRSTPRRIPHSPAREVDRLGVMTLLPPSREEVRDDKTTIKCETSPPSSPRALRLDRLHKGALHTVSHEDIRDIRNSTGSQDGPVSNPSSSNSSQDSLHKAPKKKGIKSSIGRLFGKKEKGRPGQTGKEALGQAGVSETDNSSQDALGLSKLGGQAEKNRKLQKKHELLEEARRQGLPFAQWDGPTVVVWLELWVGMPAWYVAACRANVKSGAIMSALSDTEIQREIGISNPLHRLKLRLAIQEIMSLTSPSAPPTSRTTLAYGDMNHEWIGNEWLPSLGLPQYRSYFMECLVDARMLDHLTKKDLRGQLKMVDSFHRNSFQCGIMCLRRLNYDRKELERKREESQSEIKDVLVWSNDRVIRWILSIGLKEYANNLIESGVHGALLALDETFDFSALALLLQIPTQNTQARAVLEREFNNLLVMGTDRRFDEDDDKSFRRAPSWRKKFRPKDIRGLAAGSAETLPANFRVTSSMSSPSMQPKKMQMDGNVSGTQRLDSATVRTYSC

SEQ ID NO: 810315 - protein, 1202 aa, Homo sapiens; identical to SEQ ID NO: 810314

SEQ ID NO: 810316 - protein, 1202 aa, Homo sapiens; identical to SEQ ID NO: 810314

SEQ ID NO: 810317 - protein, 1202 aa, Homo sapiens; identical to SEQ ID NO: 810314

SEQ ID NO: 810318 - protein, 891 aa, Homo sapiens [sequence omitted]

SEQ ID NO: 810319 - protein, 1212 aa, Homo sapiens
MMCEVMPTISEAEGPPGGGGGHGSGSPSQPDADSHFEQLMVSMLEERDRLLDTLRETQETLALTQGKLHEVGHERDSLQRQLNTALPQEFAALTKELNVCREQLLEREEEIAELKAERNNTRLLLEHLECLVSRHERSLRMTVVKRQAQSPAGVSSEVEVLKALKSLFEHHKALDEKVRERLRVALERCSLLEEELGATHKELMILKEQNNQKKTLTDGVLDINHEQENTPSTSGKRSSDGSLSHEEDLAKVIELQEIISKQSREQSQMKERLASLSSHVTELEEDLDTARKDLIKSEEMNTKLQRDVREAMAQKEDMEERITTLEKRYLAAQREATSVHDLNDKLENEIANKDSMHRQTEDKNRQLQERLELAEQKLQQTLRKAETLPEVEAELAQRVAALSKAEERHGNIEERLRQMEAQLEEKNQELQRARQREKMNEEHNKRLSDTVDKLLSESNERLQLHLKERMAALEDKNSLLREVESAKKQLEETQHDKDQLVLNIEALRAELDHMRLRGASLHHGRPHLGSVPDFRFPMADGHTDSYSTSAVLRRPQKGRLAALRDEPSKVQTLNEQDWERAQQASVLANVAQAFESDADVSDGEDDRDTLLSSVDLLSPSGQADAHTLAMMLQEQLDAINKEIRLIQEEKENTEQRAEEIESRVGSGSLDNLGRFRSMSSIPPYPASSLASSSPPGSGRSTPRRIPHSPAREVDRLGVMTLPSDLRKHRRKLPPSREEVRDDKTTIKCETSPPSSPRALRLDRLHKGALHTVSHEDIRDIRNSTGSQDGPVSNPSSSNSSQDSLHKAPKKKGIKSSIGRLFGKKEKGRPGQTGKEALGQAGVSETDNSSQDALGLSKLGGQAEKNRKLQKKHELLEEARRQGLPFAQWDGPTVVVWLELWVGMPAWYVAACRANVKSGAIMSALSDTEIQREIGISNPLHRLKLRLAIQEIMSLTSPSAPPTSRTTLAYGDMNHEWIGNEWLPSLGLPQYRSYFMECLVDARMLDHLTKKDLRGQLKMVDSFHRNSFQCGIMCLRRLNYDRKELERKREESQSEIKDVLVWSNDRVIRWILSIGLKEYANNLIESGVHGALLALDETFDFSALALLLQIPTQNTQARAVLEREFNNLLVMGTDRRFDEDDDKSFRRAPSWRKKFRPKDIRGLAAGSAETLPANFRVTSSMSSPSMQPKKMQMDGNVSGTQRLDSATVRTYSC

SEQ ID NO: 810320 - protein, 598 aa, Homo sapiens
GEEKVPQPFQSWSWKPQPSLPLYSVHLSEVLSPAHTQRLGLIQEEKENTEQRAEEIESRVGSGSLDNLGRFRSMSSIPPYPASSLASSSPPGSGRSTPRRIPHSPAREVDRLGVMTLLPPSREEVRDDKTTIKCETSPPSSPRALRLDRLHKGALHTVSHEDIRDIRNSTGSQDGPVSNPSSSNSSQDSLHKAPKKKGIKSSIGRLFGKKEKGRPGQTGKEALGQAGVSETDNSSQDALGLSKLGGQAEKNRKLQKKHELLEEARRQGLPFAQWDGPTVVVWLELWVGMPAWYVAACRANVKSGAIMSALSDTEIQREIGISNPLHRLKLRLAIQEIMSLTSPSAPPTSRTTLAYGDMNHEWIGNEWLPSLGLPQYRSYFMECLVDARMLDHLTKKDLRGQLKMVDSFHRNSFQCGIMCLRRLNYDRKELERKREESQSEIKDVLVWSNDRVIRWILSIGLKEYANNLIESGVHGALLALDETFDFSALALLLQIPTQNTQARAVLEREFNNLLVMGTDRRFDEDDDKSFRRAPSWRKKFRPKDIRGLAAGSAETLPANFRVTSSMSSPSMQPKKMQMDGNVSGTQRLDSATVRTYSC

SEQ ID NO: 810321 - protein, 1232 aa, Homo sapiens
MMCEVMPTISEAEGPPGGGGGHGSGSPSQPDADSHFEQLMVSMLEERDRLLDTLRETQETLALTQGKLHEVGHERDSLQRQLNTALPQEFAALTKELNVCREQLLEREEEIAELKAERNNTRLLLEHLECLVSRHERSLRMTVVKRQAQSPAGVSSEVEVLKALKSLFEHHKALDEKVRERLRVALERCSLLEEELGATHKELMILKEQNNQKKTLTDGVLDINHEQENTPSTSGKRSSDGSLSHEEDLAKVIELQEIISKQSREQSQMKERLASLSSHVTELEEDLDTARKDLIKSEEMNTKLQRDVREAMAQKEDMEERITTLEKRYLAAQREATSVHDLNDKLENEIANKDSMHRQTEDKNRQLQERLELAEQKLQQTLRKAETLPEVEAELAQRVAALSKAEERHGNIEERLRQMEAQLEEKNQELQRARQREKMNEEHNKRLSDTVDKLLSESNERLQLHLKERMAALEDKNSLLREVESAKKQLEETQHDKDQLVLNIEALRAELDHMRLRGASLHHGRPHLGSVPDFRFPMADGHTDSYSTSAVLRRPQKGRLAALRDEPSKVQTLNEQDWERAQQASVLANVAQAFESDADVSDGEDDRDTLLSSVDLLSPSGQADAHTLAMMLQEQLDAINKEIRLIQEEKENTEQRAEEIESRVGSGSLDNLGRFRSMSSIPPYPASSLASSSPPGSGRSTPRRIPHSPAREVDRLGVMTLLPPSREEVRDDKTTIKCETSPPSSPRALRLDRLHKGALHTVSHEDIRDIRNSTGSQDGPVSNPSSSNSSQDSLHKAPKKKGIKSSIGRLFGKKEKGRPGQTGKEALGQAGVSETDNSSQDALGLSKLGGQAEKNRKLQKKHELLEEARRQGLPFAQWDGPTVVVWLELWVGMPAWYVAACRANVKSGAIMSALSDTEIQREIGISNPLHRLKLRLAIQEIMSLTSPSAPPTSRTTTGNVWLTHEEMETLAATPQTEDEEGSWAQTLAYGDMNHEWIGNEWLPSLGLPQYRSYFMECLVDARMLDHLTKKDLRGQLKMVDSFHRNSFQCGIMCLRRLNYDRKELERKREESQSEIKDVLVWSNDRVIRWILSIGLKEYANNLIESGVHGALLALDETFDFSALALLLQIPTQNTQARAVLEREFNNLLVMGTDRRFDEDDDKSFRRAPSWRKKFRPKDIRGLAAGSAETLPANFRVTSSMSSPSMQPKKMQMDGNVSGTQRLDSATVRTYSC

SEQ ID NO: 810322 - protein, 583 aa, Homo sapiens
MMLQEQLDAINKEIRLIQEEKENTEQRAEEIESRVGSGSLDNLGRFRSMSSIPPYPASSLASSSPPGSGRSTPRRIPHSPAREVDRLGVMTLPSDLRKHRRKLPPSREEVRDDKTTIKCETSPPSSPRALRLDRLHKGALHTVSHEDIRDIRNSTGSQDGPVSNPSSSNSSQDSLHKAPKKKGIKSSIGRLFGKKEKGRPGQTGKEALGQAGVSETDNSSQDALGLSKLGGQAEKNRKLQKKHELLEEARRQGLPFAQWDGPTVVVWLELWVGMPAWYVAACRANVKSGAIMSALSDTEIQREIGISNPLHRLKLRLAIQEIMSLTSPSAPPTSRTTLAYGDMNHEWIGNEWLPSLGLPQYRSYFMECLVDARMLDHLTKKDLRGQLKMVDSFHRNSFQCGIMCLRRLNYDRKELERKREESQSEIKDVLVWSNDRVIRWILSIGLKEYANNLIESGVHGALLALDETFDFSALALLLQIPTQNTQARAVLEREFNNLLVMGTDRRFDEDDDKSFRRAPSWRKKFRPKDIRGLAAGSAETLPANFRVTSSMSSPSMQPKKMQMDGNVSGTQRLDSATVRTYSC

SEQ ID NO: 810323 - protein, 482 aa, Homo sapiens
MLPPSREEVRDDKTTIKCETSPPSSPRALRLDRLHKGALHTVSHEDIRDIRNSTGSQDGPVSNPSSSNSSQDSLHKAPKKKGIKSSIGRLFGKKEKGRPGQTGKEALGQAGVSETDNSSQDALGLSKLGGQAEKNRKLQKKHELLEEARRQGLPFAQWDGPTVVVWLELWVGMPAWYVAACRANVKSGAIMSALSDTEIQREIGISNPLHRLKLRLAIQEIMSLTSPSAPPTSRTTLAYGDMNHEWIGNEWLPSLGLPQYRSYFMECLVDARMLDHLTKKDLRGQLKMVDSFHRNSFQCGIMCLRRLNYDRKELERKREESQSEIKDVLVWSNDRVIRWILSIGLKEYANNLIESGVHGALLALDETFDFSALALLLQIPTQNTQARAVLEREFNNLLVMGTDRRFDEDDDKSFRRAPSWRKKFRPKDIRGLAAGSAETLPANFRVTSSMSSPSMQPKKMQMDGNVSGTQRLDSATVRTYSC

SEQ ID NO: 810324 - protein, 400 aa, Homo sapiens
MLLVAQKLGCKMANLVLEHMWHNGAVVARPRLLHQVCIGLLRSLRTYDRLKKIVNFKKKHELLEEARRQGLPFAQWDGPTVVVWLELWVGMPAWYVAACRANVKSGAIMSALSDTEIQREIGISNPLHRLKLRLAIQEIMSLTSPSAPPTSRTTLAYGDMNHEWIGNEWLPSLGLPQYRSYFMECLVDARMLDHLTKKDLRGQLKMVDSFHRNSFQCGIMCLRRLNYDRKELERKREESQSEIKDVLVWSNDRVIRWILSIGLKEYANNLIESGVHGALLALDETFDFSALALLLQIPTQNTQARAVLEREFNNLLVMGTDRRFDEDDDKSFRRAPSWRKKFRPKDIRGLAAGSAETLPANFRVTSSMSSPSMQPKKMQMDGNVSGTQRLDSATVRTYSC

SEQ ID NO: 810325 - protein, 241 aa, Homo sapiens
MNHEWIGNEWLPSLGLPQYRSYFMECLVDARMLDHLTKKDLRGQLKMVDSFHRNSFQCGIMCLRRLNYDRKELERKREESQSEIKDVLVWSNDRVIRWILSIGLKEYANNLIESGVHGALLALDETFDFSALALLLQIPTQNTQARAVLEREFNNLLVMGTDRRFDEDDDKSFRRAPSWRKKFRPKDIRGLAAGSAETLPANFRVTSSMSSPSMQPKKMQMDGNVSGTQRLDSATVRTYSC

SEQ ID NO: 810326 - protein, 241 aa, Homo sapiens; identical to SEQ ID NO: 810325

SEQ ID NO: 810327 - protein, 1136 aa, Homo sapiens
MMCEVMPTISEAEGPPGGGGGHGSGSPSQPDADSHFEQLMVSMLEERDRLLDTLRETQETLALTQGKLHEVGHERDSLQRQLNTALPQEFAALTKELNVCREQLLEREEEIAELKAERNNTRLLLEHLECLVSRHERSLRMTVVKRQAQSPAGVSSEVEVLKALKSLFEHHKALDEKVRERLRVALERCSLLEEELGATHKELMILKEQNNQKKTLTDGVLDINHEQENTPSTSGKRSSDGSLSHEEDLAKVIELQEIISKQSREQSQMKERLASLSSHVTELEEDLDTARKDLIKSEEMNTKLQRDVREAMAQKEDMEERITTLEKRYLAAQREATSVHDLNDKLENEIANKDSMHRQTEDKNRQLQERLELAEQKLQQTLRKAETLPEVEAELAQRVAALSKAEERHGNIEERLRQMEAQLEEKNQELQRARQREKMNEEHNKRLSDTVDKLLSESNERLQLHLKERMAALEDKNSLLREVESAKKQLEETQHDKDQLVLNIEALRAELDHMRLRGASLHHGRPHLGSVPDFRFPMADGHTDSYSTSAVLRRPQKGRLAALRDEPSKVQTLNEQDWERAQQASVLANVAQAFESDADVSDGEDDRDTLLSSVDLLSPSGQADAHTLAMMLQEQLDAINKEIRLIQEEKENTEQRAEEIESRVGSGSLDNLGRFRSMSSIPPYPASSLASSSPPGSGRSTPRRIPHSPAREVDRLGVMTLLPPSREEVRDDKTTIKCETSPPSSPRALRLDRLHKGALHTVSHEDIRDIRNSTGSQDGPVSNPSSSNSSQDSLHKAPKKKGIKSSIGRLFGKKEKGRPGQTGKEALGQAGVSETDNSSQDALGLSKLGGQAEKNRKLQKKHELLEEARRQGLPFAQWDGPTVVVWLELWVGMPAWYVAACRANVKSGAIMSALSDTEIQREIGISNPLHRLKLRLAIQEIMSLTSPSAPPTSRTTLAYGDMNHEWIGNEWLPSLGLPQYRSYFMECLVDARMLDHLTKKDLRGQLKMVDSFHRNSFQCGIMCLRRLNYDRKELERKREESQSEIKDVLVWSNDRVIRWILSIGLKEYANNLIESGVHGALLALDETFDFSALALLLQIPTQNTQARAVLEREFNNLLVMGTDRRFDEVSFWPNVL

SEQ ID NO: 810328 - protein, 1191 aa, Homo sapiens
MMCEVMPTISEAEGPPGGGGGHGSGSPSQPDADSHFEQLMVSMLEERDRLLDTLRETQETLALTQGKLHEVGHERDSLQRQLNTALPQEFAALTKELNVCREQLLEREEEIAELKAERNNTRLLLEHLECLVSRHERSLRMTVVKRQAQSPAGVSSEVEVLKALKSLFEHHKALDEKVRERLRVALERCSLLEEELGATHKELMILKEQNNQKKTLTDGVLDINHEQENTPSTSGKRSSDGSLSHEEDLAKVIELQEIISKQSREQSQMKERLASLSSHVTELEEDLDTARKDLIKSEEMNTKLQRDVREAMAQKEDMEERITTLEKRYLAAQREATSVHDLNDKLENEIANKDSMHRQTEDKNRQLQERLELAEQKLQQTLRKAETLPEVEAELAQRVAALSKAEERHGNIEERLRQMEAQLEEKNQELQRARQREKMNEEHNKRLSDTVDKLLSESNERLQLHLKERMAALEDKNSLLREVESAKKQLEETQHDKDQLVLNIEALRAELDHMRLRGASLHHGRPHLGSVPDFRFPMADGHTDSYSTSAVLRRPQKGRLAALRDEPSKVQTLNEQDWERAQQASVLANVAQAFESDADVSDGEDDRDTLLSSVDLLSPSGQADAHTLAMMLQEQLDAINKEIRLIQEEKENTEQRAEEIESRVGSGSLDNLGRFRSMSSIPPYPASSLASSSPPGSGRSTPRRIPHSPAREVDRLGVMTLLPPSREEVRDDKTTIKCETSPPSSPRALRLDRLHKGALHTVSHEDIRDIRNSTGSQDGPVSNPSSSNSSQDSLHKAPKKKGIKSSIGRLFGKKEKGRPGQTGKEALGQAGVSETDNSSQDALGLSKLGGQAEKNRKLQKKHELLEEARRQGLPFAQWDGPTVVVWLELWVGMPAWYVAACRANVKSGAIMSALSDTEIQREIGISNPLHRLKLRLAIQEIMSLTSPSAPPTSRTTLAYGDMNHEWIGNEWLPSLGLPQYRSYFMECLVDARMLDHLTKKDLRGQLKMVDSFHRNSFQCGIMCLRRLNYDRKELERKREESQSEIKDVLVWSNDRVIRWILSIGLKEYANNLIESGVHGALLALDETFDFSALALLLQIPTQNTQARAVLEREFNNLLVMGTDRRFDEHDDKSFGEHLHVESSLIPPREFLLCFTPSMHPIKYCHCTLCFKYPTARILLQLCTLLLLTSSC

SEQ ID NO: 810329 - protein, 1121 aa, Homo sapiens
MMCEVMPTISEAEGPPGGGGGHGSGSPSQPDADSHFEQLMVSMLEERDRLLDTLRETQETLALTQGKLHEVGHERDSLQRQLNTALPQEFAALTKELNVCREQLLEREEEIAELKAERNNTRLLLEHLECLVSRHERSLRMTVVKRQAQSPAGVSSEVEVLKALKSLFEHHKALDEKVRERLRVALERCSLLEEELGATHKELMILKEQNNQKKTLTDGVLDINHEQENTPSTSGKRSSDGSLSHEEDLAKVIELQEIISKQSREQSQMKERLASLSSHVTELEEDLDTARKDLIKSEEMNTKLQRDVREAMAQKEDMEERITTLEKRYLAAQREATSVHDLNDKLENEIANKDSMHRQTEDKNRQLQERLELAEQKLQQTLRKAETLPEVEAELAQRVAALSKAEERHGNIEERLRQMEAQLEEKNQELQRARQREKMNEEHNKRLSDTVDKLLSESNERLQLHLKERMAALEDKNSLLREVESAKKQLEETQHDKDQLVLNIEALRAELDHMRLRGASLHHGRPHLGSVPDFRFPMADGHTDSYSTSAVLRRPQKGRLAALRDEPSKVQTLNEQDWERAQQASVLANVAQAFESDADVSDGEDDRDTLLSSVDLLSPSGQADAHTLAMMLQEQLDAINKEIRLIQEEKENTEQRAEEIESRVGSGSLDNLGRFRSMSSIPPYPASSLASSSPPGSGRSTPRRIPHSPAREVDRLGVMTLLPPSREEVRDDKTTIKCETSPPSSPRALRLDRLHKGALHTVSHEDIRDIRNSTGSQDGPVSNPSSSNSSQDSLHKAPKKKGIKSSIGRLFGKKEKGRPGQTGKEALGQAGVSETDNSSQDALGLSKLGGQAEKNRKLQKKHELLEEARRQGLPFAQWDGPTVVVWLELWVGMPAWYVAACRANVKSGAIMSALSDTEIQREIGISNPLHRLKLRLAIQEIMSLTSPSAPPTSRTTLAYGDMNHEWIGNEWLPSLGLPQYRSYFMECLVDARMLDHLTKKDLRGQLKMVDSFHRNSFQCGIMCLRRLNYDRKELERKREESQSEIKDVLVWSNDRVIRWILSIGLKEYANNLIESGVHGALLALDETFDFSALALLLQIPTQNTQVTPNLSVSALIVQLAP

SEQ ID NO: 810330 - protein, 989 aa, Homo sapiens
MMCEVMPTISEAEGPPGGGGGHGSGSPSQPDADSHFEQLMVSMLEERDRLLDTLRETQETLALTQGKLHEVGHERDSLQRQLNTALPQEFAALTKELNVCREQLLEREEEIAELKAERNNTRLLLEHLECLVSRHERSLRMTVVKRQAQSPAGVSSEVEVLKALKSLFEHHKALDEKVRERLRVALERCSLLEEELGATHKELMILKEQNNQKKTLTDGVLDINHEQENTPSTSGKRSSDGSLSHEEDLAKVIELQEIISKQSREQSQMKERLASLSSHVTELEEDLDTARKDLIKSEEMNTKLQRDVREAMAQKEDMEERITTLEKRYLAAQREATSVHDLNDKLENEIANKDSMHRQTEDKNRQLQERLELAEQKLQQTLRKAETLPEVEAELAQRVAALSKAEERHGNIEERLRQMEAQLEEKNQELQRARQREKMNEEHNKRLSDTVDKLLSESNERLQLHLKERMAALEDKNSLLREVESAKKQLEETQHDKDQLVLNIEALRAELDHMRLRGASLHHGRPHLGSVPDFRFPMADGHTDSYSTSAVLRRPQKGRLAALRDEPSKVQTLNEQDWERAQQASVLANVAQAFESDADVSDGEDDRDTLLSSVDLLSPSGQADAHTLAMMLQEQLDAINKEIRLIQEEKENTEQRAEEIESRVGSGSLDNLGRFRSMSSIPPYPASSLASSSPPGSGRSTPRRIPHSPAREVDRLGVMTLLPPSREEVRDDKTTIKCETSPPSSPRALRLDRLHKGALHTVSHEDIRDIRNSTGSQDGPVSNPSSSNSSQDSLHKAPKKKGIKSSIGRLFGKKEKGRPGQTGKEALGQAGVSETDNSSQDALGLSKLGGQAEKNRKLQKKHELLEEARRQGLPFAQWDGPTVVVWLELWVGMPAWYVAACRANVKSGAIMSALSDTEIQREIGISNPLHRLKLRLAIQEIMSLTSPSAPPTSRTVRSETTPAFFGNRECLSEGITALFTLLLQFLNSI

SEQ ID NO: 810331 - protein, 1021 aa, Homo sapiens
MMCEVMPTISEAEGPPGGGGGHGSGSPSQPDADSHFEQLMVSMLEERDRLLDTLRETQETLALTQGKLHEVGHERDSLQRQLNTALPQEFAALTKELNVCREQLLEREEEIAELKAERNNTRLLLEHLECLVSRHERSLRMTVVKRQAQSPAGVSSEVEVLKALKSLFEHHKALDEKVRERLRVALERCSLLEEELGATHKELMILKEQNNQKKTLTDGVLDINHEQENTPSTSGKRSSDGSLSHEEDLAKVIELQEIISKQSREQSQMKERLASLSSHVTELEEDLDTARKDLIKSEEMNTKLQRDVREAMAQKEDMEERITTLEKRYLAAQREATSVHDLNDKLENEIANKDSMHRQTEDKNRQLQERLELAEQKLQQTLRKAETLPEVEAELAQRVAALSKAEERHGNIEERLRQMEAQLEEKNQELQRARQREKMNEEHNKRLSDTVDKLLSESNERLQLHLKERMAALEDKNSLLREVESAKKQLEETQHDKDQLVLNIEALRAELDHMRLRGASLHHGRPHLGSVPDFRFPMADGHTDSYSTSAVLRRPQKGRLAALRDEPSKVQTLNEQDWERAQQASVLANVAQAFESDADVSDGEDDRDTLLSSVDLLSPSGQADAHTLAMMLQEQLDAINKEIRLIQEEKENTEQRAEEIESRVGSGSLDNLGRFRSMSSIPPYPASSLASSSPPGSGRSTPRRIPHSPAREVDRLGVMTLLPPSREEVRDDKTTIKCETSPPSSPRALRLDRLHKGALHTVSHEDIRDIRNSTGSQDGPVSNPSSSNSSQDSLHKAPKKKGIKSSIGRLFGKKEKGRPGQTGKEALGQAGVSETDNSSQDALGLSKLGGQAEKNRKLQKKHELLEEARRQGLPFAQWDGPTVVVWLELWVGMPAWYVAACRANVKSGAIMSALSDTEIQREIGISNPLHRLKLRLAIQEIMSLTSPSAPPTSRTTTGNVWLTHEEMETLAATPQTVSHAPQPALLPARFPLKTVWVLCLFVENKMLFSIQSFQISISFSY

SEQ ID NO: 810332 - protein, 85 aa, Homo sapiens
VMPTISEAEGPPGGGGGHGSGSPSQPDADSHFEQLMVSMLEERDRLLDTLRETQETLALTQGKLHEVGHERDSLQRQLNTALPQV

SEQ ID NO: 810333 - protein, 86 aa, Homo sapiens
SHFYNCLYSFADVLVWSNDRVIRWILSIGLKEYANNLIESGVHGALLALDETFDFSALALLLQIPTQNTQVTPNLSVSALIVQLAP

SEQ ID NO: 810334 - protein, 262 aa, Homo sapiens
MVLADLGRKITSALRSLSNATIINEEVLNAMLKEVCTALLEADVNIKLVKQLRENVKSAIDLEEMASGLNKRKMIQHAVFKELVKLVDPGVKAWTPTKGKQNVIMFVGLQGSGKTTTCSKLAYYYQRKGWKTCLICADTFRAGAFDQLKQNATKARIPFYGSYTEMGSWSSLASDGVRENTEMKHVDIMTHRRNTSGQTTNQKEIYGSTQNASTDCLRHINPATIDNGKRWPSIGQDCSKTHRKGVKRYSNTYTHTTEQNCT

SEQ ID NO: 810335 - protein, 138 aa, Homo sapiens
GDATPGFFIHDLTDRMSEQELDSTDGAKVFSKQPGRIQRVARGSGVSTRDVQELLTQYTKFAQMVKKMGGIKGLFKGGDMSKNVSQSQMAKLNQQMAKMMDPRVLHHMGGMAGLQSMMRQFQQGAAGNMKGMMGFNNM

SEQ ID NO: 810336 - protein, 504 aa, Homo sapiens
MVLADLGRKITSALRSLSNATIINEEVLNAMLKEVCTALLEADVNIKLVKQLRENVKSAIDLEEMASGLNKRKMIQHAVFKELVKLVDPGVKAWTPTKGKQNVIMFVGLQGSGKTTTCSKLAYYYQRKGWKTCLICADTFRAGAFDQLKQNATKARIPFYGSYTEMDPVIIASEGVEKFKNENFEIIIVDTSGRHKQEDSLFEEMLQVANAIQPDNIVYVMDASIGQACEAQAKAFKDKVDVASVIVTKLDGHAKGGGALSAVAATKSPIIFIGTGEHIDDFEPFKTQPFISKLLGMGDIEGLIDKVNELKLDDNEALIEKLKHGQFTLRDMYEQFQNIMKMGPFSQILGMIPGFGTDFMSKGNEQESMARLKKLMTIMDSMNDQELDSTDGAKVFSKQPGRIQRVARGSGVSTRDVQELLTQYTKFAQMVKKMGGIKGLFKGGDMSKNVSQSQMAKLNQQMAKMMDPRVLHHMGGMAGLQSMMRQFQQGAAGNMKGMMGFNNM

SEQ ID NO: 810337 - protein, 477 aa, Homo sapiens
MVLADLGRKITSALRSLSNATIINEEVLNAMLKEVCTALLEADVNIKLVKQLRENVKSAIDLEEMASGLNKRKMIQHAVFKELVKLVDPGVKAWTPTKGKQNVIMFVGLQGSGKTTTCSKLAYYYQRKGWKTCLICADTFRAGAFDQLKQNATKARIPFYGSYTEMDPVIIASEGVEKFKNENFEIIIVDTSGRHKQEDSLFEEMLQVANAIQPDNIVYVMDASIGQACEAQAKAFKDKVDVASVIVTKLDGHAKGGGALSAVAATKSPIIFIGTGEHIDDFEPFKTQPFISKLLGMGDIEGLIDKVNELKLDDNEALIEKLKHGQFTLRDMYEQFQNIMKMGPFSQILGMIPGFGTDFMSKGNEQESMARLKKLMTIMDSMNDQELDSTDGAKVFSKQPGRIQRVARGSGVSTRDVQELLTQYTKFAQMVKKMGGIKGLFKDGKERKLRKKSAASIGKFTAEFHVIFKYFQDLCDL

SEQ ID NO: 810338 - protein, 450 aa, Homo sapiens
MVLADLGRKITSALRSLSNATIINEEVLNAMLKEVCTALLEADVNIKLVKQLRENVKSAIDLEEMASGLNKRKMIQHAVFKELVKLVDPGVKAWTPTKGKQNVIMFVGLQGSGKTTTCSKLAYYYQRKGWKTCLICADTFRAGAFDQLKQNATKARIPFYGSYTEMDPVIIASEGVEKFKNENFEIIIVDTSGRHKQEDSLFEEMLQVANAIQPDNIVYVMDASIGQACEAQAKAFKDKVDVASVIVTKLDGHAKGGGALSAVAATKSPIIFIGTGEHIDDFEPFKTQPFISKLLGMGDIEGLIDKVNELKLDDNEALIEKLKHGQFTLRDMYEQFQNIMKMGPFSQILGMIPGFGTDFMSKGNEQESMARLKKLMTIMDSMNDQELDSTDGAKVFSKQPGRIQRVARGSGVSTRDVQELLTQYTKFAQMVKKMGGIKGLFKEKNKLVIS

SEQ ID NO: 810339 - protein, 233 aa, Homo sapiens
  misc_feature (227)..(227): Xaa can be any naturally occurring amino acid
MVLADLGRKITSALRSLSNATIINEEVLNAMLKEVCTALLEADVNIKLVKQLRENVKSAIDLEEMASGLNKRKMIQHAVFKELVKLVDPGVKAWTPTKGKQNVIMFVGLQGSGKTTTCSKLAYYYQRKGWKTCLICADTFRAGAFDQLKQNATKARIPFYGSYTEMDPVIIASEGVEKFKNENFEIIIVDTSGRHKQEDSLFEEMLQVANAIQTWITIGLKLKGLPXKLGQGF

SEQ ID NO: 810340 - protein, 455 aa, Homo sapiens
MPPLSMKRSAIDLEEMASGLNKRKMIQHAVFKELVKLVDPGVKAWTPTKGKQNVIMFVGLQGSGKTTTCSKLAYYYQRKGWKTCLICADTFRAGAFDQLKQNATKARIPFYGSYTEMDPVIIASEGVEKFKNENFEIIIVDTSGRHKQEDSLFEEMLQVANAIQPDNIVYVMDASIGQACEAQAKAFKDKVDVASVIVTKLDGHAKGGGALSAVAATKSPIIFIGTGEHIDDFEPFKTQPFISKLLGMGDIEGLIDKVNELKLDDNEALIEKLKHGQFTLRDMYEQFQNIMKMGPFSQILGMIPGFGTDFMSKGNEQESMARLKKLMTIMDSMNDQELDSTDGAKVFSKQPGRIQRVARGSGVSTRDVQELLTQYTKFAQMVKKMGGIKGLFKGGDMSKNVSQSQMAKLNQQMAKMMDPRVLHHMGGMAGLQSMMRQFQQGAAGNMKGMMGFNNM

SEQ ID NO: 810341 - protein, 83 aa, Homo sapiens
MESRSVAQAGVQWPDLGSLQPLPPRFKRFFCLSLQSSWDYRHAPPRPANFVFLVETGFCHVSQAGLELLTSSDPPPRPPKVLR

SEQ ID NO: 810342 - protein, 83 aa, Homo sapiens; identical to SEQ ID NO: 810341

SEQ ID NO: 810343 - protein, 83 aa, Homo sapiens; identical to SEQ ID NO: 810341

SEQ ID NO: 810344 - protein, 167 aa, Homo sapiens
MTHSLVCPETVSRVSSVLNRNTRQFGKKHLFDQDEETCWNSDQGPSQWVTLEFPQLIRVSQLQIQFQGGFSSRRGCLEGSQGTQALHKIVDFYPEDNNSLQTFPIPAAEVDRLKVTFEDATDFFGRVVIYHLRVLGEKGTNRDPCRDLHYRAKLGEPRTHPRNLNFP

SEQ ID NO: 810345 - protein, 81 aa, Homo sapiens
KPTRFRVPRFGSKSYSQRNSLAQKATAPETRGKSVSCERPGLRALAVSLILSPKFSGRGLIEATFRTGVGEGVAVLVPSYR

SEQ ID NO: 810346 - protein, 139 aa, Homo sapiens
MTHSLVCPETVSRVSSVLNRNTRQFGKKHLFDQDEETCWNSDQGPSQWVTLEFPQLIRVSQLQIQFQGGFSSRRGCLEGSQGTQALHKIVDFYPEDNNSLQTFPIPAAEVDRLKVTFEDATDFFGRVVIYHLRVLGEKV

SEQ ID NO: 810347 - protein, 143 aa, Homo sapiens
MTHSLVCPETVSRVSSVLNRNTRQFGKKHLFDQDEETCWNSDQGPSQWVTLEFPQLIRVSQLQIQFQGGFSSRRGCLEGSQGTQALHKIVDFYPEDNNSLQDILPLLLGWVVCASGSFGLTQTRMGTLMCDLEHVTSRTPLFL

SEQ ID NO: 810348 - protein, 81 aa, Homo sapiens; identical to SEQ ID NO: 810345

SEQ ID NO: 810349 - protein, 134 aa, Homo sapiens
MVENSPSPLPERAIYGFVLFLSSQFGFILYLVWAFIPESWLNSLGLTYWPQKYWAVALPVYLLIAIVIGYVLLFGINMMSTSPLDSIHTITDNYAKNQQQKKYQEEAIPALRDISISEVNQMFFLAAKELYTKN

SEQ ID NO: 810350 - protein, 134 aa, Homo sapiens; identical to SEQ ID NO: 810349

SEQ ID NO: 810351 - protein, 108 aa, Homo sapiens
MVLYLVWAFIPESWLNSLGLTYWPQKYWAVALPVYLLIAIVIGYVLLFGINMMSTSPLDSIHTITDNYAKNQQQKKYQEEAIPALRDISISEVNQMFFLAAKELYTKN

SEQ ID NO: 810352 - protein, 134 aa, Homo sapiens; identical to SEQ ID NO: 810349

SEQ ID NO: 810353 - protein, 134 aa, Homo sapiens; identical to SEQ ID NO: 810349

SEQ ID NO: 810354 - protein, 246 aa, Homo sapiens
MLVGAARALFPALPSHREATLAELERASIAPEPPSLPYPPPPLLLRGARQPGCLYALEAGARVADGGAGGVLRGGGRTRGGARRREWINGATEHIADADCVPFPQLSKAPGKMVENSPSPLPERAIYGFVLFLSSQFGFILYLVWAFIPESWLNSLGLTYWPQKYWAVALPVYLLIAIVIGYVLLFGINMMSTSPLDSIHTITDNYAKNQQQKKYQEEAIPALRDISISEVNQMFFLAAKELYTKN

SEQ ID NO: 810355 - protein, 134 aa, Homo sapiens; identical to SEQ ID NO: 810349

SEQ ID NO: 810356 - protein, 108 aa, Homo sapiens; identical to SEQ ID NO: 810351

SEQ ID NO: 810357 - protein, 117 aa, Homo sapiens
MVENSPSPLPERAIYGFVLFLSSQFGFILYLVWAFIPESWLNSLGLTYWPQNYVLLFGINMMSTSPLDSIHTITDNYAKNQQQKKYQEEAIPALRDISISEVNQMFFLAAKELYTKN

SEQ ID NO: 810358 - protein, 1221 aa, Homo sapiens
MLPSVPATAVRVSCSGCKKILQKGQTAYQRKGSTQLFCSTLCLTGYTVPPARPPPPLTKKTCSSCSKDILNPKDVISAQFENTTTSKDFCSQSCLSTYELKKKPIVTINTNSISTKCSMCQKNAVIRHEVNYQNVVHKLCSDACFSKFRSANNLTMNCCENCGGYCYSGSGQCHMLQIEGQSKKFCSSSCITAYKQKSAKITPCALCKSLRSSAEMIENTNSLGKTELFCSVNCLSAYRVKMVTSAGVQVQCNSCKTSAIPQYHLAMSDGSIRNFCSYSCVVAFQNLFNKPTGMNSSVVPLSQGQVIVSIPTGSTVSAGGGSTSAVSPTSISSSAAAGLQRLAAQSQHVGFARSVVKLKCQHCNRLFATKPELLDYKGKMFQFCGKNCSDEYKKINNVMAMCEYCKIEKIVKETVRFSGADKSFCSEGCKLLYKHDLAKRWGNHCKMCSYCLQTSPKLVQNNLGGKVEEFCCEECMSKYTVLFYQMAKCDACKRQGKLSESLKWRGEMKHFCNLLCILMFCNQQSVCDPPSQNNAANISMVQAASAGPPSLRKDSTPVIANVVSLASAPAAQPTVNSNSVLQGAVPTVTAKIIGDASTQTDALKLPPSQPPRLLKNKALLCKPITQTKATSCKPHTQNKECQTEDTPSQPQIIVVPVPVPVFVPIPLHLYTQYAPVPFGIPVPMPVPMLIPSSMDSEDKVTESIEDIKEKLPTHPFEADLLEMAEMIAEDEEKKTLSQGESQTSEHELFLDTKIFEKDQGSTYSGDLESEAVSTPHSWEEELNHYALKSNAVQEADSELKQFSKGETEQDLEADFPSDSFDPLNKGQGIQARSRTRRRHRDGFPQPRRRGRKKSIVAVEPRSLIQGAFQGCSVSGMTLKYMYGVNAWKNWVQWKNAKEEQGDLKCGGVEQASSSPRSDPLGSTQDHALSQESSEPGCRVRSIKLKEDILSCTFAELSLGLCQFIQEVRRPNGEKYDPDSILYLCLGIQQYLFENGRIDNIFTEPYSRFMIELTKLLKIWEPTILPNGYMFSRIEEEHLWECKQLGAYSPIVLLNTLLFFNTKYFQLKNVTEHLKLSFAHVMRRTRTLKYSTKMTYLRFFPPLQKQESEPDKLTVGKRKRNEDDEVPVGVEMAENTDNPLRCPVRLYEFYLSKCSESVKQRNDVFYLQPERSCVPNSPMWYSTFPIDPGTLDTMLTRILMVREVHEELAKAKSEDSDVELSD

SEQ ID NO: 810359 - protein, 1575 aa, Homo sapiens
QCGRGPGGREVPPPPRGEPQRFRAGPNMAEREVESGPRKRFEQKSGAVFDEIVENCGGIMDTEMSEDIDHNLTPTLDSMSYGMPNQTGSENSLLDEDDYFLNSGDLAGIPVVGSDNEDEQDFSSKDNLVSSIHTDDSLEVERRVTQHESDNENEIQIQNKLKKDFPKQFDQVSVFKSIRKDFSLVRENSKETFSGKEKNRDLTYEREKRLDKPHKDLDSRLKSSFFDKAANQVEETLHTHLPQTPETNFRDSSYPFANKESIGSELGNSFASNIRIKEEPLDDEYDKAMAPQQGLLDKIKDEPDNAQEYSHGQQQKTQEGELKISAVFSVSGSPLAPQLTTGFQPSLASSGMNKMLPSVPATAVRVSCSGCKKILQKGQTAYQRKGSTQLFCSTLCLTGYTVPPARPPPPLTKKTCSSCSKDILNPKDVISAQFENTTTSKDFCSQSCLSTYELKKKPIVTINTNSISTKCSMCQKNAVIRHEVNYQNVVHKLCSDACFSKFRSANNLTMNCCENCGGYCYSGSGQCHMLQIEGQSKKFCSSSCITAYKQKSAKITPCALCKSLRSSAEMIENTNSLGKTELFCSVNCLSAYRVKMVTSAGVQVQCNSCKTSAIPQYHLAMSDGSIRNFCSYSCVVAFQNLFNKPTGMNSSVVPLSQGQVIVSIPTGSTVSAGGGSTSAVSPTSISSSAAAGLQRLAAQSQHVGFARSVVKLKCQHCNRLFATKPELLDYKGKMFQFCGKNCSDEYKKINNVMAMCEYCKIEKIVKETVRFSGADKSFCSEGCKLLYKHDLAKRWGNHCKMCSYCLQTSPKLVQNNLGGKVEEFCCEECMSKYTVLFYQMAKCDACKRQGKLSESLKWRGEMKHFCNLLCILMFCNQQSVCDPPSQNNAANISMVQAASAGPPSLRKDSTPVIANVVSLASAPAAQPTVNSNSVLQGAVPTVTAKIIGDASTQTDALKLPPSQPPRLLKNKALLCKPITQTKATSCKPHTQNKECQTEDTPSQPQIIVVPVPVPVFVPIPLHLYTQYAPVPFGIPVPMPVPMLIPSSMDSEDKVTESIEDIKEKLPTHPFEADLLEMAEMIAEDEEKKTLSQGESQTSEHELFLDTKIFEKDQGSTYSGDLESEAVSTPHSWEEELNHYALKSNAVQEADSELKQFSKGETEQDLEADFPSDSFDPLNKGQGIQARSRTRRRHRDGFPQPRRRGRKKSIVAVEPRSLIQGAFQGCSVSGMTLKYMYGVNAWKNWVQWKNAKEEQGDLKCGGVEQASSSPRSDPLGSTQDHALSQESSEPGCRVRSIKLKEDILSCTFAELSLGLCQFIQEVRRPNGEKYDPDSILYLCLGIQQYLFENGRIDNIFTEPYSRFMIELTKLLKIWEPTILPNGYMFSRIEEEHLWECKQLGAYSPIVLLNTLLFFNTKYFQLKNVTEHLKLSFAHVMRRTRTLKYSTKMTYLRFFPPLQKQESEPDKLTVGKRKRNEDDEVPVGVEMAENTDNPLRCPVRLYEFYLSKCSESVKQRNDVFYLQPERSCVPNSPMWYSTFPIDPGTLDTMLTRILMVREVHEELAKAKSEDSDVELSD

SEQ ID NO: 810360 - protein, 1602 aa, Homo sapiens
QCGRGPGGREVPPPPRGEPQRFRAGPNMAEREVESGPRKRFEQKSGAVFDEIVENCGGIMDTEMSEDIDHNLTPTLDSMSYGMPNQTGSENSLLDEDDYFLNSGDLAGIPVVGSDNEDEQDFSSKDNLVSSIHTDDSLEVERRVTQHESDNENEIQIQNKLKKDFPKQFDQVSVFKSIRKDFSLVRENSKETFSGKEKNRDLTYEREKRLDKPHKDLDSRLKSSFFDKAANQVEETLHTHLPQTPETNFRDSSYPFANKESIGSELGNSFASNIRIKEEPLDDEYDKAMAPQQGLLDKIKDEPDNAQEYSHGQQQKTQEGELKISAVFSVSGSPLAPQLTTGFQPSLASSGMNKMLPSVPATAVRVSCSGCKKILQKGQTAYQRKGSTQLFCSTLCLTGYTVPPARPPPPLTKKTCSSCSKDILNPKDVISAQFENTTTSKDFCSQSCLSTYELKKKPIVTINTNSISTKCSMCQKNAVIRHEVNYQNVVHKLCSDACFSKFRSANNLTMNCCENCGGYCYSGSGQCHMLQIEGQSKKFCSSSCITAYKQKSAKITPCALCKSLRSSAEMIENTNSLGKTELFCSVNCLSAYRVKMVTSAGVQVQCNSCKTSAIPQYHLAMSDGSIRNFCSYSCVVAFQNLFNKPTGMNSSVVPLSQGQVIVSIPTGSTVSAGGGSTSAVSPTSISSSAAAGLQRLAAQSQHVGFARSVVKLKCQHCNRLFATKPELLDYKGKMFQFCGKNCSDEYKKINNVMAMCEYCKIEKIVKETVRFSGADKSFCSEGCKLLYKHDLAKRWGNHCKMCSYCLQTSPKLVQNNLGGKVEEFCCEECMSKYTVLFYQMAKCDACKRQGKLSESLKWRGEMKHFCNLLCILMFCNQQSVCDPPSQNNAANISMVQAASAGPPSLRKDSTPVIANVVSLASAPAAQPTVNSNSVLQGAVPTVTAKIIGDASTQTDALKLPPSQPPRLLKNKALLCKPITQTKATSCKPHTQNKECQTEDTPSQPQIIVVPVPVPVFVPIPLHLYTQYAPVPFGIPVPMPVPMLIPSSMDSEDKVTESIEDIKEKLPTHPFEADLLEMAEMIAEDEEKKTLSQGESQTSEHELFLDTKIFEKDQGSTYSGDLESEAVSTPHSWEEELNHYALKSNAVQEADSELKQFSKGETEQDLEADFPSDSFDPLNKGQGIQARSRTRRRHRDGFPQPRRRLNKGQGIQARSRTRRRHRDGFPQPRRRGRKKSIVAVEPRSLIQGAFQGCSVSGMTLKYMYGVNAWKNWVQWKNAKEEQGDLKCGGVEQASSSPRSDPLGSTQDHALSQESSEPGCRVRSIKLKEDILSCTFAELSLGLCQFIQEVRRPNGEKYDPDSILYLCLGIQQYLFENGRIDNIFTEPYSRFMIELTKLLKIWEPTILPNGYMFSRIEEEHLWECKQLGAYSPIVLLNTLLFFNTKYFQLKNVTEHLKLSFAHVMRRTRTLKYSTKMTYLRFFPPLQKQESEPDKLTVGKRKRNEDDEVPVGVEMAENTDNPLRCPVRLYEFYLSKCSESVKQRNDVFYLQPERSCVPNSPMWYSTFPIDPGTLDTMLTRILMVREVHEELAKAKSEDSDVELSD

SEQ ID NO: 810361 - protein, 1516 aa, Homo sapiens
MDTEMSEDIDHNLTPTLDSMSYGMPNQTGSENSLLDEDDYFLNSGDLAGIPVVGSDNEDEQDFSSKDNLVSSIHTDDSLEVERRVTQHESDNENEIQIQNKLKKDFPKQFDQVSVFKSIRKDFSLVRENSKETFSGKEKNRDLTYEREKRLDKPHKDLDSRLKSSFFDKAANQVEETLHTHLPQTPETNFRDSSYPFANKESIGSELGNSFASNIRIKEEPLDDEYDKAMAPQQGLLDKIKDEPDNAQEYSHGQQQKTQEGELKISAVFSVSGSPLAPQLTTGFQPSLASSGMNKMLPSVPATAVRVSCSGCKKILQKGQTAYQRKGSTQLFCSTLCLTGYTVPPARPPPPLTKKTCSSCSKDILNPKDVISAQFENTTTSKDFCSQSCLSTYELKKKPIVTINTNSISTKCSMCQKNAVIRHEVNYQNVVHKLCSDACFSKFRSANNLTMNCCENCGGYCYSGSGQCHMLQIEGQSKKFCSSSCITAYKQKSAKITPCALCKSLRSSAEMIENTNSLGKTELFCSVNCLSAYRVKMVTSAGVQVQCNSCKTSAIPQYHLAMSDGSIRNFCSYSCVVAFQNLFNKPTGMNSSVVPLSQGQVIVSIPTGSTVSAGGGSTSAVSPTSISSSAAAGLQRLAAQSQHVGFARSVVKLKCQHCNRLFATKPELLDYKGKMFQFCGKNCSDEYKKINNVMAMCEYCKIEKIVKETVRFSGADKSFCSEGCKLLYKHDLAKRWGNHCKMCSYCLQTSPKLVQNNLGGKVEEFCCEECMSKYTVLFYQMAKCDACKRQGKLSESLKWRGEMKHFCNLLCILMFCNQQSVCDPPSQNNAANISMVQAASAGPPSLRKDSTPVIANVVSLASAPAAQPTVNSNSVLQGAVPTVTAKIIGDASTQTDALKLPPSQPPRLLKNKALLCKPITQTKATSCKPHTQNKECQTEDTPSQPQIIVVPVPVPVFVPIPLHLYTQYAPVPFGIPVPMPVPMLIPSSMDSEDKVTESIEDIKEKLPTHPFEADLLEMAEMIAEDEEKKTLSQGESQTSEHELFLDTKIFEKDQGSTYSGDLESEAVSTPHSWEEELNHYALKSNAVQEADSELKQFSKGETEQDLEADFPSDSFDPLNKGQGIQARSRTRRRHRDGFPQPRRRGRKKSIVAVEPRSLIQGAFQGCSVSGMTLKYMYGVNAWKNWVQWKNAKEEQGDLKCGGVEQASSSPRSDPLGSTQDHALSQESSEPGCRVRSIKLKEDILSCTFAELSLGLCQFIQEVRRPNGEKYDPDSILYLCLGIQQYLFENGRIDNIFTEPYSRFMIELTKLLKIWEPTILPNGYMFSRIEEEHLWECKQLGAYSPIVLLNTLLFFNTKYFQLKNVTEHLKLSFAHVMRRTRTLKYSTKMTYLRFFPPLQKQESEPDKLTVGKRKRNEDDEVPVGVEMAENTDNPLRCPVRLYEFYLSKCSESVKQRNDVFYLQPERSCVPNSPMWYSTFPIDPGTLDTMLTRILMVREVHEELAKAKSEDSDVELSD

SEQ ID NO: 810362 - protein, 1599 aa, Homo sapiens
QCGRGPGGREVPPPPRGEPQRFRAGPNMAEREVESGPRKRFEQKSGAVFDEIVENCGGIMDTEMSEDIDHNLTPTLDSMSYGMPNQTGSENSLLDEDDYFLNSGDLAGIPVVGSDNEDEQDFSSKDNLVSSIHTDDSLEVERRVTQHESDNENEIQIQNKLKKDFPKQFDQVSVFKSIRKDFSLVRENSKETFSGKEKNRDLTYEREKRLDKPHKDLDSRLKSSFFDKAANQVEETLHTHLPQTPETNFRDSSYPFANKESIGSELGNSFASNIRIKEEPLDDEYDKAMAPQQGLLDKIKDEPDNAQEYSHGQQQKTQEGELKISAVFSVSGSPLAPQLTTGFQPSLASSGMNKMLPSVPATAVRVSCSGCKKILQKGQTAYQRKGSTQLFCSTLCLTGYTVPPARPPPPLTKKTCSSCSKDILNPKDVISAQFENTTTSKDFCSQSCLSTYELKKKPIVTINTNSISTKCSMCQKNAVIRHEVNYQNVVHKLCSDACFSKFRSANNLTMNCCENCGGYCYSGSGQCHMLQIEGQSKKFCSSSCITAYKQKSAKITPCALCKSLRSSAEMIENTNSLGKTELFCSVNCLSAYRVKMVTSAGVQVQCNSCKTSAIPQYHLAMSDGSIRNFCSYSCVVAFQNLFNKPTGMNSSVVPLSQGQVIVSIPTGSTVSAGGGSTSAVSPTSISSSAAAGLQRLAAQSQHVGFARSVVKLKCQHCNRLFATKPELLDYKGKMFQFCGKNCSDEYKKINNVMAMCEYCKIEKIVKETVRFSGADKSFCSEGCKLLYKHDLAKRWGNHCKMCSYCLQTSPKLVQNNLGGKVEEFCCEECMSKYTVLFYQMAKCDACKRQGKLSESLKWRGEMKHFCNLLCILMFCNQQSVCDPPSQNNAANISMVQAASAGPPSLRKDSTPVIANVVSLASAPAAQPTVNSNSVLQGAVPTVTAKIIGDASTQTDALKLPPSQPPRLLKNKALLCKPITQTKATSCKPHTQNKECQTEDTPSQPQIIVVPVPVPVFVPIPLHLYTQYAPVPFGIPVPVLSPKGNSYEKIVRNTSKNNKNNNMPVPMLIPSSMDSEDKVTESIEDIKEKLPTHPFEADLLEMAEMIAEDEEKKTLSQGESQTSEHELFLDTKIFEKDQGSTYSGDLESEAVSTPHSWEEELNHYALKSNAVQEADSELKQFSKGETEQDLEADFPSDSFDPLNKGQGIQARSRTRRRHRDGFPQPRRRGRKKSIVAVEPRSLIQGAFQGCSVSGMTLKYMYGVNAWKNWVQWKNAKEEQGDLKCGGVEQASSSPRSDPLGSTQDHALSQESSEPGCRVRSIKLKEDILSCTFAELSLGLCQFIQEVRRPNGEKYDPDSILYLCLGIQQYLFENGRIDNIFTEPYSRFMIELTKLLKIWEPTILPNGYMFSRIEEEHLWECKQLGAYSPIVLLNTLLFFNTKYFQLKNVTEHLKLSFAHVMRRTRTLKYSTKMTYLRFFPPLQKQESEPDKLTVGKRKRNEDDEVPVGVEMAENTDNPLRCPVRLYEFYLSKCSESVKQRNDVFYLQPERSCVPNSPMWYSTFPIDPGTLDTMLTRILMVREVHEELAKAKSEDSDVELSD

SEQ ID NO: 810363 - protein, 1221 aa, Homo sapiens
  misc_feature (31)..(31): Xaa can be any naturally occurring amino acid
GVSAWKYCLILSSIIGVKNLVTCGLAIGLCXYRHKLIASVLFSYFSSQKGKRNELYHGLCYFFLIFRDILNPKDVISAQFENTTTSKDFCSQSCLSTYELKKKPIVTINTNSISTKCSMCQKNAVIRHEVNYQNVVHKLCSDACFSKFRSANNLTMNCCENCGGYCYSGSGQCHMLQIEGQSKKFCSSSCITAYKQKSAKITPCALCKSLRSSAEMIENTNSLGKTELFCSVNCLSAYRVKMVTSAGVQVQCNSCKTSAIPQYHLAMSDGSIRNFCSYSCVVAFQNLFNKPTGMNSSVVPLSQGQVIVSIPTGSTVSAGGGSTSAVSPTSISSSAAAGLQRLAAQSQHVGFARSVVKLKCQHCNRLFATKPELLDYKGKMFQFCGKNCSDEYKKINNVMAMCEYCKIEKIVKETVRFSGADKSFCSEGCKLLYKHDLAKRWGNHCKMCSYCLQTSPKLVQNNLGGKVEEFCCEECMSKYTVLFYQMAKCDACKRQGKLSESLKWRGEMKHFCNLLCILMFCNQQSVCDPPSQNNAANISMVQAASAGPPSLRKDSTPVIANVVSLASAPAAQPTVNSNSVLQGAVPTVTAKIIGDASTQTDALKLPPSQPPRLLKNKALLCKPITQTKATSCKPHTQNKECQTEDTPSQPQIIVVPVPVPVFVPIPLHLYTQYAPVPFGIPVPMPVPMLIPSSMDSEDKVTESIEDIKEKLPTHPFEADLLEMAEMIAEDEEKKTLSQGESQTSEHELFLDTKIFEKDQGSTYSGDLESEAVSTPHSWEEELNHYALKSNAVQEADSELKQFSKGETEQDLEADFPSDSFDPLNKGQGIQARSRTRRRHRDGFPQPRRRGRKKSIVAVEPRSLIQGAFQGCSVSGMTLKYMYGVNAWKNWVQWKNAKEEQGDLKCGGVEQASSSPRSDPLGSTQDHALSQESSEPGCRVRSIKLKEDILSCTFAELSLGLCQFIQEVRRPNGEKYDPDSILYLCLGIQQYLFENGRIDNIFTEPYSRFMIELTKLLKIWEPTILPNGYMFSRIEEEHLWECKQLGAYSPIVLLNTLLFFNTKYFQLKNVTEHLKLSFAHVMRRTRTLKYSTKMTYLRFFPPLQKQESEPDKLTVGKRKRNEDDEVPVGVEMAENTDNPLRCPVRLYEFYLSKCSESVKQRNDVFYLQPERSCVPNSPMWYSTFPIDPGTLDTMLTRILMVREVHEELAKAKSEDSDVELSD

SEQ ID NO: 810364 - protein, 1575 aa, Homo sapiens; identical to SEQ ID NO: 810359

SEQ ID NO: 810365 - protein, 1575 aa, Homo sapiens; identical to SEQ ID NO: 810359

SEQ ID NO: 810366 - protein, 382 aa, Homo sapiens
MFCKFLEFLQGRKKSIVAVEPRSLIQGAFQGCSVSGMTLKYMYGVNAWKNWVQWKNAKEEQGDLKCGGVEQASSSPRSDPLGSTQDHALSQESSEPGCRVRSIKLKEDILSCTFAELSLGLCQFIQEVRRPNGEKYDPDSILYLCLGIQQYLFENGRIDNIFTEPYSRFMIELTKLLKIWEPTILPNGYMFSRIEEEHLWECKQLGAYSPIVLLNTLLFFNTKYFQLKNVTEHLKLSFAHVMRRTRTLKYSTKMTYLRFFPPLQKQESEPDKLTVGKRKRNEDDEVPVGVEMAENTDNPLRCPVRLYEFYLSKCSESVKQRNDVFYLQPERSCVPNSPMWYSTFPIDPGTLDTMLTRILMVREVHEELAKAKSEDSDVELSD

SEQ ID NO: 810367 - protein, 1575 aa, Homo sapiens; identical to SEQ ID NO: 810359

SEQ ID NO: 810368 - protein, 87 aa, Homo sapiens
LYRYHSILNLSIPYLSILNSESVKQRNDVFYLQPERSCVPNSPMWYSTFPIDPGTLDTMLTRILMVREVHEELAKAKSEDSDVELSD

SEQ ID NO: 810369 - protein, 169 aa, Homo sapiens [sequence omitted]

SEQ ID NO: 810370 - protein, 97 aa, Homo sapiens
MADKVLKEKRKLFIHSMGEGTINGLLDELLQTRVLNQEEMEKVKRENATVMDKTRALIDSVIPKGAQACQICITYICEEDSYLAETLGLSAGPIPGN

SEQ ID NO: 810371 - protein, 111 aa, Homo sapiens
  misc_feature (7)..(7): Xaa can be any naturally occurring amino acid
LVDPRGXRNSARGVKAMADKVLKEKRKLFIHSMGEGTINGLLDELLQTRVLNQEEMEKVKRENATVMDKTRALIDSVIPKGAQACQICITYICEEDSYLAETLGLSAGKGQ

SEQ ID NO: 810372 - protein, 213 aa, Homo sapiens
  misc_feature (7)..(7): Xaa can be any naturally occurring amino acid
LVDPRGXRNSARGVKAMADKVLKEKRKLFIHSMGEGTINGLLDELLQTRVLNQEEMEKVKRENATVMDKTRALIDSVIPKGAQACQICITYICEEDSYLAETLGLSAALQAVQDNPAMPTCSSPEGRIKLCFLEDAQRIWKQKLQRCHVQNTIIKWSERYTSGSFEMQWLFLRTNFIERFWRNILLLPLHKGSLYPRIPGLGKELQTGTHKLS

SEQ ID NO: 810373 - protein, 92 aa, Homo sapiens
RVYPTEAPWSLPLVVPSPSQVPQPRLLPAQLLGMRGGFLQHQSPPPSTKSRPWEGVSTVPITLGEIEAEAGCAGKERQEDSWEENPHRERDI

SEQ ID NO: 810374 - protein, 359 aa, Homo sapiens
GIRRPLRAWCFRPLRAAPGLSQSPVAAVMSRQLSRARPATVLGAMEMGRRMDAPTSAAVTRAFLERGHTEIDTAFVYSEGQSETILGGLGLRLGGSDCRVKIDTKAIPLFGNSLKPDSLRFQLETSLKRLQCPRVDLFYLHMPDHSTPVEETLRACHQLHQEGKFMELGLSNYAAWEVAEICTLCKSNGWILPTVYQGMYNAITRQVETELFPCLRHFGLRFYAFNPLAGGLLTGKYKYEDKDGKQPVGRFFGNTWAEMYRNRYWKEHHFEGIALVEKALQAAYGASAPSMTSATLRWMYHHSQLQGAHGDAVILGMSSLEQLEQNLAAAEEGPLEPAVVDAFNQAWHLVAHECPNYFR

SEQ ID NO: 810375 - protein, 132 aa, Homo sapiens
TTTKLAAARRLQALRMVQRLTYRRRLSYNTASNKTRLSRTPGNRIVYLYTKKVGKAPKSACGVCPGRLRGVRAVRPKVLMRLSKTKKHVSRAYGGSMCAKCVRDRIKRAFLIEEQKIVVKVLKAQAQSQKAK

SEQ ID NO: 810376 - protein, 152 aa, Homo sapiens
FDPPLKRPRAFEMTTPKSRPLWPGLFRGRCLQALRMVQRLTYRRRLSYNTASNKTRLSRTPGNRIVYLYTKKVGKAPKSACGVCPGRLRGVRAVRPKVLMRLSKTKKHVSRAYGGSMCAKCVRDRIKRAFLIEEQKIVVKVLKAQAQSQKAK

SEQ ID NO: 810377 - protein, 147 aa, Homo sapiens
  misc_feature (2)..(2): Xaa can be any naturally occurring amino acid
MXGPAPLRWNPRIRPLWPGLFRGRCLQALRMVQRLTYRRRLSYNTASNKTRLSRTPGNRIVYLYTKKVGKAPKSACGVCPGRLRGVRAVRPKVLMRLSKTKKHVSRAYGGSMCAKCVRDRIKRAFLIEEQKIVVKVLKAQAQSQKAK

SEQ ID NO: 810378 - protein, 111 aa, Homo sapiens
YQIRGRVDTASNKTRLSRTPGNRIVYLYTKKVGKAPKSACGVCPGRLRGVRAVRPKVLMRLSKTKKHVSRAYGGSMCAKCVRDRIKRAFLIEEQKIVVKVLKAQAQSQKAK

SEQ ID NO: 810379 - protein, 111 aa, Homo sapiens; identical to SEQ ID NO: 810378

SEQ ID NO: 810380 - protein, 103 aa, Homo sapiens
SSGDVVCRSRTPGNRIVYLYTKKVGKAPKSACGVCPGRLRGVRAVRPKVLMRLSKTKKHVSRAYGGSMCAKCVRDRIKRAFLIEEQKIVVKVLKAQAQSQKAK

SEQ ID NO: 810381 - protein, 69 aa, Homo sapiens
AAAYYYYVRAVRPKVLMRLSKTKKHVSRAYGGSMCAKCVRDRIKRAFLIEEQKIVVKVLKAQAQSQKAK

SEQ ID NO: 810382 - protein, 287 aa, Homo sapiens
LGVKQLIVGVNKMDSTEPPYSQKRYEEIVKEVSTYIKKIGYNPDTVAFVPISGWNGDNMLEPSANMPWFKGWKVTRKDGNASGTTLLEALDCILPPTRPTDKPLRLPLQDVYKIGGIGTVPVGRVETGVLKPGMVVTFAPVNVTTEVNLSKCTMKLRVKLFRGRCLQALRMVQRLTYRRRLSYNTASNKTRLSRTPGNRIVYLYTKKVGKAPKSACGVCPGRLRGVRAVRPKVLMRLSKTKKHVSRAYGGSMCAKCVRDRIKRAFLIEEQKIVVKVLKAQAQSQKAK

SEQ ID NO: 810383 - protein, 188 aa, Homo sapiens
LRGVRAVRPKVLMRLSKTKKHVSRAYGGSMCAKCVRDRIKRAFLIEEQKIVVKVLKPRGTSFRGRCLQALRMVQRLTYRRRLSYNTASNKTRLSRTPGNRIVYLYTKKVGKAPKSACGVCPGRLRGVRAVRPKVLMRLSKTKKHVSRAYGGSMCAKCVRDRIKRAFLIEEQKIVVKVLKAQAQSQKAK

SEQ ID NO: 810384 - protein, 143 aa, Homo sapiens
STELLDGKRRVGPLSSFRGRCLQALRMVQRLTYRRRLSYNTASNKTRLSRTPGNRIVYLYTKKVGKAPKSACGVCPGRLRGVRAVRPKVLMRLSKTKKHVSRAYGGSMCAKCVRDRIKRAFLIEEQKIVVKVLKAQAQSQKAK

SEQ ID NO: 810385 - protein, 117 aa, Homo sapiens [sequence omitted]

SEQ ID NO: 810386 - protein, 117 aa, Homo sapiens [sequence omitted]

SEQ ID NO: 810387 - protein, 136 aa, Homo sapiens
RVPTRKAFLSRGRCLQALRMVQRLTYRRRLSYNTASNKTRLSRTPGNRIVYLYTKKVGKAPKSACGVCPGRLRGVRAVRPKVLMRLSKTKKHVSRAYGGSMCAKCVRDRIKRAFLIEEQKIVVKVLKAQAQSQKAK

SEQ ID NO: 810388 - protein, 147 aa, Homo sapiens; identical to SEQ ID NO: 810377
  misc_feature (2)..(2): Xaa can be any naturally occurring amino acid

SEQ ID NO: 810389 - protein, 152 aa, Homo sapiens; identical to SEQ ID NO: 810376

SEQ ID NO: 810390 - protein, 152 aa, Homo sapiens; identical to SEQ ID NO: 810376

SEQ ID NO: 810391 - protein, 152 aa, Homo sapiens; identical to SEQ ID NO: 810376

SEQ ID NO: 810392 - protein, 152 aa, Homo sapiens; identical to SEQ ID NO: 810376

SEQ ID NO: 810393 - protein, 152 aa, Homo sapiens; identical to SEQ ID NO: 810376

SEQ ID NO: 810394 - protein, 152 aa, Homo sapiens
LEDPRMFTTTYVVVNMRVFHDDVCRRQTCPRRTHLAHMEPPYRRRLSYNTASNKTRLSRTPGNRIVYLYTKKVGKAPKSACGVCPGRLRGVRAVRPKVLMRLSKTKKHVSRAYGGSMCAKCVRDRIKRAFLIEEQKIVVKVLKAQAQSQKAK

SEQ ID NO: 810395 - protein, 152 aa, Homo sapiens; identical to SEQ ID NO: 810376

SEQ ID NO: 810396 - protein, 152 aa, Homo sapiens; identical to SEQ ID NO: 810376

SEQ ID NO: 810397 - protein, 152 aa, Homo sapiens; identical to SEQ ID NO: 810376

SEQ ID NO: 810398 - protein, 152 aa, Homo sapiens; identical to SEQ ID NO: 810376

SEQ ID NO: 810399 - protein, 152 aa, Homo sapiens; identical to SEQ ID NO: 810376

SEQ ID NO: 810400 - protein, 152 aa, Homo sapiens; identical to SEQ ID NO: 810376

SEQ ID NO: 810401 - protein, 152 aa, Homo sapiens; identical to SEQ ID NO: 810376

SEQ ID NO: 810402 - protein, 152 aa, Homo sapiens; identical to SEQ ID NO: 810376

SEQ ID NO: 810403 - protein, 152 aa, Homo sapiens; identical to SEQ ID NO: 810376

SEQ ID NO: 810404 - protein, 152 aa, Homo sapiens; identical to SEQ ID NO: 810376

SEQ ID NO: 810405 - protein, 152 aa, Homo sapiens; identical to SEQ ID NO: 810376

SEQ ID NO: 810406 - protein, 152 aa, Homo sapiens; identical to SEQ ID NO: 810376

SEQ ID NO: 810407 - protein, 152 aa, Homo sapiens; identical to SEQ ID NO: 810376

SEQ ID NO: 810408 - protein, 117 aa, Homo sapiens [sequence omitted]

SEQ ID NO: 810409 - protein, 117 aa, Homo sapiens [sequence omitted]

SEQ ID NO: 810410 - protein, 117 aa, Homo sapiens [sequence omitted]

SEQ ID NO: 810411 - protein, 117 aa, Homo sapiens [sequence omitted]

SEQ ID NO: 810412 - protein, 136 aa, Homo sapiens; identical to SEQ ID NO: 810387

SEQ ID NO: 810413 - protein, 173 aa, Homo sapiens
FDPPLKRPRAFEMTTPKSRPLWPGLFRGRCLQALRMVQRLTYRRRLSYNTASNKTRLSRTPGNRIVYLYTKKVGKAPKSACGVCPGRLRGVRAVRPKVLMRLSKTKKHVSRAYGGSMCAKCVRDRIKRAFLIEEQKIVVKVLKAQAQSPASFHFYYSKKFQLRILLSDSVLVD

SEQ ID NO: 810414 - protein, 113 aa, Homo sapiens
  misc_feature (112)..(112): Xaa can be any naturally occurring amino acid
MVQRLTYRRRLSYNTASNKTRLSRTPGNRIVYLYTKKVGKAPKSACGVCPGRLRGVRAVRPKVLMRLSKTKKHVSRAYGGSMCAKCVRDRSSVLSFNRKGGEKGAPPQKGGXK

SEQ ID NO: 810415 - protein, 275 aa, Homo sapiens
  misc_feature (266)..(266): Xaa can be any naturally occurring amino acid
LGVKQLIVGVNKMDSTEPPYSQKRYEEIVKEVSTYIKKIGYNPDTVAFVPISGWNGDNMLEPSANMPWFKGWKVTRKDGNASGTTLLEALDCILPPTRPTDKPLRLPLQDVYKIGGIGTVPVGRVETGVLKPGMVVTFAPVNVTTEVNLSKCTMKLRVKLFRGRCLQALRMVQRLTYRRRLSYNTASNKTRLSRTPGNRIVYLYTKKVGKAPKSACGVCPGRLRGVRAVRPKVLMRLSKTKKHVSRAYGGSMCAKCVRDRSLLPYXRTKNPVKFF

SEQ ID NO: 810416 - protein, 92 aa, Homo sapiens
VVCAQAAPGNRIVYLYTKGCLGTHHMQIRGVRAVRPKVLMRLSKTKKHVSRAYGGSMCAKCVRDRIKRAFLIEEQKIVVKVLKAQAQSQKAK

SEQ ID NO: 810417 - protein, 97 aa, Homo sapiens
LYRVVGRKEESGPTSSFRGRCLQALRMVQRLTYRRRLSYNTASNKTRLSRTPGNRIVYLYTKKVGKAPKSACGVCPGRLRGVRAVRPKVLMRLSACY

SEQ ID NO: 810418 - protein, 92 aa, Homo sapiens
MTLTELETYSPVLGRSTWDSMRISEGQAWENSLREVDGPLLPYSLEQLKGILVPLESELGTDPGRGTAPGPGYEALLNIRVKLEAEIRTYRR

SEQ ID NO: 810419 - protein, 121 aa, Homo sapiens
MSTLFPSLFPRVTETLWFNLDRPCVEETELQQQEQQHQAWLQSIAEKDNNLVPIGKPASEHYDDEEEEDDEDDEDSEEDSEDDEDMQDMDEMNDYNESPDDGEVNEVDMEGNEQDQDQWMI

SEQ ID NO: 810420 - protein, 121 aa, Homo sapiens; identical to SEQ ID NO: 810419

SEQ ID NO: 810421 - protein, 190 aa, Homo sapiens
MSTLFPSLFPRVTETLWFNLDRPCVEETELQQQEQQHQAWLQSIAEKDNNLVPIGKPASEHYDDEEEEDDEDDEDSEEDSEDDEDMQDMDEMNDYNESPDDGEVNEVHLSVLPTCGLYHSHPKQLCPESIKLSHSFMPHVYMWLALPFPPPSPSAWPTQNFQIQFKCCSFSMKSQAETTTLSFRFMKGLC

SEQ ID NO: 810422 - protein, 132 aa, Homo sapiens
MSTLFPSLFPRVTETLWFNLDRPCVEETELQQQEQQHQAWLQSIAEKDNNLVPIGKPASEHYDDEEEEDDEDDEDSEEDSEDDEDMQDMDEMNDYNESPDDGEVNEEDRERADSCQLDPRQTPSTKALNGAE

SEQ ID NO: 810423 - protein, 121 aa, Homo sapiens; identical to SEQ ID NO: 810419

SEQ ID NO: 810424 - protein, 190 aa, Homo sapiens
MSTLFPSLFPRVTETLWFNLDRPCVEETELQQQEQQHQAWLQSIAEKDNNLVPIGKPASEHYDDEEEEDDEDDEDSEEDSEDDEDMQDMDEMNDYNESPDDGEVNEESMGGLGATHRIRNRGVLADTGGPGIRPAKYLVQPHLSQHVAPLMLEPTGTWFCPPRLNAGITRDTWGVYKRKGTPPRVRLEKE

SEQ ID NO: 810425 - protein, 121 aa, Homo sapiens; identical to SEQ ID NO: 810419

SEQ ID NO: 810426 - protein, 121 aa, Homo sapiens; identical to SEQ ID NO: 810419

SEQ ID NO: 810427 - protein, 121 aa, Homo sapiens; identical to SEQ ID NO: 810419

SEQ ID NO: 810428 - protein, 133 aa, Homo sapiens
MSTLFPSLFPRVTETLWFNLDRPCVEETELQQQEQQHQAWLQSIAEKDNNLVPIGKPASEACRAYRLCPAHQHYDDEEEEDDEDDEDSEEDSEDDEDMQDMDEMNDYNESPDDGEVNEVDMEGNEQDQDQWMI

SEQ ID NO: 810429 - protein, 114 aa, Homo sapiens
MSTLFPSLFPRVTETLWFNLDRPCVEETELQQQEQQHQAWLQSIAEKDNNLVPIGKPASEHYDDEEEEDDEDDEDSEEDSEDDEDMQDMDGDSRPAQTTLHPNPQPSALEIPRA

SEQ ID NO: 810430 - protein, 77 aa, Homo sapiens
FLSETRPAFFLLVNCMVIIVMSKERAVALRRWVGLSEPRSLVCQYFLDMRVFTVVPNYAGWESEIQGRAAAGPGSVR

SEQ ID NO: 810431 - protein, 49 aa, Homo sapiens
MPYDQDSFSTLLGFLQASRKYSEFTLKCPICIYVPCQCFAVGFLKQSDQ

SEQ ID NO: 810432 - protein, 1180 aa, Homo sapiens
SWGKGREGVVSPAGLGGALPGDGKFGSPSRLGCSLGEGVQRVAALGMGKEQELLEAARTGHLPAVEKLLSGKRLSSGFGGGGGGGSGGGGGGSGGGGGGLGSSSHPLSSLLSMWRGPNVNCVDSTGYTPLHHAALNGHKDVVEVLLRNDALTNVADSKGCYPLHLAAWKGDAQIVRLLIHQGPSHTRVNEQNNDNETALHCAAQYGHTEVVKVLLEELTDPTMRNNKFETPLDLAALYGRLEVVKMLLNAHPNLLSCNTKKHTPLHLAARNGHKAVVQVLLDAGMDSNYQTEMGSALHEAALFGKTDVVQILLAAGTDVNIKDNHGLTALDTVRELPSQKSQQIAALIEDHMTGKRSTKEVDKTPPPQPPLISSMDSISQKSQGDVEKAVTELIIDFDANAEEEGPYEALYNAISCHSLDSMASGRSSDQDSTNKEAEAAGVKPAGVRPRERPPPPAKPPPDEEEEDHIDKKYFPLTASEVLSMRPRIHGSAAREEDEHPYELLLTAETKKVVLVDGKTKDHRRSSSSRSQDSAEGQDGQVPEQFSGLLHGSSPVCEVGQDPFQLLCTAGQSHPDGSPQQGACHKASMQLEETGVHAPGASQPSALDQSKRVGYLTGLPTTNSRSHPETLTHTASPHPGGAEEGDRSGARSRAPPTSKPKAELKLSRSLSKSDSDLLTCSPTEDATMGSRSESLSNCSIGKKRLEKSPSFASEWDEIEKIMSSIGEGIDFSQERQKISGSRTLEQSVGEWLESIGLQQYESKLLLNGFDDVHFLGSNVMEEQDLRDIGISDPQHRRKLLQAARSLPKVKALGYDGNSPPSVPSWLDSLGLQDYVHSFLSSGYSSIDTVKNLWELELVNVLKVQLLGHRKRIIASLADRPYEEPPQKPPRFSQLRCQDLLSQTSSPLSQNDSCTGRSADLLLPPGDTGRRRHDSLHDPAAPSRAERFRIQEEHREAKLTLRPPSLAAPYAPVQSWQHQPEKLIFESCGYEANYLGSMLIKDLRGTESTQDACAKMRKSTEHMKKIPTIILSITYKGVKFIDASNKNVIAEHEIRNISCAAQDPEDLCTFAYITKDLQTSHHYCHVFSTVDVNLTYEIILTLGQAFEVAYQLALQAQKSRATGASAAEMIETKSSKPVPKPRVGVRKSALEPPDMDQDAQSHASVSWVVDPKPDSKRSLSTN

SEQ ID NO: 810433 - protein, 176 aa, Homo sapiens
  misc_feature (170)..(170): Xaa can be any naturally occurring amino acid
MTFTVQEFTGGSRTLEQSVGEWLESIGLQQYESKLLLNGFDDVHFLGSNVMEEQDLRDIGISDPQHRRKLLQAARSLPKVKALGYDGNSPPSVPSWLDSLGLQDYVHSFLSSGYSSIDTVKNLWELELVNVLKVQLLGHRKRIIASLADRPYEEPPQKPPRFSQLRCKDXSPDVFH

SEQ ID NO: 810434 - protein, 1180 aa, Homo sapiens; identical to SEQ ID NO: 810432

SEQ ID NO: 810435 - protein, 236 aa, Homo sapiens
LLHRLPNQFNMAAMRWRWWQRLLPWRLLQARGFPQNSAPSLGLGARTYSQGDCSYSRTALYDLLGVPSTATQAQIKAAYYRQCFLYHPDRNSGSAEAAERFTRISQAYVVLGSATLRRKYDRGLLSDEDLRGPGVRPSRTPAPDPGSPRTPPPTSRTHDGSRASPGANRTMFNFDAFYQAHYGEQLERERRLRARREALRKRQEYRSMKGLRWEDTRDTAAIFLIFSIFIIIGFYI

SEQ ID NO: 810436 - protein, 236 aa, Homo sapiens; identical to SEQ ID NO: 810435

SEQ ID NO: 810437 - protein, 236 aa, Homo sapiens; identical to SEQ ID NO: 810435

SEQ ID NO: 810438 - protein, 411 aa, Homo sapiens
MRAHPGGGRCCPEQEEGESAAGGSGAGGDSAIEQGGQGSALAPSPVSGVRREGARGGGRGRGRWKQAGRGGGVCGRGRGRGRGRGRGRGRGRGRGRPPSGGSGLGGDGGGCGGGGSGGGGAPRREPVPFPSGSAGPGPRGPRATESGKRMDCPALPPGWKKEEVIRKSGLSAGKSDVYYFSPSGKKFRSKPQLARYLGNTVDLSSFDFRTGKMMPSKLQKNKQRLRNDPLNQNKGKPDLNTTLPIRQTASIFKQPVTKVTNHPSNKVKSDPQRMNEQPRQLFWEKRLQGLSASDVTEQIIKTMELPKGLQGVGPGSNDETLLSAVASALHTSSAPITGQVSAAVEKNPAVWLNTSQPLCKAFIVTDEDIRKQEERVQQVRKKLEEALMADILSRAADTEEMDIEMDSGDEA

SEQ ID NO: 810439 - protein, 411 aa, Homo sapiens; identical to SEQ ID NO: 810438

SEQ ID NO: 810440 - protein, 481 aa, Homo sapiens
MRAHPGGGRCCPEQEEGESAAGGSGAGGDSAIEQGGQGSALAPSPVSGVRREGARGGGRGRGRWKQAGRGGGVCGRGRGRGRGRGRGRGRGRGRGRPPSGGSGLGGDGGGCGGGGSGGGGAPRREPVPFPSGSAGPGPRGPRATESGKRMDCPALPPGWKKEEVIRKSGLSAGKSDVYYFSPSGKKFRSKPQLARYLGNTVDLSSFDFRTGKMMPSKLQKNKQRLRNDPLNQNKLLLEHSSSCTMACAFKTLLAHTLFALLGMCLPPSPSSGELLLIQDPASLSPSLGSLPCILQAEPILSSIMGKPDLNTTLPIRQTASIFKQPVTKVTNHPSNKVKSDPQRMNEQPRQLFWEKRLQGLSASDVTEQIIKTMELPKGLQGVGPGSNDETLLSAVASALHTSSAPITGQVSAAVEKNPAVWLNTSQPLCKAFIVTDEDIRKQEERVQQVRKKLEEALMADILSRAADTEEMDIEMDSGDEA

SEQ ID NO: 810441 - protein, 360 aa, Homo sapiens
MRAHPGGGRCCPEQEEGESAAGGSGAGGDSAIEQGGRGRGRGRGRPPSGGSGLGGDGGGCGGGGSGGGGAPRREPVPFPSGSAGPGPRGPRATESGKRMDCPALPPGWKKEEVIRKSGLSAGKSDVYYFSPSGKKFRSKPQLARYLGNTVDLSSFDFRTGKMMPSKLQKNKQRLRNDPLNQNKGKPDLNTTLPIRQTASIFKQPVTKVTNHPSNKVKSDPQRMNEQPRQLFWEKRLQGLSASDVTEQIIKTMELPKGLQGVGPGSNDETLLSAVASALHTSSAPITGQVSAAVEKNPAVWLNTSQPLCKAFIVTDEDIRKQEERVQQVRKKLEEALMADILSRAADTEEMDIEMDSGDEA

SEQ ID NO: 810442 - protein, 458 aa, Homo sapiens
MRAHPGGGRCCPEQEEGESAAGGSGAGGDSAIEQGGQGSALAPSPVSGVRREGARGGGRGRGRWKQAGRGGGVCGRGRGRGRGRGRGRGRGRGRGRPPSGGSGLGGDGGGCGGGGSGGGGAPRREPVPFPSGSAGPGPRGPRATESGKRMDCPALPPGWKKEEVIRKSGLSAGKSDVYYFSPSGKKFRSKPQLARYLGNTVDLSSFDFRTGKMMPSKLQKNKQRLRNDPLNQNKGKPDLNTTLPIRQTASIFKQPVTKVTNHPSNKVKSDPQRMNEQPRQCFFLFREPGKQKIFGATLDQHLAIDVSRFEVLNLLYCWSPRDSTGATLFWEKRLQGLSASDVTEQIIKTMELPKGLQGVGPGSNDETLLSAVASALHTSSAPITGQVSAAVEKNPAVWLNTSQPLCKAFIVTDEDIRKQEERVQQVRKKLEEALMADILSRAADTEEMDIEMDSGDEA

SEQ ID NO: 810443 - protein, 411 aa, Homo sapiens; identical to SEQ ID NO: 810438

SEQ ID NO: 810444 - protein, 411 aa, Homo sapiens; identical to SEQ ID NO: 810438

SEQ ID NO: 810445 - protein, 411 aa, Homo sapiens; identical to SEQ ID NO: 810438

SEQ ID NO: 810446 - protein, 409 aa, Homo sapiens
MRAHPGGGRCCPEQEEGESAAGGSGAGGDSAIEQGGQGSALAPSPVSGVRREGARGGGRGRGRWKQAGRGGGVCGRGRGRGRGRGRGRGRGRGRGRPPSGGSGLGGDGGGCGGGGSGGGGAPRREPVPFPSGSAGPGPRGPRATESGKRMDCPALPPGWKKEEVIRKSGLSAGKSDVYYFSPSGKKFRSKPQLARYLGNTVDLSSFDFRTGKMMPSKLQKNKQRLRNDPLNQNKGKPDLNTTLPIRQTASIFKQPVTKVTNHPSNKVKSDPQRMNEQPRQLFWEKRLQGLSASDVTEQIIKTMELPKGLQGVGPGSNDETLLSAVASALHTSSAPITGQVSAAVEKNPAVWLNTSQPLCKAFIVTDEDIRETGKRVQKLGRTGRSPMCESGARGNQRHEVEWAVYKRKL

SEQ ID NO: 810447 - protein, 260 aa, Homo sapiens
GRGPEKAETRWPPIALGGPKRRWPGPRPGQEGRCCARPLYDACARPPRAALRAGRVSGIPRARLRKKRSAGWGGGWMRAHPGGGRCCPEQEEGESAAGGSGAGGDSAIEQGGQGSALAPSPVSGVRREGARGGGRGRGRWKQAGRGGGVCGRGRGRGRGRGRGRGRGRGRGRPPSGGSGLGGDGGGCGGGGSGGGGAPRREPVPFPSGSAGPGPRGPRATEEREEDGLPGPPPRMEEGGSDPKIWAKCWQERCLLLQSKW

SEQ ID NO: 810448 - protein, 302 aa, Homo sapiens
MRAHPGGGRCCPEQEEGESAAGGSGAGGDSAIEQGGQGSALAPSPVSGVRREGARGGGRGRGRWKQAGRGGGVCGRGRGRGRGRGRGRGRGRGRGRPPSGGSGLGGDGGGCGGGGSGGGGAPRREPVPFPSGSAGPGPRGPRATESGKRMDCPALPPGWKKEEVIRKSGLSAGKSDVYYFSPSGKKFRSKPQLARYLGNTVDLSSFDFRTGKMMPSKLQKNKQRLRNDPLNQNKLRWNTHRPAPWHALSRLCLLIRCLLCLECAYPLPLHLVNSYSSKTQLHCLHLWEACPAYSRQNQSFPP

SEQ ID NO: 810449 - protein, 241 aa, Homo sapiens
MRAHPGGGRCCPEQEEGESAAGGSGAGGDSAIEQGGQGSALAPSPVSGVRREGARGGGRGRGRWKQAGRGGGVCGRGRGRGRGRGRGRGRGRGRGRPPSGGSGLGGDGGGCGGGGSGGGGAPRREPVPFPSGSAGPGPRGPRATESGKRMDCPALPPGWKKEEVIRKSGLSAGKSDVYYFSPSGKKFRSKPQLARYLGNTVDLSSFDFRTGKMMPSKLQKNKQRLRNDPLNQNKFVCTFLL

SEQ ID NO: 810450 - protein, 318 aa, Homo sapiens
  misc_feature (8)..(8): Xaa can be any naturally occurring amino acid
PEFPGWRXSGALSSRERPEQPSAQGCPSRAGGLPGLPAAAPCAPGGPGMLRQLLLAALCLAGPPAPARACQLPSEWRPLSEGCRAELAETIVYARVLALHPEAPGLYNHLPWQYHAGQGGLFYSAEVEMLCDQAWGSMLEVPAGSRLNLTGLGYFSCHSHTVVQDYSYFFFLRMDENYNLLPHGVNFQDAIFPDTQENRRMFSSLFQFSNCSQGQQLATFSSDWEIQEDSRLMCSSVQKALFEEEDHVKKLQQKVATLEKRNRQLRERVKKVKRSLRQARKKGRHLELANQKLSEKLAAGALPHINARGPVRPPYLRG

SEQ ID NO: 810451 - protein, 318 aa, Homo sapiens; identical to SEQ ID NO: 810450
  misc_feature (8)..(8): Xaa can be any naturally occurring amino acid

SEQ ID NO: 810452 - protein, 1055 aa, Homo sapiens
QDADVAETPHPMFTKYGNSLLEEARGEIRNLENVIQSQRGQIEELEHLAEILKTQLRRKENEIELSLLQLREQQATDQRSNIRDNVEMIKLHKQLVEKSNALSAMEGKFIQLQEKQRTLKISHDALMANGDELNMQLKEQRLKCCSLEKQLHSMKFSERRIEELQDRINDLEKERELLKENYDKLYDSAFSAAHEEQWKLKEQQLKVQIAQLETALKSDLTDKTEILDRLKTERDQNEKLVQENRELQLQYLEQKQQLDELKKRIKLYNQENDINADELSEALLLIKAQKEQKNGDLSFLVKVDSEINKDLERSMRELQATHAETVQELEKTRNMLIMQHKINKDYQMEVEAVTRKMENLQQDYELKVEQYVHLLDIRAARIHKLEAQLKDIAYGTKQYKFKPEIMPDDSVDEFDETIHLERGENLFEIHINKVTFSSEVLQASGDKEPVTFCTYAFYDFELQTTPVVRGLHPEYNFTSQYLVHVNDLFLQYIQKNTITLEVHQAYSTEYETIAACQLKFHEILEKSGRIFCTASLIGTKGDIPNFGTVEYWFRLRVPMDQAIRLYRERAKALGYITSNFKGPEHMQSLSQQAPKTAQLSSTDSTDGNLNELHITIRCCNHLQSRASHLQPHPYVVYKFFDFADHDTAIIPSSNDPQFDDHMYFPVPMNMDLDRYLKSESLSFYVFDDSDTQENIYIGKVNVPLISLAHDRCISGIFELTDHQKHPAGTIHVILKWKFAYLPPSGSITTEDLGNFIRSEEPEVVQRLPPASSVSTLVLAPRPKPRQRLTPVDKKVSFVDIMPHQSDVSQEGSVDEVKENTEKMQQGKDDVSLLSEGQLAEQSLASSEDETEITEDLEPEVEEDMSASDSDDCIIPGPISKNIKQPSEKIRIEIIALSLNDSQVTMDDTIQRLFVECRFYSLPAEETPVSLPKPKSGQWVYYNYSNVIYVDKENNKAKRDILKAILQKQEMPNRSLRFTVVSDPPEDEQDLECEDIGVAHVDLADMFQEGRDLIEQNIDVFDARADGEGIGKLRVTVEALHALQSVYKQYRDDLEA

SEQ ID NO: 810453 - protein, 1089 aa, Homo sapiens
QDADVAETPHPMFTKYGNSLLEEARGEIRNLENVIQSQRGQIEELEHLAEILKTQLRRKENEIELSLLQLREQQATDQRSNIRDNVEMIKLHKQLVEKSNALSAMEGKFIQLQEKQRTLKISHDALMANGDELNMQLKEQRLKCCSLEKQLHSMKFSERRIEELQDRINDLEKERELLKENYDKLYDSAFSAAHEEQWKLKEQQLKVQIAQLETALKSDLTDKTEILDRLKTERDQNEKLVQENRELQLQYLEQKQQLDELKKRIKLYNQENDINADELSEALLLIKAQKEQKNGDLSFLVKVDSEINKDLERSMRELQATHAETVQELEKTRNMLIMQHKINKDYQMEVEAVTRKMENLQQDYELKVEQYVHLLDIRAARIHKLEAQLKDIAYGTKQYKFKPEIMPDDSVDEFDETIHLERGENLFEIHINKVTFSSEVLQASGDKEPVTFCTYAFYDFELQTTPVVRGLHPEYNFTSQYLVHVNDLFLQYIQKNTITLEVHQAYSTEYETIAACQLKFHEILEKSGRIFCTASLIGTKGDIPNFGTVEYWFRLRVPMDQAIRLYRERAKALGYITSNFKGPEHMQSLSQQAPKTAQLSSTDSTDGNLNELHITIRCCNHLQSRASHLQPHPYVVYKFFDFADHDTAIIPSSNDPQFDDHMYFPVPMNMDLDRYLKSESLSFYVFDDSDTQENIYIGKVNVPLISLAHDRCISGIFELTDHQKHPAGTIHVILKWKFAYLPPSGSITTEDLGNFIRSEEPEVVQRLPPASSVSTLVLAPRPKPRQRLTPVDKKVSFVDIMPHQSDETSPPPEDRKEISPEVEHIPEIEINMLTVPHVPKVSQEGSVDEVKENTEKMQQGKDDVSLLSEGQLAEQSLASSEDETEITEDLEPEVEEDMSASDSDDCIIPGPISKNIKQPSEKIRIEIIALSLNDSQVTMDDTIQRLFVECRFYSLPAEETPVSLPKPKSGQWVYYNYSNVIYVDKENNKAKRDILKAILQKQEMPNRSLRFTVVSDPPEDEQDLECEDIGVAHVDLADMFQEGRDLIEQNIDVFDARADGEGIGKLRVTVEALHALQSVYKQYRDDLEA

SEQ ID NO: 810454 - protein, 394 aa, Homo sapiens
QDADVAETPHPMFTKYGNSLLEEARGEIRNLENVIQSQRGQIEELEHLAEILKTQLRRKENEIELSLLQLREQQATDQRSNIRDNVEMIKLHKQLVEKSNALSAMEGKFIQLQEKQRTLKISHDALMANGDELNMQLKEQRLKCCSLEKQLHSMKFSERRIEELQDRINDLEKERELLKENYDKLYDSAFSAAHEEQWKLKEQQLKVQIAQLETALKSDLTDKTEILDRLKTERDQNEKLVQENRELQLQYLEQKQQLDELKKRIKLYNQENDINADELSEALLLIKAQKEQKNGDLSFLVKVDSEINKDLERSMRELQATHAETVQELEKTRNMLIMQHKINKDYQMEVEAVTRKMENLQQDYELKVEQYVHLLDIRAARIHKLEEAVSLGSI

SEQ ID NO: 810455 - protein, 894 aa, Homo sapiens
MTAIKHALQRDIFTPNDERLLSIVNVCKAGKKKKNCFLCATVTTERPVQVKVVKVKKSDKGDFYKRQIAWALRDLAVVDAKDAIKENPEFDLHFEKIYKWVASSTAEKNAFISCIWKLNQRYLRKKIDFVNVSSQLLEESVPSGENQSVTGGDEEVVDEYQELNAREEQDIEIMMEGCEYAISNAEAFAEKLSRELQVLDGANIQSIMASEKQVNILMKLLDEALKEVDQIELKLSSYEEMLQSVKEQMDQISESNHLIHLSNTNNVKLLSEIEFLVNHMDLAKGHIKALQEGDLASSRGIEACTNAADALLQCMNVALRPGHDLLLAVKQQQQRFSDLRELFARRLASHLNNVFVQQGHDQSSTLAQHSVELTLPNHHPFHRDLLRYAKLMEWLKSTDYGKYEGLTKNYMDYLSRLYEREIKDFFEVAKIKMTGTTKESKKFATLPRKESAVKQETESLHGSSGKLTGSTSSLNKLSVQSSGNRRSQSSSLLDMGNMSASDLDVADRTKFDKIFEQVLSELEPLCLAEQDFISKFFKLQQHQSMPGTMAEAEDLDGGTLSRQHNCGTPLPVSSEKDMIRQMMIKIFRCIEPELNNLIALGDKIDSFNSLYMLVKMSHHVWTAQNVDPASFLSTTLGNVLVTVKRNFDKCISNQIRQMEEVKISKKSKVGILPFVAEFEEFAGLAESIFKNAERRGDLDKAYTKLIRGVFVNVEKVANESQKTPRDVVMMENFHHIFATLSRLKISCLEAEKKEAKQKYTDHLQSYVIYSLGQPLEKLNHFFEGVEARVAQGIREEEVSYQLAFNKQELRKVIKEYPGKEVKKGLDNLYKKVDKHLCEEENLLQVVWHSMQDEFIRQYKHFEGLIARCYPGSGVTMEFTIQDILDYCSSIAQSH

SEQ ID NO: 810456 - protein, 879 aa, Homo sapiens
MTAIKHALQRDIFTPNDERLLSIVNVCKAGKKKKNCFLCATVTTERPVQVKVVKVKKSDKGDFYKRQIAWALRDLAVVDAKDAIKENPEFDLHFEKIYKWVASSTAEKNAFISCIWKLNQRYLRKKIDFVNVSSQLLEESVPSGENQSVTGGDEEVVDEYQELNAREEQDIEIMMEGCEYAISNAEAFAEKLSRELQVLDGANIQSIMASEKQVNILMKLLDEALKEVDQIELKLSSYEEMLQSVKEQMDQISESNHLIHLSNTNNVKLLSEIEFLVNHMDLAKGHIKALQEGDLASSRGIEACTNAADALLQCMNVALRPGHDLLLAVKQQQQRFSDLRELFARRLASHLNNVFVQQGHDQSSTLAQHSVELTLPNHHPFHRDLLRYAKLMEWLKSTDYGKYEGLTKNYMDYLSRLYEREIKDFFEVAKIKMTGTTKESKKFGLHGSSGKLTGSTSSLNKLSVQSSGNRRSQSSSLLDMGNMSASDLDVADRTKFDKIFEQVLSELEPLCLAEQDFISKFFKLQQHQSMPGTMAEAEDLDGGTLSRQHNCGTPLPVSSEKDMIRQMMIKIFRCIEPELNNLIALGDKIDSFNSLYMLVKMSHHVWTAQNVDPASFLSTTLGNVLVTVKRNFDKCISNQIRQMEEVKISKKSKVGILPFVAEFEEFAGLAESIFKNAERRGDLDKAYTKLIRGVFVNVEKVANESQKTPRDVVMMENFHHIFATLSRLKISCLEAEKKEAKQKYTDHLQSYVIYSLGQPLEKLNHFFEGVEARVAQGIREEEVSYQLAFNKQELRKVIKEYPGKEVKKGLDNLYKKVDKHLCEEENLLQVVWHSMQDEFIRQYKHFEGLIARCYPGSGVTMEFTIQDILDYCSSIAQSH

SEQ ID NO: 810457 - protein, 894 aa, Homo sapiens; identical to SEQ ID NO: 810455

SEQ ID NO: 810458 - protein, 897 aa, Homo sapiens
MTAIKHALQRDIFTPNDERLLSIVNVCKAGKKKKNCFLCATVTTERPVQVKVVKVKKSDKGDFYKRQIAWALRDLAVVDAKDAIKENPEFDLHFEKIYKWVASSTAEKNAFISCIWKLNQRYLRKKIDFVNVSSQLLEESVPSGENQSVTGGDEEVVDEYQELNAREEQDIEIMMEGCEYAISNAEAFAEKLSRELQVLDGANIQSIMASEKQVNILMKLLDEALKEVDQIELKLSSYEEMLQSVKEQMDQISESNHLIHLSNTNNVKLLSEIEFLVNHMDLAKGHIKALQEGDLASSRGIEACTNAADALLQCMNVALRPGHDLLLAVKQQQQRFSDLRELFARRLASHLNNVFVQQFTQALLQLYNRSYFLSVPGHDQSSTLAQHSVELTLPNHHPFHRDLLRYAKLMEWLKSTDYGKYEGLTKNYMDYLSRLYEREIKDFFEVAKIKMTGTTKESKKFGLHGSSGKLTGSTSSLNKLSVQSSGNRRSQSSSLLDMGNMSASDLDVADRTKFDKIFEQVLSELEPLCLAEQDFISKFFKLQQHQSMPGTMAEAEDLDGGTLSRQHNCGTPLPVSSEKDMIRQMMIKIFRCIEPELNNLIALGDKIDSFNSLYMLVKMSHHVWTAQNVDPASFLSTTLGNVLVTVKRNFDKCISNQIRQMEEVKISKKSKVGILPFVAEFEEFAGLAESIFKNAERRGDLDKAYTKLIRGVFVNVEKVANESQKTPRDVVMMENFHHIFATLSRLKISCLEAEKKEAKQKYTDHLQSYVIYSLGQPLEKLNHFFEGVEARVAQGIREEEVSYQLAFNKQELRKVIKEYPGKEVKKGLDNLYKKVDKHLCEEENLLQVVWHSMQDEFIRQYKHFEGLIARCYPGSGVTMEFTIQDILDYCSSIAQSH

SEQ ID NO: 810459 - protein, 317 aa, Homo sapiens
MIRQMMIKIFRCIEPELNNLIALGDKIDSFNSLYMLVKMSHHVWTAQNVDPASFLSTTLGNVLVTVKRNFDKCISNQIRQMEEVKISKKSKVGILPFVAEFEEFAGLAESIFKNAERRGDLDKAYTKLIRGVFVNVEKVANESQKTPRDVVMMENFHHIFATLSRLKISCLEAEKKEAKQKYTDHLQSYVIYSLGQPLEKLNHFFEGVEARVAQGIREEEVSYQLAFNKQELRKVIKEYPGKEVKKGLDNLYKKVDKHLCEEENLLQVVWHSMQDEFIRQYKHFEGLIARCYPGSGVTMEFTIQDILDYCSSIAQSH

SEQ ID NO: 810460 - protein, 879 aa, Homo sapiens; identical to SEQ ID NO: 810456

SEQ ID NO: 810461 - protein, 415 aa, Homo sapiens
MTAIKHALQRDIFTPNDERLLSIVNVCKAGKKKKNCFLCATVTTERPVQVKVVKVKKSDKGDFYKRQIAWALRDLAVVDAKDAIKENPEFDLHFEKIYKWVASSTAEKNAFISCIWKLNQRYLRKKIDFVNVSSQLLEESVPSGENQSVTGGDEEVVDEYQELNAREEQDIEIMMEGCEYAISNAEAFAEKLSRELQVLDGANIQSIMASEKQVNILMKLLDEALKEVDQIELKLSSYEEMLQSVKEQMDQISESNHLIHLSNTNNVKLLSEIEFLVNHMDLAKGHIKALQEGDLASSRGIEACTNAADALLQCMNVALRPGHDLLLAVKQQQQRFSDLRELFARRLASHLNNVFVQQGHDQSSTLAQHSVELTLPNHHPFHRDLLRYAKLMEWLKSTDYGKYEGLTKNSDLEIS

SEQ ID NO: 810462 - protein, 368 aa, Homo sapiens
MTAIKHALQRDIFTPNDERLLSIVNVCKAGKKKKNCFLCATVTTERPVQVKVVKVKKSDKGDFYKRQIAWALRDLAVVDAKDAIKENPEFDLHFEKIYKWVASSTAEKNAFISCIWKLNQRYLRKKIDFVNVSSQLLEESVPSGENQSVTGGDEEVVDEYQELNAREEQDIEIMMEGCEYAISNAEAFAEKLSRELQVLDGANIQSIMASEKQVNILMKLLDEALKEVDQIELKLSSYEEMLQSVKEQMDQISESNHLIHLSNTNNVKLLSEIEFLVNHMDLAKGHIKALQEGDLASSRGIEACTNAADALLQCMNVALRPGHDLLLAVKQQQQRFSDLRELFARRLASHLNNVFVQQRPHDSIYFCL

SEQ ID NO: 810463 - protein, 411 aa, Homo sapiens
MTAIKHALQRDIFTPNDERLLSIVNVCKAGKKKKNCFLCATVTTERPVQVKVVKVKKSDKGDFYKRQIAWALRDLAVVDAKDAIKENPEFDLHFEKIYKWVASSTAEKNAFISCIWKLNQRYLRKKIDFVNVSSQLLEESVPSGENQSVTGGDEEVVDEYQELNAREEQDIEIMMEGCEYAISNAEAFAEKLSRELQVLDGANIQSIMASEKQVNILMKLLDEALKEVDQIELKLSSYEEMLQSVKEQMDQISESNHLIHLSNTNNVKLLSEIEFLVNHMDLAKGHIKALQEGDLASSRGIEACTNAADALLQCMNVALRPGHDLLLAVKQQQQRFSDLRELFARRLASHLNNVFVQQGHDQSSTLAQHSVELTLPNHHPFHRDLLRYAKLMEWLKSTDYGKYEGLTKVWI

SEQ ID NO: 810464 - protein, 134 aa, Homo sapiens
CNLSSYRHLGSCGGLLGTGLLKGTMSGRLWSKAIFAGYKRGLRNQREHTALLKIEGVYARDETEFYLGKRCAYVYKAKNNTVTPGGKPNKTRVIWGKVTRAHGNSGMVRAKFRSNLPAKAIGHRFRVMLYPSRI

SEQ ID NO: 810465 - protein, 110 aa, Homo sapiens
MSGRLWSKAIFAGYKRGLRNQREHTALLKIEGVYARDETEFYLGKRCAYVYKAKNNTVTPGGKPNKTRVIWGKVTRAHGNSGMVRAKFRSNLPAKAIGHRFRVMLYPSRI

SEQ ID NO: 810466 - protein, 125 aa, Homo sapiens
VGAMAWTTAFQTEFLLEVPFPAKAIFAGYKRGLRNQREHTALLKIEGVYARDETEFYLGKRCAYVYKAKNNTVTPGGKPNKTRVIWGKVTRAHGNSGMVRAKFRSNLPAKAIGHRFRVMLYPSRI

SEQ ID NO: 810467 - protein, 691 aa, Homo sapiens
MELRSTAAPRAEGYSNVGFQNEENFLENENTSGNNSIRSRAVQSREHTNTKQDEEQVTVEQDSPRNREHMEDDDEEMQQKGCLERRYDTVCGFCRKHKTTLRHIIWGILLAGYLVMVISACVLNFHRALPLFVITVAAIFFVVWDHLMAKYEHRIDEMLSPGRRLLNSHWFWLKWVIWSSLVLAVIFWLAFDTAKLGQQQLVSFGGLIMYIVLLFLFSKYPTRVYWRPVLWGIGLQFLLGLLILRTDPGFIAFDWLGRQVQTFLEYTDAGASFVFGEKYKDHFFAFKVLPIVVFFSTVMSMLYYLGLMQWIIRKVGWIMLVTTGSSPIESVVASGNIFVGQTESPLLVRPYLPYITKSELHAIMTAGFSTIAGSVLGAYISFGVPSSHLLTASVMSAPASLAAAKLFWPETEKPKITLKNAMKMESGDSGNLLEAATQGASSSISLVANIAVNLIAFLALLSFMNSALSWFGNMFDYPQLSFELICSYIFMPFSFMMGVEWQDSFMVARLIGYKTFFNEFVAYEHLSKWIHLRKEGGPKFVNGVQQYISIRSEIIATYALCGFANIGSLGIVIGGLTSMAPSRKRDIASGAVRALIAGTVACFMTACIAGILSSTPVDINCHHVLENAFNSTFPGNTTKVIACCQSLLSSTVAKGPGEVIPGGNHSLYSLKGCCTLLNPSTFNCNGISNTF

SEQ ID NO: 810468 - protein, 750 aa, Homo sapiens
MELRSTAAPRAEGYSNVGFQNEENFLENENTSGNNSIRSRAVQSREHTNTKQRIKGHIGYDRRQVLRFDIILLRAHSNCSTSIYFLPHQLLYHWLQEPGLLFETLLETGDKDEEQVTVEQDSPRNREHMEDDDEEMQQKGCLERRYDTVCGFCRKHKTTLRHIIWGILLAGYLVMVISACVLNFHRALPLFVITVAAIFFVVWDHLMAKYEHRIDEMLSPGRRLLNSHWFWLKWVIWSSLVLAVIFWLAFDTAKLGQQQLVSFGGLIMYIVLLFLFSKYPTRVYWRPVLWGIGLQFLLGLLILRTDPGFIAFDWLGRQVQTFLEYTDAGASFVFGEKYKDHFFAFKVLPIVVFFSTVMSMLYYLGLMQWIIRKVGWIMLVTTGSSPIESVVASGNIFVGQTESPLLVRPYLPYITKSELHAIMTAGFSTIAGSVLGAYISFGVPSSHLLTASVMSAPASLAAAKLFWPETEKPKITLKNAMKMESGDSGNLLEAATQGASSSISLVANIAVNLIAFLALLSFMNSALSWFGNMFDYPQLSFELICSYIFMPFSFMMGVEWQDSFMVARLIGYKTFFNEFVAYEHLSKWIHLRKEGGPKFVNGVQQYISIRSEIIATYALCGFANIGSLGIVIGGLTSMAPSRKRDIASGAVRALIAGTVACFMTACIAGILSSTPVDINCHHVLENAFNSTFPGNTTKVIACCQSLLSSTVAKGPGEVIPGGNHSLYSLKGCCTLLNPSTFNCNGISNTF

SEQ ID NO: 810469 - protein, 660 aa, Homo sapiens
MDDWKPSPLIKPFGARKKRSWYLTWKYKLTNQRALRRFCQTGAVLFLLVTVIVNIKLILDTRRAISEANEDPEPEQDYDEALGRLEPPRRRGSGPRRVLDVEVYSSRSKVYVAVDGTTVLEDEAREQGRGIHVIVLNQATGHVMAKRVFDTYSPHEDEAMVLFLNMVAPGRVLICTVKDEGSFHLKDTAKALLRSLGSQAGPALGWRDTWAFVGRKGGPVFGEKHSKSPALSSWGDPVLLKTDVPLSSAEEAECHWADTELNRRRRRFCSKVEGYGSVCSCKDPTPIEFSPDPLPDNKVLNVPVAVIAGNRPNYLYRMLRSLLSAQGVSPQMITVFIDGYYEEPMDVVALFGLRGIQHTPISIKNARVSQHYKASLTATFNLFPEAKFAVVLEEDLDIAVDFFSFLSQSIHLLEEDDSLYCISAWNDQGYEHTAEDPALLYRVETMPGLGWVLRRSLYKEELEPKWPTPEKLWDWDMWMRMPEQRRGRECIIPDVSRSYHFGIVGLNMNGYFHEAYFKKHKFNTVPGVQLRNVDSLKKEAYEVEVHRLLSEAEVLDHSKNPCEDSFLPDTEGHTYVAFIRMEKDDDFTTWTQLAKCLHIWDLDVRGNHRGLWRLFRKKNHFLVVGVPASPYSVKKPPSVTPIFLEPPPKEEGAPGAPEQT

SEQ ID NO: 810470 - protein, 156 aa, Homo sapiens
MDDWKPSPLIKPFGARKKRSWYLTWKYKLTNQRALRRFCQTGAVLFLLVTVIVNIKLILDTRRAISEANEDPEPEQDYDEALGRLEPPRRRGSGPRRVLDVEVYSSRSKVYVAVDGTTVSGPGSGVQSLYSAQGMVHWQQGLLPKWELQLCQFLAV

SEQ ID NO: 810471 - protein, 660 aa, Homo sapiens; identical to SEQ ID NO: 810469

SEQ ID NO: 810472 - protein, 660 aa, Homo sapiens; identical to SEQ ID NO: 810469

SEQ ID NO: 810473 - protein, 687 aa, Homo sapiens
MDDWKPSPLIKPFGARKKRSWYLTWKYKLTNQRALRRFCQTGAVLFLLVTVIVNIKLILDTRRAISEANEDPEPEQDYDEALGRLEPPRRRGSGPRRVLDVEVYSSRSKVYVAVDGTTVLEDEAREQGRGIHVIVLNQATGHVMAKRVFDTYSPHEDEAMVLFLNMVAPGRVLICTVKDEGSFHLKDTAKALLRSLGSQAGPALGWRDTWAFVGRKGGPVFGEKHSKSPALSSWGDPVLLKTDVPLSSAEEAECHWADTELNRRRRRFCSKVEGYGSVCSCKDPTPIEFSPDPLPDNKVLNVPVAVIAGNRPNYLYRMLRSLLSAQGVSPQMITVFIDGYYEEPMDVVALFGLRGIQHTPISIKNARVSQHYKASLTATFNLFPEAKFAVVLEEDLDIAVDFFSFLSQSIHLLEEDDSLYCISAWNDQVGWNDQGLAGEFMRPQLIPPTMAPCPQGYEHTAEDPALLYRVETMPGLGWVLRRSLYKEELEPKWPTPEKLWDWDMWMRMPEQRRGRECIIPDVSRSYHFGIVGLNMNGYFHEAYFKKHKFNTVPGVQLRNVDSLKKEAYEVEVHRLLSEAEVLDHSKNPCEDSFLPDTEGHTYVAFIRMEKDDDFTTWTQLAKCLHIWDLDVRGNHRGLWRLFRKKNHFLVVGVPASPYSVKKPPSVTPIFLEPPPKEEGAPGAPEQT

SEQ ID NO: 810474 - protein, 732 aa, Homo sapiens
MDDWKPSPLIKPFGARKKRSWYLTWKYKLTNQRALRRFCQTGAVLFLLVTVIVNIKLILDTRRAISEANEDPEPEQDYDEALGRLEPPRRRGSGPRRVLDVEVYSSRSKVYVAVDGTTVLEDEAREQGRGIHVIVLNQATGHVMAKRVFDTYSPHEDEAMVLFLNMVAPGRVLICTVKDEGSFHLKDTAKALLRSLGSQAGPALGWRDTWAFVGRKGGPVFGEKHSKSPALSSWGDPVLLKTDVPLSSAEEAECHWADTELNRRRRRFCSKVEGYGSVCSCKDPTPIEFSPDPLPDNKVLNVPVAVIAGNRPNYLYRKAWEWAIPSTEQEGASGHLPPGGTLEVGRKAIDSETHSPLWVSIGTLGPAVNTGEPELRGDEVTLTIPGLPRMLRSLLSAQGVSPQMITVFIDGYYEEPMDVVALFGLRGIQHTPISIKNARVSQHYKASLTATFNLFPEAKFAVVLEEDLDIAVDFFSFLSQSIHLLEEDDSLYCISAWNDQGYEHTAEDPALLYRVETMPGLGWVLRRSLYKEELEPKWPTPEKLWDWDMWMRMPEQRRGRECIIPDVSRSYHFGIVGLNMNGYFHEAYFKKHKFNTVPGVQLRNVDSLKKEAYEVEVHRLLSEAEVLDHSKNPCEDSFLPDTEGHTYVAFIRMEKDDDFTTWTQLAKCLHIWDLDVRGNHRGLWRLFRKKNHFLVVGVPASPYSVKKPPSVTPIFLEPPPKEEGAPGAPEQT

SEQ ID NO: 810475 - protein, 688 aa, Homo sapiens
MDDWKPSPLIKPFGARKKRSWYLTWKYKLTNQRALRRFCQTGAVLFLLVTVIVNIKLILDTRRAISEANEDPEPEQDYDEALGRLEPPRRRGSGPRRVLDVEVYSSRSKVYVAVDGTTVLEDEAREQGRGIHVIVLNQATGHVMAKRVFDTYSPHEDEAMVLFLNMVAPGRVLICTVKDEGSFHLKDTAKALLRSLGSQAGPALGWRDTWAFVGRKGGPVFGEKHSKSPALSSWGDPVLLKTDVPLSSAEEAECHWADTELNRRRRRFCSKVEGYGSVCSCKDPTPIEFSPDPLPDNKVLNVPVAVIAGNRPNYLYRMLRSLLSAQGVSPQMITVFIDGYYEEPMDVVALFGLRGIQHTPISIKNARVSQHYKASLTATFNLFPEAKFAVVLEEDLDIAVDFFSFLSQSIHLLEEDDSLYCISAWNDQGYEHTAEDPALLYRVETMPGLGWVLRRSLYKEELEPKWPTPEKVTVRVGCGGWSPLPTRNILTFIVVHVCQLWDWDMWMRMPEQRRGRECIIPDVSRSYHFGIVGLNMNGYFHEAYFKKHKFNTVPGVQLRNVDSLKKEAYEVEVHRLLSEAEVLDHSKNPCEDSFLPDTEGHTYVAFIRMEKDDDFTTWTQLAKCLHIWDLDVRGNHRGLWRLFRKKNHFLVVGVPASPYSVKKPPSVTPIFLEPPPKEEGAPGAPEQT

SEQ ID NO: 810476 - protein, 790 aa, Homo sapiens
MDDWKPSPLIKPFGARKKRSWYLTWKYKLTNQRALRRFCQTGAVLFLLVTVIVNIKLILDTRRAISEANEDPEPEQDYDEALGRLEPPRRRGSGPRRVLDVEVYSSRSKVYVAVDGTTVLEDEAREQGRGIHVIVLNQATGHVMAKRVFDTYSPHEDEAMVLFLNMVAPGRVLICTVKDEGSFHLKDTAKALLRSLGSQAGPALGWRDTWAFVGRKGGPVFGEKHSKSPALSSWGDPVLLKTDVPLSSAEEAECHWADTELNRRRRRFCSKVEGYGSVCSCKDPTPIEFSPDPLPDNKVLNVPVAVIAGNRPNYLYRKAWEWAIPSTEQEGASGHLPPGGTLEVGRKAIDSETHSPLWVSIGTLGPAVNTGEPELRGDEVTLTIPGLPRMLRSLLSAQGVSPQMITVFIDGYYEVSRTWGGLGWSTTWSSSDCQGRARETAQARAVKCEGLGLQRWAEGKGPHMVSSGHVPQEPMDVVALFGLRGIQHTPISIKNARVSQHYKASLTATFNLFPEAKFAVVLEEDLDIAVDFFSFLSQSIHLLEEDDSLYCISAWNDQGYEHTAEDPALLYRVETMPGLGWVLRRSLYKEELEPKWPTPEKLWDWDMWMRMPEQRRGRECIIPDVSRSYHFGIVGLNMNGYFHEAYFKKHKFNTVPGVQLRNVDSLKKEAYEVEVHRLLSEAEVLDHSKNPCEDSFLPDTEGHTYVAFIRMEKDDDFTTWTQLAKCLHIWDLDVRGNHRGLWRLFRKKNHFLVVGVPASPYSVKKPPSVTPIFLEPPPKEEGAPGAPEQT

SEQ ID NO: 810477 - protein, 589 aa, Homo sapiens
MDDWKPSPLIKPFGARKKRSWYLTWKYKLTNQRALRRFCQTGAVLFLLVTVIVNIKLILDTRRAISEANEDPEPEQDYDEALGRLEPPRRRGSGPRRVLDVEVYSSRSKVYVAVDGTTVLEDEAREQGRGIHVIVLNQATGHVMAKRVFDTYSPHEDEAMVLFLNMVAPGRVLICTVKDEGSFHLKDTAKALLRSLGSQAGPALGWRDTWAFVGRKGGPVFGEKHSKSPALSSWGDPVLLKTDVPLSSAEEAECHWADTELNRRRRRFCSKVEGYGSVCSCKDPTPIEFSPDPLPDNKVLNVPVAVIAGNRPNYLYRMLRSLLSAQGVSPQMITVFIDGYYEEPMDVVALFGLRGIQHTPISIKNARVSQHYKASLTATFNLFPEAKFAVVLEEDLDIAVDFFSFLSQSIHLLEEDDSLYCISAWNDQGYEHTAEDPALLYRVETMPGLGWVLRRSLYKEELEPKWPTPEKLWDWDMWMRMPEQRRGRECIIPDVSRSYHFGIVGLNMNGYFHEAYFKKHKFNTVPGVQLRNVDSLKKEAYEVEVHRLLRYGLGQLGCSREQRVKYWGSWPHNLQGPVQNENQGPHLKH

SEQ ID NO: 810478 - protein, 642 aa, Homo sapiens
MDDWKPSPLIKPFGARKKRSWYLTWKYKLTNQRALRRFCQTGAVLFLLVTVIVNIKLILDTRRAISEANEDPEPEQDYDEALGRLEPPRRRGSGPRRVLDVEVYSSRSKVYVAVDGTTVLEDEAREQGRGIHVIVLNQATGHVMAKRVFDTYSPHEDEAMVLFLNMVAPGRVLICTVKDEGSFHLKDTAKALLRSLGSQAGPALGWRDTWAFVGRKGGPVFGEKHSKSPALSSWGDPVLLKTDVPLSSAEEAECHWADTELNRRRRRFCSKVEGYGSVCSCKDPTPIEFSPDPLPDNKVLNVPVAVIAGNRPNYLYRMLRSLLSAQGVSPQMITVFIDGYYEEPMDVVALFGLRGIQHTPISIKNARVSQHYKASLTATFNLFPEAKFAVVLEEDLDIAVDFFSFLSQSIHLLEEDDSLYCISAWNDQGYEHTAEDPALLYRVETMPGLGWVLRRSLYKEELEPKWPTPEKCIIPDVSRSYHFGIVGLNMNGYFHEAYFKKHKFNTVPGVQLRNVDSLKKEAYEVEVHRLLSEAEVLDHSKNPCEDSFLPDTEGHTYVAFIRMEKDDDFTTWTQLAKCLHIWDLDVRGNHRGLWRLFRKKNHFLVVGVPASPYSVKKPPSVTPIFLEPPPKEEGAPGAPEQT

SEQ ID NO: 810479 - protein, 660 aa, Homo sapiens; identical to SEQ ID NO: 810469

SEQ ID NO: 810480 - protein, 660 aa, Homo sapiens; identical to SEQ ID NO: 810469

SEQ ID NO: 810481 - protein, 493 aa, Homo sapiens
VLPRVQGDWKRDEGSFHLKDTAKALLRSLGSQAGPALGWRDTWAFVGRKGGPVFGEKHSKSPALSSWGDPVLLKTDVPLSSAEEAECHWADTELNRRRRRFCSKVEGYGSVCSCKDPTPIEFSPDPLPDNKVLNVPVAVIAGNRPNYLYRMLRSLLSAQGVSPQMITVFIDGYYEEPMDVVALFGLRGIQHTPISIKNARVSQHYKASLTATFNLFPEAKFAVVLEEDLDIAVDFFSFLSQSIHLLEEDDSLYCISAWNDQGYEHTAEDPALLYRVETMPGLGWVLRRSLYKEELEPKWPTPEKLWDWDMWMRMPEQRRGRECIIPDVSRSYHFGIVGLNMNGYFHEAYFKKHKFNTVPGVQLRNVDSLKKEAYEVEVHRLLSEAEVLDHSKNPCEDSFLPDTEGHTYVAFIRMEKDDDFTTWTQLAKCLHIWDLDVRGNHRGLWRLFRKKNHFLVVGVPASPYSVKKPPSVTPIFLEPPPKEEGAPGAPEQT

SEQ ID NO: 810482 - protein, 533 aa, Homo sapiens
MDDWKPSPLIKPFGARKKRSWYLTWKYKLTNQRALRRFCQTGAVLFLLVTVIVNIKLILDTRRAISEANEDPEPEQDYDEALGRLEPPRRRGSGPRRVLDVEVYSSRSKVYVAVDGTTVLEDEAREQGRGIHVIVLNQATGHVMAKRVFDTYSPHEDEAMVLFLNMVAPGRVLICTVKVIAGNRPNYLYRMLRSLLSAQGVSPQMITVFIDGYYEEPMDVVALFGLRGIQHTPISIKNARVSQHYKASLTATFNLFPEAKFAVVLEEDLDIAVDFFSFLSQSIHLLEEDDSLYCISAWNDQGYEHTAEDPALLYRVETMPGLGWVLRRSLYKEELEPKWPTPEKLWDWDMWMRMPEQRRGRECIIPDVSRSYHFGIVGLNMNGYFHEAYFKKHKFNTVPGVQLRNVDSLKKEAYEVEVHRLLSEAEVLDHSKNPCEDSFLPDTEGHTYVAFIRMEKDDDFTTWTQLAKCLHIWDLDVRGNHRGLWRLFRKKNHFLVVGVPASPYSVKKPPSVTPIFLEPPPKEEGAPGAPEQT

SEQ ID NO: 810483 - protein, 660 aa, Homo sapiens; identical to SEQ ID NO: 810469

SEQ ID NO: 810484 - protein, 660 aa, Homo sapiens; identical to SEQ ID NO: 810469

SEQ ID NO: 810485 - protein, 664 aa, Homo sapiens
MDDWKPSPLIKPFGARKKRSWYLTWKYKLTNQRALRRFCQTGAVLFLLVTVIVNIKLILDTRRAISEANEDPEPEQDYDEALGRLEPPRRRGSGPRRVLDVEVYSSRSKVYVAVDGTTVLEDEAREQGRGIHVIVLNQATGHVMAKRVFDTYSPHEDEAMVLFLNMVAPGRVLICTVKDEGSFHLKDTAKALLRSLGSQAGPALGWRDTWAFVGRKGGPVFGEKHSKSPALSSWGDPVLLKTDVPLSSAEEAECHWADTELNRRRRRFCSKVEGYGSVCSCKDPTPIEFSPDPLPDNKVLNVPVAVIAGNRPNYLYRMLRSLLSAQGVSPQMITVFIDGYYEEPMDVVALFGLRGIQHTPISIKNARVSQHYKASLTATFNLFPEAKFAVVLEEDLDIAVDFFSFLSQSIHLLEEDDSLYCISAWNDQGYEHTAEDPALLYRVETMPGLGWVLRRSLYKEELEPKWPTPEKLWDWDMWMRMPEQRRGRECIIPDVSRSYHFGIVGLNMNGYFHEAYFKKHKFNTVPGVQLRNVDSLKKEAYEVEVHRLLSEAEVLDHSKNPCEDSFLPDTEGHTYVAFIRMEKDDDFTTWTQLAKCLHIWDLDVRGNHRGLWRLFRKKNHFLVVGVPASPYSAQNLTYLLTVLRALKTGRTWRAWISFWAGMLP

SEQ ID NO: 810486 - protein, 327 aa, Homo sapiens [sequence omitted]

SEQ ID NO: 810487 - protein, 552 aa, Homo sapiens
MDDWKPSPLIKPFGARKKRSWYLTWKYKLTNQRALRRFCQTGAVLFLLVTVIVNIKLILDTRRAISEANEDPEPEQDYDEALGRLEPPRRRGSGPRRVLDVEVYSSRSKVYVAVDGTTVLEDEAREQGRGIHVIVLNQATGHVMAKRVFDTYSPHEDEAMVLFLNMVAPGRVLICTVKDEGSFHLKDTAKALLRSLGSQAGPALGWRDTWAFVGRKGGPVFGEKHSKSPALSSWGDPVLLKTDVPLSSAEEAECHWADTELNRRRRRFCSKVEGYGSVCSCKDPTPIEFSPDPLPDNKVLNVPVAVIAGNRPNYLYRMLRSLLSAQGVSPQMITVFIDGYYEEPMDVVALFGLRGIQHTPISIKNARVSQHYKASLTATFNLFPEAKFAVVLEEDLDIAVDFFSFLSQSIHLLEEDDSLYCISAWNDQVGWNDQGLAGEFMRPQLIPPTMAPCPQGYEHTAEDPALLYRVETMPGLGWVLRRSLYKEELEPKWPTPEKLWDWDMWMRMPEQRRGRECIIPDVSRSYHFGIVGLNMNGYFHVSGRQGAGHSVA

SEQ ID NO: 810488 - protein, 197 aa, Homo sapiens
PTLEAPEKLWDWDMWMRMPEQRRGRECIIPDVSRSYHFGIVGLNMNGYFHEAYFKKHKFNTVPGVQLRNVDSLKKEAYEVEVHRLLSEAEVLDHSKNPCEDSFLPDTEGHTYVAFIRMEKDDDFTTWTQLAKCLHIWDLDVRGNHRGLWRLFRKKNHFLVVGVPASPYSVKKPPSVTPIFLEPPPKEEGAPGAPEQT

SEQ ID NO: 810489 - protein, 128 aa, Homo sapiens
NSLGRGRVVMKWKSRLLSEAEVLDHSKNPCEDSFLPDTEGHTYVAFIRMEKDDDFTTWTQLAKCLHIWDLDVRGNHRGLWRLFRKKNHFLVVGVPASPYSVKKPPSVTPIFLEPPPKEEGAPGAPEQT

SEQ ID NO: 810490 - protein, 416 aa, Homo sapiens
MDDWKPSPLIKPFGARKKRSWYLTWKYKLTNQRALRRFCQTGAVLFLLVTVIVNIKLILDTRRAISEANEDPEPEQDYDEALGRLEPPRRRGSGPRRVLDVEVYSSRSKVYVAVDGTTVLEDEAREQGRGIHVIVLNQATGHVMAKRVFDTYSPHEDEAMVLFLNMVAPGRVLICTVKDEGSFHLKDTAKALLRSLGSQAGPALGWRDTWAFVGRKGGPVFGEKHSKSPALSSWGDPVLLKTDVPLSSAEEAECHWADTELNRRRRRFCSKVEGYGSVCSCKDPTPIEFSPDPLPDNKVLNVPVAVIAGNRPNYLYRMLRSLLSAQGVSPQGSESNLFIDCPEGLENRPNLEGLDFFLGWNAALRVGLALTQETAVPNPWTGPAGAHMLTQTHSETLRHWTRPPLSLLFVQISKAG

SEQ ID NO: 810491 - protein, 305 aa, Homo sapiens
MDDWKPSPLIKPFGARKKRSWYLTWKYKLTNQRALRRFCQTGAVLFLLVTVIVNIKLILDTRRAISEANEDPEPEQDYDEALGRLEPPRRRGSGPRRVLDVEVYSSRSKVYVAVDGTTVLEDEAREQGRGIHVIVLNQATGHVMAKRVFDTYSPHEDEAMVLFLNMVAPGRVLICTVKDEGSFHLKDTAKALLRSLGSQAGPALGWRDTWAFVGRKGGPVFGEKHSKSPALSSWGDPVLLKTDVPLSSAEEAECHWADTELNRRRRRFCSKVEGYGSVCSCKDPTPIEFSPDPPPGTPRAGDTLE

SEQ ID NO: 810492 - protein, 98 aa, Homo sapiens
KKKKKNFKVATAEHSTKYRVLWDTPMKWALSWLYSPTLYCSEAEVLDHSKNPCEDSFLPDTEGHTYVAFIRMEKDDDFTTWTQLAKVLQYHAHPGEPL

SEQ ID NO: 810493 - protein, 666 aa, Homo sapiens
MLPEAGSLWLLKLLRDIQLAQFYWPILEELNVTRPEHFDFVKPEDLDGIGMGRPAQRRLSEALKSLRSGPKSKNWVYKILGGFAPEHKEPTLPSDSPRHLPEPEGGLKCLIPEGAVCRGELLGSGCFGVVHRGLWTLPSGKSVPVAVKSLRVGPEGPMGTELGDFLREVSVMMNLEHPHVLRLHGLVLGQPLQMVMELAPLGSLHARLTAPAPTPPLLVALLCLFLRQLAGAMAYLGARGLVHRDLATRNLQLASPRTIKVADFGLVRPLGGARGRYVMGGPRPIPYTWCAPESLRHGAFSSASDVWMFGVTLWEMFSGGEEPWAGVPPYLILQRLEDRARLPRPPLSSRALYSLALRCWAPHPADRPSFSHLEGLLQEAGPSEACCVRDVTEPGALRMETGDPITVIEGSSSFHSPDSTIWKGQNGRTFKVGSFPASAVTLADAGGLPATRPVHRGTPARGDQHPGSIDGDRKKANLWDAPPARGQRRNMPLERMKGISRSLESVLSLGPRPTGGGSSPPEIRQARAVPQGPPGLPPRPPLSSSSPQPSQPSRERLPWPKRKPPHNHPMGMPGARKAAALSGGLLSDPELQRKIMEMELSVHGVTHQECQTALGATGGDVVSAIRNLKVDQLFHLSSRSRADCWRILEHYQWDLSAASRYVLARP

SEQ ID NO: 810494 - protein, 406 aa, Homo sapiens
  misc_feature (27)..(27): Xaa can be any naturally occurring amino acid
MGALGGAPWRVGLQGARVPPLSAPLSXGRCAPESLRHGAFSSASDVWMFGVTLWEMFSGGEEPWAGVPPYLILQRLEDRARLPRPPLSSRALYSLALRCWAPHPADRPSFSHLEGLLQEAGPSEACCVRDVTEPGALRMETGDPITVIEGSSSFHSPDSTIWKGQNGRTFKVGSFPASAVTLADAGGLPATRPVHRGTPARGDQHPGSIDGDRKKANLWDAPPARGQRRNMPLERMKGISRSLESVLSLGPRPTGGGSSPPEIRQARAVPQGPPGLPPRPPLSSSSPQPSQPSRERLPWPKRKPPHNHPMGMPGARKAAALSGGLLSDPELQRKIMEMELSVHGVTHQECQTALGATGGDVVSAIRNLKVDQLFHLSSRSRADCWRILEHYQWDLSAASRYVLARP

SEQ ID NO: 810495 - protein, 187 aa, Homo sapiens
GGGGCSQPSSSCFLLNCAGISRSLESVLSLGPRPTGGGSSPPEIRQARAVPQGPPGLPPRPPLSSSSPQPSQPSRERLPWPKRKPPHNHPMGMPGARKAAALSGGLLSDPELQRKIMEMELSVHGVTHQECQTALGATGGDVVSAIRNLKVDQLFHLSSRSRADCWRILEHYQWDLSAASRYVLARP

SEQ ID NO: 810496 - protein, 471 aa, Homo sapiens
MLPEAGSLWLLKLLRDIQLAQFYWPILEELNVTRPEHFDFVKPEDLDGIGMGRPAQRRLSEALKSLRSGPKSKNWVYKILGGFAPEHKEPTLPSDSPRHLPEPEGGLKCLIPEGAVCRGELLGSGCFGVVHRGLWTLPSGKSVPVAVKSLRVGPEGPMGTELGDFLREVSVMMNLEHPHVLRLHGLVLGQPLQMVMELAPLGSLHARLTAPAPTPPLLVALLCLFLRQLAGAMAYLGARGLVHRDLATRNLQLASPRTIKVADFGLVRPLGGARGRYVMGGPRPIPYTWCAPESLRHGAFSSASDVWMFGVTLWEMFSGGEEPWAGVPPYLILQRLEDRARLPRPPLSSRALYSLALRCWAPHPADRPSFSHLEGLLQEAGPSEACCVRDVTEPGALRMETGDPITVIEGSSSFHSPDSTIWKGQNGRTFKVGSFPASAVTLADAGGLPATRPVHRGTPARGDQHPGSIDG

SEQ ID NO: 810497 - protein, 155 aa, Homo sapiens
TPMKHRWRQKEGKSLGCAPSTGPEEEHAPGEDESSPQPSQPSRERLPWPKRKPPHNHPMGMPGARKAAALSGGLLSDPELQRKIMEMELSVHGVTHQECQTALGATGGDVVSAIRNLKVDQLFHLSSRSRADCWRILEHYQWDLSAASRYVLARP

SEQ ID NO: 810498 - protein, 272 aa, Homo sapiens
MGNTTSDRVSGERHGAKAARSEGAGGHAPGKEHKIMVGSTDDPSVFSLPDSKLPGDKEFVSWQQDLEDSVKPTQQARPTVIRWSEGGKEVFISGSFNNWSTKIPLIKSHNDFVAILDLPEGEHQYKFFVDGQWVHDPSEPVVTSQLGTINNLIHVKKSDFEVFDALKLDSMESSETSCRDLSSSPPGPYGQEMYAFRSEERFKSPPILPPHLLQVILNKDTNISCDPALLPEPNHVMLNHLYALSIKDSVMVLSATHRYKKKYVTTLLYKPI

SEQ ID NO: 810499 - protein, 265 aa, Homo sapiens
EEESLVASEGCGFNFNNFIGGLICRTAITSVALGGGSASPEVVPDELQPWETPPATGCPGSATAPRLHAPRAQAAMPRGRSTRSWWGVRTTPACSASLTPSHNDFVAILDLPEGEHQYKFFVDGQWVHDPSEPVVTSQLGTINNLIHVKKSDFEVFDALKLDSMESSETSCRDLSSSPPGPYGQEMYAFRSEERFKSPPILPPHLLQVILNKDTNISCDPALLPEPNHVMLNHLYALSIKDSVMVLSATHRYKKKYVTTLLYKPI

SEQ ID NO: 810500 - protein, 272 aa, Homo sapiens; identical to SEQ ID NO: 810498

SEQ ID NO: 810501 - protein, 272 aa, Homo sapiens; identical to SEQ ID NO: 810498

SEQ ID NO: 810502 - protein, 84 aa, Homo sapiens
GAQDVTGFALREVSLPEDAVQELPTMDYLHSQGVGAMPGAAFGEEGASGQEPKPQGFMGSRAENADCPGIPSVPPSSLLCLEAQ

SEQ ID NO: 810503 - protein, 1120 aa, Homo sapiens
MDLSMKKFAVRRFFSVYLRRKSRSKSSSLSRLEEEGVVKEIDISHHVKEGFEKADPSQFELLKVLGQGSYGKVFLVRKVKGSDAGQLYAMKVLKKATLKVRDRVRSKMERDILAEVNHPFIVKLHYAFQTEGKLYLILDFLRGGDLFTRLSKEVMFTEEDVKFYLAELALALDHLHSLGIIYRDLKPENILLDEEGHIKITDFGLSKEAIDHDKRAYSFCGTIEYMAPEVVNRRGHTQSADWWSFGVLMFEMLTGSLPFQGKDRKETMALILKAKLGMPQFLSGEAQSLLRALFKRNPCNRLGAGIDGVEEIKRHPFFVTIDWNTLYRKEIKPPFKPAVGRPEDTFHFDPEFTARTPTDSPGVPPSANAHHLFRGFSFVASSLIQEPSQQDLHKVPVHPIVQQLHGNNIHFTDGYEIKEDIGVGSYSVCKRCVHKATDTEYAVKIIDKSKRDPSEEIEILLRYGQHPNIITLKDVYDDGKFVYLVMELMRGGELLDRILRQRYFSEREASDVLCTITKTMDYLHSQGVVHRDLKPSNILYRDESGSPESIRVCDFGFAKQLRAGNGLLMTPCYTANFVAPEVLKRQGYDAACDIWSLGILLYTMLAGFTPFANGPDDTPEEILARIGSGKYALSGGNWDSISDAAKDVVSKMLHVDPHQRLTAMQVLKHPWVVNREYLSPNQLSRQDVHLVKGAMAATYFALNRTPQAPRLEPVLSSNLAQRRGMKRLTSTRCSGWDPGPSVPCQHPRGLTDPGLGARLAPRVTTSPAGRRRRPRRVRVFFFSPGEGPDLGASPSLTAPASPPALFSPKRNQMRPFTSRARARPGASFRARGSSHTWLLFLPRDLFSNYEAGRFGQTPDTHVPGTRWESGSARAQPLVVAGPQRAGVTWHPGAPHGLDDGVGTVASRRRCLVLPKIIQKSRFLLALQFLPEVLGSPSFPLSQIQMRSKSPDERKAGWIFALRAPCHQDGRGCLSEEPVSTSSLGFPRGAKRTGLPSVPSSRGHTAIWRLCRESWVLAPAQPCVGFLCAHLKLWFCCVHFDFSGLWRNCELEKWSSVASHPNLLSPAGGWRETQAPPSRLRGRGTGGRAAEISVDRSDALCRCCGFVLRFVSLLHRSVFSH

SEQ ID NO: 810504 - protein, 733 aa, Homo sapiens
MDLSMKKFAVRRFFSVYLRRKSRSKSSSLSRLEEEGVVKEIDISHHVKEGFEKADPSQFELLKVLGQGSYGKVFLVRKVKGSDAGQLYAMKVLKKATLKVRDRVRSKMERDILAEVNHPFIVKLHYAFQTEGKLYLILDFLRGGDLFTRLSKEVMFTEEDVKFYLAELALALDHLHSLGIIYRDLKPENILLDEEGHIKITDFGLSKEAIDHDKRAYSFCGTIEYMAPEVVNRRGHTQSADWWSFGVLMFEMLTGSLPFQGKDRKETMALILKAKLGMPQFLSGEAQSLLRALFKRNPCNRLGAGIDGVEEIKRHPFFVTIDWNTLYRKEIKPPFKPAVGRPEDTFHFDPEFTARTPTDSPGVPPSANAHHLFRGFSFVASSLIQEPSQQDLHKVPVHPIVQQLHGNNIHFTDGYEIKEDIGVGSYSVCKRCVHKATDTEYAVKIIDKSKRDPSEEIEILLRYGQHPNIITLKDVYDDGKFVYLVMELMRGGELLDRILRQRYFSEREASDVLCTITKTMDYLHSQGVVHRDLKPSNILYRDESGSPESIRVCDFGFAKQLRAGNGLLMTPCYTANFVAPEVLKRQGYDAACDIWSLGILLYTMLAGFTPFANGPDDTPEEILARIGSGKYALSGGNWDSISDAAKDVVSKMLHVDPHQRLTAMQVLKHPWVVNREYLSPNQLSRQDVHLVKGAMAATYFALNRTPQAPRLEPVLSSNLAQRRGMKRLTSTRL

SEQ ID NO: 810505 - protein, 733 aa, Homo sapiens; identical to SEQ ID NO: 810504

SEQ ID NO: 810506 - protein, 1029 aa, Homo sapiens
MLLGFILSMYEGAHIGELHTESGAVQYAVLCDVTVDTDGEALTESVTSWGEGTSSLRISDEDVMFTEEDVKFYLAELALALDHLHSLGIIYRDLKPENILLDEEGHIKITDFGLSKEAIDHDKRAYSFCGTIEYMAPEVVNRRGHTQSADWWSFGVLMFEMLTGSLPFQGKDRKETMALILKAKLGMPQFLSGEAQSLLRALFKRNPCNRLGAGIDGVEEIKRHPFFVTIDWNTLYRKEIKPPFKPAVGRPEDTFHFDPEFTARTPTDSPGVPPSANAHHLFRGFSFVASSLIQEPSQQDLHKVPVHPIVQQLHGNNIHFTDGYEIKEDIGVGSYSVCKRCVHKATDTEYAVKIIDKSKRDPSEEIEILLRYGQHPNIITLKDVYDDGKFVYLVMELMRGGELLDRILRQRYFSEREASDVLCTITKTMDYLHSQGVVHRDLKPSNILYRDESGSPESIRVCDFGFAKQLRAGNGLLMTPCYTANFVAPEVLKRQGYDAACDIWSLGILLYTMLAGFTPFANGPDDTPEEILARIGSGKYALSGGNWDSISDAAKDVVSKMLHVDPHQRLTAMQVLKHPWVVNREYLSPNQLSRQDVHLVKGAMAATYFALNRTPQAPRLEPVLSSNLAQRRGMKRLTSTRCSGWDPGPSVPCQHPRGLTDPGLGARLAPRVTTSPAGRRRRPRRVRVFFFSPGEGPDLGASPSLTAPASPPALFSPKRNQMRPFTSRARARPGASFRARGSSHTWLLFLPRDLFSNYEAGRFGQTPDTHVPGTRWESGSARAQPLVVAGPQRAGVTWHPGAPHGLDDGVGTVASRRRCLVLPKIIQKSRFLLALQFLPEVLGSPSFPLSQIQMRSKSPDERKAGWIFALRAPCHQDGRGCLSEEPVSTSSLGFPRGAKRTGLPSVPSSRGHTAIWRLCRESWVLAPAQPCVGFLCAHLKLWFCCVHFDFSGLWRNCELEKWSSVASHPNLLSPAGGWRETQAPPSRLRGRGTGGRAAEISVDRSDALCRCCGFVLRFVSLLHRSVFSH

SEQ ID NO: 810507 - protein, 211 aa, Homo sapiens [sequence omitted]

SEQ ID NO: 810508 - protein, 460 aa, Homo sapiens
MDLSMKKFAVRRFFSVYLRRKSRSKSSSLSRLEEEGVVKEIDISHHVKEGFEKADPSQFELLKVLGQGSYGKVFLVRKVKGSDAGQLYAMKVLKKATLKVRDRVRSKMERDILAEVNHPFIVKLHYAFQTEGKLYLILDFLRGGDLFTRLSKEVMFTEEDVKFYLAELALALDHLHSLGIIYRDLKPENILLDEEGHIKITDFGLSKEAIDHDKRAYSFCGTIEYMAPEVVNRRGHTQSADWWSFGVLMFEMLTGSLPFQGKDRKETMALILKAKLGMPQFLSGEAQSLLRALFKRNPCNRLGAGIDGVEEIKRHPFFVTIDWNTLYRKEIKPPFKPAVGRPEDTFHFDPEFTARTPTDSPGVPPSANAHHLFRGFSFVASSLIQEPSQQDLHKVPVHPIVQQLHGNNIHFTDGYEIKEDIGVGSYSVCKRCVHKATDTEYAVKPLPAGMRRRTVISNKM

SEQ ID NO: 810509 - protein, 320 aa, Homo sapiens
MDLSMKKFAVRRFFSVYLRRKSRSKSSSLSRLEEEGVVKEIDISHHVKEGFEKADPSQFELLKVLGQGSYGKVFLVRKVKGSDAGQLYAMKVLKKATLKVRDRVRSKMERDILAEVNHPFIVKLHYAFQTEGKLYLILDFLRGGDLFTRLSKEVMFTEEDVKFYLAELALALDHLHSLGIIYRDLKPENILLDEEGHIKITDFGLSKEAIDHDKRAYSFCGTIEYMAPEVVNRRGHTQSADWWSFGVLMFEMLTGSLPFQGKDRKETMALILKAKLGMPQFLSGEAQSLLRALFKRNPCNRLGEKTALCPRVSCSRLLGF

SEQ ID NO: 810510 - protein, 631 aa, Homo sapiens
MFYAHFVLSKRGPLAKIWLAAHWDKKLTKAHVFECNLESSVESIISPKVKMALRTSGHLLLGVVRIYHRKAKYLLADCNEAFIKIKMAFRPGVVDLPEENREAAYNAITLPEEFHDFDQPLPDLDDIDVAQQFSLNQSRVEEITMREEVGNISILQENDFGDFGMDDREIMREGSAFEDDDMLVSTTTSNLLLESEQSTSNLNEKINHLEYEDQYKDDNFGEGNDGGILDDKLISNNDGGIFDDPPALSEAGVMLPEQPAHDDMDEDDNVSMGGPDSPDSVDPVEPMPTMTDQTTLVPNEEEAFALEPIDITVKETKAKRKRKLIVDSVKELDSKTIRAQLSDYSDIVTTLDLAPPTKKLMMWKETGGVEKLFSLPAQPLWNNRLLKLFTRCLTPLVPEDLRKRRKGGEADNLDEFLKEFENPEVPREDQQQQHQQRDVIDEPIIEEPSRLQESVMEASRTNIDESAMPPPPPQGVKRKAGQIDPEPVMPPQQVEQMEIPPVELPPEEPPNICQLIPELELLPEKEKEKEKEKEDDEEEEDEDASGGDQDQEERRWNKRTQQMLHGLQRALAKTGAESISLLELCRNTNRKQAAAKFYSFLVLKKQQAIELTQEEPYSDIIATPGPRFHII

SEQ ID NO: 810511 - protein, 631 aa, Homo sapiens; identical to SEQ ID NO: 810510

SEQ ID NO: 810512 - protein, 631 aa, Homo sapiens; identical to SEQ ID NO: 810510

SEQ ID NO: 810513 - protein, 601 aa, Homo sapiens
  misc_feature (3)..(3): Xaa can be any naturally occurring amino acid
STXCARSTLDSVWYHLTKVKMALRTSGHLLLGVVRIYHRKAKYLLADCNEAFIKIKMAFRPGVVDLPEENREAAYNAITLPEEFHDFDQPLPDLDDIDVAQQFSLNQSRVEEITMREEVGNISILQENDFGDFGMDDREIMREGSAFEDDDMLVSTTTSNLLLESEQSTSNLNEKINHLEYEDQYKDDNFGEGNDGGILDDKLISNNDGGIFDDPPALSEAGVMLPEQPAHDDMDEDDNVSMGGPDSPDSVDPVEPMPTMTDQTTLVPNEEEAFALEPIDITVKETKAKRKRKLIVDSVKELDSKTIRAQLSDYSDIVTTLDLAPPTKKLMMWKETGGVEKLFSLPAQPLWNNRLLKLFTRCLTPLVPEDLRKRRKGGEADNLDEFLKEFENPEVPREDQQQQHQQRDVIDEPIIEEPSRLQESVMEASRTNIDESAMPPPPPQGVKRKAGQIDPEPVMPPQQVEQMEIPPVELPPEEPPNICQLIPELELLPEKEKEKEKEKEDDEEEEDEDASGGDQDQEERRWNKRTQQMLHGLQRALAKTGAESISLLELCRNTNRKQAAAKFYSFLVLKKQQAIELTQEEPYSDIIATPGPRFHII

SEQ ID NO: 810514 - protein, 374 aa, Homo sapiens
LVPNEEEVLFDQIMVGMVQRDPLNQDYQAHPLIHDQTTLVPNEEEAFALEPIDITVKETKAKRKRKLIVDSVKELDSKTIRAQLSDYSDIVTTLDLAPPTKKLMMWKETGGVEKLFSLPAQPLWNNRLLKLFTRCLTPLVPEDLRKRRKGGEADNLDEFLKEFENPEVPREDQQQQHQQRDVIDEPIIEEPSRLQESVMEASRTNIDESAMPPPPPQGVKRKAGQIDPEPVMPPQQVEQMEIPPVELPPEEPPNICQLIPELELLPEKEKEKEKEKEDDEEEEDEDASGGDQDQEERRWNKRTQQMLHGLQRALAKTGAESISLLELCRNTNRKQAAAKFYSFLVLKKQQAIELTQEEPYSDIIATPGPRFHII

SEQ ID NO: 810515 - protein, 325 aa, Homo sapiens
MNLAITVKETKAKRKRKLIVDSVKELDSKTIRAQLSDYSDIVTTLDLAPPTKKLMMWKETGGVEKLFSLPAQPLWNNRLLKLFTRCLTPLVPEDLRKRRKGGEADNLDEFLKEFENPEVPREDQQQQHQQRDVIDEPIIEEPSRLQESVMEASRTNIDESAMPPPPPQGVKRKAGQIDPEPVMPPQQVEQMEIPPVELPPEEPPNICQLIPELELLPEKEKEKEKEKEDDEEEEDEDASGGDQDQEERRWNKRTQQMLHGLQRALAKTGAESISLLELCRNTNRKQAAAKFYSFLVLKKQQAIELTQEEPYSDIIATPGPRFHII

SEQ ID NO: 810516 - protein, 621 aa, Homo sapiens
MFYAHFVLSKRGPLAKIWLAAHWDKKLTKAHVFECNLESSVESIISPKVKMALRTSGHLLLGVVRIYHRKAKYLLADCNEAFIKIKMAFRPGVVDLPEENREAAYNAITLPEEFHDFDQPLPDLDDIDVAQQFSLNQSRVEEITMREEVGNISILQENDFGDFGMDDREIMREGSAFEDDDMLVSTTTSNLLLESEQSTSNLNEKINHLEYEDQYKDDNFGEGNDGGILDDKLISNNDGGIFDDPPALSEAGVMLPEQPAHDDMDEDDNVSMGGPDSPDSVDPVEPMPTMTDQTTLVPNEEEAFALEPIDITVKETKAKRKRKLIVDSVKELDSKTIRAQLSDYSDIVTTLDLAPPTKKLMMWKETGGVEKLFSLPAQPLWNNRLLKLFTRCLTPLVPEDLRKRRKGGEADNLDEFLKEFENPEVPREDQQQQHQQRDVIDEPIIEEPSRLQESVMEASRTNIDESAMPPPPPQGVKRKAGQIDPEPVMPPQQVEQMEIPPVELPPEEPPNICQLIPELELLPEKEKEKEKEKEDDEEEEDEDASGGDQDQEERRWNKRTQQMLHGLQRALAKTGAESISLLELCRNTNRKQAAAKFYSFLVLKKQQAIETWTKVPYYIRS

SEQ ID NO: 810517 - protein, 198 aa, Homo sapiens
TSAADAIDEPIIEEPSRLQESVMEASRTNIDESAMPPPPPQGVKRKAGQIDPEPVMPPQQVEQMEIPPVELPPEEPPNICQLIPELELLPEKEKEKEKEKEDDEEEEDEDASGGDQDQEERRWNKRTQQMLHGLQRALAKTGAESISLLELCRNTNRKQAAAKFYSFLVLKKQQAIELTQEEPYSDIIATPGPRFHII

SEQ ID NO: 810518 - protein, 197 aa, Homo sapiens
MRNVTIDEPIIEEPSRLQESVMEASRTNIDESAMPPPPPQGVKRKAGQIDPEPVMPPQQVEQMEIPPVELPPEEPPNICQLIPELELLPEKEKEKEKEKEDDEEEEDEDASGGDQDQEERRWNKRTQQMLHGLQRALAKTGAESISLLELCRNTNRKQAAAKFYSFLVLKKQQAIELTQEEPYSDIIATPGPRFHII

SEQ ID NO: 810519 - protein, 631 aa, Homo sapiens; identical to SEQ ID NO: 810510

SEQ ID NO: 810520 - protein, 631 aa, Homo sapiens; identical to SEQ ID NO: 810510

SEQ ID NO: 810521 - protein, 631 aa, Homo sapiens; identical to SEQ ID NO: 810510

SEQ ID NO: 810522 - protein, 140 aa, Homo sapiens
NSYYRDQLSPGDTLSRNTHIIWELIPELELLPEKEKEKEKEKEDDEEEEDEDASGGDQDQEERRWNKRTQQMLHGLQRALAKTGAESISLLELCRNTNRKQAAAKFYSFLVLKKQQAIELTQEEPYSDIIATPGPRFHII

SEQ ID NO: 810523 - protein, 631 aa, Homo sapiens; identical to SEQ ID NO: 810510

SEQ ID NO: 810524 - protein, 497 aa, Homo sapiens
MFYAHFVLSKRGPLAKIWLAAHWDKKLTKAHVFECNLESSVESIISPKVKMALRTSGHLLLGVVRIYHRKAKYLLADCNEAFIKIKMAFRPGVVDLPEENREAAYNAITLPEEFHDFDQPLPDLDDIDVAQQFSLNQSRVEEITMREEVGNISILQENDFGDFGMDDREIMREGSAFEDDDMLVSTTTSNLLLESEQSTSNLNEKINHLEYEDQYKDDNFGEGNDGGILDDKLISNNDGGIFDDPPALSEAGVMLPEQPAHDDMDEDDNVSMGGPDSPDSVDPVEPMPTMTDQTTLVPNEEEAFALEPIDITVKETKAKRKRKLIVDSVKELDSKTIRAQLSDYSDIVTTLDLAPPTKKLMMWKETGGVEKLFSLPAQPLWNNRLLKLFTRCLTPLVPEDLRKRRKGGEADNLDEFLKEFENPEVPREDQQQQHQQRDVIDEPIIEEPSRLQESVMEASRTNIDESAMPPPPPQGVKRKAGQIDPEPVMPTEPFEKT

SEQ ID NO: 810525 - protein, 631 aa, Homo sapiens; identical to SEQ ID NO: 810510

SEQ ID NO: 810526 - protein, 631 aa, Homo sapiens; identical to SEQ ID NO: 810510

SEQ ID NO: 810527 - protein, 631 aa, Homo sapiens; identical to SEQ ID NO: 810510

SEQ ID NO: 810528 - protein, 631 aa, Homo sapiens; identical to SEQ ID NO: 810510

SEQ ID NO: 810529 - protein, 556 aa, Homo sapiens
MFYAHFVLSKRGPLAKIWLAAHWDKKLTKAHVFECNLESSVESIISPKVKMALRTSGHLLLGVVRIYHRKAKYLLADCNEAFIKIKMAFRPGVVDLPEENREAAYNAITLPEEFHDFDQPLPDLDDIDVAQQFSLNQSRVEEITMREEVGNISILQENDFGDFGMDDREIMREGSAFEDDDMLVSTTTSNLLLESEQSTSNLNEKINHLEYEDQYKDDNFGEGNDGGILDDKLISNNDGGIFDDPPALSEAGVMLPEQPAHDDMDEDDNVSMGGPDSPDSVDPVEPMPTMTDQTTLVPNEEEAFALEPIDITVKETKAKRKRKLIVDSVKELDSKTIRAQLSDYSDIVTTLDLAPPTKKLMMWKETGGVEKLFSLPAQPLWNNRLLKLFTRCLTPLVPEDLRKRRKGGEADNLDEFLKEFENPEVPREDQQQQHQQRDVIDEPIIEEPSRLQESVMEASRTNIDESAMPPPPPQGVKRKAGQIDPEPVMPPQQVEQMEIPPVELPPEEPPNICQLIPELELLPEKEKEKEKEKEDDEEEEDEDASGVDAAANLVVV

SEQ ID NO: 810530 - protein, 210 aa, Homo sapiens
MFYAHFVLSKRGPLAKIWLAAHWDKKLTKAHVFECNLESSVESIISPKVKMALRTSGHLLLGVVRIYHRKAKYLLADCNEAFIKIKMAFRPGVVDLPEENREAAYNAITLPEEFHDFDQPLPDLDDIDVAQQFSLNQSRVEEITMREEVGNISILQENDFGDFGMDDREIMREGSAFEDDDMLVSTTTSNLLLESEQSTSNLNEKINHLE

SEQ ID NO: 810531 - protein, 72 aa, Homo sapiens
VPQYADLHRGRQHGLQAWQLGLNAVHGLDDIRAGLAGDHQVDPGLCRRTRELYIQYDVPVNQGVFPVCKKTL

SEQ ID NO: 810532 - protein, 441 aa, Homo sapiens
TFSNVYRMKRNSLSVENKIVQLSGAAKQPKVGFYSSLNQTHTHTVLLDWGSLPHHVVLQIFQYLPLLDRACASSVCRRWNEVFHISDLWRKFEFELNQSATSSFKSTHPDLIQQIIKKHFAHLQYVSFKVDSSAESAEAACDILSQLVNCSIQTLGLISTAKPSFMNVSESHFVSALTVVFINSKSLSSIKIEDTPVDDPSLKILVANNSDTLRLPKMSSCPHVSSDGILCVADRCQGLRELALNYYILTDELFLALSSETHVNLEHLRIDVVSENPGQIKFHAVKKHSWDALIKHSPRVNVVMHFFLYEEEFETFFKEETPVTHLYFGRSVSKVVLGRVGLNCPRLIELVVCANDLQPLDNELICIAEHCTNLTALGLSKCEVSCSAFIRFVRLCERRLTQLSVMEEVLIPDEDYSLDEIHTEVSKYLGRVWFPDVMPLW

SEQ ID NO: 810533 - protein, 184 aa, Homo sapiens
MNVSESHFVSALTVVFINSKSLSSIKIEDTPVDDPSLKILVANNSDTLRLPKMSSCPHVSSDGILCVADRCQGLRELALNYYILTDELFLALSSETHVNLEHLRIDVVSENPGQIKFHAVKKHSWDALIKHSPRVNVVMHFFLYEEEFETFFKEETPVTHLYFGRSVSKVVLGRVKYLIVCKLS

SEQ ID NO: 810534 - protein, 196 aa, Homo sapiens
MAAEHLLPGPPPSLADFRLEAGGKGTERGSGSSKPTGSSRGPRMAKFLSQDQINEYKECFSLYDKQQRGKIKATDLMVAMRCLGASPTPGEVQRHLQTHGIDGNGELDFSTFLTIMHMQIKQEDPKKEILLAMLMVDKEKKGYVMASDLRSKLTSLGEKLTHKEVDDLFREADIEPNGKVKYDEFIHKITLPGRDY

SEQ ID NO: 810535 - protein, 117 aa, Homo sapiens
MRCLGASPTPGEVQRHLQTHGIDGNGELDFSTFLTIMHMQIKQEDPKKEILLAMLMVDKEKKGYVMASDLRSKLTSLGEKLTHKEVDDLFREADIEPNGKVKYDEFIHKITLPGRDY

SEQ ID NO: 810536 - protein, 117 aa, Homo sapiens; identical to SEQ ID NO: 810535

SEQ ID NO: 810537 - protein, 186 aa, Homo sapiens
  misc_feature (6)..(6): Xaa can be any naturally occurring amino acid
  misc_feature (10)..(10): Xaa can be any naturally occurring amino acid
  misc_feature (13)..(14): Xaa can be any naturally occurring amino acid
  misc_feature (16)..(16): Xaa can be any naturally occurring amino acid
  misc_feature (25)..(26): Xaa can be any naturally occurring amino acid
RQGAGXKPEXPRXXNXHSRANGECXXQPRVAARPEWQVLSKTNYEYKECFSLYDKQQRGKIKATDLMVAMRCLGASPTPGEVQRHLQTHGIDGNGELDFSTFLTIMHMQIKQEDPKKEILLAMLMVDKEKKGYVMASDLRSKLTSLGEKLTHKEVDDLFREADIEPNGKVKYDEFIHKITLPGRDY

SEQ ID NO: 810538 - protein, 117 aa, Homo sapiens [sequence omitted]

SEQ ID NO: 810539 - protein, 117 aa, Homo sapiens; identical to SEQ ID NO: 810535

SEQ ID NO: 810540 - protein, 134 aa, Homo sapiens
YSKGPTQTRTDLEKLRERRREGSRRWCGDPRRLVPGRADAAPLHTKRFSCTGRYFPKMPRLVGAQNPHRKVPRAARGGTHGVRVSQAPSIPPGPGPLQLIARGFSASALVGRSCSYPLPSCVPAGREGKEGLIF

SEQ ID NO: 810541 - protein, 119 aa, Homo sapiens
YSKGPTQTRTDLEKLRERRREGSRRWCGDPRRLVPGRADAAPLHTKRFSCTGRYFPKMPRLVGAQNPHRKVPRAARGGTHGVRVSQAPSIPPGPGPSSADPAPTHSLAVFPRGERGKRV

SEQ ID NO: 810542 - protein, 134 aa, Homo sapiens; identical to SEQ ID NO: 810540

SEQ ID NO: 810543 - protein, 134 aa, Homo sapiens; identical to SEQ ID NO: 810540

SEQ ID NO: 810544 - protein, 2096 aa, Homo sapiens
MAEVTVPRVYVVFGIHCIMAKASSDVQVSGFHRKIQHVKNELCHMLSLEEVAPVLQQTLLQDNLLGRVHFDQFKEALILILSRTLSNEEHFQEPDCSLEAQPKYVRGGKRYGRRSLPEFQESVEEFPEVTVIEPLDEEARPSHIPAGDCSEHWKTQRSEEYEAEGQLRFWNPDDLNASQSGSSPPQDWIEEKLQEVCEDLGITRDGHLNRKKLVSICEQYGLQNVDGEMLEEVFHNLDPDGTMSVEDFFYGLFKNGKSLTPSASTPYRQLKRHLSMQSFDESGRRTTTSSAMTSTIGFRVFSCLDDGMGHASVERILDTWQEEGIENSQEILKALDFSLDGNINLTELTLALENELLVTKNSIHQAALASFKAEIRHLLERVDQVVREKEKLRSDLDKAEKLKSLMASEVDDHHAAIERRNEYNLRKLDEEYKERIAALKNELRKEREQILQQAGKQRLELEQEIEKAKTEENYIRDRLALSLKENSRLENELLENAEKLAEYENLTNKLQRNLENVLAEKFGDLDPSSAEFFLQEERLTQMRNEYERQCRVLQDQVDELQSELEEYRAQGRVLRLPLKNSPSEEVEANSGGIEPEHGLGSEECNPLNMSIEAELVIEQMKEQHHRDICCLRLELEDKVRHYEKQLDETVVSCKKAQENMKQRHENETHTLEKQISDLKNEIAELQGQAAVLKEAHHEATCRHEEEKKQLQVKLEEEKTHLQEKLRLQHEMELKARLTQAQASFEREREGLQSSAWTEEKVRGLTQELEQFHQEQLTSLVEKHTLEKEELRKELLEKHQRELQEGREKMETECNRRTSQIEAQFQSDCQKVTERCESALQSLEGRYRQELKDLQEQQREEKSQWEFEKDELTQECAEAQELLKETLKREKTTSLVLTQEREMLEKTYKEHLNSMVVERQQLLQDLEDLRNVSETQQSLLSDQILELKSSHKRELREREEVLCQAGASEQLASQRLERLEMEHDQERQEMMSKLLAMENIHKATCETADRERAEMSTEISRLQSKIKEMQQATSPLSMLQSGCQVIGEEEVEGDGALSLLQQGEQLLEENGDVLLSLQRAHEQAVKENVKMATEISRLQQRLQKLEPGLVMSSCLDEPATEFFGNTAEQTEPFLQQNRTKQVEGVTRRHVLSDLEDDEVRDLGSTGTSSVQRQEVKIEESEASVEGFSELENSEETRTESWELKNQISQLQEQLMMLCADCDRASEKKQDLLFDVSVLKKKLKMLERIPEASPKYKLLYEDVSRENDCLQEELRMMETRYDEALENNKELTAEVFRLQDELKKMEEVTETFLSLEKSYDEVKIENEELNVLVLRLQGKIEKLQESVVQRCDCCLWEASLENLEIEPDGNILQLNQTLEECVPRVRSVHHVIEECKQENQYLEGNTQLLEKVKAHEIAWLHGTIQTHQERPRVQNQVILEENTTLLGFQDKHFQHQATIAELELEKTKLQELTRKLKERVTILVKQKDVLSHGEKEEELKAMMHDLQITCSEMQQKVELLRYESEKLQQENSILRNEITTLNEEDSISNLKLGTLNGSQEEMWQKTETVKQENAAVQKMVENLKKQISELKIKNQQLDLENTELSQKNSQNQEKLQELNQRLTEMLCQKEKEPGNSALEEREQEKFNLKEELERCKVQSSTLVSSLEAELSEVKIQTHIVQQENHLLKDELEKMKQLHRCPDLSDFQQKISSVLSYNEKLLKEKEALSEELNSCVDKLAKSSLLEHRIATMKQEQKSWEHQSASLKSQLVASQEKVQNLEDTVQNVNLQMSRMKSDLRVTQQEKEALKQEVMSLHKQLQNAGGKSWAPEIATHPSGLHNQQKRLSWDKLDHLMNEEQQLLWQENERLQTMVQNTKAELTHSREKVRQLESNLLPKHQKHLNPSGTMNPTEQEKLSLKRECDQFQKEQSPANRKVSQMNSLEQELETIHLENEGLKKKQVKLDEQLMEMQHLRSTATPSPSPHAWDLQLLQQQACPMVPREQFLQLQRQLLQAERINQHLQEELENRTSETNTPQGNQEQLVTVMEERMIEVEQKLKLVKRLLQEKVNQLKEQVSLPGHLCSPTSHSSFNSSFTSLYCH

SEQ ID NO: 810545 - protein, 2138 aa, Homo sapiens
SRPPEPGAERAGRGRPAAAAKPGVRQRPWFPRRRRAPEPRDASAGGGLPAVRALRRDRQKVSTVGYGMDELDQDQHGRLKDLFDSFDTTGTGSLGQEELTDLCHMLSLEEVAPVLQQTLLQDNLLGRVHFDQFKEALILILSRTLSNEEHFQEPDCSLEAQPKYVRGGKRYGRRSLPEFQESVEEFPEVTVIEPLDEEARPSHIPAGDCSEHWKTQRSEEYEAEGQLRFWNPDDLNASQSGSSPPQDWIEEKLQEVCEDLGITRDGHLNRKKLVSICEQYGLQNVDGEMLEEVFHNLDPDGTMSVEDFFYGLFKNGKSLTPSASTPYRQLKRHLSMQSFDESGRRTTTSSAMTSTIGFRVFSCLDDGMGHASVERILDTWQEEGIENSQEILKALDFSLDGNINLTELTLALENELLVTKNSIHQAALASFKAEIRHLLERVDQVVREKEKLRSDLDKAEKLKSLMASEVDDHHAAIERRNEYNLRKLDEEYKERIAALKNELRKEREQILQQAGKQRLELEQEIEKAKTEENYIRDRLALSLKENSRLENELLENAEKLAEMFGDLDPSSAEFFLQEERLTQMRNEYERQCRVLQDQVDELQSELEEYRAQGRVLRLPLKNSPSEEVEANSGGIEPEHGLGSEECNPLNMSIEAELVIEQMKEQHHRDICCLRLELEDKVRHYEKQLDETVVSCKKAQENMKQRHENETHTLEKQISDLKNEIAELQGQAAVLKEAHHEATCRHEEEKKQLQVKLEEEKTHLQEKLRLQHEMELKARLTQAQASFEREREGLQSSAWTEEKVRGLTQELEQFHQEQLTSLVEKHTLEKEELRKELLEKHQRELQEGREKMETECNRRTSQIEAQFQSDCQKVTERCESALQSLEGRYRQELKDLQEQQREEKSQWEFEKDELTQECAEAQELLKETLKREKTTSLVLTQEREMLEKTYKEHLNSMVVERQQLLQDLEDLRNVSETQQSLLSDQILELKSSHKRELREREEVLCQAGASEQLASQRLERLEMEHDQERQEMMSKLLAMENIHKATCETADRERAEMSTEISRLQSKIKEMQQATSPLSMLQSGCQVIGEEEVEGDGALSLLQQGEQLLEENGDVLLSLQRAHEQAVKENVKMATEISRLQQRLQKLEPGLVMSSCLDEPATEFFGNTAEQTEPFLQQNRTKQVEGVTRRHVLSDLEDDEVRDLGSTGTSSVQRQEVKIEESEASVEGFSELENSEETRTESWELKNQISQLQEQLMMLCADCDRASEKKQDLLFDVSVLKKKLKMLERIPEASPKYKLLYEDVSRENDCLQEELRMMETRYDEALENNKELTAEVFRLQDELKKMEEVTETFLSLEKSYDEVKIENEELNVLVLRLQGKIEKLQESVVQRCDCCLWEASLENLEIEPDGNILQLNQTLEECVPRVRSVHHVIEECKQENQYLEGNTQLLEKVKAHEIAWLHGTIQTHQERPRVQNQVILEENTTLLGFQDKHFQHQATIAELELEKTKLQELTRKLKERVTILVKQKDVLSHGEKEEELKAMMHDLQITCSEMQQKVELLRYESEKLQQENSILRNEITTLNEEDSISNLKLGTLNGSQEEMWQKTETVKQENAAVQKMVENLKKQISELKIKNQQLDLENTELSQKNSQNQEKLQELNQRLTEMLCQKEKEPGNSALEEREQEKFNLKEELERCKVQSSTLVSSLEAELSEVKIQTHIVQQENHLLKDELEKMKQLHRCPDLSDFQQKISSVLSYNEKLLKEKEALSEELNSCVDKLAKSSLLEHRIATMKQEQKSWEHQSASLKSQLVASQEKVQNLEDTVQNVNLQMSRMKSDLRVTQQEKEALKQEVMSLHKQLQNAGGKSWAPEIATHPSGLHNQQKRLSWDKLDHLMNEEQQLLWQENERLQTMVQNTKAELTHSREKVRQLESNLLPKHQKHLNPSGTMNPTEQEKLSLKRECDQFQKEQSPANRKVSQMNSLEQELETIHLENEGLKKKQVKLDEQLMEMQHLRSTATPSPSPHAWDLQLLQQQACPMVPREQFLQLQRQLLQAERINQHLQEELENRTSETNTPQGNQEQLVTVMEERMIEVEQKLKLVKRLLQEKVNQLKEQVSLPGHLCSPTSHSSFNSSFTSLYCH

SEQ ID NO: 810546 - protein, 2094 aa, Homo sapiens
SRPPEPGAERAGRGRPAAAAKPGVRQRPWFPRRRRAPEPRDASAGGGLPAVRALRRDRQKVSTVGYGMDELDQDQHGRLKDLFDSFDTTGTGSLGQEELTDLCHMLSLEEVAPVLQQTLLQDNLLGRVHFDQFKEALILILSRTLSNEEHFQEPDCSLEAQPKYVRGGKRYGRRSLPEFQESVEEFPEVTVIEPLDEEARPSHIPAGDCSEHWKTQRSEEYEAEGQLRFWNPDDLNASQSGSSPPQDWIEEKLQEVCEDLGITRDGHLNRKKLVSICEQYGLQNVDGEMLEEVFHNLDPDGTMSVEDFFYGLFKNGKSLTPSASTPYRQLKRHLSMQSFDESGRRTTTSSAMTSTIGFRVFSCLDDGMGHASVERILDTWQEEGIENSQEILKALDFSLDGNINLTELTLALENELLVTKNSIHQAALASFKAEIRHLLERVDQVVREKEKLRSDLDKAEKLKSLMASEVDDHHAAIERRNEYNLRKLDEEYKERIAALKNELRKEREQILQQAGKQRLELEQEIEKAKTEENYIRDRLALSLKENSRLENELLENAEKLAEMFGDLDPSSAEFFLQEERLTQMRNEYERQCRVLQDQVDELQSELEEYRAQGRVLRLPLKNSPSEEVEANSGGIEPEHGLGSEECNPLNMSIEAELVIEQMKEQHHRDICCLRLELEDKVRHYEKQLDETVVSCKKAQENMKQRHENETHTLEKQISDLKNEIAELQGQAAVLKEAHHEATCRHEEEKKQLQVKLEEEKTHLQEKLRLQHEMELKARLTQAQASFEREREGLQSSAWTEEKVRGLTQELEQFHQEQLTSLVEKHTLEKEELRKELLEKHQRELQEGREKMETECNRRTSQIEAQFQSDCQKVTERCESALQSLEGRYRQELKDLQEQQREEKSQWEFEKDELTQECAEAQELLKETLKREKTTSLVLTQEREMLEKTYKEHLNSMVVERQQLLQDLEDLRNVSETQQSLLSDQILELKSSHKRELREREEVLCQAGASEQLASQRLERLEMEHDQERQEMMSKLLAMENIHKATCETADRERAEMSTEISRLQSKIKEMQQATSPLSMLQSGCQVIGEEEVEGDGALSLLQQGEQLLEENGDVLLSLQRAHEQAVKENVKMATEISRLQQRLQKLEPGLVMSSCLDEPATEFFGNTAEQTEPFLQQNRTKQVEGVTRRHVLSDLEDDEVRDLGSTGTSSVQRQEVKIEESEASVEGFSELENSEETRTESWELKNQISQLQEQLMMLCADCDRASEKKQDLLFDVSVLKKKLKMLERIPEASPKYKLLYEDVSRENDCLQEELRMMETRYDEALENNKELTAEVFRLQDELKKMEEVTETFLSLEKSYDEVKIENEELNVLVLRLQGKIEKLQESVVQRCDCCLWEASLENLEIEPDGNILQLNQTLEECVPRVRSVHHVIEECKQENQYLEGNTQLLEKVKAHEIAWLHGTIQTHQERPRVQNQVILEENTTLLGFQDKHFQHQATIAELELEKTKLQELTRKLKERVTILVKQKDVLSHGEKEEELKAMMHDLQITCSEMQQKVELLRYESEKLQQENSILRNEITTLNEEDSISNLKLGTLNGSQEEMWQKTETVKQENAAVQKMVENLKKQISELKIKNQQLDLENTELSQKNSQNQEKLQELNQRLTEMLCQKEKEPGNSALEEREQEKFNLKEELERCKVQSSTLVSSLEAELSEVKIQTHIVQQENHLLKDELEKMKQLHRCPDLSDFQQKISSVLSYNEKLLKEKEALSEELNSCVDKLAKSSLLEHRIATMKQEQKSWEHQSASLKSQLVASQEKVQNLEDTVQNVNLQMSRMKSDLRVTQQEKEALKQEVMSLHKQLQNAGGKSWAPEIATHPSGLHNQQKRLSWDKLDHLMNEEQQLLWQENERLQTMVQNTKAELTHSREKVRQLESNLLPKHQKHLNPSGTMNPTEQEKLSLKRECDQFQKEQSPANRKVSQMNSLEQELETIHLENEGLKKKQVKLDEQLMEMQHLRSTATPSPSPHAWDLQLLQQQACPMVPREQFLQLQRQLLQAERINQHLQEELENRTSETNTPQALLPEQRAVHADSYRRIGHL

SEQ ID NO: 810547 - protein, 146 aa, Homo sapiens
GVSCQQVARVSGPLLNGHKLTHCLLIKDCSLEAQPKYVRGGKRYGRRSLPEFQESVEEFPEVTVIEPLDEEARPSHIPAGDCSECDKAARTLGFCLKILSLGCFPVPSSCHGSFCWIPCTQACLVLQHVESRQPPSSPIFSFCILP

SEQ ID NO: 810548 - protein, 2181 aa, Homo sapiens
SRPPEPGAERAGRGRPAAAAKPGVRQRPWFPRRRRAPEPRDASAGGGLPAVRALRRDRQKVSTVGYGMDELDQDQHGRLKDLFDSFDTTGTGSLGQEELTDLCHMLSLEEVAPVLQQTLLQDNLLGRVHFDQFKEALILILSRTLSNEEHFQEPDCSLEAQPKYVRGGKRYGRRSLPEFQESVEEFPEVTVIEPLDEEARPSHIPAGDCSEHWKTQRSEEYEAEGQLRFWNPDDLNASQSGSSPPQDWIEEKLQEVCEDLGITRDGHLNRKKLVSICEQYGLQNVDGEMLEEVFHNLDPDGTMSVEDFFYGLFKNGKSLTPSASTPYRQLKRHLSMQSFDESGRRTTTSSAMTSTIGFRVFSCLDDGMGHASVERILDTWQEEGIENSQEILKALDFSLDGNINLTELTLALENELLVTKNSIHQAALASFKAEIRHLLERVDQVVREKEKLRSDLDKAEKLKSLMASEVDDHHAAIERRNEYNLRKLDEEYKERIAALKNELRKEREQILQQAGKQRLELEQEIEKAKTEENYIRDRLALSLKENSRLENELLENAEKLAEMFGDLDPSSAEFFLQEERLTQMRNEYERQCRVLQDQVDELQSELEEYRAQGRVLRLPLKNSPSEEVEANSGGIEPEHGLGSEECNPLNMSIEAELVIEQMKEQHHRDICCLRLELEDKVRHYEKQLDETVVSCKKAQENMKQRHENETHTLEKQISDLKNEIAELQGQAAVLKEAHHEATCRHEEEKKQLQVKLEEEKTHLQEKLRLQHEMELKARLTQAQASFEREREGLQSSAWTEEKVRGLTQELEQFHQEQLTSLVEKHTLEKEELRKELLEKHQRELQEGREKMETECNRRTSQIEAQFQSDCQKVTERCESALQSLEGRYRQELKDLQEQQREEKSQWEFEKDELTQECAEAQELLKETLKREKTTSLVLTQEREMLEKTYKEHLNSMVVERQQLLQDLEDLRNVSETQQSLLSDQILELKSSHKRELREREEVLCQAGASEQLASQRLERLEMEHDQERQEMMSKLLAMENIHKATCETADRERAEMSTEISRLQSKIKEMQQATSPLSMLQSGCQVIGEEEVEGDGALSLLQQGEQLLEENGDVLLSLQRAHEQAVKENVKMATEISRLQQRLQKLEPGLVMSSCLDEPATEFFGNTAEQTEPFLQQNRTKQVEGVTRRHVLSDLEDDEVRDLGSTGTSSVQRQEVKIEESEASVEGFSELENSEETRTESWELKNQISQLQEQLMMLCADCDRASEKKQDLLFDVSVLKKKLKMLERIPEASPKYKLLYEDVSRENDCLQEELRMMETRYDEALENNKELTAEVFRLQDELKKMEEVTETFLSLEKSYDEVKIENEELNVLVLRLQGKIEKLQESVVQRCDCCLWEASLENLEIEPDGNILQLNQTLEECVPRVRSVHHVIEECKQENQYLEGNTQLLEKVKAHEIAWLHGTIQTHQERPRVQNQVILEENTTLLGFQDKHFQHQATIAELELEKTKLQELTRKLKERVTILVKQKDVLSHGEKEEELKAMMHDLQITCSEMQQKVELLRYESEKLQQENSILRNEITTLNEEDSISNLKLGTLNGSQEEMWQKTETVKQENAAVQKMVENLKKQISELKIKNQQLDLENTELSQKNSQNQEKLQELNQRLTEMLCQKEKEPGNSALEEREQEKFNLKEELERCKVQSSTLVSSLEAELSEVKIQTHIVQQENHLLKDELEKMKQLHRCPDLSDFQQKISSVLSYNEKLLKEKEALSEELNSCVDKLAKSSLLEHRIATMKQEQKSWEHQSASLKSQLVASQEKVQNLEDTVQNVNLQMSRMKSDLRVTQQEKEALKQEVMSLHKQLQNAGGKSWAPEIATHPSGLHNQQKRLSWDKLDHLMNEEQQLLWQENERLQTMVQNTKAELTHSREKVRQLESNLLPKHQKHLNPSGTMNPTEQEKLSLKRECDQFQKEQSPANRKVSQMNSLEQELETIHLENEGLKKKQVKLDEQLMEMQHLRSTATPSPSPHAWDLQLLQQQACPMVPREQFLQLQRQLLQAERINQHLQEELENRTSETNTPQGNQEQLVTVMEERMIEVEQKLKLVKRLLQEKVNQLKEQLCKNTKADAMVKDLYVENAQLLKALEVTEQRQKTAEKKNYLLEEKIASLSNIVRNLTPAPLTSTPPLRS

SEQ ID NO: 810549 - protein, 2181 aa, Homo sapiens; identical to SEQ ID NO: 810548

SEQ ID NO: 810550 - protein, 2139 aa, Homo sapiens
MAEVTVPRVYVVFGIHCIMAKASSDVQVSGFHRKIQHVKNELCHMLSLEEVAPVLQQTLLQDNLLGRVHFDQFKEALILILSRTLSNEEHFQEPDCSLEAQPKYVRGGKRYGRRSLPEFQESVEEFPEVTVIEPLDEEARPSHIPAGDCSEHWKTQRSEEYEAEGQLRFWNPDDLNASQSGSSPPQDWIEEKLQEVCEDLGITRDGHLNRKKLVSICEQYGLQNVDGEMLEEVFHNLDPDGTMSVEDFFYGLFKNGKSLTPSASTPYRQLKRHLSMQSFDESGRRTTTSSAMTSTIGFRVFSCLDDGMGHASVERILDTWQEEGIENSQEILKALDFSLDGNINLTELTLALENELLVTKNSIHQAALASFKAEIRHLLERVDQVVREKEKLRSDLDKAEKLKSLMASEVDDHHAAIERRNEYNLRKLDEEYKERIAALKNELRKEREQILQQAGKQRLELEQEIEKAKTEENYIRDRLALSLKENSRLENELLENAEKLAEYENLTNKLQRNLENVLAEKFGDLDPSSAEFFLQEERLTQMRNEYERQCRVLQDQVDELQSELEEYRAQGRVLRLPLKNSPSEEVEANSGGIEPEHGLGSEECNPLNMSIEAELVIEQMKEQHHRDICCLRLELEDKVRHYEKQLDETVVSCKKAQENMKQRHENETHTLEKQISDLKNEIAELQGQAAVLKEAHHEATCRHEEEKKQLQVKLEEEKTHLQEKLRLQHEMELKARLTQAQASFEREREGLQSSAWTEEKVRGLTQELEQFHQEQLTSLVEKHTLEKEELRKELLEKHQRELQEGREKMETECNRRTSQIEAQFQSDCQKVTERCESALQSLEGRYRQELKDLQEQQREEKSQWEFEKDELTQECAEAQELLKETLKREKTTSLVLTQEREMLEKTYKEHLNSMVVERQQLLQDLEDLRNVSETQQSLLSDQILELKSSHKRELREREEVLCQAGASEQLASQRLERLEMEHDQERQEMMSKLLAMENIHKATCETADRERAEMSTEISRLQSKIKEMQQATSPLSMLQSGCQVIGEEEVEGDGALSLLQQGEQLLEENGDVLLSLQRAHEQAVKENVKMATEISRLQQRLQKLEPGLVMSSCLDEPATEFFGNTAEQTEPFLQQNRTKQVEGVTRRHVLSDLEDDEVRDLGSTGTSSVQRQEVKIEESEASVEGFSELENSEETRTESWELKNQISQLQEQLMMLCADCDRASEKKQDLLFDVSVLKKKLKMLERIPEASPKYKLLYEDVSRENDCLQEELRMMETRYDEALENNKELTAEVFRLQDELKKMEEVTETFLSLEKSYDEVKIENEELNVLVLRLQGKIEKLQESVVQRCDCCLWEASLENLEIEPDGNILQLNQTLEECVPRVRSVHHVIEECKQENQYLEGNTQLLEKVKAHEIAWLHGTIQTHQERPRVQNQVILEENTTLLGFQDKHFQHQATIAELELEKTKLQELTRKLKERVTILVKQKDVLSHGEKEEELKAMMHDLQITCSEMQQKVELLRYESEKLQQENSILRNEITTLNEEDSISNLKLGTLNGSQEEMWQKTETVKQENAAVQKMVENLKKQISELKIKNQQLDLENTELSQKNSQNQEKLQELNQRLTEMLCQKEKEPGNSALEEREQEKFNLKEELERCKVQSSTLVSSLEAELSEVKIQTHIVQQENHLLKDELEKMKQLHRCPDLSDFQQKISSVLSYNEKLLKEKEALSEELNSCVDKLAKSSLLEHRIATMKQEQKSWEHQSASLKSQLVASQEKVQNLEDTVQNVNLQMSRMKSDLRVTQQEKEALKQEVMSLHKQLQNAGGKSWAPEIATHPSGLHNQQKRLSWDKLDHLMNEEQQLLWQENERLQTMVQNTKAELTHSREKVRQLESNLLPKHQKHLNPSGTMNPTEQEKLSLKRECDQFQKEQSPANRKVSQMNSLEQELETIHLENEGLKKKQVKLDEQLMEMQHLRSTATPSPSPHAWDLQLLQQQACPMVPREQFLQLQRQLLQAERINQHLQEELENRTSETNTPQGNQEQLVTVMEERMIEVEQKLKLVKRLLQEKVNQLKEQLCKNTKADAMVKDLYVENAQLLKALEVTEQRQKTAEKKNYLLEEKIASLSNIVRNLTPAPLTSTPPLRS

SEQ ID NO: 810551 - protein, 2055 aa, Homo sapiens
MWPQLLSPLSDCSLEAQPKYVRGGKRYGRRSLPEFQESVEEFPEVTVIEPLDEEARPSHIPAGDCSEHWKTQRSEEYEAEGQLRFWNPDDLNASQSGSSPPQDWIEEKLQEVCEDLGITRDGHLNRKKLVSICEQYGLQNVDGEMLEEVFHNLDPDGTMSVEDFFYGLFKNGKSLTPSASTPYRQLKRHLSMQSFDESGRRTTTSSAMTSTIGFRVFSCLDDGMGHASVERILDTWQEEGIENSQEILKALDFSLDGNINLTELTLALENELLVTKNSIHQAALASFKAEIRHLLERVDQVVREKEKLRSDLDKAEKLKSLMASEVDDHHAAIERRNEYNLRKLDEEYKERIAALKNELRKEREQILQQAGKQRLELEQEIEKAKTEENYIRDRLALSLKENSRLENELLENAEKLAEYENLTNKLQRNLENVLAEKFGDLDPSSAEFFLQEERLTQMRNEYERQCRVLQDQVDELQSELEEYRAQGRVLRLPLKNSPSEEVEANSGGIEPEHGLGSEECNPLNMSIEAELVIEQMKEQHHRDICCLRLELEDKVRHYEKQLDETVVSCKKAQENMKQRHENETHTLEKQISDLKNEIAELQGQAAVLKEAHHEATCRHEEEKKQLQVKLEEEKTHLQEKLRLQHEMELKARLTQAQASFEREREGLQSSAWTEEKVRGLTQELEQFHQEQLTSLVEKHTLEKEELRKELLEKHQRELQEGREKMETECNRRTSQIEAQFQSDCQKVTERCESALQSLEGRYRQELKDLQEQQREEKSQWEFEKDELTQECAEAQELLKETLKREKTTSLVLTQEREMLEKTYKEHLNSMVVERQQLLQDLEDLRNVSETQQSLLSDQILELKSSHKRELREREEVLCQAGASEQLASQRLERLEMEHDQERQEMMSKLLAMENIHKATCETADRERAEMSTEISRLQSKIKEMQQATSPLSMLQSGCQVIGEEEVEGDGALSLLQQGEQLLEENGDVLLSLQRAHEQAVKENVKMATEISRLQQRLQKLEPGLVMSSCLDEPATEFFGNTAEQTEPFLQQNRTKQVEGVTRRHVLSDLEDDEVRDLGSTGTSSVQRQEVKIEESEASVEGFSELENSEETRTESWELKNQISQLQEQLMMLCADCDRASEKKQDLLFDVSVLKKKLKMLERIPEASPKYKLLYEDVSRENDCLQEELRMMETRYDEALENNKELTAEVFRLQDELKKMEEVTETFLSLEKSYDEVKIENEELNVLVLRLQGKIEKLQESVVQRCDCCLWEASLENLEIEPDGNILQLNQTLEECVPRVRSVHHVIEECKQENQYLEGNTQLLEKVKAHEIAWLHGTIQTHQERPRVQNQVILEENTTLLGFQDKHFQHQATIAELELEKTKLQELTRKLKERVTILVKQKDVLSHGEKEEELKAMMHDLQITCSEMQQKVELLRYESEKLQQENSILRNEITTLNEEDSISNLKLGTLNGSQEEMWQKTETVKQENAAVQKMVENLKKQISELKIKNQQLDLENTELSQKNSQNQEKLQELNQRLTEMLCQKEKEPGNSALEEREQEKFNLKEELERCKVQSSTLVSSLEAELSEVKIQTHIVQQENHLLKDELEKMKQLHRCPDLSDFQQKISSVLSYNEKLLKEKEALSEELNSCVDKLAKSSLLEHRIATMKQEQKSWEHQSASLKSQLVASQEKVQNLEDTVQNVNLQMSRMKSDLRVTQQEKEALKQEVMSLHKQLQNAGGKSWAPEIATHPSGLHNQQKRLSWDKLDHLMNEEQQLLWQENERLQTMVQNTKAELTHSREKVRQLESNLLPKHQKHLNPSGTMNPTEQEKLSLKRECDQFQKEQSPANRKVSQMNSLEQELETIHLENEGLKKKQVKLDEQLMEMQHLRSTATPSPSPHAWDLQLLQQQACPMVPREQFLQLQRQLLQAERINQHLQEELENRTSETNTPQGNQEQLVTVMEERMIEVEQKLKLVKRLLQEKVNQLKEQLCKNTKADAMVKDLYVENAQLLKALEVTEQRQKTAEKKNYLLEEKIASLSNIVRNLTPAPLTSTPPLRS

SEQ ID NO: 810552 - protein, 1426 aa, Homo sapiens
MAEVTVPRVYVVFGIHCIMAKASSDVQVSGFHRKIQHVKNELCHMLSLEEVAPVLQQTLLQDNLLGRVHFDQFKEALILILSRTLSNEEHFQEPDCSLEAQPKYVRGGKRYGRRSLPEFQESVEEFPEVTVIEPLDEEARPSHIPAGDCSEHWKTQRSEEYEAEGQLRFWNPDDLNASQSGSSPPQDWIEEKLQEVCEDLGITRDGHLNRKKLVSICEQYGLQNVDGEMLEEVFHNLDPDGTMSVEDFFYGLFKNGKSLTPSASTPYRQLKRHLSMQSFDESGRRTTTSSAMTSTIGFRVFSCLDDGMGHASVERILDTWQEEGIENSQEILKALDFSLDGNINLTELTLALENELLVTKNSIHQAALASFKAEIRHLLERVDQVVREKEKLRSDLDKAEKLKSLMASEVDDHHAAIERRNEYNLRKLDEEYKERIAALKNELRKEREQILQQAGKQRLELEQEIEKAKTEENYIRDRLALSLKENSRLENELLENAEKLAEYENLTNKLQRNLENVLAEKFGDLDPSSAEFFLQEERLTQMRNEYERQCRVLQDQVDELQSELEEYRAQGRVLRLPLKNSPSEEVEANSGGIEPEHGLGSEECNPLNMSIEAELVIEQMKEQHHRDICCLRLELEDKVRHYEKQLDETVVSCKKAQENMKQRHENETHTLEKQISDLKNEIAELQGQAAVLKEAHHEATCRHEEEKKQLQVKLEEEKTHLQEKLRLQHEMELKARLTQAQASFEREREGLQSSAWTEEKVRGLTQELEQFHQEQLTSLVEKHTLEKEELRKELLEKHQRELQEGRYESEKLQQENSILRNEITTLNEEDSISNLKLGTLNGSQEEMWQKTETVKQENAAVQKMVENLKKQISELKIKNQQLDLENTELSQKNSQNQEKLQELNQRLTEMLCQKEKEPGNSALEEREQEKFNLKEELERCKVQSSTLVSSLEAELSEVKIQTHIVQQENHLLKDELEKMKQLHRCPDLSDFQQKISSVLSYNEKLLKEKEALSEELNSCVDKLAKSSLLEHRIATMKQEQKSWEHQSASLKSQLVASQEKVQNLEDTVQNVNLQMSRMKSDLRVTQQEKEALKQEVMSLHKQLQNAGGKSWAPEIATHPSGLHNQQKRLSWDKLDHLMNEEQQLLWQENERLQTMVQNTKAELTHSREKVRQLESNLLPKHQKHLNPSGTMNPTEQEKLSLKRECDQFQKEQSPANRKVSQMNSLEQELETIHLENEGLKKKQVKLDEQLMEMQHLRSTATPSPSPHAWDLQLLQQQACPMVPREQFLQLQRQLLQAERINQHLQEELENRTSETNTPQGNQEQLVTVMEERMIEVEQKLKLVKRLLQEKVNQLKEQLCKNTKADAMVKDLYVENAQLLKALEVTEQRQKTAEKKNYLLEEKIASLSNIVRNLTPAPLTSTPPLRS

SEQ ID NO: 810553 - protein, 2159 aa, Homo sapiens
MAEVTVPRVYVVFGIHCIMAKASSDVQVSGFHRKIQHVKNELCHMLSLEEVAPVLQQTLLQDNLLGRVHFDQFKEALILILSRTLSNEEHFQEPDCSLEAQPKYVRGGKRYGRRSLPEFQESVEEFPEVTVIEPLDEEARPSHIPAGDCSEHWKTQRSEEYEAEGQLRFWNPDDLNASQSGSSPPQDWIEEKLQEVCEDLGITRDGHLNRKKLVSICEQYGLQNVDGEMLEEVFHNLDPDGTMSVEDFFYGLFKNGKSLTPSASTPYRQLKRHLSMQSFDESGRRTTTSSAMTSTIGFRVFSCLDDGMGHASVERILDTWQEEGIENSQEILKALDFSLDGNINLTELTLALENELLVTKNSIHQAALASFKAEIRHLLERVDQVVREKEKLRSDLDKAEKLKSLMASEVDDHHAAIERRNEYNLRKLDEEYKERIAALKNELRKEREQILQQAGKQRLELEQEIEKAKTEENYIRDRLALSLKENSRLENELLENAEKLAEYENLTNKLQRNLENVLAEKFGDLDPSSAEFFLQEERLTQMRNEYERQCRVLQDQVDELQSELEEYRAQGRVLRLPLKNSPSEEVEANSGGIEPEHGLGSEECNPLNMSIEAELVIEQMKEQHHRDICCLRLELEDKVRHYEKQLDETVVSCKKAQENMKQRHENETHTLEKQISDLKNEIAELQGQAAVLKEAHHEATCRHEEEKKQLQVKLEEEKTHLQEKLRLQHEMELKARLTQAQASFEREREGLQSSAWTEEKVRGLTQELEQFHQEQLTSLVEKHTLEKEELRKELLEKHQRELQEGREKMETECNRRTSQIEAQFQSDCQKVTERCESALQSLEGRYRQELKDLQEQQREEKSQWEFEKDELTQECAEAQELLKETLKREKTTSLVLTQEREMLEKTYKEHLNSMVVERQQLLQDLEDLRNVSETQQSLLSDQILELKSSHKRELREREEVLCQAGASEQLASQRLERLEMEHDQERQEMMSKLLAMENIHKATCETADRERAEMSTEISRLQSKIKEMQQATSPLSMLQSGCQVIGEEEVEGDGALSLLQQGEQLLEENGDVLLSLQRAHEQAVKENVKMATEISRLQQRLQKLEPGLVMSSCLDEPATEFFGNTAEQTEPFLQQNRTKQVEGVTRRHVLSDLEDDEVRDLGSTGTSSVQRQEVKIEESEASVEGFSELENSEETRTESWELKNQISQLQEQLMMLCADCDRASEKKQDLLFDVSVLKKKLKMLERIPEASPKYKLLYEDVSRENDCLQEELRMMETRYDEALENNKELTAEVFRLQDELKKMEEVTETFLSLEKSYDEVKIENEELNVLVLRLQGKIEKLQESVVQRCDCCLWEASLENLEIEPDGNILQLNQTLEECVPRVRSVHHVIEECKQENQYLEGNTQLLEKVKAHEIAWLHGTIQTHQERPRVQNQVILEENTTLLGFQDKHFQHQATIAELELEKTKLQELTRKLKERVTILVKQKDVLSHGEKEEELKAMMHDLQITCSEMQQKVELLRYESEKLQQENSILRNEITTLNEEDSISNLKLGTLNGSQEEMWQKTETVKQENAAVQKMVENLKKQISELKIKNQQLDLENTELSQKNSQNQEKLQELNQRLTEMLCQKEKEPGNSALEEREQEKFNLKEELERCKVQSSTLVSSLEAELSEVKIQTHIVQQENHLLKDELEKMKQLHRCPDLSDFQQKISSVLSYNEKLLKEKEALSEELNSCVDKLAKSSLLEHRIATMKQEQKSWEHQSASLKSQLVASQEKVQNLEDTVQNVNLQMSRMKSDLRVTQQEKEALKQEVMSLHKQLQNAGGKSWAPEIATHPSGLHNQQKRLSWDKLDHLMNEEQQLLWQENERLQTMVQNTKAELTHSREKVRQLESNLLPKHQKHLNPSGTMNPTEQEKLSLKRECDQFQKEQSPANRKVSQMNSLEQELETIHLENEGLKKKQVKLDEQLMENSVVGSSREGCSSLPEMCVKMQHLRSTATPSPSPHAWDLQLLQQQACPMVPREQFLQLQRQLLQAERINQHLQEELENRTSETNTPQGNQEQLVTVMEERMIEVEQKLKLVKRLLQEKVNQLKEQLCKNTKADAMVKDLYVENAQLLKALEVTEQRQKTAEKKNYLLEEKIASLSNIVRNLTPAPLTSTPPLRS

SEQ ID NO: 810554 - protein, 2156 aa, Homo sapiens
SRPPEPGAERAGRGRPAAAAKPGVRQRPWFPRRRRAPEPRDASAGGGLPAVRALRRDRQKVSTVGYGMDELDQDQHGRLKDLFDSFDTTGTGSLGQEELTDLCHMLSLEEVAPVLQQTLLQDNLLGRVHFDQFKEALILILSRTLSNEEHFQEPDCSLEAQPKYVRGGKRYGRRSLPEFQESVEEFPEVTVIEPLDEEARPSHIPAGDCSEHWKTQRSEEYEAEGQLRFWNPDDLNASQSGSSPPQDWIEEKLQEVCEDLGITRDGHLNRKKLVSICEQYGLQNVDGEMLEEVFHNLDPDGTMSVEDFFYGLFKNGKSLTPSASTPYRQLKRHLSMQSFDESGRRTTTSSAMTSTIGFRVFSCLDDGMGHASVERILDTWQEEGIENSQEILKALDFSLDGNINLTELTLALENELLVTKNSIHQAALASFKAEIRHLLERVDQVVREKEKLRSDLDKAEKLKSLMASEVDDHHAAIERRNEYNLRKLDEEYKERIAALKNELRKEREQILQQAGKQRLELEQEIEKAKTEENYIRDRLALSLKENSRLENELLENAEKLAEYENLTNKLQRNLENVLAEKFGDLDPSSAEFFLQEERLTQMRNEYERQCRVLQDQVDELQSELEEYRAQGRVLRLPLKNSPSEEVEANSGGIEPEHGLGSEECNPLNMSIEAELVIEQMKEQHHRDICCLRLELEDKVRHYEKQLDETVVSCKKAQENMKQRHENETHTLEKQISDLKNEIAELQGQAAVLKEAHHEATCRHEEEKKQLQVKLEEEKTHLQEKLRLQHEMELKARLTQAQASFEREREGLQSSAWTEEKVRGLTQELEQFHQEQLTSLVEKHTLEKEELRKELLEKHQRELQEGREKMETECNRRTSQIEAQFQSDCQKVTERCESALQSLEGRYRQELKDLQEQQREEKSQWEFEKDELTQECAEAQELLKETLKREKTTSLVLTQEREMLEKTYKEHLNSMVVERQQLLQDLEDLRNVSETQQSLLSDQILELKSSHKRELREREEVLCQAGASEQLASQRLERLEMEHDQERQEMMSKLLAMENIHKATCETADRERAEMSTEISRLQSKIKEMQQATSPLSMLQSGCQVIGEEEVEGDGALSLLQQGEQLLEENGDVLLSLQRAHEQAVKENVKMATEISRLQQRLQKLEPGLVMSSCLDEPATEFFGNTAEQTEPFLQQNRTKQVEGVTRRHVLSDLEDDEVRDLGSTGTSSVQRQEVKIEESEASVEGFSELENSEETRTESWELKNQISQLQEQLMMLCADCDRASEKKQDLLFDVSVLKKKLKMLERIPEASPKYKLLYEDVSRENDCLQEELRMMETRYDEALENNKELTAEVFRLQDELKKMEEVTETFLSLEKSYDEVKIENEELNVLVLRLQGKIEKLQESVVQRCDCCLWEASLENLEIEPDGNILQLNQTLEECVPRVRSVHHVIEECKQENQYLEGNTQLLEKVKAHEIAWLHGTIQTHQERPRVQNQVILEENTTLLGFQDKHFQHQATIAELELEKTKLQELTRKLKERVTILVKQKDVLSHGEKEEELKAMMHDLQITCSEMQQKVELLRYESEKLQQENSILRNEITTLNEEDSISNLKLGTLNGSQEEMWQKTETVKQENAAVQKMVENLKKQISELKIKNQQLDLENTELSQKNSQNQEKLQELNQRLTEMLCQKEKEPGNSALEEREQEKFNLKEELERCKVQSSTLVSSLEAELSEVKIQTHIVQQENHLLKDELEKMKQLHRCPDLSDFQQKISSVLSYNEKLLKEKEALSEELNSCVDKLAKSSLLEHRIATMKQEQKSWEHQSASLKSQLVASQEKVQNLEDTVQNVNLQMSRMKSDLRVTQQEKEALKQEVMSLHKQLQNAGGKSWAPEIATHPSGLHNQQKRLSWDKLDHLMNEEQQLLWQENERLQTMVQNTKAELTHSREKVRQLESNLLPKHQKHLNPSGTMNPTEQEKLSLKRECDQFQKEQSPANRKVSQMNSLEQELETIHLENEGLKKKQVKLDEQLMEMQHLRSTATPSPSPHAWDLQLLQQQACPMVPREQFLQLQRQLLQAERINQHLQEELENRTSETNTPQGNQEQLVTVMEERMIEVEQKLKLVKRLLQEKVNQLKEQVSLPGHLCSPTSHSSFNSSFTSLYCH

SEQ ID NO: 810555 - protein, 521 aa, Homo sapiens
LKGSDRIVVIAVPRVTLHMEREQEKFNLKEELERCKVQSSTLVSSLEAELSEVKIQTHIVQQENHLLKDELEKMKQLHRCPDLSDFQQKISSVLSYNEKLLKEKEALSEELNSCVDKLAKSSLLEHRIATMKQEQKSWEHQSASLKSQLVASQEKVQNLEDTVQNVNLQMSRMKSDLRVTQQEKEALKQEVMSLHKQLQNAGGKSWAPEIATHPSGLHNQQKRLSWDKLDHLMNEEQQLLWQENERLQTMVQNTKAELTHSREKVRQLESNLLPKHQKHLNPSGTMNPTEQEKLSLKRECDQFQKEQSPANRKVSQMNSLEQELETIHLENEGLKKKQVKLDEQLMEMQHLRSTATPSPSPHAWDLQLLQQQACPMVPREQFLQLQRQLLQAERINQHLQEELENRTSETNTPQGNQEQLVTVMEERMIEVEQKLKLVKRLLQEKVNQLKEQLCKNTKADAMVKDLYVENAQLLKALEVTEQRQKTAEKKNYLLEEKIASLSNIVRNLTPAPLTSTPPLRS

SEQ ID NO: 810556 - protein, 341 aa, Homo sapiens
MTPVSNQQLPNSLFLRLTLCNSLKSWAPEIATHPSGLHNQQKRLSWDKLDHLMNEEQQLLWQENERLQTMVQNTKAELTHSREKVRQLESNLLPKHQKHLNPSGTMNPTEQEKLSLKRECDQFQKEQSPANRKVSQMNSLEQELETIHLENEGLKKKQVKLDEQLMEMQHLRSTATPSPSPHAWDLQLLQQQACPMVPREQFLQLQRQLLQAERINQHLQEELENRTSETNTPQGNQEQLVTVMEERMIEVEQKLKLVKRLLQEKVNQLKEQLCKNTKADAMVKDLYVENAQLLKALEVTEQRQKTAEKKNYLLEEKIASLSNIVRNLTPAPLTSTPPLRS

SEQ ID NO: 810557 - protein, 391 aa, Homo sapiens [sequence omitted]

SEQ ID NO: 810558 - protein, 1790 aa, Homo sapiens
MAEVTVPRVYVVFGIHCIMAKASSDVQVSGFHRKIQHVKNELCHMLSLEEVAPVLQQTLLQDNLLGRVHFDQFKEALILILSRTLSNEEHFQEPDCSLEAQPKYVRGGKRYGRRSLPEFQESVEEFPEVTVIEPLDEEARPSHIPAGDCSEHWKTQRSEEYEAEGQLRFWNPDDLNASQSGSSPPQDWIEEKLQEVCEDLGITRDGHLNRKKLVSICEQYGLQNVDGEMLEEVFHNLDPDGTMSVEDFFYGLFKNGKSLTPSASTPYRQLKRHLSMQSFDESGRRTTTSSAMTSTIGFRVFSCLDDGMGHASVERILDTWQEEGIENSQEILKALDFSLDGNINLTELTLALENELLVTKNSIHQAALASFKAEIRHLLERVDQVVREKEKLRSDLDKAEKLKSLMASEVDDHHAAIERRNEYNLRKLDEEYKERIAALKNELRKEREQILQQAGKQRLELEQEIEKAKTEENYIRDRLALSLKENSRLENELLENAEKLAEYENLTNKLQRNLENVLAEKFGDLDPSSAEFFLQEERLTQMRNEYERQCRVLQDQVDELQSELEEYRAQGRVLRLPLKNSPSEEVEANSGGIEPEHGLGSEECNPLNMSIEAELVIEQMKEQHHRDICCLRLELEDKVRHYEKQLDETVVSCKKAQENMKQRHENETHTLEKQISDLKNEIAELQGQAAVLKEAHHEATCRHEEEKKQLQVKLEEEKTHLQEKLRLQHEMELKARLTQAQASFEREREGLQSSAWTEEKVRGLTQELEQFHQEQLTSLVEKHTLEKEELRKELLEKHQRELQEGREKMETECNRRTSQIEAQFQSDCQKVTERCESALQSLEGRYRQELKDLQEQQREEKSQWEFEKDELTQECAEAQELLKETLKREKTTSLVLTQEREMLEKTYKEHLNSMVVERQQLLQDLEDLRNVSETQQSLLSDQILELKSSHKRELREREEVLCQAGASEQLASQRLERLEMEHDQERQEMMSKLLAMENIHKATCETADRERAEMSTEISRLQSKIKEMQQATSPLSMLQSGCQVIGEEEVEGDGALSLLQQGEQLLEENGDVLLSLQRAHEQAVKENVKMATEISRLQQRLQKLEPGLVMSSCLDEPATEFFGNTAEQTEPFLQQNRTKQVEGVTRRHVLSDLEDDEVRDLGSTGTSSVQRQEVKIEESEASVEGFSELENSEETRTESWELKNQISQLQEQLMMLCADCDRASEKKQDLLFDVSVLKKKLKMLERIPEASPKYKLLYEDVSRENDCLQEELRMMETRYDEALENNKELTAEVFRLQDELKKMEEVTETFLSLEKSYDEVKIENEELNVLVLRLQGKIEKLQESVVQRCDCCLWEASLENLEIEPDGNILQLNQTLEECVPRVRSVHHVIEECKQENQYLEGNTQLLEKVKAHEIAWLHGTIQTHQERPRVQNQVILEENTTLLGFQDKHFQHQATIAELELEKTKLQELTRKLKERVTILVKQKDVLSHGEKEEELKAMMHDLQITCSEMQQKVELLRYESEKLQQENSILRNEITTLNEEDSISNLKLGTLNGSQEEMWQKTETVKQENAAVQKMVENLKKQISELKIKNQQLDLENTELSQKNSQNQEKLQELNQRLTEMLCQKEKEPGNSALEEREQEKFNLKEELERCKVQSSTLVSSLEAELSEVKIQTHIVQQENHLLKDELEKMKQLHRCPDLSDFQQKISSVLSYNEKLLKEKEALSEELNSCVDKLAKSSLLEHRIATMKQEQKSWEHQSASLKSQLVASQEKVHELLVIFTYGMSRAYV

SEQ ID NO: 810559 - protein, 1662 aa, Homo sapiens
MAEVTVPRVYVVFGIHCIMAKASSDVQVSGFHRKIQHVKNELCHMLSLEEVAPVLQQTLLQDNLLGRVHFDQFKEALILILSRTLSNEEHFQEPDCSLEAQPKYVRGGKRYGRRSLPEFQESVEEFPEVTVIEPLDEEARPSHIPAGDCSEHWKTQRSEEYEAEGQLRFWNPDDLNASQSGSSPPQDWIEEKLQEVCEDLGITRDGHLNRKKLVSICEQYGLQNVDGEMLEEVFHNLDPDGTMSVEDFFYGLFKNGKSLTPSASTPYRQLKRHLSMQSFDESGRRTTTSSAMTSTIGFRVFSCLDDGMGHASVERILDTWQEEGIENSQEILKALDFSLDGNINLTELTLALENELLVTKNSIHQAALASFKAEIRHLLERVDQVVREKEKLRSDLDKAEKLKSLMASEVDDHHAAIERRNEYNLRKLDEEYKERIAALKNELRKEREQILQQAGKQRLELEQEIEKAKTEENYIRDRLALSLKENSRLENELLENAEKLAEYENLTNKLQRNLENVLAEKFGDLDPSSAEFFLQEERLTQMRNEYERQCRVLQDQVDELQSELEEYRAQGRVLRLPLKNSPSEEVEANSGGIEPEHGLGSEECNPLNMSIEAELVIEQMKEQHHRDICCLRLELEDKVRHYEKQLDETVVSCKKAQENMKQRHENETHTLEKQISDLKNEIAELQGQAAVLKEAHHEATCRHEEEKKQLQVKLEEEKTHLQEKLRLQHEMELKARLTQAQASFEREREGLQSSAWTEEKVRGLTQELEQFHQEQLTSLVEKHTLEKEELRKELLEKHQRELQEGREKMETECNRRTSQIEAQFQSDCQKVTERCESALQSLEGRYRQELKDLQEQQREEKSQWEFEKDELTQECAEAQELLKETLKREKTTSLVLTQEREMLEKTYKEHLNSMVVERQQLLQDLEDLRNVSETQQSLLSDQILELKSSHKRELREREEVLCQAGASEQLASQRLERLEMEHDQERQEMMSKLLAMENIHKATCETADRERAEMSTEISRLQSKIKEMQQATSPLSMLQSGCQVIGEEEVEGDGALSLLQQGEQLLEENGDVLLSLQRAHEQAVKENVKMATEISRLQQRLQKLEPGLVMSSCLDEPATEFFGNTAEQTEPFLQQNRTKQVEGVTRRHVLSDLEDDEVRDLGSTGTSSVQRQEVKIEESEASVEGFSELENSEETRTESWELKNQISQLQEQLMMLCADCDRASEKKQDLLFDVSVLKKKLKMLERIPEASPKYKLLYEDVSRENDCLQEELRMMETRYDEALENNKELTAEVFRLQDELKKMEEVTETFLSLEKSYDEVKIENEELNVLVLRLQGKIEKLQESVVQRCDCCLWEASLENLEIEPDGNILQLNQTLEECVPRVRSVHHVIEECKQENQYLEGNTQLLEKVKAHEIAWLHGTIQTHQERPRVQNQVILEENTTLLGFQDKHFQHQATIAELELEKTKLQELTRKLKERVTILVKQKDVLSHGEKEEELKAMMHDLQITCSEMQQKVELLRYESEKLQQENSILRNEITTLNEEDSISNLKLGTLNGSQEEMWQKTETVKQENAAVQKMVENLKKQISELKIKNQQLDLENTELSQKNSQNQEKLQELNQRLTEMLCQKEKEPGNSALEEREQEKFNLKEELERCKVQVWPVAT

SEQ ID NO: 810560 - protein, 606 aa, Homo sapiens
MAEVTVPRVYVVFGIHCIMAKASSDVQVSGFHRKIQHVKNELCHMLSLEEVAPVLQQTLLQDNLLGRVHFDQFKEALILILSRTLSNEEHFQEPDCSLEAQPKYVRGGKRYGRRSLPEFQESVEEFPEVTVIEPLDEEARPSHIPAGDCSEHWKTQRSEEYEAEGQLRFWNPDDLNASQSGSSPPQDWIEEKLQEVCEDLGITRDGHLNRKKLVSICEQYGLQNVDGEMLEEVFHNLDPDGTMSVEDFFYGLFKNGKSLTPSASTPYRQLKRHLSMQSFDESGRRTTTSSAMTSTIGFRVFSCLDDGMGHASVERILDTWQEEGIENSQEILKALDFSLDGNINLTELTLALENELLVTKNSIHQAALASFKAEIRHLLERVDQVVREKEKLRSDLDKAEKLKSLMASEVDDHHAAIERRNEYNLRKLDEEYKERIAALKNELRKEREQILQQAGKQRLELEQEIEKAKTEENYIRDRLALSLKENSRLENELLENAEKLAEYENLTNKLQRNLENVLAEKFGDLDPSSAEFFLQEERLTQMRNEYERQCRVLQDQVDELQSELEEYRAQGRVLRLPLKNSPSEEVEANSGGIEPEHGKHIRTGCR

SEQ ID NO: 810561 - protein, 155 aa, Homo sapiens
MAEVTVPRVYVVFGIHCIMAKASSDVQVSGFHRKIQHVKNELCHMLSLEEVAPVLQQTLLQDNLLGRVHFDQFKEALILILSRTLSNEEHFQEPDCSLEAQPKYVRGGKRYGRRSLPEFQESVEEFPEVTVIEPLDEEARPSHIPAGDCSELLES

SEQ ID NO: 810562 - protein, 330 aa, Homo sapiens
MEKNSMDIMKIREYFQKYGYSPRVKKNSVHEQEAINSDPELSNCENFQKTDVKDDLSDPPVASSCISEKSPRSPQLSDFGLERYIVSQVLPNPPQAVNNYKEEPVIVTPPTKQSLVKVLKTPKCALKMDDFECVTPKLEHFGISEYTMCLNEDYTMGLKNARNNKSEEAIDTESRLNDNVFATPSPIIQQLEKSDAEYTNSPLVPTFCTPGLKIPSTKNSIALVSTNYPLSKTNSSSNDLEVEDRTSLVLNSDTCFENLTDPSSPTISSYENLLRTPTPPEVTKIPEDILQLLSKYNSNLATPIAIKAVPPSKRFLKHGQNIRDVSNKEN

SEQ ID NO: 810563 - protein, 269 aa, Homo sapiens
MRILYDLHSEVQTLKDDVNILLDKARLENQEGIDFIKATKVLMEKNSMDIMKIREYFQKYGYSPRVKKNSVHEQEAINSDPELSNCENFQKTDVKDDLSDPPVASSCISEKSPRSPQLSDFGLERYIVSQVLPNPPQAVNNYKEEPVIVTPPTKQSLVKVLKTPKCALKMDDFECVTPKLEHFGISEYTMCLNEDYTMGLKNARNNKSEEAIDTESRLNDNVFATPSPIIQQLEKSGGEYPTLLVLHTGPVEIQLKKYSGFHSIMKHVY

SEQ ID NO: 810564 - protein, 412 aa, Homo sapiens
MDPIRSFCGKLRSLASTLDCETARLQRALDGEESDFEDYPMRILYDLHSEVQTLKDDVNILLDKARLENQEGIDFIKATKVLMEKNSMDIMKIREYFQKYGYSPRVKKNSVHEQEAINSDPELSNCENFQKTDVKDDLSDPPVASSCISEKSPRSPQLSDFGLERYIVSQVLPNPPQAVNNYKEEPVIVTPPTKQSLVKVLKTPKCALKMDDFECVTPKLEHFGISEYTMCLNEDYTMGLKNARNNKSEEAIDTESRLNDNVFATPSPIIQQLEKSDAEYTNSPLVPTFCTPGLKIPSTKNSIALVSTNYPLSKTNSSSNDLEVEDRTSLVLNSDTCFENLTDPSSPTISSYENLLRTPTPPEVTKIPEDILQLLSKYNSNLATPIAIKAVPPSKRFLKHGQNIRDVSNKEN

SEQ ID NO: 810565 - protein, 372 aa, Homo sapiens
MRILYDLHSEVQTLKDDVNILLDKARLENQEGIDFIKATKVLMEKNSMDIMKIREYFQKYGYSPRVKKNSVHEQEAINSDPELSNCENFQKTDVKDDLSDPPVASSCISEKSPRSPQLSDFGLERYIVSQVLPNPPQAVNNYKEEPVIVTPPTKQSLVKVLKTPKCALKMDDFECVTPKLEHFGISEYTMCLNEDYTMGLKNARNNKSEEAIDTESRLNDNVFATPSPIIQQLEKSDAEYTNSPLVPTFCTPGLKIPSTKNSIALVSTNYPLSKTNSSSNDLEVEDRTSLVLNSDTCFENLTDPSSPTISSYENLLRTPTPPEVTKIPEDILQLLSKYNSNLATPIAIKAVPPSKRFLKHGQNIRDVSNKEN

SEQ ID NO: 810566 - protein, 388 aa, Homo sapiens
MDPIRSFCGKLRSLASTLDCETARLQRALDGEESDFEDYPMRILYDLHSEVQTLKDDVNILLDKARLENQEGIDFIKATKVLMEKNSMDIMKIREYFQKYGYSPRVKKNSVHEQEAINSDPELSNCENFQKTDVKDDLSDPPVASSCISEKSPRSPQLSDFGLERYIVSQVLPNPPQAVNNYKEEPVIVTPPTKQSLVKVLKTPKCALKMDDFECVTPKLEHFGISEYTMCLNEDYTMGLKNARNNKSEEAIDTESRLNDNVFATPSPIIQQLEKSDAEYTNSPLVPTFCTPGLKIPSTKNSIALVSTNYPLSKTNSSSNDLEVEDRTSLVLNSDTCFENLTDPSSPTISSYENLLRTPTPPEVTKIPEDILQKFQWIYPTQKLNKMR

SEQ ID NO: 810567 - protein, 119 aa, Homo sapiens
AAASRRRGVSAPVSRGLLGPRRETSALAREDCACAEPRTRPAPRFKLVAGGCELSGGVCVRLESFPAVLSMDPIRSFCGKLRSLASTLDCETARLQRALDGEESAFIKIQLKPSYSNSN

SEQ ID NO: 810568 - protein, 309 aa, Homo sapiens
MDPIRSFCGKLRSLASTLDCETARLQRALDGEESDFEDYPMRILYDLHSEVQTLKDDVNILLDKARLENQEGIDFIKATKVLMEKNSMDIMKIREYFQKYGYSPRVKKNSVHEQEAINSDPELSNCENFQKTDVKDDLSDPPVASSCISEKSPRSPQLSDFGLERYIVSQVLPNPPQAVNNYKEEPVIVTPPTKQSLVKVLKTPKCALKMDDFECVTPKLEHFGISEYTMCLNEDYTMGLKNARNNKSEEAIDTESRLNDNVFATPSPIIQQLEKSDDEYPTLLVLHTGPVEIQLKKYSGFHSIMKHVY

SEQ ID NO: 810569 - protein, 437 aa, Homo sapiens
MLQGPRALASAAGQTPKVVPAMSPTELWPSGLSSPQLCPATATYYTPLYPQTAPPAAAPGTCLDATPHGPEGQVVRCLPAGRLPAKRKLDLEGIGRPVVPEFPTPKGKCIRVDGLPSPKTPKSPGEKTRYDTSLGLLTKKFIYLLSESEDGVLDLNWAAEVLDVQKRRIYDITNVLEGIQLIRKKAKNNIQWVGRGMFEDPTRPGKQQQLGQELKELMNTEQALDQLIQSCSLSFKHLTEDKANKRLAYVTYQDIRAVGNFKEQTVIAVKAPPQTRLEVPDRTEDNLQIYLKSTQGPIEVYLCPEEVQEPDSPSEEPLPSTSTLCPSPDSAQPSSSTDPSIMEPTASSVPAPAPTPQQAPPPPSLVPLEATDSLLELPHPLLQQTEDQFLSPTLACSSPLISFSPSLDQDDYLWGLEAGEGISDLFDSYDLGDLLIN

SEQ ID NO: 810570 - protein, 225 aa, Homo sapiens
MFRGLGEVGEGAPWQVWGLNFDQTVTFLDSPALTLAYVTYQDIRAVGNFKEQTVIAVKAPPQTRLEVPDRTEDNLQIYLKSTQGPIEVYLCPEEVQEPDSPSEEPLPSTSTLCPSPDSAQPSSSTDPSIMEPTASSVPAPAPTPQQAPPPPSLVPLEATDSLLELPHPLLQQTEDQFLSPTLACSSPLISFSPSLDQDDYLWGLEAGEGISDLFDSYDLGDLLIN

SEQ ID NO: 810571 - protein, 473 aa, Homo sapiens
MAPPAARLALLSAAALTLAARPAPSPGLGPECFTANGADYRGTQNWTALQGGKPCLFWNETFQHPYNTLKYPNGEGGLGEHNYCRNPDGDVSPWCYVAEHEDGVYWKYCEIPACQMPGNLGCYKDHGNPPPLTGTSKTSNKLTIQTCISFCRSQRFKFAGMESGYACFCGNNPDYWKYGEAASTECNSVCFGDHTQPCGGDGRIILFDTLVGACGGNYSAMSSVVYSPDFPDTYATGRVCYWTIRVPGASHIHFSFPLFDIRDSADMVELLDGYTHRVLARFHGRSRPPLSFNVSLDFVILYFFSDRINQAQGFAVLYQAVKEELPQERPAVNQTVAEVITEQANLSVSAARSSKVLYVITTSPSHPPQTVPGSNSWAPPMGAGSHRVEGWTVYGLATLLILTVTAIVAKILLHVTFKSHRVPASGDLRDCHQPGTSGEIWSIFYKPSTSISIFKKKLKGQSQQDDRNPLVSD

SEQ ID NO: 810572 - protein, 473 aa, Homo sapiens; identical to SEQ ID NO: 810571

SEQ ID NO: 810573 - protein, 456 aa, Homo sapiens
MAPPAARLALLSAAALTLAARPAPSPGLGPECFTANGADYRGTQNWTALQGGKPCLFWNETFQHPYNTLKYPNGEGGLGEHNYCRNPDGDVSPWCYVAEHEDGVYWKYCEIPACQMPGNLGCYKDHGNPPPLTGTSKTSNKLTIQTCISFCRSQRFKFAGMESGYACFCGNNPDYWKYGEAASTECNSVCFGDHTQPCGGDGRIILFDTLVGACGGNYSAMSSVVYSPDFPDTYATGRVCYWTIRVPGASHIHFSFPLFDIRDSADMVELLDGYTHRVLARFHGRSRPPLSFNVSLDFVILYFFSDRINQAQGFAVLYQAVKEELPQERPAVNQTVAEVITEQANLSVSAARSSKVLYVITTSPSHPPQTVPGWTVYGLATLLILTVTAIVAKILLHVTFKSHRVPASGDLRDCHQPGTSGEIWSIFYKPSTSISIFKKKLKGQSQQDDRNPLVSD

SEQ ID NO: 810574 - protein, 906 aa, Homo sapiens
ARGGASTGPMERAGATSRGGQAPGFLLRLHTEGRAEAARVQEQDLRQWGLTGIHLRSYQLEGVNWLAQRFHCQNGCILGDEMGLGKTCQTIALFIYLAGRLNDEGPFLILCPLSVLSNWKEEMQRFAPGLSCVTYAGDKEERACLQQDLKQESRFHVLLTTYEICLKDASFLKSFPWSVLVVDEAHRLKNQSSLLHKTLSEFSVVFSLLLTGTPIQNSLQELYSLLSFVEPDLFSKEEVGDFIQRYQDIEKESESASELHKLLQPFLLRRVKAEVATELPKKTEVVIYHGMSALQKKYYKAILMKDLDAFENETAKKVKLQNILSQLRKCVDHPYLFDGVEPEPFEVGDHLTEASGKLHLLDKLLAFLYSGGHRVLLFSQMTQMLDILQDYMDYRGYSYERVDGSVRGEERHLAIKNFGQQPIFVFLLSTRAGGVGMNLTAADTVIFVDSDFNPQNDLQAAARAHRIGQNKSVKVIRLIGRDTVEEIVYRKAASKLQLTNMIIEGGHFTLGAQKPAADADLQLSEILKFGLDKLLASEGSTMDEIDLESILGETKDGQWVSDALPAAEGGSRDQEEGKNHMYLFEGKDYSKEPSKEDRKSFEQLVNLQKTLLEKASQEGRSLRNKGSVLIPGLVEGSTKRKRVLSPEELEDRQKKRQEAAAKRRRLIEEKKRQKEEAEHKKKMAWWESNNYQSFCLPSEESEPEDLENGEESSAELDYQDPDATSLKYVSGDVTHPQAGAEDALIVHCVDDSGHWGRGGLFTALEKRSAEPRKIYELAGKMKDLSLGGVLLFPVDDKESRNKGQDLLALIVAQHRDRSNVLSGIKMAALEEGLKKIFLAAKKKKASVHLPRIGHATKGFNWYGTERLIRKHLAARGIPTYIYYFPRSKSAVLHSQSSSSSSRQLVP

SEQ ID NO: 810575 - protein, 784 aa, Homo sapiens
MQRFAPGLSCVTYAGDKEERACLQQDLKQESRFHVLLTTYEICLKDASFLKSFPWSVLVVDEAHRLKNQSSLLHKTLSEFSVVFSLLLTGTPIQNSLQELYSLLSFVEPDLFSKEEVGDFIQRYQDIEKESESASELHKLLQPFLLRRVKAEVATELPKKTEVVIYHGMSALQKKYYKAILMKDLDAFENETAKKVKLQNILSQLRKCVDHPYLFDGVEPEPFEVGDHLTEASGKLHLLDKLLAFLYSGGHRVLLFSQMTQMLDILQDYMDYRGYSYERVDGSVRGEERHLAIKNFGQQPIFVFLLSTRAGGVGMNLTAADTVIFVDSDFNPQNDLQAAARAHRIGQNKSVKVIRLIGRDTVEEIVYRKAASKLQLTNMIIEGGHFTLGAQKPAADADLQLSEILKFGLDKLLASEGSTMDEIDLESILGETKDGQWVSDALPAAEGGSRDQEEGKNHMYLFEGKDYSKEPSKEDRKSFEQLVNLQKTLLEKASQEGRSLRNKGSVLIPGLVEGSTKRKRVLSPEELEDRQKKRQEAAAKRRRLIEEKKRQKEEAEHKKKMAWWESNNYQSFCLPSEESEPEDLENGEESSAELDYQDPDATSLKYVSGDVTHPQAGAEDALIVHCVDDSGHWGRGGLFTALEKRSAEPRKIYELAGKMKDLSLGGVLLFPVDDKESRNKGQDLLALIVAQHRDRSNVLSGIKMAALEEGLKKIFLAAKKKKASVHLPRIGHATKGFNWYGTERLIRKHLAARGIPTYIYYFPRSKSAVLHSQSSSSSSRQLVP

SEQ ID NO: 810576 - protein, 139 aa, Homo sapiens
SELGVLYVAPFCFTSDLSLGGVLLFPVDDKESRNKGQDLLALIVAQHRDRSNVLSGIKMAALEEGLKKIFLAAKKKKASVHLPRIGHATKGFNWYGTERLIRKHLAARGIPTYIYYFPRSKSAVLHSQSSSSSSRQLVP

SEQ ID NO: 810577 - protein, 906 aa, Homo sapiens; identical to SEQ ID NO: 810574

SEQ ID NO: 810578 - protein, 906 aa, Homo sapiens; identical to SEQ ID NO: 810574

SEQ ID NO: 810579 - protein, 702 aa, Homo sapiens
ARGGASTGPMERAGATSRGGQAPGFLLRLHTEGRAEAARVQEQDLRQWGLTASELHKLLQPFLLRRVKAEVATELPKKTEVVIYHGMSALQKKYYKAILMKDLDAFENETAKKVKLQNILSQLRKCVDHPYLFDGVEPEPFEVGDHLTEASGKLHLLDKLLAFLYSGGHRVLLFSQMTQMLDILQDYMDYRGYSYERVDGSVRGEERHLAIKNFGQQPIFVFLLSTRAGGVGMNLTAADTVIFVDSDFNPQNDLQAAARAHRIGQNKSVKVIRLIGRDTVEEIVYRKAASKLQLTNMIIEGGHFTLGAQKPAADADLQLSEILKFGLDKLLASEGSTMDEIDLESILGETKDGQWVSDALPAAEGGSRDQEEGKNHMYLFEGKDYSKEPSKEDRKSFEQLVNLQKTLLEKASQEGRSLRNKGSVLIPGLVEGSTKRKRVLSPEELEDRQKKRQEAAAKRRRLIEEKKRQKEEAEHKKKMAWWESNNYQSFCLPSEESEPEDLENGEESSAELDYQDPDATSLKYVSGDVTHPQAGAEDALIVHCVDDSGHWGRGGLFTALEKRSAEPRKIYELAGKMKDLSLGGVLLFPVDDKESRNKGQDLLALIVAQHRDRSNVLSGIKMAALEEGLKKIFLAAKKKKASVHLPRIGHATKGFNWYGTERLIRKHLAARGIPTYIYYFPRSKSAVLHSQSSSSSSRQLVP

SEQ ID NO: 810580 - protein, 598 aa, Homo sapiens
EDTSLGKEESANRIVEDDASISSCNKLLTSGVEPEPFEVGDHLTEASGKLHLLDKLLAFLYSGGHRVLLFSQMTQMLDILQDYMDYRGYSYERVDGSVRGEERHLAIKNFGQQPIFVFLLSTRAGGVGMNLTAADTVIFVDSDFNPQNDLQAAARAHRIGQNKSVKVIRLIGRDTVEEIVYRKAASKLQLTNMIIEGGHFTLGAQKPAADADLQLSEILKFGLDKLLASEGSTMDEIDLESILGETKDGQWVSDALPAAEGGSRDQEEGKNHMYLFEGKDYSKEPSKEDRKSFEQLVNLQKTLLEKASQEGRSLRNKGSVLIPGLVEGSTKRKRVLSPEELEDRQKKRQEAAAKRRRLIEEKKRQKEEAEHKKKMAWWESNNYQSFCLPSEESEPEDLENGEESSAELDYQDPDATSLKYVSGDVTHPQAGAEDALIVHCVDDSGHWGRGGLFTALEKRSAEPRKIYELAGKMKDLSLGGVLLFPVDDKESRNKGQDLLALIVAQHRDRSNVLSGIKMAALEEGLKKIFLAAKKKKASVHLPRIGHATKGFNWYGTERLIRKHLAARGIPTYIYYFPRSKSAVLHSQSSSSSSRQLVP

SEQ ID NO: 810581 - protein, 611 aa, Homo sapiens
QNILSQLRIWVIHTLSKLDKMFCSLTFFASHFRKCVDHPYLFDGVEPEPFEVGDHLTEASGKLHLLDKLLAFLYSGGHRVLLFSQMTQMLDILQDYMDYRGYSYERVDGSVRGEERHLAIKNFGQQPIFVFLLSTRAGGVGMNLTAADTVIFVDSDFNPQNDLQAAARAHRIGQNKSVKVIRLIGRDTVEEIVYRKAASKLQLTNMIIEGGHFTLGAQKPAADADLQLSEILKFGLDKLLASEGSTMDEIDLESILGETKDGQWVSDALPAAEGGSRDQEEGKNHMYLFEGKDYSKEPSKEDRKSFEQLVNLQKTLLEKASQEGRSLRNKGSVLIPGLVEGSTKRKRVLSPEELEDRQKKRQEAAAKRRRLIEEKKRQKEEAEHKKKMAWWESNNYQSFCLPSEESEPEDLENGEESSAELDYQDPDATSLKYVSGDVTHPQAGAEDALIVHCVDDSGHWGRGGLFTALEKRSAEPRKIYELAGKMKDLSLGGVLLFPVDDKESRNKGQDLLALIVAQHRDRSNVLSGIKMAALEEGLKKIFLAAKKKKASVHLPRIGHATKGFNWYGTERLIRKHLAARGIPTYIYYFPRSKSAVLHSQSSSSSSRQLVP

SEQ ID NO: 810582 - protein, 707 aa, Homo sapiens
  misc_feature (6)..(6): Xaa can be any naturally occurring amino acid
DLPGRXGEQRYRILRRSESAASELHKLLQPFLLRRVKAEVATELPKKTEVVIYHGMSALQKKYYKAILMKDLDAFENETAKKVKLQNILSQLRKCVDHPYLFDGVEPEPFEVGDHLTEASGKLHLLDKLLAFLYSGGHRVLLFSQMTQMLDILQDYMDYRGDTFWPLHYQGSVRLNSPDRSMKNNMGYEKYYKGKQGYSYERVDGSVRGEERHLAIKNFGQQPIFVFLLSTRAGGVGMNLTAADTVIFVDSDFNPQNDLQAAARAHRIGQNKSVKVIRLIGRDTVEEIVYRKAASKLQLTNMIIEGGHFTLGAQKPAADADLQLSEILKFGLDKLLASEGSTMDEIDLESILGETKDGQWVSDALPAAEGGSRDQEEGKNHMYLFEGKDYSKEPSKEDRKSFEQLVNLQKTLLEKASQEGRSLRNKGSVLIPGLVEGSTKRKRVLSPEELEDRQKKRQEAAAKRRRLIEEKKRQKEEAEHKKKMAWWESNNYQSFCLPSEESEPEDLENGEESSAELDYQDPDATSLKYVSGDVTHPQAGAEDALIVHCVDDSGHWGRGGLFTALEKRSAEPRKIYELAGKMKDLSLGGVLLFPVDDKESRNKGQDLLALIVAQHRDRSNVLSGIKMAALEEGLKKIFLAAKKKKASVHLPRIGHATKGFNWYGTERLIRKHLAARGIPTYIYYFPRSKSAVLHSQSSSSSSRQLVP

SEQ ID NO: 810583 - protein, 470 aa, Homo sapiens
MNLTAADTVIFVDSDFNPQNDLQAAARAHRIGQNKSVKVIRLIGRDTVEEIVYRKAASKLQLTNMIIEGGHFTLGAQKPAADADLQLSEILKFGLDKLLASEGSTMDEIDLESILGETKDGQWVSDALPAAEGGSRDQEEGKNHMYLFEGKDYSKEPSKEDRKSFEQLVNLQKTLLEKASQEGRSLRNKGSVLIPGLVEGSTKRKRVLSPEELEDRQKKRQEAAAKRRRLIEEKKRQKEEAEHKKKMAWWESNNYQSFCLPSEESEPEDLENGEESSAELDYQDPDATSLKYVSGDVTHPQAGAEDALIVHCVDDSGHWGRGGLFTALEKRSAEPRKIYELAGKMKDLSLGGVLLFPVDDKESRNKGQDLLALIVAQHRDRSNVLSGIKMAALEEGLKKIFLAAKKKKASVHLPRIGHATKGFNWYGTERLIRKHLAARGIPTYIYYFPRSKSAVLHSQSSSSSSRQLVP

SEQ ID NO: 810584 - protein, 801 aa, Homo sapiens
ARGGASTGPMERAGATSRGGQAPGFLLRLHTEGRAEAARVQEQDLRQWGLTGIHLRSYQLEGVNWLAQRFHCQNGCILGDEMGLGKTCQTIALFIYLAGRLNDEGPFLILCPLSVLSNWKEEMQRFAPGLSCVTYAGDKEERACLQQDLKQESRFHVLLTTYEICLKDASFLKSFPWSVLVVDEAHRLKNQSSLLHKTLSEFSVVFSLLLTGTPIQNSLQELYSLLSFVEPDLFSKEEVGDFIQRYQDIEKESESASELHKLLQPFLLRRVKAEVATELPKKTEVVIYHGMSALQKKYYKAILMKDLDAFENETAKKVKLQNILSQLRKCVDHPYLFDGVEPEPFEVGDHLTEASGKLHLLDKLLAFLYSGGHRVLLFSQMTQMLDILQDYMDYRGYSYERVDGSVRGEERHLAIKNFGQQPIFVFLLSTRAGGVGMNLTAADTVIFVDSDFNPQNDLQAAARAHRIGQNKSVKVIRLIGRDTVEEIVYRKAASKLQLTNMIIEGGHFTLGAQKPAADADLQVLIPGLVEGSTKRKRVLSPEELEDRQKKRQEAAAKRRRLIEEKKRQKEEAEHKKKMAWWESNNYQSFCLPSEESEPEDLENGEESSAELDYQDPDATSLKYVSGDVTHPQAGAEDALIVHCVDDSGHWGRGGLFTALEKRSAEPRKIYELAGKMKDLSLGGVLLFPVDDKESRNKGQDLLALIVAQHRDRSNVLSGIKMAALEEGLKKIFLAAKKKKASVHLPRIGHATKGFNWYGTERLIRKHLAARGIPTYIYYFPRSKSAVLHSQSSSSSSRQLVP

SEQ ID NO: 810585 - protein, 273 aa, Homo sapiens
MKESCCCQNRRPRCPEDKHLPPPHSALGVAGQEESSDADGYPGTPALRDLSSSGHVEPRTRAPAEVALEIEGPWTLPMEIRGAEDGEPATARTEGLAPGSSQGVELAEDALIVHCVDDSGHWGRGGLFTALEKRSAEPRKIYELAGKMKDLSLGGVLLFPVDDKESRNKGQDLLALIVAQHRDRSNVLSGIKMAALEEGLKKIFLAAKKKKASVHLPRIGHATKGFNWYGTERLIRKHLAARGIPTYIYYFPRSKSAVLHSQSSSSSSRQLVP

SEQ ID NO: 810586 - protein, 315 aa, Homo sapiens
ARGGASTGPMERAGATSRGGQAPGFLLRLHTEGRAEAARVQEQDLRQWGLTGIHLRSYQLEGVNWLAQRFHCQNGCILGDEMGLGKTCQTIALFIYLAGRLNDEGPFLILCPLSVLSNWKEEMQRFAPGLSCVTYAGDKEERACLQQDLKQESRFHVLLTTYEICLKDASFLKSFPWSVLVVDEAHRLKNQSSLLHKTLSEFSVVFSLLLTGTPIQNSLQELYSLLSFVEPDLFSKEEVGDFIQRYQDIEKESESASELHKLLQPFLLRRVKAEVATELPKKTEVVIYHGMSALQKKYYKAILMKDLVCGSPIFV

SEQ ID NO: 810587 - protein, 417 aa, Homo sapiens
MLALLVLVTVALASAHHGGEHFEGEKVFRVNVEDENHINIIRELASTTQIDFWKPDSVTQIKPHSTVDFRVKAEDTVTVENVLKQNELQYKVLISNLRNVVEAQFDSRVRATGHSYEKYNKWETIEAWTQQVATENPALISRSVIGTTFEGRAIYLLKVGKAGQNKPAIFMDCGFHAREWISPAFCQWFVREAVRTYGREIQVTELLDKLDFYVLPVLNIDGYIYTWTKSRFWRKTRSTHTGSSCIGTDPNRNFDAGWCEIGASRNPCDETYCGPAAESEKETKALADFIRNKLSSIKAYLTIHSYSQMMIYPYSYAYKLGENNAELNALAKATVKELASLHGTKYTYGPGATTIYPAAGGSDDWAYDQGIRYSFTFELRDTGRYGFLLPESQIRATCEETFLAIKYVASYVLEHLY

SEQ ID NO: 810588 - protein, 417 aa, Homo sapiens; identical to SEQ ID NO: 810587

SEQ ID NO: 810589 - protein, 392 aa, Homo sapiens
GRVEPDGTATMLPLWTLSLLLGAVAGKEVCYERLGCFSDDSPWSGITERPLHILPWSPKDVNTRFLLYTNENPNNFQEVAADSSSISGSNFKTNRKTRFIEAWTQQVATENPALISRSVIGTTFEGRAIYLLKVGKAGQNKPAIFMDCGFHAREWISPAFCQWFVREAVRTYGREIQVTELLDKLDFYVLPVLNIDGYIYTWTKSRFWRKTRSTHTGSSCIGTDPNRNFDAGWCEIGASRNPCDETYCGPAAESEKETKALADFIRNKLSSIKAYLTIHSYSQMMIYPYSYAYKLGENNAELNALAKATVKELASLHGTKYTYGPGATTIYPAAGGSDDWAYDQGIRYSFTFELRDTGRYGFLLPESQIRATCEETFLAIKYVASYVLEHLY

SEQ ID NO: 810590 - protein, 417 aa, Homo sapiens; identical to SEQ ID NO: 810587

SEQ ID NO: 810591 - protein, 436 aa, Homo sapiens
MLALLVLVTVALASAHHGGEHFEGEKVFRVNVEDENHINIIRELASTTQIDFWKPDSVTQIKPHSTVDFRVKAEDTVTVENVLKQNELQYKVLISNLRNVVEAQFDSRVRATGHSYEKYNKWETIEAWTQQVATENPALISRSVIGTTFEGRAIYLLKVGKAGQNKPAIFMDCGFHAREWISPAFCQWFVREAVRTYGREIQVTELLDKLDFYVLPVLNIDGYIYTWTKSRFWRKTRSTHTGSSCIGTDPNRNFDAGWCEIGASRNPCDETYCGPAAESEKETKALADFIRNKLSSIKAYLTIHSYSQMMIYPYSYAYKLGENNAELNALAKATVKELASLHGTKYTYGPGATTICESWLQNCAKNHVPKKPTKDPAAGGSDDWAYDQGIRYSFTFELRDTGRYGFLLPESQIRATCEETFLAIKYVASYVLEHLY

SEQ ID NO: 810592 - protein, 109 aa, Homo sapiens
  misc_feature (15)..(15): Xaa can be any naturally occurring amino acid
PTHLLPSLPAPFAPXIAYHNALAKATVKELASLHGTKYTYGPGATTIYPAAGGSDDWAYDQGIRYSFTFELRDTGRYGFLLPESQIRATCEETFLAIKYVASYVLEHLY

SEQ ID NO: 810593 - protein, 108 aa, Homo sapiens
MRPTHYTWSDTMLALLVLVTVALASAHHGGEHFEGEKVFRVNVEDENHINIIRELASTTQIDFWKPDSVTQIKPHSTVDFRVKAEDTVTVENVLKQNELQYKSCCWGL

SEQ ID NO: 810594 - protein, 492 aa, Homo sapiens
MWRGLWTLAAQAARGPRRLCTRRSSGAPAPGSGATIFALSSGQGRCGIAVIRTSGPASGHALRILTAPRDLPLARHASLRLLSDPRSGEPLDRALVLWFPGPQSFTGEDCVEFHVHGGPAVVSGVLQALGSVPGLRPAEAGEFTRRAFANGKLNLTEVEGLADLIHAETEAQRRQALRQLDGELGHLCRGWAETLTKALAHVEAYIDFGEDDNLEEGVLEQADIEVRALQVALGAHLRDARRGQRLRSGAHVVVTGPPNAGKSSLVNLLSRKPVSIVSPEPGTTRDVLETPVDLAGFPVLLSDTAGLREGVGPVEQEGVRRARERLEQADLILAMLDASDLASPSSCNFLATVVASVGAQSPSDSSQRLLLVLNKSDLLSPEGPGPGPDLPPHLLLSCLTGEGLDGLLEALRKELAAVCGDPSTDPPLLTRARHQHHLQGCLDALGHYKQSKDLALAAEALRVARGHLTRLTGGGGTEEILDIIFQDFCVGK

SEQ ID NO: 810595 - protein, 72 aa, Homo sapiens
  misc_feature (2)..(2): Xaa can be any naturally occurring amino acid
  misc_feature (9)..(9): Xaa can be any naturally occurring amino acid
  misc_feature (31)..(31): Xaa can be any naturally occurring amino acid
  misc_feature (51)..(51): Xaa can be any naturally occurring amino acid
GXSPRNAAXRASEGRCVVTSPPPGRPPGRAXYDRGAVSMVNFPQEAFPSCXSRMKGFPKPWNLQGHFPQFVY

SEQ ID NO: 810596 - protein, 471 aa, Homo sapiens [sequence omitted]

SEQ ID NO: 810597 - protein, 471 aa, Homo sapiens [sequence omitted]

SEQ ID NO: 810598 - protein, 471 aa, Homo sapiens [sequence omitted]

SEQ ID NO: 810599 - protein, 482 aa, Homo sapiens
MRKGIRSRGNGRRERWGGGENLESSGKSKLCTRRSSGAPAPGSGATIFALSSGQGRCGIAVIRTSGPASGHALRILTAPRDLPLARHASLRLLSDPRSGEPLDRALVLWFPGPQSFTGEDCVEFHVHGGPAVVSGVLQALGSVPGLRPAEAGEFTRRAFANGKLNLTEVEGLADLIHAETEAQRRQALRQLDGELGHLCRGWAETLTKALAHVEAYIDFGEDDNLEEGVLEQADIEVRALQVALGAHLRDARRGQRLRSGAHVVVTGPPNAGKSSLVNLLSRKPVSIVSPEPGTTRDVLETPVDLAGFPVLLSDTAGLREGVGPVEQEGVRRARESCNFLATVVASVGAQSPSDSSQRLLLVLNKSDLLSPEGPGPGPDLPPHLLLSCLTGEGLDGLLEALRKELAAVCGDPSTDPPLLTRARHQHHLQGCLDALGHYKQSKDLALAAEALRVARGHLTRLTGGGGTEEILDIIFQDFCVGK

SEQ ID NO: 810600 - protein, 487 aa, Homo sapiens
CPHPCFLLVPASEPQFPHLQTPDPGDAVWNVRWALCTRRSSGAPAPGSGATIFALSSGQGRCGIAVIRTSGPASGHALRILTAPRDLPLARHASLRLLSDPRSGEPLDRALVLWFPGPQSFTGEDCVEFHVHGGPAVVSGVLQALGSVPGLRPAEAGEFTRRAFANGKLNLTEVEGLADLIHAETEAQRRQALRQLDGELGHLCRGWAETLTKALAHVEAYIDFGEDDNLEEGVLEQADIEVRALQVALGAHLRDARRGQRLRSGAHVVVTGPPNAGKSSLVNLLSRKPVSIVSPEPGTTRDVLETPVDLAGFPVLLSDTAGLREGVGPVEQEGVRRARESCNFLATVVASVGAQSPSDSSQRLLLVLNKSDLLSPEGPGPGPDLPPHLLLSCLTGEGLDGLLEALRKELAAVCGDPSTDPPLLTRARHQHHLQGCLDALGHYKQSKDLALAAEALRVARGHLTRLTGGGGTEEILDIIFQDFCVGK

SEQ ID NO: 810601 - protein, 471 aa, Homo sapiens [sequence omitted]

SEQ ID NO: 810602 - protein, 366 aa, Homo sapiens
MWRGLWTLAAQAARGPRRLCTRRSSGAPAPGSGATIFALSSGQGRCGIAVIRTSGPASGHALRILTAPRDLPLARHASLRLLSDPRSGEPLDRALVLWFPGPQSFTGEDCVEFHVHGGPAVVSGVLQALGSVPGLRPAEAGEFTRRAFANGKLNLTEVEGLADLIHAETEAQRRQALRQLDGELGHLCRGWAETLTKALAHVEAYIDFGEDDNLEEGVLEQADIEVRALQVALGAHLRDARRGQRLRSGAHVVVTGPPNAGKSSLVNLLSRKPVSIVSPEPGTTRDVLETPVDLAGFPVLLSDTAGLREGVGPVEQEGVRRAREREQLTHAGMVMVLTALLSGLLARRSLGAKSVRAGSRVTVTGR

SEQ ID NO: 810603 - protein, 158 aa, Homo sapiens [sequence omitted]

SEQ ID NO: 810604 - protein, 237 aa, Homo sapiens
SLVSTLSSSSDPPPGRKPVSIVSPEPGTTRDVLETPVDLAGFPVLLSDTAGLREGVGPVEQEGVRRARERLEQADLILAMLDASDLASPSSCNFLATVVASVGAQSPSDSSQRLLLVLNKSDLLSPEGPGPGPDLPPHLLLSCLTGEGLDGLLEALRKELAAVCGDPSTDPPLLTRARHQHHLQGCLDALGHYKQSKDLALAAEALRVARGHLTRLTGGGGTEEILDIIFQDFCVGK

SEQ ID NO: 810605 - protein, 243 aa, Homo sapiens
MRKGIRSRGNGRRERWGGGENLESSGKSKLCTRRSSGAPAPGSGATIFALSSGQGRCGIAVIRTSGPASGHALRILTAPRDLPLARHASLRLLSDPRSGEPLDRALVLWFPGPQSFTGEDCVEFHVHGGPAVVSGVLQALGSVPGLRPAEAGEFTRRAFANGKLNLTEVEGLADLIHAETEAQRRQALRQLDGELGHLCRGWAETLTKASPPFVHSLPQRPHLCNPCMRPPLNPAFIRCVEML

SEQ ID NO: 810606 - protein, 947 aa, Homo sapiens
MCVDSLVRICSGLSYGRIRNIKSLSDIQIVQVACGYYHSLALSKASEVFCWGQNKYGQLGLGTDCKKQTSPQLLKSLLGIPFMQVAAGGAHSFVLTLSGAIFGWGRNKFGQLGLNDENDRYVPNLLKSLRSQKIVYICCGEDHTAALTKEGGVFTFGAGGYGQLGHNSTSHEINPRKVFELMGSIVTEIACGRQHTSAFVPSSGRIYSFGLGGNGQLGTGSTSNRKSPFTVKGNWYPYNGQCLPDIDSEEYFCVKRIFSGGDQSFSHYSSPQNCGPPDDFRCPNPTKQIWTVNEALIQKWLSYPSGRFPVEIANEIDGTFSSSGCLNGSFLAVSNDDHYRTGTRFSGVDMNAARLLFHKLIQPDHPQISQQVAASLEKNLIPKLTSSLPDVEALRFYLTLPECPLMSDSNNFTTIAIPFGTALVNLEKAPLKVLENWWSVLEPPLFLKIVELFKEVVVHLLKLYKIGIPPSERRIFNSFLHTALKVLEILHRVNEKMGQIIQYDKFYIHEVQELIDIRNDYINWVQQQAYGMDVNHGLTELADIPVTICTYPFVFDAQAKTTLLQTDAVLQMQMAIDQAHRQNVSSLFLPVIESVNPCLILVVRRENIVGDAMEVLRKTKNIDYKKPLKVIFVGEDAVDAGGVRKEFFLLIMRELLDPKYGMFRYYEDSRLIWFSDKTFEDSDLFHLIGVICGLAIYNCTIVDLHFPLALYKKLLKKKPSLDDLKELMPDVGRSMQQLLDYPEDDIEETFCLNFTITVENFGATEVKELVLNGADTAVNKQNRQEFVDAYVDYIFNKSVASLFDAFHAGFHKVCGGKVLLLFQPNELQAMVIGNTNYDWKELEKNTEYKGEYWAEHPTIKIFWEVFHELPLEKKKQFLLFLTGSDRIPILGMKSLKLVIQSTGGGEEYLPVSHTCFNLLDLPKYTEKETLRSKLIQAIDHNEGFSLI

SEQ ID NO: 810607 - protein, 110 aa, Homo sapiens
MLCWGNASFGQLGLGGIDEEIVLEPRKSDFFINKRVRDVGCGLRHTVFVLDDGTVYTCGCNDLGQLGHEKSRKKPEFRSCFPGRSAMAPSRLTATSASQVQAILLPQPPE

SEQ ID NO: 810608 - protein, 1049 aa, Homo sapiens
MLCWGNASFGQLGLGGIDEEIVLEPRKSDFFINKRVRDVGCGLRHTVFVLDDGTVYTCGCNDLGQLGHEKSRKKPEQVVALDAQNIVAVSCGEAHTLALNDKGQVYAWGLDSDGQLGLVGSEECIRVPRNIKSLSDIQIVQVACGYYHSLALSKASEVFCWGQNKYGQLGLGTDCKKQTSPQLLKSLLGIPFMQVAAGGAHSFVLTLSGAIFGWGRNKFGQLGLNDENDRYVPNLLKSLRSQKIVYICCGEDHTAALTKEGGVFTFGAGGYGQLGHNSTSHEINPRKVFELMGSIVTEIACGRQHTSAFVPSSGRIYSFGLGGNGQLGTGSTSNRKSPFTVKGNWYPYNGQCLPDIDSEEYFCVKRIFSGGDQSFSHYSSPQNCGPPDDFRCPNPTKQIWTVNEALIQKWLSYPSGRFPVEIANEIDGTFSSSGCLNGSFLAVSNDDHYRTGTRFSGVDMNAARLLFHKLIQPDHPQISQQVAASLEKNLIPKLTSSLPDVEALRFYLTLPECPLMSDSNNFTTIAIPFGTALVNLEKAPLKVLENWWSVLEPPLFLKIVELFKEVVVHLLKLYKIGIPPSERRIFNSFLHTALKVLEILHRVNEKMGQIIQYDKFYIHEVQELIDIRNDYINWVQQQAYGMLADIPVTICTYPFVFDAQAKTTLLQTDAVLQMQMAIDQAHRQNVSSLFLPVIESVNPCLILVVRRENIVGDAMEVLRKTKNIDYKKPLKVIFVGEDAVDAGGVRKEFFLLIMRELLDPKYGMFRYYEDSRLIWFSDKTFEDSDLFHLIGVICGLAIYNCTIVDLHFPLALYKKLLKKKPSLDDLKELMPDVGRSMQQLLDYPEDDIEETFCLNFTITVENFGATEVKELVLNGADTAVNKQNRQEFVDAYVDYIFNKSVASLFDAFHAGFHKVCGGKVLLLFQPNELQAMVIGNTNYDWKELEKNTEYKGEYWAEHPTIKIFWEVFHELPLEKKKQFLLFLTGSDRIPILGMKSLKLVIQSTGGGEEYLPVSHTCFNLLDLPKYTEKETLRSKLIQAIDHNEGFSLI

SEQ ID NO: 810609 - protein, 996 aa, Homo sapiens
MLCWGNASFGQLGLGGIDEEIVLEPRKSDFFINKRVRDVGCGLRHTVFVLDDGTVYTCGCNDLGQLGHEKSRKKPEILKVCQISRLYRLLVVTIIHLHFLKQVKSSVGDRINMANWVYGTDCKKQTSPQLLKSLLGIPFMQVAAGGAHSFVLTLSGAIFGWGRNKFGQLGLNDENDRYVPNLLKSLRSQKIVYICCGEDHTAALTKEGGVFTFGAGGYGQLGHNSTSHEINPRKVFELMGSIVTEIACGRQHTSAFVPSSGRIYSFGLGGNGQLGTGSTSNRKSPFTVKGNWYPYNGQCLPDIDSEEYFCVKRIFSGGDQSFSHYSSPQNCGPPDDFRCPNPTKQIWTVNEALIQKWLSYPSGRFPVEIANEIDGTFSSSGCLNGSFLAVSNDDHYRTGTRFSGVDMNAARLLFHKLIQPDHPQISQQVAASLEKNLIPKLTSSLPDVEALRFYLTLPECPLMSDSNNFTTIAIPFGTALVNLEKAPLKVLENWWSVLEPPLFLKIVELFKEVVVHLLKLYKIGIPPSERRIFNSFLHTALKVLEILHRVNEKMGQIIQYDKFYIHEVQELIDIRNDYINWVQQQAYGMLADIPVTICTYPFVFDAQAKTTLLQTDAVLQMQMAIDQAHRQNVSSLFLPVIESVNPCLILVVRRENIVGDAMEVLRKTKNIDYKKPLKVIFVGEDAVDAGGVRKEFFLLIMRELLDPKYGMFRYYEDSRLIWFSDKTFEDSDLFHLIGVICGLAIYNCTIVDLHFPLALYKKLLKKKPSLDDLKELMPDVGRSMQQLLDYPEDDIEETFCLNFTITVENFGATEVKELVLNGADTAVNKQNRQEFVDAYVDYIFNKSVASLFDAFHAGFHKVCGGKVLLLFQPNELQAMVIGNTNYDWKELEKNTEYKGEYWAEHPTIKIFWEVFHELPLEKKKQFLLFLTGSDRIPILGMKSLKLVIQSTGGGEEYLPVSHTCFNLLDLPKYTEKETLRSKLIQAIDHNEGFSLI

SEQ ID NO: 810610 - protein, 1049 aa, Homo sapiens; identical to SEQ ID NO: 810608

SEQ ID NO: 810611 - protein, 857 aa, Homo sapiens
MQVAAGGAHSFVLTLSGAIFGWGRNKFGQLGLNDENDRYVPNLLKSLRSQKIVYICCGEDHTAALTKEGGVFTFGAGGYGQLGHNSTSHEINPRKVFELMGSIVTEIACGRQHTSAFVPSSGRIYSFGLGGNGQLGTGSTSNRKSPFTVKGNWYPYNGQCLPDIDSEEYFCVKRIFSGGDQSFSHYSSPQNCGPPDDFRCPNPTKQIWTVNEALIQKWLSYPSGRFPVEIANEIDGTFSSSGCLNGSFLAVSNDDHYRTGTRFSGVDMNAARLLFHKLIQPDHPQISQQVAASLEKNLIPKLTSSLPDVEALRFYLTLPECPLMSDSNNFTTIAIPFGTALVNLEKAPLKVLENWWSVLEPPLFLKIVELFKEVVVHLLKLYKIGIPPSERRIFNSFLHTALKVLEILHRVNEKMGQIIQYDKFYIHEVQELIDIRNDYINWVQQQAYGMLADIPVTICTYPFVFDAQAKTTLLQTDAVLQMQMAIDQAHRQNVSSLFLPVIESVNPCLILVVRRENIVGDAMEVLRKTKNIDYKKPLKVIFVGEDAVDAGGVRKEFFLLIMRELLDPKYGMFRYYEDSRLIWFSDKTFEDSDLFHLIGVICGLAIYNCTIVDLHFPLALYKKLLKKKPSLDDLKELMPDVGRSMQQLLDYPEDDIEETFCLNFTITVENFGATEVKELVLNGADTAVNKQNRQEFVDAYVDYIFNKSVASLFDAFHAGFHKVCGGKVLLLFQPNELQAMVIGNTNYDWKELEKNTEYKGEYWAEHPTIKIFWEVFHELPLEKKKQFLLFLTGSDRIPILGMKSLKLVIQSTGGGEEYLPVSHTCFNLLDLPKYTEKETLRSKLIQAIDHNEGFSLI

SEQ ID NO: 810612 - protein, 1031 aa, Homo sapiens
MLCWGNASFGQLGLGGIDEEIVLEPRKSDFFINKRVRDVGCGLRHTVFVLDDGTVYTCGCNDLGQLGHEKSRKKPEQVVALDAQNIVAVSCGEAHTLALNDKGQVYAWGLDSDGQLGLVGSEECIRVPRNIKSLSDIQIVQVACGYYHSLALSKASEVFCWGQNKYGQLGLGTDCKKQTSPQLLKSLLGIPFMQVAAGGAHSFVLTLSGAIFGWGRNKFGQLGLNDENDRYVPNLLKSLRSQKIVYICCGEDHTAALTKEGGVFTFGAGGYGQLGHNSTSHEINPRKVFELMGSIVTEIACGRQHTSAFVPSSGRIYSFGLGGNGQLGTGSTSNRKSPFTVKGNWYPYNGQCLPDIDSEEYFCVNCGPPDDFRCPNPTKQIWTVNEALIQKWLSYPSGRFPVEIANEIDGTFSSSGCLNGSFLAVSNDDHYRTGTRFSGVDMNAARLLFHKLIQPDHPQISQQVAASLEKNLIPKLTSSLPDVEALRFYLTLPECPLMSDSNNFTTIAIPFGTALVNLEKAPLKVLENWWSVLEPPLFLKIVELFKEVVVHLLKLYKIGIPPSERRIFNSFLHTALKVLEILHRVNEKMGQIIQYDKFYIHEVQELIDIRNDYINWVQQQAYGMLADIPVTICTYPFVFDAQAKTTLLQTDAVLQMQMAIDQAHRQNVSSLFLPVIESVNPCLILVVRRENIVGDAMEVLRKTKNIDYKKPLKVIFVGEDAVDAGGVRKEFFLLIMRELLDPKYGMFRYYEDSRLIWFSDKTFEDSDLFHLIGVICGLAIYNCTIVDLHFPLALYKKLLKKKPSLDDLKELMPDVGRSMQQLLDYPEDDIEETFCLNFTITVENFGATEVKELVLNGADTAVNKQNRQEFVDAYVDYIFNKSVASLFDAFHAGFHKVCGGKVLLLFQPNELQAMVIGNTNYDWKELEKNTEYKGEYWAEHPTIKIFWEVFHELPLEKKKQFLLFLTGSDRIPILGMKSLKLVIQSTGGGEEYLPVSHTCFNLLDLPKYTEKETLRSKLIQAIDHNEGFSLI

SEQ ID NO: 810613 - protein, 649 aa, Homo sapiens
MLCWGNASFGQLGLGGIDEEIVLEPRKSDFFINKRVRDVGCGLRHTVFVLDDGTVYTCGCNDLGQLGHEKSRKKPEQVVALDAQNIVAVSCGEAHTLALNDKGQVYAWGLDSDGQLGLVGSEECIRVPRNIKSLSDIQIVQVACGYYHSLALSKASEVFCWGQNKYGQLGLGTDCKKQTSPQLLKSLLGIPFMQVAAGGAHSFVLTLSGAIFGWGRNKFGQLGLNDENDRYVPNLLKSLRSQKIVYICCGEDHTAALTKEGGVFTFGAGGYGQLGHNSTSHEINPRKVFELMGSIVTEIACGRQHTSAFVPSSGRIYSFGLGGNGQLGTGSTSNRKSPFTVKGNWYPYNGQCLPDIDSEEYFCVKRIFSGGDQSFSHYSSPQNCGPPDDFRCPNPTKQIWTVNEALIQKWLSYPSGRFPVEIANEIDGTFSSSGCLNGSFLAVSNDDHYRTGTRFSGVDMNAARLLFHKLIQPDHPQISQQVAASLEKNLIPKLTSSLPDVEALRFYLTLPECPLMSDSNNFTTIAIPFGTALVNLEKAPLKVLENWWSVLEPPLFLKIVELFKEVVVHLLKLYKIGIPPSERRIFNSFLHTALKVLEILHRVNEKMGQIIQYDKFYIHEVQELIDIRNDYINWVQQQAYGMVGFLCNL

SEQ ID NO: 810614 - protein, 380 aa, Homo sapiens
MLILVVRRENIEEMQNVSSLFLPVIESVNPCLILVVRRENIVGDAMEVLRKTKNIDYKKPLKVIFVGEDAVDAGGVRKEFFLLIMRELLDPKYGMFRYYEDSRLIWFSDKTFEDSDLFHLIGVICGLAIYNCTIVDLHFPLALYKKLLKKKPSLDDLKELMPDVGRSMQQLLDYPEDDIEETFCLNFTITVENFGATEVKELVLNGADTAVNKQNRQEFVDAYVDYIFNKSVASLFDAFHAGFHKVCGGKVLLLFQPNELQAMVIGNTNYDWKELEKNTEYKGEYWAEHPTIKIFWEVFHELPLEKKKQFLLFLTGSDRIPILGMKSLKLVIQSTGGGEEYLPVSHTCFNLLDLPKYTEKETLRSKLIQAIDHNEGFSLI

SEQ ID NO: 810615 - protein, 785 aa, Homo sapiens
MLCWGNASFGQLGLGGIDEEIVLEPRKSDFFINKRVRDVGCGLRHTVFVLDDGTVYTCGCNDLGQLGHEKSRKKPEQVVALDAQNIVAVSCGEAHTLALNDKGQVYAWGLDSDGQLGLVGSEECIRVPRNIKSLSDIQIVQVACGYYHSLALSKASEVFCWGQNKYGQLGLGTDCKKQTSPQLLKSLLGIPFMQVAAGGAHSFVLTLSGAIFGWGRNKFGQLGLNDENDRYVPNLLKSLRSQKIVYICCGEDHTAALTKEGGVFTFGAGGYGQLGHNSTSHEINPRKVFELMGSIVTEIACGRQHTSAFVPSSGRIYSFGLGGNGQLGTGSTSNRKSPFTVKGNWYPYNGQCLPDIDSEEYFCVKRIFSGGDQSFSHYSSPQNCGPPDDFRCPNPTKQIWTVNEALIQKWLSYPSGRFPVEIANEIDGTFSSSGCLNGSFLAVSNDDHYRTGTRFSGVDMNAARLLFHKLIQPDHPQISQQVAASLEKNLIPKLTSSLPDVEALRFYLTLPECPLMSDSNNFTTIAIPFGTALVNLEKAPLKVLENWWSVLEPPLFLKIVELFKEVVVHLLKLYKIGIPPSERRIFNSFLHTALKVLEILHRVNEKMGQIIQYDKFYIHEVQELIDIRNDYINWVQQQAYGMLADIPVTICTYPFVFDAQAKTTLLQTDAVLQMQMAIDQAHRQNVSSLFLPVIESVNPCLILVVRRENIVGDAMEVLRKTKNIDYKKPLKVIFVGEDAVDAGGVRKEFFLLIMRELLDPKYGMFRYYEDSRLIWFSDKVKCPTI

SEQ ID NO: 810616 - protein, 236 aa, Homo sapiens [sequence omitted]

SEQ ID NO: 810617 - protein, 110 aa, Homo sapiens
MAIDQAHRQNVSSLFLPVIESVNPCLILVVRRENIVGDAMEVLRKAKNIDYKKPLKVIFVGEDAVDAGGVRKEFFLLIMRELLDPKYGMFRYYEDSRLIWFSDKVKCPTI

SEQ ID NO: 810618 - protein, 572 aa, Homo sapiens
MEPEAPRRRHTHQRGYLLTRNPHLNKDLAFTLEERQQLNIHGLLPPSFNSQEIQVLRVVKNFEHLNSDFDRYLLLMDLQDRNEKLFYRVLTSDIEKFMPIVYTPTVGLACQQYSLVFRKPRGLFITIHDRGHIASVLNAWPEDVIKAIVVTDGERILGLGDLGCNGMGIPVGKLALYTACGGMNPQECLPVILDVGTENEELLKDPLYIGLRQRRVRGSEYDDFLDEFMEAVSSKYGMNCLIQFEDFANVNAFRLLNKYRNQYCTFNDDIQGTASVAVAGLLAALRITKNKLSDQTILFQGAGEAALGIAHLIVMALEKEGLPKEKAIKKIWLVDSKGLIVKGRASLTQEKEKFAHEHEEMKNLEAIVQEIKPTALIGVAAIGGAFSEQILKDMAAFNERPIIFALSNPTSKAECSAEQCYKITKGRAIFASGSPFDPVTLPNGQTLYPGQGNNSYVFPGVALGVVACGLRQITDNIFLTTAEVIAQQVSDKHLEEGRLYPPLNTIRDVSLKIAEKIVKDAYQEKTATVYPEPQNKEAFVRSQMYSTDYDQILPDCYSWPEEVQKIQTKVDQ

SEQ ID NO: 810619 - protein, 572 aa, Homo sapiens; identical to SEQ ID NO: 810618

SEQ ID NO: 810620 - protein, 106 aa, Homo sapiens
YPYLRTRRRKQSFQAYSVIAQQVSDKHLEEGRLYPPLNTIRDVSLKIAEKIVKDAYQEKTATVYPEPQNKEAFVRSQMYSTDYDQILPDCYSWPEEVQKIQTKVDQ

SEQ ID NO: 810621 - protein, 110 aa, Homo sapiens
LAARAKILNTTKKLINELEFNVIAQQVSDKHLEEGRLYPPLNTIRDVSLKIAEKIVKDAYQEKTATVYPEPQNKEAFVRSQMYSTDYDQILPDCYSWPEEVQKIQTKVDQ

SEQ ID NO: 810622 - protein, 206 aa, Homo sapiens
EHLNSVNFDRYLLLMDLQDRNEKLFYRVLTSDIEKFMPIVYTPTVGLACQQYSLVFRKPRNLLSVHCMPGTLPSIENRGLFITIHDRGHIASVLNAWPEDVIKAIVVTDGERILGLGDLGCNGMGIPVGKLALYTACGGMNPQECLPVILDVGTENEELLKDPLYIGLRQRRVRGSEYDDFLDEFMEAVSSKVFNAKKSVLRFNRK

SEQ ID NO: 810623 - protein, 572 aa, Homo sapiens; identical to SEQ ID NO: 810618

SEQ ID NO: 810624 - protein, 572 aa, Homo sapiens; identical to SEQ ID NO: 810618

SEQ ID NO: 810625 - protein, 584 aa, Homo sapiens
MEPEAPRRRHTHQRGYLLTRNPHLNKDLAFTLEERQQLNIHGLLPPSFNSQEIQVLRVVKNFEHLNSDFDRYLLLMDLQDRNEKLFYRVLTSDIEKFMPIVYTPTVGLACQQYSLVFRKPRGLFITIHDRGHIASVLNAWPEDVIKAIVVTDGERILGLGDLGCNGMGIPVGKLALYTACGGMNPQECLPVILDVGTENEELLKDPLYIGLRQRRVRGSEYDDFLDEFMEAVSSKVFNAKKSVLLFQYGMNCLIQFEDFANVNAFRLLNKYRNQYCTFNDDIQGTASVAVAGLLAALRITKNKLSDQTILFQGAGEAALGIAHLIVMALEKEGLPKEKAIKKIWLVDSKGLIVKGRASLTQEKEKFAHEHEEMKNLEAIVQEIKPTALIGVAAIGGAFSEQILKDMAAFNERPIIFALSNPTSKAECSAEQCYKITKGRAIFASGSPFDPVTLPNGQTLYPGQGNNSYVFPGVALGVVACGLRQITDNIFLTTAEVIAQQVSDKHLEEGRLYPPLNTIRDVSLKIAEKIVKDAYQEKTATVYPEPQNKEAFVRSQMYSTDYDQILPDCYSWPEEVQKIQTKVDQ

SEQ ID NO: 810626 - protein, 559 aa, Homo sapiens
MFVIHQFSLDVLMDLAFTLEERQQLNIHGLLPPSFNSQEIQVLRVVKNFEHLNSDFDRYLLLMDLQDRNEKLFYRVLTSDIEKFMPIVYTPTVGLACQQYSLVFRKPRGLFITIHDRGHIASVLNAWPEDVIKAIVVTDGERILGLGDLGCNGMGIPVGKLALYTACGGMNPQECLPVILDVGTENEELLKDPLYIGLRQRRVRGSEYDDFLDEFMEAVSSKYGMNCLIQFEDFANVNAFRLLNKYRNQYCTFNDDIQGTASVAVAGLLAALRITKNKLSDQTILFQGAGEAALGIAHLIVMALEKEGLPKEKAIKKIWLVDSKGLIVKGRASLTQEKEKFAHEHEEMKNLEAIVQEIKPTALIGVAAIGGAFSEQILKDMAAFNERPIIFALSNPTSKAECSAEQCYKITKGRAIFASGSPFDPVTLPNGQTLYPGQGNNSYVFPGVALGVVACGLRQITDNIFLTTAEVIAQQVSDKHLEEGRLYPPLNTIRDVSLKIAEKIVKDAYQEKTATVYPEPQNKEAFVRSQMYSTDYDQILPDCYSWPEEVQKIQTKVDQ

SEQ ID NO: 810627 - protein, 514 aa, Homo sapiens
MEPEAPRRRHTHQRGYLLTRNPHLNKDLAFTLEERQQLNIHGLLPPSFNSQEIQVLRVVKNFEHLNSDFDRYLLLMDLQDRNEKLFYRVLTSDIEKFMPIVYTPTVGLACQQYSLVFRKPRGLFITIHDRGHIASVLNAWPEDVIKAIVVTDGERILGLGDLGCNGMGIPVGKLALYTACGGMNPQECLPVILDVGTENEELLKDPLYIGLRQRRVRGSEYDDFLDEFMEAVSSKYGMNCLIQFEDFANVNAFRLLNKYRNQYCTFNDDIQGTASVAVAGLLAALRITKNKLSDQTILFQGAGEAALGIAHLIVMALEKEGLPKEKAIKKIWLVDSKGLIVKGRASLTQEKEKFAHEHEEMKNLEAIVQEIKPTALIGVAAIGGAFSEQILKDMAAFNERPIIFALSNPTSKAECSAEQCYKITKVIAQQVSDKHLEEGRLYPPLNTIRDVSLKIAEKIVKDAYQEKTATVYPEPQNKEAFVRSQMYSTDYDQILPDCYSWPEEVQKIQTKVDQ

SEQ ID NO: 810628 - protein, 151 aa, Homo sapiens
WHNVCGQRIPVIYGIPRVTLPNGQTLYPGQGNNSYVFPGVALGVVACGLRQITDNIFLTTAEVIAQQVSDKHLEEGRLYPPLNTIRDVSLKIAEKIVKDAYQEKTATVYPEPQNKEAFVRSQMYSTDYDQILPDCYSWPEEVQKIQTKVDQ

SEQ ID NO: 810629 - protein, 106 aa, Homo sapiens
FFSIVPAPERKRLPGSHVIAQQVSDKHLEEGRLYPPLNTIRDVSLKIAEKIVKDAYQEKTATVYPEPQNKEAFVRSQMYSTDYDQILPDCYSWPEEVQKIQTKVDQ

SEQ ID NO: 810630 - protein, 110 aa, Homo sapiens; identical to SEQ ID NO: 810621

SEQ ID NO: 810631 - protein, 572 aa, Homo sapiens; identical to SEQ ID NO: 810618

SEQ ID NO: 810632 - protein, 572 aa, Homo sapiens; identical to SEQ ID NO: 810618

SEQ ID NO: 810633 - protein, 457 aa, Homo sapiens
MEPEAPRRRHTHQRGYLLTRNPHLNKDLAFTLEERQQLNIHGLLPPSFNSQEIQVLRVVKNFEHLNSDFDRYLLLMDLQDRNEKLFYRVLTSDIEKFMPIVYTPTVGLACQQYSLVFRKPRGLFITIHDRGHIASVLNAWPEDVIKAIVVTDGERILGLGDLGCNGMGIPVGKLALYTACGGMNPQECLPVILDVGTENEELLKDPLYIGLRQRRVRGSEYDDFLDEFMEAVSSKYGMNCLIQFEDFANVNAFRLLNKYRNQYCTFNDDIQGTASVAVAGLLAALRITKNKLSDQTILFQGAGEAALGIAHLIVMALEKEGLPKEKAIKKIWLVDSKGLIVKGRASLTQEKEKFAHEHEEMKNLEAIVQEIKPTALIGVAAIGGAFSEQILKDMAAFNERPIIFALSNPTSKAECSAEQCYKITKGRAIFASGSPFDPASIHTATTPRATPRYTVRR

SEQ ID NO: 810634 - protein, 228 aa, Homo sapiens
MPTNCAAAGCATTYNKHINISFHRFPLDPKRRKEWVRLVRRKNFVPGKHTFLCSKHFEASCFDLTGQTRRLKMDAVPTIFDFCTHIKSMKLKSRNLLKKNNSCSPAGPSNLKSNISSQQVLLEHSYAFRNPMEAKKRIIKLEKEIASLRRKMKTCLQKERRATRRWIKATCLVKNLEANSVLPKGTSEHMLPTALSSLPLEDFKILEQDQQDKTLLSLNLKQTKSTFI

SEQ ID NO: 810635 - protein, 228 aa, Homo sapiens; identical to SEQ ID NO: 810634

SEQ ID NO: 810636 - protein, 779 aa, Homo sapiens
MAPGVQGSLLHVPWRGGGQLDLLGVSLASLKKQVDGERRERLLQEAQRLSDTLHSLRSGEEEAAQPLGAPEEEPTDGQDASSHCLWVDEFAPRHYTELLSDDFTNRCLLKWLKLWDLVVFGHERPSRKPRPSVEPARVSKEATAPGKWKSHEQVLEEMLEAGLDPSQRPKQKVALLCGPPGLGKTTLAHVIARHAGYSVVEMNASDDRSPEVFRTRIEAATQMESVLGAGGKPNCLVIDEIDGAPVAAINVLLSILNRKGPQEVGPQGPAVPSGGGRRRRAEGGLLMRPIICICNDQFAPSLRQLKQQAFLLHFPPTLPSRLVQRLQEVSLRQGMRADPGVLAALCEKTDNDIRACINTLQFLYSRGQRELSVRDVQATRVGLKDQRRGLFSVWQEVFQLPRAQRRRVGQDPALPADTLLLGDGDAGSLTSASQRFYRVLHAAASAGEHEKVVQGLFDNFLRLRLRDSSLGAVCVALDWLAFDDLLAGAAHHSQSFQLLRYPPFLPVAFHVLFASSHTPRITFPSSQQEAQNRMSQMRNLIQTLVSGIAPATRSRATPQALLLDALCLLLDILAPKLRPVSTQLYSTREKQQLASLVGTMLAYSLTYRQERTPDGQYIYRLEPNVEELCRFPELPARKPLTYQTKQLIAREIEVEKMRRAEASARVENSPQVDGSPPGLEGLLGGIGEKGVHRPAPRNHEQRLEHIMRRAAREEQPEKDFFGRVVVRSTAVPSAGDTAPEQDSVERRMGTAVGRSEVWFRFNEGVSNAVRRSLYIRDLL

SEQ ID NO: 810637 - protein, 557 aa, Homo sapiens
MESVLGAGGKPNCLVIDEIDGAPVAAINVLLSILNRKGPQEVGPQGPAVPSGGGRRRRAEGGLLMRPIICICNDQFAPSLRQLKQQAFLLHFPPTLPSRLVQRLQEVSLRQGMRADPGVLAALCEKTDNDIRACINTLQFLYSRGQRELSVRDVQATRVGLKDQRRGLFSVWQEVFQLPRAQRRRVGQDPALPADTLLLGDGDAGSLTSASQRFYRVLHAAASAGEHEKVVQGLFDNFLRLRLRDSSLGAVCVALDWLAFDDLLAGAAHHSQSFQLLRYPPFLPVAFHVLFASSHTPRITFPSSQQEAQNRMSQMRNLIQTLVSGIAPATRSRATPQALLLDALCLLLDILAPKLRPVSTQLYSTREKQQLASLVGTMLAYSLTYRQERTPDGQYIYRLEPNVEELCRFPELPARKPLTYQTKQLIAREIEVEKMRRAEASARVENSPQVDGSPPGLEGLLGGIGEKGVHRPAPRNHEQRLEHIMRRAAREEQPEKDFFGRVVVRSTAVPSAGDTAPEQDSVERRMGTAVGRSEVWFRFNEGVSNAVRRSLYIRDLL

SEQ ID NO: 810638 - protein, 779 aa, Homo sapiens; identical to SEQ ID NO: 810636

SEQ ID NO: 810639 - protein, 705 aa, Homo sapiens
MAPGVQGSLLHVPWRGGGQLDLLGVSLASLKKQVDGERRERLLQEAQRLSDTLHSLRSGEEEAAQPLGAPEEEPTDGQDASSHCLWVDEFAPRHYTELLSDDFTNRCLLKWLKLWDLVVFGHERPSRKPRPSVEPARVSKEATAPGKWKSHEQVLEEMLEAGLDPSQRPKQKAAINVLLSILNRKGPQEVGPQGPAVPSGGGRRRRAEGGLLMRPIICICNDQFAPSLRQLKQQAFLLHFPPTLPSRLVQRLQEVSLRQGMRADPGVLAALCEKTDNDIRACINTLQFLYSRGQRELSVRDVQATRVGLKDQRRGLFSVWQEVFQLPRAQRRRVGQDPALPADTLLLGDGDAGSLTSASQRFYRVLHAAASAGEHEKVVQGLFDNFLRLRLRDSSLGAVCVALDWLAFDDLLAGAAHHSQSFQLLRYPPFLPVAFHVLFASSHTPRITFPSSQQEAQNRMSQMRNLIQTLVSGIAPATRSRATPQALLLDALCLLLDILAPKLRPVSTQLYSTREKQQLASLVGTMLAYSLTYRQERTPDGQYIYRLEPNVEELCRFPELPARKPLTYQTKQLIAREIEVEKMRRAEASARVENSPQVDGSPPGLEGLLGGIGEKGVHRPAPRNHEQRLEHIMRRAAREEQPEKDFFGRVVVRSTAVPSAGDTAPEQDSVERRMGTAVGRSEVWFRFNEGVSNAVRRSLYIRDLL

SEQ ID NO: 810640 - protein, 557 aa, Homo sapiens; identical to SEQ ID NO: 810637

SEQ ID NO: 810641 - protein, 350 aa, Homo sapiens
MESVLGAGGKPNCLVIDEIDGAPVAAINVLLSILNRKGPQEVGPQGPAVPSGGGRRRRAEGGLLMRPIICICNDQFAPSLRQLKQQAFLLHFPPTLPSRLVQRLQEVSLRQGMRADPGVLAALCEKTDNDIRACINTLQVLDILAPKLRPVSTQLYSTREKQQLASLVGTMLAYSLTYRQERTPDGQYIYRLEPNVEELCRFPELPARKPLTYQTKQLIAREIEVEKMRRAEASARVENSPQVDGSPPGLEGLLGGIGEKGVHRPAPRNHEQRLEHIMRRAAREEQPEKDFFGRVVVRSTAVPSAGDTAPEQDSVERRMGTAVGRSEVWFRFNEGVSNAVRRSLYIRDLL

SEQ ID NO: 810642 - protein, 557 aa, Homo sapiens; identical to SEQ ID NO: 810637

SEQ ID NO: 810643 - protein, 469 aa, Homo sapiens
MESVLGAGGKPNCLVIDEIDGAPVAAINVLLSILNRKGPQEVGPQGPAVPSGGGRRRRAEGGLLMRPIICICNDQFAPSLRQLKQQAFLLHFPPTLPSRLVQRLQEVSLRQGMRADPGVLAALCEKTDNDIRACINTLQFLYSRGQRELSVRDVQATRVGLKDQRRGLFSVWQEVFQLPRAQRRRVGQDPALPADTLLLGDGDAGSLTSASQRFYRVLHAAASAGEHEKVVQGLFDNFLRLRLRDSSLGAVCVALDWLAFDDLLAGAAHHSQSFQLLRYPPFLPVAFHVLFASSHTPRITFPSSQQEAQNRMSQMRNLIQTLVSGIAPATRSRATPQALLLDALCLLLDILAPKLRPVSTQLYSTREKQQLASLVGTMLAYSLTYRQERTPDGQYIYRLEPNVEELCRFPELPARKPLTYQTKQLIAREIEVEKMRRAEASARVENSPQWLEPQGRSRWGMGKGATARK

SEQ ID NO: 810644 - protein, 408 aa, Homo sapiens
MESVLGAGGKPNCLVIDEIDGAPVAAINVLLSILNRKGPQEVGPQGPAVPSGGGRRRRAEGGLLMRPIICICNDQFAPSLRQLKQQAFLLHFPPTLPSRLVQRLQEVSLRQGMRADPGVLAALCEKTDNDIRACINTLQFLYSRGQRELSVRDVQATRVGLKDQRRGLFSVWQEVFQLPRAQRRRVGQDPALPADTLLLGDGDAGSLTSASQRFYRVLHAAASAGEHEKVVQGLFDNFLRLRLRDSSLGAVCVALDWLAFDDLLAGAAHHSQSFQLLRYPPFLPVAFHVLFASSHTPRITFPSSQQEAQNRMSQMRNLIQTLVSGIAPATRSRATPQALLLDALCLLLDILAPKLRPQPCGPAGDTAPEQDSVERRMGTAVGRSEVWFRFNEGVSNAVRRSLYIRDLL

SEQ ID NO: 810645 - protein, 500 aa, Homo sapiens
MESVLGAGGKPNCLVIDEIDGAPVAAINVLLSILNRKGPQEVGPQGPAVPSGGGRRRRAEGGLLMRPIICICNDQFAPSLRQLKQQAFLLHFPPTLPSRLVQRLQEVSLRQGMRADPGVLAALCEKTDNDIRACINTLQFLYSRGQRELSVRDVQATRVGLKDQRRGLFSVWQEVFQLPRAQRRRVGQDPALPADTLLLGDGDAGSLTSASQRFYRVLHAAASAGEHEKVVQGLFDNFLRLRLRDSSLGAVCVALDWLAFDDLLAGAAHHSQSFQLLRYPPFLPVAFHVLFASSHTPRITFPSSQQEAQNRMSQMRNLIQTLVSGIAPATRSRATPQALLLDALCLLLDILAPKLRPVSTQLYSTREKQQLASLVGTMLAYSLTYRQERTPDGQYIYRLEPNVEELCPQAPHLPDKNHTALTAILAPVEACWERDFIKGAMSGRLWSKAIFAGYKRGLRIQREHTALLQIEGVYARDETEFYLGKRCAYVYKAKNITVPP

SEQ ID NO: 810646 - protein, 249 aa, Homo sapiens
MESVLGAGGKPNCLVIDEIDGAPVAAINVLLSILNRKGPQEVGPQGPAVPSGGGRRRRAEGGLLMRPIICICNDQFAPSLRQLKQQAFLLHFPPTLPSRLVQRLQEVSLRQGMRADPGVLAALCEKTDNDIRACINTLQFLYSRGQRELSVRDVQATRVGLKDQRRGLFSVWQEVFQLPRAQRRRVGQDPALPADTLLLGDGDAGSLTSASQRFYRVLHAAASAGEHEKVVQLQRRAAQPVHQGLALVL

SEQ ID NO: 810647 - protein, 173 aa, Homo sapiens
PSGVPLFTAGRPPRTFEEALARGDAASSPAPAASVGSSQGGARKRQVDADLQPAGSLPHGRLAALPQGLRSGREAEEASGSLHVSPPAPRIKRPRLQVVKRLNFRSEEMEEPPLPTPRRRTSPRRRALRTSQSFGATGVWLGHGRPIPSVQWDSDGAHPVPWMRPGGWGGFHG

SEQ ID NO: 810648 - protein, 296 aa, Homo sapiens
PGTVRSFGTTVWGWRPAGEAAGLDWPERDPGSQNRPRRRPRGRTAGRASMPRLLHPALPLLLGATLTFRALRRALCRLPLPVHVRADPLRTWRWHNLLVSFAHSIVSGIWALLCVWQTPDMLVEIETAWSLSGYLLVCFSAGYFIHDTVDIVASGQTRASWEYLVHHVMAMGAFFSGIFWSSFVGGGVLTLLVEVSNIFLTIRMMMKISNAQDHLLYRVNKYVNLVMYFLFRLAPQAYLTHFFLRYVNQRTLGTFLLGILLMLDVMIIIYFSRLLRSDFCPEHVPKKQHKDKFLTE

SEQ ID NO: 810649 - protein, 247 aa, Homo sapiens
MPRLLHPALPLLLGATLTFRALRRALCRLPLPVHVRADPLRTWRWHNLLVSFAHSIVSGIWALLCVWQTPDMLVEIETAWSLSGYLLVCFSAGYFIHDTVDIVASGQTRASWEYLVHHVMAMGAFFSGIFWSSFVGGGVLTLLVEVSNIFLTIRMMMKISNAQDHLLYRVNKYVNLVMYFLFRLAPQAYLTHFFLRYVNQRTLGTFLLGILLMLDVMIIIYFSRLLRSDFCPEHVPKKQHKDKFLTE

SEQ ID NO: 810650 - protein, 200 aa, Homo sapiens
MGYSAVPKCPPRGRGRDSVWQTPDMLVEIETAWSLSGYLLVCFSAGYFIHDTVDIVASGQTRASWEYLVHHVMAMGAFFSGIFWSSFVGGGVLTLLVEVSNIFLTIRMMMKISNAQDHLLYRVNKYVNLVMYFLFRLAPQAYLTHFFLRYVNQRTLGTFLLGILLMLDVMIIIYFSRLLRSDFCPEHVPKKQHKDKFLTE

SEQ ID NO: 810651 - protein, 140 aa, Homo sapiens
MGYSAVPKCPPRGRGRDSVWQTPDMLVEIETAWSLSGYLLVCFSAGYFIHDTVDIVASGQTRASWEYLVHHVMAMGAFFSGIFWSSFVGGGVLTLLVEVSNIFLTIRMMMKISNAQDHLLYRVNKGPWAPSCWVSCSCWT

SEQ ID NO: 810652 - protein, 198 aa, Homo sapiens
LGEAVFYRQRTTVWGWRPAGEAAGLDWPERDPGSQNRPRRRPRGRTAGRASMPRLLHPALPLLLGATLTFRALRRALCRLPLPVHVRADPLRTWRWHNLLVSFAHSIVSGIWALLCVWQTPDMLVEIETAWSLSGYLLVCFSAGYFIHDTVDIVASGQTRASWEYLVHHVMAMGAFFSGIFWSSFVGGGVLIGCWYLL

SEQ ID NO: 810653 - protein, 185 aa, Homo sapiens
LGEAVFYRQRTTVWGWRPAGEAAGLDWPERDPGSQNRPRRRPRGRTAGRASMPRLLHPALPLLLGATLTFRALRRALCRLPLPVHVRADPLRTWRWHNLLVSFAHSIVSGIWALLCVWQTPDMLVEIETAWSLSGYLLVCFSAGYFIHDTVDIVASGQTRASWEYLVHHVMHMDTRTGHGHRNGG

SEQ ID NO: 810654 - protein, 583 aa, Homo sapiens
MKLLHVFLLFLCFHLRFCKVTYTSQEDLVEKKCLAKKYTHLSCDKVFCQPWQRCIEGTCVCKLPYQCPKNGTAVCATNRRSFPTYCQQKSLECLHPGTKFLNNGTCTAEGKFSVSLKHGNTDSEGIVEVKLVDQDKTMFICKSSWSMREANVACLDLGFQQGADTQRRFKLSDLSINSTECLHVHCRGLETSLAECTFTKRRTMGYQDFADVVCYTQKADSPMDDFFQCVNGKYISQMKACDGINDCGDQSDELCCKACQGKGFHCKSGVCIPSQYQCNGEVDCITGEDEVGCAGFASVAQEETEILTADMDAERRRIKSLLPKLSCGVKNRMHIRRKRIVGGKRAQLGDLPWQVAIKDASGITCGGIYIGGCWILTAAHCLRASKTHRYQIWTTVVDWIHPDLKRIVIEYVDRIIFHENYNAGTYQNDIALIEMKKDGNKKDCELPRSIPACVPWSPYLFQPNDTCIVSGWGREKDNERVFSLQWGEVKLISNCSKFYGNRFYEKEMECAGTYDGSIDACKGDSGGPLVCMDANNVTYVWGVVSWGENCGKPEFPGVYTKVANYFDWISYHVGRPFISQYNV

SEQ ID NO: 810655 - protein, 161 aa, Homo sapiens
MKLLHVFLLFLCFHLRFCKVTYTSQEDLVEKKCLAKKYTHLSCDKVFCQPWQRCIEGTCVCKLPYQCPKNGTAVCATNRRSFPTYCQQKSLECLHPGTKFLNNGTCTAEGKFSVSLKHGNTDSEGIVEVKLVDQDKTMFICKSSWSMREANVACLDLGFQQ

SEQ ID NO: 810656 - protein, 224 aa, Homo sapiens
MKLLHVFLLFLCFHLRFCKVTYTSQEDLVEKKCLAKKYTHLSCDKVFCQPWQRCIEGTCVCKLPYQCPKNGTAVCATNRRSFPTYCQQKSLECLHPGTKFLNNGTCTAEGKFSVSLKHGNTDSEGIVEVKLVDQDKTMFICKSSWSMREANVACLDLGFQQGADTQRRFKLSDLSINSTECLHVHCRGLETSLAECTFTKRRTMGYQDFADVVCYTPESRFSNG

SEQ ID NO: 810657 - protein, 583 aa, Homo sapiens; identical to SEQ ID NO: 810654

SEQ ID NO: 810658 - protein, 256 aa, Homo sapiens
RYHYSRLAHKKETNVRKRAQLGDLPWQVAIKDASGITCGGIYIGGCWILTAAHCLRASKTHRYQIWTTVVDWIHPDLKRIVIEYVDRIIFHENYNAGTYQNDIALIEMKKDGNKKDCELPRSIPACVPWSPYLFQPNDTCIVSGWGREKDNERVFSLQWGEVKLISNCSKFYGNRFYEKEMECAGTYDGSIDACKGDSGGPLVCMDANNVTYVWGVVSWGENCGKPEFPGVYTKVANYFDWISYHVGRPFISQYNV

SEQ ID NO: 810659 - protein, 506 aa, Homo sapiens
MKLLHVFLLFLCFHLRFCKVTYTSQEDLVEKKCLAKKYTHLSCDKVFCQPWQRCIEGTCVCKLPYQCPKNGTAVCATNRRSFPTYCQQKSLECLHPGTKFLNNGTCTAEGKFSVSLKHGNTDSEGIVEVKLVDQDKTMFICKSSWSMREANVACLDLGFQQGADTQRRFKLSDLSINSTECLHVHCRGLETSLAECTFTKRRTMGYQDFADVVCYTQKADSPMDDFFQCVNGKYISQMKACDGINDCGDQSDELCCKACQGKGFHCKSGVCIPSQYQCNGEVDCITGEDEVGCAGFASVAQEETEILTADMDAERRRIKSLLPKLSCGVKNRMHIRRKRIVGGKRAQLGDLPWQVAIKDASGITCGGIYIGGCWILTAAHCLRASKTHRYQIWTTVVDWIHPDLKRIVIEYVDRIIFHENYNAGTYQNDIALIEMKKDGNKKDCELPRSIPACVPWSPYLFQPNDTCIVSGWGREKDNERVFSLQWGEVKLISNCSKLPANRSEPL

SEQ ID NO: 810660 - protein, 231 aa, Homo sapiens
EAPLTLSPGGITCGGIYIGGCWILTAAHCLRASKTHRYQIWTTVVDWIHPDLKRIVIEYVDRIIFHENYNAGTYQNDIALIEMKKDGNKKDCELPRSIPACVPWSPYLFQPNDTCIVSGWGREKDNERVFSLQWGEVKLISNCSKFYGNRFYEKEMECAGTYDGSIDACKGDSGGPLVCMDANNVTYVWGVVSWGENCGKPEFPGVYTKVANYFDWISYHVGRPFISQYNV

SEQ ID NO: 810661 - protein, 217 aa, Homo sapiens
ITRSIWGVNSDCYHCLTASKTHRYQIWTTVVDWIHPDLKRIVIEYVDRIIFHENYNAGTYQNDIALIEMKKDGNKKDCELPRSIPACVPWSPYLFQPNDTCIVSGWGREKDNERVFSLQWGEVKLISNCSKFYGNRFYEKEMECAGTYDGSIDACKGDSGGPLVCMDANNVTYVWGVVSWGENCGKPEFPGVYTKVANYFDWISYHVGRPFISQYNV

SEQ ID NO: 810662 - protein, 438 aa, Homo sapiens
MKLLHVFLLFLCFHLRFCKVTYTSQEDLVEKKCLAKKYTHLSCDKVFCQPWQRCIEGTCVCKLPYQCPKNGTAVCATNRRSFPTYCQQKSLECLHPGTKFLNNGTCTAEGKFSVSLKHGNTDSEGIVEVKLVDQDKTMFICKSSWSMREANVACLDLGFQQGADTQRRFKLSDLSINSTECLHVHCRGLETSLAECTFTKRRTMGYQDFADVVCYTQKADSPMDDFFQCVNGKYISQMKACDGINDCGDQSDELCCKACQGKGFHCKSGVCIPSQYQCNGEVDCITGEDEVGCAGFASVAQEETEILTADMDAERRRIKSLLPKLSCGVKNRMHIRRKRIVGGKRAQLGDLPWQVAIKDASGITCGGIYIGGCWILTAAHCLRASKTHRYQIWTTVVDWIHPDLKRIVIEYVDRIIFHENYNAGHLTMALIRAGRAKS

SEQ ID NO: 810663 - protein, 224 aa, Homo sapiens; identical to SEQ ID NO: 810656

SEQ ID NO: 810664 - protein, 104 aa, Homo sapiens
MLVNGENFGVSLNIFPSVAINKSSGAPRRVPAQGSIKDHTAGLRLTALSPEHQSPAESGDNTSSLQRGTSPPAATSLRLLLSSKDSLGFKCHFPCFRDPGVLIA

SEQ ID NO: 810665 - protein, 122 aa, Homo sapiens
RPPAQGGEPGSGAARRSRLPPIPAPGSRTGRPGDAGGLLACARLPCAPGARHDPCRPCPKCPLPSLRRNWRPATKPQSLPQFPHLYTGPITLVPALGRSQHVEVPCGAIPAIVLIFPELELP

SEQ ID NO: 810666 - protein, 125 aa, Homo sapiens
ERLPPGCSAGASAMSELPGDVRAFLREHPSLRLQTDARKVRCILTGHELPCRLPELQVYTRGKKYQRLVRASPAFDYAEFEPHIVPSTKNPHQLFCKLTLRHINKCPEHVLRHTQGRRYQRALCK

SEQ ID NO: 810667 - protein, 269 aa, Homo sapiens
ERLPPGCSAGASAMSELPGDVRAFLREHPSLRLQTDARKVRCILTGHELPCRLPELQVYTRGKKYQRLVRASPAFDYAEFEPHIVPSTKNPHQLFCKLTLRHINKCPEHVLRHTQGRRYQRALCKYEECQKQGVEYVPACLVHRRRRREDQMDGDGPRPREAFWEPTSSDEGGAASDDSMTDLYPPELFTRKDLGSTEDGDGTDDFLTDKEDEKAKPPREKATDESRRETTVYRGLVQKRGKKQLGSLKKKFKSHHRKPKSFSSCKQPG

SEQ ID NO: 810668 - protein, 324 aa, Homo sapiens
ERLPPGCSAGASAMSELPGDVRAFLREHPSLRLQTDARKVRCILTGHELPCRLPELQVYTRGKKYQRLVRASPAFDYAEFEPHIVPSTKNPWWSAAARGGPGQLGQPLRWTPPVLQPLLFQSWEPWDPGGRPGAGITCGPSGEASWHQLFCKLTLRHINKCPEHVLRHTQGRRYQRALCKYEECQKQGVEYVPACLVHRRRRREDQMDGDGPRPREAFWEPTSSDEGGAASDDSMTDLYPPELFTRKDLGSTEDGDGTDDFLTDKEDEKAKPPREKATDESRRETTVYRGLVQKRGKKQLGSLKKKFKSHHRKPKSFSSCKQPG

SEQ ID NO: 810669 - protein, 72 aa, Homo sapiens
QAMGYRMRTCQGQEDTFQKEALKGQAKKQEHGFTSHWLRVLQEFLTQKREWLKRREWTWSPPGRAPLTSSYP

SEQ ID NO: 810670 - protein, 50 aa, Homo sapiens
MRHISSCLYAEVPSSFHWLVDRRERSKVPYIVRQCVEEIERRGMEEVGIY

SEQ ID NO: 810671 - protein, 381 aa, Homo sapiens
MSGVVRTLSRCLLPAEAGGARERRAGSGARDAEREARRRSRDIDALLARERRAVRRLVKILLLGAGESGKSTFLKQMRIIHGREFDQKALLEFRDTIFDNILKGSRVLVDARDKLGIPWQYSENEKHGMFLMAFENKAGLPVEPATFQLYVPALSALWRDSGIREAFSRRSEFQLGESVKYFLDNLDRIGQLNYFPSKQDILLARKATKGIVEHDFVIKKIPFKMVDVGGQRSQRQKWFQCFDGITSILFMVSSSEYDQVLMEDRRTNRLVESMNIFETIVNNKLFFNVSIILFLNKMDLLVEKVKTVSIKKHFPDFRGDPHRLEDVQRYLVQCFDRKRRNRSKPLFHHFTTAIDTENVRFVFHAVKDTILQENLKDIMLQ

SEQ ID NO: 810672 - protein, 102 aa, Homo sapiens
MPFFLTPFEPAHIDGHKRRQEIQCGKLGTYSWPPCPELPFLCSGPSPRSRRTHCRRDQLDGLLALAPVPFRTLNTERNRVLCAAPPRRSLQRQHHLRRAIMP

SEQ ID NO: 810673 - protein, 102 aa, Homo sapiens; identical to SEQ ID NO: 810672

SEQ ID NO: 810674 - protein, 232 aa, Homo sapiens
MINNQNTGWSRCYIKGSRGEGARATQGESVKYFLDNLDRIGQLNYFPSKQDILLARKATKGIVEHDFVIKKIPFKMVDVGGQRSQRQKWFQCFDGITSILFMVSSSEYDQVLMEDRRTNRLVESMNIFETIVNNKLFFNVSIILFLNKMDLLVEKVKTVSIKKHFPDFRGDPHRLEDVQRYLVQCFDRKRRNRSKPLFHHFTTAIDTENVRFVFHAVKDTILQENLKDIMLQ

SEQ ID NO: 810675 - protein, 196 aa, Homo sapiens
MSGVVRTLSRCLLPAEAGGARERRAGSGARDAEREARRRSRDIDALLARERRAVRRLVKILLLGAGESGKSTFLKQMRIIHGREFDQKALLEFRDTIFDNILKGSRVLVDARDKLGIPWQYSENEKHGMFLMAFENKAGLPVEPATFQLYVPALSALWRDSGIREAFSRRSEFQLAPAHAAGGHTAEGTSWTAFWL

SEQ ID NO: 810676 - protein, 94 aa, Homo sapiens
MQGCGQQREPLETVAPLLLLSPTAGSQGISRSLGVMQEIFATNVFPICAPQRRSVQTRPRTLGQVGDFETRASRTEPDLHLEITRMKLVLCGSP

SEQ ID NO: 810677 - protein, 102 aa, Homo sapiens; identical to SEQ ID NO: 810672

SEQ ID NO: 810678 - protein, 217 aa, Homo sapiens
MCSEIILRQEVLKDGFHRDLLIKVKFGESIEDLHTCRLLIKQDIPAGLYVDPYELASLRERNITEAVMVSENFDIEAPNYLSKESEVLIYARRDSQCIDCFQAFLPVHCRYHRPHSEDGEASIVVNNPDLLMFCDQEFPILKCWAHSEVAAPCALENEDICQWNKMKYKSVYKNVILQVPVGLTVHTSLVCSVTLLITILCSTLILVAVFKYGHFSL

SEQ ID NO: 810679 - protein, 150 aa, Homo sapiens
MCSEIILRQEVLKDGFHRDLLIKVKFGESIEDLHTCRLLIKQDIPAGLYVDPYELASLRERNITEAVMVSENFDIEAPNYLSKESEVLIYARRDSQCIDCFQAFLPVHCRYHRPHSEDGEASIVVNNPDLLMFCDQGEGCKCFLRVETSE

SEQ ID NO: 810680 - protein, 235 aa, Homo sapiens
MCSEIILRQEVLKDGFHRDLLIKVKFGESIEDLHTCRLLIKQDIPAGLYVDPYELASLRERNITEAVMVSENFDIEAPNYLSKESEVLIYARRDSQCIDCFQAFLPVHCRYHRPHSEDGEASIVVNNPDLLMFCDQAGSRRMIRFRFDSFDKTIEFPILKCWAHSEVAAPCALENEDICQWNKMKYKSVYKNVILQVPVGLTVHTSLVCSVTLLITILCSTLILVAVFKYGHFSL

SEQ ID NO: 810681 - protein, 692 aa, Homo sapiens
MELLPLWLCLGFHFLTVGWRNRSGTATAASQGVCKLVGGAADCRGQSLASVPSSLPPHARMLTLDANPLKTLWNHSLQPYPLLESLSLHSCHLERISRGAFQEQGHLRSLVLGDNCLSENYEETAAALHALPGLRRLDLSGNALTEDMAALMLQNLSSLRSVSLAGNTIMRLDDSVFEGLERLRELDLQRNYIFEIEGGAFDGLAELRHLNLAFNNLPCIVDFGLTRLRVLNVSYNVLEWFLATGGEAAFELETLDLSHNQLLFFPLLPQYSKLRTLLLRDNNMGFYRDLYNTSSPREMVAQFLLVDGNVTNITTVSLWEEFSSSDLADLRFLDMSQNQFQYLPDGFLRKMPSLSHLNLHQNCLMTLHIREHEPPGALTELDLSHNQLSELHLAPGLASCLGSLRLFNLSSNQLLGVPPGLFANARNITTLDMSHNQISLCPLPAASDRVGPPSCVDFRNMASLRSLSLEGCGLGALPDCPFQGTSLTYLDLSSNWGVLNGSLAPLQDVAPMLQVLSLRNMGLHSSFMALDFSGFGNLRDLDLSGNCLTTFPRFGGSLALETLDLRRNSLTALPQKAVSEQLSRGLRTIYLSQNPYDCCGVDGWGALQHGQTVADWAMVTCNLSSKIIRVTELPGGVPRDCKWERLDLGLLYLVLILPSCLTLLVACTVIVLTFKKPLLQVIKSRCHWSSVY

SEQ ID NO: 810682 - protein, 217 aa, Homo sapiens; identical to SEQ ID NO: 810678

SEQ ID NO: 810683 - protein, 217 aa, Homo sapiens; identical to SEQ ID NO: 810678

SEQ ID NO: 810684 - protein, 217 aa, Homo sapiens; identical to SEQ ID NO: 810678

SEQ ID NO: 810685 - protein, 150 aa, Homo sapiens [sequence omitted]

SEQ ID NO: 810686 - protein, 150 aa, Homo sapiens [sequence omitted]

SEQ ID NO: 810687 - protein, 150 aa, Homo sapiens [sequence omitted]

SEQ ID NO: 810688 - protein, 201 aa, Homo sapiens
MAEQRLRDVVTLCTSSLLIQGHFSARNFNVVSRDEVGIPFTEQEKTIHRAVMVSENFDIEAPNYLSKESEVLIYARRDSQCIDCFQAFLPVHCRYHRPHSEDGEASIVVNNPDLLMFCDQEFPILKCWAHSEVAAPCALENEDICQWNKMKYKSVYKNVILQVPVGLTVHTSLVCSVTLLITILCSTLILVAVFKYGHFSL

SEQ ID NO: 810689 - protein, 107 aa, Homo sapiens
MGVGWRGRRRPSWGCRVGSIRKPRLHSLGSGAGRRLTPRTSPCPASPTLVAGEVLLCCAGGAEPLQQHGRPGDARAGGAAEAEHPPRAPLLPGRGSTSPRAGPWAGV

SEQ ID NO: 810690 - protein, 146 aa, Homo sapiens
MRCPRIVPSGHLDVGLELKGHPGSPAALARRDPRRVRQRGPAEQDLPADLRGGLGEAGGHLHWARAAPPLPQPRPQPVAGGEGGTIGTARALFFPDAAAGHGTGWAGTVTTRVRRPLGKSSDDWSFGGRGWGWGGEVAVGLAGAAG

SEQ ID NO: 810691 - protein, 127 aa, Homo sapiens
LWGEDSITTLGVRGLTGAGNPCWGSRRGEVGPGGVHREEPGPDQGLLVTWTPKGAPRRGLCTVCLPLTRNFFPQIKQRAGCTPHLPQALFKYHHTGKAFPDHPSLPLPATGQALSISLPSWKVSSRQ

SEQ ID NO: 810692 - protein, 251 aa, Homo sapiens
MAHRLQIRLLTWDVKDTLLRLRHPLGEAYATKARAHGLEVEPSALEQGFRQAYRAQSHSFPNYGLSHGLTSRQWWLDVVLQTFHLAGVQDAQAVAPIAEQLYKDFSHPCTWQVLDGAEDTLRECRTRGLRLAVISNFDRRLEGILEGLGLREHFDFVLTSEAAGWPKPDPRIFQEALRLAHMEPVVAAHVGDNYLCDYQGPRAVGMHSFLVVGPQALDPVVRDSVPKEHILPSLAHLLPALDCLEGSTPGL

SEQ ID NO: 810693 - protein, 251 aa, Homo sapiens; identical to SEQ ID NO: 810692

SEQ ID NO: 810694 - protein, 251 aa, Homo sapiens; identical to SEQ ID NO: 810692

SEQ ID NO: 810695 - protein, 252 aa, Homo sapiens
MAHRLQIRLLTWDVKDTLLRLRHPLGEAYATKARAHGLEVEPSALEQGFRQAYRAQSHSFPNYGLSHGLTSRQWWLDVVLQTFHLAGVQDAQAVAPIAEQLYKDFSHPCTWQVLDGAEDTLRECRTRGLRLAVISNFDRRLEGILEGLGLREHFDFVLTSEAAGWPKPDPRIFQEALRLAHMEPVVAAHVGDNYLCDYQGPRAVGMHSFLVVGPQALDPVVRDSVPKEHILPSLAQGPATSLTGLVLDRERP

SEQ ID NO: 810696 - protein, 113 aa, Homo sapiens
GVEAHWGIWCLEENQDLILPPVRAAGWPKPDPRIFQEALRLAHMEPVVAAHVGDNYLCDYQGPRAVGMHSFLVVGPQALDPVVRDSVPKEHILPSLAHLLPALDCLEGSTPGL

SEQ ID NO: 810697 - protein, 72 aa, Homo sapiens
PGACAPPPELAGLAAAFSICFLVSQVGPGPRNRPGAVDALQLRRGPKGSAAAKAPRTAAPAHAADGSYRHSA

SEQ ID NO: 810698 - protein, 135 aa, Homo sapiens
HPALKPRAKHPRTLTSSSSRAAGASPAPWPGASSRPPPPPVSPPWPPCKATWVSAGGRCLYAALPRRPFGLEGGRGHLAEADLGTTTLGPKLLCCRHCRGRRLAVRGAGAAEPQDPGSRAGGRPALGEAFVEPAA

SEQ ID NO: 810699 - protein, 112 aa, Homo sapiens
RPRPRWGGRSKDGGKPFVLLPGVLGFMDSKEWNFGPCDSLAQLPRLECSGVIMAHCSLELLGSSYPPTSASLVAGTTSAGHAWLLWIVDFLFHELDTISHDIMHLAPMLLLL

SEQ ID NO: 810700 - protein, 734 aa, Homo sapiens
MLLWLLLLILTPGREQSGVAPKAVLLLNPPWSTAFKGEKVALICSSISHSLAQGDTYWYHDEKLLKIKHDKIQITEPGNYQCKTRGSSLSDAVHVEFSPDWLILQALHPVFEGDNVILRCQGKDNKNTHQKVYYKDGKQLPNSYNLEKITVNSVSRDNSKYHCTAYRKFYILDIEVTSKPLNIQVQELFLHPVLRASSSTPIEGSPMTLTCETQLSPQRPDVQLQFSLFRDSQTLGLGWSRSPRLQIPAMWTEDSGSYWCEVETVTHSIKKRSLRSQIRVQRVPVSNVNLEIRPTGGQLIEGENMVLICSVAQGSGTVTFSWHKEGRVRSLGRKTQRSLLAELHVLTVKESDAGRYYCAADNVHSPILSTWIRVTVRIPVSHPVLTFRAPRAHTVVGDLLELHCESLRGSPPILYRFYHEDVTLGNSSAPSGGGASFNLSLTAEHSGNYSCDADNGLGAQHSHGVSLRVTVPVSRPVLTLRAPGAQAVVGDLLELHCESLRGSFPILYWFYHEDDTLGNISAHSGGGASFNLSLTTEHSGNYSCEADNGLGAQHSKVVTLNVTGTSRNRTGLTAAGITGLVLSILVLAAAAALLHYARARRKPGGLSATGTSSHSPSECQEPSSSRPSRIDPQEPTHSKPLAPMELEPMYSNVNPGDSNPIYSQIWSIQHTKENSANCPMMHQEHEELTVLYSELKKTHPDDSAGEASSRGRAHEEDDEENYENVPRVLLASDH

SEQ ID NO: 810701 - protein, 812 aa, Homo sapiens
MLLWLLLLILTPGREQSGVAPKAVLLLNPPWSTAFKGEKVALICSSISHSLAQGDTYWYHDEKLLKIKHDKIQITEPGNYQCKTRGSSLSDAVHVEFSPDWLILQALHPVFEGDNVILRCQGKDNKNTHQKVYYKDGKQLPNSYNLEKITVNSVSRDNSKYHCTAYRKFYILDIEVTSKPLNIQVQGNGRFLWITGFVRETGDKGKMFISGEFHKESPMAQPWEGDGSFCMLLYLLMAGAEDDKCISLGTLSLTTLETMLFLFIELFLHPVLRASSSTPIEGSPMTLTCETQLSPQRPDVQLQFSLFRDSQTLGLGWSRSPRLQIPAMWTEDSGSYWCEVETVTHSIKKRSLRSQIRVQRVPVSNVNLEIRPTGGQLIEGENMVLICSVAQGSGTVTFSWHKEGRVRSLGRKTQRSLLAELHVLTVKESDAGRYYCAADNVHSPILSTWIRVTVRIPVSHPVLTFRAPRAHTVVGDLLELHCESLRGSPPILYRFYHEDVTLGNSSAPSGGGASFNLSLTAEHSGNYSCDADNGLGAQHSHGVSLRVTVPVSRPVLTLRAPGAQAVVGDLLELHCESLRGSFPILYWFYHEDDTLGNISAHSGGGASFNLSLTTEHSGNYSCEADNGLGAQHSKVVTLNVTGTSRNRTGLTAAGITGLVLSILVLAAAAALLHYARARRKPGGLSATGTSSHSPSECQEPSSSRPSRIDPQEPTHSKPLAPMELEPMYSNVNPGDSNPIYSQIWSIQHTKENSANCPMMHQEHEELTVLYSELKKTHPDDSAGEASSRGRAHEEDDEENYENVPRVLLASDH

SEQ ID NO: 810702 - protein, 740 aa, Homo sapiens
MLLWLLLLILTPGREQSGVAPKAVLLLNPPWSTAFKGEKVALICSSISHSLAQGDTYWYHDEKLLKIKHDKIQITEPGNYQCKTRGSSLSDAVHVEFSPDWLILQALHPVFEGDNVILRCQGKDNKNTHQKVYYKDGKQLPNSYNLEKITVNSVSRDNSKYHCTAYRKFYILDIEVTSKPLNIQVQELFLHPVLRASSSTPIEGSPMTLTCETQLSPQRPDVQLQFSLFRDSQTLGLGWSRSPRLQIPAMWTEDSGSYWCEVETVTHSIKKRSLRSQIRVQRVPVSNVNLEIRPTGGQLIEGENMVLICSVAQGSGTVTFSWHKEGRVRSLGRKTQRSLLAELHVLTVKESDAGRYYCAADNVHSPILSTWIRVTVRTLLSPSVPVSHPVLTFRAPRAHTVVGDLLELHCESLRGSPPILYRFYHEDVTLGNSSAPSGGGASFNLSLTAEHSGNYSCDADNGLGAQHSHGVSLRVTVPVSRPVLTLRAPGAQAVVGDLLELHCESLRGSFPILYWFYHEDDTLGNISAHSGGGASFNLSLTTEHSGNYSCEADNGLGAQHSKVVTLNVTGTSRNRTGLTAAGITGLVLSILVLAAAAALLHYARARRKPGGLSATGTSSHSPSECQEPSSSRPSRIDPQEPTHSKPLAPMELEPMYSNVNPGDSNPIYSQIWSIQHTKENSANCPMMHQEHEELTVLYSELKKTHPDDSAGEASSRGRAHEEDDEENYENVPRVLLASDH

SEQ ID NO: 810703 - protein, 485 aa, Homo sapiens
MWTEDSGSYWCEVETVTHSIKKRSLRSQIRVQRVPVSNVNLEIRPTGGQLIEGENMVLICSVAQGSGTVTFSWHKEGRVRSLGRKTQRSLLAELHVLTVKESDAGRYYCAADNVHSPILSTWIRVTVRIPVSHPVLTFRAPRAHTVVGDLLELHCESLRGSPPILYRFYHEDVTLGNSSAPSGGGASFNLSLTAEHSGNYSCDADNGLGAQHSHGVSLRVTVPVSRPVLTLRAPGAQAVVGDLLELHCESLRGSFPILYWFYHEDDTLGNISAHSGGGASFNLSLTTEHSGNYSCEADNGLGAQHSKVVTLNVTGTSRNRTGLTAAGITGLVLSILVLAAAAALLHYARARRKPGGLSATGTSSHSPSECQEPSSSRPSRIDPQEPTHSKPLAPMELEPMYSNVNPGDSNPIYSQIWSIQHTKENSANCPMMHQEHEELTVLYSELKKTHPDDSAGEASSRGRAHEEDDEENYENVPRVLLASDH

SEQ ID NO: 810704 - protein, 639 aa, Homo sapiens
MLLWLLLLILTPGREQSGVAPKAVLLLNPPWSTAFKGEKVALICSSISHSLAQGDTYWYHDEKLLKIKHDKIQITEPGNYQCKTRGSSLSDAVHVEFSPDWLILQALHPVFEGDNVILRCQGKDNKNTHQKVYYKDGKQLPNSYNLEKITVNSVSRDNSKYHCTAYRKFYILDIEVTSKPLNIQVQGVPVSNVNLEIRPTGGQLIEGENMVLICSVAQGSGTVTFSWHKEGRVRSLGRKTQRSLLAELHVLTVKESDAGRYYCAADNVHSPILSTWIRVTVRIPVSHPVLTFRAPRAHTVVGDLLELHCESLRGSPPILYRFYHEDVTLGNSSAPSGGGASFNLSLTAEHSGNYSCDADNGLGAQHSHGVSLRVTVPVSRPVLTLRAPGAQAVVGDLLELHCESLRGSFPILYWFYHEDDTLGNISAHSGGGASFNLSLTTEHSGNYSCEADNGLGAQHSKVVTLNVTGTSRNRTGLTAAGITGLVLSILVLAAAAALLHYARARRKPGGLSATGTSSHSPSECQEPSSSRPSRIDPQEPTHSKPLAPMELEPMYSNVNPGDSNPIYSQIWSIQHTKENSANCPMMHQEHEELTVLYSELKKTHPDDSAGEASSRGRAHEEDDEENYENVPRVLLASDH

SEQ ID NO: 810705 - protein, 734 aa, Homo sapiens; identical to SEQ ID NO: 810700

SEQ ID NO: 810706 - protein, 734 aa, Homo sapiens; identical to SEQ ID NO: 810700

SEQ ID NO: 810707 - protein, 750 aa, Homo sapiens
MLLWLLLLILTPGREQSGVAPKAVLLLNPPWSTAFKGEKVALICSSISHSLAQGDTYWYHDEKLLKIKHDKIQITEPGNYQCKTRGSSLSDAVHVEFSPDWLILQALHPVFEGDNVILRCQGKDNKNTHQKVYYKDGKQLPNSYNLEKITVNSVSRDNSKYHCTAYRKFYILDIEVTSKPLNIQVQELFLHPVLRASSSTPIEGSPMTLTCETQLSPQRPDVQLQFSLFRDSQTLGLGWSRSPRLQIPAMWTEDSGSYWCEVETVTHSIKKRSLRSQIRVQRVPVSNVNLEIRPTGGQLIEGENMVLICSVAQGSGTVTFSWHKEGRVRSLGRKTQRSLLAELHVLTVKESDAGRYYCAADNVHSPILSTWIRVTVRIPVSHPVLTFRAPRAHTVVGDLLELHCESLRGSPPILYRFYHEDVTLGNSSAPSGGGASFNLSLTAEHSGNYSCDADNGLGAQHSHGVSLRVTVPVSRPVLTLRAPGAQAVVGDLLELHCESLRGSFPILYWFYHEDDTLGNISAHSGGGASFNLSLTTEHSGNYSCEADNGLGAQHSKVVTLNVTGTSRNRTGLTAAGITGLVLSILVLAAAAALLHYARARRKPGGLSATGTSSHSPSECQEPSSSRPSRIDPQEPTHSKPLAPMELEPMYSNVNPGDSNPIYSQIWSIQHTKENSESNRGNSQEIKQIKKIGLEYFFYVGLEESSRGNSKRSSKSRRLVWNAVCVRCKLEYIAHSLILFFATPTQQLIVQ

SEQ ID NO: 810708 - protein, 707 aa, Homo sapiens
MLLWLLLLILTPGREQSGVAPKAVLLLNPPWSTAFKGEKVALICSSISHSLAQGDTYWYHDEKLLKIKHDKIQITEPGNYQCKTRGSSLSDAVHVEFSPDWLILQALHPVFEGDNVILRCQGKDNKNTHQKVYYKDGKQLPNSYNLEKITVNSVSRDNSKYHCTAYRKFYILDIEVTSKPLNIQVQEIARPSDWAGAGPPDSRSLPCGLKTQGLTGVEVETVTHSIKKRSLRSQIRVQRVPVSNVNLEIRPTGGQLIEGENMVLICSVAQGSGTVTFSWHKEGRVRSLGRKTQRSLLAELHVLTVKESDAGRYYCAADNVHSPILSTWIRVTVRIPVSHPVLTFRAPRAHTVVGDLLELHCESLRGSPPILYRFYHEDVTLGNSSAPSGGGASFNLSLTAEHSGNYSCDADNGLGAQHSHGVSLRVTVPVSRPVLTLRAPGAQAVVGDLLELHCESLRGSFPILYWFYHEDDTLGNISAHSGGGASFNLSLTTEHSGNYSCEADNGLGAQHSKVVTLNVTGTSRNRTGLTAAGITGLVLSILVLAAAAALLHYARARRKPGGLSATGTSSHSPSECQEPSSSRPSRIDPQEPTHSKPLAPMELEPMYSNVNPGDSNPIYSQIWSIQHTKENSESNRGNSQEIKQIKKIGLEYFFYVGLEESSRGNSKRSSKSRRLVWNAVCVRCKLEYIAHSLILFFATPTQQLIVQ

SEQ ID NO: 810709 - protein, 169 aa, Homo sapiens
MEVYIPSFRYEESDLERGYTVFKIEVLMNGRKHFVEKRYSEFHALHKKLKKCIKTPEIPSKHVRNWVPKVLEQRRQGLETYLQAVILENEELPKLFLDFLNVRHLPSLPKAESCGSFDETESEESSKLSHQPVLLFLRDPYVLPAASDFPNVVIEGVLHGIFYPHLQPR

SEQ ID NO: 810710 - protein, 159 aa, Homo sapiens
MEVYIPSFRYEESDLERGYTVFKIEVLMNGRKHFVEKRYSEFHALHKKLKKCIKTPEIPSKHVRNWVPKVLEQRRQGLETYLQAVILENEELPKLFLDFLNVRHLPSLPKAESCGSFDETESEESSKLSHQPVLLFLRDPYVLPAASGNQTCHLLTALY

SEQ ID NO: 810711 - protein, 89 aa, Homo sapiens
RPESGPQPRGPASAAGREAGRPGRGRSGGRGREPAPNSPSAGWPARPWRSTSRPFAMKRATWSGDTRYLTSPISTINSHGGLTIFGTFI

SEQ ID NO: 810712 - protein, 155 aa, Homo sapiens
MEVYIPSFRYEESDLERGYTVFKIEVLMNGRKHFVEKRYSEFHALHKKLKKCIKTPEIPSKHVRNWVPKVLEQRRQGLETYLQMIIFIFGFKERRPNLKEIKLRHTSPVARATKFSTVLGTTFPKRPITILPTSLSPILTSKKTCVQLKGKVEGY

SEQ ID NO: 810713 - protein, 169 aa, Homo sapiens; identical to SEQ ID NO: 810709

SEQ ID NO: 810714 - protein, 169 aa, Homo sapiens; identical to SEQ ID NO: 810709

SEQ ID NO: 810715 - protein, 169 aa, Homo sapiens; identical to SEQ ID NO: 810709

SEQ ID NO: 810716 - protein, 172 aa, Homo sapiens
RQVRGRVIPSFRYEESDLERGYTVFKIEVLMNGRKHFVEKRYSEFHALHKKLKKCIKTPEIPSKHVRNWVPKVLEQRRQGLETYLQAVILENEELPKLFLDFLNVRHLPSLPKAESCGSFDETESEESSKLSHQPVLLFLRDPYVLPAASDFPNVVIEGVLHGIFYPHLQPR

SEQ ID NO: 810717 - protein, 142 aa, Homo sapiens
MNGRKHFVEKRYSEFHALHKKLKKCIKTPEIPSKHVRNWVPKVLEQRRQGLETYLQAVILENEELPKLFLDFLNVRHLPSLPKAESCGSFDETESEESSKLSHQPVLLFLRDPYVLPAASDFPNVVIEGVLHGIFYPHLQPR

SEQ ID NO: 810718 - protein, 102 aa, Homo sapiens
MEVYIPSFRYEESDLERGYTVFKIEVLMNGRKHFVEKRYSEFHALHKKLKKCIKTPEIPSKHVRNWVPKVLEQRRQGLETYLQEKVNTYTHMDGERDRGMDG

SEQ ID NO: 810719 - protein, 159 aa, Homo sapiens; identical to SEQ ID NO: 810710

SEQ ID NO: 810720 - protein, 102 aa, Homo sapiens; identical to SEQ ID NO: 810718

SEQ ID NO: 810721 - protein, 73 aa, Homo sapiens
MEVYIPSFRYEESDLERGYTVGAGRGRTGPREPGLRLLRPGNTLGRRRLGAGGPLVFSPLPRPRGRAAPLARL

SEQ ID NO: 810722 - protein, 115 aa, Homo sapiens
MYFNCSEDNPSRERCSVPYSCCLPTPDQAVINTMCGQGMQAFDYLEASKVIYTNGCIDKLVNWIHSNLFLLGGVALGLAIPQLVGILLSQILVNQIKDQIKLQLYNQQHRADPWY

SEQ ID NO: 810723 - protein, 283 aa, Homo sapiens
MARRPRAPAASGEEFSFVSPLVKYLLFFFNMLFWVISMVMVAVGVYARLMKHAEAALACLAVDPAILLIVVGVLMFLLTFCGCIGSLRENICLLQTFSLCLTAVFLLQLAAGILGFVFSDKARGKVSEIINNAIVHYRDDLDLQNLIDFGQKKFSCCGGISYKDWSQNMYFNCSEDNPSRERCSVPYSCCLPTPDQAVINTMCGQGMQAFDYLEASKVIYTNGCIDKLVNWIHSNLFLLGGVALGLAIPQLVGILLSQILVNQIKDQIKLQLYNQQHRADPWY

SEQ ID NO: 810724 - protein, 120 aa, Homo sapiens
METGKPHKRTAVGAESSTKWRFGFQPPSDSPVGRSKLQMGRRQGAQVAPVSGGCASSPPSQPSALCQSDTLKCLGLCFQFCLGNSSCTESWGYCCCLFTEALPPPALAGMLLSLADILRS

SEQ ID NO: 810725 - protein, 283 aa, Homo sapiens; identical to SEQ ID NO: 810723

SEQ ID NO: 810726 - protein, 283 aa, Homo sapiens; identical to SEQ ID NO: 810723

SEQ ID NO: 810727 - protein, 283 aa, Homo sapiens; identical to SEQ ID NO: 810723

SEQ ID NO: 810728 - protein, 283 aa, Homo sapiens; identical to SEQ ID NO: 810723

SEQ ID NO: 810729 - protein, 283 aa, Homo sapiens; identical to SEQ ID NO: 810723

SEQ ID NO: 810730 - protein, 299 aa, Homo sapiens
MARRPRAPAASGEEFSFVSPLVKYLLFFFNMLFWVISMVMVAVGVYARLMKHAEAALACLAVDPAILLIVVGVLMFLLTFCGCIGSLRENICLLQTFSLCLTAVFLLQLAAGILGFVFSDKARGKVSEIINNAIVHYRDDLDLQNLIDFGQKKFSCCGGISYKDWSQNMYFNCSEDNPSRERCSVPYSCCLPTPDQAVINTMCGQGMQAFDYLEASKVIYTNGCIDKLVNWIHSNLFLLGGVALGLAIPQLVGILLSQILVNQIKDQIKLQLYNQQHHQDSSTTRQQHHQTAAHHDTAP

SEQ ID NO: 810731 - protein, 185 aa, Homo sapiens
MARRPRAPAASGEEFSFVSPLVKYLLFFFNMLFWVISMVMVAVGVYARLMKHAEAALACLAVDPAILLIVVGVLMFLLTFCGCIGSLRENICLLQTFSLCLTAVFLLQLAAGILGFVFSDKARGKVSEIINNAIVHYRDDLDLQNLIDFGQKKPNSSPPPLLRKKVWNPGPYTLQSEVGLSHTCP

SEQ ID NO: 810732 - protein, 113 aa, Homo sapiens
MRRKKALSSPTRALQDLLPESAVGRTPRKLGAVRWASWRREERARQAGRARPGRGAGLRGWSPPPRRPRPAPASPNPEEMGGCASCLPSECSRSLLAAPRYRALRPGARPGGK

SEQ ID NO: 810733 - protein, 216 aa, Homo sapiens
MARRPRAPAASGEEFSFVSPLVKYLLFFFNMLFWVISMVMVAVGVYARLMKHAEAALACLAVDPAILLIVVGVLMFLLTFCGCIGSLRENICLLQTFSLCLTAVFLLQLAAGILGFVFSDKARGKVSEIINNAIVHYRDDLDLQNLIDFGQKEKVWVSQWSGGLWVKVNVIPRDASPSMPVGLFITCQVMASGKGFGKKAHVAECFKCTFKDTEQY

SEQ ID NO: 810734 - protein, 548 aa, Homo sapiens
MATSSEEVLLIVKKVRQKKQDGALYLMAERIAWAPEGKDRFTISHMYADIKCQKISPEGKAKIQLQLVLHAGDTTNFHFSNESTAVKERDAVKDLLQQLLPKFKRKANKELEEKNRMLQEDPVLFQLYKDLVVSQVISAEEFWANRLNVNATDSSSTSNHKQDVGISAAFLADVRPQTDGCNGLRYNLTSDIIESIFRTYPAVKMKYAENVPHNMTEKEFWTRFFQSHYFHRDRLNTGSKDLFAECAKIDEKGLKTMVSLGVKNPLLDLTALEDKPLDEGYGISSVPSASNSKSIKENSNAAIIKRFNHHSAMVLAAGLRKQEAQNEQTSEPSNMDGNSGDADCFQPAVKRAKLQESIEYEDLGKNNSVKTIALNLKKSDRYYHGPTPIQSLQYATSQDIINSFQSIRQEMEAYTPKLTQVLSSSAASSTITALSPGGALMQGGTQQAINQMVPNDIQSELKHLYVAVGELLRHFWSCFPVNTPFLEEKVVKMKSNLERFQVTKLCPFQEKIRRQYLSTNLVSHIEEMLQTAYNKLHTWQSRRLMKKT

SEQ ID NO: 810735 - protein, 548 aa, Homo sapiens; identical to SEQ ID NO: 810734

SEQ ID NO: 810736 - protein, 131 aa, Homo sapiens
SAWSLPLRPRSRLRSLRPATAGPLRAGDTAPTGTGGALGQMVGPARIPGPFAARDRREETKQAGTRGGGRELAEGVMAAALLSHVPRARLATSGHVPSDSSQPAMEARPPSNRGGGYCCGHWVSASSQQRL

SEQ ID NO: 810737 - protein, 131 aa, Homo sapiens; identical to SEQ ID NO: 810736

SEQ ID NO: 810738 - protein, 548 aa, Homo sapiens; identical to SEQ ID NO: 810734

SEQ ID NO: 810739 - protein, 548 aa, Homo sapiens; identical to SEQ ID NO: 810734

SEQ ID NO: 810740 - protein, 548 aa, Homo sapiens; identical to SEQ ID NO: 810734

SEQ ID NO: 810741 - protein, 432 aa, Homo sapiens
MLQEDPVLFQLYKDLVVSQVISAEEFWANRLNVNATDSSSTSNHKQDVGISAAFLADVRPQTDGCNGLRYNLTSDIIESIFRTYPAVKMKYAENVPHNMTEKEFWTRFFQSHYFHRDRLNTGSKDLFAECAKIDEKGLKTMVSLGVKNPLLDLTALEDKPLDEGYGISSVPSASNSKSIKENSNAAIIKRFNHHSAMVLAAGLRKQEAQNEQTSEPSNMDGNSGDADCFQPAVKRAKLQESIEYEDLGKNNSVKTIALNLKKSDRYYHGPTPIQSLQYATSQDIINSFQSIRQEMEAYTPKLTQVLSSSAASSTITALSPGGALMQGGTQQAINQMVPNDIQSELKHLYVAVGELLRHFWSCFPVNTPFLEEKVVKMKSNLERFQVTKLCPFQEKIRRQYLSTNLVSHIEEMLQTAYNKLHTWQSRRLMKKT

SEQ ID NO: 810742 - protein, 138 aa, Homo sapiens
MEAYTPKLTQVLSSSAASSTITALSPGGALMQGGTQQAINQMVPNDIQSELKHLYVAVGELLRHFWSCFPVNTPFLEEKVVKMKSNLERFQVTKLCPFQEKIRRQYLSTNLVSHIEEMLQTAYNKLHTWQSRRLMKKT

SEQ ID NO: 810743 - protein, 385 aa, Homo sapiens [sequence omitted]

SEQ ID NO: 810744 - protein, 131 aa, Homo sapiens; identical to SEQ ID NO: 810736

SEQ ID NO: 810745 - protein, 189 aa, Homo sapiens
MATSSEEVLLIVKKVRQKKQDGALYLMAERIAWAPEGKDRFTISHMYADIKCQKISPEGKAKIQLQLVLHAGDTTNFHFSNESTAVKERDAVKDLLQQLLPKFKRKANKELEEKNRMLQEDPVLFQLYKDLVVSQVISAEEFWANRLNVNATDSSSTSNHKQDVGISAAFLVCEPSRFLKKIKIQTPKC

SEQ ID NO: 810746 - protein, 81 aa, Homo sapiens
RLQSAEMAPLYPSLGDKTETSLGCQRLRKPGASGRGSSVTLQRLPHRLLFAKWYQDFLVVVSKRVGFLTSHRPWLEVKSMF

SEQ ID NO: 810747 - protein, 147 aa, Homo sapiens
MLVRDSDQAQETTMSSRKSERERPLFLSRRYLLLRTQEAWGRAAPWTRRLGAGPAGPAGERKHKLQLLSCGTLRARCTATSSDGYLRIYRTDLDQTESREEGELHLTVHHPRQPQRRLFTSCLGTITPPHDRSEVSEKRSADFRNRV

SEQ ID NO: 810748 - protein, 147 aa, Homo sapiens; identical to SEQ ID NO: 810747

SEQ ID NO: 810749 - protein, 147 aa, Homo sapiens; identical to SEQ ID NO: 810747

SEQ ID NO: 810750 - protein, 102 aa, Homo sapiens
MKKRHREGCDMPGPWSTLRSHRGHHCPHLHPVLRRPTLTDVEACLQCLDVCGHPRHAVDAHLLHASALDLLHALTHDVGHLGPLSPAGGGNVLSVLTALLGP

SEQ ID NO: 810751 - protein, 437 aa, Homo sapiens
PSWANPLGGGSSADSRLTREGSKGWRSGPGVQWVQPACELRPDRGAPTDGKEKLITNGTIFCFEMEPAVSEPMRDQVARTHLTEDTPKVNADIEKVNQNQAKRCTVIGGSGFLGQHMVEQLLARGYAVNVFDIQQGFDNPQVRFFLGDLCSRQDLYPALKGVNTVFHCASPPPSSNNKELFYRVNYIGTKNVIETCKEAGVQKLILTSSASVIFEGVDIKNGTEDLPYAMKPIDYYTETKILQERAVLGANDPEKNFLTTAIRPHGIFGPRDPQLVPILIEAARNGKMKFVIGNGKNLVDFTFVENVVHGHILAAEQLSRDSTLGGKAFHITNDEPIPFWTFLSRILTGLNYEAPKYHIPYWVAYYLALLLSLLVMVISPVIQLQPTFTPMRVALAGTFHYYSCERAKKAMGYQPLVTMDDAMERTVQSFRHLRRVK

SEQ ID NO: 810752 - protein, 437 aa, Homo sapiens; identical to SEQ ID NO: 810751

SEQ ID NO: 810753 - protein, 437 aa, Homo sapiens; identical to SEQ ID NO: 810751

SEQ ID NO: 810754 - protein, 437 aa, Homo sapiens; identical to SEQ ID NO: 810751

SEQ ID NO: 810755 - protein, 373 aa, Homo sapiens
MEPAVSEPMRDQVARTHLTEDTPKVNADIEKVNQNQAKRCTVIGGSGFLGQHMVEQLLARGYAVNVFDIQQGFDNPQVRFFLGDLCSRQDLYPALKGVNTVFHCASPPPSSNNKELFYRVNYIGTKNVIETCKEAGVQKLILTSSASVIFEGVDIKNGTEDLPYAMKPIDYYTETKILQERAVLGANDPEKNFLTTAIRPHGIFGPRDPQLVPILIEAARNGKMKFVIGNGKNLVDFTFVENVVHGHILAAEQLSRDSTLGGKAFHITNDEPIPFWTFLSRILTGLNYEAPKYHIPYWVAYYLALLLSLLVMVISPVIQLQPTFTPMRVALAGTFHYYSCERAKKAMGYQPLVTMDDAMERTVQSFRHLRRVK

SEQ ID NO: 810756 - protein, 425 aa, Homo sapiens
PSWANPLGGGSSADSRLTREGSKGWRSGPGVQWVQPACELRPDRGAPTDGKEKLITNGTIFCFEMEPAVSEPMRDQVARTHLTEDTPKVNADIEKVNQNQAKRCTVIGGSGFLGQHMVEQLLARGYAVNVFDIQQGFDNPQDLYPALKGVNTVFHCASPPPSSNNKELFYRVNYIGTKNVIETCKEAGVQKLILTSSASVIFEGVDIKNGTEDLPYAMKPIDYYTETKILQERAVLGANDPEKNFLTTAIRPHGIFGPRDPQLVPILIEAARNGKMKFVIGNGKNLVDFTFVENVVHGHILAAEQLSRDSTLGGKAFHITNDEPIPFWTFLSRILTGLNYEAPKYHIPYWVAYYLALLLSLLVMVISPVIQLQPTFTPMRVALAGTFHYYSCERAKKAMGYQPLVTMDDAMERTVQSFRHLRRVK

SEQ ID NO: 810757 - protein, 372 aa, Homo sapiens
PSWANPLGGGSSADSRLTREGSKGWRSGPGVQWVQPACELRPDRGAPTDGKEKLITNGTIFCFEMEPAVSEPMRDQVARTHLTEDTPKVNADIEKVNQNQAKRCTVIGGSGFLGQHMVEQLLARGYAVNVFDIQQGFDNPQVRFFLGDLCSRQDLYPALKGVNTVFHCASPPPSSNNKELFYRVNYIGTKNVIETSIRPHGIFGPRDPQLVPILIEAARNGKMKFVIGNGKNLVDFTFVENVVHGHILAAEQLSRDSTLGGKAFHITNDEPIPFWTFLSRILTGLNYEAPKYHIPYWVAYYLALLLSLLVMVISPVIQLQPTFTPMRVALAGTFHYYSCERAKKAMGYQPLVTMDDAMERTVQSFRHLRRVK

SEQ ID NO: 810758 - protein, 382 aa, Homo sapiens
  misc_feature (286)..(286): Xaa can be any naturally occurring amino acid
  misc_feature (293)..(293): Xaa can be any naturally occurring amino acid
  misc_feature (295)..(296): Xaa can be any naturally occurring amino acid
  misc_feature (298)..(300): Xaa can be any naturally occurring amino acid
  misc_feature (304)..(305): Xaa can be any naturally occurring amino acid
  misc_feature (307)..(310): Xaa can be any naturally occurring amino acid
  misc_feature (372)..(372): Xaa can be any naturally occurring amino acid
PSWANPLGGGSSADSRLTREGSKGWRSGPGVQWVQPACELRPDRGAPTDGKEKLITNGTIFCFEMEPAVSEPMRDQVARTHLTEDTPKVNADIEKVNQNQAKRCTVIGGSGFLGQHMVEQLLARGYAVNVFDIQQGFDNPQVRFFLGDLCSRQDLYPALKGVNTVFHCASPPPSSNNKELFYRVNYIGTKNVIETCKEAGVQKLILTSSASVIFEGVDIKNGTEDLPYAMKPIDYYTETKILQERAVLGANDPEKNFLTTAIRPHGIFGPRDPQLVPILIEAATKXNSNSLIXNXXKXXXLKFXXKXXXXKISHQPTRETQDKSPPPQGTRKKPPKRKGAQRKRDKKPPKKGAPKRRNKKRSPPSSKPKKQXKQPLPLIEAK

SEQ ID NO: 810759 - protein, 161 aa, Homo sapiens
DAHGPVRTPGWRRKGPAAPVPPGSGRLGCKTSWGERHAVGAGARPSPQRPQGRAGVPPVGGLLEPQPALLHLSLELGAESRGRAWDLSGPSVPNPVPHPERPGRPRDLLSVRGCPQGGLLQWRQLSGNVTSCCLDPRKPSGVWTPEESLSSSRIALRPGAL

SEQ ID NO: 810760 - protein, 404 aa, Homo sapiens
HPGATQTPGTSTGSPLQVKALNTGVLRTRGCALQQGLCWDRPSCEAAVDLPEGHGSAAPETRPCQEGSVSAHSPLGFPGAGPPLAQHSPSQHRPRWALALYLCSWQASTPSQCPVPLRAQGDPSPAQLPCRTPASPIHAGLPPACPRRTPASPFHAGLPPACPRRTPASPFHAGLPPACHFRGSLGNQCSNDHCPGQNLRGGHRSPVCSDGAASVGDPWALNTLLSHCPSLPCEGHPQLLLKPGALWWETARQAVLNTLYCKLHTVLRRQKDPKFLFKKTVPVSVPANLKGRDKRTVCPSCNFISSVTVKLRAESTPGDRAATAAATESNPRSSSQRRPAFRSGTGLPTQRPPHPTLAPPPRDNLSSAQKRHLLMLDSLGPTCAKGAWFWGRRVLPDAQRVTGC

SEQ ID NO: 810761 - protein, 360 aa, Homo sapiens
HPGATQTPGTSTGSPLQVKALNTGVLRTRGCALQQGLCWDRPSCEAAVDLPEGHGSAAPETRPCQEGSVSAHSPLGFPGAGPPLAQHSPSQHRPRWALALYLCSWQASTPSQCPVPLRAQGDPSPAQLPCRTPASPIHAGLPPACPRRTPASPFHAGLPPACPRRTPASPFHAGLPPACHFRGSLGNQCSNDHCPGQNLRGGHRSPPRQAVLNTLYCKLHTVLRRQKDPKFLFKKTVPVSVPANLKGRDKRTVCPSCNFISSVTVKLRAESTPGDRAATAAATESNPRSSSQRRPAFRSGTGLPTQRPPHPTLAPPPRDNLSSAQKRHLLMLDSLGPTCAKGAWFWGRRVLPDAQRVTGC

SEQ ID NO: 810762 - protein, 493 aa, Homo sapiens
MDQDYERRLLRQIVIQNENTMPRVTEMRRTLTPASSPVSSPSKHGDRFIPSRAGANWSVNFHRINENEKSPSQNRKAKDATSDNGKDGLAYSALLKNELLGAGIEKVQDPQTEDRRLQPSTPEKKGLFTYSLSTKRSSPDDGNDVSPYSLSPVSNKSQKLLRSPRKPTRKISKIPFKVLDAPELQDDFYLNLVDWSSLNVLSVGLGTCVYLWSACTSQVTRLCDLSVEGDSVTSVGWSERGNLVAVGTHKGFVQIWDAAAGKKLSMLEGHTARVGALAWNAEQLSSGSRDRMILQRDIRTPPLQSERRLQGHRQEVCGLKWSTDHQLLASGGNDNKLLVWNHSSLSPVQQYTEHLAAVKAIAWSPHQHGLLASGGGTADRCIRFWNTLTGQPLQCIDTGSQVCNLAWSKHANELVSTHGYSQNQILVWKYPSLTQVAKLTGHSYRVLYLAMSPDGEAIVTGAGDETLRFWNVFSKTRSTKESVSVLNLFTRIR

SEQ ID NO: 810763 - protein, 377 aa, Homo sapiens
MDQDYERRLLRQIVIQNENTMPRVTEMRRTLTPASSPVSSPSKHGDRFIPSRAGANWSVNFHRINENEKSPSQNRKAKDATSDNGKDGLAYSALLKNELLGAGIEKVQDPQTEDRRLQPSTPEKKGLFTYSLSTKRSSPDDGNDVSPYSLSPVSNKSQKLLRSPRKPTRKISKIPFKVLDAPELQDDFYLNLVDWSSLNVLSVGLGTCVYLWSACTSQVTRLCDLSVEGDSVTSVGWSERGNLVAVGTHKGFVQIWDAAAGKKLSMLEGHTARVGALAWNAEQLSSGSRDRMILQRDIRTPPLQSERRLQGHRQEVCGLKWSTDHQLLASGGNDNKLLVWNHSSLSPVQQYTEHLAAVKAIAWCSVSIHCSGPRAEF

SEQ ID NO: 810764 - protein, 493 aa, Homo sapiens; identical to SEQ ID NO: 810762

SEQ ID NO: 810765 - protein, 493 aa, Homo sapiens; identical to SEQ ID NO: 810762

SEQ ID NO: 810766 - protein, 404 aa, Homo sapiens
MDQDYERRLLRQIVIQNENTMPRVTEMRRTLTPASSPVSSPSKHGDRFIPSRAGANWSVNFHRINENEKSPSQNRKAKDATSDNGKDGLAYSALLKNELLGAGIEKVQDPQTEDRRLQPSTPEKKGLFTVTRLCDLSVEGDSVTSVGWSERGNLVAVGTHKGFVQIWDAAAGKKLSMLEGHTARVGALAWNAEQLSSGSRDRMILQRDIRTPPLQSERRLQGHRQEVCGLKWSTDHQLLASGGNDNKLLVWNHSSLSPVQQYTEHLAAVKAIAWSPHQHGLLASGGGTADRCIRFWNTLTGQPLQCIDTGSQVCNLAWSKHANELVSTHGYSQNQILVWKYPSLTQVAKLTGHSYRVLYLAMSPDGEAIVTGAGDETLRFWNVFSKTRSTKESVSVLNLFTRIR

SEQ ID NO: 810767 - protein, 364 aa, Homo sapiens
IEDACKQHDSIGSTDVRSYSLSPVSNKSQKLLRSPRKPTRKISKIPFKVLDAPELQDDFYLNLVDWSSLNVLSVGLGTCVYLWSACTSQVTRLCDLSVEGDSVTSVGWSERGNLVAVGTHKGFVQIWDAAAGKKLSMLEGHTARVGALAWNAEQLSSGSRDRMILQRDIRTPPLQSERRLQGHRQEVCGLKWSTDHQLLASGGNDNKLLVWNHSSLSPVQQYTEHLAAVKAIAWSPHQHGLLASGGGTADRCIRFWNTLTGQPLQCIDTGSQVCNLAWSKHANELVSTHGYSQNQILVWKYPSLTQVAKLTGHSYRVLYLAMSPDGEAIVTGAGDETLRFWNVFSKTRSTKESVSVLNLFTRIR

SEQ ID NO: 810768 - protein, 310 aa, Homo sapiens [sequence omitted]

SEQ ID NO: 810769 - protein, 30 aa, Homo sapiens
MSPDGEAIVTGAGDETLRFWNVFSKTRSTK

SEQ ID NO: 810770 - protein, 217 aa, Homo sapiens [sequence omitted]

SEQ ID NO: 810771 - protein, 217 aa, Homo sapiens [sequence omitted]

SEQ ID NO: 810772 - protein, 217 aa, Homo sapiens [sequence omitted]

SEQ ID NO: 810773 - protein, 217 aa, Homo sapiens [sequence omitted]

SEQ ID NO: 810774 - protein, 217 aa, Homo sapiens [sequence omitted]

SEQ ID NO: 810775 - protein, 217 aa, Homo sapiens [sequence omitted]

SEQ ID NO: 810776 - protein, 217 aa, Homo sapiens [sequence omitted]

SEQ ID NO: 810777 - protein, 267 aa, Homo sapiens
RGEVLAGHRRGAEARRYCCFGDRAAAAAAAAVAESVPVAVTAAGASAALAEQPWGRRPLAALWRGGPDAERSSCATVLNEECDQNWYKAELNGKDGFIPKNYIEMKPHPWFFGKIPRAKAEEMLSKQRHDGAFLIRESESAPGDFSLSVKFGNDVQHFKVLRDGAGKYFLWVVKFNSLNELVDYHRSTSVSRNQQIFLRDIEQVPQQPTYVQALFDFDPQEDGELGFRRGDFIHVMDNSDPNWWKGACHGQTGMFPRNYVTPVNRNV

SEQ ID NO: 810778 - protein, 176 aa, Homo sapiens
MEAIAKYDFKATADDELSFKRGDILKVLNEECDQNWYKAELNGKDGFIPKNYIEMKPHPFGNDVQHFKVLRDGAGKYFLWVVKFNSLNELVDYHRSTSVSRNQQIFLRDIEQVPQQPTYVQALFDFDPQEDGELGFRRGDFIHVMDNSDPNWWKGACHGQTGMFPRNYVTPVNRNV

SEQ ID NO: 810779 - protein, 198 aa, Homo sapiens
ELFPRRLCHESVGSPVGFGLGGPFSNVSLYRKSDPRLVPWWFFGKIPRAKAEEMLSKQRHDGAFLIRESESAPGDFSLSVKFGNDVQHFKVLRDGAGKYFLWVVKFNSLNELVDYHRSTSVSRNQQIFLRDIEQVPQQPTYVQALFDFDPQEDGELGFRRGDFIHVMDNSDPNWWKGACHGQTGMFPRNYVTPVNRNV

SEQ ID NO: 810780 - protein, 73 aa, Homo sapiens
AIAKYDFKATADDELSFKRGDILKVSADAEHNAEILSLCSPTFFRPDYTQRSCVFHCTLLTFTIIFVLESFRC

SEQ ID NO: 810781 - protein, 1353 aa, Homo sapiens
TGEAGGPPSTREAELKLRLKLVEEEANILGRKIVELEVENRGLKAEMEDMRGQQEREGPGRDHAPSIPTSPFGDSLESSTELRRHLQFVEEEAELLRRSISEIEDHNRQLTHELSKFKFEPPREPGWLGEGASPGAGGGAPLQEELKSARLQISELSGKVLKLQHENHALLSNIQRCDLAAHLGLRAPSPRDSDAESDAGKKESDGEESRLPQPKREGPVGGESDSEEMFEKTSGFGSGKPSEASEPCPTELLKAREDSEYLVTLKHEAQRLERTVERLITDTDSFLHDAGLRGGAPLPGPGLQGEEEQGEGDQQEPQLLGTINAKMKAFKKELQAFLEQVNRIGDGLSPLPHLTESSSFLSTVTSVSRDSPIGNLGKELGPDLQSRLKEQLEWQLGPARGDERESLRLRAARELHRRADGDTGSHGLGGQTCFSLEMEEEHLYALRWKELEMHSLALQNTLHERTWSDEKNLMQQELRSLKQNIFLFYVKLRWLLKHWRQGKQMEEEGEEFTEGEHPETLSRLGELGVQGGHQADGPDHDSDRGCGFPVGEHSPHSRVQIGDHSLRLQTADRGQPHKQVVENQQLFSAFKALLEDFRAELREDERARLRLQQQYASDKAAWDVEWAVLKCRLEQLEEKTENKLGELGSSAESKGALKKEREVHQKLLADSHSLVMDLRWQIHHSEKNWNREKVELLDRLDRDRQEWERQKKEFLWRIEQLQKENSPRRGGSFLCDQKDGNVRPFPHQGSLRMPRPVAMWPCADADSIPFEDRPLSKLKESDRCSASENLYLDALSLDDEPEEPPAHRPEREFRNRLPEEEENHKGNLQRAVSVSSMSEFQRLMDISPFLPEKGLPSTSSKEDVTPPLSPDDLKYIEEFNKSWDYTPNRGHNGGGPDLWADRTEVGRAGHEDSTEPFPDSSWYLTTSVTMTTDTMTSPEHCQKQPLRSHVLTEQSGLRVLHSPPAVRRVDSITAAGGEGPFPTSRARGSPGDTKGGPPEPMLSRWPCTSPRHSRDYVEGARRPLDSPLCTSLGFASPLHSLEMSKNLSDDMKEVAFSVRNAICSGPGELQVKDMACQTNGSRTMGTQTVQTISVGLQTEALRGSGVTSSPHKCLTPKAGGGATPVSSPSRSLRSRQVAPAIEKVQAKFERTCCSPKYGSPKLQRKPLPKADQPNNRTSPGMAQKGYSESAWARSTTTRESPVHTTINDGLSSLFNIIDHSPVVQDPFQKGLRAGSRSRSAEPRPELGPGQETGTNSRGRSPSPIGVGSEMCREEGGEGTPVKQDLSAPPGYTLTENVARILNKKLLEHALKEERRQAAHGPPGLHSDSHSLGDTAEPGPMENQTVLLTAPWGL

SEQ ID NO: 810782 - protein, 981 aa, Homo sapiens [sequence omitted]

SEQ ID NO: 810783 - protein, 981 aa, Homo sapiens [sequence omitted]

SEQ ID NO: 810784 - protein, 142 aa, Homo sapiens
DGSVPEILISLLYNATNGRLSAEVIKGSHLKNWAANRPPNTYVKLTLRKSTDQEMSKCKISIRRGRPNPVYKETFVFKVTLFQLSHVTLMLSVYNKSSMRRKMIGWIYLGLNSSGEELNHWTEMKESKGRQVRRWQALLESR

SEQ ID NO: 810785 - protein, 138 aa, Homo sapiens
LAGSHCQPRKGRTNEAEETAGLQMKYPDLCILMWDEWVPAKFKRLMMGWRGWQQHSIAEFSDSLPLLVLQRERDLKTKRLYRIIVTSTGGVSATRVRELWRLSAITGRIVESTGEKEKWSKRAQRVPGGKHTAAQTYS

SEQ ID NO: 810786 - protein, 138 aa, Homo sapiens; identical to SEQ ID NO: 810785

SEQ ID NO: 810787 - protein, 161 aa, Homo sapiens
RGSAPRAAILEAEAAAAALRRVRWAQSRGGAAVSGAGPAFPHPAPASTTASLSAAAAHAQRQGEMSSTSSKRAPTTATQRLKQDYLRIKKDPVPYICAEPLPSNILEWHYVVRGPEMTPYEGKDSVLRRRTPGGFYILSQPCLFNIFYLQTAAFLLWMCAS

SEQ ID NO: 810788 - protein, 323 aa, Homo sapiens
RGSAPRAAILEAEAAAAALRRVRWAQSRGGAAVSGAGPAFPHPAPASTTASLSAAAAHAQRQGEMSSTSSKRAPTTATQRLKQDYLRIKKDPVPYICAEPLPSNILEWHYVVRGPEMTPYEGGYYHGKLIFPREFPFKPPSIYMITPNGRFKCNTRLCLSITDFHPDTWNPAWSVSTILTGLLSFMVEKGPTLGSIETSDFTKRQLAVQSLAFNLKDKVFCELFPEVVEEIKQKQKAQDELSSRPQTLPLPDVVPDGETHLVQNGIQLLNGHAPGAVPNLAGLQQANRHHGLLGGALANLFVIVGFAAFAYTVKYVLRSIAQE

SEQ ID NO: 810789 - protein, 323 aa, Homo sapiens; identical to SEQ ID NO: 810788

SEQ ID NO: 810790 - protein, 322 aa, Homo sapiens
IRLGTRLGLNLAAAAAALRRVRWAQSRGGAAVSGAGPAFPHPAPASTTASLSAAAAHAQRQGEMSSTSSKRAPTTATQRLKQDYLRIKKDPVPYICAEPLPSNILEWHYVVRGPEMTPYEGGYYHGKLIFPREFPFKPPSIYMITPNGRFKCNTRLCLSITDFHPDTWNPAWSVSTILTGLLSFMVEKGPTLGSIETSDFTKRQLAVQSLAFNLKDKVFCELFPEVVEEIKQKQKAQDELSSRPQTLPLPDVVPDGETHLVQNGIQLLNGHAPGAVPNLAGLQQANRHHGLLGGALANLFVIVGFAAFAYTVKYVLRSIAQE

SEQ ID NO: 810791 - protein, 323 aa, Homo sapiens; identical to SEQ ID NO: 810788

SEQ ID NO: 810792 - protein, 418 aa, Homo sapiens
MRLGTRLGLNLAAAAAALRRVRWAQSRGGAAVSGAGPAFPHPAPASTTASLSAAAAHAQRQGEVSALAGLRRVLGPARPPCRSRPQRRPGAAGDPARRFSVRARRPRGPGPSLPARNPRSVTAGSRSSGSGHVGDLTTRPGFPSAGTLAAAPGRAASILMSSTSSKRAPTTATQRLKQDYLRIKKDPVPYICAEPLPSNILEWHYVVRGPEMTPYEGGYYHGKLIFPREFPFKPPSIYMITPNGRFKCNTRLCLSITDFHPDTWNPAWSVSTILTGLLSFMVEKGPTLGSIETSDFTKRQLAVQSLAFNLKDKVFCELFPEVVEEIKQKQKAQDELSSRPQTLPLPDVVPDGETHLVQNGIQLLNGHAPGAVPNLAGLQQANRHHGLLGGALANLFVIVGFAAFAYTVKYVLRSIAQE

SEQ ID NO: 810793 - protein, 259 aa, Homo sapiens
MSSTSSKRAPTTATQRLKQDYLRIKKDPVPYICAEPLPSNILEWHYVVRGPEMTPYEGGYYHGKLIFPREFPFKPPSIYMITPNGRFKCNTRLCLSITDFHPDTWNPAWSVSTILTGLLSFMVEKGPTLGSIETSDFTKRQLAVQSLAFNLKDKVFCELFPEVVEEIKQKQKAQDELSSRPQTLPLPDVVPDGETHLVQNGIQLLNGHAPGAVPNLAGLQQANRHHGLLGGALANLFVIVGFAAFAYTVKYVLRSIAQE

SEQ ID NO: 810794 - protein, 207 aa, Homo sapiens
MTPYEGGYYHGKLIFPREFPFKPPSIYMITPNGRFKCNTRLCLSITDFHPDTWNPAWSVSTILTGLLSFMVEKGPTLGSIETSDFTKRQLAVQSLAFNLKDKVFCELFPEVVEEIKQKQKAQDELSSRPQTLPLPDVVPDGETHLVQNGIQLLNGHAPGAVPNLAGLQQANRHHGLLGGALANLFVIVGFAAFAYTVKYVLRSIAQE

SEQ ID NO: 810795 - protein, 275 aa, Homo sapiens
MSSTSSKRAPTTATQRLKQDYLRIKKDPVPYICAEPLPSNILEWFKRFSWLSLLSSWDYRHYVVRGPEMTPYEGGYYHGKLIFPREFPFKPPSIYMITPNGRFKCNTRLCLSITDFHPDTWNPAWSVSTILTGLLSFMVEKGPTLGSIETSDFTKRQLAVQSLAFNLKDKVFCELFPEVVEEIKQKQKAQDELSSRPQTLPLPDVVPDGETHLVQNGIQLLNGHAPGAVPNLAGLQQANRHHGLLGGALANLFVIVGFAAFAYTVKYVLRSIAQE

SEQ ID NO: 810796 - protein, 323 aa, Homo sapiens; identical to SEQ ID NO: 810788

SEQ ID NO: 810797 - protein, 207 aa, Homo sapiens; identical to SEQ ID NO: 810794

SEQ ID NO: 810798 - protein, 363 aa, Homo sapiens
MRLGTRLGLNLAAAAAALRRVRWAQSRGGAAVSGAGPAFPHPAPASTTASLSAAAAHAQRQGEMSSTSSKRAPTTATQRLKQDYLRIKKDPVPYICAEPLPSNILEWHYVVRGPEMTPYEGIPVLDHLQLGQPECGSTSVGWALHHRVIAHDQRVGMPAGRGGYYHGKLIFPREFPFKPPSIYMITPNGRFKCNTRLCLSITDFHPDTWNPAWSVSTILTGLLSFMVEKGPTLGSIETSDFTKRQLAVQSLAFNLKDKVFCELFPEVVEEIKQKQKAQDELSSRPQTLPLPDVVPDGETHLVQNGIQLLNGHAPGAVPNLAGLQQANRHHGLLGGALANLFVIVGFAAFAYTVKYVLRSIAQE

SEQ ID NO: 810799 - protein, 397 aa, Homo sapiens
RGSAPRAAILEAEAAAAALRRVRWAQSRGGAAVSGAGPAFPHPAPASTTASLSAAAAHAQRQGEMSSTSSKRAPTTATQRLKQDYLRIKKDPVPYICAEPLPSNILEWHYVVRGPEMTPYEGIPVLDHLQLGQPECGSTSVGWALHHRVIAHDQRWGCQQAVVREGPGAGVQGVLKYLLRCVCVPSADLKNIYHLSGYYHGKLIFPREFPFKPPSIYMITPNGRFKCNTRLCLSITDFHPDTWNPAWSVSTILTGLLSFMVEKGPTLGSIETSDFTKRQLAVQSLAFNLKDKVFCELFPEVVEEIKQKQKAQDELSSRPQTLPLPDVVPDGETHLVQNGIQLLNGHAPGAVPNLAGLQQANRHHGLLGGALANLFVIVGFAAFAYTVKYVLRSIAQE

SEQ ID NO: 810800 - protein, 323 aa, Homo sapiens; identical to SEQ ID NO: 810788

SEQ ID NO: 810801 - protein, 115 aa, Homo sapiens
MWSLRNANLLPTAGCSCVLGAPGAFLGAPGSSAGGNLGAQGWSWRPRVLVWPGRVVMRLSGASDGRGSGSISRGLVSAFTNVFTVRMKHIPSRKCLGVFAALEARSLLTPTTSRP

SEQ ID NO: 810802 - protein, 115 aa, Homo sapiens; identical to SEQ ID NO: 810801

SEQ ID NO: 810803 - protein, 123 aa, Homo sapiens
LGLRLFQRRAHRLTGPEDRGYNSGITVTVSCGPVPQGRGARGSEQPTLPLPDVVPDGETHLVQNGIQLLNGHAPGAVPNLAGLQQANRHHGLLGGALANLFVIVGFAAFAYTVKYVLRSIAQE

SEQ ID NO: 810804 - protein, 291 aa, Homo sapiens
RGSAPRAAILEAEAAAAALRRVRWAQSRGGAAVSGAGPAFPHPAPASTTASLSAAAAHAQRQGEMSSTSSKRAPTTATQRLKQDYLRIKKDPVPYICAEPLPSNILEWHYVVRGPEMTPYEGGYYHGKLIFPREFPFKPPSIYMITPNGRFKCNTRLCLSITDFHPDTWNPAWSVSTILTGLLSFMVEKGPTLGSIETSDFTKRQLAVQSLAFNLKDKVFCELFPEVVEEIKQKQKAQDELSSRPQTLPLPDVVPDGETHLVQNGIQLLNGHAPGAVPNLAGLAWPCGDEA

SEQ ID NO: 810805 - protein, 112 aa, Homo sapiens
MITPNGRFKCNTRLCLSITDFHPDTWNPAWSVSTILTGLLSFMVEKGPTLGSIETSDFTKRQLAVQSLAFKNLKGEAKTKMCDWALEETGASALSWPRAAGAGVGGPCVLDL

SEQ ID NO: 810806 - protein, 255 aa, Homo sapiens
RGSAPRAAILEAEAAAAALRRVRWAQSRGGAAVSGAGPAFPHPAPASTTASLSAAAAHAQRQGEMSSTSSKRAPTTATQRLKQDYLRIKKDPVPYICAEPLPSNILEWHYVVRGPEMTPYEGGYYHGKLIFPREFPFKPPSIYMITPNGRFKCNTRLCLSITDFHPDTWNPAWSVSTILTGLLSFMVEKGPTLGSIETSDFTKRQLAVQSLAFKNLKGEAKTKMCDWALEETGASALSWPRAAGAGVGGPCVLDL

SEQ ID NO: 810807 - protein, 222 aa, Homo sapiens
RGSAPRAAILEAEAAAAALRRVRWAQSRGGAAVSGAGPAFPHPAPASTTASLSAAAAHAQRQGEMSSTSSKRAPTTATQRLKQDYLRIKKDPVPYICAEPLPSNILEWHYVVRGPEMTPYEGGYYHGKLIFPREFPFKPPSIYMITPNGRFKCNTRLCLSITDFHPDTWNPAWSVSTILTGLLSFMVEKGPTLGSIETSDFTLRSFACNRGQDEFCLTSLMS

SEQ ID NO: 810808 - protein, 146 aa, Homo sapiens
MTPYEGGYYHGKLIFPREFPFKPPSIYMITPNGRFKCNTRLCLSITDFHPDTWNPAWSVSTILTGLLSFMVEKGPTLGSIETSDFTKQTTGKCSSSAFYSLDPIKVFGGILSLKSVQDDETKSGLSSRTRSRPQTLPCQTCPDGHS

SEQ ID NO: 810809 - protein, 76 aa, Homo sapiens
GSGWGSGSASGGRRRRPEAAVRALRAHREALPNAWLSARGRLLGANTRPRQTGGAGLRKTPRIENECILTIRENNH

SEQ ID NO: 810810 - protein, 143 aa, Homo sapiens
GSGWGSGSASGGRRRRPEAAVRALRAHREALPNAWLSARGRLLGANTRPRQTGGAGLRKTPRVSSHFPTASLPDSGPRPGVAAPTSFLLRTGVKRENPRPWRARWAGSGEAGPAPPRTPHAGSRGNQKERRGLSFPHLAGGRR

SEQ ID NO: 810811 - protein, 475 aa, Homo sapiens
RPRRASAPPGGSGSAHAPGPPPLRGRARPPSLPPSPAVLARPARPALRVSSLVPSLPGRARAAAALPALEPRCRSRPPPEEEVEGAGGARRGGGGGGKMADFLPSRSVLSVCFPGCLLTSGEAEQQRKSKEIDKCLSREKTYVKRLVKILLLGAGESGKSTFLKQMRIIHGQDFDQRAREEFRPTIYSNVIKGMRVLVDAREKLHIPWGDNSNQQHGDKMMSFDTRAPMAAQGMVETRVFLQYLPAIRALWADSGIQNAYDRRREFQLGESVKYFLDNLDKLGEPDYIPSQQDILLARRPTKGIHEYDFEIKNVPFKMVDVGGQRSERKRWFECFDSVTSILFLVSSSEFDQVLMEDRLTNRLTESLNIFETIVNNRVFSNVSIILFLNKTDLLEEKVQIVSIKDYFLEFEGDPHCLRDVQKFLVECFRNKRRDQQQKPLYHHFTTAINTENIRLVFRDVKDTILHDNLKQLMLQ

SEQ ID NO: 810812 - protein, 475 aa, Homo sapiens; identical to SEQ ID NO: 810811

SEQ ID NO: 810813 - protein, 475 aa, Homo sapiens; identical to SEQ ID NO: 810811

SEQ ID NO: 810814 - protein, 475 aa, Homo sapiens; identical to SEQ ID NO: 810811

SEQ ID NO: 810815 - protein, 475 aa, Homo sapiens; identical to SEQ ID NO: 810811

SEQ ID NO: 810816 - protein, 475 aa, Homo sapiens; identical to SEQ ID NO: 810811

SEQ ID NO: 810817 - protein, 475 aa, Homo sapiens; identical to SEQ ID NO: 810811

SEQ ID NO: 810818 - protein, 475 aa, Homo sapiens; identical to SEQ ID NO: 810811

SEQ ID NO: 810819 - protein, 492 aa, Homo sapiens
RPRRASAPPGGSGSAHAPGPPPLRGRARPPSLPPSPAVLARPARPALRVSSLVPSLPGRARAAAALPALEPRCRSRPPPEEEVEGAGGARRGGGGGGKMADFLPSRSVLSVCFPGCLLTSGEAEQQRKSKEIDKCLSREKTYVKRLVKILLLGAGESGKSTFLKQMRIIHGQDFDQRAREEFRPTIYSNVIKGMRVLVDAREKLHIPWGDNSNQQHGDKMMSFDTRAPMAAQGMVETRVFLQYLPAIRALWADSGIQNAYDRRREFQLGESVKYFLDNLDKLGEPDYIPSQQDILLARRPTKGIHEYDFEIKNVPFKMVDVGGQRSERKRWFECFDSVTSILFLVSSSEFDQVLMEDRLTNRLTESLNIFETIVNNRVFSNVSIILFLNKTDLLEEKVQIVSIKDYFLEFEGDPHCLRDVQKFLVECFRNKRRDQQQKPLYHHFTTAINTENIRLVFRDVKDTILHDNLKQRGSTGMAILTGDFPSLEPRAC

SEQ ID NO: 810820 - protein, 101 aa, Homo sapiens
MWLPSFCVSAASFWLTTRSHQVRVGVIGRVRREATHLWAGWGWQTQLLRGGHLCNNTQGALSHKPLTPCRCQGKKLQGPPFSKLGYKALVCSSIQVLPEKP

SEQ ID NO: 810821 - protein, 1234 aa, Homo sapiens
SHKDYIFELFKLPLVLVLIFLFTITKIKFIKKKAHAVGGFGLDIGTRALLLRARSFIKPSWPLNARSSSSPTQLGNSRRGEPTLPESGFRDSAGAQPNGSGGAGPLCGKRIESPWQPAGRAATPFPPEVGVRTSTCCPSPSPFRPSSGGSVAAMESAGLEQLLRELLLPDTERIRRATEQLQIVLRAPAALPALCDLLASAADPQIRQFAAVLTRRRLNTRWRRLAAEQRESLKSLILTALQRETEHCVSLSLAQLSATIFRKEGLEAWPQLLQLLQHSTHSPHSPEREMGLLLLSVVVTSRPEAFQPHHRELLRLLNETLGEVGSPGLLFYSLRTLTTMAPYLSTEDVPLARMLVPKLIMAMQTLIPIDEAKACEALEALDELLESEVPVITPYLSEVLTFCLEVARNVALGNAIRIRILCCLTFLVKVKSKALLKNRLLPPLLHTLFPIVAAEPPPGQLDPEDQDSEEEELEIELMGETPKHFAVQVVDMLALHLPPEKLCPQLMPMLEEALRSESPYQRKAGLLVLAVLSDGAGDHIRQRLLPPLLQIVCKGLEDPSQVVRNAALFALGQFSENLQPHISSYSREVMPLLLAYLKSVPLGHTHHLAKACYALENFVENLGPKVQPYLPELMECMLQLLRNPSSPRAKELAVSALGAIATAAQASLLPYFPAIMEHLREFLLTGREDLQPVQIQSLETLGVLARAVGEPMRPLAEECCQLGLGLCDQVDDPDLRRCTYSLFAALSGLMGEGLAPHLEQITTLMLLSLRSTEGIVPQYDGSSSFLLFDDESDGEEEEELMDEDVEEEDDSEISGYSVENAFFDEKEDTCAAVGEISVNTSVAFLPYMESVFEEVFKLLECPHLNVRKAAHEALGQFCCALHKACQSCPSEPNTAALQAALARVVPSYMQAVNRERERQVVMAVLEALTGVLRSCGTLTLKPPGRLAELCGVLKAVLQRKTACQDTDEEEEEEDDDQAEYDAMLLEHAGEAIPALAAAAGGDSFAPFFAGFLPLLVCKTKQGCTVAEKSFAVGTLAETIQGLGAASAQFVSRLLPVLLSTAQEADPEVRSNAIFGMGVLAEHGGHPAQEHFPKLLGLLFPLLARERHDRVRDNICGALARLLMASPTRKPEPQVLAALLHALPLKEDLEEWVTIGRLFSFLYQSSPDQVIDVAPELLRICSLILADNKIPPDTKAALLLLLTFLAKQHTDSFQAALGSLPVDKAQELQAVLGLS

SEQ ID NO: 810822 - protein, 1081 aa, Homo sapiens
MESAGLEQLLRELLLPDTERIRRATEQLQIVLRAPAALPALCDLLASAADPQIRQFAAVLTRRRLNTRWRRLAAEQRESLKSLILTALQRETEHCVSLSLAQLSATIFRKEGLEAWPQLLQLLQHSTHSPHSPEREMGLLLLSVVVTSRPEAFQPHHRELLRLLNETLGEVGSPGLLFYSLRTLTTMAPYLSTEDVPLARMLVPKLIMAMQTLIPIDEAKACEALEALDELLESEVPVITPYLSEVLTFCLEVARNVALGNAIRIRILCCLTFLVKVKSKALLKNRLLPPLLHTLFPIVAAEPPPGQLDPEDQDSEEEELEIELMGETPKHFAVQVVDMLALHLPPEKLCPQLMPMLEEALRSESPYQRKAGLLVLAVLSDGAGDHIRQRLLPPLLQIVCKGLEDPSQVVRNAALFALGQFSENLQPHISSYSREVMPLLLAYLKSVPLGHTHHLAKACYALENFVENLGPKVQPYLPELMECMLQLLRNPSSPRAKELAVSALGAIATAAQASLLPYFPAIMEHLREFLLTGREDLQPVQIQSLETLGVLARAVGEPMRPLAEECCQLGLGLCDQVDDPDLRRCTYSLFAALSGLMGEGLAPHLEQITTLMLLSLRSTEGIVPQYDGSSSFLLFDDESDGEEEEELMDEDVEEEDDSEISGYSVENAFFDEKEDTCAAVGEISVNTSVAFLPYMESVFEEVFKLLECPHLNVRKAAHEALGQFCCALHKACQSCPSEPNTAALQAALARVVPSYMQAVNRERERQVVMAVLEALTGVLRSCGTLTLKPPGRLAELCGVLKAVLQRKTACQDTDEEEEEEDDDQAEYDAMLLEHAGEAIPALAAAAGGDSFAPFFAGFLPLLVCKTKQGCTVAEKSFAVGTLAETIQGLGAASAQFVSRLLPVLLSTAQEADPEVRSNAIFGMGVLAEHGGHPAQEHFPKLLGLLFPLLARERHDRVRDNICGALARLLMASPTRKPEPQVLAALLHALPLKEDLEEWVTIGRLFSFLYQSSPDQVIDVAPELLRICSLILADNKIPPDTKAALLLLLTFLAKQHTDSFQAALGSLPVDKAQELQAVLGLS

SEQ ID NO: 810823 - protein, 1098 aa, Homo sapiens
SEYNARGLGMLQWEGIQDTRELRQQLLRELLLPDTERIRRATEQLQIVLRAPAALPALCDLLASAADPQIRQFAAVLTRRRLNTRWRRLAAEQRESLKSLILTALQRETEHCVSLSLAQLSATIFRKEGLEAWPQLLQLLQHSTHSPHSPEREMGLLLLSVVVTSRPEAFQPHHRELLRLLNETLGEVGSPGLLFYSLRTLTTMAPYLSTEDVPLARMLVPKLIMAMQTLIPIDEAKACEALEALDELLESEVPVITPYLSEVLTFCLEVARNVALGNAIRIRILCCLTFLVKVKSKALLKNRLLPPLLHTLFPIVAAEPPPGQLDPEDQDSEEEELEIELMGETPKHFAVQVVDMLALHLPPEKLCPQLMPMLEEALRSESPYQRKAGLLVLAVLSDGAGDHIRQRLLPPLLQIVCKGLEDPSQVVRNAALFALGQFSENLQPHISSYSREVMPLLLAYLKSVPLGHTHHLAKACYALENFVENLGPKVQPYLPELMECMLQLLRNPSSPRAKELAVSALGAIATAAQASLLPYFPAIMEHLREFLLTGREDLQPVQIQSLETLGVLARAVGEPMRPLAEECCQLGLGLCDQVDDPDLRRCTYSLFAALSGLMGEGLAPHLEQITTLMLLSLRSTEGIVPQYDGSSSFLLFDDESDGEEEEELMDEDVEEEDDSEISGYSVENAFFDEKEDTCAAVGEISVNTSVAFLPYMESVFEEVFKLLECPHLNVRKAAHEALGQFCCALHKACQSCPSEPNTAALQAALARVVPSYMQAVNRERERQVVMAVLEALTGVLRSCGTLTLKPPGRLAELCGVLKAVLQRKTACQDTDEEEEEEDDDQAEYDAMLLEHAGEAIPALAAAAGGDSFAPFFAGFLPLLVCKTKQGCTVAEKSFAVGTLAETIQGLGAASAQFVSRLLPVLLSTAQEADPEVRSNAIFGMGVLAEHGGHPAQEHFPKLLGLLFPLLARERHDRVRDNICGALARLLMASPTRKPEPQVLAALLHALPLKEDLEEWVTIGRLFSFLYQSSPDQVIDVAPELLRICSLILADNKIPPDTKAALLLLLTFLAKQHTDSFQAALGSLPVDKAQELQAVLGLS

SEQ ID NO: 810824 - protein, 877 aa, Homo sapiens
RLGEAGLNRTRIDEAKACEALEALDELLESEVPVITPYLSEVLTFCLEVARNVALGNAIRIRILCCLTFLVKVKSKALLKNRLLPPLLHTLFPIVAAEPPPGQLDPEDQDSEEEELEIELMGETPKHFAVQVVDMLALHLPPEKLCPQLMPMLEEALRSESPYQRKAGLLVLAVLSDGAGDHIRQRLLPPLLQIVCKGLEDPSQVVRNAALFALGQFSENLQPHISSYSREVMPLLLAYLKSVPLGHTHHLAKACYALENFVENLGPKVQPYLPELMECMLQLLRNPSSPRAKELAVSALGAIATAAQASLLPYFPAIMEHLREFLLTGREDLQPVQIQSLETLGVLARAVGEPMRPLAEECCQLGLGLCDQVDDPDLRRCTYSLFAALSGLMGEGLAPHLEQITTLMLLSLRSTEGIVPQYDGSSSFLLFDDESDGEEEEELMDEDVEEEDDSEISGYSVENAFFDEKEDTCAAVGEISVNTSVAFLPYMESVFEEVFKLLECPHLNVRKAAHEALGQFCCALHKACQSCPSEPNTAALQAALARVVPSYMQAVNRERERQVVMAVLEALTGVLRSCGTLTLKPPGRLAELCGVLKAVLQRKTACQDTDEEEEEEDDDQAEYDAMLLEHAGEAIPALAAAAGGDSFAPFFAGFLPLLVCKTKQGCTVAEKSFAVGTLAETIQGLGAASAQFVSRLLPVLLSTAQEADPEVRSNAIFGMGVLAEHGGHPAQEHFPKLLGLLFPLLARERHDRVRDNICGALARLLMASPTRKPEPQVLAALLHALPLKEDLEEWVTIGRLFSFLYQSSPDQVIDVAPELLRICSLILADNKIPPDTKAALLLLLTFLAKQHTDSFQAALGSLPVDKAQELQAVLGLS

SEQ ID NO: 810825 - protein, 1234 aa, Homo sapiens; identical to SEQ ID NO: 810821

SEQ ID NO: 810826 - protein, 1261 aa, Homo sapiens
SHKDYIFELFKLPLVLVLIFLFTITKIKFIKKKAHAVGGFGLDIGTRALLLRARSFIKPSWPLNARSSSSPTQLGNSRRGEPTLPESGFRDSAGAQPNGSGGAGPLCGKRIESPWQPAGRAATPFPPEVGVRTSTCCPSPSPFRPSSGGSVAAMESAGLEQLLRELLLPDTERIRRATEQLQIVLRAPAALPALCDLLASAADPQIRQFAAVLTRRRLNTRWRRLAAEQRESLKSLILTALQRETEHCVSLSLAQLSATIFRKEGLEAWPQLLQLLQHSTHSPHSPEREMGLLLLSVVVTSRPEAFQPHHRELLRLLNETLGEVGSPGLLFYSLRTLTTMAPYLSTEDVPLARMLVPKLIMAMQTLIPIDEAKACEALEALDELLESEVPVITPYLSEVLTFCLEVARNVALGNAIRIRILCCLTFLVKVKSKALLKNRLLPPLLHTLFPIVAAEPPPGQLDPEDQDSEEEELEIELMGETPKHFAVQVVDMLALHLPPEKLCPQLMPMLEEALRSESPYQRKAGLLVLAVLSDGAGDHIRQRLLPPLLQIVCKGLEDPSQVVRNAALFALGQFSENLQPHISSYSREVMPLLLAYLKSVPLGHTHHLAKACYALENFVENLGPKVQPYLPELMECMLQLLRNPSSPRAKELAVSALGAIATAAQASLLPYFPAIMEHLREFLLTGREDLQPVQIQSLETLGVLARAVGEPMRPLAEECCQLGLGLCDQVDDPDLRRCTYSLFAALSGLMGEGLAPHLEQITTLMLLSLRSTEGIVPQYDGSSSFLLFDDESDGEEEEELMDEDVEEEDDSEISGYSVENAFFDEKEDTCAAVGEISVNTSVAFLPYMESVFEEVFKLLECPHLNVRKAAHEALGQFCCALHKACQSCPSEPNTAGEERLGQAGGSWGGAGPELVLQPIMSPALQAALARVVPSYMQAVNRERERQVVMAVLEALTGVLRSCGTLTLKPPGRLAELCGVLKAVLQRKTACQDTDEEEEEEDDDQAEYDAMLLEHAGEAIPALAAAAGGDSFAPFFAGFLPLLVCKTKQGCTVAEKSFAVGTLAETIQGLGAASAQFVSRLLPVLLSTAQEADPEVRSNAIFGMGVLAEHGGHPAQEHFPKLLGLLFPLLARERHDRVRDNICGALARLLMASPTRKPEPQVLAALLHALPLKEDLEEWVTIGRLFSFLYQSSPDQVIDVAPELLRICSLILADNKIPPDTKAALLLLLTFLAKQHTDSFQAALGSLPVDKAQELQAVLGLS

SEQ ID NO: 810827 - protein, 769 aa, Homo sapiens
GRVGRPTRRIELMGETPKHFAVQVVDMLALHLPPEKLCPQLMPMLEEALRSESPYQRKAGLLVLAVLSDGAGDHIRQRLLPPLLQIVCKGLEDPSQVVRNAALFALGQFSENLQPHISSYSREVMPLLLAYLKSVPLGHTHHLAKACYALENFVENLGPKVQPYLPELMECMLQLLRNPSSPRAKELAVSALGAIATAAQASLLPYFPAIMEHLREFLLTGREDLQPVQIQSLETLGVLARAVGEPMRPLAEECCQLGLGLCDQVDDPDLRRCTYSLFAALSGLMGEGLAPHLEQITTLMLLSLRSTEGIVPQYDGSSSFLLFDDESDGEEEEELMDEDVEEEDDSEISGYSVENAFFDEKEDTCAAVGEISVNTSVAFLPYMESVFEEVFKLLECPHLNVRKAAHEALGQFCCALHKACQSCPSEPNTAALQAALARVVPSYMQAVNRERERQVVMAVLEALTGVLRSCGTLTLKPPGRLAELCGVLKAVLQRKTACQDTDEEEEEEDDDQAEYDAMLLEHAGEAIPALAAAAGGDSFAPFFAGFLPLLVCKTKQGCTVAEKSFAVGTLAETIQGLGAASAQFVSRLLPVLLSTAQEADPEVRSNAIFGMGVLAEHGGHPAQEHFPKLLGLLFPLLARERHDRVRDNICGALARLLMASPTRKPEPQVLAALLHALPLKEDLEEWVTIGRLFSFLYQSSPDQVIDVAPELLRICSLILADNKIPPDTKAALLLLLTFLAKQHTDSFQAALGSLPVDKAQELQAVLGLS

SEQ ID NO: 810828 - protein, 894 aa, Homo sapiens
SHKDYIFELFKLPLVLVLIFLFTITKIKFIKKKAHAVGGFGLDIGTRALLLRARSFIKPSWPLNARSSSSPTQLGNSRRGEPTLPESGFRDSAGAQPNGSGGAGPLCGKRIESPWQPAGRAATPFPPEVGVRTSTCCPSPSPFRPSSGGSVAAMESAGLEQLLRELLLPDTERIRRATEQLQIVLRAPAALPALCDLLASAADPQIRQFAAVLTRRRLNTRWRRLAAEQRESLKSLILTALQRETEHCVSLSLAQLSATIFRKEGLEAWPQLLQLLQHSTHSPHSPEREMGLLLLSVVVTSRPEAFQPHHRELLRLLNETLGEVGSPGLLFYSLRTLTTMAPYLSTEDVPLARMLVPKLIMAMQTLIPIDEAKACEALEALDELLESEVPVITPYLSEVLTFCLEVARNVALGNAIRIRILCCLTFLVKVKSKALLKNRLLPPLLHTLFPIVAAEPPPGQLDPEDQDSEEEELEIELMGETPKHFAVQVVDMLALHLPPEKLCPQLMPMLEEALRSESPYQRKAGLLVLAVLSDGAGDHIRQRLLPPLLQIVCKGLEDPSQVVRNAALFALGQFSENLQPHISSYSREVMPLLLAYLKSVPLGHTHHLAKACYALENFVENLGPKVQPYLPELMECMLQLLRNPSSPRAKELAVSALGAIATAAQASLLPYFPAIMEHLREFLLTGREDLQPVQIQSLETLGVLARAVGEPMRPLAEECCQLGLGLCDQVDDPDLRRCTYSLFAALSGLMGEGLAPHLEQITTLMLLSLRSTEGIVPQYDGSSSFLLFDDESDGEEEEELMDEDVEEEDDSEISGYSVENAFFDEKEDTCAAVGEISVNTSVAFLPYMESVFEEVFKLLELTFLAKQHTDSFQAALGSLPVDKAQELQAVLGLS

SEQ ID NO: 810829 - protein, 150 aa, Homo sapiens
SPEPDGSDAGGHAQDENLGHRADELAHHGDRKEMRLQAAQLHPGPQAVESRASESNGAQAELLQQPSHWQEQRDVSQHVAHGQPVNGKGTDTVEVHEDVIDGAVLDPLKGVAHGVAAKHQDHGPTAPAHLDHAEVLRARATGVSQATGLG

SEQ ID NO: 810830 - protein, 129 aa, Homo sapiens
MRLKVGFQGGGCFRKDALCLEGGVSARWARAPHSAPLRPPRELHAAPPPATPTQTVVRPAGFPRRTRLMVRSAPPTQRPPTGSGCVSGLWRKGLGLRPQTLLRVGSVVLSSAPALRPRLGPCLRPPPSD

SEQ ID NO: 810831 - protein, 315 aa, Homo sapiens
CSAAATMEAARTAVLRVKRKRSAEPAEALVLACKRLRSDAVESAAQKTSEDLERAAENNVFHLVATVCSQEEPVQPLLREVLRPSRDSQQRVRRNLRASAREVRQEGRYRVLSSRRSLGTTSSGQESEYTPGNPEAAGNSGFQLLDLVHEEGEPEAASAGSCKTSDPDVILCNSVELIRERLTVSEDGPGVRRQEEQKHDDYVYDIYYLETATPGWIENILSVQPYSQEWELVNDDQEPEDIYDDEDDENSENNWRNEYPEEESSDGDEDSRGSADYNSLSEEERGSSRQRMWSKYPLDVQKEFGYDSPHDLDSD

SEQ ID NO: 810832 - protein, 249 aa, Homo sapiens
CSAAATMEAARTAVLRVKRKRSAEPAEALVLACKRLRSDAVESAAQKTSEDLERAAENNVFHLVATVCSQEEPVQPLLREVLRPSRDSQQRVRRNLRASAREVRQEGRYRVLSSRRSLGTTSSGQESEYTPGNPEAAGNSGFQLLDLVHEEGEPEAASAGSCKTSDPDVILCNSVELIRERLTVSEDGPGVRRQEEQKHDDYVYDIYYLETATPGWIENILSVQPYSQEWELVRGPMSRRGMRHPKLLI

SEQ ID NO: 810833 - protein, 315 aa, Homo sapiens; identical to SEQ ID NO: 810831

SEQ ID NO: 810834 - protein, 283 aa, Homo sapiens
CSAAATMEAARTAVLRVKRKRSAEPAEALVLACKRLRSDAVESAAQKTSEDLERAAENNVFHLVATVCSQEEPVQPLLREVLRPSRDSQQRVRRNLRASAREVRQEGRYRVLSSRRSLGTTSSGQESEYTPGNPEAAGNSGFQLLDLVHEEGEPEAASAGSCKTSDPDVILCNSVELIRERLTVSEDGPGVRRQEEQKHDDYVYDIYYLETATPGWIENILSVQPYSQEWELVNDDQEPEDIYDDEDDENSENNWRNEYPEEESSDGDEDSRGGWQPQTGRDW

SEQ ID NO: 810835 - protein, 283 aa, Homo sapiens; identical to SEQ ID NO: 810834

SEQ ID NO: 810836 - protein, 956 aa, Homo sapiens
MGLEQIIKIPDQPDTLCFQIRGAAPPYVYAVGRGSEAMAAGLCAGQCILKVNGSNVMNDGAPEVLEHFQAFRSRREEALGLYQWIYHTHEDAQEARASQEASTEDPSGEQAQEEDQADSAFPLLSLGPRLSLCEDSPMVTLTVDNVHLEHGVVYEYVSTAGVRCHVLEKIVEPRGCFGLTAKILEAFAANDSVFVENCRRLMALSSAIVTMPHFEFRNICDTKLESIGQRIACYQEFAAQLKSRVSPPFKQAPLEPHPLCGLDFCPTNCHINLMEVSYPKTTPSVGRSFSIRFGRKPSLIGLDPEQGHLNPMSYTQHCITTMAAPSWKCLPAAEGDPQGQGLHDGSFGPASGTLGQEDRGLSFLLKQEDREIQDAYLQLFTKLDVALKEMKQYVTQINRLLSTITEPTSGGSCDASLAEEASSLPLVSEESEMDRSDHGGIKKVCFKVAEEDQEDSGHDTMSYRDSYSECNSNRDSVLSYTSVRSNSSYLGSDEMGSGDELPCDMRIPSDKQDKLHGCLEHLFNQVDSINALLKGPVMSRAFEETKHFPMNHSLQEFKQKEECTIRGRSLIQISIQEDPWNLPNSIKTLVDNIQRYVEDGKNQLLLALLKCTDTELQLRRDAIFCQALVAAVCTFSEQLLAALGYRYNNNGEYEESSRDASRKWLEQVAATGVLLHCQSLLSPATVKEERTMLEDIWVTLSELDNVTFSFKQLDENYVANTNVFYHIEGSRQALKVIFYLDSYHFSKLPSRLEGGASLRLHTALFTKVLENVEGLPSPGSQAAEDLQQDINAQSLEKVQQYYRKLRAFYLERSNLPTDASTTAVKIDQLIRPINALDELCRLMKSFVHPKPGAAGSVGAGLIPISSELCYRLGACQMVMCGTGMQRSTLSVSLEQAAILARSHGLLPKCIMQATDIMRKQGPRVEILAKNLRVKDQMPQGAPRLYRLCQPPVDGDL

SEQ ID NO: 810837 - protein, 110 aa, Homo sapiens
CVVIQRIPHAMSQCQQCSHLNPMSYTQHCITTMAAPSWKCLPAAEGDPQGQGLHDGSFGPASGTLGQEDRGLSFLLKQEDREIQDAYLQLFTKLDVALKEMKQYVTQINR

SEQ ID NO: 810838 - protein, 1636 aa, Homo sapiens
SNRNRSYENRCPLLAAARESERQLRLRLCVLNEILGTERDYVGTLRFLQSAFLHRIRQNVADSVEKGLTEENVKVLFSNIEDILEVHKDFLAALEYCLHPEPQSQHELGNVFLKFKDKFCVYEEYCSNHEKALRLLVELNKIPTVRAFLLSCMLLGGRKTTDIPLEGYLLSPIQRICKYPLLLKELAKRTPGKHPDHPAVQSALQAMKTVCSNINETKRQMEKLEALEQLQSHIEGWEGSNLTDICTQLLLQGTLLKISAGNIQERAFFLFDNLLVYCKRKSRVTGSKKSTKRTKSINGSLYIFRGRINTEVMEVENVEDGTADYHSNGYTVTNGWKIHNTAKNKWFVCMAKTAEEKQKWLDAIIREREQRESLKLGMERDAYVMIAEKGEKLYHMMMNKKVNLIKDRRRKLSTVPKCFLGNEFVAWLLEIGEISKTEEGVNLGQALLENGIIHHVSDKHQFKNEQVMYRFRYDDGTYKARSELEDIMSKGVRLYCRLHSLYTPVIKDRDYHLKTYKSVLPGSKLVDWLLAQGDCQTREEAVALGVGLCNNGFMHHVLEKSEFRDESQYFRFHADEEMEGTSSKNKQLRNDFKLVENILAKRLLILPQEEDYGFDIEEKNKAVVVKSVQRGSLAEVAGLQVGRKIYSINEDLVFLRPFSEVESILNQSFCSRRPLRLLVATKAKEIIKIPDQPDTLCFQIRGAAPPYVYAVGRGSEAMAAGLCAGQCILKVNGSNVMNDGAPEVLEHFQAFRSRREEALGLYQWIYHTHEDAQEARASQEASTEDPSGEQAQEEDQADSAFPLLSLGPRLSLCEDSPMVTLTVDNVHLEHGVVYEYVSTAGVRCHVLEKIVEPRGCFGLTAKILEAFAANDSVFVENCRRLMALSSAIVTMPHFEFRNICDTKLESIGQRIACYQEFAAQLKSRVSPPFKQAPLEPHPLCGLDFCPTNCHINLMEVSYPKTTPSVGRSFSIRFGRKPSLIGLDPEQGHLNPMSYTQHCITTMAAPSWKCLPAAEGDPQGQGLHDGSFGPASGTLGQEDRGLSFLLKQEDREIQDAYLQLFTKLDVALKEMKQYVTQINRLLSTITEPTSGGSCDASLAEEASSLPLVSEESEMDRSDHGGIKKVCFKVAEEDQEDSGHDTMSYRDSYSECNSNRDSVLSYTSVRSNSSYLGSDEMGSGDELPCDMRIPSDKQDKLHGCLEHLFNQVDSINALLKGPVMSRAFEETKHFPMNHSLQEFKQKEECTIRGRSLIQISIQEDPWNLPNSIKTLVDNIQRYVEDGKNQLLLALLKCTDTELQLRRDAIFCQALVAAVCTFSEQLLAALGYRYNNNGEYEESSRDASRKWLEQVAATGVLLHCQSLLSPATVKEERTMLEDIWVTLSELDNVTFSFKQLDENYVANTNVFYHIEGSRQALKVIFYLDSYHFSKLPSRLEGGASLRLHTALFTKVLENVEGLPSPGSQAAEDLQQDINAQSLEKVQQYYRKLRAFYLERSNLPTDASTTAVKIDQLIRPINALDELCRLMKSFVHPKPGAAGSVGAGLIPISSELCYRLGACQMVMCGTGMQRSTLSVSLEQAAILARSHGLLPKCIMQATDIMRKQGPRVEILAKNLRVKDQMPQGAPRLYRLCQPPVDGDL

SEQ ID NO: 810839 - protein, 1612 aa, Homo sapiens
SNRNRSYENRCPLLAAARESERQLRLRLCVLNEILGTERDYVGTLRFLQSVLFSNIEDILEVHKDFLAALEYCLHPEPQSQHELGNVFLKFKDKFCVYEEYCSNHEKALRLLVELNKIPTVRAFLLSCMLLGGRKTTDIPLEGYLLSPIQRICKYPLLLKELAKRTPGKHPDHPAVQSALQAMKTVCSNINETKRQMEKLEALEQLQSHIEGWEGSNLTDICTQLLLQGTLLKISAGNIQERAFFLFDNLLVYCKRKSRVTGSKKSTKRTKSINGSLYIFRGRINTEVMEVENVEDGTADYHSNGYTVTNGWKIHNTAKNKWFVCMAKTAEEKQKWLDAIIREREQRESLKLGMERDAYVMIAEKGEKLYHMMMNKKVNLIKDRRRKLSTVPKCFLGNEFVAWLLEIGEISKTEEGVNLGQALLENGIIHHVSDKHQFKNEQVMYRFRYDDGTYKARSELEDIMSKGVRLYCRLHSLYTPVIKDRDYHLKTYKSVLPGSKLVDWLLAQGDCQTREEAVALGVGLCNNGFMHHVLEKSEFRDESQYFRFHADEEMEGTSSKNKQLRNDFKLVENILAKRLLILPQEEDYGFDIEEKNKAVVVKSVQRGSLAEVAGLQVGRKIYSINEDLVFLRPFSEVESILNQSFCSRRPLRLLVATKAKEIIKIPDQPDTLCFQIRGAAPPYVYAVGRGSEAMAAGLCAGQCILKVNGSNVMNDGAPEVLEHFQAFRSRREEALGLYQWIYHTHEDAQEARASQEASTEDPSGEQAQEEDQADSAFPLLSLGPRLSLCEDSPMVTLTVDNVHLEHGVVYEYVSTAGVRCHVLEKIVEPRGCFGLTAKILEAFAANDSVFVENCRRLMALSSAIVTMPHFEFRNICDTKLESIGQRIACYQEFAAQLKSRVSPPFKQAPLEPHPLCGLDFCPTNCHINLMEVSYPKTTPSVGRSFSIRFGRKPSLIGLDPEQGHLNPMSYTQHCITTMAAPSWKCLPAAEGDPQGQGLHDGSFGPASGTLGQEDRGLSFLLKQEDREIQDAYLQLFTKLDVALKEMKQYVTQINRLLSTITEPTSGGSCDASLAEEASSLPLVSEESEMDRSDHGGIKKVCFKVAEEDQEDSGHDTMSYRDSYSECNSNRDSVLSYTSVRSNSSYLGSDEMGSGDELPCDMRIPSDKQDKLHGCLEHLFNQVDSINALLKGPVMSRAFEETKHFPMNHSLQEFKQKEECTIRGRSLIQISIQEDPWNLPNSIKTLVDNIQRYVEDGKNQLLLALLKCTDTELQLRRDAIFCQALVAAVCTFSEQLLAALGYRYNNNGEYEESSRDASRKWLEQVAATGVLLHCQSLLSPATVKEERTMLEDIWVTLSELDNVTFSFKQLDENYVANTNVFYHIEGSRQALKVIFYLDSYHFSKLPSRLEGGASLRLHTALFTKVLENVEGLPSPGSQAAEDLQQDINAQSLEKVQQYYRKLRAFYLERSNLPTDASTTAVKIDQLIRPINALDELCRLMKSFVHPKPGAAGSVGAGLIPISSELCYRLGACQMVMCGTGMQRSTLSVSLEQAAILARSHGLLPKCIMQATDIMRKQGPRVEILAKNLRVKDQMPQGAPRLYRLCQPPVDGDL

SEQ ID NO: 810840 - protein, 1637 aa, Homo sapiens
MILRNSPDMGTILMEQPLYAGHWESSSEQNKFPAPAELNILGRESNNTAWVAFLHRIRQNVADSVEKGLTEENVKVLFSNIEDILEVHKDFLAALEYCLHPEPQSQHELGNVFLKFKDKFCVYEEYCSNHEKALRLLVELNKIPTVRAFLLSCMLLGGRKTTDIPLEGYLLSPIQRICKYPLLLKELAKRTPGKHPDHPAVQSALQAMKTVCSNINETKRQMEKLEALEQLQSHIEGWEGSNLTDICTQLLLQGTLLKISAGNIQERAFFLFDNLLVYCKRKSRVTGSKKSTKRTKSINGSLYIFRGRINTEVMEVENVEDGTADYHSNGYTVTNGWKIHNTAKNKWFVCMAKTAEEKQKWLDAIIREREQRESLKLGMERDAYVMIAEKGEKLYHMMMNKKVNLIKDRRRKLSTVPKCFLGNEFVAWLLEIGEISKTEEGVNLGQALLENGIIHHVSDKHQFKNEQVMYRFRYDDGTYKARSELEDIMSKGVRLYCRLHSLYTPVIKDRDYHLKTYKSVLPGSKLVDWLLAQGDCQTREEAVALGVGLCNNGFMHHVLEKSEFRDESQYFRFHADEEMEGTSSKNKQLRNDFKLVENILAKRLLILPQEEDYGFDIEEKNKAVVVKSVQRGSLAEVAGLQVGRKIYSINEDLVFLRPFSEVESILNQSFCSRRPLRLLVATKAKEIIKIPDQPDTLCFQIRGAAPPYVYAVGRGSEAMAAGLCAGQCILKVNGSNVMNDGAPEVLEHFQAFRSRREEALGLYQWIYHTHEDAQEARASQEASTEDPSGEQAQEEDQADSAFPLLSLGPRLSLCEDSPMVTLTVDNVHLEHGVVYEYVSTAGVRCHVLEKIVEPRGCFGLTAKILEAFAANDSVFVENCRRLMALSSAIVTMPHFEFRNICDTKLESIGQRIACYQEFAAQLKSRVSPPFKQAPLEPHPLCGLDFCPTNCHINLMEVSYPKTTPSVGRSFSIRFGRKPSLIGLDPEQGHLNPMSYTQHCITTMAAPSWKCLPAAEGDPQGQGLHDGSFGPASGTLGQEDRGLSFLLKQEDREIQDAYLQLFTKLDVALKEMKQYVTQINRLLSTITEPTSGGSCDASLAEEASSLPLVSEESEMDRSDHGGIKKVCFKVAEEDQEDSGHDTMSYRDSYSECNSNRDSVLSYTSVRSNSSYLGSDEMGSGDELPCDMRIPSDKQDKLHGCLEHLFNQVDSINALLKGPVMSRAFEETKHFPMNHSLQEFKQKEECTIRGRSLIQISIQEDPWNLPNSIKTLVDNIQRYVEDGKNQLLLALLKCTDTELQLRRDAIFCQALVAAVCTFSEQLLAALGYRYNNNGEYEESSRDASRKWLEQVAATGVLLHCQSLLSPATVKEERTMLEDIWVTLSELDNVTFSFKQLDENYVANTNVFYHIEGSRQALKVIFYLDSYHFSKLPSRLEGGASLRLHTALFTKVLENVEGLPSPGSQAAEDLQQDINAQSLEKVQQYYRKLRAFYLERSNLPTDASTTAVKIDQLIRPINALDELCRLMKSFVHPKPGAAGSVGAGLIPISSELCYRLGACQMVMCGTGMQRSTLSVSLEQAAILARSHGLLPKCIMQATDIMRKQGPRVEILAKNLRVKDQMPQGAPRLYRLCQPPVDGDL

SEQ ID NO: 810841 - protein, 1592 aa, Homo sapiens
LTIGLDRYSYRARSPTGQVSVQTGLTEEKSVLFSNIEDILEVHKDFLAALEYCLHPEPQSQHELGNVFLKFKDKFCVYEEYCSNHEKALRLLVELNKIPTVRAFLLSCMLLGGRKTTDIPLEGYLLSPIQRICKYPLLLKELAKRTPGKHPDHPAVQSALQAMKTVCSNINETKRQMEKLEALEQLQSHIEGWEGSNLTDICTQLLLQGTLLKISAGNIQERAFFLFDNLLVYCKRKSRVTGSKKSTKRTKSINGSLYIFRGRINTEVMEVENVEDGTADYHSNGYTVTNGWKIHNTAKNKWFVCMAKTAEEKQKWLDAIIREREQRESLKLGMERDAYVMIAEKGEKLYHMMMNKKVNLIKDRRRKLSTVPKCFLGNEFVAWLLEIGEISKTEEGVNLGQALLENGIIHHVSDKHQFKNEQVMYRFRYDDGTYKARSELEDIMSKGVRLYCRLHSLYTPVIKDRDYHLKTYKSVLPGSKLVDWLLAQGDCQTREEAVALGVGLCNNGFMHHVLEKSEFRDESQYFRFHADEEMEGTSSKNKQLRNDFKLVENILAKRLLILPQEEDYGFDIEEKNKAVVVKSVQRGSLAEVAGLQVGRKIYSINEDLVFLRPFSEVESILNQSFCSRRPLRLLVATKAKEIIKIPDQPDTLCFQIRGAAPPYVYAVGRGSEAMAAGLCAGQCILKVNGSNVMNDGAPEVLEHFQAFRSRREEALGLYQWIYHTHEDAQEARASQEASTEDPSGEQAQEEDQADSAFPLLSLGPRLSLCEDSPMVTLTVDNVHLEHGVVYEYVSTAGVRCHVLEKIVEPRGCFGLTAKILEAFAANDSVFVENCRRLMALSSAIVTMPHFEFRNICDTKLESIGQRIACYQEFAAQLKSRVSPPFKQAPLEPHPLCGLDFCPTNCHINLMEVSYPKTTPSVGRSFSIRFGRKPSLIGLDPEQGHLNPMSYTQHCITTMAAPSWKCLPAAEGDPQGQGLHDGSFGPASGTLGQEDRGLSFLLKQEDREIQDAYLQLFTKLDVALKEMKQYVTQINRLLSTITEPTSGGSCDASLAEEASSLPLVSEESEMDRSDHGGIKKVCFKVAEEDQEDSGHDTMSYRDSYSECNSNRDSVLSYTSVRSNSSYLGSDEMGSGDELPCDMRIPSDKQDKLHGCLEHLFNQVDSINALLKGPVMSRAFEETKHFPMNHSLQEFKQKEECTIRGRSLIQISIQEDPWNLPNSIKTLVDNIQRYVEDGKNQLLLALLKCTDTELQLRRDAIFCQALVAAVCTFSEQLLAALGYRYNNNGEYEESSRDASRKWLEQVAATGVLLHCQSLLSPATVKEERTMLEDIWVTLSELDNVTFSFKQLDENYVANTNVFYHIEGSRQALKVIFYLDSYHFSKLPSRLEGGASLRLHTALFTKVLENVEGLPSPGSQAAEDLQQDINAQSLEKVQQYYRKLRAFYLERSNLPTDASTTAVKIDQLIRPINALDELCRLMKSFVHPKPGAAGSVGAGLIPISSELCYRLGACQMVMCGTGMQRSTLSVSLEQAAILARSHGLLPKCIMQATDIMRKQGPRVEILAKNLRVKDQMPQGAPRLYRLCQPPVDGDL

SEQ ID NO: 810842 - protein, 1671 aa, Homo sapiens
SNRNRSYENRCPLLAAARESERQLRLRLCVLNEILGTERDYVGTLRFLQSAFLHRIRQNVADSVEKGLTEENVKVLFSNIEDILEVHKDFLAALEYCLHPEPQSQHELGNVFLKFKDKFCVYEEYCSNHEKALRLLVELNKIPTVRAFLLSCMLLGGRKTTDIPLEGYLLSPIQRICKYPLLLKELAKRTPGKHPDHPAVQSALQAMKTVCSNINETKRQMEKLEALEQLQSHIEGWEGSNLTDICTQLLLQGTLLKISAGNIQERAFFLFDNLLVYCKRKSRVTGSKKSTKRTKSINGSLYIFRGRINTEVMEVENVEDGTADYHSNGYTVTNGWKIHNTAKNKWFVCMAKTAEEKQKWLDAIIREREQRESLKLGMERDAYVMIAEKGEKLYHMMMNKKVNLIKDRRRKLSTVPKCFLGNEFVAWLLEIGEISKTEEGVNLGQALLENGIIHHVSDKHQFKNEQVMYRFRYDDGTYKARSELEDIMSKGVRLYCRLHSLYTPVIKDRDYHLKTYKSVLPGSKLVDWLLAQGDCQTREEAVALGVGLCNNGFMHHVLEKSEFRDESQYFRFHADEEMEGTSSKNKQLRNDFKLVENILAKRLLILPQEEDYGFDIEEKNKAVVVKSVQRGSLAEVAGLQVGRKIYSINEDLVFLRPFSEVESILNQSFCSRRPLRLLVATKAKEIIKIPDQPDTLCFQIRGAAPPYVYAVGRGSEAMAAGLCAGQCILKVNGSNVMNDGAPEVLEHFQAFRSRREEALGLYQWIYHTHEDAQEARASQEASTEDPSGEQAQEEDQADSAFPLLSLGPRLSLCEDSPMVTLTVDNVHLEHGVVYEYVSTAGVRCHVLEKIVEPRGCFGLTAKILEAFAANDSVFVENCRRLMALSSAIVTMPHFEFRNICDTKLESIGQRIACYQEFAAQLKSRVSPPFKQAPLEPHPLCGLDFCPTNCHINLMEVSYPKTTPSVGRSFSIRFGRKPSLIGLDPEQGHLNPMSYTQHCITTMAAPSWKCLPAAEGDPQGQGLHDGSFGPASGTLGQEDRGLSFLLKQEDREIQDAYLQLFTKLDVALKEMKQYVTQINRLLSTITEPTSGGSCDASLAEEASSLPLVSEESEMDRSDHGGIKKVCFKVAEEDQEDSGHDTMSYRDSYSECNSNRDSVLSYTSVRSNSSYLGSDEMGSGDELPCDMRIPSDKQDKLHGCLEHLFNQVDSINALLKGPVMSRAFEETKHFPMNHSLQEFKQKEECTIRGRSLIQISIQEDPWNLPNSIKTLVDNIQRYVEDGKNQLLLALLKCTDTELQLRRDAIFCQALVAAVCTFSEQLLAALGYRYNNNGEYEESSRDASRKWLEQVAATGVLLHCQSLLSPATVKEERTMLEDIWVTLSELDNVTFSFKQLDENYVANTNVFYHIEGSRQALKVIFYLDSYHFSKLPSRLEGGASLRLHTALFTKGELQAWGREDHGGRAKATKHTGSQPPARPRHLPSQVLENVEGLPSPGSQAAEDLQQDINAQSLEKVQQYYRKLRAFYLERSNLPTDASTTAVKIDQLIRPINALDELCRLMKSFVHPKPGAAGSVGAGLIPISSELCYRLGACQMVMCGTGMQRSTLSVSLEQAAILARSHGLLPKCIMQATDIMRKQGPRVEILAKNLRVKDQMPQGAPRLYRLCQPPVDGDL

SEQ ID NO: 810843 - protein, 1598 aa, Homo sapiens
SNRNRSYENRCPLLAAARESERQLRLRLCVLNEILGTERDYVGTLRFLQSAFLHRIRQNVADSVEKGLTEENVKVLFSNIEDILEVHKDFLAALEYCLHPEPQSQHELGNVFLKFKDKFCVYEEYCSNHEKALRLLVELNKIPTVRAFLLSCMLLGGRKTTDIPLEGYLLSPIQRICKYPLLLKELAKRTPGKHPDHPAVQSALQAMKTVCSNINETKRQMEKLEALEQLQSHIEGWEGSNLTDICTQLLLQGTLLKISAGNIQERAFFLFDNLLVYCKRKSRVTGSKKSTKRTKSINGSLYIFRGRINTEVMEVENVEDGTADYHSNGYTVTNGWKIHNTAKNKWFVCMAKTAEEKQKWLDAIIREREQRESLKLGMERDAYVMIAEKGEKLYHMMMNKKVNLIKDRRRKLSTVPKCFLGNEFVAWLLEIGEISKTEEGVNLGQALLENGIIHHVSDKHQFKNEQVMYRFRYDDGTYKARSELEDIMSKGVRLYCRLHSLYTPVIKDRDYHLKTYKSVLPGSKLVDWLLAQGDCQTREEAVALGVGLCNNGFMHHVLEKSEFRDESQYFRFHADEEMEGTSSKNKQLRNDFKLVENILAKRLLILPQEEDYGFDIEEKNKAVVVKSVQRGSLAEVAGLQVGRKIYSINEDLVFLRPFSEVESILNQSFCSRRPLRLLVATKAKEIIKIPDQPDTLCFQIRGAAPPYVYAVGRGSEAMAAGLCAGQCILKVNGSNVMNDGAPEVLEHFQAFRSRREEALGLYQWIYHTHEDAQEARASQEASTEDPSGEQAQEEDQADSAFPLLSLGPRLSLCEDSPMVTLTVDNVHLEHGVVYEYVSTAGVRCHVLEKIVEPRGCFGLTAKILEAFAANDSVFVENCRRLMALSSAIVTMPHFEFRNICDTKLESIGQRIACYQEFAAQLKSRVSPPFKQAPLEPHPLCGLDFCPTNCHLNPMSYTQHCITTMAAPSWKCLPAAEGDPQGQGLHDGSFGPASGTLGQEDRGLSFLLKQEDREIQDAYLQLFTKLDVALKEMKQYVTQINRLLSTITEPTSGGSCDASLAEEASSLPLVSEESEMDRSDHGGIKKVCFKVAEEDQEDSGHDTMSYRDSYSECNSNRDSVLSYTSVRSNSSYLGSDEMGSGDELPCDMRIPSDKQDKLHGCLEHLFNQVDSINALLKGPVMSRAFEETKHFPMNHSLQEFKQKEECTIRGRSLIQISIQEDPWNLPNSIKTLVDNIQRYVEDGKNQLLLALLKCTDTELQLRRDAIFCQALVAAVCTFSEQLLAALGYRYNNNGEYEESSRDASRKWLEQVAATGVLLHCQSLLSPATVKEERTMLEDIWVTLSELDNVTFSFKQLDENYVANTNVFYHIEGSRQALKVIFYLDSYHFSKLPSRLEGGASLRLHTALFTKVLENVEGLPSPGSQAAEDLQQDINAQSLEKVQQYYRKLRAFYLERSNLPTDASTTAVKIDQLIRPINALDELCRLMKSFVHPKPGAAGSVGAGLIPISSELCYRLGACQMVMCGTGMQRSTLSVSLEQAAILARSHGLLPKCIMQATDIMRKQGPRVEILAKNLRVKDQMPQGAPRLYRLCQPPVDGDL

SEQ ID NO: 810844 - protein, 1636 aa, Homo sapiens; identical to SEQ ID NO: 810838

SEQ ID NO: 810845 - protein, 1622 aa, Homo sapiens
SNRNRSYENRCPLLAAARESERQLRLRLCVLNEILGTERDYVGTLRFLQSAFLHRIRQNVADSVEKGLTEENVKVLFSNIEDILEVHKDFLAALEYCLHPEPQSQHELGNVFLKFKDKFCVYEEYCSNHEKALRLLVELNKIPTVRAFLLSCMLLGGRKTTDIPLEGYLLSPIQRICKYPLLLKELAKRTPGKHPDHPAVQSALQAMKTVCSNINETKRQMEKLEALEQLQSHIEGWEGSNLTDICTQLLLQGTLLKISAGNIQERAFFLFDNLLVYCKRKSRVTGSKKSTKRTKSINGSLYIFRGRINTEVMEVENVEDGTADYHSNGYTVTNGWKIHNTAKNKWFVCMAKTAEEKQKWLDAIIREREQRESLKLGMERDAYVMIAEKGEKLYHMMMNKKVNLIKDRRRKLSTVPKCFLGNEFVAWLLEIGEISKTEEGVNLGQALLENGIIHHVSDKHQFKNEQVMYRFRYDDGTYKARSELEDIMSKGVRLYCRLHSLYTPVIKDRDYHLKTYKSVLPGSKLVDWLLAQGDCQTREEAVALGVGLCNNGFMHHVLEKSEFRDESQYFRFHADEEMEGTSSKNKQLRNDFKLVENILAKRLLILPQEEDYGFDIEEKNKAVVVKSVQRGSLAEVAGLQVGRKIYSINEDLVFLRPFSEVESILNQSFCSRRPLRLLVATKAKEIIKIPDQPDTLCFQIRGAAPPYVYAVGRGSEAMAAGLCAGQCILKVNGSNVMNDGAPEVLEHFQAFRSRREEALGLYQWIYHTHEDAQEARASQEASTEDPSGEQAQEEDQADSAFPLLSLGPRLSLCEDSPMVTLTVDNVHLEHGVVYEYVSTAGVRCHVLEKIVEPRGCFGLTAKILEAFAANDSVFVENCRRLMALSSAIVTMPHFEFRNICDTKLESIGQRIACYQEFAAQLKSRVSPPFKQAPLEPHPLCGLDFCPTNCHINLMEVSYPKTTPSVGRSFSIRFGRKPSLIGLDPEQGHLNPMSYTQHCITTMAAPSWKCLPAAEGDPQGQGLHDGSFGPASGTLGQEDRGLSFLLKQEDREIQDAYLQLFTKLDVALKEMKQYVTQINRLLSTITEPTSGGSCDASLAEEASSLPLVSEESEMDRSDHGGIKKVCFKVAEEDQEDSGHDTMSYRDSYSECNSNRDSVLSYTSVRSNSSYLGSDEMGSGDELPCDMRIPSDKQDKLHGCLEHLFNQVDSINALLKGPVMSRAFEETKHFPMNHSLQEFKQKEECTIRGRSLIQISIQEDPWNLPNSIKTLVDNIQRYVEDGKNQLLLALLKCTDTELQLRRDAIFCQALVAAVCTFSEQLLAALGYRYNNNGEYEESSRDASRKWLEQVAATGVLLHCQSLLSPATVKEERTMLEDIWVTLSELDNVTFSFKQLDENYVANTNVFYHIEGSRQALKVIFYLDSYHFSKLPSRLEGGASLRLHTALFTKVLENVEGLPSPGSQAAEDLQQDINAQSLEKVQQYYRKLSTTAVKIDQLIRPINALDELCRLMKSFVHPKPGAAGSVGAGLIPISSELCYRLGACQMVMCGTGMQRSTLSVSLEQAAILARSHGLLPKCIMQATDIMRKQGPRVEILAKNLRVKDQMPQGAPRLYRLCQPPVDGDL

SEQ ID NO: 810846 - protein, 1636 aa, Homo sapiens; identical to SEQ ID NO: 810838

SEQ ID NO: 810847 - protein, 956 aa, Homo sapiens; identical to SEQ ID NO: 810836

SEQ ID NO: 810848 - protein, 883 aa, Homo sapiens
YSGFWQGLYQWIYHTHEDAQEARASQEASTEDPSGEQAQEEDQADSAFPLLSLGPRLSLCEDSPMVTLTVDNVHLEHGVVYEYVSTAGVRCHVLEKIVEPRGCFGLTAKILEAFAANDSVFVENCRRLMALSSAIVTMPHFEFRNICDTKLESIGQRIACYQEFAAQLKSRVSPPFKQAPLEPHPLCGLDFCPTNCHINLMEVSYPKTTPSVGRSFSIRFGRKPSLIGLDPEQGHLNPMSYTQHCITTMAAPSWKCLPAAEGDPQGQGLHDGSFGPASGTLGQEDRGLSFLLKQEDREIQDAYLQLFTKLDVALKEMKQYVTQINRLLSTITEPTSGGSCDASLAEEASSLPLVSEESEMDRSDHGGIKKVCFKVAEEDQEDSGHDTMSYRDSYSECNSNRDSVLSYTSVRSNSSYLGSDEMGSGDELPCDMRIPSDKQDKLHGCLEHLFNQVDSINALLKGPVMSRAFEETKHFPMNHSLQEFKQKEECTIRGRSLIQISIQEDPWNLPNSIKTLVDNIQRYVEDGKNQLLLALLKCTDTELQLRRDAIFCQALVAAVCTFSEQLLAALGYRYNNNGEYEESSRDASRKWLEQVAATGVLLHCQSLLSPATVKEERTMLEDIWVTLSELDNVTFSFKQLDENYVANTNVFYHIEGSRQALKVIFYLDSYHFSKLPSRLEGGASLRLHTALFTKVLENVEGLPSPGSQAAEDLQQDINAQSLEKVQQYYRKLRAFYLERSNLPTDASTTAVKIDQLIRPINALDELCRLMKSFVHPKPGAAGSVGAGLIPISSELCYRLGACQMVMCGTGMQRSTLSVSLEQAAILARSHGLLPKCIMQATDIMRKQGPRVEILAKNLRVKDQMPQGAPRLYRLCQPPVDGDL

SEQ ID NO: 810849 - protein, 1636 aa, Homo sapiens; identical to SEQ ID NO: 810838

SEQ ID NO: 810850 - protein, 1691 aa, Homo sapiens
SNRNRSYENRCPLLAAARESERQLRLRLCVLNEILGTERDYVGTLRFLQSAFLHRIRQNVADSVEKGLTEENVKVLFSNIEDILEVHKDFLAALEYCLHPEPQSQHELGNVFLKFKDKFCVYEEYCSNHEKALRLLVELNKIPTVRAFLLSCMLLGGRKTTDIPLEGYLLSPIQRICKYPLLLKELAKRTPGKHPDHPAVQSALQAMKTVCSNINETKRQMEKLEALEQLQSHIEGWEGSNLTDICTQLLLQGTLLKISAGNIQERAFFLFDNLLVYCKRKSRVTGSKKSTKRTKSINGSLYIFRGRINTEVMEVENVEDGTADYHSNGYTVTNGWKIHNTAKNKWFVCMAKTAEEKQKWLDAIIREREQRESLKLGMERDAYVMIAEKGEKLYHMMMNKKVNLIKDRRRKLSTVPKCFLGNEFVAWLLEIGEISKTEEGVNLGQALLENGIIHHVSDKHQFKNEQVMYRFRYDDGTYKARSELEDIMSKGVRLYCRLHSLYTPVIKDRDYHLKTYKSVLPGSKLVDWLLAQGDCQTREEAVALGVGLCNNGFMHHVLEKSEFRDESQYFRFHADEEMEGTSSKNKQLRNDFKLVENILAKRLLILPQEEDYGFDIEEKNKAVVVKSVQRGSLAEVAGLQVGRKIYSINEDLVFLRPFSEVESILNQSFCSRRPLRLLVATKAKEIIKIPDQPDTLCFQIRGAAPPYVYAVGRGSEAMAAGLCAGQCILKVNGSNVMNDGAPEVLEHFQAFRSRREEALGLYQWIYHTHEDAQEARASQEASTEDPSGEQAQEEDQADSAFPLLSLGPRLSLCEDSPMVTLTVDNVHLEHGVVYEYVSTAGVRCHVLEKIVEPRGCFGLTAKILEAFAANDSVFVENCRRLMALSSAIVTMPHFEFRNICDTKLESIGQRIACYQEFAAQLKSRVSPPFKQAPLEPHPLCGLDFCPTNCHINLMEVSYPKTTPSVGRSFSIRFGRKPSLIGLDPEQGHLNPMSYTQHCITTMAAPSWKCLPAAEGDPQGQGLHDGSFGPASGTLGQEDRGLSFLLKQEDREIQDAYLQLFTKLDVALKEMKQYVTQINRLLSTITEPTSGGSCDASLAEEASSLPLVSEESEMDRSDHGGIKKVCFKVAEEDQEDSGHDTMSYRDSYSECNSNRDSVLSYTSVRSNSSYLGSDEMGSGDELPCDMRIPSDKQDKLHGCLEHLFNQVDSINALLKGPVMSRAFEETKHFPMNHSLQEFKQKEECTIRGRSLIQISIQEDPWNLPNSIKTLVDNIQRYVEDGKNQLLLALLKCTDTELQLRRDAIFCQALVAAVCTFSEQLLAALGYRYNNNGEYEESSRDASRKWLEQVAATGVLLHCQSLLSPATVKEERTMLEDIWVTLSELDNVTFSFKQLDENYVANTNVFYHIEGSRQALKVIFYLDSYHFSKLPSRLEGGASLRLHTALFTKVLENVEGLPSPGSQAAEDLQQDINAQSLEKVQQYYRKLRAFYLERSNLPTDASTTAVKIDQLIRPINALDELCRLMKSFVHPKPGAAGSVGAGLIPISSELCYRLGACQMVMCGTGMQRSTLSVSLEQAAILARSHGLLPKCIMQATDIMRKQGPRVEILAKNLRVKDQMPQGAPRFQVHPNPVLTCLVDLEKTWLCRERRDGASITPVTRGSPRATPALDITAPGTGATSPGHEICSDFIYMA

SEQ ID NO: 810851 - protein, 1401 aa, Homo sapiens
SNRNRSYENRCPLLAAARESERQLRLRLCVLNEILGTERDYVGTLRFLQSAFLHRIRQNVADSVEKGLTEENVKVLFSNIEDILEVHKDFLAALEYCLHPEPQSQHELGNVFLKFKDKFCVYEEYCSNHEKALRLLVELNKIPTVRAFLLSCMLLGGRKTTDIPLEGYLLSPIQRICKYPLLLKELAKRTPGKHPDHPAVQSALQAMKTVCSNINETKRQMEKLEALEQLQSHIEGWEGSNLTDICTQLLLQGTLLKISAGNIQERAFFLFDNLLVYCKRKSRVTGSKKSTKRTKSINGSLYIFRGRINTEVMEVENVEDGTADYHSNGYTVTNGWKIHNTAKNKWFVCMAKTAEEKQKWLDAIIREREQRESLKLGMERDAYVMIAEKGEKLYHMMMNKKVNLIKDRRRKLSTVPKCFLGNEFVAWLLEIGEISKTEEGVNLGQALLENGIIHHVSDKHQFKNEQVMYRFRYDDGTYKARSELEDIMSKGVRLYCRLHSLYTPVIKDRDYHLKTYKSVLPGSKLVDWLLAQGDCQTREEAVALGVGLCNNGFMHHVLEKSEFRDESQYFRFHADEEMEGTSSKNKQLRNDFKLVENILAKRLLILPQEEDYGFDIEEKNKAVVVKSVQRGSLAEVAGLQVGRKIYSINEDLVFLRPFSEVESILNQSFCSRRPLRLLVATKAKEIIKIPDQPDTLCFQIRGAAPPYVYAVGRGSEAMAAGLCAGQCILKVNGSNVMNDGAPEVLEHFQAFRSRREEALGLYQWIYHTHEDAQEARASQEASTEDPSGEQAQEEDQADSAFPLLSLGPRLSLCEDSPMVTLTVDNVHLEHGVVYEYVSTAGVRCHVLEKIVEPRGCFGLTAKILEAFAANDSVFVENCRRLMALSSAIVTMPHFEFRNICDTKLESIGQRIACYQEFAAQLKSRVSPPFKQAPLEPHPLCGLDFCPTNCHINLMEVSYPKTTPSVGRSFSIRFGRKPSLIGLDPEQGHLNPMSYTQHCITTMAAPSWKCLPAAEGDPQGQGLHDGSFGPASGTLGQEDRGLSFLLKQEDREIQDAYLQLFTKLDVALKEMKQYVTQINRLLSTITEPTSGGSCDASLAEEASSLPLVSEESEMDRSDHGGIKKVCFKVAEEDQEDSGHDTMSYRDSYSECNSNRDSVLSYTSVRSNSSYLGSDEMGSGDELPCDMRIPSDKQDKLHGCLEHLFNQVDSINALLKGPVMSRAFEETKHFPMNHSLQEFKQKEECTIRGRSLIQISIQEDPWNLPNSIKTLVDNIQRYVEDGKNQLLLALLKCTDTELQLRRDAIFCQALVAAVCTFSEQLLAALGYRYNNNGEYEESSRDASRKWLEQVAATGVLLHCQSLLSPATVKEERTMLEDIWVTLSELDNVTFSFKQLDENYVASE

SEQ ID NO: 810852 - protein, 1314 aa, Homo sapiens
SNRNRSYENRCPLLAAARESERQLRLRLCVLNEILGTERDYVGTLRFLQSAFLHRIRQNVADSVEKGLTEENVKVLFSNIEDILEVHKDFLAALEYCLHPEPQSQHELGNVFLKFKDKFCVYEEYCSNHEKALRLLVELNKIPTVRAFLLSCMLLGGRKTTDIPLEGYLLSPIQRICKYPLLLKELAKRTPGKHPDHPAVQSALQAMKTVCSNINETKRQMEKLEALEQLQSHIEGWEGSNLTDICTQLLLQGTLLKISAGNIQERAFFLFDNLLVYCKRKSRVTGSKKSTKRTKSINGSLYIFRGRINTEVMEVENVEDGTADYHSNGYTVTNGWKIHNTAKNKWFVCMAKTAEEKQKWLDAIIREREQRESLKLGMERDAYVMIAEKGEKLYHMMMNKKVNLIKDRRRKLSTVPKCFLGNEFVAWLLEIGEISKTEEGVNLGQALLENGIIHHVSDKHQFKNEQVMYRFRYDDGTYKARSELEDIMSKGVRLYCRLHSLYTPVIKDRDYHLKTYKSVLPGSKLVDWLLAQGDCQTREEAVALGVGLCNNGFMHHVLEKSEFRDESQYFRFHADEEMEGTSSKNKQLRNDFKLVENILAKRLLILPQEEDYGFDIEEKNKAVVVKSVQRGSLAEVAGLQVGRKIYSINEDLVFLRPFSEVESILNQSFCSRRPLRLLVATKAKEIIKIPDQPDTLCFQIRGAAPPYVYAVGRGSEAMAAGLCAGQCILKVNGSNVMNDGAPEVLEHFQAFRSRREEALGLYQWIYHTHEDAQEARASQEASTEDPSGEQAQEEDQADSAFPLLSLGPRLSLCEDSPMVTLTVDNVHLEHGVVYEYVSTAGVRCHVLEKIVEPRGCFGLTAKILEAFAANDSVFVENCRRLMALSSAIVTMPHFEFRNICDTKLESIGQRIACYQEFAAQLKSRVSPPFKQAPLEPHPLCGLDFCPTNCHINLMEVSYPKTTPSVGRSFSIRFGRKPSLIGLDPEQGHLNPMSYTQHCITTMAAPSWKCLPAAEGDPQGQGLHDGSFGPASGTLGQEDRGLSFLLKQEDREIQDAYLQLFTKLDVALKEMKQYVTQINRLLSTITEPTSGGSCDASLAEEASSLPLVSEESEMDRSDHGGIKKVCFKVAEEDQEDSGHDTMSYRDSYSECNSNRDSVLSYTSVRSNSSYLGSDEMGSGDELPCDMRIPSDKQDKLHGCLEHLFNQVDSINALLKGPVMSRAFEETKHFPMNHSLQEFKQKEECTIRGRSLIQISIQEDPWNLPNSIKTLVDNIQRYVEGRWAGRVHHGGEGAMAFGVEPERIRNGSSSVTPVSP

SEQ ID NO: 810853 - protein, 864 aa, Homo sapiens
SNRNRSYENRCPLLAAARESERQLRLRLCVLNEILGTERDYVGTLRFLQSAFLHRIRQNVADSVEKGLTEENVKVLFSNIEDILEVHKDFLAALEYCLHPEPQSQHELGNVFLKFKDKFCVYEEYCSNHEKALRLLVELNKIPTVRAFLLSCMLLGGRKTTDIPLEGYLLSPIQRICKYPLLLKELAKRTPGKHPDHPAVQSALQAMKTVCSNINETKRQMEKLEALEQLQSHIEGWEGSNLTDICTQLLLQGTLLKISAGNIQERAFFLFDNLLVYCKRKSRVTGSKKSTKRTKSINGSLYIFRGRINTEVMEVENVEDGTADYHSNGYTVTNGWKIHNTAKNKWFVCMAKTAEEKQKWLDAIIREREQRESLKLGMERDAYVMIAEKGEKLYHMMMNKKVNLIKDRRRKLSTVPKCFLGNEFVAWLLEIGEISKTEEGVNLGQALLENGIIHHVSDKHQFKNEQVMYRFRYDDGTYKARSELEDIMSKGVRLYCRLHSLYTPVIKDRDYHLKTYKSVLPGSKLVDWLLAQGDCQTREEAVALGVGLCNNGFMHHVLEKSEFRDESQYFRFHADEEMEGTSSKNKQLRNDFKLVENILAKRLLILPQEEDYGFDIEEKNKAVVVKSVQRGSLAEVAGLQVGRKIYSINEDLVFLRPFSEVESILNQSFCSRRPLRLLVATKAKEIIKIPDQPDTLCFQIRGAAPPYVYAVGRGSEAMAAGLCAGQCILKVNGSNVMNDGAPEVLEHFQAFRSRREEALGLYQWIYHTHEDAQEARASQEASTEDPSGEQAQEEDQADSAFPLLSLGPRLSLCEDSPMVTLTVDNVHLEHGVVYEYVSTAGVRCHVLEKIVEPRGCFGLTAKRV

SEQ ID NO: 810854 - protein, 330 aa, Homo sapiens
SNRNRSYENRCPLLAAARESERQLRLRLCVLNEILGTERDYVGTLRFLQSAFLHRIRQNVADSVEKGLTEENVKVLFSNIEDILEVHKDFLAALEYCLHPEPQSQHELGNVFLKFKDKFCVYEEYCSNHEKALRLLVELNKIPTVRAFLLSCMLLGGRKTTDIPLEGYLLSPIQRICKYPLLLKELAKRTPGKHPDHPAVQSALQAMKTVCSNINETKRQMEKLEALEQLQSHIEGWEGSNLTDICTQLLLQGTLLKISAGNIQERAFFLFDNLLVYCKRKSRVTGSKKSTKRTKSINGSLYIFRGRINTEVMEVENVEDGTGSPSPSLA

SEQ ID NO: 810855 - protein, 104 aa, Homo sapiens
LPFFLSGCEALLPSSQPLHPGDQVSYSFQAPISPLPLLSCVALGWQLNLSELQSPSPLNGACSGTYPLDLSLGLTELNCGKHCSVVMQVSVLEPDRLSLNLPPS

SEQ ID NO: 810856 - protein, 773 aa, Homo sapiens
MDLLKITMKELISLAGPTDDIQSTVPQVHALNILRALFRDTRLGENIIPYVADGAKAAILGFTSPVWAVRNSSTLLFSALITRIFGVKRAKDEHSKTNRMTGREFFSRFPELYPFLLKQLETVANTVDSDMGEPNRHPSMFLLLLVLERLYASPMDGTSSALSMGPFVPFIMRCGHSPVYHSREMAARALVPFVMIDHIPNTIRTLLSTLPSCTDQCFRQNHIHGTLLQVFHLLQAYSDSKHGTNSDFQHELTDITVCTKAKLWLAKRQNPCLVTRAVYIDILFLLTCCLNRSAKDNQPVLESLGFWEEVRGIISGSELITGFPWAFKVPGLPQYLQSLTRLAIAAVWAAAAKSGERETNVPISFSQLLESAFPEVRSLTLEALLEKFLAAASGLGEKGVPPLLCNMGEKFLLLAMKENHPECFCKILKILHCMDPGEWLPQTEHCVHLTPKEFLIWTMDIASNERSEIQSVALRLASKVISHHMQTCVENRELIAAELKQWVQLVILSCEDHLPTESRLAVVEVLTSTTPLFLTNPHPILELQDTLALWKCVLTLLQSEEQAVRDAATETVTTAMSQENTCQSTEFAFCQVDASIALALALAVLCDLLQQWDQLAPGLPILLGWLLGESDDLVACVESMHQVEEDYLFEKAEVNFWAETLIFVKYLCKHLFCLLSKSGWRPPSPEMLCHLQRMVSEQCHLLSQFFRELPPAAEFVKTVEFTRLRIQEERTLACLRLLAFLEGKEGEDTLVLSVWDSYAESRQLTLPRTEAAC

SEQ ID NO: 810857 - protein, 207 aa, Homo sapiens
MTGREFFSRFPELYPFLLKQLETVANTVDSDMGEPNRHPSMFLLLLVLERLYASPMDGTSSALSMGPFVPFIMRCGHSPVYHSREMAARALVPFVMIDHIPNTIRTLLSTLPSCTDQCFRQNHIHGTLLQVFHLLQAYSDSKHGTNSDFQHELTDITVCTKAKLWLAKRQNPCLVTRAVYIDILFLLTCCLNRSAKDNQPGMIHSYT

SEQ ID NO: 810858 - protein, 268 aa, Homo sapiens
AGNELSKAGALACGMASAKARSPSAEFAFCQVDASIALALALAVLCDLLQQWDQLAPGLPILLGWLLGESDDLVACVESMHQVEEDYLFEKAEVNFWAETLIFVKYLCKHLFCLLSKSGWRPPSPEMLFSVTFSKKGGGNLGGGGVGGVFPPKGGRKKGGPPKKGGFLWGGAPQKKTKHPPFFFFPPPARGWVGGYFPPRFFPTQNEEGEYYIMSATTTPSDFVCFAPTTSKRRGGRNNKNAGPGPTNKQRDGGGGTHHHYYVFVVVS

SEQ ID NO: 810859 - protein, 1311 aa, Homo sapiens
DSRDPLEMGTEIVSMEEMQWIQFFITYNLNSQSPGVRQQICSLLKKLFCRIQESSQVLYKLEQSKSKREPENELTKQHPSVSLQQYKNFMSSICNSLFEALFPGSSYSTRFSALTILGSIAEVFHVPEGRIYTVYQLSHDIDVGRFQTLMECFTSTFEDVKILAFDLLMKLSKTAVHFQDSGKLQGLFQAALELSTSTKPYDCVTASYLLNFLIWQDALPSSLSAYLTQQVACDNGDRPAAVVERNTLMVIKCLMENLEEEVSQAENSLLQAAAAFPMYGRVHCITGALQKLSLNSLQLVSEWRPVVEKLLLMSYRLSTVVSPVIQSSSPEGLIPMDTDSESASRLQMILNEIQPRDTNDYFNQAKILKEHDSFDMKDLNASVVNIDTSTEIKGKEVKTCDVTAQMVLVCCWRSMKEVALLLGMLCQLLPMQPVPESSDGLLTVEQVKEIGDYFKQHLLQSRHRGAFELAYTGFVKLTEVLNRCPNVSLQKLPEQWLWSVLEEIKCSDPSSKLCATRRSAGIPFYIQALLASEPKKGRMDLLKITMKELISLAGPTDDIQSTVPQVHALNILRALFRDTRLGENIIPYVADGAKAAILGFTSPVWAVRNSSTLLFSALITRIFGVKRAKDEHSKTNRMTGREFFSRFPELYPFLLKQLETVANTVDSDMGEPNRHPSMFLLLLVLERLYASPMDGTSSALSMGPFVPFIMRCGHSPVYHSREMAARALVPFVMIDHIPNTIRTLLSTLPSCTDQCFRQNHIHGTLLQVFHLLQAYSDSKHGTNSDFQHELTDITVCTKAKLWLAKRQNPCLVTRAVYIDILFLLTCCLNRSAKDNQPVLESLGFWEEVRGIISGSELITGFPWAFKVPGLPQYLQSLTRLAIAAVWAAAAKSGERETNVPISFSQLLESAFPEVRSLTLEALLEKFLAAASGLGEKGVPPLLCNMGEKFLLLAMKENHPECFCKILKILHCMDPGEWLPQTEHCVHLTPKEFLIWTMDIASNERSEIQSVALRLASKVISHHMQTCVENRELIAAELKQWVQLVILSCEDHLPTESRLAVVEVLTSTTPLFLTNPHPILELQDTLALWKCVLTLLQSEEQAVRDAATETVTTAMSQENTCQSTEFAFCQVDASIALALALAVLCDLLQQWDQLAPGLPILLGWLLGESDDLVACVESMHQVEEDYLFEKAEVNFWAETLIFVKYLCKHLFCLLSKSGWRPPSPEMLCHLQRMVSEQCHLLSQFFRELPPAAEFVKTVEFTRLRIQEERTLACLRLLAFLEGKEGEDTLVLSVWDSYAESRQLTLPRTEAAC

SEQ ID NO: 810860 - protein, 1237 aa, Homo sapiens
DSRDPLEMGTEIVSMEEMQWIQFFITYNLNSQSPGVRQQICSLLKKLFCRIQESSQVLYKLEQSKSKREPENELTKQHPSVSLQQYKNFMSSICNSLFEALFPGSSYSTRFSALTILGSIAEVFHVPEGRIYTVYQLSHDIDVGRFQTLMECFTSTFEDVKILAFDLLMKLSKTAVHFQDSGKLQGLFQAALELSTSTKPYDCVTASYLLNFLIWQDALPSSLSAYLTQQVACDNGDRPAAVVERNTLMVIKCLMENLEEEVSQAENSLLQAAAAFPMYGRVHCITGALQKLSLNSLQLVSEWRPVVEKLLLMSYRLSTVVSPVIQSSSPEGLIPMDTDSESASRLQMILNEIQPRDTNDYFNQAKILKEHDSFDMKDLNASVVNIDTSTEIKGKEVKTCDVTAQMVLVCCWRSMKEVALLLGMLCQLLPMQPVPESSDGLLTVEQVKEIGDYFKQHLLQSRHRGAFELAYTGFVKLTEVLNRCPNVSLQKLPEQWLWSVLEEIKCSDPSSKLCATRRSAGIPFYIQALLASEPKKGRMDLLKITMKELISLAGPTDDIQSTVPQVHALNILRALFRDTRLGENIIPYVADGAKAAILGFTSPVWAVRNSSTLLFSALITRIFGVKRAKDEHSKTNRCGHSPVYHSREMAARALVPFVMIDHIPNTIRTLLSTLPSCTDQCFRQNHIHGTLLQVFHLLQAYSDSKHGTNSDFQHELTDITVCTKAKLWLAKRQNPCLVTRAVYIDILFLLTCCLNRSAKDNQPVLESLGFWEEVRGIISGSELITGFPWAFKVPGLPQYLQSLTRLAIAAVWAAAAKSGERETNVPISFSQLLESAFPEVRSLTLEALLEKFLAAASGLGEKGVPPLLCNMGEKFLLLAMKENHPECFCKILKILHCMDPGEWLPQTEHCVHLTPKEFLIWTMDIASNERSEIQSVALRLASKVISHHMQTCVENRELIAAELKQWVQLVILSCEDHLPTESRLAVVEVLTSTTPLFLTNPHPILELQDTLALWKCVLTLLQSEEQAVRDAATETVTTAMSQENTCQSTEFAFCQVDASIALALALAVLCDLLQQWDQLAPGLPILLGWLLGESDDLVACVESMHQVEEDYLFEKAEVNFWAETLIFVKYLCKHLFCLLSKSGWRPPSPEMLCHLQRMVSEQCHLLSQFFRELPPAAEFVKTVEFTRLRIQEERTLACLRLLAFLEGKEGEDTLVLSVWDSYAESRQLTLPRTEAAC

SEQ ID NO: 810861 - protein, 686 aa, Homo sapiens
MGCEMNIPRHKSMTGREFFSRFPELYPFLLKQLETVANTVDSDMGEPNRHPSMFLLLLVLERLYASPMDGTSSALSMGPFVPFIMRCGHSPVYHSREMAARALVPFVMIDHIPNTIRTLLSTLPSCTDQCFRQNHIHGTLLQVFHLLQAYSDSKHGTNSDFQHELTDITVCTKAKLWLAKRQNPCLVTRAVYIDILFLLTCCLNRSAKDNQPVLESLGFWEEVRGIISGSELITGFPWAFKVPGLPQYLQSLTRLAIAAVWAAAAKSGERETNVPISFSQLLESAFPEVRSLTLEALLEKFLAAASGLGEKGVPPLLCNMGEKFLLLAMKENHPECFCKILKILHCMDPGEWLPQTEHCVHLTPKEFLIWTMDIASNERSEIQSVALRLASKVISHHMQTCVENRELIAAELKQWVQLVILSCEDHLPTESRLAVVEVLTSTTPLFLTNPHPILELQDTLALWKCVLTLLQSEEQAVRDAATETVTTAMSQENTCQSTEFAFCQVDASIALALALAVLCDLLQQWDQLAPGLPILLGWLLGESDDLVACVESMHQVEEDYLFEKAEVNFWAETLIFVKYLCKHLFCLLSKSGWRPPSPEMLCHLQRMVSEQCHLLSQFFRELPPAAEFVKTVEFTRLRIQEERTLACLRLLAFLEGKEGEDTLVLSVWDSYAESRQLTLPRTEAAC

SEQ ID NO: 810862 - protein, 289 aa, Homo sapiens [sequence omitted]

SEQ ID NO: 810863 - protein, 290 aa, Homo sapiens
PGLQEFGNRELIAAELKQWVQLVILSCEDHLPTESRLAVVEVLTSTTPLFLTNPHPILELQDTLALWKCVLTLLQSEEQAVRDAATETVTTAMSQENTCQSTEFAFCQVDASIALALALAVLCDLLQQWDQLAPGLPILLGWLLGESDDLVACVESMHQVEEDYLFEKAEVNFWAETLIFVKYLCKHLFCLLSKSGWRPPSPEMLCHLQRMVSEQCHLLSQFFRELPPAAEFVKTVEFTRLRIQEERTLACLRLLAFLEGKEGEDTLVLSVWDSYAESRQLTLPRTEAAC

SEQ ID NO: 810864 - protein, 405 aa, Homo sapiens
DSRDPLEMGTEIVSMEEMQWIQFFITYNLNSQSPGVRQQICSLLKKLFCRIQESSQVLYKLEQSKSKREPENELTKQHPSVSLQQYKNFMSSICNSLFEALFPGSSYSTRFSALTILGSIAEVFHVPEGRIYTVYQLSHDIDVGRFQTLMECFTSTFEDVKILAFDLLMKLSKTAVHFQDSGKLQGLFQAALELSTSTKPYDCVTASYLLNFLIWQDALPSSLSAYLTQQVACDNGDRPAAVVERNTLMVIKCLMENLEEEVSQAENSLLQAAAAFPMYGRVHCITGALQKLSLNSLQLVSEWRPVVEKLLLMSYRLSTVVSPVIQSSSPEGLIPMDTDSESASRLQMILNEIQPRDTNDYFNQAKILKEHDSFDMKDLNASVVNIDTSTEIKGNLYKMDTVIHV

SEQ ID NO: 810865 - protein, 649 aa, Homo sapiens
DSRDPLEMGTEIVSMEEMQWIQFFITYNLNSQSPGVRQQICSLLKKLFCRIQESSQVLYKLEQSKSKREPENELTKQHPSVSLQQYKNFMSSICNSLFEALFPGSSYSTRFSALTILGSIAEVFHVPEGRIYTVYQLSHDIDVGRFQTLMECFTSTFEDVKILAFDLLMKLSKTAVHFQDSGKLQGLFQAALELSTSTKPYDCVTASYLLNFLIWQDALPSSLSAYLTQQVACDNGDRPAAVVERNTLMVIKCLMENLEEEVSQAENSLLQAAAAFPMYGRVHCITGALQKLSLNSLQLVSEWRPVVEKLLLMSYRLSTVVSPVIQSSSPEGLIPMDTDSESASRLQMILNEIQPRDTNDYFNQAKILKEHDSFDMKDLNASVVNIDTSTEIKGKEVKTCDVTAQMVLVCCWRSMKEVALLLGMLCQLLPMQPVPESSDGLLTVEQVKEIGDYFKQHLLQSRHRGAFELAYTGFVKLTEVLNRCPNVSLQKLPEQWLWSVLEEIKCSDPSSKLCATRRSAGIPFYIQALLASEPKKGRMDLLKITMKELISLAGPTDDIQSTVPQVHALNILRALFRDTRLGENIIPYVADGAKAAILGFTSPVWAVRNSSTLLFSALITRIFGVKRAKDEHSKTNRIQFGPVVFLLRI

SEQ ID NO: 810866 - protein, 616 aa, Homo sapiens
DSRDPLEMGTEIVSMEEMQWIQFFITYNLNSQSPGVRQQICSLLKKLFCRIQESSQVLYKLEQSKSKREPENELTKQHPSVSLQQYKNFMSSICNSLFEALFPGSSYSTRFSALTILGSIAEVFHVPEGRIYTVYQLSHDIDVGRFQTLMECFTSTFEDVKILAFDLLMKLSKTAVHFQDSGKLQGLFQAALELSTSTKPYDCVTASYLLNFLIWQDALPSSLSAYLTQQVACDNGDRPAAVVERNTLMVIKCLMENLEEEVSQAENSLLQAAAAFPMYGRVHCITGALQKLSLNSLQLVSEWRPVVEKLLLMSYRLSTVVSPVIQSSSPEGLIPMDTDSESASRLQMILNEIQPRDTNDYFNQAKILKEHDSFDMKDLNASVVNIDTSTEIKGKEVKTCDVTAQMVLVCCWRSMKEVALLLGMLCQLLPMQPVPESSDGLLTVEQVKEIGDYFKQHLLQSRHRGAFELAYTGFVKLTEVLNRCPNVSLQKLPEQWLWSVLEEIKCSDPSSKLCATRRSAGIPFYIQALLASEPKKGRMDLLKITMKELISLAGPTDDIQSTVPQVHALNILRALFRDTRLGENIIPYVADGAKAAILGFTSPVWAVWSLTCLPLP

SEQ ID NO: 810867 - protein, 295 aa, Homo sapiens
DSRDPLEMGTEIVSMEEMQWIQFFITYNLNSQSPGVRQQICSLLKKLFCRIQESSQVLYKLEQSKSKREPENELTKQHPSVSLQQYKNFMSSICNSLFEALFPGSSYSTRFSALTILGSIAEVFHVPEGRIYTVYQLSHDIDVGRFQTLMECFTSTFEDVKILAFDLLMKLSKTAVHFQDSGKLQGLFQAALELSTSTKPYDCVTASYLLNFLIWQDALPSSLSAYLTQQVACDNGDRPAAVVERNTLMVIKCLMENLEEEVSQAENSLLQAAAAFPMYGRVHCITGALQKLSLK

SEQ ID NO: 810868 - protein, 341 aa, Homo sapiens
DSRDPLEMGTEIVSMEEMQWIQFFITYNLNSQSPGVRQQICSLLKKLFCRIQESSQVLYKLEQSKSKREPENELTKQHPSVSLQQYKNFMSSICNSLFEALFPGSSYSTRFSALTILGSIAEVFHVPEGRIYTVYQLSHDIDVGRFQTLMECFTSTFEDVKILAFDLLMKLSKTAVHFQDSGKLQGLFQAALELSTSTKPYDCVTASYLLNFLIWQDALPSSLSAYLTQQVACDNGDRPAAVVERNTLMVIKCLMENLEEEVSQAENSLLQAAAAFPMYGRVHCITGALQKLSLNSLQLVSEWRPVVEKLLLMSYRLSTVVSPVIQSSSPEGLIPMDTDSG

SEQ ID NO: 810869 - protein, 510 aa, Homo sapiens
MDGFYDQQVPFMVPGKSRSEECRGRPVIDRKRKFLDTDLAHDSEELFQDLSQLQEAWLAEAQVPDDEQFVPDFQSDNLVLHAPPPTKIKRELHSPSSELSSCSHEQALGANYGEKCLYNYCAYDRKPPSGFKPLTPPTTPLSPTHQNPLFPPPQATLPTSGHAPAAGPVQGVGPAPAPHSLPEPGPQQQTFAVPRPPHQPLQMPKMMPENQYPSEQRFQRQLSEPCHPFPPQPGVPGDNRPSYHRQMSEPIVPAAPPPPQGFKQEYHDPLYEHGVPGMPGPPAHGFQSPMGIKQEPRDYCVDSEVPNCQSSYMRGGYFSSSHEGFSYEKDPRLYFDDTCVVPERLEGKVKQEPTMYREGPPYQRRGSLQLWQFLVTLLDDPANAHFIAWTGRGMEFKLIEPEEVARRWGIQKNRPAMNYDKLSRSLRYYYEKGIMQKVAGERYVYKFVCDPDALFSMAFPDNQRPFLKAESECHLSEEDTLPLTHFEDSPAYLLDMDRCSSLPYAEGFAY

SEQ ID NO: 810870 - protein, 552 aa, Homo sapiens
MSERRCPPEHREGVNDTGGSLFPQKLLNAETSQSGIRDAESTMDGFYDQQVPFMVPGKSRSEECRGRPVIDRKRKFLDTDLAHDSEELFQDLSQLQEAWLAEAQVPDDEQFVPDFQSDNLVLHAPPPTKIKRELHSPSSELSSCSHEQALGANYGEKCLYNYCAYDRKPPSGFKPLTPPTTPLSPTHQNPLFPPPQATLPTSGHAPAAGPVQGVGPAPAPHSLPEPGPQQQTFAVPRPPHQPLQMPKMMPENQYPSEQRFQRQLSEPCHPFPPQPGVPGDNRPSYHRQMSEPIVPAAPPPPQGFKQEYHDPLYEHGVPGMPGPPAHGFQSPMGIKQEPRDYCVDSEVPNCQSSYMRGGYFSSSHEGFSYEKDPRLYFDDTCVVPERLEGKVKQEPTMYREGPPYQRRGSLQLWQFLVTLLDDPANAHFIAWTGRGMEFKLIEPEEVARRWGIQKNRPAMNYDKLSRSLRYYYEKGIMQKVAGERYVYKFVCDPDALFSMAFPDNQRPFLKAESECHLSEEDTLPLTHFEDSPAYLLDMDRCSSLPYAEGFAY

SEQ ID NO: 810871 - protein, 256 aa, Homo sapiens
SLNRLFLPTRSWVAGPRTQRARVPGWSQRRQRGSLRLLGEGGVVPAHIGRVHVVIVDVDPVRADAQALGQQAAQQLAVGAVLRAADLADAVQAAERARLAGAAEGHELVRDHVHRDVLGGLAGGLRQLLGELERNPSGTEARGTLVFTMNIGMMAEGPGPLVRGAVHRLRSGSAQPFAQAPRPAARVRERACAARAAARGGERPPQEDPFSPRNYSMLKPLKVVLETLKAPWTGFMISKSLLWSQGNLNHRPPSAF

SEQ ID NO: 810872 - protein, 510 aa, Homo sapiens; identical to SEQ ID NO: 810869

SEQ ID NO: 810873 - protein, 510 aa, Homo sapiens; identical to SEQ ID NO: 810869

SEQ ID NO: 810874 - protein, 190 aa, Homo sapiens
MDGFYDQQVPFMVPGKSRSEECRGRPVIDRKRKFLDTDLAHDSEELFQDLSQLQEAWLAEAQVPDDEQFVPDFQSDNLVLHAPPPTKIKRELHSPSSELSSCSHEQALGANYGEKCLYNYCAYDRKPPSGFKPLTPPTKPRASQGQANHEIPVILPPNIQGQLYPKLKGRCPLQRGQVPGASREPAVAPR

SEQ ID NO: 810875 - protein, 688 aa, Homo sapiens
  misc_feature (55)..(55): Xaa can be any naturally occurring amino acid
TGDAVVTVQFEGMHKNEAISQQLHVLRKEVKQLQAEKRAKRTTHLHIGGSVLYMXANLITALVNAYKLQPTPGIQKVGISLFFTIVDYVSDETQRHPPTRQFFTSCIEIMGQIYTGLKSAGRRLAQCASVTIRTNKLLPMQVDGDTLDAAMLHGGSLFPQKLLNAETSQSGIRDAESTMDGFYDQQVPFMVPGKSRSEECRGRPVIDRKRKFLDTDLAHDSEELFQDLSQLQEAWLAEAQVPDDEQFVPDFQSDNLVLHAPPPTKIKRELHSPSSELSSCSHEQALGANYGEKCLYNYCAYDRKPPSGFKPLTPPTTPLSPTHQNPLFPPPQATLPTSGHAPAAGPVQGVGPAPAPHSLPEPGPQQQTFAVPRPPHQPLQMPKMMPENQYPSEQRFQRQLSEPCHPFPPQPGVPGDNRPSYHRQMSEPIVPAAPPPPQGFKQEYHDPLYEHGVPGMPGPPAHGFQSPMGIKQEPRDYCVDSEVPNCQSSYMRGGYFSSSHEGFSYEKDPRLYFDDTCVVPERLEGKVKQEPTMYREGPPYQRRGSLQLWQFLVTLLDDPANAHFIAWTGRGMEFKLIEPEEVARRWGIQKNRPAMNYDKLSRSLRYYYEKGIMQKVAGERYVYKFVCDPDALFSMAFPDNQRPFLKAESECHLSEEDTLPLTHFEDSPAYLLDMDRCSSLPYAEGFAY

SEQ ID NO: 810876 - protein, 108 aa, Homo sapiens
MDGFYDQQVPFMVPGKSRSEECRGRPVIDRKRKFLDTDLAHDSEELFQDLSQLQEAWLAEAQVPDDEQFVPDFQSDNQKCPVSPYPDCVIQCEQPFMIKSTVVDVRSQ

SEQ ID NO: 810877 - protein, 109 aa, Homo sapiens
MLKPLKVVLETLKAPWNYDKLSRSLRYYYEKGIMQKVAGERYVYKFVCDPDALFSMAFPDNQRPFLKAESECHLSEEDTLPLTHFEDSPAYLLDMDRCSSLPYAEGFAY

SEQ ID NO: 810878 - protein, 592 aa, Homo sapiens
RDAPRLAVAVAGQRAVHVAGLAGTPWEMRPRGLPPLLVVLLGCWASVSAQTDATPAVTTEGLNSTEAALATFGTFPSTRPPGTPRAPGPSSGPRPTPVTDGSHSVTQAGVYGMITAHCGLDLLGSVAVLCVCDLSPAQCDINCCCDPDCSSVDFSVFSACSVPVVTGDSQFCSQKAVIYSLNFTANPPQRVFELVDQINPSIFCIHITNYKPALSFINPEVPDENNFDTLMKTSDGFTLNAESYVSFTTKLDIPTAAKYEYGVPLQTSDSFLRFPSSLTSSLCTDNNPAAFLVNQAVKCTRKINLEQCEEIEALSMAFYSSPEILRVPDSRKKVPITVQSIVIQSLNKTLTRREDTDVLQPTLVNAGHFSLCVNVVLEVKYSLTYTDAGEVTKADLSFVLGTVSSVVVPLQQKFEIHFLQENTQPVPLSGNPGYVVGLPLAAGFQPHKGLTGALPCQLVAQKVKSLLWGQGFPDYVAPFGNSQAQDMLDWVPIHFITQSFNRKDSCQLPGALVIEVKWTKYGSLLNPQAKIVNVTANLISSSFPEANSGNERTILISTAVTFVDVSAPAEAGFRAPPAINARLPFNFFFPFV

SEQ ID NO: 810879 - protein, 292 aa, Homo sapiens
RDAPRLAVAVAGQRAVHVAGLAGTPWEMRPRGLPPLLVVLLGCWASVSAQTDATPAVTTEGLNSTEAALATFGTFPSTRPPGTPRAPGPSSGPRPTPVTDGGYQCQLLESTVIQPQGDSPVAVLCVCDLSPAQCDINCCCDPDCSSVDFSVFSACSVPVVTGDSQFCSQKAVIYSLNFTANPPQRVFELVDQINPSIFCIHITNYKPALSFINPEVPDENNFDTLMKTSDGFTLNAESYVSFTTKLDIPTAAKYEVSLNLIDSFHPITNIFPCKLIFKVTRKTGFLETELIL

SEQ ID NO: 810880 - protein, 189 aa, Homo sapiens
RDAPRLAVAVAGQRAVHVAGLAGTPWEMRPRGLPPLLVVLLGCWASVSAQTDATPAVTTEGLNSTEAALATFGTFPSTRPPGTPRAPGPSSGPRPTPVTDVAVLCVCDLSPAQCDINCCCDPDCSSVDFSVFSACSVPVVTGDSQFCSQKAVIYSLNFTANPPQRVFELVDQINPSIFCIHITNCRCSV

SEQ ID NO: 810881 - protein, 209 aa, Homo sapiens
RDAPRLAVAVAGQRAVHVAGLAGTPWEMRPRGLPPLLVVLLGCWASVSAQTDATPAVTTEGLNSTEAALATFGTFPSTRPPGTPRAPGPSSGPRPTPVTDGGYQCQLLESTVIQPQGDSPVAVLCVCDLSPAQCDINCCCDPDCSSVDFSVFSACSVPVVTGDSQFCSQKAVIYSLNFTANPPQRVFELVDQINPSIFCIHITNCRCSV

SEQ ID NO: 810882 - protein, 115 aa, Homo sapiens
RDAPRLAVAVAGQRAVHVAGLAGTPWEMRPRGLPPLLVVLLGCWASVSAQTDATPAVTTEGLNSTEAALATFGTFPSTRPPGTPRAPGPSSGPRPTPVTDGATASFVVKKQSSIH

SEQ ID NO: 810883 - protein, 85 aa, Homo sapiens
MQSGCKLRLTGALPCQLVAQKVKSLLWGQGFPDYVAPFGNSQAQDMLDWVPIHFITQSFNRKDSCQLPGALVIEVQEARPGILKS

SEQ ID NO: 810884 - protein, 614 aa, Homo sapiens
RDAPRLAVAVAGQRAVHVAGLAGTPWEMRPRGLPPLLVVLLGCWASVSAQTDATPAVTTEGLNSTEAALATFGTFPSTRPPGTPRAPGPSSGPRPTPVTDVAVLCVCDLSPAQCDINCCCDPDCSSVDFSVFSACSVPVVTGDSQFCSQKAVIYSLNFTANPPQRVFELVDQINPSIFCIHITNYKPALSFINPEVPDENNFDTLMKTSDGFTLNAESYVSFTTKLDIPTAAKYEYGVPLQTSDSFLRFPSSLTSSLCTDNNPAAFLVNQAVKCTRKINLEQCEEIEALSMAFYSSPEILRVPDSRKKVPITVQSIVIQSLNKTLTRREDTDVLQPTLVNAGHFSLCVNVVLEVKYSLTYTDAGEVTKADLSFVLGTVSSVVVPLQQKFEIHFLQENTQPVPLSGNPGYVVGLPLAAGFQPHKGSGIIQTTNRYGQLTILHSTTEQDCLALEGVRTPVLFGYTMQSGCKLRLTGALPCQLVAQKVKSLLWGQGFPDYVAPFGNSQAQDMLDWVPIHFITQSFNRKDSCQLPGALVIEVKWTKYGSLLNPQAKIVNVTANLISSSFPEANSGNERTILISTAVTFVDVSAPAEAGFRAPPAINARLPFNFFFPFV

SEQ ID NO: 810885 - protein, 596 aa, Homo sapiens
RDAPRLAVAVAGQRAVHVAGLAGTPWEMRPRGLPPLLVVLLGCWASVSAQTDATPAVTTEGLNSTEAALATFGTFPSTRPPGTPRAPGPSSGPRPTPVTDVAVLCVCDLSPAQCDINCCCDPDCSSVDFSVFSACSVPVVTGDSQFCSQKAVIYSLNFTANPPQRVFELVDQINPSIFCIHITNYKPALSFINPEVPDENNFDTLMKTSDGFTLNAESYVSFTTKLDIPTAAKYEYGVPLQTSDSFLRFPSSLTSSLCTDNNPAAFLVNQAVKCTRKINLEQCEEIEALSMAFYSSPEILRVPDSRKKVPITVQSIVIQSLNKTLTRREDTDVLQPTLVNAGHFSLCVNVVLEVKYSLTYTDAGEVTKADLSFVLGTVSSVVVPLQQKFEIHFLQPLAAGFQPHKGSGIIQTTNRYGQLTILHSTTEQDCLALEGVRTPVLFGYTMQSGCKLRLTGALPCQLVAQKVKSLLWGQGFPDYVAPFGNSQAQDMLDWVPIHFITQSFNRKDSCQLPGALVIEVKWTKYGSLLNPQAKIVNVTANLISSSFPEANSGNERTILISTAVTFVDVSAPAEAGFRAPPAINARLPFNFFFPFV

SEQ ID NO: 810886 - protein, 472 aa, Homo sapiens
RDAPRLAVAVAGQRAVHVAGLAGTPWEMRPRGLPPLLVVLLGCWASVSAQTDATPAVTTEGLNSTEAALATFGTFPSTRPPGTPRAPGPSSGPRPTPVTDVAVLCVCDLSPAQCDINCCCDPDCSSVDFSVFSACSVPVVTGDSQFCSQKAVIYSLNFTANPPQRVFELVDQINPSIFCIHITNYKPALSFINPEVPDENNFDTLMKTSDGFTLNAESYVSFTTKLDIPTAAKYEYGVPLQTSDSFLRFPSSLTSSLCTDNNPAAFLVNQAVKCTRKINLEQCEEIEALSMAFYSSPEILRVPDSRKKVPITVQSIVIQSLNKTLTRREDTDVLQPTLVNAGHFSLCVNVVLEVKYSLTYTDAGEVTKADLSFVLGTVSSVVVPLQQKFEIHFLQENTQPVPLSGNPGYVVGLPLAAGFQPHKGSGIIQTTNRYGQLTILHSTTEQDCLALEGVRTPVLFGYTMQSGCKLRR

SEQ ID NO: 810887 - protein, 567 aa, Homo sapiens
RDAPRLAVAVAGQRAVHVAGLAGTPWEMRPRGLPPLLVVLLGCWASVSAQTDATPAVTTEGLNSTEAALATFGTFPSTRPPGTPRAPGPSSGPRPTPVTDVAVLCVCDLSPAQCDINCCCDPDCSSVDFSVFSACSVPVVTGDSQFCSQKAVIYSLNFTANPPQRVFELVDQINPSIFCIHITNYKPALSFINPEVPDENNFDTLMKTSDGFTLNAESYVSFTTKLDIPTAAKYEYGVPLQTSDSFLRFPSSLTSSLCTDNNPAAFLVNQAVKCTRKINLEQCEEIEALSMAFYSSPEILRVPDSRKKVPITVQSIVIQSLNKTLTRREDTDVLQPTLVNAGHFSLCVNVVLEVKYSLTYTDAGEVTKADLSFVLGTVSSVVVPLQQKFEIHFLQENTQPVPLSGNPGYVVGLPLAAGFQPHKGLTGALPCQLVAQKVKSLLWGQGFPDYVAPFGNSQAQDMLDWVPIHFITQSFNRKDSCQLPGALVIEVKWTKYGSLLNPQAKIVNVTANLISSSFPEANSGNERTILISTAVTFVDVSAPAEAGFRAPPAINARLPFNFFFPFV

SEQ ID NO: 810888 - protein, 423 aa, Homo sapiens
RDAPRLAVAVAGQRAVHVAGLAGTPWEMRPRGLPPLLVVLLGCWASVSAQTDATPAVTTEGLNSTEAALATFGTFPSTRPPGTPRAPGPSSGPRPTPVTDVAVLCVCDLSPAQCDINCCCDPDCSSVDFSVFSACSVPVVTGDSQFCSQKAVIYSLNFTANPPQRVFELVDQINPSIFCIHITNYKPALSFINPEVPDENNFDTLMKTSDGFTLNAESYVSFTTKLDIPTAAKYEYGVPLQTSDSFLRFPSSLTSSLCTDNNPAAFLVNQAVKCTRKINLEQCEEIEALSMAFYSSPEILRVPDSRKKVPITVQSIVIQSLNKTLTRREDTDVLQPTLVNAGHFSLCVNVVLETDWSSPVSARSTEGEEPAVGPGLPRLRGPFWKFPGPGHAGLGAHPLHHPVIQQEGFLPAPRGFGYRSEVD

SEQ ID NO: 810889 - protein, 637 aa, Homo sapiens
RDAPRLAVAVAGQRAVHVAGLAGTPWEMRPRGLPPLLVVLLGCWASVSAQTDATPAVTTEGLNSTEAALATFGTFPSTRPPGTPRAPGPSSGPRPTPVTDVAVLCVCDLSPAQCDINCCCDPDCSSVDFSVFSACSVPVVTGDSQFCSQKAVIYSLNFTANPPQRVFELVDQINPSIFCIHITNYKPALSFINPEVPDENNFDTLMKTSDGFTLNAESYVSFTTKLDIPTAAKYEYGVPLQTSDSFLRFPSSLTSSLCTDNNPAGQAYWFTPVIPALWEAEARGSLEAFLVNQAVKCTRKINLEQCEEIEALSMAFYSSPEILRVPDSRKKVPITVQSIVIQSLNKTLTRREDTDVLQPTLVNAGHFSLCVNVVLEVKYSLTYTDAGEVTKADLSFVLGTVSSVVVPLQQKFEIHFLQENTQPVPLSGNPGYVVGLPLAAGFQPHKGSGIIQTTNRYGQLTILHSTTEQDCLALEGVRTPVLFGYTMQSGCKLRLTGALPCQLVAQKVKSLLWGQGFPDYVAPFGNSQAQDMLDWVPIHFITQSFNRKDSCQLPGALVIEVKWTKYGSLLNPQAKIVNVTANLISSSFPEANSGNERTILISTAVTFVDVSAPAEAGFRAPPAINARLPFNFFFPFV

SEQ ID NO: 810890 - protein, 599 aa, Homo sapiens
GCTRLSCAARDPGNSASLPPLLVVLLGCWASVSAQTDATPAVTTEGLNSTEAALATFGTFPSTRPPGTPRAPGPSSGPRPTPVTDVAVLCVCDLSPAQCDINCCCDPDCSSVDFSVFSACSVPVVTGDSQFCSQKAVIYSLNFTANPPQRVFELVDQINPSIFCIHITNYKPALSFINPEVPDENNFDTLMKTSDGFTLNAESYVSFTTKLDIPTAAKYEYGVPLQTSDSFLRFPSSLTSSLCTDNNPAAFLVNQAVKCTRKINLEQCEEIEALSMAFYSSPEILRVPDSRKKVPITVQSIVIQSLNKTLTRREDTDVLQPTLVNAGHFSLCVNVVLEVKYSLTYTDAGEVTKADLSFVLGTVSSVVVPLQQKFEIHFLQENTQPVPLSGNPGYVVGLPLAAGFQPHKGSGIIQTTNRYGQLTILHSTTEQDCLALEGVRTPVLFGYTMQSGCKLRLTGALPCQLVAQKVKSLLWGQGFPDYVAPFGNSQAQDMLDWVPIHFITQSFNRKDSCQLPGALVIEVKWTKYGSLLNPQAKIVNVTANLISSSFPEANSGNERTILISTAVTFVDVSAPAEAGFRAPPAINARLPFNFFFPFV

SEQ ID NO: 810891 - protein, 600 aa, Homo sapiens
RDAPRLAVAVAGQRAVHVAGLAGTPWEMRPRGLPPLLVVLLGCWASVSAQTDATPAVTTEGLNSTEAALATFGTFPSTRPPGTPRAPGPSSGPRPTPVTDVAVLCVCDLSPAQCDINCCCDPDCSSVDFSVFSACSVPVVTGDSQFCSQKAVIYSLNFTANPPQRVFELVDQINPSIFCIHITNYKPALSFINPEVPDENNFDTLMKTSDGFTLNAESYVSFTTKLDIPTAAKYEYGVPLQTSDSFLRFPSSLTSSLCTDNNPAGQAYWFTPVIPALWEAEARGSLEVPDSRKKVPITVQSIVIQSLNKTLTRREDTDVLQPTLVNAGHFSLCVNVVLEVKYSLTYTDAGEVTKADLSFVLGTVSSVVVPLQQKFEIHFLQENTQPVPLSGNPGYVVGLPLAAGFQPHKGSGIIQTTNRYGQLTILHSTTEQDCLALEGVRTPVLFGYTMQSGCKLRLTGALPCQLVAQKVKSLLWGQGFPDYVAPFGNSQAQDMLDWVPIHFITQSFNRKDSCQLPGALVIEVKWTKYGSLLNPQAKIVNVTANLISSSFPEANSGNERTILISTAVTFVDVSAPAEAGFRAPPAINARLPFNFFFPFV

SEQ ID NO: 810892 - protein, 389 aa, Homo sapiens
MDIPTAAKYEYGVPLQTSDSFLRFPSSLTSSLCTDNNPAAFLVNQAVKCTRKINLEQCEEIEALSMAFYSSPEILRVPDSRKKVPITVQSIVIQSLNKTLTRREDTDVLQPTLVNAGHFSLCVNVVLEVKYSLTYTDAGEVTKADLSFVLGTVSSVVVPLQQKFEIHFLQENTQPVPLSGNPGYVVGLPLAAGFQPHKGSGIIQTTNRYGQLTILHSTTEQDCLALEGVRTPVLFGYTMQSGCKLRLTGALPCQLVAQKVKSLLWGQGFPDYVAPFGNSQAQDMLDWVPIHFITQSFNRKDSCQLPGALVIEVKWTKYGSLLNPQAKIVNVTANLISSSFPEANSGNERTILISTAVTFVDVSAPAEAGFRAPPAINARLPFNFFFPFV

SEQ ID NO: 810893 - protein, 266 aa, Homo sapiens
RDAPRLAVAVAGQRAVHVAGLAGTPWEMRPRGLPPLLVVLLGCWASVSAQTDATPAVTTEGLNSTEAALATFGTFPSTRPPGTPRAPGPSSGPRPTPVTDVAVLCVCDLSPAQCDINCCCDPDCSSVDFSVFSACSVPVVTGDSQFCSQKAVIYSLNFTANPPQRVFELVDQINPSIFCIHITNYKPALSFINPEVPDENNFDTLMKTSDGFTLNAESYVSFTTKLDIPTAAKYEYGVPLQTSDSFLRFPSSLTSSLCTDNNPAGT

SEQ ID NO: 810894 - protein, 293 aa, Homo sapiens
  misc_feature (10)..(10): Xaa can be any naturally occurring amino acid
GKKSYWVEGXVLKGEEFRVWVNVVVEVKERVKVKYSLTYTDAGEVTKADLSFVLGTVSSVVVPLQQKFEIHFLQENTQPVPLSGNPGYVVGLPLAAGFQPHKGSGIIQTTNRYGQLTILHSTTEQDCLALEGVRTPVLFGYTMQSGCKLRLTGALPCQLVAQKVKSLLWGQGFPDYVAPFGNSQAQDMLDWVPIHFITQSFNRKDSCQLPGALVIEVKWTKYGSLLNPQAKIVNVTANLISSSFPEANSGNERTILISTAVTFVDVSAPAEAGFRAPPAINARLPFNFFFPFV

SEQ ID NO: 810895 - protein, 148 aa, Homo sapiens
MLFLRLTGALPCQLVAQKVKSLLWGQGFPDYVAPFGNSQAQDMLDWVPIHFITQSFNRKDSCQLPGALVIEVKWTKYGSLLNPQAKIVNVTANLISSSFPEANSGNERTILISTAVTFVDVSAPAEAGFRAPPAINARLPFNFFFPFV

SEQ ID NO: 810896 - protein, 614 aa, Homo sapiens; identical to SEQ ID NO: 810884

SEQ ID NO: 810897 - protein, 614 aa, Homo sapiens; identical to SEQ ID NO: 810884

SEQ ID NO: 810898 - protein, 442 aa, Homo sapiens
RDAPRLAVAVAGQRAVHVAGLAGTPWEMRPRGLPPLLVVLLGCWASVSAQTDATPAVTTEGLNSTEAALATFGTFPSTRPPGTPRAPGPSSGPRPTPVTDVAVLCVCDLSPAQCDINCCCDPDCSSVDFSVFSACSVPVVTGDSQFCSQKAVIYSLNFTANPPQRVFELVDQINPSIFCIHITNYKPALSFINPEVPDENNFDTLMKTSDGFTLNAESYVSFTTKLDIPTAAKYEYGVPLQTSDSFLRFPSSLTSSLCTDNNPAAFLVNQAVKCTRKINLEQCEEIEALSMAFYSSPEILRVPDSRKKVPITVQSIVIQSLNKTLTRREDTDVLQPTLVNAGHFSLCVNVVLEDSCQLPGALVIEVKWTKYGSLLNPQAKIVNVTANLISSSFPEANSGNERTILISTAVTFVDVSAPAEAGFRAPPAINARLPFNFFFPFV

SEQ ID NO: 810899 - protein, 548 aa, Homo sapiens
RDAPRLAVAVAGQRAVHVAGLAGTPWEMRPRGLPPLLVVLLGCWASVSAQTDATPAVTTEGLNSTEAALATFGTFPSTRPPGTPRAPGPSSGPRPTPVTDVAVLCVCDLSPAQCDINCCCDPDCSSVDFSVFSACSVPVVTGDSQFCSQKAVIYSLNFTANPPQRVFELVDQINPSIFCIHITNYKPALSFINPEVPDENNFDTLMKTSDGFTLNAESYVSFTTKLDIPTAAKYEYGVPLQTSDSFLRFPSSLTSSLCTDNNPAAFLVNQAVKCTRKINLEQCEEIEALSMAFYSSPEILRVPDSRKKVPITVQSIVIQSLNKTLTRREDTDVLQPTLVNAGHFSLCVNVVLEVKYSLTYTDAGEVTKADLSFVLGTVSSVVVPLQQKFEIHFLQENTQPVPLSGNPGYVVGLPLAAGFQPHKGSGIIQTTNRYGQLTILHSTTEQDCLALEGVRTPVLFGYTMQSGCKLRLTGALPCQLVAQKVKSLLWGQGFPDYVAPFGNSQAQDMLDWVPIHFITQSFNRKDSCQLPGALVIEVQEARPGNLKS

SEQ ID NO: 810900 - protein, 602 aa, Homo sapiens
RDAPRLAVAVAGQRAVHVAGLAGTPWEMRPRGLPPLLVVLLGCWASVSAQTDATPAVTTEGLNSTEAALATFGTFPSTRPPGTPRAPGPSSGPRPTPVTDVAVLCVCDLSPAQCDINCCCDPDCSSVDFSVFSACSVPVVTGDSQFCSQKAVIYSLNFTANPPQRVFELVDQINPSIFCIHITNYKPALSFINPEVPDENNFDTLMKTSDGFTLNAESYVSFTTKLDIPTAAKYEYGVPLQTSDSFLRFPSSLTSSLCTDNNPAAFLVNQAVKCTRKINLEQCEEIEALSMAFYSSPEILRVPDSRKKVPITVQSIVIQSLNKTLTRREDTDVLQPTLVNAGHFSLCVNVVLEVKYSLTYTDAGEVTKADLSFVLGTVSSVVVPLQQKFEIHFLQENTQPVPLSGNPGYVVGLPLAAGFQPHKGSGIIQTTNRYGQLTILHSTTEQDCLALEGVRTPVLFGYTMQSGCKLRLTGALPCQLVAQKVKSLLWGQGFPDYVAPFGNSQAQDMLDWVPIHFITQSFNRKDSCQLPGALVIEVKWTKYGSLLNPQAKIVNANSGNERTILISTAVTFVDVSAPAEAGFRAPPAINARLPFNFFFPFV

SEQ ID NO: 810901 - protein, 481 aa, Homo sapiens
RDAPRLAVAVAGQRAVHVAGLAGTPWEMRPRGLPPLLVVLLGCWASVSAQTDATPAVTTEGLNSTEAALATFGTFPSTRPPGTPRAPGPSSGPRPTPVTDVAVLCVCDLSPAQCDINCCCDPDCSSVDFSVFSACSVPVVTGDSQFCSQKAVIYSLNFTANPPQRVFELVDQINPSIFCIHITNYKPALSFINPEVPDENNFDTLMKTSDGFTLNAESYVSFTTKLDIPTAAKYEYGVPLQTSDSFLRFPSSLTSSLCTDNNPAAFLVNQAVKCTRKINLEQCEEIEALSMAFYSSPEILRVPDSRKKVPITVQSIVIQSLNKTLTRREDTDVLQPTLVNAGHFSLCVNVVLEVKYSLTYTDAGEVTKADLSFVLGTVSSVVVPLQQKFEIHFLQENTQPVPLSGNPGYVVGLPLAAGFQPHKGSGIIQTTNRYGQLTILHSTTEQDCLALEGVRTPVLFGYTMQSGCKLRLPFNFFFPFV

SEQ ID NO: 810902 - protein, 280 aa, Homo sapiens
RDAPRLAVAVAGQRAVHVAGLAGTPWEMRPRGLPPLLVVLLGCWASVSAQTDATPAVTTEGLNSTEAALATFGTFPSTRPPGTPRAPGPSSGPRPTPVTDVAVLCVCDLSPAQCDINCCCDPDCSSVDFSVFSACSVPVVTGDSQFCSQKAVIYSLNFTANPPQRVFELVDQINPSIFCIHITNYKPALSFINPEVPDENNFDTLMKTSDGFTLNAESYVSFTTKLDIPTAAKYEYGVPLQTSDSFLRFPSSLTSSLCTDNNPAGKKVVILLSLDICCYY

SEQ ID NO: 810903 - protein, 23 aa, Homo sapiens
MHWEKVDVNNSIKQPYFLIKNDK

SEQ ID NO: 810904 - protein, 135 aa, Homo sapiens
PPPPTRQGSREMAGAFLVAPRPPYSRSPGGPESAPTPASVLPELRRGKQDLLSADSGLPAVDQGEVAGPRLQPAQPLRPGAVPSASRARAPDTKAGTRARDPAPGASQLRAAHSPHRGGGGAPRTQLAAPPRPPL

SEQ ID NO: 810905 - protein, 161 aa, Homo sapiens
MQAPSIWQWGQENKVYACMMVFFLSNMIENQCMSTGAFEITLNDVPVWSKLESGHLPSMQQLCSNFLTMKMKLNVHIGFNPTPSIIAPPISTENSFALRDHCKSSVTDIMKACTEDSKLLVQTRCFLGRLVVPLGKPQCKIVFQCWHILEFCTFMECNNTV

SEQ ID NO: 810906 - protein, 105 aa, Homo sapiens
MQAPSIWQWGQENKVYACMMVFFLSNMIENQCMSTGAFEITLNDVPVWSKLESGHLPSMQQLCSNFLTMKMKLNVHIGFNPTPSIIAPPISTENSFALRDHCRAA

SEQ ID NO: 810907 - protein, 85 aa, Homo sapiens
TLADRACAVGSSSLLGFGLAAVCLRAAEVAGSFKMRLLLLLLVAASAMVRSEASANLGGVPSKRLKMQYATGPLLKFQIVCFLRL

SEQ ID NO: 810908 - protein, 161 aa, Homo sapiens; identical to SEQ ID NO: 810905

SEQ ID NO: 810909 - protein, 161 aa, Homo sapiens; identical to SEQ ID NO: 810905

SEQ ID NO: 810910 - protein, 161 aa, Homo sapiens; identical to SEQ ID NO: 810905

SEQ ID NO: 810911 - protein, 161 aa, Homo sapiens; identical to SEQ ID NO: 810905

SEQ ID NO: 810912 - protein, 161 aa, Homo sapiens; identical to SEQ ID NO: 810905

SEQ ID NO: 810913 - protein, 161 aa, Homo sapiens; identical to SEQ ID NO: 810905

SEQ ID NO: 810914 - protein, 161 aa, Homo sapiens; identical to SEQ ID NO: 810905

SEQ ID NO: 810915 - protein, 161 aa, Homo sapiens; identical to SEQ ID NO: 810905

SEQ ID NO: 810916 - protein, 181 aa, Homo sapiens
TLADRACAVGSSSLLGFGLAAVCLRAAEVAGSFKMRLLLLLLVAASAMVRSEASANLGGVPSKRLKMQYATGPLLKFQIVVSMCTGPRPPRRASARRHWLREAPASRPKWPHLRWPRRTVPAPFHSQPSRGPLARSGRPPFPVFPEVIGGCLRSTCGLLASGTQTSALKERITSLNQYIDT

SEQ ID NO: 810917 - protein, 112 aa, Homo sapiens
TLADRACAVGSSSLLGFGLAAVCLRAAEVAGSFKMRLLLLLLVAASAMVRSEASANLGGVPSKRLKMQYATGPLLKFQIVRWSLTVLPRLVLNSWDQVNLLPQPPKVLGLQM

SEQ ID NO: 810918 - protein, 114 aa, Homo sapiens
TLADRACAVGSSSLLGFGLAAVCLRAAEVAGSFKMRLLLLLLVAASAMVRSEASANLGGVPSKRLKMQYATGPLLKFQIVRWSLTVLPRLVLNSWDQVNLLPQPPKVLGLQIVS

SEQ ID NO: 810919 - protein, 161 aa, Homo sapiens; identical to SEQ ID NO: 810905

SEQ ID NO: 810920 - protein, 161 aa, Homo sapiens; identical to SEQ ID NO: 810905

SEQ ID NO: 810921 - protein, 161 aa, Homo sapiens; identical to SEQ ID NO: 810905

SEQ ID NO: 810922 - protein, 146 aa, Homo sapiens
MQAPSIWQWGQENKNQCMSTGAFEITLNDVPVWSKLESGHLPSMQQLCSNFLTMKMKLNVHIGFNPTPSIIAPPISTENSFALRDHCKSSVTDIMKACTEDSKLLVQTRCFLGRLVVPLGKPQCKIVFQCWHILEFCTFMECNNTV

SEQ ID NO: 810923 - protein, 85 aa, Homo sapiens; identical to SEQ ID NO: 810907

SEQ ID NO: 810924 - protein, 101 aa, Homo sapiens
  misc_feature (2)..(13): Xaa can be any naturally occurring amino acid
  misc_feature (20)..(20): Xaa can be any naturally occurring amino acid
  misc_feature (22)..(22): Xaa can be any naturally occurring amino acid
  misc_feature (24)..(25): Xaa can be any naturally occurring amino acid
  misc_feature (29)..(30): Xaa can be any naturally occurring amino acid
  misc_feature (32)..(33): Xaa can be any naturally occurring amino acid
  misc_feature (36)..(36): Xaa can be any naturally occurring amino acid
  misc_feature (39)..(49): Xaa can be any naturally occurring amino acid
  misc_feature (53)..(53): Xaa can be any naturally occurring amino acid
  misc_feature (55)..(58): Xaa can be any naturally occurring amino acid
  misc_feature (61)..(62): Xaa can be any naturally occurring amino acid
  misc_feature (65)..(67): Xaa can be any naturally occurring amino acid
  misc_feature (70)..(70): Xaa can be any naturally occurring amino acid
  misc_feature (72)..(72): Xaa can be any naturally occurring amino acid
  misc_feature (77)..(78): Xaa can be any naturally occurring amino acid
IXXXXXXXXXXXXPIYYTPXNXFXXKSLXXPXXTPXILXXXXXXXXXXXIYFXIXXXXFNXXHSXXXIIXYXPPPPXXRPPGNGGGRGGGGGGITPCGGLS

SEQ ID NO: 810925 - protein, 85 aa, Homo sapiens; identical to SEQ ID NO: 810907

SEQ ID NO: 810926 - protein, 722 aa, Homo sapiens
HTSDPVASSLLVLPRKPALPSLLGAQRLSQLRAQPGADPEGRRKPSGRASFLCCLPGLGRPIPRPELRSLPPHPSLGFTRTEPGAGCRPRLESTFQHFGQRPGRPGPFGLAMASVQQGEKQLFEKFWRGTFKAVATPRPESIIVASITARKPLPRTEPQNNPVVPAQDGPSEKLGQHLATEPLGTNSWERDKTCRELGATRGHSASHDKDLTPPPSSRGKKKKKKSTRKKRRRSSSYSPSPVKKKKKKSSKKHKRRRSFSKKRRHSSSSPKSKRRDEKRHKKQSRSRPRKSHRHRHHRCPSRSQSSESRPSSCESRHRGRSPEEGQKSRRRHSRRCSKTLCKDSPEAQSSRPPSQPLQMLGYLSARGVITGSGSAADLFTKTASPLTTSRGRSQEYDSGNDTSSPPSTQTSSARSRGQEKGSPSGGLSKSRELNSGNTSDSGNSFTTSSPQNKGAMLENLSPTSRGRESRGFQSPCLECAEVKKSSLVPSTARSSPMKGCSRSSSYASTRSSSHSSRSPNPRASPRYTQSRSTSSEKRSYSRSPSYSSKSGKRSPPSRSSRSRRSPSYSRYSPSRERDPKYSEKDSQQRERERARRRRRSYSPMRKRRRDSPSHLEARRITSARKRPIPYYRPSPSSSGSLSSTSSWYSSSSSRSASRSYSRSRSRSRSRRRSRTRTSSSSSSRSPSPGSRSRSRSRSRSRSRSRSQSRSYSSADSYSSTRR

SEQ ID NO: 810927 - protein, 210 aa, Homo sapiens
MRPGRSRTRGLRSLELCGVFKRFSCLSLPSSWDYRSSWELPDLQEGKIQAISDSDGVNYPWYGNTTETCTIVGPTKRDSKFIISMNDNFYPSVTWAVPVSESNVAKLTNIYRDQSFTTWLVATNTSTNDMIILQTLHWRMQLSIEVNPNRPLGQRARLREPIAQDQPKILSKNEPIPPSALVKPNANDAQVLMWRPKYGQPLVVIPPKHR

SEQ ID NO: 810928 - protein, 252 aa, Homo sapiens
GQGIAAALIHLPSTGNKHWRPRSPEASTDCCWLHQATGSGSVTQAGVQWYDLGSLQPLPPRFKRFSCLSLPSSWDYRSSWELPDLQEGKIQAISDSDGVNYPWYGNTTETCTIVGPTKRDSKFIISMNDNFYPSVTWAVPVSESNVAKLTNIYRDQSFTTWLVATNTSTNDMIILQTLHWRMQLSIEVNPNRPLGQRARLREPIAQDQPKILSKNEPIPPSALVKPNANDAQVLMWRPKYGQPLVVIPPKHR

SEQ ID NO: 810929 - protein, 191 aa, Homo sapiens; identical to SEQ ID NO: 760997

SEQ ID NO: 810930 - protein, 261 aa, Homo sapiens
FTKVSPKVCRKMGPKTLSGKTKHFRRNPRYENIPRDFYRFLYYKTRLPFVCRKIGALTGFFHKEWQTTFGAGGTSSPRVLVPSPREGFPKKGAREKGYRGPYNTSEFRGPPMKRARSATAMKTKFAVNHPGGESTQWERPVVRSPQYPIGALWVCDQIPKPKPLSQPRYLNQWNSIPSLGSDLHMAGNCMRQRNTMVNPNRPLGQRARLREPIAQDQPKILSKNEPIPPSALVKPNANDAQVLMWRPKYGQPLVVIPPKHR

SEQ ID NO: 810931 - protein, 103 aa, Homo sapiens
MGAYHVDAEAFVRGSPDHLLDLIYRYEDSDASTPRLGGRVIQVGSRLVDVPYVIQRAGAGSSLPWQLVPLSPASSFPLFFVCLLVFVFHFYLLQIDLNIFYNH

SEQ ID NO: 810932 - protein, 98 aa, Homo sapiens
IEISCAKASEMSSRGSPTAMHVTILSTASSSRSPLNLGSVGSFSKKSENTYSVARWSLTWQVIIHFPGFSAIISVVRKVAGNRLTTSVRCPLLMKVLP

SEQ ID NO: 810933 - protein, 174 aa, Homo sapiens
NRDLLREGQRDEQQGQPHRNARDHLVHSQLQSQPLELGLRGLLQQEIREHVLRGQLSDGHGCGAPGSTRRSGYSRRRESCAAPSPSHRPGARLSLSLCLLPHPACLCVSVPQAPSDSAGLSRSLPPPPAGRGGAGTRELRFLRFHPARPCKSPGRARHSDSRLSRAPPGAGTTR

SEQ ID NO: 810934 - protein, 98 aa, Homo sapiens; identical to SEQ ID NO: 810932

SEQ ID NO: 810935 - protein, 192 aa, Homo sapiens
MQAIKCVVVGDGAVGKTCLLISYTTNAFPGEYIPTVFDNYSANVMVDSKPVNLGLWDTAGQEDYDRLRPLSYPQTDVFLICFSLVSPASYENVRAKWFPEVRHHCPSTPIILVGTKLDLRDDKDTIEKLKEKKLAPITYPQGLALAKEIDSVKYLECSALTQRGLKTVFDEAIRAVLCPQPTRQQKRACSLL

SEQ ID NO: 810936 - protein, 115 aa, Homo sapiens
VSGGVRLPASERRFLSCCPLPARPLLQRLASRHPASLPCSQQLLWRSSRAPPLLPSLPLGVLITDPLTRHPGHHHPAPFHSAALLVPVKPPTAWEGKSRLARPCLSQALEACQLT

SEQ ID NO: 810937 - protein, 115 aa, Homo sapiens; identical to SEQ ID NO: 810936

SEQ ID NO: 810938 - protein, 521 aa, Homo sapiens
MAAHLVKRCTCLLREAARQAPAMAPVGRLRLAWVAHKTLTSSATSPISHLPGSLMEPVEKERASTPYIEKQVDHLIKKATRPEELLELLGGSHDLDSNQAAMVLIRLSHLLSEKPEDKGLLIQDAHFHQLLCLLNSQIASVWHGTLSKLLGSLYALGIPKASKELQSVEQEVRWRMRKLKYKHLAFLAESCATLSQEQHSQELLAELLTHLERRWTEIEDSHTLVTVMMKVGHLSEPLMNRLEDKHVLNRAQDITLPHLCSVLLAFARLNFHPDQEDQFFSLVHEKLGSELPGLEPALQVDLVWALCVLQQAREAELQAVLHPEFHIQFLGGKSQKDQNTFQKLLHINATALLEYPEYSGPLLPASAVAPGPSALDRKVTPLQKELQETLKGLLGSADKGSLEVATQYGWVLDAEVLLDSDGEFLPVRDFVAPHLAQPTGSQSPPPGSKRLAFLRWEFPNFNSRSKDLLGRFVLARRHIVAAGFLIVDVPFYEWLELKSEWQKGAYLKDKMRKAVAEELAK

SEQ ID NO: 810939 - protein, 631 aa, Homo sapiens
MAAHLVKRCTCLLREAARQAPAMAPVGRLRLAWVAHKTLTSSATSPISHLPGSLMEPVEKERASTPYIEKQVDHLIKKATRPEELLELLGGSHDLDSNQAAMVLIRLSHLLSEKPEDKGLLIQDAHFHQLLCLLNSQIASVWHGTLSKLLGSLYALGIPKASKELQSVEQEVRWRMRKLKYKHLAFLAESCATLSQEQHSQELLAELLTHLERRWTEIEDSHTLVTVMMKVGHLSEPLMNRLEDKCLELVEHFGPNELRKVLVMLAAQSRRSVPLLRAISYHLVQKPFSLTKDVLLDVAYAYGKLSFHQTQVSQRLATDLLSLMPSLTSGEVAHCAKSFALLKWLSLPLFEAFAQHVLNRAQDITLPHLCSVLLAFARLNFHPDQEDQFFSLVHEKLGSELPGLEPALQVDLVWALCVLQQAREAELQAVLHPEFHIQFLGGKSQKDQNTFQKLLHINATALLEYPEYSGPLLPASAVAPGPSALDRKVTPLQKELQETLKGLLGSADKGSLEVATQYGWVLDAEVLLDSDGEFLPVRDFVAPHLAQPTGSQSPPPGSKRLAFLRWEFPNFNSRSKDLLGRFVLARRHIVAAGFLIVDVPFYEWLELKSEWQKGAYLKDKMRKAVAEELAK

SEQ ID NO: 810940 - protein, 631 aa, Homo sapiens; identical to SEQ ID NO: 810939

SEQ ID NO: 810941 - protein, 631 aa, Homo sapiens; identical to SEQ ID NO: 810939

SEQ ID NO: 810942 - protein, 527 aa, Homo sapiens
MAAHLVKRCTCLLREAARQAPAMAPVGRLRLAWVAHKTLTSSATSPISHLPGSLMEPVEKERASTPYIEKQVDHLIKKATRPEELLELLGGSHDLDSNQAAMVLIRLSHLLSEKPEDKGLLIQDAHFHQLLCLLNSQIASVWHGTLSKLLGSLYALGIPKASKELQSVEQEVRWRMRKLKYKHLAFLAESCATLSQEQHSQELLAELLTHLERRWTEIEDSHTLVTVMMKVGHLSEPLMNRLEDKCLELVEHFGPNELRKVLVMLAAQSRRSVPLLRAISYHLVQKPFSLTKDVLLDVAYAYGKLSFHQTQVSQRLATDLLSLMPSLTSGEVAHCAKSFALLKWLSLPLFEAFAQHVLNRAQDITLPHLCSVLLAFARLNFHPDQEDQFFSLVHEKLGSELPGLEPALQVDLVWALCVLQQAREAELQAVLHPEFHIQFLGGKSQKDQNTFQKLLHINATALLEYPEYSGPLLPASAVAPGPSALDRKVTPLQKELQETLKGLLGSADKGSLEMLRCCWTVTASFCP

SEQ ID NO: 810943 - protein, 631 aa, Homo sapiens; identical to SEQ ID NO: 810939

SEQ ID NO: 810944 - protein, 521 aa, Homo sapiens; identical to SEQ ID NO: 810938

SEQ ID NO: 810945 - protein, 551 aa, Homo sapiens
MAAHLVKRCTCLLREAARQAPAMAPVGRLRLAWVAHKTLTSSATSPISHLPGSLMEPVEKERASTPYIEKQVDHLIKKATRPEELLELLGGSHDLDSNQAAMVLIRLSHLLSEKPEDKGLLIQDAHFHQLLCLLNSQIASVWHGTLSKLLGSLYALGIPKASKELQSVEQEVRWRMRKLKYKHLAFLAESCATLSQEQHSQELLAELLTHLERRWTEIEDSHTLVTVMMKVGHLSEPLMNRLEDKCLELVEHFGPNELRKVLVMLAAQSRRSVPLLRAISYHLVQKPFSLTKDVLLDVAYAYGKLSFHQTQVSQRLATDLLSLMPSLTSGEVAHCAKSFALLKWLSLPLFEAFAQHVLNRAQDITLPHLCSVLLAFARLNFHPDQEDQFFSLVHEKLGSELPGLEPALQVDLVWALCVLQQAREAELQAVLHPEFHIQFLGGKSQKDQNTFQKLLHINATALLEYPEYSGPLLPASAVAPGPSALDRKVTPLQKELQETLKGLLGSADKGSLEVATQYGWVLGEGSPWLAQGLALPESNGTLLTHPVCSKY

SEQ ID NO: 810946 - protein, 488 aa, Homo sapiens
MAAHLVKRCTCLLREAARQAPAMAPVGRLRLAWVAHKTLTSSATSPISHLPGSLMEPVEKERASTPYIEKQVDHLIKKATRPEELLELLGGSHDLDSNQAAMVLIRLSHLLSEKPEDKGLLIQDAHFHQLLCLLNSQIASVWHGTLSKLLGSLYALGIPKASKELQSVEQEVRWRMRKLKYKHLAFLAESCATLSQEQHSQELLAELLTHLERRWTEIEDSHTLVTVMMKVGHLSEPLMNRLEDKCLELVEHFGPNELRKVLVMLAAQSRRSVPLLRAISYHLVQKPFSLTKDVLLDVAYAYGKLSFHQTQVSQRLATDLLSLMPSLTSGEVAHCAKSFALLKWLSLPLFEAFAQHVLNRAQDITLPHLCSVLLAFARLNFHPDQEDQFFSLVHEKLGSELPGLEPALQVDLVWALCVLQQAREAELQAVLHPEFHIQFLGGKSQKDQNTFQKLLVPFYEWLELKSEWQKGAYLKDKMRKAVAEELAK

SEQ ID NO: 810947 - protein, 521 aa, Homo sapiens; identical to SEQ ID NO: 810938

SEQ ID NO: 810948 - protein, 371 aa, Homo sapiens
MAAHLVKRCTCLLREAARQAPAMAPVGRLRLAWVAHKTLTSSATSPISHLPGSLMEPVEKERASTPYIEKQVAHCAKSFALLKWLSLPLFEAFAQHVLNRAQDITLPHLCSVLLAFARLNFHPDQEDQFFSLVHEKLGSELPGLEPALQVDLVWALCVLQQAREAELQAVLHPEFHIQFLGGKSQKDQNTFQKLLHINATALLEYPEYSGPLLPASAVAPGPSALDRKVTPLQKELQETLKGLLGSADKGSLEVATQYGWVLDAEVLLDSDGEFLPVRDFVAPHLAQPTGSQSPPPGSKRLAFLRWEFPNFNSRSKDLLGRFVLARRHIVAAGFLIVDVPFYEWLELKSEWQKGAYLKDKMRKAVAEELAK

SEQ ID NO: 810949 - protein, 307 aa, Homo sapiens
MQALLRLRARQEDSVLGRELILSLCYFCPTQHVLNRAQDITLPHLCSVLLAFARLNFHPDQEDQFFSLVHEKLGSELPGLEPALQVDLVWALCVLQQAREAELQAVLHPEFHIQFLGGKSQKDQNTFQKLLHINATALLEYPEYSGPLLPASAVAPGPSALDRKVTPLQKELQETLKGLLGSADKGSLEVATQYGWVLDAEVLLDSDGEFLPVRDFVAPHLAQPTGSQSPPPGSKRLAFLRWEFPNFNSRSKDLLGRFVLARRHIVAAGFLIVDVPFYEWLELKSEWQKGAYLKDKMRKAVAEELAK

SEQ ID NO: 810950 - protein, 252 aa, Homo sapiens
DAWVRTRGQFFSLVHEKLGSELPGLEPALQVDLVWALCVLQQAREAELQAVLHPEFHIQFLGGKSQKDQNTFQKLLHINATALLEYPEYSGPLLPASAVAPGPSALDRKVTPLQKELQETLKGLLGSADKGSLEVATQYGWVLDAEVLLDSDGEFLPVRDFVAPHLAQPTGSQSPPPGSKRLAFLRWEFPNFNSRSKDLLGRFVLARRHIVAAGFLIVDVPFYEWLELKSEWQKGAYLKDKMRKAVAEELAK

SEQ ID NO: 810951 - protein, 248 aa, Homo sapiens
MAAHLVKRCTCLLREAARQAPAMAPVGRLRLALCVLQQAREAELQAVLHPEFHIQFLGGKSQKDQNTFQKLLHINATALLEYPEYSGPLLPASAVAPGPSALDRKVTPLQKELQETLKGLLGSADKGSLEVATQYGWVLDAEVLLDSDGEFLPVRDFVAPHLAQPTGSQSPPPGSKRLAFLRWEFPNFNSRSKDLLGRFVLARRHIVAAGFLIVDVPFYEWLELKSEWQKGAYLKDKMRKAVAEELAK

SEQ ID NO: 810952 - protein, 631 aa, Homo sapiens; identical to SEQ ID NO: 810939

SEQ ID NO: 810953 - protein, 653 aa, Homo sapiens
MAAHLVKRCTCLLREAARQAPAMAPVGRLRLAWVAHKTLTSSATSPISHLPGSLMEPVEKERASTPYIEKQVDHLIKKATRPEELLELLGGSHDLDSNQAAMVLIRLSHLLSEKPEDKGLLIQDAHFHQLLCLLNSQIASVWHGTLSKLLGSLYALGIPKASKELQSVEQEVRWRMRKLKYKHLAFLAESCATLSQEQHSQELLAELLTHLERRWTEIEDSHTLVTVMMKVGHLSEPLMNRLEDKCLELVEHFGPNELRKVLVMLAAQSRRSVPLLRAISYHLVQKPFSLTKDVLLDVAYAYGKLSFHQTQVSQRLATDLLSLMPSLTSGEVAHCAKSFALLKWLSLPLFEAFAQHVLNRAQDITLPHLCSVLLAFARLNFHPDQEDQFFSLVHEKLGSELPGLEPALQVDLVWALCVLQQAREAELQAVLHPEFHIQFLGEPPAPSTTGTGKLPGLVCLVPGGKSQKDQNTFQKLLHINATALLEYPEYSGPLLPASAVAPGPSALDRKVTPLQKELQETLKGLLGSADKGSLEVATQYGWVLDAEVLLDSDGEFLPVRDFVAPHLAQPTGSQSPPPGSKRLAFLRWEFPNFNSRSKDLLGRFVLARRHIVAAGFLIVDVPFYEWLELKSEWQKGAYLKDKMRKAVAEELAK

SEQ ID NO: 810954 - protein, 551 aa, Homo sapiens; identical to SEQ ID NO: 810945

SEQ ID NO: 810955 - protein, 642 aa, Homo sapiens
MEVSGGARCDIMAAHLVKRCTCLLREAARQAPAMAPVGRLRLAWVAHKTLTSSATSPISHLPGSLMEPVEKERASTPYIEKQVDHLIKKATRPEELLELLGGSHDLDSNQAAMVLIRLSHLLSEKPEDKGLLIQDAHFHQLLCLLNSQIASVWHGTLSKLLGSLYALGIPKASKELQSVEQEVRWRMRKLKYKHLAFLAESCATLSQEQHSQELLAELLTHLERRWTEIEDSHTLVTVMMKVGHLSEPLMNRLEDKCLELVEHFGPNELRKVLVMLAAQSRRSVPLLRAISYHLVQKPFSLTKDVLLDVAYAYGKLSFHQTQVSQRLATDLLSLMPSLTSGEVAHCAKSFALLKWLSLPLFEAFAQHVLNRAQDITLPHLCSVLLAFARLNFHPDQEDQFFSLVHEKLGSELPGLEPALQVDLVWALCVLQQAREAELQAVLHPEFHIQFLGGKSQKDQNTFQKLLHINATALLEYPEYSGPLLPASAVAPGPSALDRKVTPLQKELQETLKGLLGSADKGSLEVATQYGWVLDAEVLLDSDGEFLPVRDFVAPHLAQPTGSQSPPPGSKRLAFLRWEFPNFNSRSKDLLGRFVLARRHIVAAGFLIVDVPFYEWLELKSEWQKGAYLKDKMRKAVAEELAK

SEQ ID NO: 810956 - protein, 665 aa, Homo sapiens
MAAHLVKRCTCLLREAARQAPAMAPVGRLRLAWVAHKTLTSSATSPISHLPGSLMEPVEKERASTPYIEKQVDHLIKKATRPEELLELLGGSHDLDSNQAAMVLIRLSHLLSEKPEDKGLLIQDAHFHQLLCLLNSQIASVWHGTLSKLLGSLYALGIPKASKELQSVEQEVRWRMRKLKYKHLAFLAESCATLSQEQHSQELLAELLTHLERRWTEIEDSHTLVTVMMKVGHLSEPLMNRLEDKCLELVEHFGPNELRKVLVMLAAQSRRSVPLLRAISYHLVQKPFSLTKDVLLDVAYAYGKLSFHQTQVSQRLATDLLSLMPSLTSGEVAHCAKSFALLKWLSLPLFEAFAQHVLNRAQDITLPHLCSVLLAFARLNFHPDQEDQFFSLVHEKLGSELPGLEPALQVDLVWALCVLQQAREAELQAVLHPEFHIQFLGGKSQKDQNTFQKLLHINATALLEYPEYSGPLLPASAVAPGPSALDRKVTPLQKELQETLKGLLGSADKGSLEVATQYGWVLDAEVLLDSDGEFLPVRDFVAPHLAQPTGSQSPPPGSKRLAFLRWEFPNFNSRSKDLLGRFVLARRHIVAAGFLIVDVPFYEWLELKLTCASSMDCVPLRRRSSCGRPRRVTLEDKPLCRTLARVGRVASHSEGQNVLLCIINL

SEQ ID NO: 810957 - protein, 527 aa, Homo sapiens; identical to SEQ ID NO: 810942

SEQ ID NO: 810958 - protein, 596 aa, Homo sapiens
MAAHLVKRCTCLLREAARQAPAMAPVGRLRLAWVAHKTLTSSATSPISHLPGSLMEPVEKERASTPYIEKQVDHLIKKATRPEELLELLGGSHDLDSNQAAMIASVWHGTLSKLLGSLYALGIPKASKELQSVEQEVRWRMRKLKYKHLAFLAESCATLSQEQHSQELLAELLTHLERRWTEIEDSHTLVTVMMKVGHLSEPLMNRLEDKCLELVEHFGPNELRKVLVMLAAQSRRSVPLLRAISYHLVQKPFSLTKDVLLDVAYAYGKLSFHQTQVSQRLATDLLSLMPSLTSGEVAHCAKSFALLKWLSLPLFEAFAQHVLNRAQDITLPHLCSVLLAFARLNFHPDQEDQFFSLVHEKLGSELPGLEPALQVDLVWALCVLQQAREAELQAVLHPEFHIQFLGGKSQKDQNTFQKLLHINATALLEYPEYSGPLLPASAVAPGPSALDRKVTPLQKELQETLKGLLGSADKGSLEVATQYGWVLDAEVLLDSDGEFLPVRDFVAPHLAQPTGSQSPPPGSKRLAFLRWEFPNFNSRSKDLLGRFVLARRHIVAAGFLIVDVPFYEWLELKSEWQKGAYLKDKMRKAVAEELAK

SEQ ID NO: 810959 - protein, 393 aa, Homo sapiens
MVGTGPEGCHRNTVTHGPCSCVPGSGINLVTDIKYLDLEAEVGWSCWVIADSLQLNPVICSVLKGKLSFHQTQVSQRLATDLLSLMPSLTSGEVAHCAKSFALLKWLSLPLFEAFAQHVLNRAQDITLPHLCSVLLAFARLNFHPDQEDQFFSLVHEKLGSELPGLEPALQVDLVWALCVLQQAREAELQAVLHPEFHIQFLGGKSQKDQNTFQKLLHINATALLEYPEYSGPLLPASAVAPGPSALDRKVTPLQKELQETLKGLLGSADKGSLEVATQYGWVLDAEVLLDSDGEFLPVRDFVAPHLAQPTGSQSPPPGSKRLAFLRWEFPNFNSRSKDLLGRFVLARRHIVAAGFLIVDVPFYEWLELKSEWQKGAYLKDKMRKAVAEELAK

SEQ ID NO: 810960 - protein, 255 aa, Homo sapiens
MAAHLVKRCTCLLREAARQAPAMAPVGRLRLAWVAHKTLTSSATSPISHLPGSLMEPVEKERASTPYIEKQVDHLIKKATRPEELLELLGGSHDLDSNQAAMVLIRLSHLLSEKPEDKGLLIQDAHFHQLLCLLNSQIASVWHGTLSKLLGSLYALGIPKASKELQSVEQEVRWRMRKLKYKHLAFLAESCATLSQEQHSQELLAELLTHLERRWTEIEDSHTLVTVMMKVGHLSEPLMNRLEDKAIELTSARLW

SEQ ID NO: 810961 - protein, 130 aa, Homo sapiens
MEGPAIAPGHAGSPQTQSQAGGQRAGQRAYSVPLLFLTHPARPEQSAGHHPAPPVQRTSGFCASELPSRPRGSVLQPGRASGLPLLDLYPPLQLMAHEPSSQDQLGLGGGGRGHYVWHGRAGGTDWSQAS

SEQ ID NO: 810962 - protein, 980 aa, Homo sapiens
MKSLKAKFRKSDTNEWNKNDDRLLQAVENGDAEKVASLLGKKGASATKHDSEGKTAFHLAAAKGHVECLRVMITHGVDVTAQDTTGHSALHLAAKNSHHECIRKLLQSKCPAESVDSSGKTALHYAAAQGCLQAVQILCEHKSPINLKDLDGNIPLLLAVQNGHSEICHFLLDHGADVNSRNKSGRTALMLACEIGSSNAVEALIKKGADLNLVDSLGYNALHYSKLSENAGIQSLLLSKISQDADLKTPTKPKQHDQVSKISSERSGTPKKRKAPPPPISPTQLSDVSSPRSITSTPLSGKESVFFAEPPFKAEISSIRENKDRLSDSTTGADSLLDISSEADQQDLLSLLQAKVASLTLHNKELQDKLQAKSPKEAEADLSFDSYHSTQTDLGPSLGKPGETSPPDSKSSPSVLIHSLGKSTTDNDVRIQQLQEILQDLQKRLESSEAERKQLQVELQSRRAELVCLNNTEISENSSDLSQKLKETQSKYEEAMKEVLSVQKQMKLGLVSPESMDNYSHFHELRVTEEEINVLKQDLQNALEESERNKEKVRELEEKLVEREKGTVIKPPVEEYEEMKSSYCSVIENMNKEKAFLFEKYQEAQEEIMKLKDTLKSQMTQEASDEAEDMKEAMNRMIDELNKQVSELSQLYKEAQAELEDYRKRKSLEDVTAEYIHKAEHEKLMQLTNVSRAKAEDALSEMKSQYSKVLNELTQLKQLVDAQKENSVSITEHLQVITTLRTAAKEMEEKISNLKEHLASKEVEVAKLEKQLLEEKAAMTDAMVPRSSYEKLQSSLESEVSVLASKLKESVKEKEKVHSEVVQIRSEVSQVKREKENIQTLLKSKEQEVNELLQKFQQAQEELAEMKRYAESSSKLEEDKDKKINEMSKEVTKLKEALNSLSQLSYSTSSSKRQSQQLEALQQQVKQLQNQLAECKKQHQEVISVYRMHLLYAVQGQMDEDVQKVLKQILTMCKNQSQKK

SEQ ID NO: 810963 - protein, 980 aa, Homo sapiens; identical to SEQ ID NO: 810962

SEQ ID NO: 810964 - protein, 980 aa, Homo sapiens; identical to SEQ ID NO: 810962

SEQ ID NO: 810965 - protein, 979 aa, Homo sapiens
AFLGVSMVKGKTNEWNKNDDRLLQAVENGDAEKVASLLGKKGASATKHDSEGKTAFHLAAAKGHVECLRVMITHGVDVTAQDTTGHSALHLAAKNSHHECIRKLLQSKCPAESVDSSGKTALHYAAAQGCLQAVQILCEHKSPINLKDLDGNIPLLLAVQNGHSEICHFLLDHGADVNSRNKSGRTALMLACEIGSSNAVEALIKKGADLNLVDSLGYNALHYSKLSENAGIQSLLLSKISQDADLKTPTKPKQHDQVSKISSERSGTPKKRKAPPPPISPTQLSDVSSPRSITSTPLSGKESVFFAEPPFKAEISSIRENKDRLSDSTTGADSLLDISSEADQQDLLSLLQAKVASLTLHNKELQDKLQAKSPKEAEADLSFDSYHSTQTDLGPSLGKPGETSPPDSKSSPSVLIHSLGKSTTDNDVRIQQLQEILQDLQKRLESSEAERKQLQVELQSRRAELVCLNNTEISENSSDLSQKLKETQSKYEEAMKEVLSVQKQMKLGLVSPESMDNYSHFHELRVTEEEINVLKQDLQNALEESERNKEKVRELEEKLVEREKGTVIKPPVEEYEEMKSSYCSVIENMNKEKAFLFEKYQEAQEEIMKLKDTLKSQMTQEASDEAEDMKEAMNRMIDELNKQVSELSQLYKEAQAELEDYRKRKSLEDVTAEYIHKAEHEKLMQLTNVSRAKAEDALSEMKSQYSKVLNELTQLKQLVDAQKENSVSITEHLQVITTLRTAAKEMEEKISNLKEHLASKEVEVAKLEKQLLEEKAAMTDAMVPRSSYEKLQSSLESEVSVLASKLKESVKEKEKVHSEVVQIRSEVSQVKREKENIQTLLKSKEQEVNELLQKFQQAQEELAEMKRYAESSSKLEEDKDKKINEMSKEVTKLKEALNSLSQLSYSTSSSKRQSQQLEALQQQVKQLQNQLAECKKQHQEVISVYRMHLLYAVQGQMDEDVQKVLKQILTMCKNQSQKK

SEQ ID NO: 810966 - protein, 909 aa, Homo sapiens
MITHGVDVTAQDTTGHSALHLAAKNSHHECIRKLLQSKCPAESVDSSGKTALHYAAAQGCLQAVQILCEHKSPINLKDLDGNIPLLLAVQNGHSEICHFLLDHGADVNSRNKSGRTALMLACEIGSSNAVEALIKKGADLNLVDSLGYNALHYSKLSENAGIQSLLLSKISQDADLKTPTKPKQHDQVSKISSERSGTPKKRKAPPPPISPTQLSDVSSPRSITSTPLSGKESVFFAEPPFKAEISSIRENKDRLSDSTTGADSLLDISSEADQQDLLSLLQAKVASLTLHNKELQDKLQAKSPKEAEADLSFDSYHSTQTDLGPSLGKPGETSPPDSKSSPSVLIHSLGKSTTDNDVRIQQLQEILQDLQKRLESSEAERKQLQVELQSRRAELVCLNNTEISENSSDLSQKLKETQSKYEEAMKEVLSVQKQMKLGLVSPESMDNYSHFHELRVTEEEINVLKQDLQNALEESERNKEKVRELEEKLVEREKGTVIKPPVEEYEEMKSSYCSVIENMNKEKAFLFEKYQEAQEEIMKLKDTLKSQMTQEASDEAEDMKEAMNRMIDELNKQVSELSQLYKEAQAELEDYRKRKSLEDVTAEYIHKAEHEKLMQLTNVSRAKAEDALSEMKSQYSKVLNELTQLKQLVDAQKENSVSITEHLQVITTLRTAAKEMEEKISNLKEHLASKEVEVAKLEKQLLEEKAAMTDAMVPRSSYEKLQSSLESEVSVLASKLKESVKEKEKVHSEVVQIRSEVSQVKREKENIQTLLKSKEQEVNELLQKFQQAQEELAEMKRYAESSSKLEEDKDKKINEMSKEVTKLKEALNSLSQLSYSTSSSKRQSQQLEALQQQVKQLQNQLAECKKQHQEVISVYRMHLLYAVQGQMDEDVQKVLKQILTMCKNQSQKK

SEQ ID NO: 810967 - protein, 931 aa, Homo sapiens
MKSLKAKFRKSDTNEWNKNDDRLLQAVENGDAEKVASLLGKKGASATKHDSEGKTAFHLAAAKGHVECLRVMITHGVDVTAQDTTGHSALHLAAKNSHHECIRKLLQSKCPAESVDSSGKTALHYAAAQGCLQAVQILCEHKSPINLKDLDGNIPLLLAVQNGHSEICHFLLDHGADVNSRNKSGRTALMLACEIGSSNAVEALIKKGADLNLVDSLGYNALHYSKLSENAGIQSLLLSKISQDADLKTPTKPKQHDQVSKISSERSGTPKKRKAPPPPISPTQLSDVSSPRSITSTPLSGKESVFFAEPPFKAEISSIRENKDRLSDSTTGADSLLDISSEADQQDLLSLLQAKVASLTLHNKELQDKLQVNPLLTMMSEFSNCKRFCKIYRRDSESSEAERKQLQVELQSRRAELVCLNNTEISENSSDLSQKLKETQSKYEEAMKEVLSVQKQMKLGLVSPESMDNYSHFHELRVTEEEINVLKQDLQNALEESERNKEKVRELEEKLVEREKGTVIKPPVEEYEEMKSSYCSVIENMNKEKAFLFEKYQEAQEEIMKLKDTLKSQMTQEASDEAEDMKEAMNRMIDELNKQVSELSQLYKEAQAELEDYRKRKSLEDVTAEYIHKAEHEKLMQLTNVSRAKAEDALSEMKSQYSKVLNELTQLKQLVDAQKENSVSITEHLQVITTLRTAAKEMEEKISNLKEHLASKEVEVAKLEKQLLEEKAAMTDAMVPRSSYEKLQSSLESEVSVLASKLKESVKEKEKVHSEVVQIRSEVSQVKREKENIQTLLKSKEQEVNELLQKFQQAQEELAEMKRYAESSSKLEEDKDKKINEMSKEVTKLKEALNSLSQLSYSTSSSKRQSQQLEALQQQVKQLQNQLAECKKQHQEVISVYRMHLLYAVQGQMDEDVQKVLKQILTMCKNQSQKK

SEQ ID NO: 810968 - protein, 1008 aa, Homo sapiens
RRQFQPPIKDYVIQSFHLAAAKGHVECLRVMITHGVDVTAQDTTNIITRSSDCIYQCTGVAYNNASLSDGLQFQPPIKDYVIQSFHLAAAKGHVECLRVMITHGVDVTAQDTTGHSALHLAAKNSHHECIRKLLQSKCPAESVDSSGKTALHYAAAQGCLQAVQILCEHKSPINLKDLDGNIPLLLAVQNGHSEICHFLLDHGADVNSRNKSGRTALMLACEIGSSNAVEALIKKGADLNLVDSLGYNALHYSKLSENAGIQSLLLSKISQDADLKTPTKPKQHDQVSKISSERSGTPKKRKAPPPPISPTQLSDVSSPRSITSTPLSGKESVFFAEPPFKAEISSIRENKDRLSDSTTGADSLLDISSEADQQDLLSLLQAKVASLTLHNKELQDKLQAKSPKEAEADLSFDSYHSTQTDLGPSLGKPGETSPPDSKSSPSVLIHSLGKSTTDNDVRIQQLQEILQDLQKRLESSEAERKQLQVELQSRRAELVCLNNTEISENSSDLSQKLKETQSKYEEAMKEVLSVQKQMKLGLVSPESMDNYSHFHELRVTEEEINVLKQDLQNALEESERNKEKVRELEEKLVEREKGTVIKPPVEEYEEMKSSYCSVIENMNKEKAFLFEKYQEAQEEIMKLKDTLKSQMTQEASDEAEDMKEAMNRMIDELNKQVSELSQLYKEAQAELEDYRKRKSLEDVTAEYIHKAEHEKLMQLTNVSRAKAEDALSEMKSQYSKVLNELTQLKQLVDAQKENSVSITEHLQVITTLRTAAKEMEEKISNLKEHLASKEVEVAKLEKQLLEEKAAMTDAMVPRSSYEKLQSSLESEVSVLASKLKESVKEKEKVHSEVVQIRSEVSQVKREKENIQTLLKSKEQEVNELLQKFQQAQEELAEMKRYAESSSKLEEDKDKKINEMSKEVTKLKEALNSLSQLSYSTSSSKRQSQQLEALQQQVKQLQNQLAECKKQHQEVISVYRMHLLYAVQGQMDEDVQKVLKQILTMCKNQSQKK

SEQ ID NO: 810969 - protein, 1035 aa, Homo sapiens
MDLNRIIQALKGTIDPKLRIAAENELNQSYKIINFAPSLLRIIVSDHVEFPVRQAAAIYLKNMVTQYWPDREPPPGEAIFPFNIHENDRQQIRDNIVEGIIRSPDLVRVQLTMCLRAIIKHDFPGHWPGVVDKIDYYLQSQSSASWLGSLLCLYQLVKTYEYKKAEEREPLIIAMQIFLPRIQQQIVQLLPDSSYYSVLLQKQILKIFYALVCIASSAVNNQTMTTWMEIFRTIIDRTVPPETLHIDEDDRPELVWWKCKKWALHIVARLFERYGSPGNVTKEYFEFSEFFLKTYAVGIQQVLLKILDQYRQKEYVAPRVLQQAFNYLNQGVVHSITWKQMKPHIQNISEDVIFSVMCYKDEDEELWQEDPYEYIRMKFDIFEDYASPTTAAQTLLYTAAKKRKEVLPKMMAFCYQILTDPNFDPRKKDGALHVIGSLAEILLKKSLFKDQMELFLQNHVFPLLLSNLGYLRARSCWVLHAFSSLKFHNELNLRNAVELAKKSLIEDKEMPVKVEAALALQSLISNQIQAKEYMKPHVRPIMQELLHIVRETENDDVTNVIQKMICEYSQEVASIAVDMTQHLAEIFGKVLQSDEYEEVEDKTVMAMGILHTIDTILTVVEDHKEITQQLENICLRIIDLVLQKHVIEFYEEILSLAYSLTCHSISPQMWQLLGILYEVFQQDCFEYFTDMMPLLHNYVTIDTDTLLSNAKHLEILFTMCRKVLCGDAGEDAECHAAKLLEVIILQCKGRGIDQCIPLFVQLVLERLTRGVKTSELRTMCLQVAIAALYYNPDLLLHTLERIQLPHNPGPITVQFINQWMNDTDCFLGHHDRKMCIIGLSILLELQNRPPAVDAVVGQIVPSILFLFLGLKQVCATRQLVNREDRSKAEKADMEENEEISSDEEETNVTAQAMQSNNGRGEDEEEEDDDWDEEVLEETALEGFSTPLDLDNSVDEYQFFTQALITVQSRDAAWYQLLMAPLSEDQRTALQEVYTLAEHRRTVAEAKKKIEQQGGFTFENKGVLSAFNFGTVPSNN

SEQ ID NO: 810970 - protein, 1007 aa, Homo sapiens
MDLNRIIQALKGTIDPKLRIAAENELNQSYKIINFAPSLLRIIVSDHVEFPVRQAAAIYLKNMVTQYWPDREPPPGEAIFPFNIHENDRQQIRDNIVEGIIRSPDLVRVQLTMCLRAIIKHDFPGHWPGVVDKIDYYLQSQSSASWLGSLLCLYQLVKTYEYKKAEEREPLIIAMQIFLPRIQQQIVQLLPDSSYYSVLLQKQILKIFYALVCIASSAVNNQTMTTWMEIFRTIIDRTVPPETLHIDEDDRPELVWWKCKKWALHIVARLFERYGSPGNVTKEYFEFSEFFLKTYAVGIQQVLLKILDQYRQKEYVAPRVLQQAFNYLNQGVVHSITWKQMKPHIQNISEDVIFSVMCYKDEDEELWQEDPYEYIRMKFDIFEDYASPTTAAQTLLYTAAKKRKEVLPKMMAFCYQILTDPNFDPRKKDGALHVIGSLAEILLKKSLFKDQMELFLQNHVFPLLLSNLGYLRARSCWVLHAFSSLKFHNELNLRNAVELAKKSLIEDKEMPVKVEAALALQSLISNQIQAKEYMKPHVRPIMQELLHIVRETENDDVTNVIQKMICEYSQEVASIAVDMTQHLAEIFGKVLQSDEYEEVEDKTVMAMGILHTIDTILTVVEDHKEITQQLENICLRIIDLVLQKHVIEFYEEILSLAYSLTCHSISPQMWQLLGILYEVFQQDCFEYFTDMMPLLHNYVTIDTDTLLSNAKHLEILFTMCRKVLCGDAGEDAECHAAKLLEVIILQCKGRGIDQCIPLFVQLVLERLTRGVKTSELRTMCLQVAIAALYYNPDLLLHTLERIQLPHNPGPITVQFINQWMNDTDCFLGHHDRKMCIIGLSILLELQNRPPAVDAVVGQIVPSILFLFLGLKQVCATRQLVNREDRSKAEKADMEENEEISSDEEETNVTAQAMQSNNGRGEDEEEEDDDWDEEVLEETALEGFSTPLDLDNSVDEYQFFTQALITVQSRDAAWYQLLMAPLSEDQRTALQEVYTLAEHRRTVAGQPE

SEQ ID NO: 810971 - protein, 945 aa, Homo sapiens
MVTQYWPDREPPPGEAIFPFNIHENDRQQIRDNIVEGIIRSPDLVRVQLTMCLRAIIKHDFPGHWPGVVDKIDYYLQSQSSASWLGSLLCLYQLVKTYEYKKAEEREPLIIAMQIFLPRIQQQIVQLLPDSSYYSVLLQKQILKIFYALDALPLQLVNNQTMTTWMEIFRTIIDRTVPPETLHIDEDDRPELVWWKCKKWALHIVARLFERYGSPGNVTKEYFEFSEFFLKTYAVGIQQVLLKILDQYRQKEYVAPRVLQQAFNYLNQGVVHSITWKQMKPHIQNISEDVIFSVMCYKDEDEELWQEDPYEYIRMKFDIFEDYASPTTAAQTLLYTAAKKRKEVLPKMMAFCYQILTDPNFDPRKKDGALHVIGSLAEILLKKSLFKDQMELFLQNHVFPLLLSNLGYLRARSCWVLHAFSSLKFHNELNLRNAVELAKKSLIEDKEMPVKVEAALALQSLISNQIQAKEYMKPHVRPIMQELLHIVRETENDDVTNVIQKMICEYSQEVASIAVDMTQHLAEIFGKVLQSDEYEEVEDKTVMAMGILHTIDTILTVVEDHKEITQQLENICLRIIDLVLQKHVIEFYEEILSLAYSLTCHSISPQMWQLLGILYEVFQQDCFEYFTDMMPLLHNYVTIDTDTLLSNAKHLEILFTMCRKVLCGDAGEDAECHAAKLLEVIILQCKGRGIDQCIPLFVQLVLERLTRGVKTSELRTMCLQVAIAALYYNPDLLLHTLERIQLPHNPGPITVQFINQWMNDTDCFLGHHDRKMCIIGLSILLELQNRPPAVDAVVGQIVPSILFLFLGLKQVCATRQLVNREDRSKAEKADMEENEEISSDEEETNVTAQAMQSNNGRGEDEEEEDDDWDEEVLEETALEGFSTPLDLDNSVDEYQFFTQALITVQSRDAAWYQLLMAPLSEDQRTALQEVYTLAEHRRTVAGQPE

SEQ ID NO: 810972 - protein, 953 aa, Homo sapiens
MDLNRIIQALKGTIDPKLRIAAENELNQSYKIINFAPSLLRIIVSDHVEFPVRQAAAIYLKNMVTQYWPDREPPPGEAIFPFNIHENDRQQIRDNIVEGIIRSPDLVRVQLTMCLRAIIKHDFPGHWPGVVDKIDYYLQSQSSASWLGSLLCLYQLVKTYEYKKAEEREPLIIAMQIFLPRIQQQIVQLLPDSSYYSVLLQKQILKIFYALDFLFVFSRYGSPGNVTKEYFEFSEFFLKTYAVGIQQVLLKILDQYRQKEYVAPRVLQQAFNYLNQGVVHSITWKQMKPHIQNISEDVIFSVMCYKDEDEELWQEDPYEYIRMKFDIFEDYASPTTAAQTLLYTAAKKRKEVLPKMMAFCYQILTDPNFDPRKKDGALHVIGSLAEILLKKSLFKDQMELFLQNHVFPLLLSNLGYLRARSCWVLHAFSSLKFHNELNLRNAVELAKKSLIEDKEMPVKVEAALALQSLISNQIQAKEYMKPHVRPIMQELLHIVRETENDDVTNVIQKMICEYSQEVASIAVDMTQHLAEIFGKVLQSDEYEEVEDKTVMAMGILHTIDTILTVVEDHKEITQQLENICLRIIDLVLQKHVIEFYEEILSLAYSLTCHSISPQMWQLLGILYEVFQQDCFEYFTDMMPLLHNYVTIDTDTLLSNAKHLEILFTMCRKVLCGDAGEDAECHAAKLLEVIILQCKGRGIDQCIPLFVQLVLERLTRGVKTSELRTMCLQVAIAALYYNPDLLLHTLERIQLPHNPGPITVQFINQWMNDTDCFLGHHDRKMCIIGLSILLELQNRPPAVDAVVGQIVPSILFLFLGLKQVCATRQLVNREDRSKAEKADMEENEEISSDEEETNVTAQAMQSNNGRGEDEEEEDDDWDEEVLEETALEGFSTPLDLDNSVDEYQFFTQALITVQSRDAAWYQLLMAPLSEDQRTALQEVYTLAEHRRTVAGQPE

SEQ ID NO: 810973 - protein, 990 aa, Homo sapiens
MVILLYLRHIKSYKIINFAPSLLRIIVSDHVEFPVRQAAAIYLKNMVTQYWPDREPPPGEAIFPFNIHENDRQQIRDNIVEGIIRSPDLVRVQLTMCLRAIIKHDFPGHWPGVVDKIDYYLQSQSSASWLGSLLCLYQLVKTYEYKKAEEREPLIIAMQIFLPRIQQQIVQLLPDSSYYSVLLQKQILKIFYALVCIASSAVNNQTMTTWMEIFRTIIDRTVPPETLHIDEDDRPELVWWKCKKWALHIVARLFERYGSPGNVTKEYFEFSEFFLKTYAVGIQQVLLKILDQYRQKEYVAPRVLQQAFNYLNQGVVHSITWKQMKPHIQNISEDVIFSVMCYKDEDEELWQEDPYEYIRMKFDIFEDYASPTTAAQTLLYTAAKKRKEVLPKMMAFCYQILTDPNFDPRKKDGALHVIGSLAEILLKKSLFKDQMELFLQNHVFPLLLSNLGYLRARSCWVLHAFSSLKFHNELNLRNAVELAKKSLIEDKEMPVKVEAALALQSLISNQIQAKEYMKPHVRPIMQELLHIVRETENDDVTNVIQKMICEYSQEVASIAVDMTQHLAEIFGKVLQSDEYEEVEDKTVMAMGILHTIDTILTVVEDHKEITQQLENICLRIIDLVLQKHVIEFYEEILSLAYSLTCHSISPQMWQLLGILYEVFQQDCFEYFTDMMPLLHNYVTIDTDTLLSNAKHLEILFTMCRKVLCGDAGEDAECHAAKLLEVIILQCKGRGIDQCIPLFVQLVLERLTRGVKTSELRTMCLQVAIAALYYNPDLLLHTLERIQLPHNPGPITVQFINQWMNDTDCFLGHHDRKMCIIGLSILLELQNRPPAVDAVVGQIVPSILFLFLGLKQVCATRQLVNREDRSKAEKADMEENEEISSDEEETNVTAQAMQSNNGRGEDEEEEDDDWDEEVLEETALEGFSTPLDLDNSVDEYQFFTQALITVQSRDAAWYQLLMAPLSEDQRTALQEVYTLAEHRRTVAGQPE

SEQ ID NO: 810974 - protein, 667 aa, Homo sapiens
MKPHIQNISEDVIFSVMCYKDEDEELWQEDPYEYIRMKFDIFEDYASPTTAAQTLLYTAAKKRKEVLPKMMAFCYQILTDPNFDPRKKDGALHVIGSLAEILLKKSLFKDQMELFLQNHVFPLLLSNLGYLRARSCWVLHAFSSLKFHNELNLRNAVELAKKSLIEDKEMPVKVEAALALQSLISNQIQAKEYMKPHVRPIMQELLHIVRETENDDVTNVIQKMICEYSQEVASIAVDMTQHLAEIFGKVLQSDEYEEVEDKTVMAMGILHTIDTILTVVEDHKEITQQLENICLRIIDLVLQKHVIEFYEEILSLAYSLTCHSISPQMWQLLGILYEVFQQDCFEYFTDMMPLLHNYVTIDTDTLLSNAKHLEILFTMCRKVLCGDAGEDAECHAAKLLEVIILQCKGRGIDQCIPLFVQLVLERLTRGVKTSELRTMCLQVAIAALYYNPDLLLHTLERIQLPHNPGPITVQFINQWMNDTDCFLGHHDRKMCIIGLSILLELQNRPPAVDAVVGQIVPSILFLFLGLKQVCATRQLVNREDRSKAEKADMEENEEISSDEEETNVTAQAMQSNNGRGEDEEEEDDDWDEEVLEETALEGFSTPLDLDNSVDEYQFFTQALITVQSRDAAWYQLLMAPLSEDQRTALQEVYTLAEHRRTVAGQPE

SEQ ID NO: 810975 - protein, 1007 aa, Homo sapiens; identical to SEQ ID NO: 810970

SEQ ID NO: 810976 - protein, 462 aa, Homo sapiens
MDLNRIIQALKGTIDPKLRIAAENELNQSYKIINFAPSLLRIIVSDHVEFPVRQAAAIYLKNMVTQYWPDREPPPGEAIFPFNIHENDRQQIRDNIVEGIIRSPDLVRVQLTMCLRAIIKHDFPGHWPGVVDKIDYYLQSQSSASWLGSLLCLYQLVKTYEYKKAEEREPLIIAMQIFLPRIQQQIVQLLPDSSYYSVLLQKQILKIFYALVCIASSAVNNQTMTTWMEIFRTIIDRTVPPETLHIDEDDRPELVWWKCKKWALHIVARLFERYGSPGNVTKEYFEFSEFFLKTYAVGIQQVLLKILDQYRQKEYVAPRVLQQAFNYLNQGVVHSITWKQMKPHIQNISEDVIFSVMCYKDEDEELWQEDPYEYIRMKFDIFEDYASPTTAAQTLLYTAAKKRKEVLPKMMAFCYQILTDPNFDPRKKDGALHVIGSLAEILLKKSLFKDQIGAVVTGVPNS

SEQ ID NO: 810977 - protein, 250 aa, Homo sapiens
MDLNRIIQALKGTIDPKLRIAAENELNQSYKIINFAPSLLRIIVSDHVEFPVRQAAAIYLKNMVTQYWPDREPPPGEAIFPFNIHENDRQQIRDNIVEGIIRSPDLVRVQLTMCLRAIIKHDFPGHWPGVVDKIDYYLQSQSSASWLGSLLCLYQLVKTYEYKKAEEREPLIIAMQIFLPRIQQQIVQLLPDSSYYSVLLQKQILKIFYALVQVGFYCRKQTWSPVFLPDTWKVLNKCHLLLKIILYYPI

SEQ ID NO: 810978 - protein, 245 aa, Homo sapiens
TSVSNHVSSPFELSIHKHDITLQLAEAERMADGPLKDRPETVVSRSSIIIKPSDPVERNSHAPPAETIRWKSHSAPSEVGFSDARHVTVRNAWKSRRDLKSLEDPPTRIGKNVESTNSNAYTQRSSTDFSELEQPRSCLFEQGTRRVGPSSGDAPEPSSRRTQSSLTVSEVLTRRNRVGDTITVAAWNHSASMEEEGEDCTLSVYRQLHNSLDPSELPGKQGLPESGRVRAEERLRPTRPCAEEN

SEQ ID NO: 810979 - protein, 245 aa, Homo sapiens; identical to SEQ ID NO: 810978

SEQ ID NO: 810980 - protein, 146 aa, Homo sapiens
SPRASGHCAGALCSLLPDRPCLAHSFLQAPLRVQQSWARCLPGKGNTDSRAALCSFHWKGEAAWTGGSGWGRWGHSGLRPDPQRLSPGRGHLTSTSPVAVPASRSRPSSPGKPLTRSARILTPVRDRQGPLGLGGGVWFLAQESPS

SEQ ID NO: 810981 - protein, 221 aa, Homo sapiens
MALAGTQVGPPPQERAPEPIGRAWGPPGITQPSAPGATVGRRVSVAAGPWLHGPHGSCEWVRLPGSGDRQRTDPRLGSWREGRRGAGQPGSDTVSSSGRRRPAGSTQAGRGWASLEPATALVGTWRRAHVSPHASHRGALARRPARGACAWDGSQNQRAPVRLASTVGLWESLLFIFKHLGFSHTQQNPSSALLRRAEHTGPTGHALAVSAPFLPRETAGP

SEQ ID NO: 810982 - protein, 146 aa, Homo sapiens; identical to SEQ ID NO: 810980

SEQ ID NO: 810983 - protein, 383 aa, Homo sapiens
LPHPQWGLQLGPRGHENDQLGFPGGQASLDWARCFLPAKMSNVSGILETAGVPLVSANWPQPSPPPAVPAGPQMDHMGNSSQGAPWLFLTSALARGVSGIFVWTALVLTCHQIYLHLRSYTVPQEQRYIIRLLLIVPIYAFDSWLSLLLLGDHQYYVYFDSVRDCYEAFVIYSFLSLCFQYLGGEGAIMAEIRGKPIKSSCLYGTCCLRGMTYSIGFLRFCKQATLQFCLVKPVMAVTTIILQAFGKYHDGDFNVRSGYLYVTLIYNASVSLALYALFLFYFTTRELLRPFQPVLKFLTIKAVIFLSFWQGLLLAILERCGVIPEVETSGGNKLGAGTLAAGYQNFIICVEMLFASVALRYAFPCQVYAEKKENSPAVPPALL

SEQ ID NO: 810984 - protein, 406 aa, Homo sapiens
LPHPQWGLQLGPRGHENDQLGFPGGQASLDWARCFLPAKMSNVSGILETAGVPLVSANWPQPSPPPAVPAGPQMDHMGNSSQGAPWLFLTSALARGVSGIFVWTALVLTCHQIYLHLRSYTVPQEQRYIIRLLLIVPIYAFDSWLSLLLLGDHQYYVYFDSVRDCYEAFVIYSFLSLCFQYLGGEGAIMAEIRGKPIKSSCLYGTCCLRGMTYSIGFLRFCKQATLQFCLVKPVMAVTTIILQAFGKYHDGDFNVRSGYLYVTLIYNASVSLALYALFLFYFTTRELLRPFQPVLKFLTIKAVIFLSFWQGLLLAILERCGVIPEVETSGGNKLGAGTLAAGYQNFIICVEMLFASVALRYAFPCQVYAEKKENSPAPPAPMQSISSGIRETVSPQDIVQDAIHNF

SEQ ID NO: 810985 - protein, 312 aa, Homo sapiens
QRLQRGSIRSQGAPWLFLTSALARGVSGIFVWTALVLTCHQIYLHLRSYTVPQEQRYIIRLLLIVPIYAFDSWLSLLLLGDHQYYVYFDSVRDCYEAFVIYSFLSLCFQYLGGEGAIMAEIRGKPIKSSCLYGTCCLRGMTYSIGFLRFCKQATLQFCLVKPVMAVTTIILQAFGKYHDGDFNVRSGYLYVTLIYNASVSLALYALFLFYFTTRELLRPFQPVLKFLTIKAVIFLSFWQGLLLAILERCGVIPEVETSGGNKLGAGTLAAGYQNFIICVEMLFASVALRYAFPCQVYAEKKENSPAVPPALL

SEQ ID NO: 810986 - protein, 329 aa, Homo sapiens
MALAGTQVGPPPQERAPEPIGRAWGPPGITQPSAPGATVGRRVSVAAGPWLHGPHGSCEWVRLPGSGDRQRTDPRLGSWREGRRGAGQPGSDTVSSSGRRRPAGSTQAGRGWASLEPATALVGTWRRAHVSPHASHRGALARRPARGACAWDGSQNQRAPVRLASTVGLWESLLFIFKHLGFSTGSWLLFPQGMSLRSRTRWGSQEAAAQSLHAGKGSHLSGVGSLVVQGSAGQSLGCAITATAFLLGASTSSKTGLVPAPPAASGQGHEGRALSTWAGGTLPGGTEGAPTWAPASCPSLLPPRARWGPGFEEPRTRALPAGSWRRASG

SEQ ID NO: 810987 - protein, 181 aa, Homo sapiens
GRKNSSRPGTKGASGRTHGWPRARGVTAGRPPGPGPVRGHGTALTTAPVCPSVRSGYLYVTLIYNASVSLALYALFLFYFTTRELLRPFQPVLKFLTIKAVIFLSFWQGLLLAILERCGVIPEVETSGGNKLGAGTLAAGYQNFIICVEMLFASVALRYAFPCQVYAEKKENSPAVPPALL

SEQ ID NO: 810988 - protein, 349 aa, Homo sapiens
LPHPQWGLQLGPRGHENDQLGFPGGQASLDWARCFLPAKMSNVSGILETAGVPLVSANWPQPSPPPAVPAGPQMDHMGNSSQGAPWLFLTSALARGVSGIFVWTALVLTCHQIYLHLRSYTVPQEQRYIIRLLLIVPIYALVGTWRRAHVSPHASHRGALARRPARGACAWDGSQNQRAPVRLASTVGLWESLLFIFKHLGFSTGSWLLFPQGMSLRSRTRWGSQEAAAQSLHAGKGSHLSGVGSLVVQGSAGQSLGCAITATAFLLGASTSSKTGLVPAPPAASGQGHEGRALSTWAGGTLPGGTEGAPTWAPASCPSLLPPRARWGPGFEEPRTRALPAGSWRRASG

SEQ ID NO: 810989 - protein, 271 aa, Homo sapiens
LPHPQWGLQLGPRGHENDQLGFPGGQASLDWARCFLPAKMSNVSGILETAGVPLVSANWPQPSPPPAVPAGPQMDHMGNSSQGAPWLFLTSALARGVSGIFVWTALVLTCHQIYLHLRSYTVPQEQRYIIRLLLIVPIYAFDSWLSLLLLGDHQYYVYFDSVRDCYEAFVIYSFLSLCFQYLGGEGAIMAEIRGKPIKSSCLYGTCCLRGMTYSIGFLRFCKQATLQFCLVKPVMAVTTIILQAFGKYHDGDFKTSLPSTSTVGAWTSPLP

SEQ ID NO: 810990 - protein, 168 aa, Homo sapiens
MNEVKESLRSIEQKYKLFQQQQLTFTAALEHCRENAHDKIRPISSIGQVQSYMEHYCNSSTDRRVLLMFLDICSELNKLCQHFEAVHSGTPVTNNLLEKCKTLVSQSNDLSSLRAKYPHDVVNHLSCDEARNHYGGVVSLIPLILDLMKEWIAHSEKLPRKVLQHGTT

SEQ ID NO: 810991 - protein, 222 aa, Homo sapiens
MNEVKESLRSIEQKYKLFQQQQLTFTAALEHCRENAHDKIRPISSIGQVQSYMEHYCNSSTDRRVLLMFLDICSELNKLCQHFEAVHSGTPVTNNLLEKCKTLVSQSNDLSSLRAKYPHDVVNHLSCDEARNHYGGVVSLIPLILDLMKEWIAHSEKLPRKVLQHVSEPQAHQESTRGAARPAQAIGTQPRATKHKCRQLTKASLKPRGCSKPPWRPPGGKL

SEQ ID NO: 810992 - protein, 222 aa, Homo sapiens; identical to SEQ ID NO: 810991

SEQ ID NO: 810993 - protein, 168 aa, Homo sapiens; identical to SEQ ID NO: 810990

SEQ ID NO: 810994 - protein, 378 aa, Homo sapiens
EGLGPPVAGGAAAGAGMPGGGGGPSAALREQERVYEWFGLVLGSAQRLEFMCGLLDLCNPLELRFLGSCLEDLARKDYHYLRDSEAKANGLSDPGPLADFREPAVRSRLIVYLALLGSENREAAGRLHRLLPQVDSVLKSLRAARGEGSRGGAEDERGEDGDGEQDAEKDGSGPEGGIVEPRVGGGLGSRAQEELLLLFTMASLHPAFSFHQRVTLREHLERLRAALRGGPEDAEVEVEPCKFAGPRAQVRRTEPPWTRGAIAAPAASPASLSDAPCPSPSPAQVARNPHPAAPSARGLSFVSLGRSVPLPHPTPHPGRHSHPPSQNALEVPSVPRCCHGRRGAPRPGPLSEEKCRDVFGSEHLSARCGSRGALEEPV

SEQ ID NO: 810995 - protein, 1114 aa, Homo sapiens
EGLGPPVAGGAAAGAGMPGGGGGPSAALREQERVYEWFGLVLGSAQRLEFMCGLLDLCNPLELRFLGSCLEDLARKDYHYLRDSEAKANGLSDPGPLADFREPAVRSRLIVYLALLGSENREAAGRLHRLLPQVDSVLKSLRAARGEGSRGGAEDERGEDGDGEQDAEKDGSGPEGGIVEPRVGGGLGSRAQEELLLLFTMASLHPAFSFHQRVTLREHLERLRAALRGGPEDAEVEVEPCKFAGPRAQNNSAHGDYMQNNESSLIEQAPIPQDGLTVAPHRAQREAVHIEKIMLKGVQRKRADKYWEYTFKVNWSDLSVTTVTKTHQELQEFLLKLPKELSSETFDKTILRALNQGSLKREERRHPDLEPILRQLFSSSSQAFLQSQKVHSFFQSISSDSLHSINNLQSSLKTSKILEHLKEDSSEASSQEEDVLQHAIIHKKHTGKSPIVNNIGTSCSPLDGLTMQYSEQNGIVDWRKQSCTTIQHPEHCVTSADQHSAEKRSLSSINKKKGKPQTEKEKIKKTDNRLNSRINGIRLSTPQHAHGGTVKDVNLDIGSGHDTCGETSSESYSSPSSPRHDGRESFESEEEKDRDTDSNSEDSGNPSTTRFTGYGSVNQTVTVKPPVQIASLGNENGNLLEDPLNSPKYQHISFMPTLHCVMHNGAQKSEVVVPAPKPADGKTIGMLVPSPVAISAIRESANSTPVGILGPTACTGESEKHLELLASPLPIPSTFLPHSSTPALHLTVQRLKLPPPQGSSESCTVNIPQQPPGSLSIASPNTAFIPIHNPGSFPGSPVATTDPITKSASQVVGLNQMVPQIEGNTGTVPQPTNVKVVLPAAGLSAAQPPASYPLPGSPLAAGVLPSQNSSVLSTAATSPQPASAGISQAQATVPPAVPTHTPGPAPSPSPALTHSTAQSDSTSYISAVGNTNANGTVVPPQQMGSGPCGSCGRRCSCGTNGNLQLNSYYYPNPMPGPMYRVPSFFTLPSICNGSYLNQAHQSNGNQLPFFLPQTPYANGLVHDPVMGSQANYGMQQMAGFGRFYPVYPAPNVVANTSGSGPKKNGNVSCYNCGVSGHYAQDCKQSSMEANQQGTYRLRYAPPLPPSNDTLDSAD

SEQ ID NO: 810996 - protein, 713 aa, Homo sapiens [sequence omitted]

SEQ ID NO: 810997 - protein, 799 aa, Homo sapiens
EGLGPPVAGGAAAGAGMPGGGGGPSAALREQERVYEWFGLVLGSAQRLEFMCGLLDLCNPLELRFLGSCLEDLARKDYHYLRDSEAKANGLSDPGPLADFREPAVRSRLIVYLALLGSENREAAGRLHRLLPQVDSVLKSLRAARGEGSRGGAEDERGEDGDGEQDAEKDGSGPEGGIVEPRVGGGLGSRAQEELLLLFTMASLHPAFSFHQRVTLREHLERLRAALRGGPEDAEVEVEPCKFAGPRAQNNSAHGDYMQNNESSLIEQAPIPQDGLTVAPHRAQREAVHIEKIMLKGVQRKRADKYWEYTFKVNWSDLSVTTVTKTHQELQEFLLKLPKELSSETFDKTILRALNQGSLKREERRHPDLEPILRQLFSSSSQAFLQSQKVHSFFQSISSDSLHSINNLQSSLKTSKILEHLKEDSSEASSQEEDVLQHAIIHKKHTGKSPIVNNIGTSCSPLDGLTMQYSEQNGIVDWRKQSCTTIQHPEHCVTSADQHSAEKRSLSSINKKKGKPQTEKEKIKKTDNRLNSRINGIRLSTPQHAHGGTVKDVNLDIGSGHDTCGETSSESYSSPSSPRHDGRESFESEEEKDRDTDSNSEDSGNPSTTRFTGYGSVNQTVTVKPPVQIASLGNENGNLLEDPLNSPKYQHISFMPTLHCVMHNGAQKSEVVVPAPKPADGKTIGMLVPSPVAISAIRESANSTPVGILGPTACTGESEKHLELLASPLPIPSTFLPHSSTPALHLTVQRLKLPPPQGSSESCTVNIPQQPPGSLSIASPNTAFIPIHNPDSICKWTGT

SEQ ID NO: 810998 - protein, 526 aa, Homo sapiens
EGLGPPVAGGAAAGAGMPGGGGGPSAALREQERVYEWFGLVLGSAQRLEFMCGLLDLCNPLELRFLGSCLEDLARKDYHYLRDSEAKANGLSDPGPLADFREPAVRSRLIVYLALLGSENREAAGRLHRLLPQVDSVLKSLRAARGEGSRGGAEDERGEDGDGEQDAEKDGSGPEGGIVEPRVGGGLGSRAQEELLLLFTMASLHPAFSFHQRVTLREHLERLRAALRGGPEDAEVEVEPCKFAGPRAQNNSAHGDYMQNNESSLIEQAPIPQDGLTVAPHRAQREAVHIEKIMLKGVQRKRADKYWEYTFKVNWSDLSVTTVTKTHQELQEFLLKLPKELSSETFDKTILRALNQGSLKREERRHPDLEPILRQLFSSSSQAFLQSQKVHSFFQSISSDSLHSINNLQSSLKTSKILEHLKEDSSEASSQEEDVLQHAIIHKKHTGKSPIVNNIGTSCSPLDGLTMQYSEQNGIVDWRKQSCTTIQHPEHCVTSADQHSAEKRSLSSINKKKGKPQTEKEKIKKN

SEQ ID NO: 810999 - protein, 753 aa, Homo sapiens
EGLGPPVAGGAAAGAGMPGGGGGPSAALREQERVYEWFGLVLGSAQRLEFMCGLLDLCNPLELRFLGSCLEDLARKDYHYLRDSEAKANGLSDPGPLADFREPAVRSRLIVYLALLGSENREAAGRLHRLLPQVDSVLKSLRAARGEGSRGGAEDERGEDGDGEQDAEKDGSGPEGGIVEPRVGGGLGSRAQEELLLLFTMASLHPAFSFHQRVTLREHLERLRAALRGGPEDAEVEVEPCKFAGPRAQNNSAHGDYMQNNESSLIEQAPIPQDGLTVAPHRAQREAVHIEKIMLKGVQRKRADKYWEYTFKVNWSDLSVTTVTKTHQELQEFLLKLPKELSSETFDKTILRALNQGSLKREERRHPDLEPILRQLFSSSSQAFLQSQKVHSFFQSISSDSLHSINNLQSSLKTSKILEHLKEDSSEASSQEEDVLQHAIIHKKHTGKSPIVNNIGTSCSPLDGLTMQYSEQNGIVDWRKQSCTTIQHPEHCVTSADQHSAEKRSLSSINKKKGKPQTEKEKIKKTDNRLNSRINGIRLSTPQHAHGGTVKDVNLDIGSGHDTCGETSSESYSSPSSPRHDGRESFESEEEKDRDTDSNSEDSGNPSTTRFTGYGSVNQTVTVKPPVQIASLGNENGNLLEDPLNSPKYQHISFMPTLHCVMHNGAQKSEVVVPAPKPADGKTIGMLVPSPVAISAIRESANSTPVGILGPTACTGESEKHLELLASPVSSRTTLLSDSGIMAMQSSFCLASD

SEQ ID NO: 811000 - protein, 207 aa, Homo sapiens
MAALVEPLGLERDVSRAVELLERLQRSGELPPQKLQALQRVLQSRFCSAIREVYEQLYDTLDITGSAEIRAHATAKATVAAFTASEGHAHPRVVELPKTDEGLGFNIMGGKEQNSPIYISRVIPGGVADRHGGLKRGDQLLSVNGVSVEGEQHEKAVELLKAAQGSVKLVVRYTPRVLEEMEARFEKMRSARRRQQHQSYSSLESRG

SEQ ID NO: 811001 - protein, 322 aa, Homo sapiens
PTRAAAYIPSPRSPPFPGQASAGGPADPEGVGGAGAGAGRSLVWEAPWARAGTLGARLTTRPVEGSRGRRAAGGSLSCATLDSAGCPTRLRPSSPDCALGLTPPLSLLLCVSGSLTLGVSAPRPRPADVSRAVELLERLQRSGELPPQKLQALQRVLQSRFCSAIREVYEQLYDTLDITGSAEIRAHATAKATVAAFTASEGHAHPRVVELPKTDEGLGFNIMGGKEQNSPIYISRVIPGGVADRHGGLKRGDQLLSVNGVSVEGEQHEKAVELLKAAQGSVKLVVRYTPRVLEEMEARFEKMRSARRRQQHQSYSSLESRG

SEQ ID NO: 811002 - protein, 162 aa, Homo sapiens
MPLLLTQVYEQLYDTLDITGSAEIRAHATAKATVAAFTASEGHAHPRVVELPKTDEGLGFNIMGGKEQNSPIYISRVIPGGVADRHGGLKRGDQLLSVNGVSVEGEQHEKAVELLKAAQGSVKLVVRYTPRVLEEMEARFEKMRSARRRQQHQSYSSLESRG

SEQ ID NO: 811003 - protein, 156 aa, Homo sapiens
MPLLLTQVYEQLYDTLDITGSAEIRAHATAKATVAAFTASEGHAHPRVVELPKTDEGLGFNIMGGKEQNSPIYISRVIPGGVADRHGGLKRGDQLLSVNGVSVEGEQHEKAVELLKAAQGSVKLVVRYTPRVLEEMEARFEKMRSARRRQQHQSYS

SEQ ID NO: 811004 - protein, 179 aa, Homo sapiens
IVHCAMTSVPCLGIVTQAKSLSSVHIPHPSFHAYLEGALIFSRFLFSQATVAAFTASEGHAHPRVVELPKTDEGLGFNIMGGKEQNSPIYISRVIPGGVADRHGGLKRGDQLLSVNGVSVEGEQHEKAVELLKAAQGSVKLVVRYTPRVLEEMEARFEKMRSARRRQQHQSYSSLESRG

SEQ ID NO: 811005 - protein, 131 aa, Homo sapiens
MAALVEPLGLERDVSRAVELLERLQRSGELPPQKLQALQRVLQSRFCSAIREVYEQLYDTLDITGSAEIRAHATAKSVEGEQHEKAVELLKAAQGSVKLVVRYTPRVLEEMEARFEKMRSARRRQQHQSYS

SEQ ID NO: 811006 - protein, 133 aa, Homo sapiens
MAALVEPLGLERDVSRAVELLERLQRSGELPPQKLQALQRVLQSRFCSAIREVYEQLYDTLDITGSAEIRAHATAKKYKKKKKERKSRAWWRVPVIPAGLQLRRLRQENRLNPGGRGCSEPRSCHCTPAWATE

SEQ ID NO: 811007 - protein, 121 aa, Homo sapiens
MAALVEPLGLERDVSRAVELLERLQRSGELPPQKLQALQRVLQSRFCSAIREVYEQLYDTLDITGSAEIRAHATAKVGPAPHCSWCLFNCLVELNISFMPVISVSSLMIFAKSMCHLTISK

SEQ ID NO: 811008 - protein, 136 aa, Homo sapiens
MILNWKLLGILVLCLHTRGISGSEGHPSHPPAEDREEAGSPTLPQGPPVPGDPWPGAPPLFEDPPPTRPSRPWRDLPETGVWPPEPPRTDPPQPPRPDDPWPAGPQPPENPWPPAPEVDNRPQEEPDLDPPREEYR

SEQ ID NO: 811009 - protein, 1024 aa, Homo sapiens
MERRSRRKSRRNGRSTAGKAAATQPAKSPGAQLWLFPSAAGLHRALLRRVEVTRQLCCSPGRLAVLERGGAGVQVHQLLAGSGGARTPKCIKLGKNMKIHSVDQGAEHMLILSSDGKPFEYDNYSMKHLRFESILQEKKIIQITCGDYHSLALSKGGELFAWGQNLHGQLGVGRKFPSTTTPQIVEHLAGVPLAQISAGEAHSMALSMSGNIYSWGKNECGQLGLGHTESKDDPSLIEGLDNQKVEFVACGGSHSALLTQDGLLFTFGAGKHGQLGHNSTQNELRPCLVAELVGYRVTQIACGRWHTLAYVSDLGKVFSFGSGKDGQLGNGGTRDQLMPLPVKVSSSEELKLESHTSEKELIMIAGGNQSILLWIKKENSYVNLKRTIPTLNEGTVKRWIADVETKRWQSTKREIQEIFSSPACLTGSFLRKRRTTEMMPVYLDLNKARNIFKELTQKDWITNMITTCLKDNLLKRLPFHSPPQEALEIFFLLPECPVMHISNNWESLVVPFAKVVCKMSDQSSLVLEEYWATLQESTFSKLVQMFKTAVICQLDYWDESAEENGNVQALLEMLKKLHRVNQVKCQLPESIFQVDELLHRLNFFVEVCRRYLWKMTVDASENVQCCVIFSHFPFIFNNLSKIKLLHTDTLLKIESKKHKAYLRSAAIEEERESEFALRPTFDLTVRRNHLIEDVLNQLSQFENEDLRKELWVSFSGEIGYDLGGVKKEFFYCLFAEMIQPEYGMFMYPEGASCMWFPVKPKFEKKRYFFFGVLCGLSLFNCNVANLPFPLALFKKLLDQMPSLEDLKELSPDLGKNLQTLLDDEGDNFEEVFYIHFNVHWDRNDTNLIPNGSSITVNQTNKRDYVSKYINYIFNDSVKAVYEEFRRGFYKMCDEDIIKLFHPEELKDVIVGNTDYDWKTFEKNARYEPGYNSSHPTIVMFWKAFHKLTLEEKKKFLVFLTGTDRLQMKDLNNMKITFCCPESWNERDPIRALTCFSVLFLPKYSTMETVEEALQEAINNNRGFG

SEQ ID NO: 811010 - protein, 662 aa, Homo sapiens
MIAGGNQSILLWIKKENSYVNLKRTIPTLNEGTVKRWIADVETKRWQSTKREIQEIFSSPACLTGSFLRKRRTTEMMPVYLDLNKARNIFKELTQKDWITNMITTCLKDNLLKRLPFHSPPQEALEIFFLLPECPVMHISNNWESLVVPFAKVVCKMSDQSSLVLEEYWATLQESTFSKLVQMFKTAVICQLDYWDESAEENGNVQALLEMLKKLHRVNQVKCQLPESIFQVDELLHRLNFFVEVCRRYLWKMTVDASENVQCCVIFSHFPFIFNNLSKIKLLHTDTLLKIESKKHKAYLRSAAIEEERESEFALRPTFDLTVRRNHLIEDVLNQLSQFENEDLRKELWVSFSGEIGYDLGGVKKEFFYCLFAEMIQPEYGMFMYPEGASCMWFPVKPKFEKKRYFFFGVLCGLSLFNCNVANLPFPLALFKKLLDQMPSLEDLKELSPDLGKNLQTLLDDEGDNFEEVFYIHFNVHWDRNDTNLIPNGSSITVNQTNKRDYVSKYINYIFNDSVKAVYEEFRRGFYKMCDEDIIKLFHPEELKDVIVGNTDYDWKTFEKNARYEPGYNSSHPTIVMFWKAFHKLTLEEKKKFLVFLTGTDRLQMKDLNNMKITFCCPESWNERDPIRALTCFSVLFLPKYSTMETVEEALQEAINNNRGFG

SEQ ID NO: 811011 - protein, 170 aa, Homo sapiens
SEYPPLRRDYVSKYINYIFNDSVKAVYEEFRRGFYKMCDEDIIKLFHPEELKDVIVGNTDYDWKTFEKNARYEPGYNSSHPTIVMFWKAFHKLTLEEKKKFLVFLTGTDRLQMKDLNNMKITFCCPESWNERDPIRALTCFSVLFLPKYSTMETVEEALQEAINNNRGFG

SEQ ID NO: 811012 - protein, 130 aa, Homo sapiens
MEKYERIRVVGRGAFGIVHLCLRKADQKLVIIKQIPVEQMTKEERQAAQNECQVLKLLNHPNVIEYYENFLEDKALMIAMEYAPGGPASLQWPGWRASYLWDRQTQISWLPSLEWAWQGLEFWSQLSDPG

SEQ ID NO: 811013 - protein, 490 aa, Homo sapiens
RHNGVSEGDEQVVPAPGAQGVGAHVHGIVHLCLRKADQKLVIIKQIPVEQMTKEERQAAQNECQVLKLLNHPNVIEYYENFLEDKALMIAMEYAPGGTLAEFIQKRCNSLLEEETILHFFVQILLALHHVHTHLILHRDLKTQNILLDKHRMVVKIGDFGISKILSSKSKAYTVVGTPCYISPELCEGKPYNQKSDIWALGCVLYELASLKRAFEAANLPALVLKIMSGTFAPISDRYSPELRQLVLSLLSLEPAQRPPLSHIMAQPLCIRALLNLHTDVGSVRMRRAEKSVAPSNTGSRTTSVRCRGIPRGPVRPAIPPPLSSVYAWGGGLGTPLRLPMLNTEVVQVAAGRTQKAGVTRSGASHPVRRTHPYVQDEADSLLRNMEQPKPRFNRRTREDQNGVTIKTVDSGEPQHDGPKENKHTPKTNREADKQGAKARRQPLKTRANTGDAQPRQNRYTPYKQHRRNRERNNQYDDQPDRVKRQQHTRD

SEQ ID NO: 811014 - protein, 303 aa, Homo sapiens
RHNGVSEGDEQVVPAPGAQGVGAHVHGIVHLCLRKADQKLVIIKQIPVEQMTKEERQAAQNECQVLKLLNHPNVIEYYENFLEDKALMIAMEYAPGGTLAEFIQKRCNSLLEEETILHFFVQILLALHHVHTHLILHRDLKTQNILLDKHRMVVKIGDFGISKILSSKSKAYTVPGHGRDLQGTRSLEGQDLTLPPPLPLKNPWPFGPCLGGSAGGSPLACFEKKLSPNGLMHRAPGLPSLQGCDPSSASILQDRSWDQWWVPHAISPLSCVRASPTTRRVTSGPWAVSSTSWPASRGLSRLR

SEQ ID NO: 811015 - protein, 109 aa, Homo sapiens
PKKRPGGASQGGTSEPQGLDAASWAQIHQKLRDFSRSTQAELERERAQLLVRATMAEEQLSELQEYVDQHLGRYKHEILRLRKLAGAGDPWKVGAVPPAKPQHPRTGSH

SEQ ID NO: 811016 - protein, 156 aa, Homo sapiens
AGLIVSEEATMQVLTKRYPKNCLLTVMDRYAAEVHNMEQVVMIPSLLRDVQLSGPGGQAQAEAPDLYTYFTMLKAICVDVDHGLLPREEWQAKVAGSEENGTAETEEVEDESASGELDLEAQFHLHFSSLHHILMHLTEKAQEVTRKYQEMTGQVW

SEQ ID NO: 811017 - protein, 156 aa, Homo sapiens; identical to SEQ ID NO: 811016

SEQ ID NO: 811018 - protein, 156 aa, Homo sapiens; identical to SEQ ID NO: 811016

SEQ ID NO: 811019 - protein, 156 aa, Homo sapiens; identical to SEQ ID NO: 811016

SEQ ID NO: 811020 - protein, 185 aa, Homo sapiens
FREGFSLIGSKDWLKIVRRVDCLLFGTTIKDKSRLFRVQFSGESKEQALEHCCSCVQKLAQYITVQVPDGNIQELQLIPGPPRATESQGKDSAKSVPRQPGSHQHSEQQQVCVTAGTGAPDGRTSLTQLAQTLLASEELPHVYEQSAWGAEELGPFLRLCLMDQNFPAFVEEVEKELKKLAGLRN

SEQ ID NO: 811021 - protein, 400 aa, Homo sapiens
MNFTVGFKPLLGDAHSMDNLEKQLICPICLEMFSKPVVILPCQHNLCRKCANDVFQASNPLWQSRGSTTVSSGGRFRCPSCRHEVVLDRHGVYGLQRNLLVENIIDIYKQESSRPLHSKAEQHLMCEEHEEEKINIYCLSCEVPTCSLCKVFGAHKDCEVAPLPTIYKRQKKQDLTLLPRLECSGTNTTYCSLDLPSSSDPPILASQNTKIIDSELSDGIAMLVAGNDRVQAVITQMEEVCQTIEDNSRRQKQLLNQRFESLCAVLEERKGELLQALAREQEEKLQRVRGLIRQYGDHLEASSKLVESAIQSMEEPQMALYLQQAKELINKVGAMSKVELAGRPEPGYESMEQFTVRVEHVAEMLRTIDFQPGASGEEEEVAPDGEEGSAGPEEERPDGP

SEQ ID NO: 811022 - protein, 210 aa, Homo sapiens
MNFTVGFKPLLGDAHSMDNLEKQLICPICLEMFSKPVVILPCQHNLCRKCANDVFQASNPLWQSRGSTTVSSGGRFRCPSCRHEVVLDRHGVYGLQRNLLVENIIDIYKQESSRPLHSKAEQHLMCEEHEEEKINIYCLSCEVPTCSLCKVFGAHKDCEVAPLPTIYKRQKSELSDGIAMLVAGNDRVQAVITQMEEVCQTIEVSLGWRE

SEQ ID NO: 811023 - protein, 200 aa, Homo sapiens
MSKVELAGRPEPGYESMEQFTVRVEHVAEMLRTIDFQPGEGGGRGPLRRVRTLCVGGAAGTMAVKAGTPPHQAFLGLRRFRGGRGGGPRRRGGQRGAGGRAAGWALRPAPTRPCSRARARVGEDLRRDRSITQIGAGPGRISIKNSSVPDPYLLSLPNPAAWASKATRPPSCPSQNLRPSGGRKPNEPLLGTSVMPGANW

SEQ ID NO: 811024 - protein, 179 aa, Homo sapiens
MLVAGNDRVQAVITQMEEVCQTIEDNSRRQKQLLNQRFESLCAVLEERKGELLQALAREQEEKLQRVRGLIRQYGDHLEASSKLVESAIQSMEEPQMALYLQQAKELINKVGAMSKVELAGRPEPGYESMEQFTVRVEHVAEMLRTIDFQPGASGEEEEVAPDGEEGSAGPEEERPDGP

SEQ ID NO: 811025 - protein, 358 aa, Homo sapiens
MNFTVGFKPLLGDAHSMDNLEKQLICPICLEMFSKPVVILPCQHNLCRKCANDVFQASNPLWQSRGSTTVSSGGRFRCPSCRHEVVLDRHGVYGLQRNLLVENIIDIYKQESSRPLHSKAEQHLMCEEHEEEKINIYCLSCEVPTCSLCKVFGAHKDCEVAPLPTIYKRQKSELSDGIAMLVAGNDRVQAVITQMEEVCQTIEDNSRRQKQLLNQRFESLCAVLEERKGELLQALAREQEEKLQRVRGLIRQYGDHLEASSKLVESAIQSMEEPQMALYLQQAKELINKVGAMSKVELAGRPEPGYESMEQFTVRVEHVAEMLRTIDFQPGASGEEEEVAPDGEEGSAGPEEERPDGP

SEQ ID NO: 811026 - protein, 206 aa, Homo sapiens
KDLGWVLAQPLTHSVTTDGSLSVLVLCEYPVLSQPPGLSHAFPHPCSPSFEDNSRRQKQLLNQRFESLCAVLEERKGELLQALAREQEEKLQRVRGLIRQYGDHLEASSKLVESAIQSMEEPQMALYLQQAKELINKVGAMSKVELAGRPEPGYESMEQFTVRVEHVAEMLRTIDFQPGASGEEEEVAPDGEEGSAGPEEERPDGP

SEQ ID NO: 811027 - protein, 105 aa, Homo sapiens
AARGCTQHGQPGEAAHLPHLPGDVLQTSGDPALPTQPVPQMCQRRLPGGCQGRAGPGKAMQTCGGLIRSELRPQKVMDRVLSEVGGGCCGWRAEGLGSKQIPEQA

SEQ ID NO: 811028 - protein, 140 aa, Homo sapiens
IAFFPAWGFSRFPPALGKGALSGLDGFTFVVCFLPSVPTQRCASPWLHLDFTVNVSFTAHTLPPILSSPESRRHPVFPPPYNSALHRTGPARMKLSKERDSSCCINIRNGFQACLNEFHTQCINIIVHSSFQRPLNKFPK

SEQ ID NO: 811029 - protein, 435 aa, Homo sapiens
  misc_feature (9)..(11): Xaa can be any naturally occurring amino acid
GPARPGPPXXXPPRALSTHAAGLALRSRGPGPAAAFSRRSYSLGICSPSGRGGNVGDAEEQSPRSASRGSGRLPSSRRKRTAQEGAGSAGRGAGPGSELGPASASASSCELPSARHPGSSGGSRTKPPRHHHPENPSPSPMAGYLPPKGYAPSPPPPYPVTPGYPEPALHPGPGQAPVPAQVPAPAPGFALFPSPGPVALGSAAPFLPLPGVPSGLEFLVQIDQILIHQKAERVETFLGWETCNRYELRSGAGQPLGQAAEESNCCARLCCGARRPLRVRLADPGDREVLRLLRPLHCGCSCCPCGLQEMEVQAPPGTTIGHVLQTWHPFLPKFSIQDADRQTVLRVVGPCWTCGCGTDTNFEVKTRDESRSVGRISKQWGGLVREALTDADDFGLQFPLDLDVRVKAVLLGATFLIDYMFFEKRGGAGPSAITS

SEQ ID NO: 811030 - protein, 211 aa, Homo sapiens
  misc_feature (9)..(11): Xaa can be any naturally occurring amino acid
GPARPGPPXXXPPRALSTHAAGLALRSRGPGPAAAFSRRSYSLGICSPSGRGGNVGDAEEQSPRSASRGSGRLPSSRRKRTAQEGAGSAGRGAGPGSELGPASASASSCELPSARHPGSSGGSRTKPPRHHHPENPSPSPMAGKCAQVWGSPLSPPRTWEPGLNTSSRNVLGLAGWGPSPSFRGTSTLLPCPIFLCLLPPRFPREASRPMG

SEQ ID NO: 811031 - protein, 299 aa, Homo sapiens
  misc_feature (9)..(11): Xaa can be any naturally occurring amino acid
GPARPGPPXXXPPRALSTHAAGLALRSRGPGPAAAFSRRSYSLGICSPSGRGGNVGDAEEQSPRSASRGSGRLPSSRRKRTAQEGAGSAGRGAGPGSELGPASASASSCELPSARHPGSSGGSRTKPPRHHHPENPSPSPMAATCPPQGYALPTATCHPGPGGLIWAGSAGRQYSRPVRLFLRPGLGLCPFCMRVLWLILCMIDGSEAGVSPGGAVRYDWLWGREPWVRRRETMCAVCVGARGVVSLADRDVRWLSPCLGERALGSRMDQSTANAVLDDLSQSSERATLDGPACVDTMG

SEQ ID NO: 811032 - protein, 295 aa, Homo sapiens
MAGYLPPKGYAPSPPPPYPVTPGYPEPALHPGPGQAPVPAQVPAPAPGFALFPSPGPVALGSAAPFLPLPGVPSGLEFLVQIDQILIHQKAERVETFLGWETCNRYELRSGAGQPLGQAAEESNCCARLCCGARRPLRVRLADPGDREVLRLLRPLHCGCSCCPCGLQEMEVQAPPGTTIGHVLQTWHPFLPKFSIQDADRQTVLRVVGPCWTCGCGTDTNFEVKTRDESRSVGRISKQWGGLVREALTDADDFGLQFPLDLDVRVKAVLLGATFLIDYMFFEKRGGAGPSAITS

SEQ ID NO: 811033 - protein, 473 aa, Homo sapiens
  misc_feature (9)..(11): Xaa can be any naturally occurring amino acid
GPARPGPPXXXPPRALSTHGRRPGVAFAGPGTSRRLLQALLLSGHLQSERKGREASATPREQSPRSASRGSGRLPSSRRKRTAQEGAGSAGRGAGPGSELGPASASASSCELPSARHPGSSGGSSRGAAQETLGRRRAQLPLRLCVCLCVCLAISEFASASRTKPPRHHHPENPSPSPMAGYLPPKGYAPSPPPPYPVTPGYPEPALHPGPGQAPVPAQVPAPAPGFALFPSPGPVALGSAAPFLPLPGVPSGLEFLVQIDQILIHQKAERVETFLGWETCNRYELRSGAGQPLGQAAEESNCCARLCCGARRPLRVRLADPGDREVLRLLRPLHCGCSCCPCGLQEMEVQAPPGTTIGHVLQTWHPFLPKFSIQDADRQTVLRVVGPCWTCGCGTDTNFEVKTRDESRSVGRISKQWGGLVREALTDADDFGLQFPLDLDVRVKAVLLGATFLIDYMFFEKRGGAGPSAITS

SEQ ID NO: 811034 - protein, 295 aa, Homo sapiens; identical to SEQ ID NO: 811032

SEQ ID NO: 811035 - protein, 126 aa, Homo sapiens
MEVQAPPGTTIGHVLQTWHPFLPKFSIQDADRQTVLRVVGPCWTCGCGTDTNFEVKTRDESRSVGRISKQWGGLVREALTDADDFGLQFPLDLDVRVKAVLLGATFLIDYMFFEKRGGAGPSAITS

SEQ ID NO: 811036 - protein, 449 aa, Homo sapiens
  misc_feature (9)..(11): Xaa can be any naturally occurring amino acid
GPARPGPPXXXPPRALSTHGRRPGVAFAGPGTSRRLLQALLLSGHLQSERKGREASATPREQSPRSASRGSGRLPSSRRKRTAQEGAGSAGRGAGPGSELGPASASASSCELPSARHPGSSGGSSRGAAQETLGRRRAQLPLRLCVCLCVCLAISEFASASRTKPPRHHHPENPSPSPMAGYLPPKGYAPSPPPPYPVTPGYPEPALHPGPGQAPVPAQVPAPAPGFALFPSPGPVALGSAAPFLPLPGVPSGLEFLVQIDQILIHQKAERVETFLGWETCNRYELRSGAGQPLGQAAEESNCCARLCCGARRPLRVRLADPGDREVLRLLRPLHCGCSCCPCGLQEFSIQDADRQTVLRVVGPCWTCGCGTDTNFEVKTRDESRSVGRISKQWGGLVREALTDADDFGLQFPLDLDVRVKAVLLGATFLIDYMFFEKRGGAGPSAITS

SEQ ID NO: 811037 - protein, 295 aa, Homo sapiens; identical to SEQ ID NO: 811032

SEQ ID NO: 811038 - protein, 377 aa, Homo sapiens
  misc_feature (8)..(8): Xaa can be any naturally occurring amino acid
  misc_feature (15)..(15): Xaa can be any naturally occurring amino acid
  misc_feature (27)..(27): Xaa can be any naturally occurring amino acid
PLCQGEKXGEVAPGXAEGEPGASPGSXMIRGAAQETLGRRRAQLPLRLCVCLCVCLAISEFASASRTKPPRHHHPENPSPSPMAGYLPPKGYAPSPPPPYPVTPGYPEPALHPGPGQAPVPAQVPAPAPGFALFPSPGPVALGSAAPFLPLPGVPSGLEFLVQIDQILIHQKAERVETFLGWETCNRYELRSGAGQPLGQAAEESNCCARLCCGARRPLRVRLADPGDREVLRLLRPLHCGCSCCPCGLQEMEVQAPPGTTIGHVLQTWHPFLPKFSIQDADRQTVLRVVGPCWTCGCGTDTNFEVKTRDESRSVGRISKQWGGLVREALTDADDFGLQFPLDLDVRVKAVLLGATFLIDYMFFEKRGGAGPSAITS

SEQ ID NO: 811039 - protein, 190 aa, Homo sapiens
MNCALGPGSPWVRRPRRATAAPVCAVAPAGRLRVRLADPGDREVLRLLRPLHCGCSCCPCGLQEMEVQAPPGTTIGHVLQTWHPFLPKFSIQDADRQTVLRVVGPCWTCGCGTDTNFEVKTRDESRSVGRISKQWGGLVREALTDADDFGLQFPLDLDVRVKAVLLGATFLIDYMFFEKRGGAGPSAITS

SEQ ID NO: 811040 - protein, 295 aa, Homo sapiens; identical to SEQ ID NO: 811032

SEQ ID NO: 811041 - protein, 190 aa, Homo sapiens; identical to SEQ ID NO: 811039

SEQ ID NO: 811042 - protein, 295 aa, Homo sapiens; identical to SEQ ID NO: 811032

SEQ ID NO: 811043 - protein, 126 aa, Homo sapiens; identical to SEQ ID NO: 811035

SEQ ID NO: 811044 - protein, 295 aa, Homo sapiens; identical to SEQ ID NO: 811032

SEQ ID NO: 811045 - protein, 361 aa, Homo sapiens
  misc_feature (9)..(11): Xaa can be any naturally occurring amino acid
GPARPGPPXXXPPRALSTHAAGLALRSRGPGPAAAFSRRSYSLGICSPSGRGGNVGDAEEQSPRSASRGSGRLPSSRRKRTAQEGAGSAGRGAGPGSELGPASASASSCELPSARHPGSSGGSSRGAAQETLGRRRAQLPLRLCVCLCVCLAISEFASASRTKPPRHHHPENPSPSPMAGYLPPKGYAPSPPPPYPVTPGYPLRVRLADPGDREVLRLLRPLHCGCSCCPCGLQEMEVQAPPGTTIGHVLQTWHPFLPKFSIQDADRQTVLRVVGPCWTCGCGTDTNFEVKTRDESRSVGRISKQWGGLVREALTDADDFGLQFPLDLDVRVKAVLLGATFLIDYMFFEKRGGAGPSAITS

SEQ ID NO: 811046 - protein, 295 aa, Homo sapiens; identical to SEQ ID NO: 811032

SEQ ID NO: 811047 - protein, 126 aa, Homo sapiens; identical to SEQ ID NO: 811035

SEQ ID NO: 811048 - protein, 164 aa, Homo sapiens
  misc_feature (163)..(163): Xaa can be any naturally occurring amino acid
MEVQAPPGTTIGHVLQTWHPFLPKFSIQDADRQTVLRVVGPCWTCGCGTDTNFEVKTRDESRSVGRISKQWGGLVREALTDADDFGLQFPLDLDVRVKAVLLGATFLIVSWLPLPPPPACPLLSFEALCISWPLARGKSGIGVVGVEVLELACDSASWAGPAXI

SEQ ID NO: 811049 - protein, 136 aa, Homo sapiens
MNCALGPGSPWVRRPRRATAAPVCAVAPAGRLRVRLADPGDREVLRLLRPLHCGCSCCPCGLQEMEVQAPPGTTIGHVLQTWHPFLPKFSIQDADRQTVLRVVGPCWTCGCGTDTNFEVKTRDEIPQVWARISKAV

SEQ ID NO: 811050 - protein, 140 aa, Homo sapiens
MSGRIIQVESPVLILIAIHSQPVLGSCYHQTEHRQICFPQLESQIVSWVSTQAPDMDDLGWNLSPSACWLCDSGPGRAAGEDLEIWYRQPFVCLPHRYKLAPQRPGSRRSNPSPATAGNKNQGRTEEIKQKRKNEFIEAL

SEQ ID NO: 811051 - protein, 469 aa, Homo sapiens
GVKERRGPGCVWWRRPKSLCAELRGLWMRRTRRPRFVLMNKMDDLNLHYRFLNWRRRIREIREVRAFRYQERFKHILVDGDTLSYHGNSGEVGCYVASRPLTKDSNYFEVSIVDSGVRGTIAVGLVPQYYSLDHQPGWLPDSVAYHADDGKLYNGRAKGRQFGSKCNSGDRIGCGIEPVSFDVQTAQIFFTKNGKRVGSTIMPMSPDGLFPAVGMHSLGEEVRLHLNAELGREDDSVMMVDSYEDEWGRLHDVRVCGTLLEYLGKGKSIVDVGLAQARHPLSTRSHYFEVEIVDPGEKCYIALGLARKDYPKNRHPGWSRGSVAYHADDGKIFHGSGVGDPFGPRCYKGDIMGCGIMFPRDYILDSEGDSDDSCDTVILSPTARAVRNVRNVMYLHQEGEEEEEEEEEEEDGEEIEPEHEGRKVVVFFTRNGKIIGKKDAVVPSGGFFPTIGMLSCGEKVKVDLHPLSG

SEQ ID NO: 811052 - protein, 469 aa, Homo sapiens; identical to SEQ ID NO: 811051

SEQ ID NO: 811053 - protein, 102 aa, Homo sapiens
WLLKTEARLMFLQKFSPLVGGGAAERDSSSSGGSNIDYEEWRRLPQDLQHPRGADFNFSDRIKRCQEAQNGSRAVSRQEASKPLSSLQSMQYVHYSVFCYCR

SEQ ID NO: 811054 - protein, 128 aa, Homo sapiens
WLLKTEARLMFLQKFSPLVGGGAAERDSSSSGGSNIDYEEWRRLPQDLQHPRGSRAVSRQEASKPLSSLQSMHLIKSALGDRTGLEALSFKDKIHARPSVGAGDGYDLKVKIVMEKKVVFSCTYLRNC

SEQ ID NO: 811055 - protein, 135 aa, Homo sapiens
GSRRGDRLCAGAHHFQGLGGVVSHSLCPQLTTRSAMTSKGPEEEHPSVTLFRQYLRIRTVQPKPDYGEKTVVPEPVTGPKGRGLCSKPASNPCHPAEPHSAVPNGSPTPPAIPQVNRLRQPLQVREEPFPQRLCC

SEQ ID NO: 811056 - protein, 254 aa, Homo sapiens
MTSKGPEEEHPSVTLFRQYLRIRTVQPKPDYGAAVAFFEETARQLGLGCQKVEVAPGYVVTVLTWPGTNPTLSSILLNSHTDVVPVFKEHWSHDPFEAFKDSEGYIYARGAQDMKCVSIQYLEAVRRLKVEGHRFPRTIHMTFVPDEEVGGHQGMELFVQRPEFHALRAGFALDEGIANPTDAFTVFYSERSPWWVRVTSTGRPGHASRFMEDTAAEKLHKVVNSILAFREKEWPEAAVKPPPERGVRDLREPD

SEQ ID NO: 811057 - protein, 267 aa, Homo sapiens
MTSKGPEEEHPSVTLFRQYLRIRTVQPKPDYGAAVAFFEETARQLGLGCQKVEVAPGYVVTVLTWPGTNPTLSSILLNSHTDVVPVFKEHWSHDPFEAFKDSEGYIYARGAQDMKCVSIQYLEAVRRLKVEGHRFPRTIHMTFVPDEEVGGHQGMELFVQRPEFHALRAGFALDEGIANPTDAFTVFYSERSPWWVRVTTLGGRHAHAHGGHRARSWQGCNSTGSGEEGGGNPLKRPDRNAKRGGATESARPTGAGKDRHTRAPEAP

SEQ ID NO: 811058 - protein, 267 aa, Homo sapiens; identical to SEQ ID NO: 811057

SEQ ID NO: 811059 - protein, 94 aa, Homo sapiens
FAPSILRFLPPHSSGSFSYRNLTLEPEIMPAATDNRYIRAVGVPALGFSPMNRTPVLLHDHDERLHEAVFLRGVDIYTRLLPALASVPALPSDS

SEQ ID NO: 811060 - protein, 266 aa, Homo sapiens
MTSKGPEEEHPSVTLFRQYLRIRTVQPKPDYGAAVAFFEETARQLGLGCQKVEVAPGYVVTVLTWPGTNPTLSSILLNSHTDVVPVFKEHWSHDPFEAFKDSEGYIYARGAQDMKCVSIQYLEAVRRLKVEGHRFPRTIHMTFVPDEEVGGHQGMELFVQRPEFHALRAGFALDEGIANPTDAFTVFYSERSPWWVRVTSTGRPGHASRFMEDTAAEKLHKVVNSILASRDNRMARGCSQHPDLTERDTEPREPELPQRTAGPKRD

SEQ ID NO: 811061 - protein, 97 aa, Homo sapiens
NSRGGAGRGGRCPGTGSGSNPPVISLRPEPEAGGDIRADAAAGAGTALTDGLRSPPRHPASATWWADRGGPEPATSQATSLDPKSRPQSGKGAERRA

SEQ ID NO: 811062 - protein, 254 aa, Homo sapiens; identical to SEQ ID NO: 811056

SEQ ID NO: 811063 - protein, 254 aa, Homo sapiens; identical to SEQ ID NO: 811056

SEQ ID NO: 811064 - protein, 254 aa, Homo sapiens; identical to SEQ ID NO: 811056

SEQ ID NO: 811065 - protein, 254 aa, Homo sapiens; identical to SEQ ID NO: 811056

SEQ ID NO: 811066 - protein, 254 aa, Homo sapiens; identical to SEQ ID NO: 811056

SEQ ID NO: 811067 - protein, 219 aa, Homo sapiens
MTSKGPEEEHPSVTLFRQYLRIRTVQPKPDYGTNPTLSSILLNSHTDVVPVFKEHWSHDPFEAFKDSEGYIYARGAQDMKCVSIQYLEAVRRLKVEGHRFPRTIHMTFVPDEEVGGHQGMELFVQRPEFHALRAGFALDEGIANPTDAFTVFYSERSPWWVRVTSTGRPGHASRFMEDTAAEKLHKVVNSILAFREKEWPEAAVKPPPERGVRDLREPD

SEQ ID NO: 811068 - protein, 167 aa, Homo sapiens
MEHWSHDPFEAFKDSEGYIYARGAQDMKCVSIQYLEAVRRLKVEGHRFPRTIHMTFVPDEEVGGHQGMELFVQRPEFHALRAGFALDEGIANPTDAFTVFYSERSPWWVRVTSTGRPGHASRFMEDTAAEKLHKVVNSILAFREKEWPEAAVKPPPERGVRDLREPD

SEQ ID NO: 811069 - protein, 140 aa, Homo sapiens
MSASFDFRVAPDVDFKAFEEQLQSWCQAAGEGVTLEFAQKWMHPQVTPTDDSNPWWAAFSRVCKDMNLTLEPEIMPAATDNRYIRAVGVPALGFSPMNRTPVLLHDHDERLHEAVFLRGVDIYTRLLPALASVPALPSDS

SEQ ID NO: 811070 - protein, 232 aa, Homo sapiens
  misc_feature (91)..(91): Xaa can be any naturally occurring amino acid
  misc_feature (100)..(100): Xaa can be any naturally occurring amino acid
  misc_feature (105)..(105): Xaa can be any naturally occurring amino acid
  misc_feature (121)..(121): Xaa can be any naturally occurring amino acid
MTSKGPEEEHPSVTLFRQYLRIRTVQPKPDYGAAVAFFEETARQLGLGCQKVEVAPGYVVTVLTWPGTNPTLSSILLNSHTDVVPVFKNLXSRPFEASRXWRLHXARVPDMNSSDPYWKCXELKWKARFPRTIHMTFVPDEEVGGHQGMELFVQRPEFHALRAGFALDEGIANPTDAFTVFYSERSPWWVRVTSTGRPGHACSSVGWTYIHACCLPLPVCLPCPVTAEPWNS

SEQ ID NO: 811071 - protein, 132 aa, Homo sapiens
RCYVLGTAHSMGNRARCPGPCPDPAILPVPQKWMHPQVTPTDDSNPWWAAFSRVCKDMNLTLEPEIMPAATDNRYIRAVGVPALGFSPMNRTPVLLHDHDERLHEAVFLRGVDIYTRLLPALASVPALPSDS

SEQ ID NO: 811072 - protein, 791 aa, Homo sapiens
MGEERWVSLTPEEFDQLQKYSEYSSKKIKDALTEFNEGGSLKQYDPHEPISYDVFKLFMRAYLEVDLPQPLSTHLFLAFSQKPRHETSDHPTEGASNSEANSADTNIQNADNATKADEACAPDTESNMAEKQAPAEDQVAATPLEPPVPRSSSSESPVVYLKDVVCYLSLLETGRPQDKLEFMFRLYDSDENGLLDQAEMDCIVNQMLHIAQYLEWDPTELRPILKEMLQGMDYDRDGFVSLQEWVHGGMTTIPLLVLLGMDDSGSKGDGGHAWTMKHFKKPTYCNFCHIMLMGVRKQGLCCTYCKYTVHERCVSKNIPGCVKTYSKAKRSGEVMQHAWVEGNSSVKCDRCHKSIKCYQSVTARHCVWCRMTFHRKCELSTLCDGGELRDHILLPTSICPITRDRPGEKSDGCVSAKGELVMQYKIIPTPGTHPLLVLVNPKSGGRQGERILRKFHYLLNPKQVFNLDNGGPTPGLNFFRDTPDFRVLACGGDGTVGWILDCIDKANFAKHPPVAVLPLGTGNDLARCLRWGGGYEGGSLTKILKDIEQSPLVMLDRWHLEVIPREEVENGDQVPYSIMNNYFSIGVDASIAHRFHVMREKHPEKFNSRMKNKLWYFEFGTSETFAATCKKLHDHIELECDGVGVDLSNIFLEGIAILNIPSMYGGTNLWGENKKNRAVIRESRKGVTDPKELKFCVQDLSDQLLEVVGLEGAMEMGQIYTGLKSAGRRLAQCASVTIRTNKLLPMQVDGEPWMQPCCTIKITHKNQAPMMMGPPQKSSFFSLRRKSRSKD

SEQ ID NO: 811073 - protein, 218 aa, Homo sapiens
MTTHQGSACLFHFQDASIAHRFHVMREKHPEKFNSRMKNKLWYFEFGTSETFAATCKKLHDHIELECDGVGVDLSNIFLEGIAILNIPSMYGGTNLWGENKKNRAVIRESRKGVTDPKELKFCVQDLSDQLLEVVGLEGAMEMGQIYTGLKSAGRRLAQCASVTIRTNKLLPMQVDGEPWMQPCCTIKITHKNQAPMMMGPPQKSSFFSLRRKSRSKD

SEQ ID NO: 811074 - protein, 765 aa, Homo sapiens
MGEERWVSLTPEEFDQLQKYSEYSSKKIKDALTEFNEGGSLKQYDPHEPISYDVFKLFMRAYLEVDLPQPLSTHLFLAFSQKPRHETSDHPTEGASNSEANSADTNIQNADNATKADEACAPDTESNMAEKQAPAEDQVAATPLEPPVPRSSSSESPVVYLKDVVCYLSLLETGRPQDKLEFMFRLYDSDENGLLDQAEMDCIVNQMLHIAQYLEWDPTELRPILKEMLQGMDYDRDGFVSLQEWVHGGMTTIPLLVLLGMDDSGSKGDGGHAWTMKHFKKPTYCNFCHIMLMGVRKQGLCCTYCKYTVHERCVSKNIPGCVKTYSKAKRSGEVMQHAWVEGNSSVKCDRCHKSIKCYQSVTARHCVWCRMTFHRKCELSTLCDGGELRDHILLPTSICPITRDRPGEKSDGCVSAKGELVMQYKIIPTPGTHPLLVLVNPKSGGRQGERILRKFHYLLNPKQVFNLDNGGPTPGLNFFRDTPDFRVLACGGDGTVGWILDCIDKANFAKHPPVAVLPLGTGNDLARCLRWGGGYEGGSLTKILKDIEQSPLVMLDRWHLEVIPREEVENGDQVPYSIMNNYFSIGVDASIAHRFHVMREKHPEKFNSRMKNKLWYFEFGTSETFAATCKKLHDHIELECDGVGVDLSNIFLEGIAILNIPSMYGGTNLWGENKKNRAVIRESRKGVTDPKELKFCVQDLSDQLLEVVGLEGAMEMGQIYTGLKSAGRRLAQCASVTIRTNKLLPMQVDGEPWMQPCCTVSLANL

SEQ ID NO: 811075 - protein, 791 aa, Homo sapiens; identical to SEQ ID NO: 811072

SEQ ID NO: 811076 - protein, 759 aa, Homo sapiens
MGEERWVSLTPEEFDQLQKYSEYSSKKIKDALTEFNEGGSLKQYDPHEPISYDVFKLFMRAYLEVDLPQPLSTHLFLAFSQKPRHETSDHPTEGASNSEANSADTNIQNADNATKADEACAPDTESNMAEKQAPAEDQVAATPLEPPVPRSSSSESPVVYLKDVVCYLSLLETGRPQDKLEFMFRLYDSDENGLLDQAEMDCIVNQMLHIAQYLEWDPTELRPILKEMLQGMDYDRDGFVSLQEWVHGGMTTIPLLVLLGMDDSGSKGDGGHAWTMKHFKKPTYCNFCHIMLMGVRKQGLCCTYCKYTVHERCVSKNIPGCVKTYSKAKRSGEVMQHAWVEGNSSVKCDRCHKSIKCYQSVTARHCVWCRMTFHRKCELSTLCDGGELRDHILLPTSICPITRDRPGEKSDGCVSAKGELVMQYKIIPTPGTHPLLVLVNPKSGGRQGERILRKFHYLLNPKQVFNLDNGGPTPGLNFFRDTPDFRVLACGGDGTVGWILDCIDKANFAKHPPVAVLPLGTGNDLARCLRWGGGYEGGSLTKILKDIEQSPLVMLDRWHLEVIPREEVENGDQVPYSIMNNYFSIGVDASIAHRFHVMREKHPEKFNSRMKNKLWYFEFGTSETFAATCKKLHDHIELECDGVGVDLSNIFLEGIAILNIPSMYGGTNLWGENKKNRAVIRESRKGVTDPKELKFCVQGKPGMRIIVLGQCPVVGALRWMSAGLVRPHSPARTPCSVDMLTRHPMLQSLQLNPEDKNSQ

SEQ ID NO: 811077 - protein, 862 aa, Homo sapiens
MAQPGPASQPDVSLQQRVAELEKINAEFLRAQQQLEQEFNQKRAKFKELYLAKEEDLKRQNAVLQAAQDDLGHLRTQLWEAQAEMENIKAIATVSENTKQEAIDEVKRQWREEVASLQAVMKETVRDYEHQFHLRLEQERTQWAQYRESAEREIADLRRRLSEGQEEENLENEMKKAQEDAEKLRSVVMPMEKEIAALKDKLTEAEDKIKELEASKVKELNHYLEAEKSCRTDLEMYVAVLNTQKSVLQEDAEKLRKELHEVCHLLEQERQQHNQLKHTWQKANDQFLESQRLLMRDMQRMEIVLTSEQLRQVEELKKKDQEDDEQQRLNKRKDHKKADVEEEIKIPVVCALTQEESSAQLSNEEEHLDSTRGSVHSLDAGLLLPSGDPFSKSDNDMFKDGLRRAQSTDSLGTSGSLQSKALGYNYKAKSAGNLDESDFGPLVGADSVSENFDTASLGSLQMPSGFMLTKDQERAIKAMTPEQEETASLLSSVTQGMESAYVSPSGYRLVSETEWNLLQKEVHNAGNKLGRRCDMCSNYEKQLQGIQIQEAETRDQVKKLQLMLRQANDQLEKTMKDKQELEDFIKQSSEDSSHQISALVLRAQASEILLEELQQGLSQAKRDVQEQMAVLMQSREQVSEELVRLQKDNDSLQGKHSLHVSLQQAEDFILPDTTEALRELVLKYREDIINVRTAADHVEEKLKAEILFLKEQIQAEQCLKENLEETLQLEIENCKEEIASISSLKAELERIKVEKGQLESTLREKSQQLESLQEIKISLEEQLKKETAAKATVEQLMFEEKNKAQRLQTELDVSEQVQRDFVKLSQTLQVQLERIRQADSLERIRAILNDTKLTDINQLPET

SEQ ID NO: 811078 - protein, 829 aa, Homo sapiens
MAQPGPASQPDVSLQQRVAELEKINAEFLRAQQQLEQEFNQKRAKFKELYLAKEEDLKRQNAVLQAAQDDLGHLRTQLWEAQAEMENIKAIATVSENTKQEAIDEVKRQWREEVASLQAVMKETVRDYEHQFHLRLEQERTQWAQYRESAEREIADLRRRLSEGQEEENLENEMKKAQEDAEKLRSVVMPMEKEIAALKDKLTEAEDKIKELEASKVKELNHYLEAEKSCRTDLEMYVAVLNTQKSVLQEDAEKLRKELHEVCHLLEQERQQHNQLKHTWQKANDQFLESQRLLMRDMQRMEIVLTSEQLRQVEELKKKDQEDDEQQRLNKRKDHKKADVEEEIKIPVVCALTQEESSAQLSNEEEHLDSTRGSVHSLDAGLLLPSGDPFSKSDNDMFKDGLRRAQSTDSLGTSGSLQSKALGYNYKAKSAGNLDESDFGPLVGADSVSENFDTASLGSLQMPSGFMLTKDQERAIKAMTPEQEETASLLSSVTQGMESAYVSPSGYRLVSETEWNLLQKEVHNAGNKLGRRCDMCSNYEKQLQGIQIQEAETRDQVKKLQLMLRQANDQLEKTMKDKQELEDFIKQSSEDSSHQISALVLRAQASEILLEELQQGLSQAKRDVQEQMAVLMQSREQVSEELVRLQKDNDSLQGKHSLHVSLQQAEDFILPDTTEALRELVLKYREDIINVRTAADHVEEKLKAEILFLKEQIQAEQCLKENLEETLQLEIENCKEEIASISSLKAELERIKVEKGQATVEQLMFEEKNKAQRLQTELDVSEQVQRDFVKLSQTLQVQLERIRQADSLERIRAILNDTKLTDINQLPET

SEQ ID NO: 811079 - protein, 225 aa, Homo sapiens
MAQPGPASQPDVSLQQRVAELEKINAEFLRAQQQLEQEFNQKRAKFKELYLAKEEDLKRQNAVLQAAQDDLGHLRTQLWEAQAEMENIKAIATVSENTKQEAIDEVKRQWREEVASLQAVMKETVRDYEHQFHLRLEQERTQWAQYRESAEREIADLRRRLSEGQEEENLENEMKKAQEDAEKLRSVVMPMEKEIAALKDKLTEAEDKIKELEASKVMKHCNPFA

SEQ ID NO: 811080 - protein, 625 aa, Homo sapiens
MLASLQGKHSLHVSLQQAEDFILPDTTEALRELVLKYREDIINVRTAADHVEEKLKAEILFLKEQIQAEQCLKENLEETLQLEIENCKEEIASISSLKAELERIKVEKGQLESTLREKSQQLESLQEIKISLEEQLKKETAAKATVEQLMFEEKNKAQRLQTELDVSEQVQRDFVKLSQTLQVQLEADRQVDLGEKPGNLRVANGGINRVWKRRPLGGYRRRGEFPPCSKEKFFSQIKDPQAGTGHKRRAETHGGAHNNAHARRSYVIRAIYVISLKTTDVTTLTTHTTRAEQRETEERARDRKYKRTGPSGKADERRHTAGEAGTTETAGANRMREEERPHETGNRTQTRSAETHNASRQTSTAKGRQAQNERETIERKQQEEEEKGTQERHNRAREQRGSRRRQREAKGAPRANDSRTRHENRTKQKGRRERTAEKQRKHGARREAGGRRAKRGATPAEHGTPATTTHRANKRGQPGTRTDGPGAETRTGRGTKRHEGRREGEEPHTSDARNEEQNKAHTNEERERTERQTQSSRAQPKTAGTADEERGAGESVRTRERSEQQRSSNAARDEQPHSTPTATHWSKRHNEQIRGQKAQGRLAARIPSQQRAQSASYEPETTARA

SEQ ID NO: 811081 - protein, 147 aa, Homo sapiens
MAQPGPASQPDEDLKRQNAVLQAAQDDLGHLRTQLWEAQAEMENIKAIATVSENTKQEAIDEVKRQWREEVASLQAVMKETVRDYEHQFHLRLEQERTQWAQYRESAEREIADLRRRLSEGQEEENLENEMKKDPIQDTILHLVVSP

SEQ ID NO: 811082 - protein, 802 aa, Homo sapiens
MAQPGPASQPDVSLQQRVAELEKINAEFLRAQQQLEQEFNQKRAKFKELYLAKEEDLKRQNAVLQAAQDDLGHLRTQLWEAQAEMENIKAIATVSENTKQEAIDEVKRQWREEVASLQAVMKETVRDYEHQFHLRLEQERTQWAQYRESAEREIADLRRRLSEGQEEENLENEMKKAQEDAEKLRSVVMPMEKEIAALKDKLTEAEDKIKELEASKVKELNHYLEAEKSCRTDLEMYVAVLNTQKSVYRKMLRNCGKNCMKEDDEQQRLNKRKDHKKADVEEEIKIPVVCALTQEESSAQLSNEEEHLDSTRGSVHSLDAGLLLPSGDPFSKSDNDMFKDGLRRAQSTDSLGTSGSLQSKALGYNYKAKSAGNLDESDFGPLVGADSVSENFDTASLGSLQMPSGFMLTKDQERAIKAMTPEQEETASLLSSVTQGMESAYVSPSGYRLVSETEWNLLQKEVHNAGNKLGRRCDMCSNYEKQLQGIQIQEAETRDQVKKLQLMLRQANDQLEKTMKDKQELEDFIKQSSEDSSHQISALVLRAQASEILLEELQQGLSQAKRDVQEQMAVLMQSREQVSEELVRLQKDNDSLQGKHSLHVSLQQAEDFILPDTTEALRELVLKYREDIINVRTAADHVEEKLKAEILFLKEQIQAEQCLKENLEETLQLEIENCKEEIASISSLKAELERIKVEKGQLESTLREKSQQLESLQEIKISLEEQLKKETAAKATVEQLMFEEKNKAQRLQTELDVSEQVQRDFVKLSQTLQVQLERIRQADSLERIRAILNDTKLTDINQLPET

SEQ ID NO: 811083 - protein, 575 aa, Homo sapiens
RLGGGPGFKSAEGMEIVLTSEQLRQVEELKKKDQEDDEQQRLNKRKDHKKADVEEEIKIPVVCALTQEESSAQLSNEEEHLDSTRGSVHSLDAGLLLPSGDPFSKSDNDMFKDGLRRAQSTDSLGTSGSLQSKALGYNYKAKSAGNLDESDFGPLVGADSVSENFDTASLGSLQMPSGFMLTKDQERAIKAMTPEQEETASLLSSVTQGMESAYVSPSGYRLVSETEWNLLQKEVHNAGNKLGRRCDMCSNYEKQLQGIQIQEAETRDQVKKLQLMLRQANDQLEKTMKDKQELEDFIKQSSEDSSHQISALVLRAQASEILLEELQQGLSQAKRDVQEQMAVLMQSREQVSEELVRLQKDNDSLQGKHSLHVSLQQAEDFILPDTTEALRELVLKYREDIINVRTAADHVEEKLKAEILFLKEQIQAEQCLKENLEETLQLEIENCKEEIASISSLKAELERIKVEKGQLESTLREKSQQLESLQEIKISLEEQLKKETAAKATVEQLMFEEKNKAQRLQTELDVSEQVQRDFVKLSQTLQVQLERIRQADSLERIRAILNDTKLTDINQLPET

SEQ ID NO: 811084 - protein, 593 aa, Homo sapiens
AQSPFAACLSSVNAEIPETGHWPSATYVLTGMEIVLTSEQLRQVEELKKKDQEDDEQQRLNKRKDHKKADVEEEIKIPVVCALTQEESSAQLSNEEEHLDSTRGSVHSLDAGLLLPSGDPFSKSDNDMFKDGLRRAQSTDSLGTSGSLQSKALGYNYKAKSAGNLDESDFGPLVGADSVSENFDTASLGSLQMPSGFMLTKDQERAIKAMTPEQEETASLLSSVTQGMESAYVSPSGYRLVSETEWNLLQKEVHNAGNKLGRRCDMCSNYEKQLQGIQIQEAETRDQVKKLQLMLRQANDQLEKTMKDKQELEDFIKQSSEDSSHQISALVLRAQASEILLEELQQGLSQAKRDVQEQMAVLMQSREQVSEELVRLQKDNDSLQGKHSLHVSLQQAEDFILPDTTEALRELVLKYREDIINVRTAADHVEEKLKAEILFLKEQIQAEQCLKENLEETLQLEIENCKEEIASISSLKAELERIKVEKGQLESTLREKSQQLESLQEIKISLEEQLKKETAAKATVEQLMFEEKNKAQRLQTELDVSEQVQRDFVKLSQTLQVQLERIRQADSLERIRAILNDTKLTDINQLPET

SEQ ID NO: 811085 - protein, 564 aa, Homo sapiens
RRLQRTPAYVDCRPVEELKKKDQEDDEQQRLNKRKDHKKADVEEEIKIPVVCALTQEESSAQLSNEEEHLDSTRGSVHSLDAGLLLPSGDPFSKSDNDMFKDGLRRAQSTDSLGTSGSLQSKALGYNYKAKSAGNLDESDFGPLVGADSVSENFDTASLGSLQMPSGFMLTKDQERAIKAMTPEQEETASLLSSVTQGMESAYVSPSGYRLVSETEWNLLQKEVHNAGNKLGRRCDMCSNYEKQLQGIQIQEAETRDQVKKLQLMLRQANDQLEKTMKDKQELEDFIKQSSEDSSHQISALVLRAQASEILLEELQQGLSQAKRDVQEQMAVLMQSREQVSEELVRLQKDNDSLQGKHSLHVSLQQAEDFILPDTTEALRELVLKYREDIINVRTAADHVEEKLKAEILFLKEQIQAEQCLKENLEETLQLEIENCKEEIASISSLKAELERIKVEKGQLESTLREKSQQLESLQEIKISLEEQLKKETAAKATVEQLMFEEKNKAQRLQTELDVSEQVQRDFVKLSQTLQVQLERIRQADSLERIRAILNDTKLTDINQLPET

SEQ ID NO: 811086 - protein, 315 aa, Homo sapiens
RSRPVLIGRVKKLQLMLRQANDQLEKTMKDKQELEDFIKQSSEDSSHQISALVLRAQASEILLEELQQGLSQAKRDVQEQMAVLMQSREQVSEELVRLQKDNDSLQGKHSLHVSLQQAEDFILPDTTEALRELVLKYREDIINVRTAADHVEEKLKAEILFLKEQIQAEQCLKENLEETLQLEIENCKEEIASISSLKAELERIKVEKGQLESTLREKSQQLESLQEIKISLEEQLKKETAAKATVEQLMFEEKNKAQRLQTELDVSEQVQRDFVKLSQTLQVQLERIRQADSLERIRAILNDTKLTDINQLPET

SEQ ID NO: 811087 - protein, 231 aa, Homo sapiens [sequence omitted]

SEQ ID NO: 811088 - protein, 859 aa, Homo sapiens
MAQPGPASQPDVSLQQRVAELEKINAEFLRAQQQLEQEFNQKRAKFKELYLAKEEDLKRQNAVLQAAQDDLGHLRTQLWEAQAEMENIKAIATVSENTKQEAIDEVKRQWREEVASLQAVMKETVRDYEHQFHLRLEQERTQWAQYRESAEREIADLRRRLSEGQEEENLENEMKKAQEDAEKLRSVVMPMEKEIAALKDKLTEAEDKIKELEASKVKELNHYLEAEKSCRTDLEMYVAVLNTQKSVLQEDAEKLRKELHEVCHLLEQERQQHNQLKHTWQKANDQFLESQRLLMRDMQRMEIVLTSEQLRQVEELKKKDQEDDEQQRLNKRKDHKKADVEEEIKIPVVCALTQEESSAQLSNEEEHLDSTRGSVHSLDAGLLLPSGDPFSKSDNDMFKDGLRRAQSTDSLGTSGSLQSKALGYNYKAKSAGNLDESDFGPLVGADSVSENFDTASLGSLQMPSGFMLTKDQERAIKAMTPEQEETASLLSSVTQGMESAYVSPSGYRLVSETEWNLLQKEVHNAGNKLGRRCDMCSNYEKQLQGIQIQEAETRDQVKKLQLMLRQANDQLEKTMKDKQELEDFIKQSSEDSSHQISALVLRAQASEILLEELQQGLSQAKRDVQEQMAVLMQSREQVSEELVRLQKDNDSLQGKHSLHVSLQQAEDFILPDTTEALRELVLKYREDIINVRTAADHVEEKLKAEILFLKEQIQAEQCLKENLEETLQLEIENCKEEIASISSLKAELERIKVEKGQLESTLREKSQQLESLQEIKISLEEQLKKETAAKATVEQLMFEEKNKAQRLQTELDVSEQVQRDFVKLSQTLQVRHLGNHIQSTKAVLGDRTLPIPDLTTGSS

SEQ ID NO: 811089 - protein, 1272 aa, Homo sapiens
MAQPGPASQPDVSLQQRVAELEKINAEFLRAQQQLEQEFNQKRAKFKELYLAKEEDLKRQNAVLQAAQDDLGHLRTQLWEAQAEMENIKAIATVSENTKQEAIDEVKRQWREEVASLQAVMKETVRDYEHQFHLRLEQERTQWAQYRESAEREIADLRRRLSEGQEEENLENEMKKAQEDAEKLRSVVMPMEKEIAALKDKLTEAEDKIKELEASKVKELNHYLEAEKSCRTDLEMYVAVLNTQKSVLQEDAEKLRKELHEVCHLLEQERQQHNQLKHTWQKANDQFLESQRLLMRDMQRMEIVLTSEQLRQVEELKKKDQEDDEQQRLNKRKDHKKADVEEEIKIPVVCALTQEESSAQLSNEEEHLDSTRGSVHSLDAGLLLPSGDPFSKSDNDMFKDGLRRAQSTDSLGTSGSLQSKALGYNYKAKSAGNLDESDFGPLVGADSVSENFDTASLGSLQMPSGFMLTKDQERAIKAMTPEQEETASLLSSVTQGMESAYVSPSGYRLVSETEWNLLQKEVHNAGNKLGRRCDMCSNYEKQLQGIQIQEAETRDQVKKLQLMLRQANDQLEKTMKDKQELEDFIKQSSEDSSHQISALVLRAQASEILLEELQQGLSQAKRDVQEQMAVLMQSREQVSEELVRLQKDNDSLQGKHSLHVSLQQAEDFILPDTTEALRELVLKYREDIINVRTAADHVEEKLKAEILFLKEQIQAEQCLKENLEETLQLEIENCKEEIASISSLKAELERIKVEKGQLESTLREKSQQLESLQEIKISLEEQLKKETAAKATVEQLMFEEKNKAQRLQTELDVSEQVQRDFVKLSQTLQVQLRSGSGKWILGRNLGNLRVANGGINRVWKRRPLGGYRRRGEFPPCSKEKFFSQIKDPQAGTGHKRRAETHGGAHNNAHARRSYVIRAIYVISLKTTDVTTLTTHTTRAEQRETEERARDRKYKRTGPSGKADERRHTAGEAGTTETAGANRMREEERPHETGNRTQTRSAETHNASRQTSTAKGRQAQNERETIERKQQEEGRRAHRNDTTERANSAEADSRQREAKGAPRANDSRTRHENRTKQKGRRERTAEKQRKHGARREAGGRRAKRGATPAEHGTPATTTHRANKRGQPGTRTDGPGAETRTGRGTKRHEGRREGEEPHTSDARNEEQNKAHTNEERERTERQTQSSRAQPKTAGTADEERGAGESVRTRERSEQQRSSNAARDEQPQQHADRNALEQTAQRADPRAKAQGRLAARIPSQQRAQSASYEPETTAR

SEQ ID NO: 811090 - protein, 691 aa, Homo sapiens
  misc_feature (679)..(679): Xaa can be any naturally occurring amino acid
MAQPGPASQPDVSLQQRVAELEKINAEFLRAQQQLEQEFNQKRAKFKELYLAKEEDLKRQNAVLQAAQDDLGHLRTQLWEAQAEMENIKAIATVSENTKQEAIDEVKRQWREEVASLQAVMKETVRDYEHQFHLRLEQERTQWAQYRESAEREIADLRRRLSEGQEEENLENEMKKAQEDAEKLRSVVMPMEKEIAALKDKLTEAEDKIKELEASKVKELNHYLEAEKSCRTDLEMYVAVLNTQKSVLQEDAEKLRKELHEVCHLLEQERQQHNQLKHTWQKANDQFLESQRLLMRDMQRMEIVLTSEQLRQVEELKKKDQEDDEQQRLNKRKDHKKADVEEEIKIPVVCALTQEESSAQLSNEEEHLDSTRGSVHSLDAGLLLPSGDPFSKSDNDMFKDGLRRAQSTDSLGTSGSLQSKALGYNYKAKSAGNLDESDFGPLVGADSVSENFDTASLGSLQMPSGFMLTKDQERAIKAMTPEQEETASLLSSVTQGMESAYVSPSGYRLVSETEWNLLQKEVHNAGNKLGRRCDMCSNYEKQLQGIQIQEAETRDQVKKLQLMLRQANDQLEKTMKDKQELEDFIKQSSEDSSHQISALVLRAQASEILLEELQQGLSQAKRDVQEQMAVLMQSREQVSEELVRLQKDNDSLQGKHSLHVSLQQAEDFILPDTTEALRXLVFTGRAIICAG

SEQ ID NO: 811091 - protein, 225 aa, Homo sapiens; identical to SEQ ID NO: 811079

SEQ ID NO: 811092 - protein, 225 aa, Homo sapiens; identical to SEQ ID NO: 811079

SEQ ID NO: 811093 - protein, 190 aa, Homo sapiens
MAQPGPASQPDVSLQQRVAELEKINAEFLRAQQQLEQEFNQKRAKFKELYLAKEEDLKRQNAVLQAAQDDLGHLRTQLWEAQAEMENIKAIATVSENTKQEAIDEVKRQWREEVASLQAVMKETVRDYEHQFHLRLEQERTQWAQYRESAEREIADLRRRLSEGQEEENLENEMKKDPIQDTILHLVVSP

SEQ ID NO: 811094 - protein, 195 aa, Homo sapiens
VIISKLRLSLVFILIWELNILLFLLFIAKHNVKVILWFRGVSRGPSPVSLGNQDTLPVAVALTESVNAYFKGADPTKCIVKITGDMTMSFPSGIIKVFTSNPTPAVLCFRVKNISRLEQILPNAQLVFRKGTSDLLAWDPLFGPSLDSSSSSSLTSSSSARPTTPLSVGTIVPPPRPASRPKLTSGKLSGINEGY

SEQ ID NO: 811095 - protein, 750 aa, Homo sapiens
MVAPSVLSNIQVVVPVDGGVTNMQSLPPAIWNAEQMKAFWKLSSISEKSENGGSGSLRAKFDLSEGPSKPTTLAVQFLSEGSTLSGVDFELVGTGYRLSLIKKRFATGRYLADVDGPGKVMWLQGLQTCHSALSVLSKHYFNLYDVFQTETYLRADYNTLNRTFKVSIEINSTEMILYVVNDQLQYSGSTFIQILSKNEVFVGLIFEIISSVYVEKKGYSVISGLKFQKKQAQSNLAFHTFLESEITLKFHKFDIQWIQIEHEFKVLGNVNSEHLIKLSYVPEGNQTRVQVDMQKIYNLILINILIKYEVMFYMIFKKNSQDAMCFKISLQMTAETFTSAVSYLYRSCDFFDEFNAVDLIYFYMELHNVCLLKQYTKTRDVPIQFVFINVPHFFSQSESSVQNLTVIKHFYKIFAIFVNIFGLQLGRGFRVIKPNLRILAHFFGDTLYPLEREINPMACVYRKKDYLQILDINLIKKCVNFKTNSKKTIVLNGNWYFDSQFSIFLDTLSLKIYAFIYCLCCEHEFYEYFVRDAFFKRLILETEGEALPFVFISTIGKITNLYILIIQFLLVKIGKLFEVIYLVKHFKNKLPILNSKKPNFSSKSLLIEEIKYFWIRFHNLQMGISFIIINMSVLYLPSRSDEIVLYMIIYIKPLIVPLSFTENKTSITRHLCNILLYKIQQKIYSLAIYNTVYAFLYIQCYAQVWNLHLTKAAHKIIAKMLIFTKKGAKLEFLTLICALLNANYSPLLEF

SEQ ID NO: 811096 - protein, 917 aa, Homo sapiens
MGCNWTPQCASGELPFPLEAFLVHIKVWDLEATGHHWAWKGIIVLTTDVISETRPPEKSSTWSPDRCEASHPAEPAIALSALGIWKCSASTTDLRVDYKYNPEAMVAPSVLSNIQVVVPVDGGVTNMQSLPPAIWNAEQMKAFWKLSSISEKSENGGSGSLRAKFDLSEGPSKPTTLAVQFLSEGSTLSGVDFELVGTGYRLSLIKKRFATGRYLADCDGPGKVMWLQGLQTCHSALSVLSKHYFNLYDVFQTYTYLRADYKHYNRTFKVSLEINSTEMILYVVNDQLQYSGSTFIQILSKNEVFVGLIFKLFPVSMLKKRVIVYIRPKVSEEQAQSNLAFHTFLESEITLKFHKFDIQWIQIEHEFKVLGNVNSEHLIKLSYVPEGNQTRVQVDMQKIYNLILINILIKYKMMFYMIFKKNSQVQCAFKISLQMTAETFTSAVSYLYRSCDFFDELNAVDLIYFYMELHNVLPFKTFFSQSESSVQNLTVIKHFYKIFAIFVNIFGLQLGRGFRVIKPNLRILAHFFGDTLYPLEREINPMACVYRKKDYLQILDINLIKKCVNFKTNSKKTIVLNGNWYFDSQFSIFLDTLSLKIYDLFTDCVVNMSFMVFVRDAFFKRLILETEGEALPFVFISTIGKITNLYILIIQFLLVKIGKLFEVIYLVKHFKNKLPILNSKKPNFSSKSLLIEEIKYFWIRFHNLQMGISFIIINMSVLYLPSRSDEIVLYMIIYIKPLIVPLSFTENKTSITRHLCNILLYKIQQKIYSLAIYNTVYAFLYIQCYAQVWNLHLTKAAHKIIAKMLIFTKKGAKLEFLTLILCSFKCQLQSLTGILTVICFAIKLLLGQPIFYYWNSDTVLTVFVFNQILPKNVQISEMVKLLHFLSYHSLHTKYWVQVTILKPYEFILIFFFHLKIH

SEQ ID NO: 811097 - protein, 534 aa, Homo sapiens
YIYFKGIKPRKRKTFALPGIIKKEKDAESVECPDADSLNIPDVDEEGYSIKPETNQNDTKENHFYSSSDSDSEDEEPKKYRIEIKPMHPNNSHHTMASLDELKVSIGNITLSPAISVSTVQMNRNLSNEELTKSKPSAPPNEKGTSDLLAWDPLFGPSLDSSSSSSLTSSSSARPTTPLSVGTIVPPPRPASRPKLTSGKLSGINEIPRPFSPPVTSNTSPPPAAPLARAESSSSISSSASLSAANTPTVGVSRGPSPVSLGNQDTLPVAVALTESVNAYFKGADPTKCIVKITGDMTMSFPSGIIKVFTSNPTPAVLCFRVKNISRLEQILPNAQLVFSDPSQCDSNTKDFWMNMQAVTVYLKKLSEQNPAASYYNVDVLKYQVSSNGIQSTPLNLATYWKCSASTTDLRVDYKYNPEAMVAPSVLSNIQVVVPVDGGVTNMQSLPPAIWNAEQMKAFWKLSSISEKSENGGSGSLRAKFDLSEGPSKPTTLAVQFLSEGSTLSGVDFELVGTGYRLSLIKKRFATGRYLADC

SEQ ID NO: 811098 - protein, 491 aa, Homo sapiens
MKKATVLNQKQIRMISKENHFYSSSDSDSEDEEPKKYRIEIKPMHPNNSHHTMASLDELKVSIGNITLSPAISVSTVQMNRNLSNEELTKSKPSAPPNEKGTSDLLAWDPLFGPSLDSSSSSSLTSSSSARPTTPLSVGTIVPPPRPASRPKLTSGKLSGINEIPRPFSPPVTSNTSPPPAAPLARAESSSSISSSASLSAANTPTVGVSRGPSPVSLGNQDTLPVAVALTESVNAYFKGADPTKCIVKITGDMTMSFPSGIIKVFTSNPTPAVLCFRVKNISRLEQILPNAQLVFSDPSQCDSNTKDFWMNMQAVTVYLKKLSEQNPAASYYNVDVLKYQVSSNGIQSTPLNLATYWKCSASTTDLRVDYKYNPEAMVAPSVLSNIQVVVPVDGGVTNMQSLPPAIWNAEQMKAFWKLSSISEKSENGGSGSLRAKFDLSEGPSKPTTLAVQFLSEGSTLSGVDFELVGTGYRLSLIKKRFATGRYLADC

SEQ ID NO: 811099 - protein, 512 aa, Homo sapiens
YIYFKGIKPRKRKTFALPGIIKKEKDAESVECPDADSLNIPDVDEEGYSIKPETNQNDTKENHFYSSSDSDSEDEEPKKYRIEIKPMHPNNSHHTMASLDELKVSIGNITLSPAISVSTVQMNRNLSNEELTKSKPSAPPNEKGTSDLLAWDPLFGPSLDSSSSSSLTSSSSARPTTPLSVGTIVPPPRPASRPKLTSGKLSGINEIPRPFSPPVTSNTSPPPAAPLARAESSSSISSSASLSAANTPTVGVSRGPSPVSLGNQDTLPVAVALTESVNAYFKGADPTKCIVKITGDMTMSFPSGIIKVFTSNPTPAVLCFRVKNISRLEQILPNAQLVFSDPSQCDSNTKDFWMNMQAVTVYLKKLSEQNPAASYYNVDVLKYQVSSNGIQSTPLNLATYWKCSASTTDLRVDYKYNPEAMVAPSVLSNIQVVVPVDGGVTNMQSLPPAIWNAEQMKAFWKLSSISEKSENGVQFLSEGSTLSGVDFELVGTGYRLSLIKKRFATGRYLADC

SEQ ID NO: 811100 - protein, 451 aa, Homo sapiens
YIYFKGIKPRKRKTFALPGIIKKEKDAESVECPDADSLNIPDVDEEGYSIKPETNQNDTKENHFYSSSDSDSEDEEPKKYRIEIKPMHPNNSHHTMASLDELKVSIGNITLSPAISVSTVQMNRNLSNEELTKSKPSAPPNEKGTSDLLAWDPLFGPSLDSSSSSSLTSSSSARPTTPLSVGTIVPPPRPASRPKLTSGKLSGINEIPRPFSPPVTSNTSPPPAAPLARAESSSSISSSASLSAANTPTVGVSRGPSPVSLGNQDTLPVAVALTESVNAYFKGADPTKCIVKITGDMTMSFPSGIIKVFTSNPTPAVLCFRVKNISRLEQILPNAQLVFSDPSQCDSNTKDFWMNMQAVTVYLKKLSEQNPAASYYNVDVLKYQVSSNGIQSTPLNLATYWKCSASTTDLRVDYKYNPEAMVAPSVLSNIQVVVPVDGGVTNMQSLPPAIW

SEQ ID NO: 811101 - protein, 135 aa, Homo sapiens
MKKATVLNQKQIRMISKENHFYSSSDSDSEDEEPKKYRIEIKPMHPNNSHHTMASLDELKVSIGNITLSPAISVSTVQMNRNLSNEELTKSKPSAPPNEKGTSDLLAWDPLFGPSLDSSSSSSLTSSSSGKYIYV

SEQ ID NO: 811102 - protein, 666 aa, Homo sapiens
MAAGGSTQQRRREMAAASAAAISGAGRCRLSKIGATRRPPPARVRVAVRLRPFVDGTAGASDPPCVRGMDSCSLEIANWRNHQETLKYQFDAFYGERSTQQDIYAGSVQPILRHLLEGQNASVLAYGPTGAGKTHTMLGSPEQPGVIPRALMDLLQLTREEGAEGRPWALSVTMSYLEIYQEKVLDLLDPASGDLVIREDCRGNILIPGLSQKPISSFADFERHFLPASRNRTVGATRLNQRSSRSHAVLLVKVDQRERLAPFRQREGKLYLIDLAGSEDNRRTGNKGLRLKESGAINTSLFVLGKVVDALNQGLPRVPYRDSKLTRLLQDSLGGSAHSILIANIAPERRFYLDTVSALNFAARSKEVINRPFTNESLQPHALGPVKLSQKELLGPPEAKRARGPEEEEIGSPEPMAAPASASQKLSPLQKLSSMDPAMLERLLSLDRLLASQGSQGAPLLSTPKRERMVLMKTVEEKDLEIERLKTKQKELEAKMLAQKAEEKENHCPTMLRPLSHRTVTGAKPLKKAVVMPLQLIQEQAASPNAEIHILKNKGRKRKQLESLDALEPEEKAEDCWELQISPELLAHGRQKILDLLNEGSARDLRSLQRIGPKKAQLIVGWRELHGPFSQVEDLERVEGITGKQMESFLKANILGLAAGQRCGAS

SEQ ID NO: 811103 - protein, 725 aa, Homo sapiens
GEFEWERRAQGGSGMAAGGSTQQRRREMAAASAAAISGAGRCRLSKIGATRRPPPARVRVAVRLRPFVDGTAGASDPPCVRGMDSCSLEIANWRNHQETLKYQFDAFYGERSTQQDIYAGSVQPILRHLLEGQNASVLAYGPTGAGKTHTMLGSPEQPGVIPRALMDLLQLTREEGAEGRPWALSVTMSYLEIYQEKVLDLLDPASGDLVIREDCRGNILIPGLSQKPISSFADFERHFLPASRNRTVGATRLNQRSSRSHAVLLVKVDQRERLAPFRQREGKLYLIDLAGSEDNRRTGNKGLRLKESGAINTSLFVLGKVVDALNQGLPRVPYRDSKLTRLLQVRPTCLREEGAAEGGSQACCGVGNSSVRHEEGWASDPPTAWSHPQDSLGGSAHSILIANIAPERRFYLDTVSALNFAARSKEVINRPFTNESLQPHALGPVKLSQKELLGPPEAKRARGPEEEEIGSPEPMAAPASASQKLSPLQKLSSMDPAMLERLLSLDRLLASQGSQGAPLLSTPKRERMVLMKTVEEKDLEIERLKTKQKELEAKMLAQKAEEKENHCPTMLRPLSHRTVTGAKPLKKAVVMPLQLIQEQAASPNAEIHILKNKGRKRKQLESLDALEPEEKAEDCWELQISPELLAHGRQKILDLLNEGSARDLRSLQRIGPKKAQLIVGWRELHGPFSQVEDLERVEGITGKQMESFLKANILGLAAGQRCGAS

SEQ ID NO: 811104 - protein, 666 aa, Homo sapiens; identical to SEQ ID NO: 811102

SEQ ID NO: 811105 - protein, 683 aa, Homo sapiens
MAAGGSTQQRRREMAAASAAAISGAGRCRLSKIGATRRPPPARVRVAVRLRPFVDGTAGASDPPCVRGMDSCSLEIANWRNHQETLKYQFDAFYGERSTQQDIYAGSVQPILRHLLEGQNASVLAYGPTGAGKTHTMLGSPEQPGVIPRALMDLLQLTREEGAEGRPWALSVTMSYLEIYQEKVLDLLDPASGDLVIREDCRGNILIPGLSQKPISSFADFERHFLPASRNRTVGATRLNQRSSRSHAVLLVKVDQRERLAPFRQREGKLYLIDLAGSEDNRRTGNKGLRLKESGAINTSLFVLGKVVDALNQGLPRVPYRDSKLTRLLQDSLGGSAHSILIANIAPERRFYLDTVSALNFAARSKEVINRPFTNESLQPHALGPVKLSQKELLGPPEAKRARGPEEEEIGSPEPMAAPASASQKLSPLQKLSSMDPAMLERLLSLDRLLASQGSQGAPLLSTPKRERMVLMKTVEEKDLEIEAALELGLDHISLILSNQRLKTKQKELEAKMLAQKAEEKENHCPTMLRPLSHRTVTGAKPLKKAVVMPLQLIQEQAASPNAEIHILKNKGRKRKQLESLDALEPEEKAEDCWELQISPELLAHGRQKILDLLNEGSARDLRSLQRIGPKKAQLIVGWRELHGPFSQVEDLERVEGITGKQMESFLKANILGLAAGQRCGAS

SEQ ID NO: 811106 - protein, 666 aa, Homo sapiens; identical to SEQ ID NO: 811102

SEQ ID NO: 811107 - protein, 572 aa, Homo sapiens
MAAGGSTQQRRREMAAASAAAISGAGRCRLSKIGATRRPPPARVRVAVRLRPFVDGTAGASDPPCVRGMDSCSLEIANWRNHQETLKYQFDAFYGERSTQQDIYAGSVQPILRHLLEGQNASVLAYGPTGAGKTHTMLGSPEQPGVIPRALMDLLQLTREEGAEGRPWALSVTMSYLEIYQEKVLDLLDPASGDLVIREDCRGNILIPGLSQKPISSFADFERHFLPASRNRTVGATRLNQRSSRSHAVLLVKVDQRERLAPFRQREGKLYLIDLAGSEDNRRTGNKGLRLKESGAINTSLFVLGKVVDALNQGLPRVPYRDSKLTRLLQDSLGGSAHSILIANIAPERRFYLDTVSALNFAARSKEVINRPFTNESLQPHALGPVKLSQKELLGPPEAKRARGPEEEEIGSPEPMAAPASASQKLSPLQKLSSMDPAMLERLLSLDRLLASQGSQGAPLLSTPKRERMVLMKTVEEKDLEIERLKTKQKELEAKMLAQKAEEKENHCPTMLRPLSHRTVTGAKPLKKAVVMPLQLIQEQAASPNAEIHILKNKGRKRKQLHEKGANITTGY

SEQ ID NO: 811108 - protein, 572 aa, Homo sapiens; identical to SEQ ID NO: 811107

SEQ ID NO: 811109 - protein, 666 aa, Homo sapiens; identical to SEQ ID NO: 811102

SEQ ID NO: 811110 - protein, 669 aa, Homo sapiens
MAAGGSTQQRRREMAAASAAAISGAGRCRLSKIGATRRPPPARVRVAVRLRPFVDGTAGASDPPCVRGMDSCSLEIANWRNHQETLKYQFDAFYGERSTQQDIYAGSVQPILRHLLEGQNASVLAYGPTGAGKTHTMLGSPEQPGVIPRALMDLLQLTREEGAEGRPWALSVTMSYLEIYQEKVLDLLDPASGDLVIREDCRGNILIPGLSQKPISSFADFERHFLPASRNRTVGATRLNQRSSRSHAVLLVKVDQRERLAPFRQREGKLYLIDLAGSEDNRRTGNKGLRLKESGAINTSLFVLGKVVDALNQGLPRVPYRDSKLTRLLQDSLGGSAHSILIANIAPERRFYLDTVSALNFAARSKEVINRPFTNESLQPHALGPVKLSQKELLGPPEAKRARGPEEEEIGSPEPMAAPASASQKLSPLQKLSSMDPAMLERLLSLDRLLASQGSQGAPLLSTPKRERMVLMKTVEEKDLEIERLKTKQKELEAKMLAQKAEEKENHCPTMLRPLSHRTVTGAKPLKKAVVMPLQLIQEQAASPNAEIHILKNKGRKRKQLESLDALEPEEKAEDCWELQISPELLAHGRQKILDLLNEGSARDLRSLQRIGPKKAQLIVGWRELHGPFSQVEDLERVEGITGKQMESFLKVKSRPCPSSACPAPRAPL

SEQ ID NO: 811111 - protein, 695 aa, Homo sapiens
MAAGGSTQQRRREMAAASAAAISGAGRCRLSKIGATRRPPPARVRVAVRLRPFVDGTAGASDPPCVRGMDSCSLEIANWRNHQETLKYQFDAFYGERSTQQDIYAGSVQPILRHLLEGQNASVLAYGPTGAGKTHTMLGSPEQPGVIPRALMDLLQLTREEGAEGRPWALSVTMSYLEIYQEKVLDLLDPASGDLVIREDCRGNILIPGLSQKPISSFADFERHFLPASRNRTVGATRLNQRSSRSHAVLLVKVDQRERLAPFRQREGKLYLIDLAGSEDNRRTGNKGLRLKESGAINTSLFVLGKVVDALNQGLPRVPYRDSKLTRLLQDSLGGSAHSILIANIAPERRFYLDTVSALNFAARSKEVINRPFTNESLQPHALGPVKLSQKELLGPPEAKRARGPEEEEIGSPEPMAAPASASQKLSPLQKLSSMDPAMLERLLSLDRLLASQGSQGAPLLSTPKRERMVLMKTVEEKDLEIERLKTKQKELEAKMLAQKAEEKENHCPTMLRPLSHRTVTGAKPLKKAVVMPLQLIQEQAASPNAEIHILKNKGRKRKQLESLDALEPEEKAEDCWELQISPELLAHGRQKILDLLNEGSARDLRSLQRIGPKKAQLIVGWRELHGPFSQVAAHWTGGGRGRGRPGTPETLSPIDPVPQVEDLERVEGITGKQMESFLKANILGLAAGQRCGAS

SEQ ID NO: 811112 - protein, 738 aa, Homo sapiens
MAAGGSTQQRRREMAAASAAAISGAGRCRLSKIGATRRPPPARVRVAVRLRPFVDGTAGASDPPCVRGMDSCSLEIANWRNHQETLKYQFDAFYGERSTQQDIYAGSVQPILRHLLEGQNASVLAYGPTGAGKTHTMLGSPEQPGVIPRALMDLLQLTREEGAEGRPWALSVTMSYLEIYQEKVLDLLDPASGDLVIREDCRGNILIPGLSQKPISSFADFERHFLPASRNRTVGATRLNQRSSRSHAVLLVKVDQRERLAPFRQREGKLYLIDLAGSEDNRRTGNKGLRLKESGAINTSLFVLGKVVDALNQGLPRVPYRDSKLTRLLQDSLGGSAHSILIANIAPERRFYLDTVSALNFAARSKEVINRPFTNESLQPHALGPVKLSQKELLGPPEAKRARGPEEEEIGSPEPMAAPASASQKLSPLQKLSSMDPAMLERLLSLDRLLASQGSQGAPLLSTPKRERMVLMKTVEEKDLEIERLKTKQKELEAKMLAQKAEEKENHCPTMLRPLSHRTVTGAKPLKKAVVMPLQLIQEQAASPNAEIHILKNKGRKRKQLESLDALEPEEKAEDCWELQISPELLAHGRQKILDLLNEGSARDLRSLQRIGPKKAQLIVGWRELHGPFSQVAAHWTGGGRGRGRPGTPETLSPIDPVPPGGGPGTRGGHNGETDGVLPEGEVTALPLLCLSCAPRPSLTSLSPSLLCCRQTSWVSPPASAVAPPDRRLLTPPFQIFV

SEQ ID NO: 811113 - protein, 572 aa, Homo sapiens; identical to SEQ ID NO: 811107

SEQ ID NO: 811114 - protein, 572 aa, Homo sapiens; identical to SEQ ID NO: 811107

SEQ ID NO: 811115 - protein, 576 aa, Homo sapiens
MAAGGSTQQRRREMAAASAAAISGAGRCRLSKIGATRRPPPARVRVAVRLRPFVDGTAGASDPPCVRGMDSCSLEIANWRNHQETLKYQFDAFYGERSTQQDIYAGSVQPILRHLLEGQNASVLAYGPTGAGKTHTMLGSPEQPGVIPRALMDLLQLTREEGAEGRPWALSVTMSYLEIYQEKVLDLLDPASGDLVIREDCRGNILIPGLSQKPISSFADFERHFLPASRNRTVGATRLNQRSSRSHAVLLVKVDQRERLAPFRQREGKLYLIDLAGSEDNRRTGNKGLRLKESGAINTSLFVLGKVVDALNQGLPRVPYRDSKLTRLLQDSLGGSAHSILIANIAPERRFYLDTVSALNFAARSKEVINRPFTNESLQPHALGPVKLSQKELLGPPEAKRARGPEEEEIGSPEPMAAPASASQKLSPLQKLSSMDPAMLERLLSLDRLLASQGSQGAPLLSTPKRERMVLMKTVEEKDLEIERLKTKQKELEAKMLAQKAEEKENHCPTMLRPLSHRTVTGAKPLKKAVVMPLQLIQEQAASPNAEIHILKNKGRKRKVKVAGGLGYTWSPEVRG

SEQ ID NO: 811116 - protein, 598 aa, Homo sapiens
MDSCSLEIANWRNHQETLKYQFDAFYGERSTQQDIYAGSVQPILRHLLEGQNASVLAYGPTGAGKTHTMLGSPEQPGVIPRALMDLLQLTREEGAEGRPWALSVTMSYLEIYQEKVLDLLDPASGDLVIREDCRGNILIPGLSQKPISSFADFERHFLPASRNRTVGATRLNQRSSRSHAVLLVKVDQRERLAPFRQREGKLYLIDLAGSEDNRRTGNKGLRLKESGAINTSLFVLGKVVDALNQGLPRVPYRDSKLTRLLQDSLGGSAHSILIANIAPERRFYLDTVSALNFAARSKEVINRPFTNESLQPHALGPVKLSQKELLGPPEAKRARGPEEEEIGSPEPMAAPASASQKLSPLQKLSSMDPAMLERLLSLDRLLASQGSQGAPLLSTPKRERMVLMKTVEEKDLEIERLKTKQKELEAKMLAQKAEEKENHCPTMLRPLSHRTVTGAKPLKKAVVMPLQLIQEQAASPNAEIHILKNKGRKRKQLESLDALEPEEKAEDCWELQISPELLAHGRQKILDLLNEGSARDLRSLQRIGPKKAQLIVGWRELHGPFSQVEDLERVEGITGKQMESFLKANILGLAAGQRCGAS

SEQ ID NO: 811117 - protein, 598 aa, Homo sapiens; identical to SEQ ID NO: 811116

SEQ ID NO: 811118 - protein, 666 aa, Homo sapiens
MAAGGSTQQRRREMAAASAAAISGAGRCRLSKIGATRRPPPARVRVAVRLRPFVDGTAGASDPPCVRGMDSCSLEIANWRNHQETLKYQFDAFYGERSTQQDIYAGSVQPILRHLLEGQNASVLAYGPTGAGKTHTMLGSPEQPGVIPRALMDLLQLTREEGAEGRPWALSVTMSYLEIYQEKVLDLLDPASGDLVIREDCRGNILIPGLSQKPISSFADFERHFLPASRNRTVGATRLNEGGGGGGGGGGGEVDQRERLAPFRQREGKLYLIDLAGSEDNRRTGNKGLRLKESGAINTSLFVLGKVVDALNQGLPRVPYRDSKLTRLLQDSLGGSAHSILIANIAPERRFYLDTVSALNFAARSKEVINRPFTNESLQPHALGPVKLSQKELLGPPEAKRARGPEEEEIGSPEPMAAPASASQKLSPLQKLSSMDPAMLERLLSLDRLLASQGSQGAPLLSTPKRERMVLMKTVEEKDLEIERLKTKQKELEAKMLAQKAEEKENHCPTMLRPLSHRTVTGAKPLKKAVVMPLQLIQEQAASPNAEIHILKNKGRKRKQLESLDALEPEEKAEDCWELQISPELLAHGRQKILDLLNEGSARDLRSLQRIGPKKAQLIVGWRELHGPFSQVEDLERVEGITGKQMESFLKANILGLAAGQRCGAS

SEQ ID NO: 811119 - protein, 639 aa, Homo sapiens
MAAGGSTQQRRREMAAASAAAISGAGRCRLSKIGATRRPPPARVRVAVRLRPFVDGTAGASDPPCVRGMDSCSLEIANWRNHQETLKYQFDAFYGERSTQQDIYAGSVQPILRHLLEGQNASVLAYGPTGAGKTHTMLGSPEQPGVIPRALMDLLQLTREEGAEGRPWALSVTMSYLEIYQEKSQKPISSFADFERHFLPASRNRTVGATRLNQRSSRSHAVLLVKVDQRERLAPFRQREGKLYLIDLAGSEDNRRTGNKGLRLKESGAINTSLFVLGKVVDALNQGLPRVPYRDSKLTRLLQDSLGGSAHSILIANIAPERRFYLDTVSALNFAARSKEVINRPFTNESLQPHALGPVKLSQKELLGPPEAKRARGPEEEEIGSPEPMAAPASASQKLSPLQKLSSMDPAMLERLLSLDRLLASQGSQGAPLLSTPKRERMVLMKTVEEKDLEIERLKTKQKELEAKMLAQKAEEKENHCPTMLRPLSHRTVTGAKPLKKAVVMPLQLIQEQAASPNAEIHILKNKGRKRKQLESLDALEPEEKAEDCWELQISPELLAHGRQKILDLLNEGSARDLRSLQRIGPKKAQLIVGWRELHGPFSQVEDLERVEGITGKQMESFLKANILGLAAGQRCGAS

SEQ ID NO: 811120 - protein, 430 aa, Homo sapiens
MAVSQRSSRSHAVLLVKVDQRERLAPFRQREGKLYLIDLAGSEDNRRTGNKGLRLKESGAINTSLFVLGKVVDALNQGLPRVPYRDSKLTRLLQDSLGGSAHSILIANIAPERRFYLDTVSALNFAARSKEVINRPFTNESLQPHALGPVKLSQKELLGPPEAKRARGPEEEEIGSPEPMAAPASASQKLSPLQKLSSMDPAMLERLLSLDRLLASQGSQGAPLLSTPKRERMVLMKTVEEKDLEIERLKTKQKELEAKMLAQKAEEKENHCPTMLRPLSHRTVTGAKPLKKAVVMPLQLIQEQAASPNAEIHILKNKGRKRKQLESLDALEPEEKAEDCWELQISPELLAHGRQKILDLLNEGSARDLRSLQRIGPKKAQLIVGWRELHGPFSQVEDLERVEGITGKQMESFLKANILGLAAGQRCGAS

SEQ ID NO: 811121 - protein, 435 aa, Homo sapiens
MTAGGALVEPGGSYSHAVLLVKVDQRERLAPFRQREGKLYLIDLAGSEDNRRTGNKGLRLKESGAINTSLFVLGKVVDALNQGLPRVPYRDSKLTRLLQDSLGGSAHSILIANIAPERRFYLDTVSALNFAARSKEVINRPFTNESLQPHALGPVKLSQKELLGPPEAKRARGPEEEEIGSPEPMAAPASASQKLSPLQKLSSMDPAMLERLLSLDRLLASQGSQGAPLLSTPKRERMVLMKTVEEKDLEIERLKTKQKELEAKMLAQKAEEKENHCPTMLRPLSHRTVTGAKPLKKAVVMPLQLIQEQAASPNAEIHILKNKGRKRKQLESLDALEPEEKAEDCWELQISPELLAHGRQKILDLLNEGSARDLRSLQRIGPKKAQLIVGWRELHGPFSQVEDLERVEGITGKQMESFLKANILGLAAGQRCGAS

SEQ ID NO: 811122 - protein, 251 aa, Homo sapiens
MAAPASASQKLSPLQKLSSMDPAMLERLLSLDRLLASQGSQGAPLLSTPKRERMVLMKTVEEKDLEIERLKTKQKELEAKMLAQKAEEKENHCPTMLRPLSHRTVTGAKPLKKAVVMPLQLIQEQAASPNAEIHILKNKGRKRKQLESLDALEPEEKAEDCWELQISPELLAHGRQKILDLLNEGSARDLRSLQRIGPKKAQLIVGWRELHGPFSQVEDLERVEGITGKQMESFLKANILGLAAGQRCGAS

SEQ ID NO: 811123 - protein, 249 aa, Homo sapiens
MDPAMLERLLSLDRLLASQGSQGAPLLSTPKRERMVLMKTVEEKDLEIEAALELGLDHISLILSNQRLKTKQKELEAKMLAQKAEEKENHCPTMLRPLSHRTVTGAKPLKKAVVMPLQLIQEQAASPNAEIHILKNKGRKRKQLESLDALEPEEKAEDCWELQISPELLAHGRQKILDLLNEGSARDLRSLQRIGPKKAQLIVGWRELHGPFSQVEDLERVEGITGKQMESFLKANILGLAAGQRCGAS

SEQ ID NO: 811124 - protein, 70 aa, Homo sapiens
HTMLGSPEQPGVIPRALMDLLQLTREEGAEGRPWALSVTMSYLEIYQEKEAPCWLGEEQQRVKVRPGSRT

SEQ ID NO: 811125 - protein, 166 aa, Homo sapiens
YTKNSLLHQVLHSQSRHVEVRMACIHYLRENREKFEAFIEGSFEEYLKRLENPQEWVGQVEISALSLMYRKDFIIYREPNVSPSQVTENNFPEKVLLCFSNGNHYDIVYPIKYKESSAMCQSLLYELLYEKVFKTDVSKIVMELDTLEVADEDNSEISDSEDDSCK

SEQ ID NO: 811126 - protein, 292 aa, Homo sapiens
MEAAVGVPDGGDQGGAGPREDATPMDAYLRKLGLYRKLVAKDGSCLFRAVAEQVLHSQSRHVEVRMACIHYLRENREKFEAFIEGSFEEYLKRLENPQEWVGQVEISALSLMYRKDFIIYREPNVSPSQVTENNFPEKVLLCFSNGNHYDIVYPIKYKESSAMCQSLLYELLYEKVFKTDVSKIVMELDTLEVADEDNSEISDSEDDSCKSKTAAAAADVNGFKPLSGNEQLKNNGNSTSLPLSRKVLKSLNPAVYRNVEYEIWLKSKQAQQKRDYSIAAGLQYEVGDKCQV

SEQ ID NO: 811127 - protein, 2261 aa, Homo sapiens [sequence omitted]

SEQ ID NO: 811128 - protein, 363 aa, Homo sapiens
MACWPQLRLLLWKNLTFRRRQTCQLLLEVAWPLFIFLILISVRLSYPPYEQHECHFPNKAMPSAGTLPWVQGIICNANNPCFRYPTPGEAPGVVGNFNKSIVARLFSDARRLLLYSQKDTSMKDMRKVLRTLQQIKKSSSNLKLQDFLVDNETFSGFLYHNLSLPKSTVDKMLRADVILHKVFLQGYQLHLTSLCNGSKSEEMIQLGDQEVSELCGLPREKLAAAERVLRSNMDILKPILMDVACDDIAHGQLTVPRSAAVAATGDAKPNMMGRETLLSICASVPKVEFHERHILEHFSFCVCVSVSLFPAKGIVSFSWASFRIWVLWKAVFWQHGESMAVWEGQLGLGLNIAFEYFTSIDVG

SEQ ID NO: 811129 - protein, 123 aa, Homo sapiens
MPSAGTLPWVQGIICNANNPCFRYPTPGEAPGVVGNFNKSIVARLFSDARRLLLYSQKDTSMKDMRKVLRTLQQIKKSSSNLKLQDFLVDNETFSGFLYHNLSLPKSTVDKMLRADVILHKVS

SEQ ID NO: 811130 - protein, 140 aa, Homo sapiens
  misc_feature (5)..(5): Xaa can be any naturally occurring amino acid
  misc_feature (13)..(13): Xaa can be any naturally occurring amino acid
CSRGXNFFKKEIXNQSWMDVACDDIAHGQLTVPRSAAVAATGDAKPNMMGRETLLSICASVPKVEFHERHILEHFSFCVCVSVSLFPAKGIVSFSWASFRIWVLWKAVFWQHGESMAVWEGQLGLGLNIAFEYFTSIDVG

SEQ ID NO: 811131 - protein, 2261 aa, Homo sapiens [sequence omitted]

SEQ ID NO: 811132 - protein, 2261 aa, Homo sapiens [sequence omitted]

SEQ ID NO: 811133 - protein, 1987 aa, Homo sapiens
MRSWSDMRQEVMFLTNVNSSSSSTQIYQAVSRIVCGHPEGGGLKIKSLNWYEDNNYKALFGGNGTEEDAETFYDNSTTPYCNDLMKNLESSPLSRIIWKALKPLLVGKILYTPDTPATRQVMAEVNKTFQELAVFHDLEGMWEELSPKIWTFMENSQEMDLVRMLLDSRDNDHFWEQQLDGLDWTAQDIVAFLAKHPEDVQSSNGSVYTWREAFNETNQAIRTISRFMECVNLNKLEPIATEVWLINKSMELLDERKFWAGIVFTGITPGSIELPHHVKYKIRMDIDNVERTNKIKDGYWDPGPRADPFEDMRYVWGGFAYLQDVVEQAIIRVLTGTEKKTGVYMQQMPYPCYVDDIFLRVMSRSMPLFMTLAWIYSVAVIIKGIVYEKEARLKETMRIMGLDNSILWFSWFISSLIPLLVSAGLLVVILKLGNLLPYSDPSVVFVFLSVFAVVTILQCFLISTLFSRANLAAACGGIIYFTLYLPYVLCVAWQDYVGFTLKIFASLLSPVAFGFGCEYFALFEEQGIGVQWDNLFESPVEEDGFNLTTSVSMMLFDTFLYGVMTWYIEAVFPGQYGIPRPWYFPCTKSYWFGEESDEKSHPGSNQKRISEICMEEEPTHLKLGVSIQNLVKVYRDGMKVAVDGLALNFYEGQITSFLGHNGAGKTTTMSILTGLFPPTSGTAYILGKDIRSEMSTIRQNLGVCPQHNVLFDMLTVEEHIWFYARLKGLSEKHVKAEMEQMALDVGLPSSKLKSKTSQLSGGMQRKLSVALAFVGGSKVVILDEPTAGVDPYSRRGIWELLLKYRQGRTIILSTHHMDEADVLGDRIAIISHGKLCCVGSSLFLKNQLGTGYYLTLVKKDVESSLSSCRNSSSTVSYLKKEDSVSQSSSDAGLGSDHESDTLTIDVSAISNLIRKHVSEARLVEDIGHELTYVLPYEAAKEGAFVELFHEIDDRLSDLGISSYGISETTLEEIFLKVAEESGVDAETSDGTLPARRNRRAFGDKQSCLRPFTEDDAADPNDSDIDPESRETDLLSGMDGKGSYQVKGWKLTQQQFVALLWKRLLIARRSRKGFFAQIVLPAVFVCIALVFSLIVPPFGKYPSLELQPWMYNEQYTFVSNDAPEDTGTLELLNALTKDPGFGTRCMEGNPIPDTPCQAGEEEWTTAPVPQTIMDLFQNGNWTMQNPSPACQCSSDKIKKMLPVCPPGAGGLPPPQRKQNTADILQDLTGRNISDYLVKTYVQIIAKSLKNKIWVNEFRYGGFSLGVSNTQALPPSQEVNDAIKQMKKHLKLAKDSSADRFLNSLGRFMTGLDTRNNVKVWFNNKGWHAISSFLNVINNAILRANLQKGENPSHYGITAFNHPLNLTKQQLSEVALMTTSVDVLVSICVIFAMSFVPASFVVFLIQERVSKAKHLQFISGVKPVIYWLSNFVWDMCNYVVPATLVIIIFICFQQKSYVSSTNLPVLALLLLLYGWSITPLMYPASFVFKIPSTAYVVLTSVNLFIGINGSVATFVLELFTDNKLNNINDILKSVFLIFPHFCLGRGLIDMVKNQAMADALERFGENRFVSPLSWDLVGRNLFAMAVEGVVFFLITVLIQYRFFIRPRPVNAKLSPLNDEDEDVRRERQRILDGGGQNDILEIKELTKIYRRKRKPAVDRICVGIPPGECFGLLGVNGAGKSSTFKMLTGDTTVTRGDAFLNKNSILSNIHEVHQNMGYCPQFDAITELLTGREHVEFFALLRGVPEKEVGKVGEWAIRKLGLVKYGEKYAGNYSGGNKRKLSTAMALIGGPPVVFLDEPTTGMDPKARRFLWNCALSVVKEGRSVVLTSHSMEECEALCTRMAIMVNGRFRCLGSVQHLKNRFGDGYTIVVRIAGSNPDLKPVQDFFGLAFPGSVLKEKHRNMLQYQLPSSLSSLARIFSILSQSKKRLHIEDYSVSQTTLDQVFVNFAKDQSDDDHLKDLSLHKNQTVVDVAVLTSFLQDEKVKESYV

SEQ ID NO: 811134 - protein, 1202 aa, Homo sapiens
MVGKGLIAAFIGRPQFFWQLCFLTSHPQEARLFTRHTHARQGPLKPRLPVHVSQGKLFPLVLTQQSFLEALPGEGAGGSALLLSLTRSHLLLCHQEDSVSQSSSDAGLGSDHESDTLTIDVSAISNLIRKHVSEARLVEDIGHELTYVLPYEAAKEGAFVELFHEIDDRLSDLGISSYGISETTLEEIFLKVAEESGVDAETSDGTLPARRNRRAFGDKQSCLRPFTEDDAADPNDSDIDPESRETDLLSGMDGKGSYQVKGWKLTQQQFVALLWKRLLIARRSRKGFFAQIVLPAVFVCIALVFSLIVPPFGKYPSLELQPWMYNEQYTFVSNDAPEDTGTLELLNALTKDPGFGTRCMEGNPIPDTPCQAGEEEWTTAPVPQTIMDLFQNGNWTMQNPSPACQCSSDKIKKMLPVCPPGAGGLPPPQRKQNTADILQDLTGRNISDYLVKTYVQIIAKSLKNKIWVNEFRYGGFSLGVSNTQALPPSQEVNDAIKQMKKHLKLAKDSSADRFLNSLGRFMTGLDTRNNVKVWFNNKGWHAISSFLNVINNAILRANLQKGENPSHYGITAFNHPLNLTKQQLSEVALMTTSVDVLVSICVIFAMSFVPASFVVFLIQERVSKAKHLQFISGVKPVIYWLSNFVWDMCNYVVPATLVIIIFICFQQKSYVSSTNLPVLALLLLLYGWSITPLMYPASFVFKIPSTAYVVLTSVNLFIGINGSVATFVLELFTDNKLNNINDILKSVFLIFPHFCLGRGLIDMVKNQAMADALERFGENRFVSPLSWDLVGRNLFAMAVEGVVFFLITVLIQYRFFIRPRPVNAKLSPLNDEDEDVRRERQRILDGGGQNDILEIKELTKIYRRKRKPAVDRICVGIPPGECFGLLGVNGAGKSSTFKMLTGDTTVTRGDAFLNKNSILSNIHEVHQNMGYCPQFDAITELLTGREHVEFFALLRGVPEKEVGKVGEWAIRKLGLVKYGEKYAGNYSGGNKRKLSTAMALIGGPPVVFLDEPTTGMDPKARRFLWNCALSVVKEGRSVVLTSHSMEECEALCTRMAIMVNGRFRCLGSVQHLKNRFGDGYTIVVRIAGSNPDLKPVQDFFGLAFPGSVLKEKHRNMLQYQLPSSLSSLARIFSILSQSKKRLHIEDYSVSQTTLDQVFVNFAKDQSDDDHLKDLSLHKNQTVVDVAVLTSFLQDEKVKESYV

SEQ ID NO: 811135 - protein, 2248 aa, Homo sapiens
MACWPQLRLLLWKNLTFRRRQTCQLLLEVAWPLFIFLILISVRLSYPPYEQHECHFPNKAMPSAGTLPWVQGIICNANNPCFRYPTPGEAPGVVGNFNKSIVARLFSDARRLLLYSQKDTSMKDMRKVLRTLQQIKKSSSNLKLQDFLVDNETFSGFLYHNLSLPKSTVDKMLRADVILHKVFLQGYQLHLTSLCNGSKSEEMIQLGDQEVSELCGLPREKLAAAERVLRSNMDILKPILRTLNSTSPFPSKELAEATKTLLHSLGTLAQELFSMRSWSDMRQEVMFLTNVNSSSSSTQIYQAVSRIVCGHPEGGGLKIKSLNWYEDNNYKALFGGNGTEEDAETFYDNSTTPYCNDLMKNLESSPLSRIIWKALKPLLVGKILYTPDTPATRQVMAEVNKTFQELAVFHDLEGMWEELSPKIWTFMENSQEMDLVRMLLDSRDNDHFWEQQLDGLDWTAQDIVAFLAKHPEDVQSSNGSVYTWREAFNETNQAIRTISRFMECVNLNKLEPIATEVWLINKSMELLDERKFWAGIVFTGITPGSIELPHHVKYKIRMDIDNVERTNKIKDGYWDPGPRADPFEDMRYVWGGFAYLQDVVEQAIIRVLTGTEKKTGVYMQQMPYPCYVDDIFLRVMSRSMPLFMTLAWIYSVAVIIKGIVYEKEARLKETMRIMGLDNSILWFSWFISSLIPLLVSAGLLVVILKLGNLLPYSDPSVVFVFLSVFAVVTILQCFLISTLFSRANLAAACGGIIYFTLYLPYVLCVAWQDYVGFTLKIFASLLSPVAFGFGCEYFALFEEQGIGVQWDNLFESPVEEDGFNLTTSVSMMLFDTFLYGVMTWYIEAVFPGQYGIPRPWYFPCTKSYWFGEESDEKSHPGSNQKRISEICMEEEPTHLKLGVSIQNLVKVYRDGMKVAVDGLALNFYEGQITSFLGHNGAGKTTTMSILTGLFPPTSGTAYILGKDIRSEMSTIRQNLGVCPQHNVLFDMLTVEEHIWFYARLKGLSEKHVKAEMEQMALDVGLPSSKLKSKTSQLSGGMQRKLSVALAFVGGSKVVILDEPTAGVDPYSRRGIWELLLKYRQGRTIILSTHHMDEADVLGDRIAIISHGKLCCVGSSLFLKNQLGTGYYLTLVKKDVESSLSSCRNSSSTVSYLKKEDSVSQSSSDAGLGSDHESDTLTIDVSAISNLIRKHVSEARLVEDIGHELTYVLPYEAAKEGAFVELFHEIDDRLSDLGISSYGISETTLEEIFLKVAEESGVDAETSDGTLPARRNRRAFGDKQSCLRPFTEDDAADPNDSDIDPESRETDLLSGMDGKGSYQVKGWKLTQQQFVALLWKRLLIARRSRKGFFAQIVLPAVFVCIALVFSLIVPPFGKYPSLELQPWMYNEQYTFVSNDAPEDTGTLELLNALTKDPGFGTRCMEGNPIPDTPCQAGEEEWTTAPVPQTIMDLFQNGNWTMQNPSPACQCSSDKIKKMLPVCPPGAGGLPPPQRKQNTADILQDLTGRNISDYLVKTYVQIIAKSLKNKIWVNEFRYGGFSLGVSNTQALPPSQEVNDAIKQMKKHLKLAKDSSADRFLNSLGRFMTGLDTRNNVKVWFNNKGWHAISSFLNVINNAILRANLQKGENPSHYGITAFNHPLNLTKQQLSEVALMTTSVDVLVSICVIFAMSFVPASFVVFLIQERVSKAKHLQFISGVKPVIYWLSNFVWDMCNYVVPATLVIIIFICFQQKSYVSSTNLPVLALLLLLYGWSITPLMYPASFVFKIPSTAYVVLTSVNLFIGINGSVATFVLELFTDNKLNNINDILKSVFLIFPHFCLGRGLIDIGENRFVSPLSWDLVGRNLFAMAVEGVVFFLITVLIQYRFFIRPRPVNAKLSPLNDEDEDVRRERQRILDGGGQNDILEIKELTKIYRRKRKPAVDRICVGIPPGECFGLLGVNGAGKSSTFKMLTGDTTVTRGDAFLNKNSILSNIHEVHQNMGYCPQFDAITELLTGREHVEFFALLRGVPEKEVGKVGEWAIRKLGLVKYGEKYAGNYSGGNKRKLSTAMALIGGPPVVFLDEPTTGMDPKARRFLWNCALSVVKEGRSVVLTSHSMEECEALCTRMAIMVNGRFRCLGSVQHLKNRFGDGYTIVVRIAGSNPDLKPVQDFFGLAFPGSVLKEKHRNMLQYQLPSSLSSLARIFSILSQSKKRLHIEDYSVSQTTLDQVFVNFAKDQSDDDHLKDLSLHKNQTVVDVAVLTSFLQDEKVKESYV

SEQ ID NO: 811136 - protein, 600 aa, Homo sapiens
MTTSVDVLVSICVIFAMSFVPASFVVFLIQERVSKAKHLQFISGVKPVIYWLSNFVWDMCNYVVPATLVIIIFICFQQKSYVSSTNLPVLALLLLLYGWSITPLMYPASFVFKIPSTAYVVLTSVNLFIGINGSVATFVLELFTDNKLNNINDILKSVFLIFPHFCLGRGLIDMGRIALCHHYLGTWWDDNLFAMAVEGVVFFLITVLIQYRFFIRPRPVNAKLSPLNDEDEDVRRERQRILDGGGQNDILEIKELTKIYRRKRKPAVDRICVGIPPGECFGLLGVNGAGKSSTFKMLTGDTTVTRGDAFLNKNSILSNIHEVHQNMGYCPQFDAITELLTGREHVEFFALLRGVPEKEVGKVGEWAIRKLGLVKYGEKYAGNYSGGNKRKLSTAMALIGGPPVVFLDEPTTGMDPKARRFLWNCALSVVKEGRSVVLTSHSMEECEALCTRMAIMVNGRFRCLGSVQHLKNRFGDGYTIVVRIAGSNPDLKPVQDFFGLAFPGSVLKEKHRNMLQYQLPSSLSSLARIFSILSQSKKRLHIEDYSVSQTTLDQVFVNFAKDQSDDDHLKDLSLHKNQTVVDVAVLTSFLQDEKVKESYV

SEQ ID NO: 811137 - protein, 858 aa, Homo sapiens
MACWPQLRLLLWKNLTFRRRQTCQLLLEVAWPLFIFLILISVRLSYPPYEQHECHFPNKAMPSAGTLPWVQGIICNANNPCFRYPTPGEAPGVVGNFNKSIVARLFSDARRLLLYSQKDTSMKDMRKVLRTLQQIKKSSSNLKLQDFLVDNETFSGFLYHNLSLPKSTVDKMLRADVILHKVFLQGYQLHLTSLCNGSKSEEMIQLGDQEVSELCGLPREKLAAAERVLRSNMDILKPILRTLNSTSPFPSKELAEATKTLLHSLGTLAQELFSMRSWSDMRQEVMFLTNVNSSSSSTQIYQAVSRIVCGHPEGGGLKIKSLNWYEDNNYKALFGGNGTEEDAETFYDNSTTPYCNDLMKNLESSPLSRIIWKALKPLLVGKILYTPDTPATRQVMAEVNKTFQELAVFHDLEGMWEELSPKIWTFMENSQEMDLVRMLLDSRDNDHFWEQQLDGLDWTAQDIVAFLAKHPEDVQSSNGSVYTWREAFNETNQAIRTISRFMECVNLNKLEPIATEVWLINKSMELLDERKFWAGIVFTGITPGSIELPHHVKYKIRMDIDNVERTNKIKDGYWDPGPRADPFEDMRYVWGGFAYLQDVVEQAIIRVLTGTEKKTGVYMQQMPYPCYVDDIFLRVMSRSMPLFMTLAWIYSVAVIIKGIVYEKEARLKETMRIMGLDNSILWFSWFISSLIPLLVSAGLLVVILKLGNLLPYSDPSVVFVFLSVFAVVTILQCFLISTLFSRANLAAACGGIIYFTLYLPYVLCVAWQDYVGFTLKIFASLLSPVAFGFGCEYFALFEEQGIGVQWDNLFESPVEEDGFNLTTSVSMMLFDTFLYGVMTWYIEAVFPGTLLWASVWKI

SEQ ID NO: 811138 - protein, 641 aa, Homo sapiens
MACWPQLRLLLWKNLTFRRRQTCQLLLEVAWPLFIFLILISVRLSYPPYEQHECHFPNKAMPSAGTLPWVQGIICNANNPCFRYPTPGEAPGVVGNFNKSIVARLFSDARRLLLYSQKDTSMKDMRKVLRTLQQIKKSSSNLKLQDFLVDNETFSGFLYHNLSLPKSTVDKMLRADVILHKVFLQGYQLHLTSLCNGSKSEEMIQLGDQEVSELCGLPREKLAAAERVLRSNMDILKPILRTLNSTSPFPSKELAEATKTLLHSLGTLAQELFSMRSWSDMRQEVMFLTNVNSSSSSTQIYQAVSRIVCGHPEGGGLKIKSLNWYEDNNYKALFGGNGTEEDAETFYDNSTTPYCNDLMKNLESSPLSRIIWKALKPLLVGKILYTPDTPATRQVMAEVNKTFQELAVFHDLEGMWEELSPKIWTFMENSQEMDLVRMLLDSRDNDHFWEQQLDGLDWTAQDIVAFLAKHPEDVQSSNGSVYTWREAFNETNQAIRTISRFMECVNLNKLEPIATEVWLINKSMELLDERKFWAGIVFTGITPGSIELPHHVKYKIRMDIDNVERTNKIKDGYWDPGPRADPFEDMRYVWGGFAYLQDVVEQAIIRVLTGTEKKTGVYMQQMPYPCYVDDILIWGPACWSA

SEQ ID NO: 811139 - protein, 640 aa, Homo sapiens
MACWPQLRLLLWKNLTFRRRQTCQLLLEVAWPLFIFLILISVRLSYPPYEQHECHFPNKAMPSAGTLPWVQGIICNANNPCFRYPTPGEAPGVVGNFNKSIVARLFSDARRLLLYSQKDTSMKDMRKVLRTLQQIKKSSSNLKLQDFLVDNETFSGFLYHNLSLPKSTVDKMLRADVILHKVFLQGYQLHLTSLCNGSKSEEMIQLGDQEVSELCGLPREKLAAAERVLRSNMDILKPILRTLNSTSPFPSKELAEATKTLLHSLGTLAQELFSMRSWSDMRQEVMFLTNVNSSSSSTQIYQAVSRIVCGHPEGGGLKIKSLNWYEDNNYKALFGGNGTEEDAETFYDNSTTPYCNDLMKNLESSPLSRIIWKALKPLLVGKILYTPDTPATRQVMAEVNKTFQELAVFHDLEGMWEELSPKIWTFMENSQEMDLVRMLLDSRDNDHFWEQQLDGLDWTAQDIVAFLAKHPEDVQSSNGSVYTWREAFNETNQAIRTISRFMECVNLNKLEPIATEVWLINKSMELLDERKFWAGIVFTGITPGSIELPHHVKYKIRMDIDNVERTNKIKDGYWDPGPRADPFEDMRYVWGGFAYLQDVVEQAIIRVLTGTEKKTGVYMQQIAGLFKSRHSNQGPHAWCG

SEQ ID NO: 811140 - protein, 94 aa, Homo sapiens
DVSLPSQLGNLLPYSDPSVVFVFLSVFAVVTILQCFLISTLFSRANLAAACGGIIYFTLYLPYVLCVAWQDYVGFTLKIFAVSTSGLSSVAVGI

SEQ ID NO: 811141 - protein, 321 aa, Homo sapiens
LATSATSAPSPLLGPARGLSPAALGQGLTREVLPPAAATRRDLLLPGNRGFRPRGQGPLTPAQSVLGLVVSAEGGSAVAGFSSQLCPRLLAGLRGQRGATIQPLGARPKQLSRTHSACAAMASAGAERRPGVQEATVVGQGQLTEEPGSAQTSECPVAGDQFLVPAHEARGTQSEDQRPAGAASESELQEEGPKLGEERPKPHAGALEERGPRPVVSIVRPRHGPKRKPVKSLSLPGLRAHLKAEAELPPKLPLQEEEPEDSQSEPSPSAKQHKKAKKRKSLGAPVLHAVASMVSAPLETLRLEPSALPWVFAGKAQRLRP

SEQ ID NO: 811142 - protein, 212 aa, Homo sapiens
ALGGKELQPRGWGTHHSRIPKSCTPAGRILVPSHYHHSPPVPQEPPCREQQESGSFRACRGLGSLASKPLGPGVSLTRNGTGVEPWGCGQAGLFPGPGNGSQGWSLAQVSCPWLRSLSLPGLRAHLKAEAELPPKLPLQEEEPEDSQSEPSPSAKQHKKAKKRKSLGAPVLHAVASMVSAPLETLRLEREWQSLDCSFSPCLWGPTWHNLAL

SEQ ID NO: 811143 - protein, 403 aa, Homo sapiens
LATSATSAPSPLLGPARGLSPAALGQGLTREVLPPAAATRRDLLLPGNRGFRPRGQGPLTPAQSVLGLVVSAEGGSAVAGFSSQLCPRLLAGLRGQRGATIQPLGARPKQLSRTHSACAAMASAGAERRPGVQEATVVGQGQLTEEPGSAQTSEVTVRLFNLQTQGRSALRGGTERPDPLTARLGPPGGEGQQAGVLIPVSVSNVRCSVTDPYVLCPAMVTDGLCVISECPVAGDQFLVPAHEARGTQSEDQRPAGAASESELQEEGPKLGEERPKPHAGALEERGPRPVVSIVRPRHGPKRKPVKSLSLPGLRAHLKAEAELPPKLPLQEEEPEDSQSEPSPSAKQHKKAKKRKSLGAPVLHAVASMVSAPLETLRLEREWQSLDCSFSPCLWGPTWHNLAL

SEQ ID NO: 811144 - protein, 328 aa, Homo sapiens
LATSATSAPSPLLGPARGLSPAALGQGLTREVLPPAAATRRDLLLPGNRGFRPRGQGPLTPAQSVLGLVVSAEGGSAVAGFSSQLCPRLLAGLRGQRGATIQPLGARPKQLSRTHSACAAMASAGAERRPGVQEATVVGQGQLTEEPGSAQTSECPVAGDQFLVPAHEARGTQSEDQRPAGAASESELQEEGPKLGEERPKPHAGALEERGPRPVVSIVRPRHGPKRKPVKSLSLPGLRAHLKAEAELPPKLPLQEEEPEDSQSEPSPSAKQHKKAKKRKSLGAPVLHAVASMVSAPLETLRLEREWQSLDCSFSPCLWGPTWHNLAL

SEQ ID NO: 811145 - protein, 286 aa, Homo sapiens
QGQMAPPLPDSEREKQEPEQGEVGKRPGLPPEPREQRDVERAGGNQAASQLEEAGRAEMLDHAVLLQVIKEQQVQQKRLLDQQEKLLAVIEEQHKEIHQQRQEDEEDKPRQVEVHQEPGAAVPRGQEAPEGKARETVENLPPLPLDPVLRAPGGRPAPSQDLNQRSLEHSEGPVGRDPAGPPDGGPDTEPRAAQGKLRDGQKDAAPRAAGTVKELPKGPEQVPVPDPAREAGGPEERLAEEFPGQSQDVTGGSQDRKNWRGGSRARFEEARSWRPAQRGLLADADG

SEQ ID NO: 811146 - protein, 194 aa, Homo sapiens
MKPKQVSRDLGLAADLPGGAEGAAAQPQAVLRQPELRVISDGEQGGQQGHRLDHGGHLEMRKARGGDHVPVSHEQPRGGEDAAVQEPRQRPEPELGLKRAVPGGQRPDNAKPNRDLKLQAGSDLRRRRRDLGPHAEGQLAPRDGVIIGLNPLPDVQVNDLRGALDAQLRQAAGGALQVVHSRQLRQAPGPPEES

SEQ ID NO: 811147 - protein, 194 aa, Homo sapiens; identical to SEQ ID NO: 811146

SEQ ID NO: 811148 - protein, 585 aa, Homo sapiens
QGQMAPPLPDSEREKQEPEQGEVGKRPGQAQALEEAGDLPEDPQKVPEADGQPAVQPAKEDLGPGDRCLHPRPQAVLSEQQNGLAVGGGEKAKGGPPPGNAAGDTGQPAEDSDHGGKPPLPAEKPAPGPGLPPEPREQRDVERAGGNQAASQLEEAGRAEMLDHAVLLQVIKEQQVQQKRLLDQQEKLLAVIEEQHKEIHQQRQEDEEDKPRQVEVHQEPGAAVPRGQEAPEGKARETVENLPPLPLDPVLRAPGGRPAPSQDLNQRSLEHSEGPVGRDPAGPPDGGPDTEPRAAQGKLRDGQKDAAPRAAGTVKELPKGPEQVPVPDPAREAGGPEERLAEEFPGQSQDVTGGSQDRKKPGKEVAATGTSILKEANWLVAGPGAETGDPRMKPKQVSRDLGLAADLPGGAEGAAAQPQAVLRQPELRVISDGEQGGQQGHRLDHGGHLEMRKARGGDHVPVSHEQPRGGEDAAVQEPRQRPEPELGLKRAVPGGQRPDNAKPNRDLKLQAGSDLRRRRRDLGPHAEGQLAPRDGVIIGLNPLPDVQVNDLRGALDAQLRQAAGGALQVVHSRQLRQAPGPPEES

SEQ ID NO: 811149 - protein, 592 aa, Homo sapiens
QGQMAPPLPDSEREKQEPEQGEVGKRPGQAQALEEAGDLPEDPQKVPEADGQPAVQPAKEDLGPGDRCLHPRPQAVLSEQQNGLAVGGGEKAKGGPPPGNAAGDTGQPAEDSDHGGKPPLPAEKPAPGPGLPPEPREQRDVERAGGNQAASQLEAEIKKIVEAGRAEMLDHAVLLQVIKEQQVQQKRLLDQQEKLLAVIEEQHKEIHQQRQEDEEDKPRQVEVHQEPGAAVPRGQEAPEGKARETVENLPPLPLDPVLRAPGGRPAPSQDLNQRSLEHSEGPVGRDPAGPPDGGPDTEPRAAQGKLRDGQKDAAPRAAGTVKELPKGPEQVPVPDPAREAGGPEERLAEEFPGQSQDVTGGSQDRKKPGKEVAATGTSILKEANWLVAGPGAETGDPRMKPKQVSRDLGLAADLPGGAEGAAAQPQAVLRQPELRVISDGEQGGQQGHRLDHGGHLEMRKARGGDHVPVSHEQPRGGEDAAVQEPRQRPEPELGLKRAVPGGQRPDNAKPNRDLKLQAGSDLRRRRRDLGPHAEGQLAPRDGVIIGLNPLPDVQVNDLRGALDAQLRQAAGGALQVVHSRQLRQAPGPPEES

SEQ ID NO: 811150 - protein, 194 aa, Homo sapiens; identical to SEQ ID NO: 811146

SEQ ID NO: 811151 - protein, 194 aa, Homo sapiens; identical to SEQ ID NO: 811146

SEQ ID NO: 811152 - protein, 194 aa, Homo sapiens; identical to SEQ ID NO: 811146

SEQ ID NO: 811153 - protein, 189 aa, Homo sapiens
AGILGEETYILRLGAEGAAAQPQAVLRQPELRVISDGEQGGQQGHRLDHGGHLEMRKARGGDHVPVSHEQPRGGEDAAVQEPRQRPEPELGLKRAVPGGQRPDNAKPNRDLKLQAGSDLRRRRRDLGPHAEGQLAPRDGVIIGLNPLPDVQVNDLRGALDAQLRQAAGGALQVVHSRQLRQAPGPPEES

SEQ ID NO: 811154 - protein, 225 aa, Homo sapiens
MAVRSLWAGRLRVQRLLAWSAAWESKGWPLPFSTATQRTAGEDCRSEDPPDELGPPLAERALRVKAVKLEKEVQDLTVRYQRAIADCENIRRRTQRCVEDAKIFGIQSFCKDLVEVADILEKTTECISEESEPEDQKLTLEKVFRGLLLLEAKLKSVFAKHGLEKLTPIGDKYDPHEHELICHVPAGVGVQPGTVALVRQDGYKLHGRTIRLARVEVAVESQRRL

SEQ ID NO: 811155 - protein, 225 aa, Homo sapiens; identical to SEQ ID NO: 811154

SEQ ID NO: 811156 - protein, 237 aa, Homo sapiens
SVGQGTSFSASTTVHSRPHFTDGETEAISRASFLGRGRGWPLPFSTATQRTAGEDCRSEDPPDELGPPLAERALRVKAVKLEKEVQDLTVRYQRAIADCENIRRRTQRCVEDAKIFGIQSFCKDLVEVADILEKTTECISEESEPEDQKLTLEKVFRGLLLLEAKLKSVFAKHGLEKLTPIGDKYDPHEHELICHVPAGVGVQPGTVALVRQDGYKLHGRTIRLARVEVAVESQRRL

SEQ ID NO: 811157 - protein, 128 aa, Homo sapiens
KITGFSAGIQSFCKDLVEVADILEKTTECISEESEPEDQKLTLEKVFRGLLLLEAKLKSVFAKHGLEKLTPIGDKYDPHEHELICHVPAGVGVQPGTVALVRQDGYKLHGRTIRLARVEVAVESQRRL

SEQ ID NO: 811158 - protein, 225 aa, Homo sapiens; identical to SEQ ID NO: 811154

SEQ ID NO: 811159 - protein, 112 aa, Homo sapiens
MAVRSLWAGRLRVQRLLAWSAAWESKGWPLPFSTATQRTAGEDCRSEDPPDELGPPLAERALRVKAVKLEKEVQDLTVRYQRAIADCENIRRRTQRCVEDAKIFGERFIYNK

SEQ ID NO: 811160 - protein, 76 aa, Homo sapiens
ACAVSKPCQTRCGGCLKLVSRGAAHLWLGQCRAPLGRYREALVAFRLDGAGQPWFAGFWVFEQPRCRSSPPPTRSA

SEQ ID NO: 811161 - protein, 76 aa, Homo sapiens; identical to SEQ ID NO: 811160

SEQ ID NO: 811162 - protein, 76 aa, Homo sapiens; identical to SEQ ID NO: 811160

SEQ ID NO: 811163 - protein, 76 aa, Homo sapiens; identical to SEQ ID NO: 811160

SEQ ID NO: 811164 - protein, 407 aa, Homo sapiens
MDSPCQPQPLSQALPQLPGSSSEPLEPEPGRARMGVESYLPCPLLPSYHCPGVPSEASAGSGTPRATATSTTASPLRDGFGGQDGGELRPLQSEGAAALVTKGCQRLAAQGARPEAPKRKWAEDGGDAPSPSKRPWARQENQEAEREGGMSCSCSSGSGEASAGLMEEALPSAPERLALDYIVPCMRYYGICVKDSFLGAALGGRVLAEVEALKRGGRLRDGQLVSQRAIPPRSIRGDQIAWVEGHEPGCRSIGALMAHVDAVIRHCAGRLGSYVINGRTKAMVACYPGNGLGYVRHVDNPHGDGRCITCIYYLNQNWDVKVHGGLLQIFPEGRPVVANIEPLFDRLLIFWSDRRNPHEVKPAYATRYAITVWYFDAKERAAAKDKYQLASGQKGVQVPVSQPPTPT

SEQ ID NO: 811165 - protein, 407 aa, Homo sapiens; identical to SEQ ID NO: 811164

SEQ ID NO: 811166 - protein, 128 aa, Homo sapiens
MLDRERLSTNVGSKGSPEGEEWNGSGRRDVQHTRPHAATPLICTTSDSTMATCLTVQTRAHGHNMLLNNTPKASVNARSLTCCVTRELMCSLRLVLPYLIFCLYDLSSDVSRMFKSTAIIVLSQPPVG

SEQ ID NO: 811167 - protein, 407 aa, Homo sapiens; identical to SEQ ID NO: 811164

SEQ ID NO: 811168 - protein, 407 aa, Homo sapiens; identical to SEQ ID NO: 811164

SEQ ID NO: 811169 - protein, 407 aa, Homo sapiens; identical to SEQ ID NO: 811164

SEQ ID NO: 811170 - protein, 423 aa, Homo sapiens
MDSPCQPQPLSQALPQLPGSSSEPLEPEPGRARMGVESYLPCPLLPSYHCPGVPSEASAGSGTPRATATSTTASPLRDGFGGQDGGELRPLQSEGAAALVTKGCQRLAAQGARPEAPKRKWAEDGGDAPSPSKRPWARQENQEAEREGGMSCSCSSGSGEASAGLMEEALPSAPERLALDYIVPCMRYYGICVKDSFLGAALGGRVLAEVEALKRGGRLRDGQLVSQRAIPPRSIRGDQIAWVEGHEPGCRSIGALMAHVDAVIRHCAGRLGSYVINGRTKAMVACYPGNGLGYVRHVDNPHGDGRCITCIYYLNQNWDVKVGVRVRVRVALGLGLGRGWRASTPFSTLSPDSGILLFLFSTHSGQCDLPALPGKWHLLLSSGLCGGNSPLSGNGAVCPAPPGLVMNTFPLFLSLVASCPSPW

SEQ ID NO: 811171 - protein, 396 aa, Homo sapiens
MDSPCQPQPLSQALPQLPGSSSEPLEPEPGRARMGVESYLPCPLLPSYHCPGVPSEASAGSGTPRATATSTTASPLRDGFGGQDGGELRPLQSEGAAALVTKGCQRLAAQGARPEAPKRKWAEDGGDAPSPSKRPWARQENQEAEREGGMSCSCSSGSGEASAGLMEEALPSAPERLALDYIVPCMRYYGICVKDSFLGAALGGRVLAEVEALKRGGRLRDGQLVSQRAIPPRSIRGDQIAWVEGHEPGCRSIGALMAHVDAVIRHCAGRLGSYVINGRTKAMVACYPGNGLGYVRHVDNPHGDGRCITCIYYLNQNWDVKVHGGLLQIFPEGRPVVANIEPLFDRLLIFWSDRRNPHEVKPAYATSIRTERCPSTCITAAYAHLVASPRAAWQTA

SEQ ID NO: 811172 - protein, 292 aa, Homo sapiens
MDSPCQPQPLSQALPQLPGSSSEPLEPEPGRARMGVESYLPCPLLPSYHCPGVPSEASAGSGTPRATATSTTASPLRDGFGGQDGGELRPLQSEGAAALVTKGCQRLAAQGARPEAPKRKWAEDGGDAPSPSKRPWARQENQEAEREGGMSCSCSSGSGEASAGLMEEALPSAPERLALDYIVPCMRYYGICVKDSFLGAALGGRVLAEVEALKRGGRLRDGQLVSQRAIPPRSIRGDQIAWVEGHEPGCRSIGALMAHVDAVIRHCAGRLGSYVINGRTKAMGAASPVSIT

SEQ ID NO: 811173 - protein, 407 aa, Homo sapiens; identical to SEQ ID NO: 811164

SEQ ID NO: 811174 - protein, 258 aa, Homo sapiens [sequence omitted]

SEQ ID NO: 811175 - protein, 407 aa, Homo sapiens; identical to SEQ ID NO: 811164

SEQ ID NO: 811176 - protein, 114 aa, Homo sapiens
VGAGYGALCGAGRLAQTAAPGPEEKARHPEGSLPKPLGTAEDLGTSKQPPGHEKSSCCLPCLTLPHARPGGPQLHQVEAEEEAEEGGTMGPGGALHARGMKTLLPWTARASRSP

SEQ ID NO: 811177 - protein, 323 aa, Homo sapiens
MDSPCQPQPLSQALPQLPGSSSEPLEPEPGRARMGVESYLPCPLLPSYHCPGVPSEASAGSGTPRATATSTTASPLRDGFGGQDGGELRPLQSEGAAALVTKGCQRLAAQGARPEAPKRKWAEDGGDAPSPSKRPWARQENQEAEREGGMSCSCSSGSGEASAGLMEEALPSAPERLALDYIVPCMRYYGICVKDSFLGAALGGRVLAEVEALKRGGRLRDGQLVSQRAIPPRSIRGDQIAWVEGHEPGCRSIGALMAHVDAVIRHCAGRLGSYVINGRTKAMVACYPGNGLGYVRHVDNPHVPNPFGHGRHLLDWAATAWAE

SEQ ID NO: 811178 - protein, 125 aa, Homo sapiens
MVACYPGNGLGYVRHVDNPHGDGRCITCIYYLNQNWDVKVHGGLLQIFPEGRPVVANIEPLFDRLLIFWSDRRNPHEVKPAYATRYAITVWYFDAKERAAAKDKYQLASGQKGVQVPVSQPPTPT

SEQ ID NO: 811179 - protein, 151 aa, Homo sapiens
MDSPCQPQPLSQALPQLPGSSSEPLEPEPGRARMGVESYLPCPLLPSYHCPGVPSEASAGSGTPRATATSTTASPLRDGFGGQDGGELRPLQSEGAAALVTKGCQRLAAQGARPEAPKRKWAEDGGDAPSPSKRPSDFASVLPGVEGSVCC

SEQ ID NO: 811180 - protein, 134 aa, Homo sapiens
MDSPCQPQPLSQALPQLPGSSSEPLEPEPGRARMGVESYLPCPLLPSYHCPGVPSEASAGSGTPRATATSTTASPLRDGFGGQDGGELRPLQSEGAAALVTKGCQRLAAQGARPEAPKRKWAEDGAAVEATVTN

SEQ ID NO: 811181 - protein, 154 aa, Homo sapiens
MDSPCQPQPLSQALPQLPGSSSEPLEPEPGRARMGVESYLPCPLLPSYHCPGVPSEASAGSGTPRATATSTTASPLRDGFGGQDGGELRPLQSEGAAALVTKGCQRLAGSRGGHRYQLKLGAWVLPCLVMTPLGMESWEEALSLPTRMQDLGLR

SEQ ID NO: 811182 - protein, 134 aa, Homo sapiens; identical to SEQ ID NO: 811180

SEQ ID NO: 811183 - protein, 154 aa, Homo sapiens; identical to SEQ ID NO: 811181

SEQ ID NO: 811184 - protein, 142 aa, Homo sapiens [sequence omitted]

SEQ ID NO: 811185 - protein, 159 aa, Homo sapiens
YSEQTLYHEGSFEERRTPNVGRSTNTNVGSKGSPEGEEWNGSGRRDVQHTRPHAATPLICTTSDSTMATCLTVQTRAHGHNMLLNNTPKASVNATDSTEPTASCSTSTATTPNHRTGWQHTHSTRHSTRQSSGITEHNNTGQQNTQQIRSQYMPTHDTQ

SEQ ID NO: 811186 - protein, 94 aa, Homo sapiens
SGSLLIIARQRAHGHNMLLNNTPKASVNATDSTEPTASCSTSTATTPNHRTGWQHTHSTRHSTRQSSGITEHNNTGQQNTQQIRSQYMPTHDTQ

SEQ ID NO: 811187 - protein, 142 aa, Homo sapiens [sequence omitted]

SEQ ID NO: 811188 - protein, 106 aa, Homo sapiens
STCTVYSKKYGAILTFCSFFVFERRSFARFPGCRSIGALMAHVDAVIRHCAGRLGSYVINGRTKAMVACYPGNGLGYVRHVDNPHVPNPFGHGRHLLDWAATAWAE

SEQ ID NO: 811189 - protein, 158 aa, Homo sapiens
MCLPSPSKPTSLHPCQAMVACYPGNGLGYVRHVDNPHGDGRCITCIYYLNQNWDVKVGVRVRVRVALGLGLGRGWRASTPFSTLSPDSGILLFLFSTHSGQCDLPALPGKWHLLLSSGLCGGNSPLSGNGAVCPAPPGLVMNTFPLFLSLVASCPSPW

SEQ ID NO: 811190 - protein, 430 aa, Homo sapiens
VFFFYPPFLFIIFLHIDRILGNERKKKPKLTRAEDLPPLPLPSSLFSPPQEKKTPKQKKVHLGLVFFLQYFLGGQNFLGVIFFGFSSSFIFLPKLLLVGEKKMPQLNGGGGDDLGANDELISFKDEGEQEEKSSENSSAERDLADVKSSLVNESETNQNSSSDSEAERRPPPRSESFRDKSRESLEEAAKRQDGGLFKGPPYPGYPFIMIPDLTSPYLPNGSLSPTARTLHFQSGSTHYSAYKTIEHQIAVQYLQMKWPLLDVQAGSLQSRQALKDARSPSPAHIVSPLPCCTQGHDCQHFYPPSDFTVSTQVFRDMKRSHSLQKVGEPWCIESNKVPVVQHPHHVHPLTPLITYSNEHFTPGNPPPHLPADVDPKTESTARPPDIFPYYHYCWGGGKSPSVDGCPSAGTGFLRKGCKPSQLSQSSGAPM

SEQ ID NO: 811191 - protein, 698 aa, Homo sapiens
VFFFYPPFLFIIFLHIDRILGNERKKKPKLTRAEDLPPLPLPSSLFSPPQEKKTPKQKKVHLGLVFFLQYFLGGQNFLGVIFFGFSSSFIFLPKLLLVGEKKMPQLNGGGGDDLGANDELISFKDEGEQEEKSSENSSAERDLADVKSSLVNESETNQNSSSDSEAERRPPPRSESFRDKSRESLEEAAKRQDGGLFKGPPYPGYPFIMIPDLTSPYLPNGSLSPTARTYLQMKWPLLDVQAGSLQSRQALKDARSPSPAHIVSNKVPVVQHPHHVHPLTPLITYSNEHFTPGNPPPHLPADVDPKTGIPRPPHPPDISPYYPLSPGTVGQIPHPLGWLVPQQGQPVYPITTGGFRHPYPTALTVNASMSRFPPHMVPPHHTLHTTGIPHPAIVTPTVKQESSQSDVGSLHSSKHQDSKKEEEKKKPHIKKPLNAFMLYMKEMRAKVVAECTLKESAAINQILGRRWHALSREEQAKYYELARKERQLHMQLYPGWSARDNYGKKKKRKRDKQPGETNEHSECFLNPCLSLPPITDLSAPKKCRARFGLDQQNNWCGPCRRKKKCVRYIQGEGSCLSPPSSDGSLLDSPPPSPNLLGSPPRDAKSQTEQTQPLSLSLKPDPLAHLSMMPPPPALLLAEATHKASALCPNGALDLPPAALQPAAPSSSIAQPSTSSLHSHSSLAGTQPQPLSLVTKSLE

SEQ ID NO: 811192 - protein, 584 aa, Homo sapiens
VFFFYPPFLFIIFLHIDRILGNERKKKPKLTRAEDLPPLPLPSSLFSPPQEKKTPKQKKVHLGLVFFLQYFLGGQNFLGVIFFGFSSSFIFLPKLLLVGEKKMPQLNGGGGDDLGANDELISFKDEGEQEEKSSENSSAERDLADVKSSLVNESETNQNSSSDSEAERRPPPRSESFRDKSRESLEEAAKRQDGGLFKGPPYPGYPFIMIPDLTSPYLPNGSLSPTARTLHFQSGSTHYSAYKTIEHQIAVQYLQMKWPLLDVQAGSLQSRQALKDARSPSPAHIVSNKVPVVQHPHHVHPLTPLITYSNEHFTPGNPPPHLPADVDPKTGIPRPPHPPDISPYYPLSPGTVGQIPHPLGWLVPQQGQPVYPITTGGFRHPYPTALTVNASMSRFPPHMVPPHHTLHTTGIPHPAIVTPTVKQESSQSDVGSLHSSKHQDSKKEEEKKKPHIKKPLNAFMLYMKEMRAKVVAECTLKESAAINQILGRRWHALSREEQAKYYELARKERQLHMQLYPGWSARDNYGKKKKRKRDKQPGETNEHSECFLNPCLSLPPITGEKKSAFATYKVKAAASAHPLQMEAY

SEQ ID NO: 811193 - protein, 567 aa, Homo sapiens
VFFFYPPFLFIIFLHIDRILGNERKKKPKLTRAEDLPPLPLPSSLFSPPQEKKTPKQKKVHLGLVFFLQYFLGGQNFLGVIFFGFSSSFIFLPKLLLVGEKKMPQLNGGGGDDLGANDELISFKDEGEQEEKSSENSSAERDLADVKSSLVNESETNQNSSSDSEAERRPPPRSESFRDKSRESLEEAAKRQDGGLFKGPPYPGYPFIMIPDLTSPYLPNGSLSPTARTLHFQSGSTHYSAYKTIEHQIAVQYLQMKWPLLDVQAGSLQSRQALKDARSPSPAHIVSNKVPVVQHPHHVHPLTPLITYSNEHFTPGNPPPHLPADVDPKTGIPRPPHPPDISPYYPLSPGTVGQIPHPLGWLVPQQGQPVYPITTGGFRHPYPTALTVNASMSRFPPHMVPPHHTLHTTGIPHPAIVTPTVKQESSQSDVGSLHSSKHQDSKKEEEKKKPHIKKPLNAFMLYMKEMRAKVVAECTLKESAAINQILGRRWHALSREEQAKYYELARKERQLHMQLYPGWSARDNYGKKKKRKRDKQPGETNGEKKSAFATYKVKAAASAHPLQMEAY

SEQ ID NO: 811194 - protein, 698 aa, Homo sapiens; identical to SEQ ID NO: 811191

SEQ ID NO: 811195 - protein, 698 aa, Homo sapiens; identical to SEQ ID NO: 811191

SEQ ID NO: 811196 - protein, 548 aa, Homo sapiens
VFFFYPPFLFIIFLHIDRILGNERKKKPKLTRAEDLPPLPLPSSLFSPPQEKKTPKQKKVHLGLVFFLQYFLGGQNFLGVIFFGFSSSFIFLPKLLLVGEKKMPQLNGGGGDDLGANDELISFKDEGEQEEKSSENSSAERDLADVKSSLVNESETNQNSSSDSEAERRPPPRSESFRDKSRESLEEAAKRQDGGLFKGPPYPGYPFIMIPDLTSPYLPNGSLSPTARTYLQMKWPLLDVQAGSLQSRQASNKVPVVQHPHHVHPLTPLITYSNEHFTPGNPPPHLPADVDPKTGIPRPPHPPDISPYYPLSPGTVGQIPHPLGWLVPQQGQPVYPITTGGFRHPYPTALTVNASMSRFPPHMVPPHHTLHTTGIPHPAIVTPTVKQESSQSDVGSLHSSKHQDSKKEEEKKKPHIKKPLNAFMLYMKEMRAKVVAECTLKESAAINQILGRRWHALSREEQAKYYELARKERQLHMQLYPGWSARDNYGKKKKRKRDKQPGETNEHSECFLNPCLSLPPITGEKKSAFATYKVKAAASAHPLQMEAY

SEQ ID NO: 811197 - protein, 575 aa, Homo sapiens
VFFFYPPFLFIIFLHIDRILGNERKKKPKLTRAEDLPPLPLPSSLFSPPQEKKTPKQKKVHLGLVFFLQYFLGGQNFLGVIFFGFSSSFIFLPKLLLVGEKKMPQLNGGGGDDLGANDELISFKDEGEQEEKSSENSSAERDLADVKSSLVNESETNQNSSSDSEAERRPPPRSESFRDKSRESLEEAAKRQDGGLFKGPPYPGYPFIMIPDLTSPYLPNGSLSPTARTLHFQSGSTHYSAYKTIEHQIAVQYLQMKWPLLDVQAGSLQSRQALKDARSPSPAHIVSNKVPVVQHPHHVHPLTPLITYSNEHFTPGNPPPHLPADVDPKTGIPRPPHPPDISPYYPLSPGTVGQIPHPLGWLVPQQGQPVYPITTGGFRHPYPTALTVNASMSRFPPHMVPPHHTLHTTGIPHPAIVTPTVKQESSQSDVGSLHSSKHQDSKKEEEKKKPHIKKPLNAFMLYMKEMRAKVVAECTLKESAAINQILGRRWHALSREEQAKYYELARKERQLHMQLYPGWSARDNYGKKKKRKRDKQPGETNAPPHQLHSRRLLPYIPTAPWPGPSPSRCRSSPSL

SEQ ID NO: 811198 - protein, 428 aa, Homo sapiens
MKRSHSLQKVGEPWCIESNKVPVVQHPHHVHPLTPLITYSNEHFTPGNPPPHLPADVDPKTGIPRPPHPPDISPYYPLSPGTVGQIPHPLGWLVPQQGQPVYPITTGGFRHPYPTALTVNASMSRFPPHMVPPHHTLHTTGIPHPAIVTPTVKQESSQSDVGSLHSSKHQDSKKEEEKKKPHIKKPLNAFMLYMKEMRAKVVAECTLKESAAINQILGRRWHALSREEQAKYYELARKERQLHMQLYPGWSARDNYGKKKKRKRDKQPGETNEHSEMFPKSLPFTSSDYRRKKKCVRYIQGEGSCLSPPSSDGSLLDSPPPSPNLLGSPPRDAKSQTEQTQPLSLSLKPDPLAHLSMMPPPPALLLAEATHKASALCPNGALDLPPAALQPAAPSSSIAQPSTSSLHSHSSLAGTQPQPLSLVTKSLE

SEQ ID NO: 811199 - protein, 346 aa, Homo sapiens
VFFFYPPFLFIIFLHIDRILGNERKKKPKLTRAEDLPPLPLPSSLFSPPQEKKTPKQKKVHLGLVFFLQYFLGGQNFLGVIFFGFSSSFIFLPKLLLVGEKKMPQLNGGGGDDLGANDELISFKDEGEQEEKSSENSSAERDLADVKSSLVNESETNQNSSSDSEAERRPPPRSESFRDKSRESLEEAAKRQDGGLFKGPPYPGYPFIMIPDLTSPYLPNGSLSPTARTLHFQSGSTHYSAYKTIEHQIAVQYLQMKWPLLDVQAGSLQSRQALKDARSPSPAHIVSNKVPVVQHPHHVHPLTPLITYSNEHFTPGNPPPHLPGIPRPPHPPDISPYYPLSPGTIR

SEQ ID NO: 811200 - protein, 195 aa, Homo sapiens
RFSLELIQTSALLRNAERALALINRITGAALADANTPKKCRALFGLDRQTLWCKPCRRKKKCVRYIQGEGSCLSPPSSDGSLLDSPPPSPNLLGSPPRDAKSQTEQTQPLSLSLKPDPLAHLSMMPPPPALLLAEATHKASALCPNGALDLPPAALQPAAPSSSIAQPSTSSLHSHSSLAGTQPQPLSLVTKSLE

SEQ ID NO: 811201 - protein, 110 aa, Homo sapiens
ESFPSPPANPFSAPKKRVSLQLGYNARAFGLKRGWRLDKYRGFVWMEMAVWSLPPAFSFQVRPDTLLTSVSCSNSLCFISSSRERRRRGKGTSSRERPMEKKKVRSLHTR

SEQ ID NO: 811202 - protein, 497 aa, Homo sapiens
VFFFYPPFLFIIFLHIDRILGNERKKKPKLTRAEDLPPLPLPSSLFSPPQEKKTPKQKKVHLGLVFFLQYFLGGQNFLGVIFFGFSSSFIFLPKLLLVGEKKMPQLNGGGGDDLGANDELISFKDEGEQEEKSSENSSAERDLADVKSSLVNESETNQNSSSDSEAERRPPPRSESFRDKSRESLEEAAKRQDGGLFKGPPYPGYPFIMIPDLTSPYLPNGSLSPTARTLHFQSGSTHYSAYKTIEHQIAVQYLQMKWPLLDVQAGSLQSRQALKDARSPSPAHIVSNKVPVVQHPHHVHPLTPLITYSNEHFTPGNPPPHLPADVDPKTGIPRPPHPPDISPYYPLSPGTVGQIPHPLGWLVPQQGQPVYPITTGGFRHPYPTALTVNASMSRFPPHMVPPHHTLHTTGIPHPAIVTPTVKQESSQSDVGSLHSSKHQDSKKEEEKKKPHIKKPLNAFMLYMKEMRAKVVAECTLKESAAINQILGRRVACTPFSG

SEQ ID NO: 811203 - protein, 566 aa, Homo sapiens
VFFFYPPFLFIIFLHIDRILGNERKKKPKLTRAEDLPPLPLPSSLFSPPQEKKTPKQKKVHLGLVFFLQYFLGGQNFLGVIFFGFSSSFIFLPKLLLVGEKKMPQLNGGGGDDLGANDELISFKDEGEQEEKSSENSSAERDLADVKSSLVNESETNQNSSSDSEAERRPPPRSESFRDKSRESLEEAAKRQDGGLFKGPPYPGYPFIMIPDLTSPYLPNGSLSPTARTLHFQSGSTHYSAYKTIEHQIAVQYLQMKWPLLDVQAGSLQSRQALKDARSPSPAHIVSNKVPVVQHPHHVHPLTPLITYSNEHFTPGNPPPHLPADVDPKTGIPRPPHPPDISPYYPLSPGTVGQIPHPLGWLVPQQGQPVYPITTGGFRHPYPTALTVNASMSRFPPHMVPPHHTLHTTGIPHPAIVTPTVKQESSQSDVGSLHSSKHQDSKKEEEKKKPHIKKPLNAFMLYMKEMRAKVVAECTLKESAAINQILGRRWHALSREEQAKYYELARKERQLHMQLYPGWSARDNYGKKKKRKRDKQPGETNEHSECFLNPCLSLPPITGANVILSH

SEQ ID NO: 811204 - protein, 284 aa, Homo sapiens
VFFFYPPFLFIIFLHIDRILGNERKKKPKLTRAEDLPPLPLPSSLFSPPQEKKTPKQKKVHLGLVFFLQYFLGGQNFLGVIFFGFSSSFIFLPKLLLVGEKKMPQLNGGGGDDLGANDELISFKDEGEQEEKSSENSSAERDLADVKSSLVNESETNQNSSSDSEAERRPPPRSESFRDKSRESLEEAAKRQDGGLFKGPPYPGYPFIMIPDLTSPYLPNGSLSPTARTYLQMKWPLLDVQAGSLQSRQALKDARSPSPAHIVVSNLPEMMASFIEGVKKKMLF

SEQ ID NO: 811205 - protein, 119 aa, Homo sapiens
FLQYFLGGQNFLGVIFFGFSSSFIFLPKLLLVGEKKMPQLNGGGGDDLGANDELISFKDEGEQEEKSSENSSAERDLADVKSSLVNESETNQNSSSDSEVGKAPRAGGVFYLFPGLGKC

SEQ ID NO: 811206 - protein, 852 aa, Homo sapiens
MAGALAGLAAGLQVPRVAPSPDSDSDTDSEDPSLRRSAGGLLRSQVIHSGHFMVSSPHSDSLPRRRDQEGSVGPSDFGPRSIDPTLTRLFECLSLAYSGKLVSPKWKNFKGLKLLCRDKIRLNNAIWRAWYIQYVKRRKSPVCGFVTPLQGPEADAHRKPEAVVLEGNYWKRRIEVVMREYHKWRIYYKKRLRKPSREDDLLAPKQAEGRWPPPEQWCKQLFSSVVPVLLGDPEEEPGGRQLLDLNCFLSDISDTLFTMTQSGPSPLQLPPEDAYVGNADMIQPDLTPLQPSLDDFMDISDFFTNSRLPQPPMPSNFPEPPSFSPVVDSLFSSGTLGPEVPPASSAMTHLSGHSRLQARNSCPGPLDSSAFLSSDFLLPEDPKPRLPPPPVPPPLLHYPPPAKVPGLEPCPPPPFPPMAPPTALLQEEPLFSPRFPFPTVPPAPGVSPLPAPAAFPPTPQSVPSPAPTPFPIELLPLGYSEPAFGPCFSMPRGKPPAPSPRGQKASPPTLAPATASPPTTAGSNNPCLTQLLTAAKPEQALEPPLVSSTLLRSPGSPQETVPEFPCTFLPPTPAPTPPRPPPGPATLAPSRPLLVPKAERLSPPAPSGSERRLSGDLSSMPGPGTLSVRVSPPQPILSRGRPDSNKTENRRITHISAEQKRRFNIKLGFDTLHGLVSTLSAQPSLKVSKATTLQKTAEYILMLQQERAGLQEEAQQLRDEIEELNAAINLCQQQLPATGVPITHQRFDQMRDMFDDYVRTRTLHNWKFWVFSILIRPLFESFNGMVSTASVHTLRQTSLAWLDQYCSLPALRPTVLNSLRQLGTSTSILTDPGRIPEQATRAVTEGTLGKPL

SEQ ID NO: 811207 - protein, 833 aa, Homo sapiens
MAGALAGLAAGLQVPRVAPSPDSDSDTDSEDPSLRRSAGGLLRSQVIHSGHFMVSSPHSDSLPRRRDQEGSVGPSDFGPRSIDPTLTRLFECLSLAYSGKLVSPKWKNFKGLKLLCRDKIRLNNAIWRAWYIQYVKRRKSPVCGFVTPLQGPEADAHRKPEAVVLEGNYWKRRIEVVMREYHKWRIYYKKRLRKPSREDDLLAPKQAEGRWPPPEQWCKQLFSSVVPVLLGDPEEEPGGRQLLDLNCFLSDISDTLFTMTQSGPSPLQLPPEDAYVGNADMIQPDLTPLQPSLDDFMDISDFFTNSRLPQPPMPSNFPEPPSFSPVVDSLFSSGTLGPEVPPASSAMTHLSGHSRLQARNSCPGPLDSSAFLSSDFLLPEDPKPRLPPPPVPPPLLHYPPPAKVPGLEPCPPPPFPPMAPPTALLQEEPLFSPRFPFPTVPPAPGVSPLPAPAAFPPTPQSVPSPAPTPFPIELLPLGYSEPAFGPCFSMPRGKPPAPSPRGQKASPPTLAPATASPPTTAGSNNPCLTQLLTAAKPEQALEPPLVSSTLLRSPGSPQETVPEFPCTFLPPTPAPTPPRPPPGPATLAPSRPLLVPKAERLSPPAPSGSERRLSGDLSSMPGPGTLSVRVSPPQPILSRGRPDSNKTENRRITHISAEQKRRFNIKLGFDTLHGLVSTLSAQPSLKERAGLQEEAQQLRDEIEELNAAINLCQQQLPATGVPITHQRFDQMRDMFDDYVRTRTLHNWKFWVFSILIRPLFESFNGMVSTASVHTLRQTSLAWLDQYCSLPALRPTVLNSLRQLGTSTSILTDPGRIPEQATRAVTEGTLGKPL

SEQ ID NO: 811208 - protein, 575 aa, Homo sapiens
MAGALAGLAAGLQVPRVAPSPDSDSDTDSEDPSLRRSAGGLLRSQVIHSGHFMVSSPHSDSLPRRRDQEGSVGPSDFGPRSIDPTLTRLFECLSLAYSGKLVSPKWKNFKGLKLLCRDKIRLNNAIWRAWYIQYVKRRKSPVCGFVTPLQGPEADAHRKPEAVVLEGNYWKRRIEVVMREYHKWRIYYKKRLRKPSREDDLLAPKQAEGRWPPPEQWCKQLFSSVVPVLLGDPEEEPGGRQLLDLNCFLSDISDTLFTMTQSGPSPLQLPPEDAYVGNADMIQPDLTPLQPSLDDFMDISDFFTNSRLPQPPMPSNFPEPPSFSPVVDSLFSSGTLGPEVPPASSAMTHLSGHSRLQARNSCPGPLDSSAFLSSDFLLPEDPKPRLPPPPVPPPLLHYPPPAKVPGLEPCPPPPFPPMAPPTALLQEEPLFSPRFPFPTVPPAPGVSPLPAPAAFPPTPQSVPSPAPTPFPIELLPLGYSEPAFGPCFSMPRGKPPAPSPRGQKASPPTLAPATASPPTTAGSNNPCLTQLLTAAKPEQALEPPLVSSTLLRSPGSPAVNGGCQGTSAPCQALGL

SEQ ID NO: 811209 - protein, 535 aa, Homo sapiens
MIQPDLTPLQPSLDDFMDISDFFTNSRLPQPPMPSNFPEPPSFSPVVDSLFSSGTLGPEVPPASSAMTHLSGHSRLQARNSCPGPLDSSAFLSSDFLLPEDPKPRLPPPPVPPPLLHYPPPAKVPGLEPCPPPPFPPMAPPTALLQEEPLFSPRFPFPTVPPAPGVSPLPAPAAFPPTPQSVPSPAPTPFPIELLPLGYSEPAFGPCFSMPRGKPPAPSPRGQKASPPTLAPATASPPTTAGSNNPCLTQLLTAAKPEQALEPPLVSSTLLRSPGSPQETVPEFPCTFLPPTPAPTPPRPPPGPATLAPSRPLLVPKAERLSPPAPSGSERRLSGDLSSMPGPGTLSVRVSPPQPILSRGRPDSNKTENRRITHISAEQKRRFNIKLGFDTLHGLVSTLSAQPSLKVSKATTLQKTAEYILMLQQERAGLQEEAQQLRDEIEELNAAINLCQQQLPATGVPITHQRFDQMRDMFDDYVRTRTLHNWKFWVFSILIRPLFESFNGMVSTASVHTLRQTSLAWLDQYCSLPALRPST

SEQ ID NO: 811210 - protein, 233 aa, Homo sapiens [sequence omitted]

SEQ ID NO: 811211 - protein, 177 aa, Homo sapiens
LLKAGPAAQRTEPSAARAEKAPGAVRRSQASPQRPRRPPPAPGRAAPLCRSSGFQVRAWSPRVISGKLVSPKWKNFKGLKLLCRDKIRLNNAIWRAWYIQYVKRRKSPVCGFVTPLQGPEADAHRKPEAVVLEGNYWKRRIEVVMREYHKWRIYYKKRLRKPSREDDLLAPKQVGAL

SEQ ID NO: 811212 - protein, 884 aa, Homo sapiens
LLKAGPAAQRTEPSAARAEKAPGAVRRSQASPQRPRRPPPAPGRAAPLCRSSGFQVRAWSPRVISGKLVSPKWKNFKGLKLLCRDKIRLNNAIWRAWYIQYVKRRKSPVCGFVTPLQGPEADAHRKPEAVVLEGNYWKRRIEVVMREYHKWRIYYKKRVSGGGPGRPQSFPPAAAGYRPPRKIPGKGILTPELAPLGPSIQSRADSATVWPQRLLAASLPRGRLRKPSREDDLLAPKQAEGRWPPPEQWCKQLFSSVVPVLLGDPEEEPGGRQLLDLNCFLSDISDTLFTMTQSGPSPLQLPPEDAYVGNADMIQPDLTPLQPSLDDFMDISDFFTNSRLPQPPMPSNFPEPPSFSPVVDSLFSSGTLGPEVPPASSAMTHLSGHSRLQARNSCPGPLDSSAFLSSDFLLPEDPKPRLPPPPVPPPLLHYPPPAKVPGLEPCPPPPFPPMAPPTALLQEEPLFSPRFPFPTVPPAPGVSPLPAPAAFPPTPQSVPSPAPTPFPIELLPLGYSEPAFGPCFSMPRGKPPAPSPRGQKASPPTLAPATASPPTTAGSNNPCLTQLLTAAKPEQALEPPLVSSTLLRSPGSPQETVPEFPCTFLPPTPAPTPPRPPPGPATLAPSRPLLVPKAERLSPPAPSGSERRLSGDLSSMPGPGTLSVRVSPPQPILSRGRPDSNKTENRRITHISAEQKRRFNIKLGFDTLHGLVSTLSAQPSLKVSKATTLQKTAEYILMLQQERAGLQEEAQQLRDEIEELNAAINLCQQQLPATGVPITHQRFDQMRDMFDDYVRTRTLHNWKFWVFSILIRPLFESFNGMVSTASVHTLRQTSLAWLDQYCSLPALRPTVLNSLRQLGTSTSILTDPGRIPEQATRAVTEGTLGKPL

SEQ ID NO: 811213 - protein, 677 aa, Homo sapiens
GGWGKGSGVQLCVSLQLRKPSREDDLLAPKQAEGRWPPPEQWCKQLFSSVVPVLLGDPEEEPGGRQLLDLNCFLSDISDTLFTMTQSGPSPLQLPPEDAYVGNADMIQPDLTPLQPSLDDFMDISDFFTNSRLPQPPMPSNFPEPPSFSPVVDSLFSSGTLGPEVPPASSAMTHLSGHSRLQARNSCPGPLDSSAFLSSDFLLPEDPKPRLPPPPVPPPLLHYPPPAKVPGLEPCPPPPFPPMAPPTALLQEEPLFSPRFPFPTVPPAPGVSPLPAPAAFPPTPQSVPSPAPTPFPIELLPLGYSEPAFGPCFSMPRGKPPAPSPRGQKASPPTLAPATASPPTTAGSNNPCLTQLLTAAKPEQALEPPLVSSTLLRSPGSPQETVPEFPCTFLPPTPAPTPPRPPPGPATLAPSRPLLVPKAERLSPPAPSGSERRLSGDLSSMPGPGTLSVRVSPPQPILSRGRPDSNKTENRRITHISAEQKRRFNIKLGFDTLHGLVSTLSAQPSLKVSKATTLQKTAEYILMLQQERAGLQEEAQQLRDEIEELNAAINLCQQQLPATGVPITHQRFDQMRDMFDDYVRTRTLHNWKFWVFSILIRPLFESFNGMVSTASVHTLRQTSLAWLDQYCSLPALRPTVLNSLRQLGTSTSILTDPGRIPEQATRAVTEGTLGKPL

SEQ ID NO: 811214 - protein, 685 aa, Homo sapiens
MAGALAGLAAGLQVPRVAPSPDSDSDTDSEDPSLRRSAGGLLRSQVIHSGHFMVSSPHSDSLPRRRDQEGSVGPSDFGPRSIDPTLTRLFECLSLAYSGKLVSPKWKNFKGLKLLCRDKIRLNNAIWRAWYIQYFFTNSRLPQPPMPSNFPEPPSFSPVVDSLFSSGTLGPEVPPASSAMTHLSGHSRLQARNSCPGPLDSSAFLSSDFLLPEDPKPRLPPPPVPPPLLHYPPPAKVPGLEPCPPPPFPPMAPPTALLQEEPLFSPRFPFPTVPPAPGVSPLPAPAAFPPTPQSVPSPAPTPFPIELLPLGYSEPAFGPCFSMPRGKPPAPSPRGQKASPPTLAPATASPPTTAGSNNPCLTQLLTAAKPEQALEPPLVSSTLLRSPGSPQETVPEFPCTFLPPTPAPTPPRPPPGPATLAPSRPLLVPKAERLSPPAPSGSERRLSGDLSSMPGPGTLSVRVSPPQPILSRGRPDSNKTENRRITHISAEQKRRFNIKLGFDTLHGLVSTLSAQPSLKVSKATTLQKTAEYILMLQQERAGLQEEAQQLRDEIEELNAAINLCQQQLPATGVPITHQRFDQMRDMFDDYVRTRTLHNWKFWVFSILIRPLFESFNGMVSTASVHTLRQTSLAWLDQYCSLPALRPTVLNSLRQLGTSTSILTDPGRIPEQATRAVTEGTLGKPL

SEQ ID NO: 811215 - protein, 252 aa, Homo sapiens
GLSVPTTGSERRLSGDLSSMPGPGTLSVRVSPPQPILSRGRPDSNKTENRRITHISAEQKRRFNIKLGFDTLHGLVSTLSAQPSLKVSKATTLQKTAEYILMLQQERAGLQEEAQQLRDEIEELNAAINLCQQQLPATGVPITHQRFDQMRDMFDDYVRTRTLHNWKFWVFSILIRPLFESFNGMVSTASVHTLRQTSLAWLDQYCSLPALRPTVLNSLRQLGTSTSILTDPGRIPEQATRAVTEGTLGKPL

SEQ ID NO: 811216 - protein, 884 aa, Homo sapiens; identical to SEQ ID NO: 811212

SEQ ID NO: 811217 - protein, 79 aa, Homo sapiens
GALGCFLGGRVRARRRSLPGSAFLKAGLPFGEGVSVSASGACLVWRTGEKHFFSYCIPSASSLLRGPSLPPPDATQKMD

SEQ ID NO: 811218 - protein, 793 aa, Homo sapiens
MQTKVQNKKRQVAFFILLMLWGEVGSESIQYSVLEETESGTFVANLTKDLGLRVGELASRGARVVFKGNRQHLQFDPQTHDLLLNEKLDREELCGSTEPCVLPFQVLLENPLQFFQASLRVRDINDHAPEFPAREMLLKISEITMPGKIFPLKMAHDLDTGSNGLQRYTISSNPHFHVLTRNRSEGRKFPELVLDKPLDREEQPQLRLTLIALDGGSPPRSGTSEIQIQVLDINDNVPEFAQELYEAQVPENNPLGSLVITVSARDLDAGSFGKVSYALFQVDDVNQPFEINAITGEIRLRKALDFEEIQSYDVDVEATDGGGLSGKCSLVVRVLDVNDNAPELTMSFFISLIPENLPEITVAVFSVSDADSGHNQQVICSIENNLPFLLRPSVENFYTLVTEGALDRESRAEYNITITVTDLGTPRLKTQQSITVQVSDVNDNVPAFTQTSYTLFVRENNSPALHIGSVSATDRDSGINAQVTYSLLPPQDPHLPLSSLVSINADNGHLFALRSLDYEALQSFEFRVGATDRGSPALSSEALVRLLVLDANDNSPFVLYPLQNGSAPCTELVPRAAEPGYLVTKVVAVDGDSGQNAWLSYQLLKATELGLFGVWAHNGEVRTARLLSERDAAKHRLVVLVKDNGEPPRSATATLHVLLVDGFSQPYLPLPEAAPAQAQADSLTVYLVVALASVSSLFLFSVLLFVAVRLCRRSRAASVGRYSVPEGPFPGHLVDVSGTGTLSQSYQYKVCLTGGSETNEFKFLKPIMPNFPPQGTEREMEETPTSRNSFPFS

SEQ ID NO: 811219 - protein, 446 aa, Homo sapiens
RRPQSLSPVLSLSPDSMSFTTRSTFSTNYRSLGSVQAPSYGARPVSSAASVYAGAGGSGSRISVSRSTSFRGGMGSGGLATGIAGGLAGMGGIQNEKETMQSLNDRLASYLDRVRSLETENRRLESKIREHLEKKGPQVRDWSHYFKIIEDLRAQIFANTVDNARIVLQIDNARLAADDFRVKYETELAMRQSVENDIHGLRKVIDDTNITRLQLETEIEALKEELLFMKKNHEEEVKGLQAQIASSGLTVEVDAPKSQDLAKIMADIRGQYDELARKNREELDKYWSQQIEESTTVVTTQSAEVGAAETTLTELRRTVQSLEIDLDSMRNLKATLENSLREVEARYALQMEQLNGILLHLESELAQTRAEGQRQAQEYEALLNIKVKLEAEIATYRRLLEDGEDFNLGDALDSSNSMQTIQKTTTRRIVDGKVVSETNDTKVLRH

SEQ ID NO: 811220 - protein, 365 aa, Homo sapiens
MRLRSGGTEGLLAEKLEALITQTRAKQAATMSEVEWRGRTVPVKIDKVRIFLLGLADNEAAIVQAESEETKERLFESMLSECRDAIQVVREELKPDQKQRDYILEGEPGKVSNLQYLHSYLTYIKLSTAIKRNENMAKGLQRALLQQQPEDDSKRSPRPQDLIRLYDIILQNLVELLQLPGLEEDKAFQKEIGLKTLVFKAYRCFFIAQSYVLVKKWSEALVLYDRVLKYANEVNSDAGAFKNSLKDLPDVQELITQVRSEKCSLQAAAILDANDAHQTETSSSQVKDNKPLVERFETFCLDPSLVTKQANLVHFPPGFQPIPCKPLFFDLALNHVAFPPLEDKLEQKTKSGLTGYIKGIFGFRS

SEQ ID NO: 811221 - protein, 309 aa, Homo sapiens
ARSSTWRPAAARADGGGVRRYPISPARQVQLSPAQVVPPPLSRLALRRRGKMAAEKQVPGGGGGGGSGGGGGSGGGGSGGGRGAGGEENKENERPSAGSKANKEFGDSLSLEILQIIKESQQQHGLRHGDFQRYRGYCSRRQRRLRKTLNFKMGNRHKFTGKKVTEELLTDNRYLLLVLMDAERAWSYAMQLKQEANTEPRKRFHLLSRLRKAVKHAEELERLCESNRVDAKTKLEAQAYTAYLSGMLRFEHQEWKAAIEAFNKCKTIYEKLASAFTEEQAVLYNQRVEEISPNIRYCAYNIGGPVSHQ

SEQ ID NO: 811222 - protein, 208 aa, Homo sapiens
MLLLVSENPLRVLQNLVELLQLPGLEEDKAFQKEIGLKTLVFKAYRCFFIAQSYVLVKKWSEALVLYDRVLKYANEVNSDAGAFKNSLKDLPDVQELITQVRSEKCSLQAAAILDANDAHQTETSSSQVKDNKPLVERFETFCLDPSLVTKQANLVHFPPGFQPIPCKPLFFDLALNHVAFPPLEDKLEQKTKSGLTGYIKGIFGFRS

SEQ ID NO: 811223 - protein, 365 aa, Homo sapiens; identical to SEQ ID NO: 811220

SEQ ID NO: 811224 - protein, 365 aa, Homo sapiens; identical to SEQ ID NO: 811220

SEQ ID NO: 811225 - protein, 365 aa, Homo sapiens; identical to SEQ ID NO: 811220

SEQ ID NO: 811226 - protein, 365 aa, Homo sapiens; identical to SEQ ID NO: 811220

SEQ ID NO: 811227 - protein, 365 aa, Homo sapiens; identical to SEQ ID NO: 811220

SEQ ID NO: 811228 - protein, 365 aa, Homo sapiens; identical to SEQ ID NO: 811220

SEQ ID NO: 811229 - protein, 365 aa, Homo sapiens; identical to SEQ ID NO: 811220

SEQ ID NO: 811230 - protein, 307 aa, Homo sapiens
MRLRSGGTEGLLAEKLEALITQTRAKQAATMSEVEWRGRTVPVKIDKVRIFLLGLADNEAAIVQAESEETKERLFESMLSECRDAIQVVREELKPDQKQRDYILEGEPGKVSNLQYLHSYLTYIKLSTAIKRNENMAKGLQRALLQQQPEDDSKRSPRPQDLIRLYDIILQNLVELLQLPGLEEDKAFQKEIGLKTLVFKAYRCFFIAQSYVLVKKWSEALVLYDRVLKYANEVNSDAGAFKNSLKDLPDVQELITQVRSEKCSLQAAAILDANDAHQTETSSSQVKDNKPLVSNAFRSPHQAQMGP

SEQ ID NO: 811231 - protein, 309 aa, Homo sapiens; identical to SEQ ID NO: 811221

SEQ ID NO: 811232 - protein, 365 aa, Homo sapiens; identical to SEQ ID NO: 811220

SEQ ID NO: 811233 - protein, 441 aa, Homo sapiens
LTHLISFQHLIRAFNISPPFQHLIAPSNIAYLLPTSHPAFQHLMSLPTSHLSFQHLIPFLPTSHPPPNISCLLPWPLPTSHASSQHLMAEKLEALITQTRAKQAATMSEVEWRGRTVPVKIDKVRIFLLGLADNEAAIVQAESEETKERLFESMLSECRDAIQVVREELKPDQKQRDYILEGEPGKVSNLQYLHSYLTYIKLSTAIKRNENMAKGLQRALLQQQPEDDSKRSPRPQDLIRLYDIILQNLVELLQLPGLEEDKAFQKEIGLKTLVFKAYRCFFIAQSYVLVKKWSEALVLYDRVLKYANEVNSDAGAFKNSLKDLPDVQELITQVRSEKCSLQAAAILDANDAHQTETSSSQVKDNKPLVERFETFCLDPSLVTKQANLVHFPPGFQPIPCKPLFFDLALNHVAFPPLEDKLEQKTKSGLTGYIKGIFGFRS

SEQ ID NO: 811234 - protein, 208 aa, Homo sapiens; identical to SEQ ID NO: 811222

SEQ ID NO: 811235 - protein, 103 aa, Homo sapiens
LVRSEFRPQPDPGQAPRLGAVSPPRLGEALRPEGASPPVPGTRAAPASRPLPEKQVKGVQGGAVGEAWGPGGSAAAGGLWDLGDVVMDAAVGPGEMKRRGGSP

SEQ ID NO: 811236 - protein, 846 aa, Homo sapiens
VIQRFPELRRRRLGGGAGGSDVAAEGTSPNRILDRHPGLALSLPLGSERPFGLREPRRPSPAHAQPRPLGLCRRNRMAQWNQLQQLDTRYLEQLHQLYSDSFPMELRQFLAPWIESQDWAYAASKESHATLVFHNLLGEIDQQYSRFLQESNVLYQHNLRRIKQFLQSRYLEKPMEIARIVARCLWEESRLLQTAATAAQQGGQANHPTAAVVTEKQQMLEQHLQDVRKRVQDLEQKMKVVENLQDDFDFNYKTLKSQGDMQDLNGNNQSVTRQKMQQLEQMLTALDQMRRSIVSELAGLLSAMEYVQKTLTDEELADWKRRQQIACIGGPPNICLDRLENWITSLAESQLQTRQQIKKLEELQQKVSYKGDPIVQHRPMLEERIVELFRNLMKSAFVVERQPCMPMHPDRPLVIKTGVQFTTKVRLLVKFPELNYQLKIKVCIDKDSGDVAALRGSRKFNILGTNTKVMNMEESNNGSLSAEFKHLTLREQRCGNGGRANCDASLIVTEELHLITFETEVYHQGLKIDLETHSLPVVVISNICQMPNAWASILWYNMLTNNPKNVNFFTKPPIGTWDQVAEVLSWQFSSTTKRGLSIEQLTTLAEKLLGPGVNYSGCQITWAKFCKENMAGKGFSFWVWLDNIIDLVKKYILALWNEGYIMGFISKERERAILSTKPPGTFLLRFSESSKEGGVTFTWVEKDISGKTQIQSVEPYTKQQLNNMSFAEIIMGYKIMDATNILVSPLVYLYPDIPKEEAFGKYCRPESQEHPEADPGSAAPYLKTKFICVTPTTCSNTIDLPMSPRTLDSLMQFGNNGEGAEPSAGGQFESLTFDMELTSECATSPM

SEQ ID NO: 811237 - protein, 846 aa, Homo sapiens; identical to SEQ ID NO: 811236

SEQ ID NO: 811238 - protein, 770 aa, Homo sapiens
MAQWNQLQQLDTRYLEQLHQLYSDSFPMELRQFLAPWIESQDWAYAASKESHATLVFHNLLGEIDQQYSRFLQESNVLYQHNLRRIKQFLQSRYLEKPMEIARIVARCLWEESRLLQTAATAAQQGGQANHPTAAVVTEKQQMLEQHLQDVRKRVQDLEQKMKVVENLQDDFDFNYKTLKSQGDMQDLNGNNQSVTRQKMQQLEQMLTALDQMRRSIVSELAGLLSAMEYVQKTLTDEELADWKRRQQIACIGGPPNICLDRLENWITSLAESQLQTRQQIKKLEELQQKVSYKGDPIVQHRPMLEERIVELFRNLMKSAFVVERQPCMPMHPDRPLVIKTGVQFTTKVRLLVKFPELNYQLKIKVCIDKDSGDVAALRGSRKFNILGTNTKVMNMEESNNGSLSAEFKHLTLREQRCGNGGRANCDASLIVTEELHLITFETEVYHQGLKIDLETHSLPVVVISNICQMPNAWASILWYNMLTNNPKNVNFFTKPPIGTWDQVAEVLSWQFSSTTKRGLSIEQLTTLAEKLLGPGVNYSGCQITWAKFCKENMAGKGFSFWVWLDNIIDLVKKYILALWNEGYIMGFISKERERAILSTKPPGTFLLRFSESSKEGGVTFTWVEKDISGKTQIQSVEPYTKQQLNNMSFAEIIMGYKIMDATNILVSPLVYLYPDIPKEEAFGKYCRPESQEHPEADPGSAAPYLKTKFICVTPTTCSNTIDLPMSPRTLDSLMQFGNNGEGAEPSAGGQFESLTFDMELTSECATSPM

SEQ ID NO: 811239 - protein, 825 aa, Homo sapiens
NTSARYRGLGVKIGRPGLALSLPLGSERPFGLREPRRPSPAHAQPRPLGLCRRNRMAQWNQLQQLDTRYLEQLHQLYSDSFPMELRQFLAPWIESQDWAYAASKESHATLVFHNLLGEIDQQYSRFLQESNVLYQHNLRRIKQFLQSRYLEKPMEIARIVARCLWEESRLLQTAATAAQQGGQANHPTAAVVTEKQQMLEQHLQDVRKRVQDLEQKMKVVENLQDDFDFNYKTLKSQGDMQDLNGNNQSVTRQKMQQLEQMLTALDQMRRSIVSELAGLLSAMEYVQKTLTDEELADWKRRQQIACIGGPPNICLDRLENWITSLAESQLQTRQQIKKLEELQQKVSYKGDPIVQHRPMLEERIVELFRNLMKSAFVVERQPCMPMHPDRPLVIKTGVQFTTKVRLLVKFPELNYQLKIKVCIDKDSGDVAALRGSRKFNILGTNTKVMNMEESNNGSLSAEFKHLTLREQRCGNGGRANCDASLIVTEELHLITFETEVYHQGLKIDLETHSLPVVVISNICQMPNAWASILWYNMLTNNPKNVNFFTKPPIGTWDQVAEVLSWQFSSTTKRGLSIEQLTTLAEKLLGPGVNYSGCQITWAKFCKENMAGKGFSFWVWLDNIIDLVKKYILALWNEGYIMGFISKERERAILSTKPPGTFLLRFSESSKEGGVTFTWVEKDISGKTQIQSVEPYTKQQLNNMSFAEIIMGYKIMDATNILVSPLVYLYPDIPKEEAFGKYCRPESQEHPEADPGSAAPYLKTKFICVTPTTCSNTIDLPMSPRTLDSLMQFGNNGEGAEPSAGGQFESLTFDMELTSECATSPM

SEQ ID NO: 811240 - protein, 846 aa, Homo sapiens; identical to SEQ ID NO: 811236

SEQ ID NO: 811241 - protein, 699 aa, Homo sapiens
MRPAKNHMPLWCFIISWERLTSSIAASCKSRMFSISTIYEESRLLQTAATAAQQGGQANHPTAAVVTEKQQMLEQHLQDVRKRVQDLEQKMKVVENLQDDFDFNYKTLKSQGDMQDLNGNNQSVTRQKMQQLEQMLTALDQMRRSIVSELAGLLSAMEYVQKTLTDEELADWKRRQQIACIGGPPNICLDRLENWITSLAESQLQTRQQIKKLEELQQKVSYKGDPIVQHRPMLEERIVELFRNLMKSAFVVERQPCMPMHPDRPLVIKTGVQFTTKVRLLVKFPELNYQLKIKVCIDKDSGDVAALRGSRKFNILGTNTKVMNMEESNNGSLSAEFKHLTLREQRCGNGGRANCDASLIVTEELHLITFETEVYHQGLKIDLETHSLPVVVISNICQMPNAWASILWYNMLTNNPKNVNFFTKPPIGTWDQVAEVLSWQFSSTTKRGLSIEQLTTLAEKLLGPGVNYSGCQITWAKFCKENMAGKGFSFWVWLDNIIDLVKKYILALWNEGYIMGFISKERERAILSTKPPGTFLLRFSESSKEGGVTFTWVEKDISGKTQIQSVEPYTKQQLNNMSFAEIIMGYKIMDATNILVSPLVYLYPDIPKEEAFGKYCRPESQEHPEADPGSAAPYLKTKFICVTPTTCSNTIDLPMSPRTLDSLMQFGNNGEGAEPSAGGQFESLTFDMELTSECATSPM

SEQ ID NO: 811242 - protein, 945 aa, Homo sapiens
VIQRFPELRRRRLGGGAGGSDVAAEGTSPNRILDRHPGLALSLPLGSERPFGLREPRRPSPAHAQPRPLGLCRRNRMAQWNQLQQLDTRYLEQLHQLYSDSFPMELRQFLAPWIESQDWAYAASKESHATLVFHNLLGEIDQQYSRFLQESNVLYQHNLRRIKQFLQSRYLEKPMEIARIVARCLWEESRLLQTAATAAQQGGQANHPTAAVVTEKQQMLEQHLQDVRKRVQDLEQKMKVVENLQDDFDFNYKTLKSQGDMQDLNGNNQSVTRQKMQQLEQMLTALDQMRRVRARSDHFPHVSRSLAGFQRLVAELAWFLRSSCSGVDKRMWLETAEEMFSDFVLVSNQSIVSELAGLLSAMEYVQKTLTDEELADWKRRQQIACIGGPPNICLDRLENWITSLAESQLQTRQQIKKLEELQQKVSYKGDPIVQHRPMLEERIVELFRNLMKRYLASLSLSLIYKIPKDSRGRVRGGLTSGHGRAREPIFSFLSAFVVERQPCMPMHPDRPLVIKTGVQFTTKVRLLVKFPELNYQLKIKVCIDKDSGDVAALRGSRKFNILGTNTKVMNMEESNNGSLSAEFKHLTLREQRCGNGGRANCDASLIVTEELHLITFETEVYHQGLKIDLETHSLPVVVISNICQMPNAWASILWYNMLTNNPKNVNFFTKPPIGTWDQVAEVLSWQFSSTTKRGLSIEQLTTLAEKLLGPGVNYSGCQITWAKFCKENMAGKGFSFWVWLDNIIDLVKKYILALWNEGYIMGFISKERERAILSTKPPGTFLLRFSESSKEGGVTFTWVEKDISGKTQIQSVEPYTKQQLNNMSFAEIIMGYKIMDATNILVSPLVYLYPDIPKEEAFGKYCRPESQEHPEADPGSAAPYLKTKFICVTPTTCSNTIDLPMSPRTLDSLMQFGNNGEGAEPSAGGQFESLTFDMELTSECATSPM

SEQ ID NO: 811243 - protein, 828 aa, Homo sapiens
VIQRFPELRRRRLGGGAGGSDVAAEGTSPNRILDRHPGLALSLPLGSERPFGLREPRRPSPAHAQPRPLGLCRRNRMAQWNQLQQLDTRYLEQLHQLYSDSFPMELRQFLAPWIESQDWAYAASKESHATLVFHNLLGEIDQQYSRFLQESNVLYQHNLRRIKQFLQSRYLEKPMEIARIVARCLWEESRLLQTAATAAQQGGQANHPTAAVVTEKQQMLEQHLQDVRKRVQDLEQKMKVVENLQDDFDFNYKTLKSQGDMQDLNGNNQSVTRQKMQQLEQMLTALDQMRRSIVSELAGLLSAMEYVQKTLTDEELADWKRRQQIACIGGPPNICLDRLENWITSLAESQLQTRQQIKKLEELQQKVSYKGDPIVQHRPMLEERIVELFRNLMKSAFVVERQPCMPMHPDRPLVIKTGVQFTTKVRLLVKFPELNYQLKIKVCIDKDSGDVAALRGSRKFNILGTNTKVMNMEESNNGSLSAEFKHLTLREQRCGNGGRANCDASLIVTEELHLITFETEVYHQGLKIDLETHSLPVVVISNICQMPNAWASILWYNMLTNNPKNVNFFTKPPIGTWDQVAEVLSWQFSSTTKRGLSIEQLTTLAEKLLGPGVNYSGCQITWAKFCKENMAGKGFSFWVWLDNIIDLVKERERAILSTKPPGTFLLRFSESSKEGGVTFTWVEKDISGKTQIQSVEPYTKQQLNNMSFAEIIMGYKIMDATNILVSPLVYLYPDIPKEEAFGKYCRPESQEHPEADPGSAAPYLKTKFICVTPTTCSNTIDLPMSPRTLDSLMQFGNNGEGAEPSAGGQFESLTFDMELTSECATSPM

SEQ ID NO: 811244 - protein, 778 aa, Homo sapiens
VIQRFPELRRRRLGGGAGGSDVAAEGTSPNRILDRHPGLALSLPLGSERPFGLREPRRPSPAHAQPRPLGLCRRNRMAQWNQLQQLDTRYLEQLHQLYSDSFPMELRQFLAPWIESQDWAYAASKESHATLVFHNLLGEIDQQYSRFLQESNVLYQHNLRRIKQFLQSRYLEKPMEIARIVARCLWEESRLLQTAATAAQQGGQANHPTAAVVTEKQQMLEQHLQDVRKRVQDLEQKMKVVENLQDDFDFNYKTLKSQGDMQDLNGNNQSVTRQKMQQLEQMLTALDQMRRSIVSELAGLLSAMEYVQKTLTDEELADWKRRQQIACIGGPPNICLDRLENWITSLAESQLQTRQQIKKLEELQQKVSYKGDPIVQHRPMLEERIVELFRNLMKSAFVVERQPCMPMHPDRPLVIKTGVQFTTKVRLLVKFPELNYQLKIKVCIDKDSGDVAALRGSRKFNILGTNTKVMNMEESNNGSLSAEFKHLTLREQRCGNGGRANCDASLIVTEELHLITFETEVYHQGLKIDLETHSLPVVVISNICQMPNAWASILWYNMLTNNPKNVNFFTKPPIGTWDQVAEVLSWQFSSTTKRGLSIEQLTTLAEKLLGPGVNYSGCQITWAKFCKENMAGKGFSFWVWLDNIIDLVKKYILALWNEGYIMGFISKERERAILSTKPPGTFLLRFSESSKEGGVTFTWVEKDISGKTQIQSVEPYTKQQLNNMSFAEIIMGYKIMDATNILVSPLVYLYPDIPKEEAFGKYCRPESQEHPEADPGSC

SEQ ID NO: 811245 - protein, 566 aa, Homo sapiens
MFSDFVLVSNQSIVSELAGLLSAMEYVQKTLTDEELADWKRRQQIACIGGPPNICLDRLENWITSLAESQLQTRQQIKKLEELQQKVSYKGDPIVQHRPMLEERIVELFRNLMKSAFVVERQPCMPMHPDRPLVIKTGVQFTTKVRLLVKFPELNYQLKIKVCIDKDSGDVAALRGSRKFNILGTNTKVMNMEESNNGSLSAEFKHLTLREQRCGNGGRANCDASLIVTEELHLITFETEVYHQGLKIDLETHSLPVVVISNICQMPNAWASILWYNMLTNNPKNVNFFTKPPIGTWDQVAEVLSWQFSSTTKRGLSIEQLTTLAEKLLGPGVNYSGCQITWAKFCKENMAGKGFSFWVWLDNIIDLVKKYILALWNEGYIMGFISKERERAILSTKPPGTFLLRFSESSKEGGVTFTWVEKDISGKTQIQSVEPYTKQQLNNMSFAEIIMGYKIMDATNILVSPLVYLYPDIPKEEAFGKYCRPESQEHPEADPGSAAPYLKTKFICVTPTTCSNTIDLPMSPRTLDSLMQFGNNGEGAEPSAGGQFESLTFDMELTSECATSPM

SEQ ID NO: 811246 - protein, 798 aa, Homo sapiens
VIQRFPELRRRRLGGGAGGSDVAAEGTSPNRILDRHPGLALSLPLGSERPFGLREPRRPSPAHAQPRPLGLCRRNRMAQWNQLQQLDTRYLEQLHQLYSDSFPMELRQFLAPWIESQDWAYAASKESHATLVFHNLLGEIDQQYSRFLQESNVLYQHNLRRIKQFLQSRYLEKPMEIARIVARCLWEESRLLQTAATAAQQGGQANHPTAAVVTEKQQMLEQHLQDVRKRVQDLEQKMKVVENLQDDFDFNYKTLKSQGDMQDLNGNNQSVTRQKMQQLEQMLTALDQMRRSIVSELAGLLSAMEYVQKTLTDEELADWKRRQQIACIGGPPNICLDRLENWITSLAESQLQTRQQIKKLEELQQKVSYKGDPIVQHRPMLEERIVELFRNLMKSAFVVERQPCMPMHPDRPLVIKTGVQFTTKVRLLVKFPELNYQLKIKVCIDKDSGDVAALRGSRKFNILGTNTKVMNMEESNNGSLSAEFKHLTLREQRCGNGGRANCDASLIVTEELHLITFETEVYHQGLKIDLETHSLPVVVISNICQMPNAWASILWYNMLTNNPKNVNFFTKPPIGTWDQVAEVLSWQFSSTTKRGLSIEQLTTLAEKLLGPGVNYSGCQITWAKFCKENMAGKGFSFWVWLDNIIDLVKKYILALWNEGYIMGFISKERERAILSTKPPGTFLLRFSESSKEGGVTFTWVEKDISGKTQIQSVEPYTKQQLNNMSFAEIIMGYKIMDATNILVSPLVYLYPDIPKEEAFGKYCRPESQEHPEADPGSAAPYLKTKFICVTPFIDAVWK

SEQ ID NO: 811247 - protein, 778 aa, Homo sapiens; identical to SEQ ID NO: 811244

SEQ ID NO: 811248 - protein, 263 aa, Homo sapiens
PKDPRSCRYQRGLSIEQLTTLAEKLLGPGVNYSGCQITWAKFCKENMAGKGFSFWVWLDNIIDLVKKYILALWNEGYIMGFISKERERAILSTKPPGTFLLRFSESSKEGGVTFTWVEKDISGKTQIQSVEPYTKQQLNNMSFAEIIMGYKIMDATNILVSPLVYLYPDIPKEEAFGKYCRPESQEHPEADPGSAAPYLKTKFICVTPTTCSNTIDLPMSPRTLDSLMQFGNNGEGAEPSAGGQFESLTFDMELTSECATSPM

SEQ ID NO: 811249 - protein, 265 aa, Homo sapiens
NTSARYEAGCLNRPREHRAADYTGRETLGPGVNYSGCQITWAKFCKENMAGKGFSFWVWLDNIIDLVKKYILALWNEGYIMGFISKERERAILSTKPPGTFLLRFSESSKEGGVTFTWVEKDISGKTQIQSVEPYTKQQLNNMSFAEIIMGYKIMDATNILVSPLVYLYPDIPKEEAFGKYCRPESQEHPEADPGSAAPYLKTKFICVTPTTCSNTIDLPMSPRTLDSLMQFGNNGEGAEPSAGGQFESLTFDMELTSECATSPM

SEQ ID NO: 811250 - protein, 798 aa, Homo sapiens; identical to SEQ ID NO: 811246

SEQ ID NO: 811251 - protein, 66 aa, Homo sapiens
SSVPDLTTRLPTTCSNTIDLPMSPRTLDSLMQFGNNGEGAEPSAGGQFESLTFDMELTSECATSPM

SEQ ID NO: 811252 - protein, 456 aa, Homo sapiens
VIQRFPELRRRRLGGGAGGSDVAAEGTSPNRILDRHPGLALSLPLGSERPFGLREPRRPSPAHAQPRPLGLCRRNRMAQWNQLQQLDTRYLEQLHQLYSDSFPMELRQFLAPWIESQDWAYAASKESHATLVFHNLLGEIDQQYSRFLQESNVLYQHNLRRIKQFLQSRYLEKPMEIARIVARCLWEESRLLQTAATAAQQGGQANHPTAAVVTEKQQMLEQHLQDVRKRVQDLEQKMKVVENLQDDFDFNYKTLKSQGDMQDLNGNNQSVTRQKMQQLEQMLTALDQMRRSIVSELAGLLSAMEYVQKTLTDEELADWKRRQQIACIGGPPNICLDRLENWITSLAESQLQTRQQIKKLEELQQKVSYKGDPIVQHRPMLEERIVELFRNLMKSAFVVERQPCMPMHPDRPLVIKTGVQFTTKVRLLVKFPELNYQLKIKVCIDKDSGDVAALRG

SEQ ID NO: 811253 - protein, 220 aa, Homo sapiens
VIQRFPELRRRRLGGGAGGSDVAAEGTSPNRILDRHPGLALSLPLGSERPFGLREPRRPSPAHAQPRPLGLCRRNRMAQWNQLQQLDTRYLEQLHQLYSDSFPMELRQFLAPWIESQDWAYAASKESHATLVFHNLLGEIDQQYSRFLQESNVLYQHNLRRIKQFLQSRYLEKPMEIARIVARCLWEESRLLQTAATAAQVRPETKQIPGLGGMENQTTL

SEQ ID NO: 811254 - protein, 118 aa, Homo sapiens
GSPCVVQADHELLGSSDPPNSASQSAGITGVSHCTWPTGSLLLGILPAGPACIFFEVLASFEFSSETLYFLFPRKSFFTSVFLFAYFKQDLEQKMKVVENLQDDFDFNYKTLKSQGGK

SEQ ID NO: 811255 - protein, 151 aa, Homo sapiens
VTQHLGAKVSGKTQIQSVEPYTKQQLNNMSFAEIIMGYKIMDATNILVSPLVYLYPDIPKEEAFGKYCRPESQEHPEADPGSAAPYLKTKFICVTPTTCSNTIDLPMSPRTLDSLMQFGNNGEGAEPSAGGQFESLTFDMELTSECATSPM

SEQ ID NO: 811256 - protein, 541 aa, Homo sapiens
VIQRFPELRRRRLGGGAGGSDVAAEGTSPNRILDRHPGLALSLPLGSERPFGLREPRRPSPAHAQPRPLGLCRRNRMAQWNQLQQLDTRYLEQLHQLYSDSFPMELRQFLAPWIESQDWAYAASKESHATLVFHNLLGEIDQQYSRFLQESNVLYQHNLRRIKQFLQSRYLEKPMEIARIVARCLWEESRLLQTAATAAQQGGQANHPTAAVVTEKQQMLEQHLQDVRKRVQDLEQKMKVVENLQDDFDFNYKTLKSQGDMQDLNGNNQSVTRQKMQQLEQMLTALDQMRRSIVSELAGLLSAMEYVQKTLTDEELADWKRRQQIACIGGPPNICLDRLENWITSLAESQLQTRQQIKKLEELQQKVSYKGDPIVQHRPMLEERIVELFRNLMKSAFVVERQPCMPMHPDRPLVIKTGVQFTTKVRLLVKFPELNYQLKIKVCIDKDSGDVAALRGSRKFNILGTNTKVMNMEESNNGSLSAEFKHLTLREQRCGNGGRANCDASLIVTEELHLITFETEVYHQGLKIDLERFTSFNTSGD

SEQ ID NO: 811257 - protein, 168 aa, Homo sapiens
VIQRFPELRRRRLGGGAGGSDVAAEGTSPNRILDRHPGLALSLPLGSERPFGLREPRRPSPAHAQPRPLGLCRRNRMAQWNQLQQLDTRYLEQLHQLYSDSFPMELRQFLAPWIESQDWAYAASKESHATLVFHNLLGEIDQQYSRFLQESNVLYQHNLRRIKQFLQV

SEQ ID NO: 811258 - protein, 109 aa, Homo sapiens
MELDPQAKGAPLQGRSAGSRRLLDRDRGELAAAHNGHGLGGGVRTIALCLRIPVTLRGRPQAGLPQLRGLSGPGVSTLTSGPGRWGRPLVMFRSSGPLPVKGRSSRANC

SEQ ID NO: 811259 - protein, 102 aa, Homo sapiens
HREMGRSPWLGSGRACRRVYCSLSLSLSISLHLSHHTHTHSVLLRENSEKVEFSVGKGYIFPTSHVSLKMGLLLIILLASLYLGKRKRELPERSWEERTKHT

SEQ ID NO: 811260 - protein, 128 aa, Homo sapiens
PPPPRVRPLHSQSAVGARGITGVVVLYARGARRAPMELDPQAKGAPLQGRSAGSRRLLDRDRGELAAAHNGHGLGGGVRTIALCLRIPEPAGPPEVCVLPVPAARRAGLYTCAKDTNGSISKSVLSPK

SEQ ID NO: 811261 - protein, 1301 aa, Homo sapiens
PEASAALQVRATKDYCNNYDLTSLNVKAGDIITVLEQHPDGRWKGCIHDNRTGNDRVGYFPSSLGEAIVKRAGSRAGTEPSLPQGSSSSGPSAPPEEIWVLRKPFAGGDRSGSISGMAGGRGSGGHALHAGSEGVKLLATVLSQKSVSESGPGDSPAKPPEGSAGVARSQPPVAHAGQVYGEQPPKKLEPASEGKSSEAVSQWLTAFQLQLYAPNFISAGYDLPTISRMTPEDLTAIGVTKPGHRKKIAAEISGLSIPDWLPEHKPANLAVWLSMIGLAQYYKVLVDNGYENIDFITDITWEDLQEIGITKLGHQKKLMLAVRKLAELQKAEYAKYEGGPLRRKAPQSLEVMAIESPPPPEPTPADCQSPKMTTFQDSELSDELQAAMTGPAEVGPTTEKPSSHLPPTPRATTRQDSSLGGRARHMSSSQELLGDGPPGPSSPMSRSQEYLLDEGPAPGTPPREARPGRHGHSIKRASVPPVPGKPRQVLPPGTSHFTPPQTPTKTRPGSPQALGGPHGPAPATAKVKPTPQLLPPTERPMSPRSLPQSPTHRGFAYVLPQPVEGEVGPAAPGPAPPPVPTAVPTLCLPPEADAEPGRPKKRAHSLNRYAASDSEPERDELLVPAAAGPYATVQRRVGRSHSVRAPAGADKNVNRSQSFAVRPRKKGPPPPPPKRSSSALASANLADEPVPDAEPEDGLLGVRAQCRRASDLAGSVDTGSAGSVKSIAAMLELSSIGGGGRAARRPPEGHPTPRPASPEPGRVATVLASVKHKEAIGPGGEVVNRRRTLSGPVTGLLATARRGPGESADPGPFVEDGTGRQRPRGPSKGEAGVEGPPLAKVEASATLKRRIRAKQNQQENVKFILTESDTVKRRPKAKEREAGPEPPPPLSVYHNGTGTVRRRPASEQAGPPELPPPPPPAEPPPTDLAHLPPLPPPEGEARKPAKPPVSPKPVLTQPVPKLQGSPTPTSKKVPLPGPWQPRGEARPRHATARVSQAAAAAHSAQARQGGRGAAFGQRRPFTRTLARATAARRPRQAARYAALAGRQPRQAPVPRRARAARARQAPASRRRRRRRRRRAPRPARRRLVRGQRPAETGGDKRVPCRGAAGGGGEDPAGGRAGPARLGGGKEHWQHPGRHRQHVRRPGRPAGCHAGVNAAWPGPPAPPGPSPHTDLYLRMGASGRGASGRAGPCRSTTPAPGPGPGRPPGTAWPGAPRALGRPCARGSSPPAAPRAIPAGPPARAGGEGAPGPGMGQRTGPGPAQNCPSGRPASRSGAAQGTGDQGQGPPAPPHPQNISYQEY

SEQ ID NO: 811262 - protein, 1301 aa, Homo sapiens; identical to SEQ ID NO: 811261

SEQ ID NO: 811263 - protein, 1359 aa, Homo sapiens
MAEAGLRGWLLWALLLRLAQSEPYTTIHQPGYCAFYDECGKNPELSGSLMTLSNVSCLSNTPARKITGDHLILLQKICPRLYTGPNTQACCSAKQLVSLEASLSITKALLTRCPACSDNFVNLHCHNTCSPNQSLFINVTRVAQLGAGQLPAVVAYEAFYQHSFAEQSYDSCSRVRVPAAATLAVGTMCGVYGSALCNAQRWLNFQGDTGNGLAPLDITFHLLEPGQAVGSGIQPLNEGVARCNESQGDDVATCSCQDCAASCPAIARPQALDSTFYLGQMPGSLVLIIILCSVFAVVTILLVGFRVAPARDKSKMVDPKKGTSLSDKLSFSTHTLLGQFFQGWGTWVASWPLTILVLSVIPVVALAAGLVFTELTTDPVELWSAPNSQARSEKAFHDQHFGPFFRTNQVILTAPNRSSYRYDSLLLGPKNFSGILDLDLLLELLELQERLRHLQVWSPEAQRNISLQDICYAPLNPDNTSLYDCCINSLLQYFQNNRTLLLLTANQTLMGQTSQVDWKDHFLYCANAPLTFKDGTALALSCMADYGAPVFPFLAIGGYKGKDYSEAEALIMTFSLNNYPAGDPRLAQAKLWEEAFLEEMRAFQRRMAGMFQVTFMAERSLEDEINRTTAEDLPIFATSYIVIFLYISLALGSYSSWSRVMVDSKATLGLGGVAVVLGAVMAAMGFFSYLGIRSSLVILQVVPFLVLSVGADNIFIFVLEYQRLPRRPGEPREVHIGRALGRVAPSMLLCSLSEAICFFLGALTPMPAVRTFALTSGLAVILDFLLQMSAFVALLSLDSKRQEASRLDVCCCVKPQELPPPGQGEGLLLGFFQKAYAPFLLHWITRGVVLLLFLALFGVSLYSMCHISVGLDQELALPKDSYLLDYFLFLNRYFEVGAPVYFVTTLGYNFSSEAGMNAICSSAGCNNFSFTQKIQYATEFPEQSYLAIPASSWVDDFIDWLTPSSCCRLYISGPNKDKFCPSTVNSLNCLKNCMSITMGSVRPSVEQFHKYLPWFLNDRPNIKCPKGGLAAYSTSVNLTSDGQVLDTVAILSPRLEYSGTISAHCNLYLLDSASRFMAYHKPLKNSQDYTEALRAARELAANITADLRKVPGTDPAFEVFPYTITNVFYEQYLTILPEGLFMLSLCLVPTFAVSCLLLGLDLRSGLLNLLSIVMILVDTVGFMALWGISYNAVSLINLVSAVGMSVEFVSHITRSFAISTKPTWLERAKEATISMGSAVFAGVAMTNLPGILVLGLAKAQLIQIFFFRLNLLITLLGLLHGLVFLPVILSYVGPDVNPALALEQKRAEEAVAAVMVASCPNHPSRVSTADNIYVNHSFEGSIKGAGAISNFLPNNGRQF

SEQ ID NO: 811264 - protein, 724 aa, Homo sapiens
MAEAGLRGWLLWALLLRLAQSEPYTTIHQPGYCAFYDECGKNPELSGSLMTLSNVSCLSNTPARKITGDHLILLQKICPRLYTGPNTQACCSAKQLVSLEASLSITKALLTRCPACSDNFVNLHCHNTCSPNQSLFINVTRVAQLGAGQLPAVVAYEAFYQHSFAEQSYDSCSRVRVPAAATLAVGTMCGVYGSALCNAQRWLNFQGDTGNGLAPLDITFHLLEPGQAVGSGIQPLNEGVARCNESQGDDVATCSCQDCAASCPAIARPQALDSTFYLGQMPGSLVLIIILCSVFAVVTILLVGFRVAPARDKSKMVDPKKGTSLSDKLSFSTHTLLGQFFQGWGTWVASWPLTILVLSVIPVVALAAGLVFTELTTDPVELWSAPNSQARSEKAFHDQHFGPFFRTNQVILTAPNRSSYRYDSLLLGPKNFSGILDLDLLLELLELQERLRHLQVWSPEAQRNISLQDICYAPLNPDNTSLYDCCINSLLQYFQNNRTLLLLTANQTLMGQTSQVDWKDHFLYCANAPLTFKDGTALALSCMADYGAPVFPFLAIGGYKGKDYSEAEALIMTFSLNNYPAGDPRLAQAKLWEEAFLEEMRAFQRRMAGMFQVTFMAERSLEDEINRTTAEDLPIFATSYIVIFLYISLALGSYSSWSRVMVDSKATLGLGGVAVVLGAVMAAMGFFSYLGIRSSLVILQVVPFLVLSVGADNIFIFVLEYQGP

SEQ ID NO: 811265 - protein, 84 aa, Homo sapiens
  misc_feature (9)..(9): Xaa can be any naturally occurring amino acid
ELYPGVFGXPPEQPIYVLPSVEQFHKYLPWFLNDRPNIKCPKGGLAAYSTSVNLTSDGQVLGKHGLAWRGGHKSVALEGPRKPQ

SEQ ID NO: 811266 - protein, 1359 aa, Homo sapiens; identical to SEQ ID NO: 811263

SEQ ID NO: 811267 - protein, 191 aa, Homo sapiens
MDWGGPALGIPHLCRVSLLPLPTCVGSFFLGTHRAAPVLTPIECRVSREANQCSRGPGSKVPTHPPGLRFFPVAEDGVMAPRTLLLLLSGALVLTQTWAGFHSLRYFHTTMSRPGRADPRFLSVGDVDDTQCVRLDSDATSPRMEPRAPWMEQEGPEYWEEETGTAKAKAQFYRVNLRTLSGYYNQSEACE

SEQ ID NO: 811268 - protein, 106 aa, Homo sapiens
MAPRTLLLLLSGALVLTQTWAGFHSLRYFHTTMSRPGRADPRFLSVGDVDDTQCVRLDSDATSPRMEPEGPEYWEEETGTAKAKAQFYRVNLRTLSGYYNQSEACE

SEQ ID NO: 811269 - protein, 206 aa, Homo sapiens
MSWTHTETQGYGMKGKLTLWQQAPWGDFSSRRVHGDRVSLLPLPTCVGSFFLGTHRAAPVLTPIECRVSREANQCSRGPGSKVPTHPPGLRFFPVAEDGVMAPRTLLLLLSGALVLTQTWAGFHSLRYFHTTMSRPGRADPRFLSVGDVDDTQCVRLDSDATSPRMEPEGPEYWEEETGTAKAKAQFYRVNLRTLSGYYNQSEACE

SEQ ID NO: 811270 - protein, 256 aa, Homo sapiens
VPGPRGSGKGDCGELGATAGMDQSSEGCMKKISSVNLDKLINDFSQIEKKMVETNGKNNILDIQLEKSNCLLKVMQAKEVSIKEECATLHNIIKGLQQTIEYQQNLKGENEQLKISADLIKEKLKSHEQEYKNNIAKLVSEMKIKEEGYKKEISKLYQDMQRKVELNEEKHKELIEKKEMEISELNAKLRSQEKEKQNEIIKLQLEFDAKLARVQTKSKSYQDSTVLPQSIYRRKLQHFQEEKTRRLQFFVIPFAI

SEQ ID NO: 811271 - protein, 155 aa, Homo sapiens
MESLQTPQHRENQDKREKEYGVKHMPMGNNAGNLEPEKRKAVRVALSSATAAQNIPSSVHCGCSKQWRLRLPSESLQSRGQVMKRPNNILKLRNLDLLIYPWPELRRRQVASDLMSLLLLPAFSGLTWAPFLFLFTYLPPFLNLLTVGFVSYFLV

SEQ ID NO: 811272 - protein, 213 aa, Homo sapiens
MVSRGLALSGRLCSPLSSNPVSTFQCFGILALCLYSLFCICLASGTHNPSPCPSEPVAMESLQTPQHRENQDKREKEYGVKHMPMGNNAGNLEPEKRKAVRVALSSATAAQNIPSSVHCGCSKQWRLRLPSESLQSRGQVMKRPNNILKLRNLDLLIYPWPELRRRQVASDLMSLLLLPAFSGLTWAPFLFLFTYLPPFLNLLTVGFVSYFLV

SEQ ID NO: 811273 - protein, 84 aa, Homo sapiens
GFSTEVQDFSGSYRAVKSLRPLQETESFRSCTTPVCLAFPSSSLPRQHSVAVCLLARQSSAQSNDSTQLALGRSSSPELPASIV

SEQ ID NO: 811274 - protein, 1156 aa, Homo sapiens
MFPAAPSPRTPGTGSRRGPLAGLGPGSTPRTASRKGLPLGSAVSSPVLFSPVGRRSSLSSRGTPTRMFPHHSITESVNYDVKTFGSSLPVKVMEALTLAEVDDQLTINIDEGGWACLVCKEKLIIWKIALSPITKLSVCKELQLPPSDFHWSADLVALSYSSPSGEAHSTQAVAVMVATREGSIRYWPSLAGEDTYTEAFVDSGGDKTYSFLTAVQGGSFILSSSGSQLIRLIPESSGKIHQHILPQGQGMLSGIGRKVSSLFGILSPSSDLTLSSVLWDRERSSFYSLTSSNISKWELDDSSEKHAYSWDINRALKENITDAIWGSESNYEAIKEGVNIRYLDLKQNCDGLVILAAAWHSADNPCLIYYSLITIEDNGCQMSDAVTVEVTQYNPPFQSEDLILCQLTVPNFSNQTAYLYNESAVYVCSTGTGKFSLPQEKIVFNAQGDSVLGAGACGGVPIIFSRNSGLVSITSRENVSILAEDLEGSLASSVAGPNSESMIFETTTKNETIAQEDKIKLLKAAFLQYCRKDLGHAQMVVDELFSSHSDLDSDSELDRAVTQISVDLMDDYPASDPRWAESVPEEAPGFSNTSLIILHQLEDKMKAHSFLMDFIHQVGLFGRLGSFPVRGTPMATRLLLCEHAEKLSAAIVLKNHHSRLSDLVNTAILIALNKREYEIPSNLTPADVFFREVSQVDTICECLLEHEEQVLRDAPMDSIEWAEVVINVNNILKDMLQAASHYRQNRNSLYRREESLEKEPEYVPWTATSGPGGIRTVIIRQHEIVLKVAYPQADSNLRNIVTEQLVALIDCFLDGYVSQLKSVDKSSNRERYDNLEMEYLQKRSDLLSPLLSLGQYLWAASLAEKYCDFDILVQMCEQTDNQSRLQRYMTQFADQNFSDFLFRWYLEKGKRGKLLSQPISQHGQLANFLQAHEHLSWLHEINSQELEKAHATLLGLANMETRYFAKKKTLLGLSKLAALASDFSEDMLQEKIEEMAEQERFLLHQETLPEQLLAEKQLNLSAMPVLTAPQLIGLYICEENRRANEYDFKKALDLLEYIDEEEDININDLKLEILCKALQRDNWSSSDGKDDPIEVSKDSIFVKILQKLLKDGIQLSEYLPEVKDLLQADQLGSLKSNPYFEFVLKANYEYYVQGQI

SEQ ID NO: 811275 - protein, 981 aa, Homo sapiens
MVATREGSIRYWPSLAGEDTYTEAFVDSGGDKTYSFLTAVQGGSFILSSSGSQLIRLIPESSGKIHQHILPQGQGMLSGIGRKVSSLFGILSPSSDLTLSSVLWDRERSSFYSLTSSNISKWELDDSSEKHAYSWDINRALKENITDAIWGSESNYEAIKEGVNIRYLDLKQNCDGLVILAAAWHSADNPCLIYYSLITIEDNGCQMSDAVTVEVTQYNPPFQSEDLILCQLTVPNFSNQTAYLYNESAVYVCSTGTGKFSLPQEKIVFNAQGDSVLGAGACGGVPIIFSRNSGLVSITSRENVSILAEDLEGSLASSVAGPNSESMIFETTTKNETIAQEDKIKLLKAAFLQYCRKDLGHAQMVVDELFSSHSDLDSDSELDRAVTQISVDLMDDYPASDPRWAESVPEEAPGFSNTSLIILHQLEDKMKAHSFLMDFIHQVGLFGRLGSFPVRGTPMATRLLLCEHAEKLSAAIVLKNHHSRLSDLVNTAILIALNKREYEIPSNLTPADVFFREVSQVDTICECLLEHEEQVLRDAPMDSIEWAEVVINVNNILKDMLQAASHYRQNRNSLYRREESLEKEPEYVPWTATSGPGGIRTVIIRQHEIVLKVAYPQADSNLRNIVTEQLVALIDCFLDGYVSQLKSVDKSSNRERYDNLEMEYLQKRSDLLSPLLSLGQYLWAASLAEKYCDFDILVQMCEQTDNQSRLQRYMTQFADQNFSDFLFRWYLEKGKRGKLLSQPISQHGQLANFLQAHEHLSWLHEINSQELEKAHATLLGLANMETRYFAKKKTLLGLSKLAALASDFSEDMLQEKIEEMAEQERFLLHQETLPEQLLAEKQLNLSAMPVLTAPQLIGLYICEENRRANEYDFKKALDLLEYIDEEEDININDLKLEILCKALQRDNWSSSDGKDDPIEVSKDSIFVKILQKLLKDGIQLSEYLPEVKDLLQADQLGSLKSNPYFEFVLKANYEYYVQGQI

SEQ ID NO: 811276 - protein, 981 aa, Homo sapiens; identical to SEQ ID NO: 811275

SEQ ID NO: 811277 - protein, 422 aa, Homo sapiens [sequence omitted]

SEQ ID NO: 811278 - protein, 997 aa, Homo sapiens
MFPAAPSPRTPGTGSRRGPLAGLGPGSTPRTASRKGLPLGSAVSSPVLFSPVGRRSSLSSRGTPTRMFPHHSITESVNYDVKTFGSSLPVKVMEALTLAEVDDQLTINIDEGGWACLVCKEKLIIWKIALSPITKLSVCKELQLPPSDFHWSADLVALSYSSPSGEAHSTQAVAVMVATREGSIRYWPSLAGEDTYTEAFVDSGGDKTYSFLTAVQGGSFILSSSGSQLIRLIPESSGKIHQHILPQGQGMLSGIGRKVSSLFGILSPSSDLTLSSVLWDRERSSFYSLTSSNISKWELDDSSEKHAYSWDINRALKENITDAIWGSESNYEAIKEGVNIRYLDLKQNCDGLVILAAAWHSADNPCLIYYSLITIEDNGCQMSDAVTVEVTQYNPPFQSEDLILCQLTVPNFSNQTAYLYNESAVYVCSTGTGKFSLPQEKIVFNAQGDSVLGAGACGGVPIIFSRNSGLVSITSRENVSILAEDLEGSLASSVAGPNSESMIFETTTKNETIAQEDKIKLLKAAFLQYCRKDLGHAQMVVDELFSSHSDLDSDSELDRAVTQISVDLMDDYPASDPRWAESVPEEAPGFSNTSLIILHQLEDKMKAHSFLMDFIHQVGLFGRLGSFPVRGTPMATRLLLCEHAEKLSAAIVLKNHHSRLSDLVNTAILIALNKREYEIPSNLTPADVFFREVSQVDTICECLLEHEEQVLRDAPMDSIEWAEVVINVNNILKDMLQAASHYRQNRNSLYRREESLEKEPEYVPWTATSGPGGIRTVIIRQHEIVLKVAYPQADSNLRNIVTEQLVALIDCFLDGYVSQLKSVDKSSNRERYDNLEMEYLQKRSDLLSPLLSLGQYLWAASLAEKYCDFDILVQMCEQTDNQSRLQRYMTQFADQNFSDFLFRWYLEKGKRGKLLSQPISQHGQLANFLQAHEHLSWLHEINSQELEKAHATLLGLANMETRYFAKKKTLLGLSKLAALASDFSEDMLQEKIEAIYL

SEQ ID NO: 811279 - protein, 239 aa, Homo sapiens
MSQDGGREMGIQGAHEHLSWLHEINSQELEKAHATLLGLANMETRYFAKKKTLLGLSKLAALASDFSEDMLQEKIEEMAEQERFLLHQETLPEQLLAEKQLNLSAMPVLTAPQLIGLYICEENRRANEYDFKKALDLLEYIDEEEDININDLKLEILCKALQRDNWSSSDGKDDPIEVSKDSIFVKILQKLLKDGIQLSEYLPEVKDLLQADQLGSLKSNPYFEFVLKANYEYYVQGQI

SEQ ID NO: 811280 - protein, 229 aa, Homo sapiens
RKYIEHAQLNTCPGVDKNQRGAHATLLGLANMETRYFAKKKTLLGLSKLAALASDFSEDMLQEKIEEMAEQERFLLHQETLPEQLLAEKQLNLSAMPVLTAPQLIGLYICEENRRANEYDFKKALDLLEYIDEEEDININDLKLEILCKALQRDNWSSSDGKDDPIEVSKDSIFVKILQKLLKDGIQLSEYLPEVKDLLQADQLGSLKSNPYFEFVLKANYEYYVQGQI

SEQ ID NO: 811281 - protein, 1156 aa, Homo sapiens; identical to SEQ ID NO: 811274

SEQ ID NO: 811282 - protein, 1156 aa, Homo sapiens; identical to SEQ ID NO: 811274

SEQ ID NO: 811283 - protein, 1156 aa, Homo sapiens; identical to SEQ ID NO: 811274

SEQ ID NO: 811284 - protein, 1116 aa, Homo sapiens
MFPAAPSPRTPGTGSRRGPLAGLGPGSTPRTASRKGLPLGSAVSSPVLFSPVGRRSSLSSRGTPTRMFPHHSITESVNYDVKTFGSSLPVKVMEALTLAEVDDQLTINIDEGGWACLVCKEKLIIWKIALSPITKLSVCKELQLPPSDFHWSADLVALSYSSPSGEAHSTQAVAVMVATREGSIRYWPSLAGEDTYTEAFVDSGGDKTYSFLTAVQGGSFILSSSGSQLIRLIPESSGKIHQHILPQGQGMLSGIGRKVSSLFGILSPSSDLTLSSVLWDRERSSFYSLTSSNISKWELDDSSEKHAYSWDINRALKENITDAIWGSESNYEAIKEGVNIRYLDLKQNCDGLVILAAAWHSADNPCLIYYSLITIEDNGCQMSDAVTVEVTQYNPPFQSEDLILCQLTVPNFSNQTAYLYNESAVYVCSTGTGKFSLPQEKIVFNAQGDSVLGAGACGGVPIIFSRNSGLVSITSRENVSILAEDLEGSLASSVAGPNSESMIFETTTKNETIAQEDKIKLLKAAFLQYCRKDLGHAQMVVDELFSSHSDLDSDSELDRAVTQISVDLMDDYPASDPRWAESVPEEAPGFSNTSLIILHQLEDKMKAHSFLMDFIHQVGLFGRLGSFPVRGTPMATRLLLCEHAEKLSAAIVLKNHHSRLSDLVNTAILIALNKREYEIPSNLTPADVFFREVSQVDTICECLLEHEEQVLRDAPMDSIEWAEVVINVNNILKDMLQAASHYRQNRNSLYRREESLEKEPEYVPWTATSGPGGIRTVIIRQHEIVLKVAYPQADSNLRNIVTEQLVALIDCFLDGYVSQLKSVDKSSNRERYDNLEMEYLQKRSDLLSPLLSLGQYLWAASLAEKYCDFDILVQMCEQTDNQSRLQRYMTQFADQNFSDFLFRWYLEKGKRGKLLSQPISQHGQLANFLQAHEHLSWLHEINSQELEKAHATLLGLANMETRYFAKKKTLLGLSKLAALASDFSEDMLQEKIEEMAEQERFLLHQETLPEQLLAEKQLNLSAMPVLTAPQLIGLYICEENRRANEYDFKKALDLLEYIDEEEDININDLKLEILCKALQRDNWSSSDGKDDPIEVSKDSIFVKILQKLLKDGIQVQ

SEQ ID NO: 811285 - protein, 1082 aa, Homo sapiens
MFPAAPSPRTPGTGSRRGPLAGLGPGSTPRTASRKGLPLGSAVSSPVLFSPVGRRSSLSSRGTPTRMFPHHSITESVNYDVKTFGSSLPVKVMEALTLAEVDDQLTINIDEGGWACLVCKEKLIIWKIALSPITKLSVCKELQLPPSDFHWSADLVALSYSSPSGEAHSTQAVAVMVATREGSIRYWPSLAGEDTYTEAFVDSGGDKTYSFLTAVQGGSFILSSSGSQLIRLIPESSGKIHQHILPQGQGMLSGIGRKVSSLFGILSPSSDLTLSSVLWDRERSSFYSLTSSNISKWELDDSSEKHAYSWDINRALKENITDAIWGSESNYEAIKEGVNIRYLDLKQNCDGLVILAAAWHSADNPCLIYYSLITIEDNGCQMSDAVTVEVTQYNPPFQSEDLILCQLTVPNFSNQTAYLYNESAVYVCSTGTGKFSLPQEKIVFNAQGDSVLGAGACGGVPIIFSRNSGLVSITSRENVSILAEDLEGSLASSVAGPNSESMIFETTTKNETIAQEDKIKLLKAAFLQYCRKDLGHAQMVVDELFSSHSDLDSDSELDRAVTQISVDLMDDYPASDPRWAESVPEEAPGFSNTSLIILHQLEDKMKAHSFLMDFIHQVGLFGRLGSFPVRGTPMATRLLLCEHAEKLSAAIVLKNHHSRLSDLVNTAILIALNKREYEIPSNLTPADVFFREVSQVDTICECLLEHEEQVLRDAPMDSIEWAEVVINVNNILKDMLQAASHYRQNRNSLYRREESLEKEPEYVPWTATSGPGGIRTVIIRQHEIVLKVAYPQADSNLRNIVTEQLVALIDCFLDGYVSQLKSVDKSSNRERYDNLEMEYLQKRSDLLSPLLSLGQYLWAASLAEKYCDFDILVQMCEQTDNQSRLQRYMTQFADQNFSDFLFRWYLEKGKRGKLLSQPISQHGQLANFLQAHEHLSWLHEINSQELEKAHATLLGLANMETRYFAKKKTLLGLSKLAALASDFSEDMLQEKIEEMAEQERFLLHQETLPEQLLAEKQLNLSAMPVLTAPQLIGLYICEENRRANEYDFKKALDLLEYIDEEEDININDLKLEILCKALQRDK

SEQ ID NO: 811286 - protein, 871 aa, Homo sapiens
MFPAAPSPRTPGTGSRRGPLAGLGPGSTPRTASRKGLPLGSAVSSPVLFSPVGRRSSLSSRGTPTRMFPHHSITESVNYDVKTFGSSLPVKVMEALTLAEVDDQLTINIDEGGWACLVCKEKLIIWKIALSPITKLSVCKELQLPPSDFHWSADLVALSYSSPSGEAHSTQAVAVMVATREGSIRYWPSLAGEDTYTEAFVDSGGDKTYSFLTAVQGGSFILSSSGSQLIRLIPESSGKIHQHILPQGQGMLSGIGRKVSSLFGILSPSSDLTLSSVLWDRERSSFYSLTSSNISKWELDDSSEKHAYSWDINRALKENITDAIWGSESNYEAIKEGVNIRYLDLKQNCDGLVILAAAWHSADNPCLIYYSLITIEDNGCQMSDAVTVEVTQYNPPFQSEDLILCQLTVPNFSNQTAYLYNESAVYVCSTGTGKFSLPQEKIVFNAQGDSVLGAGACGGVPIIFSRNSGLVSITSRENVSILAEDLEGSLASSVAGPNSESMIFETTTKNETIAQEDKIKLLKAAFLQYCRKDLGHAQMVVDELFSSHSDLDSDSELDRAVTQISVDLMDDYPASDPRWAESVPEEAPGFSNTSLIILHQLEDKMKAHSFLMDFIHQVGLFGRLGSFPVRGTPMATRLLLCEHAEKLSAAIVLKNHHSRLSDLVNTAILIALNKREYEIPSNLTPADVFFREVSQVDTICECLLEHEEQVLRDAPMDSIEWAEVVINVNNILKDMLQAASHYRQNRNSLYRREESLEKEPEYVPWTATSGPGGIRTVIIRQHEIVLKVAYPQADSNLRNIVTEQLVALIDCFLDGYVSQLKSVDKSSNRERYDNLEMEYLQKRSDLLSPLRKFMILGKSFKFAEWMKGLNS

SEQ ID NO: 811287 - protein, 652 aa, Homo sapiens
  misc_feature (637)..(637): Xaa can be any naturally occurring amino acid
  misc_feature (644)..(644): Xaa can be any naturally occurring amino acid
  misc_feature (646)..(646): Xaa can be any naturally occurring amino acid
  misc_feature (648)..(648): Xaa can be any naturally occurring amino acid
  misc_feature (651)..(651): Xaa can be any naturally occurring amino acid
MFPAAPSPRTPGTGSRRGPLAGLGPGSTPRTASRKGLPLGSAVSSPVLFSPVGRRSSLSSRGTPTRMFPHHSITESVNYDVKTFGSSLPVKVMEALTLAEVDDQLTINIDEGGWACLVCKEKLIIWKIALSPITKLSVCKELQLPPSDFHWSADLVALSYSSPSGEAHSTQAVAVMVATREGSIRYWPSLAGEDTYTEAFVDSGGDKTYSFLTAVQGGSFILSSSGSQLIRLIPESSGKIHQHILPQGQGMLSGIGRKVSSLFGILSPSSDLTLSSVLWDRERSSFYSLTSSNISKWELDDSSEKHAYSWDINRALKENITDAIWGSESNYEAIKEGVNIRYLDLKQNCDGLVILAAAWHSADNPCLIYYSLITIEDNGCQMSDAVTVEVTQYNPPFQSEDLILCQLTVPNFSNQTAYLYNESAVYVCSTGTGKFSLPQEKIVFNAQGDSVLGAGACGGVPIIFSRNSGLVSITSRENVSILAEDLEGSLASSVAGPNSESMIFETTTKNETIAQEDKIKLLKAAFLQYCRKDLGHAQMVVDELFSSHSDLDSDSELDRAVTQISVDLMDDYPASDPRWAESVPEEAPGFSNTSLIILHQLEDKMKAHSFLMDFIHQVGVIWDVLGRFLQVQKGTPXGHSNCLXLXNXPKXL

SEQ ID NO: 811288 - protein, 611 aa, Homo sapiens
MFPAAPSPRTPGTGSRRGPLAGLGPGSTPRTASRKGLPLGSAVSSPVLFSPVGRRSSLSSRGTPTRMFPHHSITESVNYDVKTFGSSLPVKVMEALTLAEVDDQLTINIDEGGWACLVCKEKLIIWKIALSPITKLSVCKELQLPPSDFHWSADLVALSYSSPSGEAHSTQAVAVMVATREGSIRYWPSLAGEDTYTEAFVDSGGDKTYSFLTAVQGGSFILSSSGSQLIRLIPESSGKIHQHILPQGQGMLSGIGRKVSSLFGILSPSSDLTLSSVLWDRERSSFYSLTSSNISKWELDDSSEKHAYSWDINRALKENITDAIWGSESNYEAIKEGVNIRYLDLKQNCDGLVILAAAWHSADNPCLIYYSLITIEDNGCQMSDAVTVEVTQYNPPFQSEDLILCQLTVPNFSNQTAYLYNESAVYVCSTGTGKFSLPQEKIVFNAQGDSVLGAGACGGVPIIFSRNSGLVSITSRENVSILAEDLEGSLASSVAGPNSESMIFETTTKNETIAQEDKIKLLKAAFLQYCRKDLGHAQMVVDELFSSHSDLDSDSELDRAVTQISVDLMDDYPADNPCLIYYSLITIEDNGCQMSDAVTVEVTQYNPPFQR

SEQ ID NO: 811289 - protein, 524 aa, Homo sapiens
MFPAAPSPRTPGTGSRRGPLAGLGPGSTPRTASRKGLPLGSAVSSPVLFSPVGRRSSLSSRGTPTRMFPHHSITESVNYDVKTFGSSLPVKVMEALTLAEVDDQLTINIDEGGWACLVCKEKLIIWKIALSPITKLSVCKELQLPPSDFHWSADLVALSYSSPSGEAHSTQAVAVMVATREGSIRYWPSLAGEDTYTEAFVDSGGDKTYSFLTAVQGGSFILSSSGSQLIRLIPESSGKIHQHILPQGQGMLSGIGRKVSSLFGILSPSSDLTLSSVLWDRERSSFYSLTSSNISKWELDDSSEKHAYSWDINRALKENITDAIWGSESNYEAIKEGVNIRYLDLKQNCDGLVILAAAWHSADNPCLIYYSLITIEDNGCQMSDAVTVEVTQYNPPFQSEDLILCQLTVPNFSNQTAYLYNESAVYVCSTGTGKFSLPQEKIVFNAQGDSVLGAGACGGVPIIFSRNSGLVSITSRENVSILAEDLEGSLASSVAGPNSEVDRLRPGVGDQPGQHVKTPSLPKK

SEQ ID NO: 811290 - protein, 315 aa, Homo sapiens
MFPAAPSPRTPGTGSRRGPLAGLGPGSTPRTASRKGLPLGSAVSSPVLFSPVGRRSSLSSRGTPTRMFPHHSITESVNYDVKTFGSSLPVKVMEALTLAEVDDQLTINIDEGGWACLVCKEKLIIWKIALSPITKLSVCKELQLPPSDFHWSADLVALSYSSPSGEAHSTQAVAVMVATREGSIRYWPSLAGEDTYTEAFVDSGGDKTYSFLTAVQGGSFILSSSGSQLIRLIPESSGKIHQHILPQGQGMLSGIGRKLSSVLWDRERSSFYSLTSSNISKWELDDSSEKHAYSWDINRALKENITDAIWVRNNN

SEQ ID NO: 811291 - protein, 338 aa, Homo sapiens
MVGRVQPDRKQLPLVLLRLLCLLPTGLPVRSVDFNRGTDNITVRQGDTAILRCVLEDKNSKVAWLNRSGIIFAGHDKWSLDPRVELEKRHSLEYSLRIQKVDVYDEGSYTCSVQTQHEPKTSQVYLIVQVPPKISNISSDVTVNEGSNVTLVCMANGRPEPVITWRHLTPTGREFEGEEEYLEILGITREQSGKYECKAANEVSSADVKQVKVTVNYPPTITESKSNEATTGRQASLKCEASAVPAPDFEWYRDDTRINSANGLEIKSTEGQSSLTVTNVTEEHYGNYTCVAANKLGVTNASLVLFRPGSVRGINGSISLAVPLWLLAASLLCLLSKC

SEQ ID NO: 811292 - protein, 241 aa, Homo sapiens
MVGRVQPDRKQLPLVLLRLLCLLPTGLPVRSVDFNRGTDNITVRQGDTAIPGREFEGEEEYLEILGITREQSGKYECKAANEVSSADVKQVKVTVNYPPTITESKSNEATTGRQASLKCEASAVPAPDFEWYRDDTRINSANGLEIKSTEGQSSLTVTNVTEEHYGNYTCVAANKLGVTNASLVLFKRVLPTIPHPIQEIGTTVHFKQKGPGSVRGINGSISLAVPLWLLAASLLCLLSKC

SEQ ID NO: 811293 - protein, 218 aa, Homo sapiens
MVGRVQPDRKQLPLVLLRLLCLLPTGLPVRSVDFNRGTDNITVRQGDTAIPGREFEGEEEYLEILGITREQSGKYECKAANEVSSADVKQVKVTVNYPPTITESKSNEATTGRQASLKCEASAVPAPDFEWYRDDTRINSANGLEIKSTEGQSSLTVTNVTEEHYGNYTCVAANKLGVTNASLVLFRPGSVRGINGSISLAVPLWLLAASLLCLLSKC

SEQ ID NO: 811294 - protein, 342 aa, Homo sapiens
MVGRVQPDRKQLPLVLLRLLCLLPTGLPVRSVDFNRGTDNITVRQGDTAILRCVLEDKNSKVAWLNRSGIIFAGHDKWSLDPRVELEKRHSLEYSLRIQKVDVYDEGSYTCSVQTQHEPKTSQVYLIVQVPPKISNISSDVTVNEGSNVTLVCMANGRPEPVITWRHLTPTGREFEGEEEYLEILGITREQSGKYECKAANEVSSADVKQVKVTVNYPPTITESKSNEATTGRQASLKCEASAVPAPDFEWYRDDTRINSANGLEIKSTEGQSSLTVTNVTEEHYGNYTCVAANKLGVTNASLVLFRPGSVRGINGSISLAVPLWLLAASLLCLLRDRSVGD

SEQ ID NO: 811295 - protein, 350 aa, Homo sapiens
MVGRVQPDRKQLPLVLLRLLCLLPTGLPVRSVDFNRGTDNITVRQGDTAILRCVLEDKNSKVAWLNRSGIIFAGHDKWSLDPRVELEKRHSLEYSLRIQKVDVYDEGSYTCSVQTQHEPKTSQVYLIVQVPPKISNISSDVTVNEGSNVTLVCMANGRPEPVITWRHLTPTGREFEGEEEYLEILGITREQSGKYECKAANEVSSADVKQVKVTVNYPPTITESKSNEATTGRQASLKCEASAVPAPDFEWYRDDTRINSANGLEIKSTEGQSSLTVTNVTEEHYGNYTCVAANKLGVTNASLVLFKRVLPTIPHPIQGPGSVRGINGSISLAVPLWLLAASLLCLLSKC

SEQ ID NO: 811296 - protein, 320 aa, Homo sapiens
MVGRVQPDRKQLPLVLLRLLCLLPTGLPVRSVDFNRGTDNITVRQGDTAILRCVLEDKNSKVAWLNRSGIIFAGHDKWSLDPRVELEKRHSLEYSLRIQKVDVYDEGSYTCSVQTQHEPKTSQVYLIVQVPPKISNISSDVTVNEGSNVTLVCMANGRPEPVITWRHLTPTGREFEGEEEYLEILGITREQSGKYECKAANEVSSADVKQVKVTVNYPPTITESKSNEATTGRQASLKCEASAVPAPDFEWYRDDTRINSANGLEIKSTEGQSSLTVTNVTEEHYGNYTCVAANKLGVTNASLVLFSKYAKAGPNLMELN

SEQ ID NO: 811297 - protein, 338 aa, Homo sapiens
MVGRVQPDRKQLPLVLLRLLCLLPTGLPVRSVDFNRGTDNITVRQGDTAILRCVLEDKNSKVAWLNRSGIIFAGHDKWSLDPRVELEKRHSLEYSLRIQKVDVYDEGSYTCSVQTQHEPKTSQVYLIVQVPPKISNISSDVTVNEGSNVTLVCMANGRPEPVITWRHLTPTGREFEGEEEYLEILGITREQSGKYECKAANEVSSADVKQVKVTVNYPPTITESKSNEATTGRQASLKCEASAVPAPDFEWYRDDTRINSANGLEIKSTEGQSSLTVTNVTEEHYGNYTCVAANKLGVTNASLVLFKRVLPTIPHPIQEIGTTVHFKQKVLLQLNFAP

SEQ ID NO: 811298 - protein, 229 aa, Homo sapiens
PALPIMTQSLRHPTLVFTPSIHTLEQSIPTWHLRNHRDVHLHPLQLLEAKEWEQTTRWALGSTVITGLGGRMPALGEEVPFKPGMQLGQCQLLPQPPHSPPHWKLPLGLRAFLGTSLPPWDPGILLSTMSFFRHAGDLQAMISKEFHLAATQDDCRKGRTQEDILVPSSHPELFASVLPMAPEEAARLQQPQPLPPPSGIHLSASRTLAPTLLYSSPPSHSPFGLSSLI

SEQ ID NO: 811299 - protein, 229 aa, Homo sapiens; identical to SEQ ID NO: 811298

SEQ ID NO: 811300 - protein, 152 aa, Homo sapiens
MTCTDQKSHSQRALGTQTPALQGPQLLNTDPSSKETRPPHVNPDRLCHMEPANHFWHAGDLQAMISKEFHLAATQDDCRKGRTQEDILVPSSHPELFASVLPMAPEEAARLQQPQPLPPPSGIHLSASRTLAPTLLYSSPPSHSPFGLSSLI

SEQ ID NO: 811301 - protein, 505 aa, Homo sapiens [sequence omitted]

SEQ ID NO: 811302 - protein, 772 aa, Homo sapiens
MLNRVRSAVAHLVSSGGAPPPRPKSPDLPNAASAPPAAAPEAPRSPPAKAGSGSATPAKAVEARASFSRPTFLQLSPGGLRRADDHAGRAVQSPPDTGRRLPWSTGYAEWAPPGAPKPGWGSHPSPQLRIPGARTRFPTPRPGQELPFPWTFAILWSSGRTPSQPIFQWGAACVTFFTSFPLIDCPRPRRLRTLFCPRARRAESPAKDELASSPSRPGSLKAKGKGVSRRSGVLFNRGHSGWEDSLTRFPAPAPQFPVPLTEFPSPSTPRNSPRHQEAASFPRSGEGDARGRGGSHLDALQPANSCWPGKEADPLPGAAGWPPGCVYFKCICREQQSTEGDGGAQFAEEGGWWPMDPPPPPLASCVGGVYGYVAPAQSRWAFTSTLFQFLFPDLGWRASSLLRQQKLSLDGFRKGVINAGKSRHNEDQACCEVVYVEGRRSVTGVPREPSRGQGLCFYYWGLFDGHAGGGAAEMASRLLHRHIREQLKDLKEVSHESLVVGAIENAFQLMDEQMARERRGHQVEGGCCALVVIYLLGKVYVANAGDSRAIIVRNGEIIPMSREFTPETERQRLQLLGFLKPELLGSEFTHLEFPRRVLPKELGQRMLYRDQNMTGWAYKKIELEDLRFPLVCGEGKKARVMATIGVTRGLGDHSLKVCSSTLPIKPFLSCFPEVRVYDLTQYEHCPDDVLVLGTDGLWDVTTDCEVAATVDRVLSAYEPNDHSRYTALAQALVLGARGTPRDRGWRLPNNKLGSGDDISVFVIPLGGPGSYS

SEQ ID NO: 811303 - protein, 98 aa, Homo sapiens
HVGLCICLPTYMLVHECACVLLAGIQLWPKLWSWGPGVPPETVAGVSPTTSWVPGMTSLSSSSPWEGQAVTPEGLNTIPPTSLSILTPLTAQILKLSP

SEQ ID NO: 811304 - protein, 205 aa, Homo sapiens
MATIGVTRGLGDHSLKVCSSTLPIKPFLSCFPEVRVYDLTQYEHCPDDVLVLGTDGLWDVTTDCEVAATVDRVLSAYEPNDHSSPTMAAIRKKLVIVGDGACGKTCLLIVFSKDQFPEVYVPTVFENYIADIEVDGKQVELALWDTAGQEDYDRLRPLSYPDTDVILMCFSIDSPDSLENIPEKWTPEVKHFCPNVPIILVGNKK

SEQ ID NO: 811305 - protein, 505 aa, Homo sapiens [sequence omitted]

SEQ ID NO: 811306 - protein, 505 aa, Homo sapiens [sequence omitted]

SEQ ID NO: 811307 - protein, 237 aa, Homo sapiens
MPSPWGWFAVTACGAQRNNFEEPVALQEMDTSNGVLLPFYDPDSSIVYLCGKGDSSIRYFEITDEPPFVHYLNTFSSKEPQRGMGFMPKRGLDVSKCEIARFYKLHERKCEPIIMTVPRKSDLFQDDLYPDTPGPEPALEADEWLSGQDAEPVLISLRDGYVPPKHRELRVTKRNILDVRPPSGPRRSQSASDAPLSQHTLETLLEEIKALRERVQAQEQRITALENMLCELVDGTD

SEQ ID NO: 811308 - protein, 579 aa, Homo sapiens
QLGLQRRRALESRRIGQSAELDTRVPDTTDTRRGGSFALKPSSAPYALGPLPQRIRSVSAPAARSGPAMSRRVVRQSKFRHVFGQAAKADQAYEDIRVSKVTWDSSFCAVNPKFLAIIVEAGGGGAFIVLPLAKTGRVDKNYPLVTGHTAPVLDIDWCPHNDNVIASASDDTTIMVWQIPDYTPMRNITEPIITLEGHSKRVGILSWHPTARNVLLSAGGDNVIIIWNVGTGEVLLSLDDMHPDVIHSVCWNSNGSLLATTCKDKTLRIIDPRKGQVVAERFAAHEGMRPMRAVFTRQGHIFTTGFTRMSQRELGLWDPVTQLEAWVLLRRVKDPALAPPPGDAESLGVVCCDCSGAQRNNFEEPVALQEMDTSNGVLLPFYDPDSSIVYLCGKGDSSIRYFEITDEPPFVHYLNTFSSKEPQRGMGFMPKRGLDVSKCEIARFYKLHERKCEPIIMTVPRKSDLFQDDLYPDTPGPEPALEADEWLSGQDAEPVLISLRDGYVPPKHRELRVTKRNILDVRPPSGPRRSQSASDAPLSQHTLETLLEEIKALRERVQAQEQRITALENMLCELVDGTD

SEQ ID NO: 811309 - protein, 539 aa, Homo sapiens
QLGLQRRRALESRRIGQSAELDTRVPDTTDTRRGGSFALKPSSAPYALGPLPQRIRSVSAPAARSGPAMSRRVVRQSKFRHVFGQAAKADQAYEDIRVSKVTWDSSFCAVNPKFLAIIVEAGGGGAFIVLPLAKTGRVDKNYPLVTGHTAPVLDIDWCPHNDNVIASASDDTTIMVWQIPDYTPMRNITEPIITLEGHSKRVGILSWHPTARNVLLSAGGDNVIIIWNVGTGEVLLSLDDMHPDVIHSVCWNSNGSLLATTCKDKTLRIIDPRKGQVVAERFAAHEGMRPMRAVFTRQGHIFTTGFTRMSQRELGLWDPNNFEEPVALQEMDTSNGVLLPFYDPDSSIVYLCGKGDSSIRYFEITDEPPFVHYLNTFSSKEPQRGMGFMPKRGLDVSKCEIARFYKLHERKCEPIIMTVPRKSDLFQDDLYPDTPGPEPALEADEWLSGQDAEPVLISLRDGYVPPKHRELRVTKRNILDVRPPSGPRRSQSASDAPLSQHTLETLLEEIKALRERVQAQEQRITALENMLCELVDGTD

SEQ ID NO: 811310 - protein, 522 aa, Homo sapiens
QLGLQRRRALESRRIGQSAELDTRVPDTTDTRRGGSFALKPSSAPYALGPLPQRIRSVSAPAARSGPAMSRRVVRQSKFRHVFGQAAKADQAYEDIRVSKVTWDSSFCAVNPKFLAIIVEAGGGGAFIVLPLAKTGRVDKNYPLVTGHTAPVLDIDWCPHNDNVIASASDDTTIMVWQIPDYTPMRNITEPIITLEGHSKRVGILSWHPTARNVLLSAGGDNVIIIWNVGTGEVLLSLDDMHPDVIHSVCWNSNGSLLATTCKDKTLRIIDPRKGQVVAERFAAHEGMRPMRAVFTRQGHIFTTGFTRMSQRELGLWDPNNFEEPVALQEMDTSNGVLLPFYDPDSSIVYLCGKGDSSIRYFEITDEPPFVHYLNTFSSKEPRSQIDSDYAARSDYAARSDYAARSDYAARSDYAARSDYAARSDYAARSDYAARSDYAARSDYSARSDYAARSDYAARSDYALADMLAHVEELARDGEAPLDKACAEDDDEEDEEEEEEEPDPTRRWSTSEAEAYESACCL

SEQ ID NO: 811311 - protein, 330 aa, Homo sapiens
QLGLQRRRALESRRIGQSAELDTRVPDTTDTRRGGSFALKPSSAPYALGPLPQRIRSVSAPAARSGPAMSRRVVRQSKFRHVFGQAAKADQAYEDIRVSKVTWDSSFCAVNPKFLAIIVEAGGGGAFIVLPLAKTGRVDKNYPLVTGHTAPVLDIDWCPHNDNVIASASDDTTIMVWQIPDYTPMRNITEPIITLEGHSKRVGILSWHPTARNVLLSAGGDNVIIIWNVGTGEVLLSLDDMHPDVIHSVCWNSNGSLLATTCKDKTLRIIDPRKGQVVAVSALSKPPACNSLPGSCSLPSLASQKLREGLLALGLRRGEAGNSILPPEPA

SEQ ID NO: 811312 - protein, 285 aa, Homo sapiens
MCRGGGAMCAGEEERCAQGRGLQLWSLEVWGIGFGKARKRKGASGGPEVAREGGAGLVTPPVLGQNNFEEPVALQEMDTSNGVLLPFYDPDSSIVYLCGKGDSSIRYFEITDEPPFVHYLNTFSSKEPQRGMGFMPKRGLDVSKCEIARFYKLHERKCEPIIMTVPRKSDLFQDDLYPDTPGPEPALEADEWLSGQDAEPVLISLRDGYVPPKHRELRVTKRNILDVRPPSGPRRSQSASDAPLSQHTLETLLEEIKALRERVQAQEQRITALENMLCELVDGTD

SEQ ID NO: 811313 - protein, 511 aa, Homo sapiens
MSRRVVRQSKFRHVFGQAAKADQAYEDIRVSKVTWDSSFCAVNPKFLAIIVEAGGGGAFIVLPLAKTGRVDKNYPLVTGHTAPVLDIDWCPHNDNVIASASDDTTIMVWQIPDYTPMRNITEPIITLEGHSKRVGILSWHPTARNVLLSAGGDNVIIIWNVGTGEVLLSLDDMHPDVIHSVCWNSNGSLLATTCKDKTLRIIDPRKGQVVAERFAAHEGMRPMRAVFTRQGHIFTTGFTRMSQRELGLWDPVTQLEAWVLLRRVKDPALAPPPGDAESLGVVCCDCSGAQRNNFEEPVALQEMDTSNGVLLPFYDPDSSIVYLCGKGDSSIRYFEITDEPPFVHYLNTFSSKEPQRGMGFMPKRGLDVSKCEIARFYKLHERKCEPIIMTVPRKSDLFQDDLYPDTPGPEPALEADEWLSGQDAEPVLISLRDGYVPPKHRELRVTKRNILDVRPPSGPRRSQSASDAPLSQHTLETLLEEIKALRERVQAQEQRITALENMLCELVDGTD

SEQ ID NO: 811314 - protein, 237 aa, Homo sapiens; identical to SEQ ID NO: 811307

SEQ ID NO: 811315 - protein, 88 aa, Homo sapiens
GRRPPWTPATSSLGEEPQPRDEEEAELELLRQFDLAWQYGPCTGITRLQRWCRAKQMGLEPPPEVWQVLKTHPGDPRFQCSLWHLYPL

SEQ ID NO: 811316 - protein, 214 aa, Homo sapiens
VASGSLCPVQGGSLLASQGSSVLEIFMKVADCENLELGSVWIGDPAAEGDSCVGQGGMMGRPVWVTDCPPASRRVPGSSSTPRRSQGAAGSPGGLGGLAGPPPHRLVLHLGACLSAATLQILSARRWPGPVCLSQQLSFSRPLAGLSSSPQLPPSLPAWVAAMGRKRLITDSYPVVKRREGPAGHSKGELAPELGGGAPAPRRGGSGAGAAEAV

SEQ ID NO: 811317 - protein, 91 aa, Homo sapiens
KEARYEAGCELAEAVFSRPLAGLSSSPQLPPSLPAWVAAMGRKRLITDSYPVVKRREGPAGHSKGELAPELGGGAPAPRRGGSGAGAAEAV

SEQ ID NO: 811318 - protein, 89 aa, Homo sapiens
HASGPTRPELAPELGEEPQPRDEEEAELELLRQFDLAWQYGPCTGITRLQRWCRAKQMGLEPPPEVWQVLKTHPGDPRFQCSLWHLYPL

SEQ ID NO: 811319 - protein, 78 aa, Homo sapiens
RRPPLPVQSLASLSPMRQNLEVSEAQLLHLTSRLPESPEEPAQLKQSASRWRVVTGEKDLAITFQYLLPVSLTHDLAS

SEQ ID NO: 811320 - protein, 79 aa, Homo sapiens
EASSLDPGDFLSRSCLPAAGLAPSVSLSSCLSPALSSLAHHPRTSGQKREPIAPAQLSPAAEEPLAGRTWRCQRLNSSI

SEQ ID NO: 811321 - protein, 107 aa, Homo sapiens
PLRLGTEAWVWLLILSARRWPGPVCLSQQLSFSRPLAGLSSSPQLPPSLPAWVAAMGRKRLITDSYPVVKRREGPAGHSKGELAPELGGGAPAPRRGGSGAGAAEAV

SEQ ID NO: 811322 - protein, 107 aa, Homo sapiens
GGVLPGPRRLPLSILSARRWPGPVCLSQQLSFSRPLAGLSSSPQLPPSLPAWVAAMGRKRLITDSYPVVKRREGPAGHSKGELAPELGGGAPAPRRGGSGAGAAEAV

SEQ ID NO: 811323 - protein, 246 aa, Homo sapiens
VASGSLCPVQGGSLLASQGSSVLEIFMKVADCENLELGSVWIGDPAAEGDSCVGQGGMMGRPVWVTDCPPASRRVPGSSSSQGGARGLRGAQEGWEAWQGRHLTGWFSIWGPACLRRLFRSCLPAAGLAPSVSLSSCLSRAHWPVSPLPRSCLLLCLPGWPPWAGSGSSLIREEPQPRDEEEAELELLRQFDLAWQYGPCTGITRLQRWCRAKQMGLEPPPEVWQVLKTHPGDPRFQCSLWHLYPL

SEQ ID NO: 811324 - protein, 196 aa, Homo sapiens
VASGSLCPVQGGSLLASQGSSVLEIFMKVADCENLELGSVWIGDPAAEGDSCVGQGGMMGRPVWVTDCPPASRRVPGSSSTPRRSQGAAGSPGGLGGLAGPPPHRLVLHLGACLSAATLQILSARRWPGPVCLSQQLSFSRPLAGLSSSPQLPPSLPAWVAAMGRKRLITDSYPVVKRREGPAGHSKGELAPELGL

SEQ ID NO: 811325 - protein, 196 aa, Homo sapiens; identical to SEQ ID NO: 811324

SEQ ID NO: 811326 - protein, 95 aa, Homo sapiens
ASGRGAAPGRPGPSPMDLRAGEEPQPRDEEEAELELLRQFDLAWQYGPCTGITRLQRWCRAKQMGLEPPPEVWQVLKTHPGDPRFQCSLWHLYPL

SEQ ID NO: 811327 - protein, 196 aa, Homo sapiens; identical to SEQ ID NO: 811324

SEQ ID NO: 811328 - protein, 214 aa, Homo sapiens; identical to SEQ ID NO: 811316

SEQ ID NO: 811329 - protein, 108 aa, Homo sapiens
MGRKRLITDSDHTAAALVSGQADGLGASPRGVAGAEDPPRRPPLPVQSLASLSPMRHHVRPPALSSLAHHPRTSGQKREPIAPAQLSPAAEEPLAGRTWRCQRLNSSI

SEQ ID NO: 811330 - protein, 214 aa, Homo sapiens; identical to SEQ ID NO: 811316

SEQ ID NO: 811331 - protein, 89 aa, Homo sapiens
GGVLPGPRRLPLSILSARRWPGPVCLSQQLSFSRPLAGLSSSPQLPPSLPAWVAAMGRKRLITDSYPVVKRREGPAGHSKGELAPELGL

SEQ ID NO: 811332 - protein, 89 aa, Homo sapiens; identical to SEQ ID NO: 811331

SEQ ID NO: 811333 - protein, 106 aa, Homo sapiens
MVLISCPRDPTHLSLPKCWDYRREPPHPANNSYLYKLVGGKGTPRTQGTIYLELRGFPRTMGMAKNKLVKSDPGTQQLILCFSLSLSGVSLPPTPSSTVLWHLYPL

SEQ ID NO: 811334 - protein, 214 aa, Homo sapiens; identical to SEQ ID NO: 811316

SEQ ID NO: 811335 - protein, 214 aa, Homo sapiens; identical to SEQ ID NO: 811316

SEQ ID NO: 811336 - protein, 214 aa, Homo sapiens; identical to SEQ ID NO: 811316

SEQ ID NO: 811337 - protein, 214 aa, Homo sapiens; identical to SEQ ID NO: 811316

SEQ ID NO: 811338 - protein, 214 aa, Homo sapiens; identical to SEQ ID NO: 811316

SEQ ID NO: 811339 - protein, 159 aa, Homo sapiens
ELELRLHFTPAGMPGSHLSTLGFLSVSDLGFPPRQSSQPPPSFPPALISLGVSPSYVLPLLPASLSIPWGRAEGPLPSPRGVAGAEDPPRRPPLPVQSLASLSPMRHHVRPPALSSLAHHPRTSGQKREPIAPAGSTPPSNQQAPRVPGRACAAEAECF

SEQ ID NO: 811340 - protein, 214 aa, Homo sapiens; identical to SEQ ID NO: 811316

SEQ ID NO: 811341 - protein, 307 aa, Homo sapiens
SPPRPLPVPAAAAVAFGAKGTDPAEARSSRGIEEAGPRAHGRAGREPERRRSRQQRRGGLQARRSTLLKTCARARATAPGAMKMVAPWTRFYSNSCCLCCHVRTGTILLGVWYLIINAVVLLILLSALADPDQYNFSSSELGGDFEFMDDANMCIAIAISLLMILICAMATYGAYKQRAAWIIPFFCYQIFDFALNMLVAITVLIYPNSIQEYIRQLPPNFPYRDDVMSVNPTCLVLIILLFISIILTFKGYLISCVWNCYRYINGRNSSDVLVYVTSNDTTVLLPPYDDATVNGAAKEPPPPYVSA

SEQ ID NO: 811342 - protein, 307 aa, Homo sapiens; identical to SEQ ID NO: 811341

SEQ ID NO: 811343 - protein, 307 aa, Homo sapiens; identical to SEQ ID NO: 811341

SEQ ID NO: 811344 - protein, 307 aa, Homo sapiens; identical to SEQ ID NO: 811341

SEQ ID NO: 811345 - protein, 307 aa, Homo sapiens; identical to SEQ ID NO: 811341

SEQ ID NO: 811346 - protein, 128 aa, Homo sapiens
MGPVCNQAEEISDGFLNMLVAITVLIYPNSIQEYIRQLPPNFPYRDDVMSVNPTCLVLIILLFISIILTFKGYLISCVWNCYRYINGRNSSDVLVYVTSNDTTVLLPPYDDATVNGAAKEPPPPYVSA

SEQ ID NO: 811347 - protein, 307 aa, Homo sapiens; identical to SEQ ID NO: 811341

SEQ ID NO: 811348 - protein, 307 aa, Homo sapiens; identical to SEQ ID NO: 811341

SEQ ID NO: 811349 - protein, 307 aa, Homo sapiens; identical to SEQ ID NO: 811341

SEQ ID NO: 811350 - protein, 199 aa, Homo sapiens
SPPRPLPVPAAAAVAFGAKGTDPAEARSSRGIEEAGPRAHGRAGREPERRRSRQQRRGGLQARRSTLLKTCARARATAPGAMKMVAPWTRFYSNSCCLCCHVRTGTILLGVWYLIINAVVLLILLSALADPDQYNFSSSELGGDFEFMDDANMCIAIAISLLMILICAMATYGAYKQRAAWIIPFFCYQIFDFALLVHY

SEQ ID NO: 811351 - protein, 307 aa, Homo sapiens; identical to SEQ ID NO: 811341

SEQ ID NO: 811352 - protein, 315 aa, Homo sapiens
SPPRPLPVPAAAAVAFGAKGTDPAEARSSRGIEEAGPRAHGRAGREPERRRSRQQRRGGLQARRSTLLKTCARARATAPGAMKMVAPWTRFYSNSCCLCCHVRTGTILLGVWYLIINAVVLLILLSALADPDQYNFSSSELGGDFEFMDDAKILFNLSADMCIAIAISLLMILICAMATYGAYKQRAAWIIPFFCYQIFDFALNMLVAITVLIYPNSIQEYIRQLPPNFPYRDDVMSVNPTCLVLIILLFISIILTFKGYLISCVWNCYRYINGRNSSDVLVYVTSNDTTVLLPPYDDATVNGAAKEPPPPYVSA

SEQ ID NO: 811353 - protein, 155 aa, Homo sapiens [sequence omitted]

SEQ ID NO: 811354 - protein, 147 aa, Homo sapiens
ADLRGFPGKALRRRYKQRAAWIIPFFCYQIFDFALNMLVAITVLIYPNSIQEYIRQLPPNFPYRDDVMSVNPTCLVLIILLFISIILTFKGYLISCVWNCYRYINGRNSSDVLVYVTSNDTTVLLPPYDDATVNGAAKEPPPPYVSA

SEQ ID NO: 811355 - protein, 307 aa, Homo sapiens; identical to SEQ ID NO: 811341

SEQ ID NO: 811356 - protein, 79 aa, Homo sapiens
GSRLGVNRPRYLLFISIILTFKGYLISCVWNCYRYINGRNSSDVLVYVTSNDTTVLLPPYDDATVNGAAKEPPPPYVSA

SEQ ID NO: 811357 - protein, 286 aa, Homo sapiens
SPPRPLPVPAAAAVAFGAKGTDPAEARSSRGIEEAGPRAHGRAGREPERRRSRQQRRGGLQARRSTLLKTCARARATAPGAMKMVAPWTRFYSNSCCLCCHVRTGTILLGVWYLIINAVVLLILLSALADPDQYNFSSSELGGDFEFMDDANMCIAIAISLLMILICAMATYGAYKQRAAWIIPFFCYQIFDFALNMLVAITVLIYPNSIQEYIRQLPPNFPYRDDVMSVNPTCLVLIILLFISIILTFKGYLISCVWNCYRYINGRNSSDVLVYVTSNDTTGCTR

SEQ ID NO: 811358 - protein, 153 aa, Homo sapiens
NLENGFYINDQKADLLLLENKKLKEYILYLKNNIEKYREGQEALMHTSSDLSRQLIAQEAQYKDLWAEFQTTVKILVDNGEETLQDINNLTDKLRERDEKMQHVSTWLRGSLEGLRLLVEQESPMDLLKKKKHIRTRVHFPVVKCTEKNTLTK

SEQ ID NO: 811359 - protein, 454 aa, Homo sapiens
GRAHSHPLPPRPSCTLPGAALRPSPCPPPPPPPPESPCRSRAPLFSRCCCCCWRRPPRRSCPGPAARRLWPPGAQTGRAQAGLCVCASSEPVCGSDANTYANLCQLRAASRRSERLHRPPVIVLQRGACGQGQEDPNSLRHKYNFIADVVEKIAPAVVHIELFRKLPFSKREVPVASGSGFIVSEDGLIVTNAHVVTNKHRVKVELKNGATYEAKIKDVDEKADIALIKIDHQGKLPVLLLGRSSELRPGEFVVAIGSPFSLQNTVTTGIVSTTQRGGKELGLRNSDMDYIQTDAIINYGNSGGPLVNLDGEVIGINTLKVTAGISFAIPSDKIKKFLTESHDRQAKGKAITKKKYIGIRMMSLTSSKAKELKDRHRDFPDVISGAYIIEVIPDTPAEAGGLKENDVIISINGQSVVSANDVSDVIKRESTLNMVVRRGNEDIMITVIPEEIDP

SEQ ID NO: 811360 - protein, 341 aa, Homo sapiens
RPRALAPAAPEALLHSPRRRSPALALSAATAAAARVAMQIPRAALLPLLLLLLAAPASAQLSRAGRSAPLAAGCPDRCEPARCPPQPEHCEGGRARDACGCCEVCGAPEGAACGLQEGPCGEGLQCVVPFGVPASATVRRRAQAGLCVCASSEPVCGSDANTYANLCQLRAASRRSERLHRPPVIVLQRGACGQGQEDPNSLRHKYNFIADVVEKIAPAVVHIELFRKLPFSKREVPVASGSGFIVSEDGLIVTNAHVVTNKHRVKVELKNGATYEAKIKDVDEKADIALIKIDHQNDTGSCCLCCVSSGGICPSSVSQHHTVVHTRAQNGRINMIINVLS

SEQ ID NO: 811361 - protein, 297 aa, Homo sapiens [sequence omitted]

SEQ ID NO: 811362 - protein, 480 aa, Homo sapiens
MQIPRAALLPLLLLLLAAPASAQLSRAGRSAPLAAGCPDRCEPARCPPQPEHCEGGRARDACGCCEVCGAPEGAACGLQEGPCGEGLQCVVPFGVPASATVRRRAQAGLCVCASSEPVCGSDANTYANLCQLRAASRRSERLHRPPVIVLQRGACGQGQEDPNSLRHKYNFIADVVEKIAPAVVHIELFRKLPFSKREVPVASGSGFIVSEDGLIVTNAHVVTNKHRVKVELKNGATYEAKIKDVDEKADIALIKIDHQGKLPVLLLGRSSELRPGEFVVAIGSPFSLQNTVTTGIVSTTQRGGKELGLRNSDMDYIQTDAIINYGNSGGPLVNLDGEVIGINTLKVTAGISFAIPSDKIKKFLTESHDRQAKGKAITKKKYIGIRMMSLTSSKAKELKDRHRDFPDVISGAYIIEVIPDTPAEAGGLKENDVIISINGQSVVSANDVSDVIKRESTLNMVVRRGNEDIMITVIPEEIDP

SEQ ID NO: 811363 - protein, 462 aa, Homo sapiens
MQIPRAALLPLLLLLLAAPASAQLSRAGRSAPLAAGCPDRCEPARCPPQPEHCEGGRARDACGCCEVCGAPEGAACGLQEGPCGEGLQCVVPFGVPASATVRRRAQAGLCVCASSEPVCGSDANTYANLCQLRAASRRSERLHRPPVIVLQRGACGQGQEDPNSLRHKYNFIADVVEKIAPAVVHIELFRKLPFSKREVPVASGSGFIVSEDGLIVTNAHVVTNKHRVKVELKNGATYEAKIKDVDEKADIALIKIDHQGKLPVLLLGRSSELRPGEFVVAIGSPFSLQNTVTTGIVSTTQRGGKELGLRNSDMDYIQTDAIINYGNSGGPLVNLDGEVIGINTLKVTAGISFAIPSDKIKKFLTESHDRQAKGKAITKKKYIGIRMMSLTSSKAKELKDRHRDFPDVISGAYIIEVIPDTPAEAGGLKENDVIISINGQSVVSANDVSDVIITVIPEEIDP

SEQ ID NO: 811364 - protein, 480 aa, Homo sapiens; identical to SEQ ID NO: 811362

SEQ ID NO: 811365 - protein, 480 aa, Homo sapiens; identical to SEQ ID NO: 811362

SEQ ID NO: 811366 - protein, 442 aa, Homo sapiens
MQIPRAALLPLLLLLLAAPARDACGCCEVCGAPEGAACGLQEGPCGEGLQCVVPFGVPASATVRRRAQAGLCVCASSEPVCGSDANTYANLCQLRAASRRSERLHRPPVIVLQRGACGQGQEDPNSLRHKYNFIADVVEKIAPAVVHIELFRKLPFSKREVPVASGSGFIVSEDGLIVTNAHVVTNKHRVKVELKNGATYEAKIKDVDEKADIALIKIDHQGKLPVLLLGRSSELRPGEFVVAIGSPFSLQNTVTTGIVSTTQRGGKELGLRNSDMDYIQTDAIINYGNSGGPLVNLDGEVIGINTLKVTAGISFAIPSDKIKKFLTESHDRQAKGKAITKKKYIGIRMMSLTSSKAKELKDRHRDFPDVISGAYIIEVIPDTPAEAGGLKENDVIISINGQSVVSANDVSDVIKRESTLNMVVRRGNEDIMITVIPEEIDP

SEQ ID NO: 811367 - protein, 316 aa, Homo sapiens
RSLAGSPLIAVFIVIAPAVVHIDLFRTLPFSKREVPVASGSGFIVSEDGLIVTNAHVVTNKHRVKVELKNGATYEAKIKDVDEKADIALIKIDHQGKLPVLLLGRSSELRPGEFVVAIGSPFSLQNTVTTGIVSTTQRGGKELGLRNSDMDYIQTDAIINYGNSGGPLVNLDGEVIGINTLKVTAGISFAIPSDKIKKFLTESHDRQAKGKAITKKKYIGIRMMSLTSSKAKELKDRHRDFPDVISGAYIIEVIPDTPAEAGGLKENDVIISINGQSVVSANDVSDVIKRESTLNMVVRRGNEDIMITVIPEEIDP

SEQ ID NO: 811368 - protein, 226 aa, Homo sapiens
ERDFTVSLRKTLPWMTDEDSGLLERTLKTFDCHLVGSVRDSLANRILLDSLQAKQMYCCRDYIQTEAIINYGNSGGALVNLDGEVIGINTLKVTAGISFAIPSDKIKKFLTESHDRQAKGKAITKKKYIGIRMMSLTSSKAKELKDRHRDFPDVISGAYIIEVIPDTPAEAGGLKENDVIISINGQSVVSANDVSDVIKRESTLNMVVRRGNEDIMITVIPEEIDP

SEQ ID NO: 811369 - protein, 570 aa, Homo sapiens
  misc_feature (535)..(535): Xaa can be any naturally occurring amino acid
RPRALAPAAPEALLHSPRRRSPALALSAATAAAARVAMQIPRAALLPLLLLLLAAPASAQLSRAGRSAPLAAGCPDRCEPARCPPQPEHCEGGRARDACGCCEVCGAPEGAACGLQEGPCGEGLQCVVPFGVPASATVRRRAQAGLCVCASSEPVCGSDANTYANLCQLRAASRRSERLHRPPVIVLQRGACGQGQEDPNSLRHKYNFIADVVEKIAPAVVHIELFRKLPFSKREVPVASGSGFIVSEDGLIVTNAHVVTNKHRVKVELKNGATYEAKIKDVDEKADIALIKIDHQGKLPVLLLGRSSELRPGEFVVAIGSPFSLQNTVTTGIVSTTQRGGKELGLRNSDMDYIQTDAIINYGNSGGPLVNLDGEVIGINTLKVTAGISFAIPSDKIKKFLTESHDRQAKGKAITKKKYIGIRMMSLTSRQSQELKDGTGTFQKSHQRRNYEVLRYPEKGGAQERGLTHKGTGVPNVWGLKGSPKVGRVRNNQDPKSTRGREVSHTRREEGKHKTSGGPPIEGRPFLSRYMCCVXSHDRQRDENKRVDDRNTQRHDSMIERRSDTTRNNG

SEQ ID NO: 811370 - protein, 757 aa, Homo sapiens
MSLLFSRCNSIVTVKKNKRHMAEVNASPLKHFVTAKKKINGIFEQLGAYIQESATFLEDTYRNAELDPVTTEEQVLDVKGYLSKVRGISEVLARRHMKVAFFGRTSNGKSTVINAMLWDKVLPSGIGHTTNCFLRVEGTDGHEAFLLTEGSEEKRSAKTVNQLAHALHQDKQLHAGSLVSVMWPNSKCPLLKDDLVLMDSPGIDVTTELDSWIDKFCLDADVFVLVANSESTLMQTEKHFFHKVSERLSRPNIFILNNRWDASASEPEYMEEVRRQHMERCTSFLVDELGVVDRSQAGDRIFFVSAKEVLNARIQKAQGMPEGGGALAEGFQVRMFEFQNFERRFEECISQSAVKTKFEQHTVRAKQIAEAVRLIMDSLHMAAREQQVYCEEMREERQDRLKFIDKQLELLAQDYKLRIKQITEEVERQVSTAMAEEIRRLSVLVDDYQMDFHPSPVVLKVYKNELHRHIEEGLGRNMSDRCSTAITNSLQTMQQDMIDGLKPLLPVSVRSQIDMLVPRQCFSLNYDLNCDKLCADFQEDIEFHFSLGWTMLVNRFLGPKNSRRALMGYNDQVQRPIPLTPANPSMPPLPQGSLTQEEFMVSMVTGLASLTSRTSMGILVVGGVVWKAVGWRLIALSFGLYGLLYVYERLTWTTKAKERAFKRQFVEHASEKLQLVISYTGSNCSHQVQQELSGTFAHLCQQVDVTRENLEQEIAAMNKKIEVLDSLQSKAKLLRNKAGWLDSELNMFTHQYLQPSR

SEQ ID NO: 811371 - protein, 399 aa, Homo sapiens
MAFLSSWGRGALAEGFQVRMFEFQNFERRFEECISQSAVKTKFEQHTVRAKQIAEAVRLIMDSLHMAAREQQVYCEEMREERQDRLKFIDKQLELLAQDYKLRIKQITEEVERQVSTAMAEEIRRLSVLVDDYQMDFHPSPVVLKVYKNELHRHIEEGLGRNMSDRCSTAITNSLQTMQQDMIDGLKPLLPVSVRSQIDMLVPRQCFSLNYDLNCDKLCADFQEDIEFHFSLGWTMLVNRFLGPKNSRRALMGYNDQVQRPIPLTPANPSMPPLPQGSLTQEEFMVSMVTGLASLTSRTSMGILVVGGVVWKAVGWRLIALSFGLYGLLYVYERLTWTTKAKERAFKRQFVEHASEKLQLVISYTGSNCSHQVQQELSGTFAHLCQQVDVTRENGRDPF

SEQ ID NO: 811372 - protein, 289 aa, Homo sapiens
MSLLFSRCNSIVTVKKNKRHMAEVNASPLKHFVTAKKKINGIFEQLGAYIQESATFLEDTYRNAELDPVTTEEQVLDVKGYLSKVRGISEVLARRHMKVAFFGRTSNGKSTVINAMLWDKVLPSGIGHTTNCFLRVEGTDGHEAFLLTEGSEEKRSAKTVNQLAHALHQDKQLHAGSLVSVMWPNSKCPLLKDDLVLMDSPGIDVTTELDSWIDKFCLDADVFVLVANSESTLMQTEKHFFHKVSERLSRPNIFILNNRWDASASEPEYMEEGRGDMEGEHSGIKGWGC

SEQ ID NO: 811373 - protein, 757 aa, Homo sapiens; identical to SEQ ID NO: 811370

SEQ ID NO: 811374 - protein, 757 aa, Homo sapiens; identical to SEQ ID NO: 811370

SEQ ID NO: 811375 - protein, 757 aa, Homo sapiens; identical to SEQ ID NO: 811370

SEQ ID NO: 811376 - protein, 661 aa, Homo sapiens
MKVAFFGRTSNGKSTVINAMLWDKVLPSGIGHTTNCFLRVEGTDGHEAFLLTEGSEEKRSAKTVNQLAHALHQDKQLHAGSLVSVMWPNSKCPLLKDDLVLMDSPGIDVTTELDSWIDKFCLDADVFVLVANSESTLMQTEKHFFHKVSERLSRPNIFILNNRWDASASEPEYMEEVRRQHMERCTSFLVDELGVVDRSQAGDRIFFVSAKEVLNARIQKAQGMPEGGGALAEGFQVRMFEFQNFERRFEECISQSAVKTKFEQHTVRAKQIAEAVRLIMDSLHMAAREQQVYCEEMREERQDRLKFIDKQLELLAQDYKLRIKQITEEVERQVSTAMAEEIRRLSVLVDDYQMDFHPSPVVLKVYKNELHRHIEEGLGRNMSDRCSTAITNSLQTMQQDMIDGLKPLLPVSVRSQIDMLVPRQCFSLNYDLNCDKLCADFQEDIEFHFSLGWTMLVNRFLGPKNSRRALMGYNDQVQRPIPLTPANPSMPPLPQGSLTQEEFMVSMVTGLASLTSRTSMGILVVGGVVWKAVGWRLIALSFGLYGLLYVYERLTWTTKAKERAFKRQFVEHASEKLQLVISYTGSNCSHQVQQELSGTFAHLCQQVDVTRENLEQEIAAMNKKIEVLDSLQSKAKLLRNKAGWLDSELNMFTHQYLQPSR

SEQ ID NO: 811377 - protein, 605 aa, Homo sapiens
MRARPDFSPVPGFLLHDLPASQVPGLFSAGRIGLLLCLMIWFTPVTFSPGIDVTTELDSWIDKFCLDADVFVLVANSESTLMQTEKHFFHKVSERLSRPNIFILNNRWDASASEPEYMEEVRRQHMERCTSFLVDELGVVDRSQAGDRIFFVSAKEVLNARIQKAQGMPEGGGALAEGFQVRMFEFQNFERRFEECISQSAVKTKFEQHTVRAKQIAEAVRLIMDSLHMAAREQQVYCEEMREERQDRLKFIDKQLELLAQDYKLRIKQITEEVERQVSTAMAEEIRRLSVLVDDYQMDFHPSPVVLKVYKNELHRHIEEGLGRNMSDRCSTAITNSLQTMQQDMIDGLKPLLPVSVRSQIDMLVPRQCFSLNYDLNCDKLCADFQEDIEFHFSLGWTMLVNRFLGPKNSRRALMGYNDQVQRPIPLTPANPSMPPLPQGSLTQEEFMVSMVTGLASLTSRTSMGILVVGGVVWKAVGWRLIALSFGLYGLLYVYERLTWTTKAKERAFKRQFVEHASEKLQLVISYTGSNCSHQVQQELSGTFAHLCQQVDVTRENLEQEIAAMNKKIEVLDSLQSKAKLLRNKAGWLDSELNMFTHQYLQPSR

SEQ ID NO: 811378 - protein, 442 aa, Homo sapiens
MAFLSSWGRGALAEGFQVRMFEFQNFERRFEECISQSAVKTKFEQHTVRAKQIAEAVRLIMDSLHMAAREQQVYCEEMREERQDRLKFIDKQLELLAQDYKLRIKQITEEVERQVSTAMAEEIRRLSVLVDDYQMDFHPSPVVLKVYKNELHRHIEEGLGRNMSDRCSTAITNSLQTMQQDMIDGLKPLLPVSVRSQIDMLVPRQCFSLNYDLNCDKLCADFQEDIEFHFSLGWTMLVNRFLGPKNSRRALMGYNDQVQRPIPLTPANPSMPPLPQGSLTQEEFMVSMVTGLASLTSRTSMGILVVGGVVWKAVGWRLIALSFGLYGLLYVYERLTWTTKAKERAFKRQFVEHASEKLQLVISYTGSNCSHQVQQELSGTFAHLCQQVDVTRENLEQEIAAMNKKIEVLDSLQSKAKLLRNKAGWLDSELNMFTHQYLQPSR

SEQ ID NO: 811379 - protein, 445 aa, Homo sapiens
GDKLCADFQEDIEFHFSLGWTMLVNRFLGPKNSRRALMGYNDQVQRPIPLTPANPSMPPLPQGSLTLHMAAREQQVYCEEMREERQDRLKFIDKQLELLAQDYKLRIKQITEEVERQVSTAMAEEIRRLSVLVDDYQMDFHPSPVVLKVYKNELHRHIEEGLGRNMSDRCSTAITNSLQTMQQDMIDGLKPLLPVSVRSQIDMLVPRQCFSLNYDLNCDKLCADFQEDIEFHFSLGWTMLVNRFLGPKNSRRALMGYNDQVQRPIPLTPANPSMPPLPQGSLTQEEFMVSMVTGLASLTSRTSMGILVVGGVVWKAVGWRLIALSFGLYGLLYVYERLTWTTKAKERAFKRQFVEHASEKLQLVISYTGSNCSHQVQQELSGTFAHLCQQVDVTRENLEQEIAAMNKKIEVLDSLQSKAKLLRNKAGWLDSELNMFTHQYLQPSR

SEQ ID NO: 811380 - protein, 887 aa, Homo sapiens
MSLLFSRCNSIVTVKKNKRHMAEVNASPLKHFVTAKKKINGIFEQLGAYIQESATFLEDTYRNAELDPVTTEEQVLDVKGYLSKVRGISEVLARRHMKVAFFGRTSNGKSTVINAMLWDKVLPSGIGHTTNCFLRVEGTDGHEAFLLTEGSEEKRSAKTVNQLAHALHQDKQLHAGSLVSVMWPNSKCPLLKDDLVLMDSPGIDVTTELDSWIDKFCLDADVFVLVANSESTLMQTEKHFFHKVSERLSRPNIFILNNRWDASASEPEYMEEVRRQHMERCTSFLVDELGVVDRSQAGDRIFFVSAKEVLNARIQKAQGMPEGGGALAEGFQVRMFEFQNFERRFEECISQSAVKTKFEQHTVRAKQIAEAVRLIMDSLHMAAREQQVYCEEMREERQDRLKFIDKQLELLAQDYKLRIKQITEEVERQVRNEEEAFWEDLDSEESPEESRPPPLRDFSAFQKKVVALFQEYSSCRLGSIVGLCDAGHVPFPLDLHRSCGRLISQFPRPSHFRGFNSIEELRRLLFERKDVPSARISPGAAGVNFGLPGYLTVCFLLLYVSTAMAEEIRRLSVLVDDYQMDFHPSPVVLKVYKNELHRHIEEGLGRNMSDRCSTAITNSLQTMQQDMIDGLKPLLPVSVRSQIDMLVPRQCFSLNYDLNCDKLCADFQEDIEFHFSLGWTMLVNRFLGPKNSRRALMGYNDQVQRPIPLTPANPSMPPLPQGSLTQEEFMVSMVTGLASLTSRTSMGILVVGGVVWKAVGWRLIALSFGLYGLLYVYERLTWTTKAKERAFKRQFVEHASEKLQLVISYTGSNCSHQVQQELSGTFAHLCQQVDVTRENLEQEIAAMNKKIEVLDSLQSKAKLLRNKAGWLDSELNMFTHQYLQPSR

SEQ ID NO: 811381 - protein, 207 aa, Homo sapiens [sequence omitted]

SEQ ID NO: 811382 - protein, 757 aa, Homo sapiens; identical to SEQ ID NO: 811370

SEQ ID NO: 811383 - protein, 177 aa, Homo sapiens
MSLLFSRCNSIVTVKKNKRHMAEVNASPLKHFVTAKKKINGIFEQLGAYIQESATFLEDTYRNAELDPVTTEEQVLDVKGYLSKVRGISEVLARRHMKVAFFGRTSNGKSTVINAMLWDKVLPSGIGHTTNCFLRVEGTDGHEAFLLTEGSEEKRSAKTVNQLAHALHQDKQLEEWE

SEQ ID NO: 811384 - protein, 177 aa, Homo sapiens; identical to SEQ ID NO: 811383

SEQ ID NO: 811385 - protein, 757 aa, Homo sapiens; identical to SEQ ID NO: 811370

SEQ ID NO: 811386 - protein, 757 aa, Homo sapiens; identical to SEQ ID NO: 811370

SEQ ID NO: 811387 - protein, 542 aa, Homo sapiens
MSLLFSRCNSIVTVKKNKRHMAEVNASPLKHFVTAKKKINGIFEQLGAYIQESATFLEDTYRNAELDPVTTEEQVLDVKGYLSKVRGISEVLARRHMKVAFFGRTSNGKSTVINAMLWDKVLPSGIGHTTNCFLRVEGTDGHEAFLLTEGSEEKRSAKTVNQLAHALHQDKQLHAGSLVSVMWPNSKCPLLKDDLVLMDSPGIDVTTELDSWIDKFCLDADVFVLVANSESTLMQTEKHFFHKVSERLSRPNIFILNNRWDASASEPEYMEEVRRQHMERCTSFLVDELGVVDRSQAGDRIFFVSAKEVLNARIQKAQGMPEGGGALAEGFQVRMFEFQNFERRFEECISQSAVKTKFEQHTVRAKQIAEAVRLIMDSLHMAAREQQVYCEEMREERQDRLKFIDKQLELLAQDYKLRIKQITEEVERQVSTAMAEEIRRLSVLVDDYQMDFHPSPVVLKVYKNELHRHIEEGLGRNMSDRCSTAITNSLQTMQQDMIDGLKPLLPVSVRSQIDMLVPRQCFSLNYDLNCDKLCTVWWPHHR

SEQ ID NO: 811388 - protein, 757 aa, Homo sapiens; identical to SEQ ID NO: 811370

SEQ ID NO: 811389 - protein, 289 aa, Homo sapiens; identical to SEQ ID NO: 811372

SEQ ID NO: 811390 - protein, 706 aa, Homo sapiens
MSLLFSRCNSIVTVKKNKRHMAEVNASPLKHFVTAKKKINGIFEQLGAYIQESATFLEDTYRNAELDPVTTEEQVLDVKGYLSKVRGISEVLARRHMKVAFFGRTSNGKSTVINAMLWDKVLPSGIGHTTNCFLRVEGTDGHEAFLLTEGSEEKRSAKTVNQLAHALHQDKQLHAGSLVSVMWPNSKCPLLKDDLVLMDSPGIDVTTELDSWIDKFCLDADVFVLVANSESTLMQTEKHFFHKVSERLSRPNIFILNNRWDASASEPEYMEEVRRQHMERCTSFLVDELGVVDRSQAGDRIFFVSAKEVLNARIQKAQGMPEGGGALAEGFQVRMFEFQNFERRFEECISQSAVKTKFEQHTVRAKQIAEAVRLIMDSLHMAAREQQVYCEEMREERQDRLKFIDKQLELLAQDYKLRIKQITEEVERQVSTAMAEEIRRLSVLVDDYQMDFHPSPVVLKVYKNELHRHIEEGLGRNMSDRCSTAITNSLQTMQQDMIDGLKPLLPVSVRSQIDMLVPRQCFSLNYDLNCDKLCADFQEDIEFHFSLGWTMLVNRFLGPKNSRRALMGYNDQVQRPIPLTPANPSMPPLPQGSLTQEEFMVSMVTGLASLTSRTSMGILVVGGVVWKAVGWRLIALSFGLYGLLYVYERLTWTTKAKERAFKRQFVEHASEKLQLVISYTGSNCSHQVQHRGPAAQPSLIFEEMSW

SEQ ID NO: 811391 - protein, 714 aa, Homo sapiens
MSLLFSRCNSIVTVKKNKRHMAEVNASPLKHFVTAKKKINGIFEQLGAYIQESATFLEDTYRNAELDPVTTEEQVLDVKGYLSKVRGISEVLARRHMKVAFFGRTSNGKSTVINAMLWDKVLPSGIGHTTNCFLRVEGTDGHEAFLLTEGSEEKRSAKTVNQLAHALHQDKQLHAGSLVSVMWPNSKCPLLKDDLVLMDSPGIDVTTELDSWIDKFCLDADVFVLVANSESTLMQTEKHFFHKVSERLSRPNIFILNNRWDASASEPEYMEEVRRQHMERCTSFLVDELGVVDRSQAGDRIFFVSAKEVLNARIQKAQGMPEGGGALAEGFQVRMFEFQNFERRFEECISQSAVKTKFEQHTVRAKQIAEAVRLIMDSLHMAAREQQVYCEEMREERQDRLKFIDKQLELLAQDYKLRIKQITEEVERQVSTAMAEEIRRLSVLVDDYQMDFHPSPVVLKVYKNELHRHIEEGLGRNMSDRCSTAITNSLQTMQQDMIDGLKPLLPVSVRSQIDMLVPRQCFSLNYDLNCDKLCADFQEDIEFHFSLGWTMLVNRFLGPKNSRRALMGYNDQVQRPIPLTPANPSMPPLPQGSLTQEEFMVSMVTGLASLTSRTSMGILVVGGVVWKAVGWRLIALSFGLYGLLYVYERLTWTTKAKERAFKRQFVEHASEKLQLVISYTGSNCSHQVQQELSGTFAHLCQQVDVTRENGRDPF

SEQ ID NO: 811392 - protein, 200 aa, Homo sapiens [sequence omitted]

SEQ ID NO: 811393 - protein, 184 aa, Homo sapiens
MAADESSQNTLRLQFKAMQEMQHKRLQKQMEKKREKELSLKSRADDQEEPLEVSDGLSLLHAGEPNSKNSFEKRVLEDEIEHLRNELRETVDENGRLYKLLKERDFEIKHLKKKIEEDRFAFTGTAGVAGDVVATKIVELSKKNRLLMAESEGAKTRVKQLTNRIQELEREVRGLGHSPSGGDS

SEQ ID NO: 811394 - protein, 228 aa, Homo sapiens
MAADESSQNTLRLQFKAMQEMQHKRLQKQMEKKREKELSLKSRADDQEEPLEVSDGLSLLHAGEPNSKNSFEKRVLEDEIEHLRNELRETVDENGRLYKLLKERDFEIKHLKKKIEEDRFAFTGTAGVAGDVVATKIVELSKKNRLLMAESEGAKTRVKQLTNRIQELERELQTALTRLSAKGATDAGAKPPRAQMGDRALLETPEVKALQDRLVATNLKMSDLRNQI

SEQ ID NO: 811395 - protein, 976 aa, Homo sapiens
MDPEYEEKMKADRAKRFEFLLKQTELFAHFIQPSAQKSPTSPLNMKLGRPRIKKDEKQSLISAGDYRHRRTEQEEDEELLSESRKTSNVCIRFEVSPSYVKGGPLRDYQIRGLNWLISLYENGVNGILADEMGLGKTLQTIALLGYLKHYRNIPGPHMVLVPKSTLHNWMNEFKRWVPSLRVICFVGDKDARAAFIRDEMMPGEWDVCVTSYEMVIKEKSVFKKFHWRYLVIDEAHRIKNEKSKLSEIVREFKSTNRLLLTGTPLQNNLHELWALLNFLLPDVFNSADDFDSWFDTKNCLGDQKLVERLHAVLKPFLLRRIKTDVEKSLPPKKEIKIYLGLSKMQREWYTKILMKDIDVLNSSGKMDKMRLLNILMQLRKCCNHPYLFDGAEPGPPYTTDEHIVSNSGKMVVLDKLLAKLKEQGSRVLIFSQMTRLLDILEDYCMWRGYEYCRLDGQTPHEEREDKFLEVEFLGQREAIEAFNAPNSSKFIFMLSTRAGGLGINLASADVVILYDSDWNPQVDLQAMDRAHRIGQKKPVRVFRLITDNTVEERIVERAEIKLRLDSIVIQQGRLIDQQSNKLAKEEMLQMIRHGATHVFASKESELTDEDITTILERGEKKTAEMNERLQKMGESSLRNFRMDIEQSLYKFEGEDYREKQKLGMVEWIEPPKRERKANYAVDAYFREALRVSEPKIPKAPRPPKQPNVQDFQFFPPRLFELLEKEILYYRKTIGYKVPRNPDIPNPALAQREEQKKIDGAEPLTPEETEEKEKLLTQGFTNWTKRDFNQFIKANEKYGRDDIDNIAREVEGKSPEEVMEYSAVFWERCNELQDIEKIMAQIERGEARIQRRISIKKALDAKIARYKAPFHQLRIQYGTSKGKNYTEEEDRFLICMLHKMGFDRENVYEELRQCVRNAPQFRFDWFIKSRTAMEFQRRCNTLISLIEKENMEIEERERAEKKKRATKTPMVKFSAFS

SEQ ID NO: 811396 - protein, 1195 aa, Homo sapiens
KIHYDQVGFILGMYDWFHICKLISIIDHISRTKNKDHMIFSIDIEKVFDKIQYSFILKTLKNSVYMEYNNNKGHKFTANFILNGEKLKAFPLKSGKNQECSLSPFLCNIPCSIYLFPVQPLPPPRSPRPLPCPPTRSRSHGMEQDTAAVAATVAAADATATIVVIEDEQPGPSTSQEEGAAAAATEATAATEKGEKKKEKNVSSFQLKLAAKAPKSEKEMDPEYEEKMKADRAKRFEFLLKQTELFAHFIQPSAQKSPTSPLNMKLGRPRIKKDEKQSLISAGDYRHRRTEQEEDEELLSESRKTSNVCIRFEVSPSYVKGGPLRDYQIRGLNWLISLYENGVNGILADEMGLGKTLQTIALLGYLKHYRNIPGPHMVLVPKSTLHNWMNEFKRWVPSLRVICFVGDKDARAAFIRDEMMPGEWDVCVTSYEMVIKEKSVFKKFHWRYLVIDEAHRIKNEKSKLSEIVREFKSTNRLLLTGTPLQNNLHELWALLNFLLPDVFNSADDFDSWFDTKNCLGDQKLVERLHAVLKPFLLRRIKTDVEKSLPPKKEIKIYLGLSKMQREWYTKILMKDIDVLNSSGKMDKMRLLNILMQLRKCCNHPYLFDGAEPGPPYTTDEHIVSNSGKMVVLDKLLAKLKEQGSRVLIFSQMTRLLDILEDYCMWRGYEYCRLDGQTPHEEREDKFLEVEFLGQREAIEAFNAPNSSKFIFMLSTRAGGLGINLASADVVILYDSDWNPQVDLQAMDRAHRIGQKKPVRVFRLITDNTVEERIVERAEIKLRLDSIVIQQGRLIDQQSNKLAKEEMLQMIRHGATHVFASKESELTDEDITTILERGEKKTAEMNERLQKMGESSLRNFRMDIEQSLYKFEGEDYREKQKLGMVEWIEPPKRERKANYAVDAYFREALRVSEPKIPKAPRPPKQPNVQDFQFFPPRLFELLEKEILYYRKTIGYKVPRNPDIPNPALAQREEQKKIDGAEPLTPEETEEKEKLLTQGFTNWTKRDFNQFIKANEKYGRDDIDNIAREVEGKSPEEVMEYSAVFWERCNELQDIEKIMAQIERGEARIQRRISIKKALDAKIARYKAPFHQLRIQYGTSKGKNYTEEEDRFLICMLHKMGFDRENVYEELRQCVRNAPQFRFDWFIKSRTAMEFQRRCNTLISLIEKENMEIEERERAEKKKRATKTPMVKFSAFS

SEQ ID NO: 811397 - protein, 1189 aa, Homo sapiens
KIHYDQVGFILGMYDWFHICKLISIIDHISRTKNKDHMIFSIDIEKVFDKIQYSFILKTLKNSVYMEYNNNKGHKFTANFILNGEKLKAFPLKSGKNQECSLSPFLCNIPCSIYLFPVQPLPPPRSPRPLPCPPTRSRSHGMEQDTAAVAATVAAADATATIVVIEDEQPGPSTSQEEGAAAAATEATAATEKGEKKKEKNVSSFQLKLAAKAPKSEKEMDPEYEEKMKADRAKRFEFLLKQTELFAHFIQPSAQKSPTSPLNMKLGRPRIKKDEKQSLISAGDYRHRRTEQEEDEELLSESRKTSNVCIRFEVSPSYVKGGPLRDYQIRGLNWLISLYENGVNGILADEMGLGKTLQTIALLGYLKHYRNIPGPHMVLVPKSTLHNWMNEFKRWVPSLRVICFVGDKDARAAFIRDEMMPGEWDVCVTSYEMVIKEKSVFKKFHWRYLVIDEAHRIKNEKSKLSEIVREFKSTNRLLLTGTPLQNNLHELWALLNFLLPDVFNSADDFDSWFDTKNCLGDQKLVERLHAVLKPFLLRRIKTDVEKSLPPKKEIKIYLGLSKMQREWYTKILMKDIDVLNSSGKMDKMRLLNILMQLRKCCNHPYLFDGAEPGPPYTTDEHIVSNSGKMVVLDKLLAKLKEQGSRVLIFSQMTRLLDILEDYCMWRGYEYCRLDGQTPHEEREDKFLEVEFLGQREAIEAFNAPNSSKFIFMLSTRAGGLGINLASADVVILYDSDWNPQVDLQAMDRAHRIGQKKPVRVFRLITDNTVEERIVERAEIKLRLDSIVIQQGRLIDQQSNKLAKEEMLQMIRHGATHVFASKESELTDEDITTILERGEKKTAEMNERLQKMGESSLRNFRMDIEQSLYKFEGEDYREKQKLGMVEWIEPPKRERKANYAVDAYFREALRVSEPKIPKAPRPPKQPNVQDFQFFPPRLFELLEKEILYYRKTIGYKVPRNPDIPNPALAQREEQKKIDGAEPLTPEETEEKEKLLTQGFTNWTKRDFNQFIKANEKYGRDDIDNIAREVEGKSPEEVMEYSAVFWERCNELQDIEKIMAQIERGEARIQRRISIKKALDAKIARYKAPFHQLRIQYGTSKGKNYTEEEDRFLICMLHKMGFDRENVYEELRQCVRNAPQFRFDWFIKSRTAMEFQRRCNTLISLIEKENMEIEERERAEKKKRATKTPMI

SEQ ID NO: 811398 - protein, 1033 aa, Homo sapiens
MEQDTAAVAATVAAADATATIVVIEDEQPGPSTSQEEKNVSSFQLKLAAKAPKSEKEMDPEYEEKMKADRAKRFEFLLKQTELFAHFIQPSAQKSPTSPLNMKLGRPRIKKDEKQSLISAGDYRHRRTEQEEDEELLSESRKTSNVCIRFEVSPSYVKGGPLRDYQIRGLNWLISLYENGVNGILADEMGLGKTLQTIALLGYLKHYRNIPGPHMVLVPKSTLHNWMNEFKRWVPSLRVICFVGDKDARAAFIRDEMMPGEWDVCVTSYEMVIKEKSVFKKFHWRYLVIDEAHRIKNEKSKLSEIVREFKSTNRLLLTGTPLQNNLHELWALLNFLLPDVFNSADDFDSWFDTKNCLGDQKLVERLHAVLKPFLLRRIKTDVEKSLPPKKEIKIYLGLSKMQREWYTKILMKDIDVLNSSGKMDKMRLLNILMQLRKCCNHPYLFDGAEPGPPYTTDEHIVSNSGKMVVLDKLLAKLKEQGSRVLIFSQMTRLLDILEDYCMWRGYEYCRLDGQTPHEEREDKFLEVEFLGQREAIEAFNAPNSSKFIFMLSTRAGGLGINLASADVVILYDSDWNPQVDLQAMDRAHRIGQKKPVRVFRLITDNTVEERIVERAEIKLRLDSIVIQQGRLIDQQSNKLAKEEMLQMIRHGATHVFASKESELTDEDITTILERGEKKTAEMNERLQKMGESSLRNFRMDIEQSLYKFEGEDYREKQKLGMVEWIEPPKRERKANYAVDAYFREALRVSEPKIPKAPRPPKQPNVQDFQFFPPRLFELLEKEILYYRKTIGYKVPRNPDIPNPALAQREEQKKIDGAEPLTPEETEEKEKLLTQGFTNWTKRDFNQFIKANEKYGRDDIDNIAREVEGKSPEEVMEYSAVFWERCNELQDIEKIMAQIERGEARIQRRISIKKALDAKIARYKAPFHQLRIQYGTSKGKNYTEEEDRFLICMLHKMGFDRENVYEELRQCVRNAPQFRFDWFIKSRTAMEFQRRCNTLISLIEKENMEIEERERAEKKKRATKTPMVKFSAFS

SEQ ID NO: 811399 - protein, 1211 aa, Homo sapiens
KIHYDQVGFILGMYDWFHICKLISIIDHISRTKNKDHMIFSIDIEKVFDKIQYSFILKTLKNSVYMEYNNNKGHKFTANFILNGEKLKAFPLKSGKNQECSLSPFLCNIPCSIYLFPVQPLPPPRSPRPLPCPPTRSRSHGMEQDTAAVAATVAAADATATIVVIEDEQPGPSTSQEEGAAAAATEATAATEKGEKKKEKNVSSFQLKLAAKAPKSEKEMDPEYEEKMKADRAKRFEFLLKQTELFAHFIQPSAQKSPTSPLNMKLGRPRIKKDEKQSLISAGDYRHRRTEQEEDEELLSESRKTSNVCIRFEVSPSYVKGGPLRDYQIRGLNWLISLYENGVNGILADEMGLGKTLQTIALLGYLKHYRNIPGPHMVLVPKSTLHNWMNEFKRWVPSLRVICFVGDKDARAAFIRDEMMPGEWDVCVTSYEMVIKEKSVFKKFHWRYLVIDEAHRIKNEKSKLSEIVREFKSTNRLLLTGTPLQNNLHELWALLNFLLPDVFNSADDFDSWFDTKNCLGDQKLVERLHAVLKPFLLRRIKTDVEKSLPPKKEIKIYLGLSKMQREWYTKILMKDIDVLNSSGKMDKMRLLNILMQLRKCCNHPYLFDGAEPGPPYTTDEHIVSNSGKMVVLDKLLAKLKEQGSRVLIFSQMTRLLDILEDYCMWRGYEYCRLDGQTPHEEREDKFLEVEFLGQREAIEAFNAPNSSKFIFMLSTRAGGLGINLASADVVILYDSDWNPQVDLQAMDRAHRIGQKKPVRVFRLITDNTVEERIVERAEIKLRLDSIVIQQGRLIDQQSNKLAKEEMLQMIRHGATHVFASKESELTDEDITTILERGEKKTAEMNERLQKMGESSLRNFRMDIEQSLYKFEGEDYREKQKLGMVEWIEPPKRERKANYAVDAYFREALRVSEPKIPKAPRPPKQPNVQDFQFFPPRLFELLEKEILYYRKTIGYKVPRNPDIPNPALAQREEQKKIDGAEPLTPEETEEKEKLLTQGFTNWTKRDFNQFIKANEKYGRDDIDNIAREVEGKSPEEVMEYSAVFWERCNELQDIEKIMAQIERGEARIQRRISIKKALDAKIARYKAPFHQLRIQYGTSKGKNYTEEEDRFLICMLHKMGFDRENVYEELRQCVRNAPQFRFDWFIKSRTAMEFQRRCNTLISLIEKENMEIEERERAEKKKRATKTPMSQKRKAESATESSGKKDVKKVKS

SEQ ID NO: 811400 - protein, 1042 aa, Homo sapiens
MEQDTAAVAATVAAADATATIVVIEDEQPGPSTSQEEGAAAAATEATAATEKGEKKKEKNVSSFQLKLAAKAPKSEKEMDPEYEEKMKADRAKRFEFLLKQTELFAHFIQPSAQKSPTSPLNMKLGRPRIKKDEKQSLISAGDYRHRRTEQEEDEELLSESRKTSNVCIRFEVSPSYVKGGPLRDYQIRGLNWLISLYENGVNGILADEMGLGKTLQTIALLGYLKHYRNIPGPHMVLVPKSTLHNWMNEFKRWVPSLRVICFVGDKDARAAFIRDEMMPGEWDVCVTSYEMVIKEKSVFKKFHWRYLVIDEAHRIKNEKSKLSEIVREFKSTNRLLLTGTPLQNNLHELWALLNFLLPDVFNSADDFDSWFDTKNCLGDQKLVERLHAVLKPFLLRRIKTDVEKSLPPKKEIKIYLGLSKMQREWYTKILMKDIDVLNSSGKMDKMRLLNILMQLRKCCNHPYLFDGAEPGPPYTTDEHIVSNSGKMVVLDKLLAKLKEQGSRVLIFSQMTRLLDILEDYCMWRGYEYCRLDGQTPHEEREEAIEAFNAPNSSKFIFMLSTRAGGLGINLASADVVILYDSDWNPQVDLQAMDRAHRIGQKKPVRVFRLITDNTVEERIVERAEIKLRLDSIVIQQGRLIDQQSNKLAKEEMLQMIRHGATHVFASKESELTDEDITTILERGEKKTAEMNERLQKMGESSLRNFRMDIEQSLYKFEGEDYREKQKLGMVEWIEPPKRERKANYAVDAYFREALRVSEPKIPKAPRPPKQPNVQDFQFFPPRLFELLEKEILYYRKTIGYKVPRNPDIPNPALAQREEQKKIDGAEPLTPEETEEKEKLLTQGFTNWTKRDFNQFIKANEKYGRDDIDNIAREVEGKSPEEVMEYSAVFWERCNELQDIEKIMAQIERGEARIQRRISIKKALDAKIARYKAPFHQLRIQYGTSKGKNYTEEEDRFLICMLHKMGFDRENVYEELRQCVRNAPQFRFDWFIKSRTAMEFQRRCNTLISLIEKENMEIEERERAEKKKRATKTPMVKFSAFS

SEQ ID NO: 811401 - protein, 1195 aa, Homo sapiens; identical to SEQ ID NO: 811396

SEQ ID NO: 811402 - protein, 982 aa, Homo sapiens
MEQDTAAVAATVAAADATATIVVIEDEQPGPSTSQEEGAAAAATEATAATEKGEKKKEKNVSSFQLKLAAKAPKSEKEMDPEYEEKMKADRAKRFEFLLKQTELFAHFIQPSAQKSPTSPLNMKLGRPRIKKDEKQSLISAGDYRHRRTEQEEDEELLSESRKTSNVCIRFEVSPSYVKGGPLRDYQIRGLNWLISLYENGVNGILADEMAAFIRDEMMPGEWDVCVTSYEMVIKEKSVFKKFHWRYLVIDEAHRIKNEKSKLSEIVREFKSTNRLLLTGTPLQNNLHELWALLNFLLPDVFNSADDFDSWFDTKNCLGDQKLVERLHAVLKPFLLRRIKTDVEKSLPPKKEIKIYLGLSKMQREWYTKILMKDIDVLNSSGKMDKMRLLNILMQLRKCCNHPYLFDGAEPGPPYTTDEHIVSNSGKMVVLDKLLAKLKEQGSRVLIFSQMTRLLDILEDYCMWRGYEYCRLDGQTPHEEREEAIEAFNAPNSSKFIFMLSTRAGGLGINLASADVVILYDSDWNPQVDLQAMDRAHRIGQKKPVRVFRLITDNTVEERIVERAEIKLRLDSIVIQQGRLIDQQSNKLAKEEMLQMIRHGATHVFASKESELTDEDITTILERGEKKTAEMNERLQKMGESSLRNFRMDIEQSLYKFEGEDYREKQKLGMVEWIEPPKRERKANYAVDAYFREALRVSEPKIPKAPRPPKQPNVQDFQFFPPRLFELLEKEILYYRKTIGYKVPRNPDIPNPALAQREEQKKIDGAEPLTPEETEEKEKLLTQGFTNWTKRDFNQFIKANEKYGRDDIDNIAREVEGKSPEEVMEYSAVFWERCNELQDIEKIMAQIERGEARIQRRISIKKALDAKIARYKAPFHQLRIQYGTSKGKNYTEEEDRFLICMLHKMGFDRENVYEELRQCVRNAPQFRFDWFIKSRTAMEFQRRCNTLISLIEKENMEIEERERAEKKKRATKTPMVKFSAFS

SEQ ID NO: 811403 - protein, 1200 aa, Homo sapiens
KIHYDQVGFILGMYDWFHICKLISIIDHISRTKNKDHMIFSIDIEKVFDKIQYSFILKTLKNSVYMEYNNNKGHKFTANFILNGEKLKAFPLKSGKNQECSLSPFLCNIPCSIYLFPVQPLPPPRSPRPLPCPPTRSRSHGMEQDTAAVAATVAAADATATIVVIEDEQPGPSTSQEEGAAAAATEATAATEKGEKKKEKNVSSFQLKLAAKAPKSEKEMDPEYEEKMKADRAKRFEFLLKQTELFAHFIQPSAQKSPTSPLNMKLGRPRIKKDEKQSLISAGDYRHRRTEQEEDEELLSESRKTSNVCIRFEVSPSYVKGGPLRDYQIRGLNWLISLYENGVNGILADEMGLGKTLQTIALLGYLKHYRNIPGPHMVLVPKSTLHNWMNEFKRWVPSLRVICFVGDKDARAAFIRDEMMPGEWDVCVTSYEMVIKEKSVFKKFHWRYLVIDEAHRIKNEKSKLSEIVREFKSTNRLLLTGTPLQNNLHELWALLNFLLPDVFNSADDFDSWFDTKNCLGDQKLVERLHAVLKPFLLRRIKTDVEKSLPPKKEIKIYLGLSKMQREWYTKILMKDIDVLNSSGKMDKMRLLNILMQLRKCCNHPYLFDGAEPGPPYTTDEHIVSNSGKMVVLDKLLAKLKEQGSRVLIFSQMTRLLDILEDYCMWRGYEYCRLDGQTPHEEREDKFLEVEFLGQREAIEAFNAPNSSKFIFMLSTRAGGLGINLASADVVILYDSDWNPQVDLQAMDRAHRIGQKKPVRVFRLITDNTVEERIVERAEIKLRLDSIVIQQGRLIDQQSNKLAKEEMLQMIRHGATHVFASKESELTDEDITTILERGEKKTAEMNERLQKMGESSLRNFRMDIEQSLYKFEGEDYREKQKLGMVEWIEPPKRERKANYAVDAYFREALRVSEPKIPKAPRPPKQPNVQDFQFFPPRLFELLEKEILYYRKTIGYKVPRNPDIPNPALAQREEQKKIDGAEPLTPEETEEKEKLLTQGFTNWTKRDFNQFIKANEKYGRDDIDNIAREVEGKSPEEVMEYSAVFWERCNELQDIEKIMAQIERGEARIQRRISIKKALDAKIARYKAPFHQLRIQYGTSKGKNYTEEEDRFLICMLHKMGFDRENVYEELRQCVRNAPQFRFDWFIKSRTAMEFQRRCNTLISLIEKENMEIEERERAEKKKRATKTPMGGCGARCNRKFH

SEQ ID NO: 811404 - protein, 103 aa, Homo sapiens
MEQDTAAVAATVAAADATATIVVIEDEQPGPSTSQEEGAAAAATEATAATEKGEKKKEKNVSSFQLKLAAKAPKSEKEMDPEYEEKMKADRAKRFEFLLKQSS

SEQ ID NO: 811405 - protein, 701 aa, Homo sapiens
MDESPEPLQQGRGPVPVRRQRPAPRGLREMLKARLWCSCSCSVLCVRALVQDLLPATRWLRQYRPREYLAGDVMSGLVIGIILVPQAIAYSLLAGLQPIYSLYTSFFANLIYFLMGTSRHVSVGIFSLLCLMVGQVVDRELQLAGFDPSQDGLQPGANSSTLNGSAAMLDCGRDCYAIRVATALTLMTGLYQVLMGVLRLGFVSAYLSQPLLDGFAMGASVTILTSQLKHLLGVRIPRHQGPGMVVLTWLSLLRGAGQANVCDVVTSTVCLAVLLAAKELSDRYRHRLRVPLPTELLVIVVATLVSHFGQLHKRFGSSVAGDIPTGFMPPQVPEPRLMQRVALDAVALALVAAAFSISLAEMFARSHGYSVRANQELLAVGCCNVLPAFLHCFATSAALAKSLVKTATGCRTQLSSVVSATVVLLVLLALAPLFHDLQRSVLACVIVVSLRGALRKVWDLPRLWRMSPADALVWAGTAATCMLVSTEAGLLAGVILSLLSLAGRTQRPRTALLARIGDTAFYEDATEFEGLVPEPGVRVFRFGGPLYYANKDFFLQSLYSLTGLDAGCMAARRKEGGSETGVGEGGPAQGEDLGPVSTRAALVPAAAGFHTVVIDCAPLLFLDAAGVSTLQDLRRDYGALGISLLLACCSPPVRDILSRGGFLGEGPGDTAEEEQLFLSVHDAVQTARARHRELEATDAHL

SEQ ID NO: 811406 - protein, 619 aa, Homo sapiens
MDESPEPLQQGRGPVPVRRQRPAPRGLREMLKARLWCSCSCSVLCVRALVQDLLPATRWLRQYRPREYLAGDVMSGLVIGIILVPQAIAYSLLAGLQPIYSLYTSFFANLIYFLMGTSRHVSVGIFSLLCLMVGQVVDRELQLAGFDPSQDGLQPGANSSTLNGSAAMLDCGRDCYAIRVATALTLMTGLYQVLMGVLRLGFVSAYLSQPLLDGFAMGASVTILTSQLKHLLGVRIPRHQGPGMVVLTWLSLLRGAGQANVCDVVTSTVCLAVLLAAKELSDRYRHRLRVPLPTELLVIVVATLVSHFGQLHKRFGSSVAGDIPTGFMPPQVPEPRLMQRVALDAVALALVAAAFSISLAEMFARSHGYSVRANQELLAVGCCNVLPAFLHCFATSAALAKSLVKTATGCRTQLSSVVSATVVLLVLLALAPLFHDLQRSVLACVIVVSLRGALRKVWDLPRLWRMSPADALVWAGTAATCMLVSTEAGLLAGVILSLLSLAGRTQRPRTALLARIGDTAFYEDATEFEGLVPEPGVRVFRFGGPLYYANKDFFLQSKKKKKKKKKKKKKKKGGGPKKKTPGGAHILARLTPGFFVKKGGPPKRKGAIYKHNRTEGARG

SEQ ID NO: 811407 - protein, 224 aa, Homo sapiens
MDESPEPLQQGRGPVPVRRQRPAPRGLREMLKARLWCSCSCSVLCVRALVQDLLPATRWLRQYRPREYLAGDVMSGLVIGIILVPQAIAYSLLAGLQPIYSLYTSFFANLIYFLMGTSRHVSVGIFSLLCLMVGQVVDRELQLAGFDPSQDGLQPGANSSTLNGSAAMLDCGRDCYAIRVATALTLMTGLYQTSWGRNSFQQHPWQLTQRSDSQELLEEEERSC

SEQ ID NO: 811408 - protein, 258 aa, Homo sapiens
MDESPEPLQQGRGPVPVRRQRPAPRGLREMLKARLWCSCSCSVLCVRALVQDLLPATRWLRQYRPREYLAGDVMSGLVIGIILVPQAIAYSLLAGLQPIYSLYTSFFANLIYFLMGTSRHVSVGIFSLLCLMVGQVVDRELQLAGFDPSQDGLQPGANSSTLNGSAAMLDCGRDCYAIRVATALTLMTGLYQAFCPRWSGGWPPHPRRSPALACPPWPPLAPHLHGGQWAPCVGSSRKGLPSDTRGLNSEIKRAAARD

SEQ ID NO: 811409 - protein, 306 aa, Homo sapiens
MAAVDDLQFEEFGNAATSLTANPDATTVNIEDPGETPKHQPGSPRGSGREEDDELLGNDDSDKTELLAGQKKSSPFWTFEYYQTFFDVDTYQVFDRIKGSLLPIPGKNFVRLYIRSNPDLYGPFWICATLVFAIAISGNLSNFLIHLGEKTYHYVPEFRKVSIAATIIYAYAWLVPLALWGFLMWRNSKVMNIVSYSFLEIVCVYGYSLFIYIPTAILWIIPQKAVRWILVMIALGISGSLLAMTFWPAVREDNRRVALATIVTIVLLHMLLSVGCLAYFFDAPEMDHLPTTTATPNQTVAAAKSS

SEQ ID NO: 811410 - protein, 306 aa, Homo sapiens; identical to SEQ ID NO: 811409

SEQ ID NO: 811411 - protein, 306 aa, Homo sapiens; identical to SEQ ID NO: 811409

SEQ ID NO: 811412 - protein, 306 aa, Homo sapiens; identical to SEQ ID NO: 811409

SEQ ID NO: 811413 - protein, 306 aa, Homo sapiens; identical to SEQ ID NO: 811409

SEQ ID NO: 811414 - protein, 306 aa, Homo sapiens; identical to SEQ ID NO: 811409

SEQ ID NO: 811415 - protein, 338 aa, Homo sapiens
PEEAERFRPPDLRLPATGLDRNRRGATEARAFSGPGGRLTPREFGNAATSLTANPDATTVNIEDPGETPKHQPGSPRGSGREEDDELLGNDDSDKTELLAGQKKSSPFWTFEYYQTFFDVDTYQVFDRIKGSLLPIPGKNFVRLYIRSNPDLYGPFWICATLVFAIAISGNLSNFLIHLGEKTYHYVPEFRKVSIAATIIYAYAWLVPLALWGFLMWRNSKVMNIVSYSFLEIVCVYGYSLFIYIPTAILWIIPQKAVRWILVMIALGISGSLLAMTFWPAVREDNRRVALATIVTIVLLHMLLSVGCLAYFFDAPEMDHLPTTTATPNQTVAAAKSS

SEQ ID NO: 811416 - protein, 247 aa, Homo sapiens
MTCNLKLLAGQKKSSPFWTFEYYQTFFDVDTYQVFDRIKGSLLPIPGKNFVRLYIRSNPDLYGPFWICATLVFAIAISGNLSNFLIHLGEKTYHYVPEFRKVSIAATIIYAYAWLVPLALWGFLMWRNSKVMNIVSYSFLEIVCVYGYSLFIYIPTAILWIIPQKAVRWILVMIALGISGSLLAMTFWPAVREDNRRVALATIVTIVLLHMLLSVGCLAYFFDAPEMDHLPTTTATPNQTVAAAKSS

SEQ ID NO: 811417 - protein, 336 aa, Homo sapiens
MAAVDDLQFEEFGNAATSLTANPDATTVNIEDPGETPKHQPGSPRGSGREEDDELLGNDDSDKTEVTVSGNDSSEVNDTWPLPWWGKQANRPLLSLLAGQKKSSPFWTFEYYQTFFDVDTYQVFDRIKGSLLPIPGKNFVRLYIRSNPDLYGPFWICATLVFAIAISGNLSNFLIHLGEKTYHYVPEFRKVSIAATIIYAYAWLVPLALWGFLMWRNSKVMNIVSYSFLEIVCVYGYSLFIYIPTAILWIIPQKAVRWILVMIALGISGSLLAMTFWPAVREDNRRVALATIVTIVLLHMLLSVGCLAYFFDAPEMDHLPTTTATPNQTVAAAKSS

SEQ ID NO: 811418 - protein, 80 aa, Homo sapiens
PEEAERFRPPDLRLPATGLDRNRRGATEARAFSGPGGRLTPRDEETEAARSAHTAEKQQNRESNPALSDPRACAFNHWLG

SEQ ID NO: 811419 - protein, 306 aa, Homo sapiens; identical to SEQ ID NO: 811409

SEQ ID NO: 811420 - protein, 336 aa, Homo sapiens; identical to SEQ ID NO: 811417

SEQ ID NO: 811421 - protein, 247 aa, Homo sapiens; identical to SEQ ID NO: 811416

SEQ ID NO: 811422 - protein, 269 aa, Homo sapiens
MPPQLQNGLNLSAKVVQGSLDSLPQAVREFLENNAELCQPDHIHICDGSEEENGRLLGQMEEEGILRRLKKYDNCWLALTDPRDVARIESKTVIVTQEQRDTVPIPKTGLSQLGRWMSEEDFEKAFNARFPGCMKGRTMYVIPFSMGPLGSPLSKIGIELTDSPYVVASMRIMTRMGTPVLEALGDGEFVKCLHSVGCPLPLQKPLVNNWPCNPELTLIAHLPDRREIISFGSGYGGNSLLGKKCFALRMASRLAKEEGWLAEHMLIWV

SEQ ID NO: 811423 - protein, 739 aa, Homo sapiens
MPPQLQNGLNLSAKVVQGSLDSLPQAVREFLENNAELCQPDHIHICDGSEEENGRLLGQMEEEGILRRLKKYDNCWLALTDPRDVARIESKTVIVTQEQRDTVPIPKTGLSQLGRWMSEEDFEKAFNARFPGCMKGRTMYVIPFSMGPLGSPLSKIGIELTDSPYVVASMRIMTRMGTPVLEALGDGEFVKCLHSVGCPLPLQKPLVNNWPCNPELTLIAHLPDRREIISFGSGYGGNSLLGKKCFALRMASRLAKEEGWLAEHMLVSLQEALMLQMRGLGGGRNKQHYSSHPSAHLSERAGSRTDRETPPVMISLHIYIAFEGPQTPGDHRDPLDFMILGVFVCTDDLKKYILRAYIPTSGLKYQPRGEGNKDHNKESCPQQILGITNPEGEKKYLAAAFPSACGKTNLAMMNPSLPGWKVECVGDDIAWMKFDAQGHLRAINPENGFFGVAPGTSVKTNPNAIKTIQKNTIFTNVAETSDGGVYWEGIDEPLASGVTITSWKNKEWSSEDGEPCAHPNSRFCTPASQCPIIDAAWESPEGVPIEGIIFGGRRPAGVPLVYEALSWQHGVFVGAAMRSEATAAAEHKGKIIMHDPFAMRPFFGYNFGKYLAHWLSMAQHPAAKLPKIFHVNWFRKDKEGKFLWPGFGENSRVLEWMFNRIDGKASTKLTPIGYIPKEDALNLKGLGHINMMELFSISKEFWEKEVEDIEKYLEDQVNADLPCEIEREILALKQRISQM

SEQ ID NO: 811424 - protein, 484 aa, Homo sapiens
MYVIPFSMGPLGSPLSKIGIELTDSPYVVASMRIMTRMGTPVLEALGDGEFVKCLHSVGCPLPLQKPLVNNWPCNPELTLIAHLPDRREIISFGSGYGGNSLLGKKCFALRMASRLAKEEGWLAEHMLILGITNPEGEKKYLAAAFPSACGKTNLAMMNPSLPGWKVECVGDDIAWMKFDAQGHLRAINPENGFFGVAPGTSVKTNPNAIKTIQKNTIFTNVAETSDGGVYWEGIDEPLASGVTITSWKNKEWSSEDGEPCAHPNSRFCTPASQCPIIDAAWESPEGVPIEGIIFGGRRPAGVPLVYEALSWQHGVFVGAAMRSEATAAAEHKGKIIMHDPFAMRPFFGYNFGKYLAHWLSMAQHPAAKLPKIFHVNWFRKDKEGKFLWPGFGENSRVLEWMFNRIDGKASTKLTPIGYIPKEDALNLKGLGHINMMELFSISKEFWEKEVEDIEKYLEDQVNADLPCEIEREILALKQRISQM

SEQ ID NO: 811425 - protein, 665 aa, Homo sapiens
MPPQLQNGLNLSAKVVQGSLDSLPQAVREFLENNAELCQPDHIHICDGSEEENGRLLGQMEEEGILRRLKKYDNCWLALTDPRDVARIESKTVIVTQEQRDTVPIPKTGLSQLGRWMSEEDFEKAFNARFPGCMKGRTMYVIPFSMGPLGSPLSKIGIELTDSPYVVASMRIMTRMGTPVLEALGDGEFVKCLHSVGCPLPLQSKCIISESKVKIKKKAERKPQLSASGTPKQGPGALTWERSLFTEPLVNNWPCNPELTLIAHLPDRREIISFGSGYGGNSLLGKKCFALRMASRLAKEEGWLAEHMLILGITNPEGEKKYLAAAFPSACGKTNLAMMNPSLPGWKVECVGDDIAWMKFDAQGHLRAINPENGFFGVAPGTSVKTNPNAIKTIQKNTIFTNVAETSDGGVYWEGIDEPLASGVTITSWKNKEWSSEDGEPCAHPNSRFCTPASQCPIIDAAWESPEGVPIEGIIFGGRRPAGVPLVYEALSWQHGVFVGAAMRSEATAAAEHKGKIIMHDPFAMRPFFGYNFGKYLAHWLSMAQHPAAKLPKIFHVNWFRKDKEGKFLWPGFGENSRVLEWMFNRIDGKASTKLTPIGYIPKEDALNLKGLGHINMMELFSISKEFWEKEVEDIEKYLEDQVNADLPCEIEREILALKQRISQM

SEQ ID NO: 811426 - protein, 739 aa, Homo sapiens; identical to SEQ ID NO: 811423

SEQ ID NO: 811427 - protein, 103 aa, Homo sapiens
MPPQLQNGLNLSAKVVQGSLDSLPQAVREFLENNAELCQPDHIHICDGSEEENGRLLGQMEEEGILRRLKKYDNWYSSAPAACPSTLQAGLPCVSWELVEKGE

SEQ ID NO: 811428 - protein, 622 aa, Homo sapiens [sequence omitted]

SEQ ID NO: 811429 - protein, 276 aa, Homo sapiens
MPPQLQNGLNLSAKVVQGSLDSLPQAVREFLENNAELCQPDHIHICDGSEEENGRLLGQMEEEGILRRLKKYDNCWLALTDPRDVARIESKTVIVTQEQRDTVPIPKTGLSQLGRWMSEEDFEKAFNARFPGCMKGRTMYVIPFSMGPLGSPLSKIGIELTDSPYVVASMRIMTRMGTPVLEALGDGEFVKCLHSVGCPLPLQKPLVNNWPCNPELTLIAHLPDRREIISFGSGYGGNSLLGKKCFALRMASRLAKEEGWLAEHMLVSLQEALMCR

SEQ ID NO: 811430 - protein, 365 aa, Homo sapiens
MTTAGWLSLTPGMWPGSKARRLSSPKSKETQCPSPKQASASSVAGWKVECVGDDIAWMKFDAQGHLRAINPENGFFGVAPGTSVKTNPNAIKTIQKNTIFTNVAETSDGGVYWEGIDEPLASGVTITSWKNKEWSSEDGEPCAHPNSRFCTPASQCPIIDAAWESPEGVPIEGIIFGGRRPAGVPLVYEALSWQHGVFVGAAMRSEATAAAEHKGKIIMHDPFAMRPFFGYNFGKYLAHWLSMAQHPAAKLPKIFHVNWFRKDKEGKFLWPGFGENSRVLEWMFNRIDGKASTKLTPIGYIPKEDALNLKGLGHINMMELFSISKEFWEKEVEDIEKYLEDQVNADLPCEIEREILALKQRISQM

SEQ ID NO: 811431 - protein, 276 aa, Homo sapiens; identical to SEQ ID NO: 811429

SEQ ID NO: 811432 - protein, 305 aa, Homo sapiens
MAAEAADLGLGAAVPVELRRERRMVCVEYPGVVRDVAKMLPTLGGEEGVSRIYADPTKRLELYFRPKDPYCHPVCANRFSTSSLLLRIRKRTRRQKGVLGTEAHSEVTFDMEILGIISTIYKFQGMSDFQYLAVHTEAGGKHTSMYDKVLMLRPEKEAFFHQELPLYIPPPIFSRLDAPVDYFYRPETQHREGYNNPPISGENLIGLSRARRPHNAIFVNFEDEEVPKQPLEAAAQTWRRVCTNPVDRKVEEELRKLFDIRPIWSRNAVKANISVHPDKLKVLLPFIAYYMITGPWRSLWDSIWV

SEQ ID NO: 811433 - protein, 305 aa, Homo sapiens; identical to SEQ ID NO: 811432

SEQ ID NO: 811434 - protein, 305 aa, Homo sapiens; identical to SEQ ID NO: 811432

SEQ ID NO: 811435 - protein, 305 aa, Homo sapiens; identical to SEQ ID NO: 811432

SEQ ID NO: 811436 - protein, 193 aa, Homo sapiens [sequence omitted]

SEQ ID NO: 811437 - protein, 193 aa, Homo sapiens [sequence omitted]

SEQ ID NO: 811438 - protein, 305 aa, Homo sapiens; identical to SEQ ID NO: 811432

SEQ ID NO: 811439 - protein, 263 aa, Homo sapiens
MAAEAADLGLGAAVPVELRRERRMVCVEYPGVVRDVAKMLPTLGGEEGVSRIYADPTKRLELYFRPKDPYCHPVCANRFSTSSLLLRIRKRTRRQKGVLGTEAHSEVTFDMEILGIISTIYKFQGMSDFQYLAVHTEAGGKHTSMYDKVLMLRPEKEAFFHQELPLYIPPPIFSRLDAPVDYFYRPETQHREGYNNPPISGENLIGLSRARRPHNAIFVNFEDEEVPNNRPLAQPMGFDLGMTPEKTQMPRFIKSSISESVVE

SEQ ID NO: 811440 - protein, 258 aa, Homo sapiens
MTRAIYADPTKRLELYFRPKDPYCHPVCANRFSTSSLLLRIRKRTRRQKGVLGTEAHSEVTFDMEILGIISTIYKFQGMSDFQYLAVHTEAGGKHTSMYDKVLMLRPEKEAFFHQELPLYIPPPIFSRLDAPVDYFYRPETQHREGYNNPPISGENLIGLSRARRPHNAIFVNFEDEEVPKQPLEAAAQTWRRVCTNPVDRKVEEELRKLFDIRPIWSRNAVKANISVHPDKLKVLLPFIAYYMITGPWRSLWDSIWV

SEQ ID NO: 811441 - protein, 118 aa, Homo sapiens
PRMKHEPPGLSWITVRLLLREEQLPTGCLACHCFTLSPLALPQIYADPTKRLELYFRPKDPYCHPVCANRFSTSSLLLRIRKRTRRQKGVLGTEAHSEVTFDMEILGIISTIYKFQGN

SEQ ID NO: 811442 - protein, 1400 aa, Homo sapiens
ARPGWPSAHPLSPRLFPRKAEPHSFREKVFRKKPPVCAVCKVTIDGTGVSCRVCKVATHRKCEAKVTSACQALPPVELRRNTAPVRRIEHLGSTKSLNHSKQRSTLPRSFSLDPLMERRWDLDLTYVTERILAAAFPARPDEQRHRGHLRELAHVLQSKHRDKYLLFNLSEKRHDLTRLNPKVQDFGWPELHAPPLDKLCSICKAMETWLSADPQHVVVLYCKGNKGKLGVIVSAYMHYSKISAGADQALATLTMRKFCEDKVATELQPSQRRYISYFSGLLSGSIRMNSSPLFLHYVLIPMLPAFEPGTGFQPFLKIYQSMQLVYTSGVYHIAGPGPQQLCISLEPALLLKGDVMVTCYHKGGRGTDRTLVFRVQFHTCTIHGPQLTFPKDQLDEAWTDERFPFQASVEFVFSSSPEKIKGSTPRNDPSVSVDYNTTEPAVRWDSYENFNQHHEDSVDGSLTHTRGPLDGSPYAQVQRPPRQTPPAPSPEPPPPPMLSVSSDSGHSSTLTTEPAAESPGRPPPTAAERQELDRLLGGCGVASGGRGAGRETAILDDEEQPTVGGGPHLGVYPGHRPGLSRHCSCRQGYREPCGVPNGGYYRPEGTLERRRLAYGGYEGSPQGYAEASMEKRRLCRSLSEGLYPYPPEMGKPATGDFGYRAPGYREVVILEDPGLPALYPCPACEEKLALPTAALYGLRLEREAGEGWASEAGKPLLHPVRPGHPLPLLLPACGHHHAPMPDYSCLKPPKAGEEGHEGCSYTMCPEGRYGHPGYPALVTYSYGGAVPSYCPAYGRVPHSCGSPGEGRGYPSPGAHSPRAGSISPGSPPYPQSRKLSYEIPTEEGGDRYPLPGHLASAGPLASAESLEPVSWREGPSGHSTLPRSPRDAPCSASSELSGPSTPLHTSSPVQGKESTRRQDTRSPTSAPTQRLSPGEALPPVSQAGTGKAPELPSGSGPEPLAPSPVSPTFPPSSPSDWPQERSPGGHSDGASPRSPVPTTLPGLRHAPWQGPRGPPDSPDGSPLTPVPSQMPWLVASPEPPQSSPTPAFPLAASYDTNGLSQPPLPEKRHLPGPGQQPGPWGPEQASSPARGISHHVTFAPLLSDNVPQTPEPPTQESQSNVKFVQDTSKFWYKPHLSRDQAIALLKDKDPGAFLIRDSHSFQGAYGLALKVATPPPSAQPWKGDPVEQLVRHFLIETGPKGVKIKGCPSEPYFGSLSALVSQHSISPISLPCCLRIPSKDPLEETPEAPVPTNMSTAADLLRQGAACSVLYLTSVETESLTGPQAVARASSAALSCSPRPTPAVVHFKVSAQGITLTDNQRKLFFRRHYPVNSITFSSTDPQDRRWTNPDGTTSKIFGFVAKKPGSPWENVCHLFAELDPDQPAGAIVTFITKVLLGQRK

SEQ ID NO: 811443 - protein, 1396 aa, Homo sapiens
LRKESRPRRAMKPRKAEPHSFREKVFRKKPPVCAVCKVTIDGTGVSCRVCKVATHRKCEAKVTSACQALPPVELRRNTAPVRRIEHLGSTKSLNHSKQRSTLPRSFSLDPLMERRWDLDLTYVTERILAAAFPARPDEQRHRGHLRELAHVLQSKHRDKYLLFNLSEKRHDLTRLNPKVQDFGWPELHAPPLDKLCSICKAMETWLSADPQHVVVLYCKGNKGKLGVIVSAYMHYSKISAGADQALATLTMRKFCEDKVATELQPSQRRYISYFSGLLSGSIRMNSSPLFLHYVLIPMLPAFEPGTGFQPFLKIYQSMQLVYTSGVYHIAGPGPQQLCISLEPALLLKGDVMVTCYHKGGRGTDRTLVFRVQFHTCTIHGPQLTFPKDQLDEAWTDERFPFQASVEFVFSSSPEKIKGSTPRNDPSVSVDYNTTEPAVRWDSYENFNQHHEDSVDGSLTHTRGPLDGSPYAQVQRPPRQTPPAPSPEPPPPPMLSVSSDSGHSSTLTTEPAAESPGRPPPTAAERQELDRLLGGCGVASGGRGAGRETAILDDEEQPTVGGGPHLGVYPGHRPGLSRHCSCRQGYREPCGVPNGGYYRPEGTLERRRLAYGGYEGSPQGYAEASMEKRRLCRSLSEGLYPYPPEMGKPATGDFGYRAPGYREVVILEDPGLPALYPCPACEEKLALPTAALYGLRLEREAGEGWASEAGKPLLHPVRPGHPLPLLLPACGHHHAPMPDYSCLKPPKAGEEGHEGCSYTMCPEGRYGHPGYPALVTYSYGGAVPSYCPAYGRVPHSCGSPGEGRGYPSPGAHSPRAGSISPGSPPYPQSRKLSYEIPTEEGGDRYPLPGHLASAGPLASAESLEPVSWREGPSGHSTLPRSPRDAPCSASSELSGPSTPLHTSSPVQGKESTRRQDTRSPTSAPTQRLSPGEALPPVSQAGTGKAPELPSGSGPEPLAPSPVSPTFPPSSPSDWPQERSPGGHSDGASPRSPVPTTLPGLRHAPWQGPRGPPDSPDGSPLTPVPSQMPWLVASPEPPQSSPTPAFPLAASYDTNGLSQPPLPEKRHLPGPGQQPGPWGPEQASSPARGISHHVTFAPLLSDNVPQTPEPPTQESQSNVKFVQDTSKFWYKPHLSRDQAIALLKDKDPGAFLIRDSHSFQGAYGLALKVATPPPSAQPWKGDPVEQLVRHFLIETGPKGVKIKGCPSEPYFGSLSALVSQHSISPISLPCCLRIPSKDPLEETPEAPVPTNMSTAADLLRQGAACSVLYLTSVETESLTGPQAVARASSAALSCSPRPTPAVVHFKVSAQGITLTDNQRKLFFRRHYPVNSITFSSTDPQDRRWTNPDGTTSKIFGFVAKKPGSPWENVCHLFAELDPDQPAGAIVTFITKVLLGQRK

SEQ ID NO: 811444 - protein, 1416 aa, Homo sapiens
HPSQPNTMKSSGPVERLLRALGRRDSSRAASRPRKAEPHSFREKVFRKKPPVCAVCKVTIDGTGVSCRVCKVATHRKCEAKVTSACQALPPVELRRNTAPVRRIEHLGSTKSLNHSKQRSTLPRSFSLDPLMERRWDLDLTYVTERILAAAFPARPDEQRHRGHLRELAHVLQSKHRDKYLLFNLSEKRHDLTRLNPKVQDFGWPELHAPPLDKLCSICKAMETWLSADPQHVVVLYCKGNKGKLGVIVSAYMHYSKISAGADQALATLTMRKFCEDKVATELQPSQRRYISYFSGLLSGSIRMNSSPLFLHYVLIPMLPAFEPGTGFQPFLKIYQSMQLVYTSGVYHIAGPGPQQLCISLEPALLLKGDVMVTCYHKGGRGTDRTLVFRVQFHTCTIHGPQLTFPKDQLDEAWTDERFPFQASVEFVFSSSPEKIKGSTPRNDPSVSVDYNTTEPAVRWDSYENFNQHHEDSVDGSLTHTRGPLDGSPYAQVQRPPRQTPPAPSPEPPPPPMLSVSSDSGHSSTLTTEPAAESPGRPPPTAAERQELDRLLGGCGVASGGRGAGRETAILDDEEQPTVGGGPHLGVYPGHRPGLSRHCSCRQGYREPCGVPNGGYYRPEGTLERRRLAYGGYEGSPQGYAEASMEKRRLCRSLSEGLYPYPPEMGKPATGDFGYRAPGYREVVILEDPGLPALYPCPACEEKLALPTAALYGLRLEREAGEGWASEAGKPLLHPVRPGHPLPLLLPACGHHHAPMPDYSCLKPPKAGEEGHEGCSYTMCPEGRYGHPGYPALVTYSYGGAVPSYCPAYGRVPHSCGSPGEGRGYPSPGAHSPRAGSISPGSPPYPQSRKLSYEIPTEEGGDRYPLPGHLASAGPLASAESLEPVSWREGPSGHSTLPRSPRDAPCSASSELSGPSTPLHTSSPVQGKESTRRQDTRSPTSAPTQRLSPGEALPPVSQAGTGKAPELPSGSGPEPLAPSPVSPTFPPSSPSDWPQERSPGGHSDGASPRSPVPTTLPGLRHAPWQGPRGPPDSPDGSPLTPVPSQMPWLVASPEPPQSSPTPAFPLAASYDTNGLSQPPLPEKRHLPGPGQQPGPWGPEQASSPARGISHHVTFAPLLSDNVPQTPEPPTQESQSNVKFVQDTSKFWYKPHLSRDQAIALLKDKDPGAFLIRDSHSFQGAYGLALKVATPPPSAQPWKGDPVEQLVRHFLIETGPKGVKIKGCPSEPYFGSLSALVSQHSISPISLPCCLRIPSKDPLEETPEAPVPTNMSTAADLLRQGAACSVLYLTSVETESLTGPQAVARASSAALSCSPRPTPAVVHFKVSAQGITLTDNQRKLFFRRHYPVNSITFSSTDPQDRRWTNPDGTTSKIFGFVAKKPGSPWENVCHLFAELDPDQPAGAIVTFITKVLLGQRK

SEQ ID NO: 811445 - protein, 1366 aa, Homo sapiens
LRKESRPRRAMKPRKAEPHSFREKVFRKKPPVCAVCKVTIDGTGVSCRVCKVATHRKCEAKVTSACQALPPVELRRNTAPVRRIEHLGSTKSLNHSKQRSTLPRSFSLDPLMERRWDLDLTYVTERILAAAFPARPDEQRHRGHLRELAHVLQSKHRDKYLLFNLSEKRHDLTRLNPKVQDFGWPELHAPPLDKLCSICKAMETWLSADPQHVVVLYCKGNKGKLGVIVSAYMHYSKISAGADQALATLTMRKFCEDKVATELQPSQRRYISYFSGLLSGSIRMNSSPLFLHYVLIPMLPAFEPGTGFQPFLKIYQSMQLVYTSGVYHIAGPGPQQLCISLEPALLLKGDVMVTCYHKGGRGTDRTLVFRVQFHTCTIHGPQLTFPKDQLDEAWTDERFPFQASVEFVFSSSPEKIKGSTPRNDPSVSVDYNTTEPAVRWDSYENFNQHHEDSVDGSLTHTRGPLDGSPYAQVQRPPRQTPPAPSPEPPPPPMLSVSSDSGHSSTLTTEPAAESPGRPPPTAAERQELDRLLGGCGVASGGRGAGRETAILDDEEQPTVGGGPHLGVYPGHRPGLSRHCSCRQGYREPCGVPNGGYYRPEGTLERRRLAYGGYEGSPQGYAEASMEKRRLCRSLSEGLYPYPPEMGKPATGDFGYRAPGYREVVILEDPGLPALYPCPACEEKLALPTAALYGLRLEREAGEGWASEAGKPLLHPVRPGHPLPLLLPACGHHHAPMPDYSCLKPPKAGEEGHEGCSYTMCPEGRYGHPGYPALVTYSYGGAVPSYCPAYGRVPHSCGSPGEGRGYPSPGAHSPRAGSISPGSPPYPQSRKLSYEIPTEEGGDRYPLPGHLASAGPLASAESLEPVSWREGPSGHSTLPRSPRDAPCSASSELSGPSTPLHTSSPVQGKESTRRQDTRSPTSAPTQRLSPGEACPLFPSSPSDWPQERSPGGHSDGASPRSPVPTTLPGLRHAPWQGPRGPPDSPDGSPLTPVPSQMPWLVASPEPPQSSPTPAFPLAASYDTNGLSQPPLPEKRHLPGPGQQPGPWGPEQASSPARGISHHVTFAPLLSDNVPQTPEPPTQESQSNVKFVQDTSKFWYKPHLSRDQAIALLKDKDPGAFLIRDSHSFQGAYGLALKVATPPPSAQPWKGDPVEQLVRHFLIETGPKGVKIKGCPSEPYFGSLSALVSQHSISPISLPCCLRIPSKDPLEETPEAPVPTNMSTAADLLRQGAACSVLYLTSVETESLTGPQAVARASSAALSCSPRPTPAVVHFKVSAQGITLTDNQRKLFFRRHYPVNSITFSSTDPQDRRWTNPDGTTSKIFGFVAKKPGSPWENVCHLFAELDPDQPAGAIVTFITKVLLGQRK

SEQ ID NO: 811446 - protein, 1435 aa, Homo sapiens
LRKESRPRRAMKPRKAEPHSFREKVFRKKPPVCAVCKVTIDGTGVSCRVCKVATHRKCEAKVTSACQALPPVELRRNTAPVRRIEHLGSTKSLNHSKQRSTLPRSFSLDPLMERRWDLDLTYVTERILAAAFPARPDEQRHRGHLRELAHVLQSKHRDKYLLFNLSEKRHDLTRLNPKVQDFGWPELHAPPLDKLCSICKAMETWLSADPQHVVVLYCKGNKGKLGVIVSAYMHYSKISAGADQALATLTMRKFCEDKVATELQPSQRRYISYFSGLLSGSIRMNSSPLFLHYVLIPMLPAFEPGTGFQPFLKIYQSMQLVYTSGVYHIAGPGPQQLCISLEPALLLKGDVMVTCYHKGGRGTDRTLVFRVQFHTCTIHGPQLTFPKDQLDEAWTDERFPFQASVEFVFSSSPEKIKGSTPRNDPSVSVDYNTTEPAVRWDSYENFNQHHEDSVDGSLTHTRGPLDGSPYAQVQRPPRQTPPAPSPEPPPPPMLSVSSDSGHSSTLTTEPAAESPGRPPPTAAERQELDRLLGGCGVASGGRGAGRETAILDDEEQPTVGGGPHLGVYPGHRPGLSRHCSCRQGYREPCGVPNGGYYRPEGTLERRRLAYGGYEGSPQGYAEASMEKRRLCRSLSEGLYPYPPEMGKPATGDFGYRAPGYREVVILEDPGLPALYPCPACEEKLALPTAALYGLRLEREAGEGWASEAGKPLLHPVRPGHPLPLLLPACGHHHAPMPDYSCLKPPKAGEEGHEGCSYTMCPEGRYGHPGYPALVTYSYGGAVPSYCPAYGRVPHSCGSPGEGRGYPSPGAHSPRAGSISPGSPPYPQSRKLSYEIPTEEGGDRYPLPGHLASAGPLASAESLEPVSWREGPSGHSTLPRSPRDAPCSASSELSGPSTPLHTSSPVQGKESTRRQDTRSPTSAPTQRLSPGEALPPVSQAGTGKAPELPSGSGPEPLAPSPVSPTFPPSSPSDWPQERSPGGHSDGASPRSPVPTTLPGLRHAPWQGPRGPPDSPDGSPLTPVPSQMPWLVASPEPPQSSPTPAFPLAASYDTNGLSQPPLPEKRHLPGPGQQPGPWGPEQASSPARGISHHVTFAPLLSDNVPQTPGIKALEGVGATLREPFLLGCSMDGDPGTLGSEPTPSLSSEPPTQESQSNVKFVQDTSKFWYKPHLSRDQAIALLKDKDPGAFLIRDSHSFQGAYGLALKVATPPPSAQPWKGDPVEQLVRHFLIETGPKGVKIKGCPSEPYFGSLSALVSQHSISPISLPCCLRIPSKDPLEETPEAPVPTNMSTAADLLRQGAACSVLYLTSVETESLTGPQAVARASSAALSCSPRPTPAVVHFKVSAQGITLTDNQRKLFFRRHYPVNSITFSSTDPQDRRWTNPDGTTSKIFGFVAKKPGSPWENVCHLFAELDPDQPAGAIVTFITKVLLGQRK

SEQ ID NO: 811447 - protein, 1396 aa, Homo sapiens; identical to SEQ ID NO: 811443

SEQ ID NO: 811448 - protein, 267 aa, Homo sapiens
IEIGTNSAIALLKDKDPGAFLIRDSHSFQGAYGLALKVATPPPSAQPWKGDPVEQLVRHFLIETGPKGVKIKGCPSEPYFGSLSALVSQHSISPISLPCCLRIPSKDPLEETPEAPVPTNMSTAADLLRQGAACSVLYLTSVETESLTGPQAVARASSAALSCSPRPTPAVVHFKVSAQGITLTDNQRKLFFRRHYPVNSITFSSTDPQDRRWTNPDGTTSKIFGFVAKKPGSPWENVCHLFAELDPDQPAGAIVTFITKVLLGQRK

SEQ ID NO: 811449 - protein, 1396 aa, Homo sapiens; identical to SEQ ID NO: 811443

SEQ ID NO: 811450 - protein, 175 aa, Homo sapiens
DASAHASGLRIPSKDPLEETPEAPVPTNMSTAADLLRQGAACSVLYLTSVETESLTGPQAVARASSAALSCSPRPTPAVVHFKVSAQGITLTDNQRKLFFRRHYPVNSITFSSTDPQDRRWTNPDGTTSKIFGFVAKKPGSPWENVCHLFAELDPDQPAGAIVTFITKVLLGQRK

SEQ ID NO: 811451 - protein, 1396 aa, Homo sapiens; identical to SEQ ID NO: 811443

SEQ ID NO: 811452 - protein, 143 aa, Homo sapiens
EEGELLVEWCAFDARGGRARLCVDEWFGFIVCWFVVLFLFFRCVCVLFFFVFFFFFLFIVVVFFFFFYGNSIFIGCINISGLYIHFIHRRVGSEGQREAQQHNSSPAFPTALPALCKPRPTAPAASSSLEKSLLRGGGQGLKD

SEQ ID NO: 811453 - protein, 108 aa, Homo sapiens
MESAFLTSHLCDCKACDSSSWGMCKSWWGWLGDGHSLPDPLPAPVACSVLYLTSVETESLTGPQAVARASSAALSCSPRPTPAVVHFKVSAQGITLTDNQRKYVYSAL

SEQ ID NO: 811454 - protein, 1331 aa, Homo sapiens
LRKESRPRRAMKPRKAEPHSFREKVFRKKPPVCAVCKVTIDGTGVSCRVCKVATHRKCEAKVTSACQALPPVELRRNTAPVRRIEHLGSTKSLNHSKQRSTLPRSFSLDPLMERRWDLDLTYVTERILAAAFPARPDEQRHRGHLRELAHVLQSKHRDKYLLFNLSEKRHDLTRLNPKVQDFGWPELHAPPLDKLCSICKAMETWLSADPQHVVVLYCKGNKGKLGVIVSAYMHYSKISAGADQALATLTMRKFCEDKVATELQPSQRRYISYFSGLLSGSIRMNSSPLFLHYVLIPMLPAFEPGTGFQPFLKIYQSMQLVYTSGVYHIAGPGPQQLCISLEPALLLKGDVMVTCYHKGGRGTDRTLVFRVQFHTCTIHGPQLTFPKDQLDEAWTDERFPFQASVEFVFSSSPEKIKGSTPRNDPSVSVDYNTTEPAVRWDSYENFNQHHEDSVDGSLTHTRGPLDGSPYAQVQRPPRQTPPAPSPEPPPPPMLSVSSDSGHSSTLTTEPAAESPGRPPPTAAERQELDRLLGGCGVASGGRGAGRETAILDDEEQPTVGGGPHLGVYPGHRPGLSRHCSCRQGYREPCGVPNGGYYRPEGTLERRRLAYGGYEGSPQGYAEASMEKRRLCRSLSEGLYPYPPEMGKPATGDFGYRAPGYREVVILEDPGLPALYPCPACEEKLALPTAALYGLRLEREAGEGWASEAGKPLLHPVRPGHPLPLLLPACGHHHAPMPDYSCLKPPKAGEEGHEGCSYTMCPEGRKLSYEIPTEEGGDRYPLPGHLASAGPLASAESLEPVSWREGPSGHSTLPRSPRDAPCSASSELSGPSTPLHTSSPVQGKESTRRQDTRSPTSAPTQRLSPGEALPPVSQAGTGKAPELPSGSGPEPLAPSPVSPTFPPSSPSDWPQERSPGGHSDGASPRSPVPTTLPGLRHAPWQGPRGPPDSPDGSPLTPVPSQMPWLVASPEPPQSSPTPAFPLAASYDTNGLSQPPLPEKRHLPGPGQQPGPWGPEQASSPARGISHHVTFAPLLSDNVPQTPEPPTQESQSNVKFVQDTSKFWYKPHLSRDQAIALLKDKDPGAFLIRDSHSFQGAYGLALKVATPPPSAQPWKGDPVEQLVRHFLIETGPKGVKIKGCPSEPYFGSLSALVSQHSISPISLPCCLRIPSKDPLEETPEAPVPTNMSTAADLLRQGAACSVLYLTSVETESLTGPQAVARASSAALSCSPRPTPAVVHFKVSAQGITLTDNQRKLFFRRHYPVNSITFSSTDPQDRRWTNPDGTTSKIFGFVAKKPGSPWENVCHLFAELDPDQPAGAIVTFITKVLLGQRK

SEQ ID NO: 811455 - protein, 1396 aa, Homo sapiens; identical to SEQ ID NO: 811443

SEQ ID NO: 811456 - protein, 292 aa, Homo sapiens
MELGSRGGGLHGAQSTPVKTPPHCPLPLTLQPSIALLKDKDPGAFLIRDSHSFQGAYGLALKVATPPPSAQPWKGDPVEQLVRHFLIETGPKGVKIKGCPSEPYFGSLSALVSQHSISPISLPCCLRIPSKDPLEETPEAPVPTNMSTAADLLRQGAACSVLYLTSVETESLTGPQAVARASSAALSCSPRPTPAVVHFKVSAQGITLTDNQRKLFFRRHYPVNSITFSSTDPQDRRWTNPDGTTSKIFGFVAKKPGSPWENVCHLFAELDPDQPAGAIVTFITKVLLGQRK

SEQ ID NO: 811457 - protein, 226 aa, Homo sapiens
AGEPHTVGDEELGPQPRFSKSHEQDDHGVVAGRLLCLASDCRSSRVMESAFLTSHLCDCKACDSSSWGMCKSWWGWLGDGHSLPDPLPAPVACSVLYLTSVETESLTGPQAVARASSAALSCSPRPTPAVVHFKVSAQGITLTDNQRKLFFRRHYPVNSITFSSTDPQDRRWTNPDGTTSKIFGFVAKKPGSPWENVCHLFAELDPDQPAGAIVTFITKVLLGQRK

SEQ ID NO: 811458 - protein, 120 aa, Homo sapiens
  misc_feature (5)..(5): Xaa can be any naturally occurring amino acid
GSDLXGRERRKGDQTGEGLLLIHSSKPPHEFSLFLPRDQGAAVLSMLAFDLSHQGQLHSLVEGMLSPFPTLYPPRIFGFVAKKPGSPWENVCHLFAELDPDQPAGAIVTFITKVLLGQRK

SEQ ID NO: 811459 - protein, 1396 aa, Homo sapiens; identical to SEQ ID NO: 811443

SEQ ID NO: 811460 - protein, 440 aa, Homo sapiens
LRKESRPRRAMKPRKAEPHSFREKVFRKKPPVCAVCKVTIDGTGVSCRVCKVATHRKCEAKVTSACQALPPVELRRNTAPVRRIEHLGSTKSLNHSKQRSTLPRSFSLDPLMERRWDLDLTYVTERILAAAFPARPDEQRHRGHLRELAHVLQSKHRDKYLLFNLSEKRHDLTRLNPKVQDFGWPELHAPPLDKLCSICKAMETWLSADPQHVVVLYCKGNKGKLGVIVSAYMHYSKISAGADQALATLTMRKFCEDKVATELQPSQRRYISYFSGLLSGSIRMNSSPLFLHYVLIPMLPAFEPGTGFQPFLKIYQSMQLVYTSGVYHIAGPGPQQLCISLEPALLLKGDVMVTCYHKGGRGTDRTLVFRVQFHTCTIHGPQLTFPKDQLDEAWTDERFPFQASVEFVFSSSPEKIKGSTPRNDPSVSVDHVAKHRGYSR

SEQ ID NO: 811461 - protein, 34 aa, Homo sapiens
PPVCAVCKVTIDGTGVSCRGEALCPVTLRPSTQY

SEQ ID NO: 811462 - protein, 202 aa, Homo sapiens
HEAAFHPAPGSVVCMAPPWAGGERRGPGTTCLHSPWMLEAAPPWAGGEGRELGAACLHSLRMLEAGGSEAATARGRGDFGAASCSDLAFRCASSQNPRSLEPVASSPERRRRQPSRAFACTLPGCWRLEAVTQQQREATLERPHIATSPSAARPPRAQEARNLWHPSLKGEDGNPAEALLGWGLHDRAGLIKWRPTRGSNPG

SEQ ID NO: 811463 - protein, 202 aa, Homo sapiens; identical to SEQ ID NO: 811462

SEQ ID NO: 811464 - protein, 202 aa, Homo sapiens; identical to SEQ ID NO: 811462

SEQ ID NO: 811465 - protein, 202 aa, Homo sapiens; identical to SEQ ID NO: 811462

SEQ ID NO: 811466 - protein, 202 aa, Homo sapiens; identical to SEQ ID NO: 811462

SEQ ID NO: 811467 - protein, 102 aa, Homo sapiens
GWLQLRHCARSSAPEGRGQPGDRGPGAPWEAGNTCRDPRACLRLWPEVLRLPIRGSGRPVAAPSESSPDSPTSCLGHVGGTPKGMPSKCVNKLQSDCPSQRK

SEQ ID NO: 811468 - protein, 102 aa, Homo sapiens; identical to SEQ ID NO: 811467

SEQ ID NO: 811469 - protein, 133 aa, Homo sapiens [sequence omitted]

SEQ ID NO: 811470 - protein, 162 aa, Homo sapiens
KVASTSRPARGSILSVNLHHRLWRSAILVIEEMFVVCTNNDGSGERSVGAGVKSTMAVRDGHVPGLYQKWCPKQSCDFLILTQNRHFKNTEISFKLGVEFDETTADDRKVKSIVTLDGGKLVHLQKWDGQETTLVRELIDGKLILTLTHGTAVCTRTYEKEA

SEQ ID NO: 811471 - protein, 66 aa, Homo sapiens
WGVEGARDREMTGRSSIVTLDGGKLVHLQKWDGQETTLVRELIDGKLILTLTHGTAVCTRTYEKEA

SEQ ID NO: 811472 - protein, 126 aa, Homo sapiens
MVDAFLGTWKLVDSKNFDDYMKSLGVGFATRQVASMTKPTTIIEKNGDILTLKTHSTFKNTEISFKLGVEFDETTADDRKVKSIVTLDGGKLVHLQKWDGQETTLVRELIDGKLILMEKLQLRNVK

SEQ ID NO: 811473 - protein, 144 aa, Homo sapiens
MVDAFLGTWKLVDSKNFDDYMKSLAHILITFPLPSGVGFATRQVASMTKPTTIIEKNGDILTLKTHSTFKNTEISFKLGVEFDETTADDRKVKSIVTLDGGKLVHLQKWDGQETTLVRELIDGKLILTLTHGTAVCTRTYEKEA

SEQ ID NO: 811474 - protein, 155 aa, Homo sapiens
MVDAFLGTWKLVDSKNFDDYMKSLGVGFATRQVASMTKPTTIIEKNGDILTLKTHSTFKNTEISFKLGVEFDETTADDRKVKPEPGCSSDLSIYSSSSWVTLCKSIVTLDGGKLVHLQKWDGQETTLVRELIDGKLILTLTHGTAVCTRTYEKEA

SEQ ID NO: 811475 - protein, 227 aa, Homo sapiens
GRWRLAWRVWGSTAAKGLSLTLYGCAWRATESSVRKKRRGFSEIVSAMALRSQFWGLFSVCRNPGCRFAALSTSSEPAAKPEVDPVENEAVAPEFTNRNPRNLELLSVARKERGWRTVFPSREFWHRLRVIRTQHHVEALVEHQNGKVVVSASTREWAIKKHLYSTRNVVACESIGRVLAQRCLEAGINFMVYQPTPWEAASDSMKRLQSAMTEGGVVLREPQRIYE

SEQ ID NO: 811476 - protein, 170 aa, Homo sapiens
GRWRLAWRVWGSTAAKGLSLTLYGCAWRATESSVRKKRRGFSEIVSAMALRSQFWGLFSVCRNPGCRFAALSTSSEPAAKPEVDPVENEAVAPEFTNRNPRNLELLSVARKERGWRTVFPSREFWHRLRVIRTQHHVEALVEHQNGKMKRLQSAMTEGGVVLREPQRIYE

SEQ ID NO: 811477 - protein, 210 aa, Homo sapiens
MDTQGVALKQKGVRGVARTCEPGRPAFPRRARFQRRPGHHIHALPVSKPCRARRGSSSLWEKWGHSALPQRTAGGLGPAAGPRGPFCGGKGEKRGQPGSGRGGTRPSPAANPTQARPALTVLGADRFPSAAVTEHGQRPLHLDGSDTRRILLTPRATSIAAPRPTGDHSSGCDGVERTRAMSQELLGNTPPHPLPGCPGPAAGHGGKEKE

SEQ ID NO: 811478 - protein, 349 aa, Homo sapiens
MDTQGVALKQKGVRGVARTCEPGRPAFPRRARFQRRPGHHIHALPVSKPCRARRGSSSLWEKWGHSALPQRTAGGLGPAAGPRGPFCGGKGEKRGQPGSGRGGTRPSPAANPTQARPALTVLGADRFPSAAVTEHGQRPLHLDGSDTRRILLTPRATSIAAPRPTGDHSSGCDGVERTRAMSQELLGCRFAALSTSSEPAAKPEVDPVENEAVAPEFTNRNPRNLELLSVARKERGWRTVFPSREFWHRLRVIRTQHHVEALVEHQNGKVVVSASTREWAIKKHLYSTRNVVACESIGRVLAQRCLEAGINFMVYQPTPWEAASDSMKRLQSAMTEGGVVLREPQRIYE

SEQ ID NO: 811479 - protein, 209 aa, Homo sapiens
GRWRLAWRVWGSTAAKGLSLTLYGCAWRATESSVRKKRRGFSEIVSAMALRSQFWGLFSVCRNPGCRFAALSTSSEPAAKPEVDPVVLSVARKERGWRTVFPSREFWHRLRVIRTQHHVEALVEHQNGKVVVSASTREWAIKKHLYSTRNVVACESIGRVLAQRCLEAGINFMVYQPTPWEAASDSMKRLQSAMTEGGVVLREPQRIYE

SEQ ID NO: 811480 - protein, 227 aa, Homo sapiens; identical to SEQ ID NO: 811475

SEQ ID NO: 811481 - protein, 205 aa, Homo sapiens
GRWRLAWRVWGSTAAKGLSLTLYGCAWRATESSVRKKRRGFSEIVSAMALRSQFWGLFSVCRNPGCRFAALSTSSEPAAKPEVDPVENEAVAPEFTNRNPRNLELLSVARKERGWRTVFPSREFWHRLRVIRTQHHVEALVEHQNGKVVVSASTRVLAQRCLEAGINFMVYQPTPWEAASDSMKRLQSAMTEGGVVLREPQRIYE

SEQ ID NO: 811482 - protein, 127 aa, Homo sapiens
GRWRLAWRVWGSTAAKGLSLTLYGCAWRATESSVRKKRRGFSEIVSAMALRSQFWGLFSVCRNPGCRFAALSTSSEPAAKPEVDPVENEAVAPEFTNRNPRNLELLSVARKERGWRTVFPSREFWHR

SEQ ID NO: 811483 - protein, 177 aa, Homo sapiens
GRWRLAWRVWGSTAAKGLSLTLYGCAWRATESSVRKKRRGFSEIVSAMALRSQFWGLFSVCRNPGCRFAALSTSSEPAAKPEVDPVENEAVAPEFTNRNPRNLELLSVARKERGWRTVFPSREFWHRLRVIRTQHHVEALVEHQNGKVVVSASTRDETTTKCHDRRWCGSTGTSENL

SEQ ID NO: 811484 - protein, 188 aa, Homo sapiens
WEEVEPSPQNDVAQTQWAILVPSRKGCRFAALSTSSEPAAKPEVDPVENEAVAPEFTNRNPRNLELLSVARKERGWRTVFPSREFWHRLRVIRTQHHVEALVEHQNGKVVVSASTREWAIKKHLYSTRNVVACESIGRVLAQRCLEAGINFMVYQPTPWEAASDSMKRLQSAMTEGGVVLREPQRIYE

SEQ ID NO: 811485 - protein, 227 aa, Homo sapiens; identical to SEQ ID NO: 811475

SEQ ID NO: 811486 - protein, 212 aa, Homo sapiens
GRWRLAWRVWGSTAAKGLSLTLYGCAWRATESSVRKKRRGFSEIVSAMALRSQFWGLFSVCRNPGCRFAALSTSSEPAAKPEVDPVENEAVAPEFTNRNPRNLELLSVARKERGWRTVFPSREFWHRLRVIRTQHHVEALVEHQNGKVVVSASTREWAIKKHLYSTRNVVACESIGRVLAQRCLEAGINFMVYQPTPWEAASDSVFLFSCTY

SEQ ID NO: 811487 - protein, 1287 aa, Homo sapiens
TFCPPAEKDKGGRQLHRAGPRPCTQSRELLCRSQASPWVPMMREWVLLMSVLLCGLAGPTHLFQPSLVLDMAKVLLDNYCFPENLLGMQEAIQQAIKSHEILSISDPQTLASVLTAGVQSSLNDPRLVISYEPSTPEPPPQVPALTSLSEEELLAWLQRGLRHEVLEGNVGYLRVDSVPGQEVLSMMGEFLVAHVWGNLMGTSALVLDLRHCTGGQVSGIPYIISYLHPGNTILHVDTIYNRPSNTTTEIWTLPQVLGERYGADKDVVVLTSSQTRGVAEDIAHILKQMRRAIVVGERTGGGALDLRKLRIGESDFFFTVPVSRSLGPLGGGSQTWEGSGVLPCVGTPAEQALEKALAILTLRSALPGVVHCLQEVLKDYYTLVDRVPTLLQHLASMDFSTVVSEEDLVTKLNAGLQAASEDPRLLVRAIGPTETPSWPAPDAAAEDSPGVAPELPEDEAIRQALVDSVFQVSVLPGNVGYLRFDSFADASVLGVLAPYVLRQVWEPLQDTEHLIMDLRHNPGGPSSAVPLLLSYFQGPEAGPVHLFTTYDRRTNITQEHFSHMELPGPRYSTQRGVYLLTSHRTATAAEEFAFLMQSLGWATLVGEITAGNLLHTRTVPLLDTPEGSLALTVPVLTFIDNHGEAWLGGGVVPDAIVLAEEALDKAQEVLEFHQSLGALVEGTGHLLEAHYARPEVVGQTSALLRAKLAQGAYRTAVDLESLASQLTADLQEVSGDHRLLVFHSPGELVVEEAPPPPPAVPSPEELTYLIEALFKTEVLPGQLGYLRFDAMAELETVKAVGPQLVRLVWQQLVDTAALVIDLRYNPGSYSTAIPLLCSYFFEAEPRQHLYSVFDRATSKVTEVWTLPQVAGQRYGSHKDLYILMSHTSGSAAEAFAHTMQDLQRATVIGEPTAGGALSVGIYQVGSSPLYASMPTQMAMSATTGKAWDLAGVEPDITVPMSEALSIAQDIVALRAKVPTVLQTAGKLVADNYASAELGAKMATKLSGLQSRYSRVTSEVALAEILGADLQMLSGDPHLKAAHIPENAKDRIPGIVPMQIPSPEVFEELIKFSFHTNVLEDNIGYLRFDMFGDGELLTQVSRLLVEHIWKKIMHTDAMIIDMRFNIGGPTSSIPILCSYFFDEGPPVLLDKIYSRPDDSVSELWTHAQVVGERYGSKKSMVILTSSVTAGTAEEFTYIMKRLGRALVIGEVTSGGCQPPQTYHVDDTNLYLTIPTARSVGASDGSSWEGVGVTPHVVVPAEEALARAKEMLQHNQLRVKRSPGLQDHL

SEQ ID NO: 811488 - protein, 555 aa, Homo sapiens
MVAACRSVAGLLPRRRRCFPARAPLLRVALCLLCWTPAAVRAVPELGLWLETVNDKSGPLIFRKTMFNSTDIKLSVKSFHCSGPVKFTIVWHLKYHTCHNEHSNLEELFQKHKLSVDEDFCHYLKNDNCWTTKNENLDCNSDSQVFPSLNNKELINIRNVSNQERSMDVVARTQKDGFHIFIVSIKTENTDASWNLNVSLSMIGPHGYISASDWPLMIFYMVMCIVYILYGILWLTWSACYWKDILRIQFWIAAVIFLGMLEKAVFYSEYQNISNTGLSTQGLLIFAELISAIKRTLARLLVIIVSLGYGIVKPRLGTVMHRVIGLGLLYLIFAAVEGVMRVIGGSNHLAVVLDDIILAVIDSIFVWFIFISLAQTMKTLRLRKNTVKFSLYRHFKNTLIFAVLASIVFMGWTTKTFRIAKCQSDWMERWVDDAFWSFLFSLILIVIMFLWRPSANNQRYAFMPLIDDSDDEIEEFMVTSENLTEGIKLRASKSVSNGTAKPATSENFDEDLKWVEENIPSSFTDVALPVLVDSDEEIMTRSEMAEKMFSSEKIM

SEQ ID NO: 811489 - protein, 147 aa, Homo sapiens
NAYRNSYTGSSYIGNSIYEQMVEARRYTNAGRSMLSGPVIPSVRHSNTYLVQEPAVHIPGQEPLTASMLAAAPLHEQKQMIGERLYPLIHDVHTQLAGKITGMLLEIDNSELLLMLESPESLHAKIDEAVAVLQAHQAMEQPKAYMH

SEQ ID NO: 811490 - protein, 168 aa, Homo sapiens
MVRPPVVPRRPPAHISSVRQASTQVPRTVPHTQRVANIGTQTTGPSGVGCCTPGRPLLPCKCSSAAHSTYRVQEPAVHIPGQEPLTASMLAAAPLHEQKQMIGERLYPLIHDVHTQLAGKITGMLLEIDNSELLLMLESPESLHAKIDEAVAVLQAHQAMEQPKAYMH

SEQ ID NO: 811491 - protein, 168 aa, Homo sapiens; identical to SEQ ID NO: 811490

SEQ ID NO: 811492 - protein, 171 aa, Homo sapiens
MVRPPVVPRRPPAHISSVRQASTQVPRTVPHTQRVANIGTQTTGPSGVGCCTPGRPLLPCKCSSAAHSTYRVQEPAVHIPGQEPLTASMLAAAPLHEQKQMIGERLYPLIHDVHTQLAGKITGMLLEIDNSELLLMLESPESLHAKKRKSSLPWLPKGQCFWLSALRPCKL

SEQ ID NO: 811493 - protein, 559 aa, Homo sapiens
QSSALRRGARLGGPRPSYLPSAPGLCSHFPAVEGREAGAMQSESGIVPDFEVGEEFHEEPKTYYELKSQPLKSSSSAEHPGASKPPISSSSMTSRILLRQQLMREQMQEQERREQQQKLQAAQFMQQRVPVSQTPAINVSVPTTLPSATQVPMEVLKVQTHLENPTKYHIQQAQRQQVKQYLSTTLANKHANQVLSLPCPNQPGDHVMPPVPGSSAPNSPMAMLTLNSNCEKEGFYKFEEQNRAESECPGMNTHSRASCMQMDDVIDDIISLESSYNEEILGLMDPALQMANTLPVSGNLIDLYGNQGLPPPGLTISNSCPANLPNIKRELTESEARALAKERQKKDNHNLIERRRRFNINDRIKELGTLIPKSNDPDMRWNKGTILKASVDYIRKLQREQQRAKELENRQKKLEHANRHLLLRIQELEMQARAHGLSLIPSTGLCSPDLVNRIIKQEPVLENCSQDLLQHHADLTCTTTLDLTDGTITFNNNLGTGTEANQAYSVPTKMGSKLEDILMDDTLSPVGVTDPLLSSVSPGASKTSSRRSSMSMEETEHTC

SEQ ID NO: 811494 - protein, 419 aa, Homo sapiens
MLEMLEYNHYQVQTHLENPTKYHIQQAQRQQVKQYLSTTLANKHANQVLSLPCPNQPGDHVMPPVPGSSAPNSPMAMLTLNSNCEKEGFYKFEEQNRAESECPGMNTHSRASCMQMDDVIDDIISLESSYNEEILGLMDPALQMANTLPVSGNLIDLYGNQGLPPPGLTISNSCPANLPNIKRELTACIFPTESEARALAKERQKKDNHNLIERRRRFNINDRIKELGTLIPKSNDPDMRWNKGTILKASVDYIRKLQREQQRAKELENRQKKLEHANRHLLLRIQELEMQARAHGLSLIPSTGLCSPDLVNRIIKQEPVLENCSQDLLQHHADLTCTTTLDLTDGTITFNNNLGTGTEANQAYSVPTKMGSKLEDILMDDTLSPVGVTDPLLSSVSPGASKTSSRRSSMSMEETEHTC

SEQ ID NO: 811495 - protein, 541 aa, Homo sapiens
QSSALRRGARLGGPRPSYLPSAPGLCSHFPAVEGREAGAMQSESGIVPDFEVGEEFHEEPKTYYELKSQPLKSSSSAEHPGASKPPISSSSMTSRILLRQQLMREQMQEQERREQQQKLQAAQFMQQRVPVSQTPAINVSVPTTLPSATQVPMEVLKVQTHLENPTKYHIQQAQRQQVKQYLSTTLANKHANQVLSLPCPNQPGDHVMPPVPGSSAPNSPMAMLTLNSNCEKEGFYKFEEQNRAESECPGMNTHSRASCMQMDDVIDDIISLESSYNEEILGLMDPALQMANTLPVSGNLIDLYGNQGLPPPGLTISNSCPANLPNIKRELTESEARALAKERQKKDNHNLIERRRRFNINDRIKELGTLIPKSNDPDMRWNKGTILKASVDYIRKLQREQQRAKELENRQKKLEHANRHLLLRIQELEMQARAHGLSLIPSTGLCSPDLVNRIIKQEPVLENCSQDLLQHHADLTCTTTLDLTDGTITFNNNLGTGTEANQAYSVPTKMGSKLEDILMDDTLSPVGVTDPLLSSVSPGAS

SEQ ID NO: 811496 - protein, 130 aa, Homo sapiens [sequence omitted]

SEQ ID NO: 811497 - protein, 230 aa, Homo sapiens
MSSSYYVNALFSKYTAGTSLFQNAEPTSCSFAPNSQRSGYGAGAGAFASTVPGLYNVNSPLYQSPFASGYGLGADAYGNLPCASYDQNIPGLCSDLAKGACDKTDEGALHGAAEANFRIYPWMRSSGPDRKRGRQTYTRYQTLELEKEFHFNRYLTRRRRIEIAHALCLTERQIKIWFQNRRMKWKKEHKDEGPTAAAAPEGAVPSAAATAAADKADEEDDDEEEEDEEE

SEQ ID NO: 811498 - protein, 107 aa, Homo sapiens
KKTKTKTKKQPSPQPALYPPPSPTPAPNFCGLNGRRDWVALDSLCLTERQIKIWFQNRRMKWKKEHKDEGPTAAAAPEGAVPSAAATAAADKADEEDDDEEEEDEEE

SEQ ID NO: 811499 - protein, 325 aa, Homo sapiens
LLPGAVEQPQPQFISRFLEGQSGVTIKHVACGDFFTACLTDRGIIMTFGSGSNGCLGHGSLTDISQPTIVEALLGYEMVQVACGASHVLALSTERELFAWGRGDSGRLGLGTRESHSCPQQVPMPPGQEAQRVVCGIDSSMILTVPGQALACGSNRFNKLGLDHLSLGEEPVPHQQVEEALSFTLLGSAPLDQEPLLSIDLGTAHSAAVTASGDCYTFGSNQHGQLGTNTRRGSRAPCKVQGLEGIKMAMVACGDAFTVAIGAESEVYSWGKGARGRLGRRDEDAGLPRPVQLDETHPYTVTSVSCCHGNTLLAVRSVTDEPVPP

SEQ ID NO: 811500 - protein, 325 aa, Homo sapiens; identical to SEQ ID NO: 811499

SEQ ID NO: 811501 - protein, 258 aa, Homo sapiens
LLPGAVEQPQPQFISRFLEGQSGVTIKHVACGDFFTACLTDRGIIMTFGSGSNGCLGHGSLTDISQPTIVEALLGYEMVQVACGASHVLALSTERELFAWGRGDSGRLGLGTRESHSCPQQVPMPPGQEAQRVVCGIDSSMILTVPGQALACGSNRFNKLGLDHLSLGEEPVPHQQVEEALSFTLLGSAPLDQEPLLSIDLGTAHSAAVTASGDCYTFGSNQHGQLGTNTRRGSRAPCKVQGLEGIKMAMVACGDAFM

SEQ ID NO: 811502 - protein, 267 aa, Homo sapiens
MGAAAAEADRTLFVGNLETKVTEELLFELFHQAGPVIKVKIPKDKDGKPKQFAFVNFKHEVSVPYAMNLLNGIKLYGRPIKIQFRSGSSHAPQDVSLSYPQHHVGNSSPTSTSPSSRYERTMDNMTSSAQIIQRSFSSPENFQRQAVMNSALRQMSYGGKFGSSPLDQSGFSPSVQSHSHSFNQSSSSQWRQGTPSSQRKVRMNSYPYLADRHYSREQRYTDHGSDHHYRGKRDDFFYEDRNHDDWSHDYDNRRDSSRDGKWRSSRH

SEQ ID NO: 811503 - protein, 151 aa, Homo sapiens
MGAAAAEADRTLFVGNLETKVTEELLFELFHQAGPVIKVKIPKDKDGKPKQFAFVNFKHEVSVPYAMNLLNGIKLYGRPIKIQFRSGSSHAPQDVSLSYPQHHVGNSSPTSTSPSSRYERTMDNMTSSAQIIQRSFSSPENFQRQAVITLV

SEQ ID NO: 811504 - protein, 267 aa, Homo sapiens; identical to SEQ ID NO: 811502

SEQ ID NO: 811505 - protein, 267 aa, Homo sapiens; identical to SEQ ID NO: 811502

SEQ ID NO: 811506 - protein, 188 aa, Homo sapiens
PGWASNKGSSHAPQDVSLSYPQHHVGNSSPTSTSPSSRYERTMDNMTSSAQIIQRSFSSPENFQRQAVMNSALRQMSYGGKFGSSPLDQSGFSPSVQSHSHSFNQSSSSQWRQGTPSSQRKVRMNSYPYLADRHYSREQRYTDHGSDHHYRGKRDDFFYEDRNHDDWSHDYDNRRDSSRDGKWRSSRH

SEQ ID NO: 811507 - protein, 269 aa, Homo sapiens
MGAAAAEADRTLFVGNLETKVTEELLFELFHQAGPVIKVKIPKDKDGKPKQFAFVNFKHEVSVPYAMNLLNGIKLYGRPIKIQFRSGSSHAPQDVSLSYPQHHVGNSSPTSTSPSSRYERTMDNMTSSAQIIQRSFSSPENFQRQAVMNSALRQMSYGGKFGSSPLDQSGFSPSVQSHSHSFNQSSSSQWRQGTPSSQRKVRMNSYPYLADRHYSREQRYTDHGSDHHYRGKRDDFFYEDRNHDDWSHDYDNRSSTWIRMRSQRDTLIQ

SEQ ID NO: 811508 - protein, 231 aa, Homo sapiens
MDPEHAKPESSEAPSGNLKQPETAAALASSGSVVSSVPKAQRNISAKTAPRKHPAVSIRSAQSAAAARPQGSEGTAPSRKATTRPPPKPTLPPPTPSAHTESKLLNEMAIKERVEGRAKVPYKFRDSLKRFSFSPTGMLKILRLSLILGALACFIITQANESFITITSLEICIVVFFILIYVLTLHHLLTYLHWPLLDLTNSIITAVFLSVVAILAMQEKKRRHLLYVGGR

SEQ ID NO: 811509 - protein, 111 aa, Homo sapiens
MWKTLLVMERFLRGNSNLCPWKFSRREGSYQQYHYSCVPFSSCHLGHARKEKKAFTLCRGAVIVCCIDAFVVTTKMRTNLKRFLGVEVERKLSPAKDAYPETGPDAPQRPA

SEQ ID NO: 811510 - protein, 113 aa, Homo sapiens
QLTGNNSIHAHRICVGTDTRNHNIDSWWRGSYQQYHYSCVPFSSCHLGHARKEKKAFTLCRGAVIVCCIDAFVVTTKMRTNLKRFLGVEVERKLSPAKDAYPETGPDAPQRPA

SEQ ID NO: 811511 - protein, 221 aa, Homo sapiens
MDPEHAKPESSEAPSGNLKQPETAAALASSGSVVSSVPKAQRNISAKTAPRKHPAVSIRSAQSAAAARPQGSEGTAPSRKATTRPPPKPTLPPPTPSAHTESKLLNEMAIKERVEGRAKVPYKFRDSLKRFSFSPTGMLKILRLVSGELVRPSWADVAGSGLGEMPTGCQLQKPSIIHFATHLCFASPILTLNNLPLCPAPIEQGSRRGVSDAVSQSRLAF

SEQ ID NO: 811512 - protein, 221 aa, Homo sapiens
MDPEHAKPESSEAPSGNLKQPETAAALASSGSVVSSVPKAQRNISAKTAPRKHPAVSIRSAQSAAAARPQGSEGTAPSRKATTRPPPKPTLPPPTPSAHTESKLLNEMAIKERVEGRAKVPYKFRDSLKRFSFSPTGMLKILRLSLILGALACFIITQANESFITITSLEICIVVFFILIYVLTLHHLLTYLHWPLLVSVHFYNSSNPSFALSPRVRALLK

SEQ ID NO: 811513 - protein, 127 aa, Homo sapiens
RGSPWQSTHGQTIQVDHQQAEVFIVEQTVHAEEGIPMSCQYYLLSDGHLAKRIQVGSPGCCIITKMPILREEDEIEPRPVFEKKPLVWEEDMELYSKFLDRKEELRLGHASYLRQHPEAHALISDFL

SEQ ID NO: 811514 - protein, 79 aa, Homo sapiens
MLAVCRCRAGHRRGILWASVVQVGPSAELHELLSSQPCSISWFWQQEASPVHSGAVGLGHSQQEGALLRPACSLSAEGD

SEQ ID NO: 811515 - protein, 93 aa, Homo sapiens
RDPHGPDTPALRKRRTLVGATTDRRTETRGRRVLSVAPYPEQRPRPQAVMSPRPRILCASSGRAARGGAKRNPWNSLSSENWEQPQGTRCSSC

SEQ ID NO: 811516 - protein, 846 aa, Homo sapiens
METKETVTSEVVNLSNKNEKLCQELTEIDQLAQQLERHKEEVLETADKELGEAKKEIKRKLSEMQDLEETMAKLQLELNLCQKEKERLSDELLVKSDLETVVHQLEQEKQRLSKKVESFAVTERQLTLEVERMRLEHGIKRRDRSPSRLDTFLKGIEEERDYYKKELERLQHIIQRRSCSTSYSAREKSSIFRTPEKGDYNSEIHQITRERDELQRMLERFEKYMEDIQSNVKLLTAERDKLSVLYNEAQEELSALRKESTQTTAPHNIVSLMEKEKELALSDLRRIMAEKEALREKLEHIEEVSLFGKSELEKTIEHLTCVNHQLESEKYELKSKVLIMKETIESLENKLKVQAQKFSHVAGDSSHQKTEVNSLRIVNEQLQRSVDDYQHRLSIKRGELESAQAQIKILEEKIDELNLKMTSQDEEAHVMKKTIGVIDKEKDFLQETVDEKTEKIANLQENLANKEKAVAQMKIMISECESSVNQLKETLVNRDREINSLRRQLDAAHKELDEVGRSREIAFKENRRLQDDLATMARENQEISLELEAAVQEKEEMKSRVHKYITEVSRWESLMAAKEKENQDLLDRFQMLHNRAEDWEVKAHQAEGESSSVRLELLSIDTERRHLRERVELLEKEIQEHINAHHAYESQISSMAKAMSRLEEELRHQEDEKATVLNDLSSLRELCIKLDSGKDIMTQQLNSKNLEFERVVVELENVKSESDLLKKQLSNERHTVKNLESLLATNRDKEFHSHLTSHEKDTEIQLLKEKLTLSESKLTSQSRENTMLRAKVAQLQTDYDALKRQISTERYERERAIQEMRRHGLATPPLSSTLRSPSHSPEHRNV

SEQ ID NO: 811517 - protein, 249 aa, Homo sapiens
MTTAVERKYINIRKRLDQLGYRQTLTVECLPLVEKLFSDLVHTTESLRQSKLSAVKAEKESANFDFVLEPYKLENARLSRENNELYLELMKLREHSDQHVKELKTSLKKCARETADLKFLNNQYAHKLKLLEKESKAKNERIQQLQEKNLHAVVQTPGGKKRSIAFRRQRMQIDEPVPPSEVSSYPVPQPDDPYIADLLQVADNRIQELQQEVHQLQEKLAMMESGVRDYSKQVGFLFTCIVGIEIGML

SEQ ID NO: 811518 - protein, 1140 aa, Homo sapiens
MTTAVERKYINIRKRLDQLGYRQTLTVECLPLVEKLFSDLVHTTESLRQSKLSAVKAEKESANFDFVLEPYKLENARLSRENNELYLELMKLREHSDQHVKELKTSLKKCARETADLKFLNNQYAHKLKLLEKESKAKNERIQQLQEKNLHAVVQTPGGKKRSIAFRRQRMQIDEPVPPSEVSSYPVPQPDDPYIADLLQVADNRIQELQQEVHQLQEKLAMMESGVRDYSKQIELREREIERLSVALDGGRSPDVLSLESRNKTNEKLIAHLNIQVDFLQQANKDLEKRIRELMETKETVTSEVVNLSNKNEKLCQELTEIDQLAQQLERHKEEVLETADKELGEAKKEIKRKLSEMQDLEETMAKLQLELNLCQKEKERLSDELLVKSDLETVVHQLEQEKQRLSKKVESFAVTERQLTLEVERMRLEHGIKRRDRSPSRLDTFLKGIEEERDYYKKELERLQHIIQRRSCSTSYSAREKSSIFRTPEKGDYNSEIHQITRERDELQRMLERFEKYMEDIQSNVKLLTAERDKLSVLYNEAQEELSALRKESTQTTAPHNIVSLMEKEKELALSDLRRIMAEKEALREKLEHIEEVSLFGKSELEKTIEHLTCVNHQLESEKYELKSKVLIMKETIESLENKLKVQAQKFSHVAGDSSHQKTEVNSLRIVNEQLQRSVDDYQHRLSIKRGELESAQAQIKILEEKIDELNLKMTSQDEEAHVMKKTIGVIDKEKDFLQETVDEKTEKIANLQENLANKEKAVAQMKIMISECESSVNQLKETLVNRDREINSLRRQLDAAHKELDEVGRSREIAFKENRRLQDDLATMARENQEISLELEAAVQEKEEMKSRVHKYITEVSRWESLMAAKEKENQDLLDRFQMLHNRAEDWEVKAHQAEGESSSVRLELLSIDTERRHLRERVELLEKEIQEHINAHHAYESQISSMAKAMSRLEEELRHQEDEKATVLNDLSSLRELCIKLDSGKDIMTQQLNSKNLEFERVVVELENVKSESDLLKKQLSNERHTVKNLESLLATNRDKEFHSHLTSHEKDTEIQLLKEKLTLSESKLTSQSRENTMLRAKVAQLQTDYDALKRQISTERYERERAIQEMRRHGLATPPLSSTLRSPSHSPEHRNV

SEQ ID NO: 811519 - protein, 1088 aa, Homo sapiens
MTTAVERKYINIRKRLDQLGYRQTLTVECLPLVEKLFSDLVHTTESLRQSKLSAVKAEKESANFDFVLEPYKLENARLSRENNELYLELMKLREHSDQHVKELKTSLKKCARETADLKFLNNQYAHKLKLLEKESKAKNERIQQLQEKNLHAVVQTPGGKKRSIAFRRQRMQIDEPVPPSEVSSYPVPQPDDPYIADLLQVADNRIQELQQEVHQLQEKLAMMESGVRDYSKQIELREREIERLSVALDGGRSPDVLSLESRNKTNEKLIAHLNIQVDFLQQANKDLEKRIRELMETKETVTSEVVNLSNKNEKLCQELTEIDQLAQQLERHKEEVLETADKELGEAKKEIKRKLSEMQDLEETMAKLQLELNLCQKEKERLSDELLVKSDLETVVHQLEQEKQRLSKKVESFAVTERQLTLEVERMRLEHGIKRRDRSPSRLDTFLKGIEEERDYYKKELERLQHIIQRRSCSTSYSAREKSSIFRTPEKGDYNSEIHQITRERDELQRMLERFEKYMEDIQSNVKLLTAERDKLSVLYNEAQEELSALRKESTQTTAPHNIVSLMEKEKELALSDLRRIMAEKEALREKLEHIEEVSLFGKSELEKTIEHLTCVNHQLESEKYELKSKVLIMKETIESLENKLKVQAQKFSHVAGDSSHQKTEVNSLRIVNEQLQRSVDDYQHRLSIKRGELESAQAQIKILEEKIDELNLKMTSQDEEAHVMKKTIGVIDKEKDFLQETVDEKTEKIANLQENLANKEKAVAQMKIMISECESSVNQLKETLVNRDREINSLRRQLDAAHKELDEVGRSREIAFKENRRLQDDLATMARENQEISLELEAAVQEKEEMKSRVHKYITEVSRWESLMAAKEKENQDLLDRFQMLHNRAEDWEVKAHQAEGESSSVRLELLSIDTERRHLRERVELLEKEIQEHINAHHAYESQISSMAKAMSRLEEELRHQEDEKATVLNDLSSLRELCIKLDSGKDIMTQQLNSKNLEFERVVVELENVKSESDLLKKQLSNERHTVKNLESLLATNRDKEFHSHLTSHEKDTEIQLLKENCLNPGGGGCGEPRSCHCTPAWVTE

SEQ ID NO: 811520 - protein, 195 aa, Homo sapiens
MCCGHGSKASGYEGQSSSWEIPREGREPLDMWNVISVGCWWIPQVVWHGRRPEAAMDHLCLGRFLEMVGSPWARAAYVAWASSGAGGSLRMLSKVSYESWSQSLDMGVGRMLRFQDVGSRGRVFGAGQISTKFSLTQRARGFWQVCLTHMLWAGNPGFAPGVCVSIPGETPFGLHGVCHLREKDYAPRHRCDYGG

SEQ ID NO: 811521 - protein, 204 aa, Homo sapiens
CIQRRMTASNAADCIQSRMTASNAASHAILGDGRSPGTHGVWALSEAVGSLLNVVWHGRRPEAAMDHLCLGRFLEMVGSPWARAAYVAWASSGAGGSLRMLSKVSYESWSQSLDMGVGRMLRFQDVGSRGRVFGAGQISTKFSLTQRARGFWQVCLTHMLWAGNPGFAPGVCVSIPGETPFGLHGVCHLREKDYAPRHRCDYGG

SEQ ID NO: 811522 - protein, 388 aa, Homo sapiens
GRGTRRGGGTMVMAYFVENFWGEKNSGFDVLYHNMKHGQISTKELADFVRERATIEEAYSRSMTKLAKSASNYSQLGTFAPVWDVFKTSTEKLANCHLDLVRKLQELIKEVQKYGEEQVKSHKKTKEEVAGTLEAVQTIQSITQALQKSKENYNAKCVEQERLKKEGATQREIEKAAVKSKKATDTYKLYVEKYALAKADFEQKMTETAQKFQDIEETHLIHIKEIIGSLSNAIKEIHLQIGQVHEEFINNMANTTVESLIQKFAESKGTGKERPGLIEFEECDTASAVEGIKPRKRKTFALPGIIKKEKDAESVWSFTVVAQVGMQWRDLGLLHSPPPRFKRFSSYLSLPSSWNYGAHHHIWLIFCIFSRDRVSPYWPGWSRTPDLR

SEQ ID NO: 811523 - protein, 337 aa, Homo sapiens
GRGTRRGGGTMVMAYFVENFWGEKNSGFDVLYHNMKHGQISTKELADFVRERATIEEAYSRSMTKLAKSASNYSQLGTFAPVWDVFKTSTEKLANCHLDLVRKLQELIKEVQKYGEEQVKSHKKTKEEVAGTLEAVQTIQSITQALQKSKENYNAKCVEQERLKKEGATQREIEKAAVKSKKATDTYKLYVEKYALAKADFEQKMTETAQKFQDIEETHLIHIKEIIGSLSNAIKEIHLQIGQVHEEFINNMANTTVESLIQKFAESKGTGKERPGLIEFEECDTASAVEGIKPRKRKTFALPGIIKKEKDAESVECPDADSLMHFWIYIARCFPIK

SEQ ID NO: 811524 - protein, 388 aa, Homo sapiens; identical to SEQ ID NO: 811522

SEQ ID NO: 811525 - protein, 330 aa, Homo sapiens
AALESAPPPRAPSLRPAPPAPLSQRRASGVKSAPLAPQPVPTAAAQPQPSSASASLSSSSSAAGHAAAGRDRDAAGESGTRAASPSPSGSRTAGRLPSPSYSPLPAPSLFPPPPLPAPAASTMSAGGDFGNPLRKFKLVFLGEQSVGKTSLITRFMYDSFDNTYQATIGIDFLSKTMYLEDRTVRLQLWDTAGQERFRSLIPSYIRDSTVAVVVYDITNLNSFQQTSKWIDDVRTERGSDVIIMLVGNKTDLADKRQITIEEGEQRAKELSVMFIETSAKTGYNVKQLFRRVASALPGMENVQEKSKEGMIDIKLDKPQEPPASEGGCSC

SEQ ID NO: 811526 - protein, 330 aa, Homo sapiens; identical to SEQ ID NO: 811525

SEQ ID NO: 811527 - protein, 94 aa, Homo sapiens
MTHVLGTTAVAEVSGHLGKSLIKFCSGDLGPEGILPDTHLLDPLLKEASTAPLAQIPSKGMDGESRVGPLLYQLVSYPPRPRPQLPGPTPQSSG

SEQ ID NO: 811528 - protein, 348 aa, Homo sapiens
SSLCFPRMRAPGAGAASVVSLALLWLLGLPWTWSAAAALGVYVGSGGWRFLRIVCKTARRDLFGLSVLIRVRLELRRHQRAGHTIPRIFQAVVQRQPERLALVDAGTGECWTFAQLDAYSNAVANLFRQLGFAPGDVVAIFLEGRPEFVGLWLGLAKAGMEAALLNVNLRREPLAFCLGTSGAKALIFGGEMVAAVAEVSGHLGKSLIKFCSGDLGPEGILPDTHLLDPLLKEASTAPLAQIPSKGMDDRLFYIYTSGTTGLPKAAIVVHSRYYRMAAFGHHAYRMQAADVLYDCLPLYHSAGNIIGVGQCLIYGLTVVLRKKFSASRFWDDCIKYNCTLYLARPILD

SEQ ID NO: 811529 - protein, 597 aa, Homo sapiens
MRAPGAGAASVVSLALLWLLGLPWTWSAAAALGVYVGSGGWRFLRIVCKTARRDLFGLSVLIRVRLELRRHQRAGHTIPRIFQAVVQRQPERLALVDAGTGECWTFAQLDAYSNAVANLFRQLGFAPGDVVAIFLEGRPEFVGLWLGLAKAGMEAALLNVNLRREPLAFCLGTSGAKALIFGGEMVAAVAEVSGHLGKSLIKFCSGDLGPEGILPDTHLLDPLLKEASTAPLAQIPSKGMDDRLFYIYTSGTTGLPKAAIVVHSRYYRMAAFGHHAYRMQAADVLYDCLPLYHSAGNIIGVGQCLIYGLTVVLRKKFSASRFWDDCIKYNCTVVQYIGEICRYLLKQPVREAERRHRVRLAVGNGLRPAIWEEFTERFGVRQIGEFYGATECNCSIANMDGKVGSCGFNSRILPHVYPIRLVKVNEDTMELLRDAQGLCIPCQAGEPGLLVGQINQQDPLRRFDGYVSESATSKKIAHSVFSKGDSAYLSGDVLVMDELGYMYFRDRSGDTFRWRGENVSTTEVEGVLSRLLGQTDVAVYGVAVPGTFKIQKTRLQREGFDPRQTSDRLFFLDLKQGHYLPLNEAVYTRICSGAFAL

SEQ ID NO: 811530 - protein, 361 aa, Homo sapiens
STCSMLPHACTLGDLGPSLCPPGSPSPCRYYRMAAFGHHAYRMQAADVLYDCLPLYHSAGNIIGVGQCLIYGLTVVLRKKFSASRFWDDCIKYNCTVVQYIGEICRYLLKQPVREAERRHRVRLAVGNGLRPAIWEEFTERFGVRQIGEFYGATECNCSIANMDGKVGSCGFNSRILPHVYPIRLVKVNEDTMELLRDAQGLCIPCQAGEPGLLVGQINQQDPLRRFDGYVSESATSKKIAHSVFSKGDSAYLSGDVLVMDELGYMYFRDRSGDTFRWRGENVSTTEVEGVLSRLLGQTDVAVYGVAVPGTFKIQKTRLQREGFDPRQTSDRLFFLDLKQGHYLPLNEAVYTRICSGAFAL

SEQ ID NO: 811531 - protein, 418 aa, Homo sapiens
MTHVLGTTAVAEVSGHLGKSLIKFCSGDLGPEGILPDTHLLDPLLKEASTAPLAQIPSKGMDDRLFYIYTSGTTGLPKAAIVVHSRYYRMAAFGHHAYRMQAADVLYDCLPLYHSAGNIIGVGQCLIYGLTVVLRKKFSASRFWDDCIKYNCTVVQYIGEICRYLLKQPVREAERRHRVRLAVGNGLRPAIWEEFTERFGVRQIGEFYGATECNCSIANMDGKVGSCGFNSRILPHVYPIRLVKVNEDTMELLRDAQGLCIPCQAGEPGLLVGQINQQDPLRRFDGYVSESATSKKIAHSVFSKGDSAYLSGDVLVMDELGYMYFRDRSGDTFRWRGENVSTTEVEGVLSRLLGQTDVAVYGVAVPGTFKIQKTRLQREGFDPRQTSDRLFFLDLKQGHYLPLNEAVYTRICSGAFAL

SEQ ID NO: 811532 - protein, 93 aa, Homo sapiens
AAVADPHSLLDPNAIYQELQKVLAPYARPIFLRLLPQVDTTGTFKIQKTRLQREGFDPRQTSDRLFFLDLKQGHYLPLNEAVYTRICSGAFAL

SEQ ID NO: 811533 - protein, 597 aa, Homo sapiens; identical to SEQ ID NO: 811529

SEQ ID NO: 811534 - protein, 178 aa, Homo sapiens
FKDGVLLLLPRLEFNGTISALSPRFKQFSCPASCLLSWEEASWVSSSGVSTGGSHRRGSRGVRGGLLPGVGLSSLRGSSLLNIPHLVVAPPMSPLMALTPCWWRCPRQSHQDGPDIPTGFAGGSSRTSTPAFLGPATQAACPSVLPPAAPPGPWSGGAMARDTVASHVNFPGHCGFIS

SEQ ID NO: 811535 - protein, 455 aa, Homo sapiens
SSLCFPRMRAPGAGAASVVSLALLWLLGLPWTWSAAAALGVYVGSGGWRFLRIVCKTARRDLFGLSVLIRVRLELRRHQRAGHTIPRIFQAVVQRQPERLALVDAGTGECWTFAQLDAYSNAVANLFRQLGFAPGDVVAIFLEGRPEFVGLWLGLAKAGMEAALLNVNLRREPLAFCLGTSGAKALIFGGEMVAAVAEVSGHLGKSLIKFCSGDLGPEGILPDTHLLDPLLKEASTAPLAQIPSKGMDDRLFYIYTSGTTGLPKAAIVVHSRYYRMAAFGHHAYRMQAADVLYDCLPLYHSAGNIIGVGQCLIYGLTVVLRKKFSASRFWDDCIKYNCTVVQYIGEICRYLLKQPVREAERRHRVRLAVGNGLRPAIWEEFTERFGVRQIGEFYGATECNCSIANMDGKVHTGRAPGQVSEFREDHCLLFLGPLGYIKQPGLARKAPPRRTQGGV

SEQ ID NO: 811536 - protein, 97 aa, Homo sapiens
MQAGKVGGGALSWRRRLLPCFCRSAKVTELRMTLEVLGPSPRARQAKFTEKDPAYPRLLPTQFTPFQVGSCGFNSRILPHVYPIRLVKVNEDTMELL

SEQ ID NO: 811537 - protein, 150 aa, Homo sapiens
GLAPWVGRSRGLSSDPGSPPPAGPITHFLTTVPQVVQYIGEICRYLLKQPVREAERRHRVRLAVGNGLRPAIWEEFTERFGVRQIGEFYGATECNCSIANMDGKVHTGRAPGQVSEFREDHCLLFLGPLGYIKQPGLARKAPPRRTQGGV

SEQ ID NO: 811538 - protein, 128 aa, Homo sapiens
ARFEAGCGDYHDLESVVQQVEQNLELMTKRAVKAENHVVKLKQEISLLQAQVSNFQRENEALRCGQGASLTVVKQNADVALQNLRVVMNSAQASIKQLVSGAETLNLVAEILKSIDRISEVKDEEEDS

SEQ ID NO: 811539 - protein, 449 aa, Homo sapiens
VQARAFGARSGSSGERLGGAGAAERRATGAGDGGGRRGPRHGRSRGHGAAAAGLGRSCPAGPAAMSGYQRRPGATPLSRARSLAIPDDFGYGKGKCSKQSPSGAHGTHFGDDRFEDLEEANPFSFREFLKTKNLGLSKEDPASRIYAKEASRHSLGLDHNSPPSQTGGYGLEYQQPFFEDPTGAGDLLDEEEDEDTGWSGAYLPSAIEQTHPERVPAGTSPCSTYLSFFSTPSELAGPESLPSWALSDTDSRVSPASPAGSPSADFAVHGESLGDRHLRTLQISYDALKDENSKLRRKLNEVQSFSEAQTEMVRTLERKLEAKMIKEESDYHDLESVVQQVEQNLELMTKRAVKAENHVVKLKQEISLLQAQVSNFQRENEALRCGQGASLTVVKQNADVALQNLRVVMNSAQASIKQLVSGAETLNLVAEILKSIDRISEVKDEEEDS

SEQ ID NO: 811540 - protein, 499 aa, Homo sapiens
VQARAFGARSGSSGERLGGAGAAERRATGAGDGGGRRGPRHGRSRGHGAAAAGLGRSCPAGPAAMSGYQRRPGATPLSRARSLAIPDAPAFYERRSCLPQLNCERPHGRDLDSPFFGIRPAFMCYVPSPVLASVGDTDFGYGKGKCSKQSPSGAHGTHFGDDRFEDLEEANPFSFREFLKTKNLGLSKEDPASRIYAKEASRHSLGLDHNSPPSQTGGYGLEYQQPFFEDPTGAGDLLDEEEDEDTGWSGAYLPSAIEQTHPERVPAGTSPCSTYLSFFSTPSELAGPESLPSWALSDTDSRVSPASPAGSPSADFAVHGESLGDRHLRTLQISYDALKDENSKLRRKLNEVQSFSEAQTEMVRTLERKLEAKMIKEESDYHDLESVVQQVEQNLELMTKRAVKAENHVVKLKQEISLLQAQVSNFQRENEALRCGQGASLTVVKQNADVALQNLRVVMNSAQASIKQLVSGAETLNLVAEILKSIDRISEVKDEEEDS

SEQ ID NO: 811541 - protein, 476 aa, Homo sapiens
VQARAFGARSGSSGERLGGAGAAERRATGAGDGGGRRGPRHGRSRGHGAAAAGLGRSCPAGPAAMSGYQRRPGATPLSRARSLAIPDAPAFYERRSCLPQLNCERPHGRDLDSPFFGIRPAFMCYVPSPVLASVGDTDDRFEDLEEANPFSFREFLKTKNLGLSKEDPASRIYAKEASRHSLGLDHNSPPSQTGGYGLEYQQPFFEDPTGAGDLLDEEEDEDTGWSGAYLPSAIEQTHPERVPAGTSPCSTYLSFFSTPSELAGPESLPSWALSDTDSRVSPASPAGSPSADFAVHGESLGDRHLRTLQISYDALKDENSKLRRKLNEVQSFSEAQTEMVRTLERKLEAKMIKEESDYHDLESVVQQVEQNLELMTKRAVKAENHVVKLKQEISLLQAQVSNFQRENEALRCGQGASLTVVKQNADVALQNLRVVMNSAQASIKQLVSGAETLNLVAEILKSIDRISEVKDEEEDS

SEQ ID NO: 811542 - protein, 473 aa, Homo sapiens
SGTRFRCSERKQRREARRRGGGRAAGDGGGRRGRATRAARAPPRCPEPGASPFPTVSGAGAESSGPGGRRPPRHAVKSLLSLLPAPAFYERRSCLPQLNCERPHGRDLDSPFFGIRPAFMCYVPSPVLASVGDTDDRFEDLEEANPFSFREFLKTKNLGLSKEDPASRIYAKEASRHSLGLDHNSPPSQTGGYGLEYQQPFFEDPTGAGDLLDEEEDEDTGWSGAYLPSAIEQTHPERVPAGTSPCSTYLSFFSTPSELAGPESLPSWALSDTDSRVSPASPAGSPSADFAVHGESLGDRHLRTLQISYDALKDENSKLRRKLNEVQSFSEAQTEMVRTLERKLEAKMIKEESDYHDLESVVQQVEQNLELMTKRAVKAENHVVKLKQEISLLQAQVSNFQRENEALRCGQGASLTVVKQNADVALQNLRVVMNSAQASIKQLVSGAETLNLVAEILKSIDRISEVKDEEEDS

SEQ ID NO: 811543 - protein, 505 aa, Homo sapiens
VQARAFGARSGSSGERLGGAGAAERRATGAGDGGGRRGPRHGRSRGHGAAAAGLGRSCPAGPAAMSGYQRRPGATPLSRARSLAIPDGERGRAESSGPGGRRPPRHAVKSLLSLLPAPAFYERRSCLPQLNCERPHGRDLDSPFFGIRPAFMCYVPSPVLASVGDTDDRFEDLEEANPFSFREFLKTKNLGLSKEDPASRIYAKEASRHSLGLDHNSPPSQTGGYGLEYQQPFFEDPTGAGDLLDEEEDEDTGWSGAYLPSAIEQTHPERVPAGTSPCSTYLSFFSTPSELAGPESLPSWALSDTDSRVSPASPAGSPSADFAVHGESLGDRHLRTLQISYDALKDENSKLRRKLNEVQSFSEAQTEMVRTLERKLEAKMIKEESDYHDLESVVQQVEQNLELMTKRAVKAENHVVKLKQEISLLQAQVSNFQRENEALRCGQGASLTVVKQNADVALQNLRVVMNSAQASIKQLVSGAETLNLVAEILKSIDRISEVKDEEEDS

SEQ ID NO: 811544 - protein, 426 aa, Homo sapiens
VQARAFGARSGSSGERLGGAGAAERRATGAGDGGGRRGPRHGRSRGHGAAAAGLGRSCPAGPAAMSGYQRRPGATPLSRARSLAIPDDDRFEDLEEANPFSFREFLKTKNLGLSKEDPASRIYAKEASRHSLGLDHNSPPSQTGGYGLEYQQPFFEDPTGAGDLLDEEEDEDTGWSGAYLPSAIEQTHPERVPAGTSPCSTYLSFFSTPSELAGPESLPSWALSDTDSRVSPASPAGSPSADFAVHGESLGDRHLRTLQISYDALKDENSKLRRKLNEVQSFSEAQTEMVRTLERKLEAKMIKEESDYHDLESVVQQVEQNLELMTKRAVKAENHVVKLKQEISLLQAQVSNFQRENEALRCGQGASLTVVKQNADVALQNLRVVMNSAQASIKQLVSGAETLNLVAEILKSIDRISEVKDEEEDS

SEQ ID NO: 811545 - protein, 577 aa, Homo sapiens
VQARAFGARSGSSGERLGGAGAAERRATGAGDGGGRRGPRHGRSRGHGAAAAGLGRSCPAGPAAMSGYQRRPGATPLSRARSLAIPDGERGRAESSGPGGRRPPRHAVKSLLSLLPAPAFYERRSCLPQLNCERPHGRDLDSPFFGIRPAFMCYVPSPVLASVGDTGERRGRRPRGRFQFPRHVWHLRCSTSSSIDPSMCRALTACQALGIQRRSPLLGAHSLVAGRPPPRQTVPVQDDDRFEDLEEANPFSFREFLKTKNLGLSKEDPASRIYAKEASRHSLGLDHNSPPSQTGGYGLEYQQPFFEDPTGAGDLLDEEEDEDTGWSGAYLPSAIEQTHPERVPAGTSPCSTYLSFFSTPSELAGPESLPSWALSDTDSRVSPASPAGSPSADFAVHGESLGDRHLRTLQISYDALKDENSKLRRKLNEVQSFSEAQTEMVRTLERKLEAKMIKEESDYHDLESVVQQVEQNLELMTKRAVKAENHVVKLKQEISLLQAQVSNFQRENEALRCGQGASLTVVKQNADVALQNLRVVMNSAQASIKQLVSGAETLNLVAEILKSIDRISEVKDEEEDS

SEQ ID NO: 811546 - protein, 273 aa, Homo sapiens
EWPRSQRTLSIAKAQVLPGCHLRAHLVFVLLMKSRTTHCTYRTTDVLGWDWKTLIPEPLLCLKITGFYDNVFPDSRVSPASPAGSPSADFAVHGESLGDRHLRTLQISYDALKDENSKLRRKLNEVQSFSEAQTEMVRTLERKLEAKMIKEESDYHDLESVVQQVEQNLELMTKRAVKAENHVVKLKQEISLLQAQVSNFQRENEALRCGQGASLTVVKQNADVALQNLRVVMNSAQASIKQLVSGAETLNLVAEILKSIDRISEVKDEEEDS

SEQ ID NO: 811547 - protein, 355 aa, Homo sapiens
VQARAFGARSGSSGERLGGAGAAERRATGAGDGGGRRGPRHGRSRGHGAAAAGLGRSCPAGPAAMSGYQRRPGATPLSRARSLAIPDAPAFYERRSCLPQLNCERPHGRDLDSPFFGIRPAFMCYVPSPVLASVGDTDDRFEDLEEANPFSFREFLKTKNLGLSKEDPASRIYAKEASRHSLGLDHNSPPSQTGGYGLEYQQPFFEDPTGAGDLLDEEEDEDTGWSGAYLPSAIEQTHPERVPAGTSPCSTYLSFFSTPSELAGPESLPSWALSDTDSRVSPASPAGSPSADFAVHGESLGDRHLRTLQISYDAVSEPHGALWHSACPSGFSRGEPGAILPLGWPGLISRTRRFA

SEQ ID NO: 811548 - protein, 343 aa, Homo sapiens
VQARAFGARSGSSGERLGGAGAAERRATGAGDGGGRRGPRHGRSRGHGAAAAGLGRSCPAGPAAMSGYQRRPGATPLSRARSLAIPDAPAFYERRSCLPQLNCERPHGRDLDSPFFGIRPAFMCYVPSPVLASVGDTDDRFEDLEEANPFSFREFLKTKNLGLSKEDPASRIYAKEASRHSLGLDHNSPPSQTGGYGLEYQQPFFEDPTGAGDLLDEEEDEDTGWSGAYLPSAIEQTHPERVPAGTSPCSTYLSFFSTPSELAGPESLPSWALSDTDSRVSPASPAGSPSADFAVHGESLGDRHLRTLQISYDALKDENSKLRRKLNEVQSFSEAQTEMYVSF

SEQ ID NO: 811549 - protein, 476 aa, Homo sapiens; identical to SEQ ID NO: 811541

SEQ ID NO: 811550 - protein, 467 aa, Homo sapiens
VQARAFGARSGSSGERLGGAGAAERRATGAGDGGGRRGPRHGRSRGHGAAAAGLGRSCPAGPAAMSGYQRRPGATPLSRARSLAIPDAPAFYERRSCLPQLNCERPHGRDLDSPFFGIRPAFMCYVPSPVLASVGDTDDRFEDLEEANPFSFREFLKTKNLGLSKEDPASRIYAKEASRHSLGLDHNSPPSQTGGYGLEYQQPFFEDPTGAGDLLDEEEDEDTGWSGAYLPSAIEQTHPERVPAGTSPCSTYLSFFSTPSELAGPESLPSWALSDTDSRVSPASPAGSPSADFAVHGESLGDRHLRTLQISYDALKDENSKLRRKLNEVQSFSEAQTEMVRTLERKLEAKMIKEESDYHDLESVVQQKRAVKAENHVVKLKQEISLLQAQVSNFQRENEALRCGQGASLTVVKQNADVALQNLRVVMNSAQASIKQLVSGAETLNLVAEILKSIDRISEVKDEEEDS

SEQ ID NO: 811551 - protein, 444 aa, Homo sapiens
VQARAFGARSGSSGERLGGAGAAERRATGAGDGGGRRGPRHGRSRGHGAAAAGLGRSCPAGPAAMSGYQRRPGATPLSRARSLAIPDAPAFYERRSCLPQLNCERPHGRDLDSPFFGIRPAFMCYVPSPVLASVGDTDDRFEDLEEANPFSFREFLKTKNLGLSKEDPASRIYAKEASRHSLGLDHNSPPSQTGGYGLEYQQPFFEDPTGAGDLLDEEEDEDTGWSGAYLPSAIEQTHPERVPAGTSPCSTYLSFFSTPSELAGPESLPSWALSDTDSRVSPASPAGSPSADFAVHGESLGDRHLRTLQISYDALKDENSKLRRKLNEVQSFSEAQTEMVRTLERKLEAKMIKEESDYHDLESVVQQVEQNLELMTKRAVKAENHVVKLKQEISLLQAQVSNFQRENEALRCGQGASLTVVKQNADVALQNLRVVMNSAQASIK

SEQ ID NO: 811552 - protein, 138 aa, Homo sapiens
MVRTLERKLEAKMIKEESDYHDLESVVQQVEQNLELMTKRAVKAENHVVKLKQEISLLQAQVSNFQRENEALRCGQGASLTVVKQNADVALQNLRVVMNSAQASIKQLVSGAETLNLVAEILKSIDRISEVKDEEEDS

SEQ ID NO: 811553 - protein, 161 aa, Homo sapiens [sequence omitted]

SEQ ID NO: 811554 - protein, 130 aa, Homo sapiens
PPAPWVGARVRYECEDISDAFCGFSFLGEQKRAVKAENHVVKLKQEISLLQAQVSNFQRENEALRCGQGASLTVVKQNADVALQNLRVVMNSAQASIKQLVSGAETLNLVAEILKSIDRISEVKDEEEDS

SEQ ID NO: 811555 - protein, 343 aa, Homo sapiens; identical to SEQ ID NO: 811548

SEQ ID NO: 811556 - protein, 476 aa, Homo sapiens; identical to SEQ ID NO: 811541

SEQ ID NO: 811557 - protein, 476 aa, Homo sapiens; identical to SEQ ID NO: 811541

SEQ ID NO: 811558 - protein, 476 aa, Homo sapiens; identical to SEQ ID NO: 811541

SEQ ID NO: 811559 - protein, 355 aa, Homo sapiens; identical to SEQ ID NO: 811547

SEQ ID NO: 811560 - protein, 142 aa, Homo sapiens
MTRTKTVNLDNIKPQIIISKLLLTLFKSDWKTWTNQVHVLHLYVLCQYPRSSHMVDIHMEFQIQNRLPLPSCPYTSYSLFKSSICDFSFPESLKIQFENVYNTFSPVFSRLRLLLLKYTTFSLFWSRLTQYLCERELLTTLQ

SEQ ID NO: 811561 - protein, 142 aa, Homo sapiens; identical to SEQ ID NO: 811560

SEQ ID NO: 811562 - protein, 142 aa, Homo sapiens; identical to SEQ ID NO: 811560

SEQ ID NO: 811563 - protein, 81 aa, Homo sapiens
EGAEELGGEGDHVLRLAQQQEEQEVGDERVGFGVLPQIAGVAEPELLLAGDRARASAGRDPRAPGAPSRSLQGELRGAGAF

SEQ ID NO: 811564 - protein, 81 aa, Homo sapiens; identical to SEQ ID NO: 811563

SEQ ID NO: 811565 - protein, 104 aa, Homo sapiens
RQPPSPAVAGQLEGHGWVKCLAEGNSDQRAAARKQLGPHKTPEVKVRVTQRLLTIPASSSWCTSHSMPLSSGWTIVTSLRKGGKLLGLGGSTQPCYQGTCRHAM

SEQ ID NO: 811566 - protein, 78 aa, Homo sapiens
  misc_feature (3)..(3): Xaa can be any naturally occurring amino acid
  misc_feature (8)..(8): Xaa can be any naturally occurring amino acid
ATXTAPGXDLADKVASVYEAPGFFLDLEPIPGALDAVREMNDLPDTQVFICTSPLLKYHHCVGEKVWLPRPYSARGAA

SEQ ID NO: 811567 - protein, 714 aa, Homo sapiens
MNTLQGPVSFKDVAVDFTQEEWQQLDPDEKITYRDVMLENYSHLVSVGYDTTKPNVIIKLEQGEEPWIMGGEFPCQHSPEAWRVDDLIERIQENEDKHSRQAACINSKTLTEEKENTFSQIYMETSLVPSSIIAHNCVSCGKNLESISQLISSDGSYARTKPDECNECGKTYHGEKMCEFNQNGDTYSHNEENILQKISILEKPFEYNECMEALDNEAVFIAHKRAYIGEKPYEWNDSGPDFIQMSNFNAYQRSQMEMKPFECSECGKSFCKKSKFIIHQRAHTGEKPYECNVCGKSFSQKGTLTVHRRSHLEEKPYKCNECGKTFCQKLHLTQHLRTHSGEKPYECSECGKTFCQKTHLTLHQRNHSGERPYPCNECGKSFSRKSALSDHQRTHTGEKLYKCNECGKSYYRKSTLITHQRTHTGEKPYQCSECGKFFSRVSYLTIHYRSHLEEKPYECNECGKTFNLNSAFIRHRKVHTEEKSHECSECGKFSQLYLTDHHTAHLEEKPYECNECGKTFLVNSAFDGHQPLPKGEKSYECNVCGKLFNELSYYTEHYRSHSEEKPYGCSECGKTFSHNSSLFRHQRVHTGEKPYECYECGKFFSQKSYLTIHHRIHSGEKPYECSKCGKVFSRMSNLTVHYRSHSGEKPYECNECGKVFSQKSYLTVHYRTHSGEKPYECNECGKKFHHRSAFNSHQRIHRRGNMNVLDVENL

SEQ ID NO: 811568 - protein, 226 aa, Homo sapiens
SSAPSASGRARAPQTPRARSSGPAAMARSVRVLVDMDGVLADFEAGLLRGFRRRFPEEPHVPLEQRRGFLAREQYRALRPDLADKVASVYEAPGFFLDLEPIPGALDAVREMNDLPDTQVFICTSPLLKYHHCVGEKYRWVEQHLGPQFVERIILTRDKTVVLGDLLIDDKDTVRGQEETPSWEHILFTCCHNRHLVLPPTRRRLLSWSDNWREILDSKRGAAQRE

SEQ ID NO: 811569 - protein, 142 aa, Homo sapiens
SSAPSASGRARAPQTPRARSSGPAAMARSVRVLVDMDGVLADFEAGLLRGFRRRFPEEPHVPLEQRRGFLAREQYRALRPDLADKVASVYEAPGFFLDLEPIPGALDAVREMNDLPDPLLKYHHCVGEKVWLPRPYSARGAA

SEQ ID NO: 811570 - protein, 197 aa, Homo sapiens
SSAPSASGRARAPQTPRARSSGPAAMARSVRVLVDMDGVLADFEAGLLRGFRRRFPEEPHVPLEQRRGFLAREQYRALRPDLADKVASVYEAPGFFLDLEPIPGALDAVREMNDLPDTQVFICTSPLLKYHHCVGEKYRWVEQHLGPQFVERIILTRDKTVVLGDLLIDDKDTVRGQEETPSWEHILFTCCHNRHLE

SEQ ID NO: 811571 - protein, 117 aa, Homo sapiens
SSAPSASGRARAPQTPRARSSGPAAMARSVRVLVDMDGVLADFEAGLLRGFRRRFPEEPHVPLEQRRGFLAREQYRALRPDLADKVASVYEAPGFFLDLEPIPGALDAVREMNDLPE

SEQ ID NO: 811572 - protein, 106 aa, Homo sapiens
SSAPSASGRARAPQTPRARSSGPAAMARSVRVLVDMDGVLADFEAGLLRGFRRRFPEEPHVPLEQRRGFLAREQYRALRPDLAVGGAGSPPGQGPLAPFRGSPPSL

SEQ ID NO: 811573 - protein, 106 aa, Homo sapiens; identical to SEQ ID NO: 811572

SEQ ID NO: 811574 - protein, 117 aa, Homo sapiens; identical to SEQ ID NO: 811571

SEQ ID NO: 811575 - protein, 106 aa, Homo sapiens; identical to SEQ ID NO: 811572

SEQ ID NO: 811576 - protein, 234 aa, Homo sapiens
SSAPSASGRARAPQTPRARSSGPAAMARSVRVLVDMDGVLADFEAGLLRGFRRRFPEEPHVPLEQRRGFLAREQYRALRPDLAVGGAGSPPGQGPLAPFRGSPPSLWRAQSSHPGTRGQRTLGRSLWARAPDRRPLRPSELGPGAPRSLPAGPRGNGKPGPRTLVFQDKVASVYEAPGFFLDLEPIPGALDAVREMNDLPDTQVFICTSPLLKYHHCVGEKVWLPRPYSARGAA

SEQ ID NO: 811577 - protein, 177 aa, Homo sapiens
SSAPSASGRARAPQTPRARSSGPAAMARSVRVLVDMDGVLADFEAGLLRGFRRRFPEEPHVPLEQRRGFLAREQYRALRPDLADKVASVYEAPGFFLDLEPIPGALDAVREMNDLPDTQVFICTSPLLKYHHCVGEKARRRPQAGSTSCSPAATIGTWSCPRQGDGCSPGVTTGGRS

SEQ ID NO: 811578 - protein, 226 aa, Homo sapiens; identical to SEQ ID NO: 811568

SEQ ID NO: 811579 - protein, 226 aa, Homo sapiens; identical to SEQ ID NO: 811568

SEQ ID NO: 811580 - protein, 117 aa, Homo sapiens; identical to SEQ ID NO: 811571

SEQ ID NO: 811581 - protein, 234 aa, Homo sapiens; identical to SEQ ID NO: 811576

SEQ ID NO: 811582 - protein, 177 aa, Homo sapiens; identical to SEQ ID NO: 811577

SEQ ID NO: 811583 - protein, 106 aa, Homo sapiens; identical to SEQ ID NO: 811572

SEQ ID NO: 811584 - protein, 111 aa, Homo sapiens
AALPPLPAEPAPPRPRELAAPARRRWRGACACWWTWTASWPTSRPASCGASAAASLRSRTCRWSSAAASWPASSTAPCGPTWRIKWPVCTKPRAFSWTWSPSREPWTLCGR

SEQ ID NO: 811585 - protein, 106 aa, Homo sapiens; identical to SEQ ID NO: 811572

SEQ ID NO: 811586 - protein, 111 aa, Homo sapiens; identical to SEQ ID NO: 811584

SEQ ID NO: 811587 - protein, 719 aa, Homo sapiens
MAALEEEFTLSSVVLSAGPEGLLGVEQSDKTDQFLVTDSGRTVILYKVSDQKPLGSWSVKQGQIITCPAVCNFQTGEYVVVHDNKVLRIWNNEDVNLDKVFKATLSAEVYRILSVQGTEPLVLFKEGAVRGLEALLADPQQKIETVISDEEVIKWTKFFVVFRHPVLIFITEKHGNYFAYVQMFNSRILTKYTLLLGQDENSVIKSFTASVDRKFISLMSLSSDGCIYETLIPIRPADPEKNQSLVKSLLLKAVVSGNARNGVALTALDQDHVAVLGSPLAASKECLSVWNIKFQTLQTSKELPQGTSGQLWYYGEHLFMLHGKSLTVIPYKCEVSSLAGALGKLKHSQDPGTHVVSHFVNWETPQGCGLGFQNSEQSRRILRRRKIEVSLQPEVPPSKQLLSTIMKDSEKHIEVEVRKFLALKQTPDFHTVIGDTVTGLLERCKAEPSFYPRNCLMQLIQTHVLSYSLCPDLMEIALKKKDVQLLQLCLQQFPDIPESVTCACLKIFLSIGDDSLQETDVNMESVFDYSINSVHDEKMEEQTEILQNGFNPEEDKCNNCDQELNKKPQDETKESTSCPVVQKRAALLNAILHSAYSETFLLPHLKDIPAQHITLFLKYLYFLYLKCSENATMTLPGIHPPTLNQIMDWICLLLDANFTVVVMMPEAKRLLINLYKLVKSQISVYSELNKIEVSFRELQKLNQEKNNRGLYSIEVLELF

SEQ ID NO: 811588 - protein, 719 aa, Homo sapiens; identical to SEQ ID NO: 811587

SEQ ID NO: 811589 - protein, 719 aa, Homo sapiens; identical to SEQ ID NO: 811587

SEQ ID NO: 811590 - protein, 719 aa, Homo sapiens; identical to SEQ ID NO: 811587

SEQ ID NO: 811591 - protein, 592 aa, Homo sapiens
MAALEEEFTLSSVVLSAGPEGLLGVEQSDKTDQFLVTDSGRTVILYKVSDQKPLGSWSVKQGQIITCPAVCNFQTGEYVVVHDNKVLRIWNNEDVNLDKVFKATLSAEVYRILSVQGTEPLVLFKEGAVRGLEALLADPQQKIETVISDEEVIKWTKFFVVFRHPVLIFITEKHGNYFAYVQMFNSRILTKYTLLLGQDENSVIKSFTASVDRKFISLMSLSSDGCIYETLIPIRPADPEKNQSLVKSLLLKAVVSGNARNGVALTALDQDHVAVLGSPLAASKECLSVWNIKFQTLQTSKELPQGTSGQLWYYGEHLFMLHGKSLTVIPYKCEVSSLAGALGKLKHSQDPGTHVVSHFVNWETPQGCGLGFQNSEQSRRILRRRKIEVSLQPEVPPSKQLLSTIMKDSEKHIEVEVRKFLALKQTPDFHTVIGDTVTGLLERCKAEPSFYPRNCLMQLIQTHVLSYSLCPDLMEIALKKKDVQLLQLCLQQFPDIPESVTCACLKIFLSIGDDSLQETDVNMESVFDYSINSVHDEKMEEQTEILQNGFNPEEDKCNNCDQELNKKPQDETKESTSCPVVQKRAALLYPLT

SEQ ID NO: 811592 - protein, 618 aa, Homo sapiens
MPSTRKYVVDYILLQGTEPLVLFKEGAVRGLEALLADPQQKIETVISDEEVIKWTKFFVVFRHPVLIFITEKHGNYFAYVQMFNSRILTKYTLLLGQDENSVIKSFTASVDRKFISLMSLSSDGCIYETLIPIRPADPEKNQSLVKSLLLKAVVSGNARNGVALTALDQDHVAVLGSPLAASKECLSVWNIKFQTLQTSKELPQGTSGQLWYYGEHLFMLHGKSLTVIPYKCEVSSLAGALGKLKHSQDPGTHVVSHFVNWETPQGCGLGFQNSEQSRRILRRRKIEVSLQPEVPPSKQLLSTIMKDSEKHIEVEVRKFLALKQTPDFHTVIGDTVTGLLERCKAEPSFYPRNCLMQLIQTHVLSYSLCPDLMEIALKKKDVQLLQLCLQQFPDIPESVTCACLKIFLSIGDDSLQETDVNMESVFDYSINSVHDEKMEEQTEILQNGFNPEEDKCNNCDQELNKKPQDETKESTSCPVVQKRAALLNAILHSAYSETFLLPHLKDIPAQHITLFLKYLYFLYLKCSENATMTLPGIHPPTLNQIMDWICLLLDANFTVVVMMPEAKRLLINLYKLVKSQISVYSELNKIEVSFRELQKLNQEKNNRGLYSIEVLELF

SEQ ID NO: 811593 - protein, 652 aa, Homo sapiens
MAALEEEFTLSSVVLSAGPEGLLGVEQSDKTDQFLVTDSGRTVILYKVSDQKPLGSWSVKQGQIITCPAVCNFQTGEYVVVHDNKVLRIWNNEDVNLDKVFKATLSAEVYRILSVQGTEPLVLFKEGAVRGLEALLADPQQKIETVISDEEVIKWTKFFVVFRHPVLIFITEKHGNYFAYVQMFNSRILTKYTLLLGQDENSVIKSFTASVDRKFISLMSLSSDGCIYETLIPIRPADPEKNQSLVKSLLLKAVVSGNARNGVALTALDQDHVAVLGSPLAASKGTHVVSHFVNWETPQGCGLGFQNSEQSRRILRRRKIEVSLQPEVPPSKQLLSTIMKDSEKHIEVEVRKFLALKQTPDFHTVIGDTVTGLLERCKAEPSFYPRNCLMQLIQTHVLSYSLCPDLMEIALKKKDVQLLQLCLQQFPDIPESVTCACLKIFLSIGDDSLQETDVNMESVFDYSINSVHDEKMEEQTEILQNGFNPEEDKCNNCDQELNKKPQDETKESTSCPVVQKRAALLNAILHSAYSETFLLPHLKDIPAQHITLFLKYLYFLYLKCSENATMTLPGIHPPTLNQIMDWICLLLDANFTVVVMMPEAKRLLINLYKLVKSQISVYSELNKIEVSFRELQKLNQEKNNRGLYSIEVLELF

SEQ ID NO: 811594 - protein, 537 aa, Homo sapiens
MFNSRILTKYTLLLGQDENSVIKSFTASVDRKFISLMSLSSDGCIYETLIPIRPADPEKNQSLVKSLLLKAVVSGNARNGVALTALDQDHVAVLGSPLAASKECLSVWNIKFQTLQTSKELPQGTSGQLWYYGEHLFMLHGKSLTVIPYKCEVSSLAGALGKLKHSQDPGTHVVSHFVNWETPQGCGLGFQNSEQSRRILRRRKIEVSLQPEVPPSKQLLSTIMKDSEKHIEVEVRKFLALKQTPDFHTVIGDTVTGLLERCKAEPSFYPRNCLMQLIQTHVLSYSLCPDLMEIALKKKDVQLLQLCLQQFPDIPESVTCACLKIFLSIGDDSLQETDVNMESVFDYSINSVHDEKMEEQTEILQNGFNPEEDKCNNCDQELNKKPQDETKESTSCPVVQKRAALLNAILHSAYSETFLLPHLKDIPAQHITLFLKYLYFLYLKCSENATMTLPGIHPPTLNQIMDWICLLLDANFTVVVMMPEAKRLLINLYKLVKSQISVYSELNKIEVSFRELQKLNQEKNNRGLYSIEVLELF

SEQ ID NO: 811595 - protein, 537 aa, Homo sapiens; identical to SEQ ID NO: 811594

SEQ ID NO: 811596 - protein, 719 aa, Homo sapiens; identical to SEQ ID NO: 811587

SEQ ID NO: 811597 - protein, 719 aa, Homo sapiens; identical to SEQ ID NO: 811587

SEQ ID NO: 811598 - protein, 719 aa, Homo sapiens; identical to SEQ ID NO: 811587

SEQ ID NO: 811599 - protein, 711 aa, Homo sapiens
MAALEEEFTLSSVVLSAGPEGLLGVEQSDKTDQFLVTDSGRTVILYKVSDQKPLGSWSVKQGQIITCPAVCNFQTGEYVVVHDNKVLRIWNNEDVNLDKVFKATLSAEVYRILSVQGTEPLVLFKEGAVRGLEALLADPQQKIETVISDEEVIKWTKFFVVFRHPVLIFITEKHGNYFAYVQMFNSRILTKYTLLLGQDENSVIKSFTASVDRKFISLMSLSSDGCIYETLIPIRPADPEKNQSLVKSLLLKAVVSGNARNGVALTALDQDHVAVLGSPLAASKECLSVWNIKFQTLQTSKELPQGTSGQLWYYGEHLFMLHGKSLTVIPYKCEVSSLAGALGKLKHSQDPGTHVVSHFVNWETPQGCGLGFQNSEQSRRILRRRKIEVSLQPEVPPSKQLLSTIMKDSEKHIEVEVRKFLALKQTPDFHTVIGDTVTGLLERCKAEPSFYPRNCLMQLIQTHVLSYSLCPDLMEIALKKKDVQLLQLCLQQFPDIPESVTCACLKIFLSIGDDSLQETDVNMESVFDYSINSVHDEKMEEQTEILQNGFNPEEDKCNNCDQELNKKPQDETKESTSCPVVQKRAALLNAILHSAYSETFLLPHLKDIPAQHITLFLKYLYFLYLKCSENATMTLPGIHPPTLNQIMDWICLLLDANFTVVVMMPEAKRLLINLYKLVKSQARTVFCLRPSQCQEKRVSEYLDHHLTDAPG

SEQ ID NO: 811600 - protein, 672 aa, Homo sapiens
MAALEEEFTLSSVVLSAGPEGLLGVEQSDKTDQFLVTDSGRTVILYKVSDQKPLGSWSVKQGQIITCPAVCNFQTGEYVVVHDNKVLRIWNNEDVNLDKVFKATLSAEVYRILSVQGTEPLVLFKEGAVRGLEALLADPQQKIETVISDEEVIKWTKFFVVFRHPVLIFITEKHGNYFAYVQMFNSRILTKYTLLLGQDENSVIKSFTASVDRKFISLMSLSSDGCIYETLIPIRPADPEKNQSLVKSLLLKAVVSGNARNGVALTALDQDHVAVLGSPLAASKECLSVWNIKFQTLQTSKELPQGTSGQLWYYGEHLFMLHGKSLTVIPYKCEVSSLAGALGKLKHSQDPGTHVVSHFVNWETPQGCGLGFQNSEQSRRILRRRKIEVSLQPEVPPSKQLLSTIMKDSEKHIEVEVRKFLALKQTPDFHTVIGDTVTGLLERCKAEPSFYPRNCLMQLIQTHVLSYSLCPDLMEIALKKKDVQLLQLCLQQFPDIPESVTCACLKIFLSIGDDSLQETDVNMESVFDYSINSVHDEKMEEQTEILQNGFNPEEDKCNNCDQELNKKPQDETKESTSCPVVQKRAALLNAILHSAYSETFLLPHLKDIPAQHITLFLKYLYFLYLKSSLILLLAPISNPLANLVDPTFTIYLKLTTSFLTSTINGLFQGTII

SEQ ID NO: 811601 - protein, 119 aa, Homo sapiens
MEIALKKKDVQLLQLCLQQFPDIPESVTCACLKIFLSIGDDSLQETDVNMESVFDYSINSVHDEKMEEQTEILQNGFNPEEDKCNNCDQELNKKPQDETKESTSCPVVQKRAALLYPLT

SEQ ID NO: 811602 - protein, 197 aa, Homo sapiens
MESVFDYSINSVHDEKMEEQTEILQNGFNPEEDKCNNCDQELNKKPQDETKESTSCPVVQKRAALLNAILHSAYSETFLLPHLKDIPAQHITLFLKYLYFLYLKCSENATMTLPGIHPPTLNQIMDWICLLLDANFTVVVMMPEAKRLLINLYKLVKSQISVYSELNKIEVSFRELQKLNQEKNNRGLYSIEVLELF

SEQ ID NO: 811603 - protein, 200 aa, Homo sapiens
MAALEEEFTLSSVVLSAGPEGLLGVEQSDKTDQFLVTDSGRTVILYKVSDQKPLGSWSVKQGQIITCPAVCNFQTGEYVVVHDNKVLRIWNNEDVNLDKVFKATLSAEVYRILSVQGTEPLVLFKEGAVRGLEALLADPQQKIETVISDEEVIKWTKFFVVFRHPVLIFITEKHGNYFAYVQMFNSRILTKYTLLLVIKS

SEQ ID NO: 811604 - protein, 286 aa, Homo sapiens
MAALEEEFTLSSVVLSAGPEGLLGVEQSDKTDQFLVTDSGRTVILYKVSDQKPLGSWSVKQGQIITCPAVCNFQTGEYVVVHDNKVLRIWNNEDVNLDKVFKATLSAEVYRILSVQGTEPLVLFKEGAVRGLEALLADPQQKIETVISDEEVIKWTKFFVVFRHPVLIFITEKHGNYFAYVQMFNSRILTKYTLLLGQDENSVIKSFTASVDRKFISLMSLSSDGCIYETLIPIRPADPEKNQSLVKSLLLKAVVSGNARNGVALTALDQDHVAVLGSPLAASKGN

SEQ ID NO: 811605 - protein, 267 aa, Homo sapiens
MVSNSAGSNSRQLPLPLSADAPPASSSHWSWQPSRHTNQPIDRAILRSRPCCRLSRTCHWSLQPPHPPRRASGWAASLGRAAVPARARLASLVRAGSAGRARLRGAALEETEAAGGPEAQEEDEDEEEALPHSEAMDVFQEGLAMVVQDPLLCDLPIQVTLEEVNSQIALEYGQAMTVRVCKMDGEVMPVVVVQSATVLDLKKAIQRYVQLKQEREGGIQHISWSYVWRTYHLTSAGEKLTEDRKKLRDYGIRNRDEVSFIKKLRQK

SEQ ID NO: 811606 - protein, 207 aa, Homo sapiens
MVSNSAGSNSRQLPLPLSADAPPASSSHWSWQPSRHTNQPIDRAILRSRPCCRLSRTCHWSLQPPHPPRRASGWAASLGRAAVPARARLASLVRAGSAGRARLRGAALEETEAAGGPEAQEEDEDEEEALPHSEAMDVFQEGLAMVVQDPLLCDLPIQVTLEEVNSQIALEYGQAMTVRVCKMDGEVMPTWEAEVGVSFTPGRLRLQ

SEQ ID NO: 811607 - protein, 267 aa, Homo sapiens; identical to SEQ ID NO: 811605

SEQ ID NO: 811608 - protein, 267 aa, Homo sapiens; identical to SEQ ID NO: 811605

SEQ ID NO: 811609 - protein, 224 aa, Homo sapiens
MVSNSAGSNSRQLPLPLSADAPPASSSHWSWQPSRHTNQPIDRAILRSRPCCRLSRTCHWSLQPPHPPRRASGWAASLGRAAVPARARLASLVRAGSAGRARLRGAALEETEAAGGPEAQEEDEDEEEALPHSEAMDVFQEGLAMVVQDPLLCDLPIQVTLEEVNSQIALEYGQAMTVRVCKMDGEVMPVVVVQSATVLDLKKAIQRYVQLKQEREGGIQHISW

SEQ ID NO: 811610 - protein, 625 aa, Homo sapiens
RVSVSVAEMESRDPAQPMSPGEATQSGARPADRYGLLKHSREFLDFFWDIAKPEQETRLAATEKLLEYLRGRPKGSEMKYALKRLITGLGVGRETARPCYSLALAQLLQSFEDLPLCSILQQIQEKYDLHQVKKAMLRPALFANLFGVLALFQSGRLVKDQEALMKSVKLLQALAQYQNHLQEQPRKALVDILSEVSKATLQEILPEVLKADLNIILSSPEQLELFLLAQQKVPSKLKKLVGSVNLFSDENVPRLVNVLKMAASSVKKDRKLPAIALDLLRLALKEDKFPRFWKEVVEQGLLKMQFWPASYLCFHLLGAALPLLTKEQLHLVMQGDVIRHYGEHVCTAKLPKQFKFAPEMDDYVGTFLEGCQDDPERQLAVLVAFSSVTNQGLPVTPTFWRVVRFLSPPALQGYVAWLRAMFLQPDLDSLVDFSTNNQKKAQDSSLHMPERAVFRLRKWIIFRLVSIVDSLHLEMEEALTEQVARFCLFHSFFVTKKPTSQIPETKHPFSFPLENQAREAVSSAFFSLLQTLSTQFKQAPGQTQGGQPWTYHLVQFADLLLNHSHNVTTVTPFTAQQRQAWDRMLQTLKELEAHSAEARAAAFQHLLLLVGIHLLKVLGPGREGL

SEQ ID NO: 811611 - protein, 1336 aa, Homo sapiens
RVSVSVAEMESRDPAQPMSPGEATQSGARPADRYGLLKHSREFLDFFWDIAKPEQETRLAATEKLLEYLRGRPKGSEMKYALKRLITGLGVGRETARPCYSLALAQLLQSFEDLPLCSILQQIQEKYDLHQVKKAMLRPALFANLFGVLALFQSGRLVKDQEALMKSVKLLQALAQYQNHLQEQPRKALVDILSEVSKATLQEILPEVLKADLNIILSSPEQLELFLLAQQKVPSKLKKLVGSVNLFSDENVPRLVNVLKMAASSVKKDRKLPAIALDLLRLALKEDKFPRFWKEVVEQGLLKMQFWPASYLCFHLLGAALPLLTKEQLHLVMQGDVIRHYGEHVCTAKLPKQFKFAPEMDDYVGTFLEGCQDDPERQLAVLVAFSSVTNQGLPVTPTFWRVVRFLSPPALQGYVAWLRAMFLQPDLDSLVDFSTNNQKKAQDSSLHMPERAVFRLRKWIIFRLVSIVDSLHLEMEEALTEQVARFCLFHSFFVTKKPTSQIPETKHPFSFPLENQAREAVSSAFFSLLQTLSTQFKQAPGQTQGGQPWTYHLVQFADLLLNHSHNVTTVTPFTAQQRQAWDRMLQTLKELEAHSAEARAAAFQHLLLLVGIHLLKSPAESCDLLGDIQTCIRKSLGEKPRRSRTKTIDPQEPPWVEVLVEILLALLAQPSHLMRQVARSVFGHICSHLTPRALQLILDVLNPETSEDENDRVVVTDDSDERRLKGAEDKSEEGEDNRSSESEEESEGEESEEEERDGDVDQGFREQLMTVLQAGKALGGEDSENEEELGDEAMMALDQSLASLFAEQKLRIQARRDEKNKLQKEKALRRDFQIRVLDLVEVLVTKQPENALVLELLEPLLSIIRRSLRSSSSKQEQDLLHKTARIFTHHLCRARRYCHDLGERAGALHAQVERLVQQAGRQPDSPTALYHFNASLYLLRVLKGNTAEGCVHETQEKQKAGTDPSHMPTGPQAASCLDLNLVTRVYSTALSSFLTKRNSPLTVPMFLSLFSRHPVLCQSLLPILVQHITGPVRPRHQACLLLQKTLSMREVRSCFEDPEWKQLMGQVLAKVTENLRVLGEAQTKAQHQQALSSLELLNVLFRTCKHEKLTLDLTVLLGVLQGQQQSLQQGAHSTGSSRLHDLYWQAMKTLGVQRPKLEKKDAKEIPSATQSPISKKRKKKGFLPETKKRKKRKSEDGTPAEDGTPAATGGSQPPSMGRKKRNRTKAKVPAQANGTPTTKSPAPGAPTRSPSTPAKSPKLQKKNQKPSQVNGAPGSPTEPAGQKQHQKALPKKGVLGKSPLSALARKKARLSLVIRSPSLLQSGAKKKAQVRKAGKP

SEQ ID NO: 811612 - protein, 1336 aa, Homo sapiens; identical to SEQ ID NO: 811611

SEQ ID NO: 811613 - protein, 1340 aa, Homo sapiens
RVSVSVAEMESRDPAQPMSPGEATQSGARPADRYGLLKHSREFLDFFWDIAKPEQETRLAATEKLLEYLRGRPKGSEMKYALKRLITGLGVGRETARPCYSLALAQLLQSFEDLPLCSILQQIQEKYDLHQVKKAMLRPALFANLFGVLALFQSGRLVKDQEALMKSVKLLQALAQYQNHLQEQPRKALVDILSEVSKATLQEILPEVLKADLNIILSSPEQLELFLLAQQKVPSKLKKLVGSVNLFSDENVPRLVNVLKMAASSVKKDRKLPAIALDLLRLALKEDKFPRFWKEVVEQGLLKMQFWPASYLCFHLLGAALPLLTKEQLHLVMQGDVIRHYGEHVCTAKLPKQFKFAPEMDDYVGTFLEGCQDDPERQLAVLVAFSSVTNQGLPVTPTFWRVVRFLSPPALQGYVAWLRAMFLQPDLDSLVDFSTNNQKKAQDSSLHMPERAVFRLRKWIIFRLVSIVDSLHLEMEEALTEQVARFCLFHSFFVTKKPTSQIPETKHPFSFPLENQAREAVSSAFFSLLQTLSTQFKQAPGQTQGGQPWTYHLVQFADLLLNHSHNVTTVTPFTAQQRQAWDRMLQTLKELEAHSAEARAAAFQHLLLLVGIHLLKSPAESCDLLGDIQTCIRKSLGEKPRRSRTKTIDPQEPPWVEVLVEILLALLAQPSHLMRQVARSVFGHICSHLTPRALQLILDVLNPETSEDENDRVVVTDDSDERRLKGAEDKSEEGEDNRSSESEEESEGEESEEEERDGDVDQGFREQLMTVLQAGKALGGEDSENEEELGDEAMMALDQSLASLFAEQKLRIQARRDEKNKLQKEKALRRDFQIRVLDLVEVLVTKQPENALVLELLEPLLSIIRRSLRSSSSKQEQDLLHKTARIFTHHLCRARRYCHDLGERAGALHAQVERLVQQAGRQPDSPTALYHFNASLYLLRVLKGNTAEGCVHETQEKQKAGTDPSHMPTGPQAASCLDLNLVTRVYSTALSSFLTKRNSPLTVPMFLSLFSRHPVLCQSLLPILVQHITGPVRPRHQACLLLQKTLSMREVRSCFEDPEWKQLMGQVLAKVTENLRVLGEAQTKAQHQQALSSLELLNVLFRTCKHEKLTLDLTVLLGVLQGQQQSLQQGAHSTGSSRLHDLYWQAMKTLGVQRPKLEKKDAKEIPSATQSPISKKRKKKGFLPETKKRKKRKSEDGTPAEDGTPAATGGSQPPSMGRKKRNRTKAKVPAQANGTPTTKSPAPGAPTRSPSTPAKSPKLQKKNQKPSQVNGAPGSPTEPAGQKQHQKALPKKGVLGKSPLSALARKKARLSLVIRSPSLLQSGAKKKAQTLRFTISSSKK

SEQ ID NO: 811614 - protein, 1242 aa, Homo sapiens
RVSVSVAEMESRDPAQPMSPGEATQSGARPADRYGLLKHSREFLDFFWDIAKPEQETRLAATEKLLEYLRGRPKGSEMKYALKRLITGLGVGRETARPCYSLALAQLLQSFEDLPLCSILQQIQEKYDLHQVKKAMLRPALFANLFGVLALFQSGRLVKDQEALMKSVKLLQALAQYQNHLQEQPRKALVDILSEVSKATLQEILPEVLKADLNIILSSPEQLELFLLAQQKVPSKLKKLVGSVNLFSDENVPRLVNVLKMAASSVKKDRKLPAIALDLLRLALKEDKFPRFWKEVVEQGLLKMQFWPASYLCFHLLGAALPLLTKEQLHLVMQGDVIRHYGEHVCTAKLPKQFKFAPEMDDYVGTFLEGCQDDPERQLAVLVAFSSVTNQGLPVTPTFWRVVRFLSPPALQGYVAWLRAMFLQPDLDSLVDFSTNNQKKAQDSSLHMPERAVFRLRKWIIFRLVSIVDSLHLEMEEALTEQVARFCLFHSFFVTKKPTSQIPETKHPFSFPLENQAREAVSSAFFSLLQTLSTQFKQAPGQTQGGQPWTYHLVQFADLLLNHSHNVTTVTPFTAQQRQAWDRMLQTLKELEAHSAEARAAAFQHLLLLVGIHLLKSPAESCDLLGDIQTCIRKSLGEKPRRSRTKTIDPQEPPWVEVLVEILLALLAQPSHLMRQVARSVFGHICSHLTPRALQLILDVLNPETSEDENDRVVVTDDSDERRLKGAEDKSEEGEDNRSSESEEESEGEESEEEERDGDVDQGFREQLMTVLQAGKALGGEDSENEEELGDEAMMALDQSLASLFAEQKLRIQARRDEKNKLQKEKALRRDFQIRVLDLVEVLVTKQPENALVLELLEPLLSIIRRSLRSSSSKQEQDLLHKTARIFTHHLCRARRYCHDLGERAGALHAQVERLVQQAGRQPDSPTALYHFNASLYLLRVLKGNTAEGCVHETQEKQKAGTDPSHMPTGPQAASCLDLNLVTRVYSTALSSFLTKRNSPLTVPMFLSLFSRHPVLCQSLLPILVQHITGPVRPRHQACLLLQKTLSMREVRSCFEDPEWKQLMGQVLAKVTENLRVLGEAQTKAQHQQALSSLELLNVLFRTCKHEKLTLDLTVLLGVLQGQQQSLQQGAHSTGSSRLHDLYWQAMKTLGVQRPKLEKKDAKEIPSATQSPISKKRKKKGFLPETKKRKKRKSEDGTPAEDGTPAATGGSQPPSMGRKKRNRTKAKVPAQANGTPTTKSPR

SEQ ID NO: 811615 - protein, 1319 aa, Homo sapiens
RVSVSVAEMESRDPAQPMSPGEATQSGARPADRYGLLKHSREFLDFFWDIAKPEQETRLAATEKLLEYLRGRPKGSEMKYALKRLITGLGVGRETARPCYSLALAQLLQSFEDLPLCSILQQIQEKYDLHQVKKAMLRPALFANLFGVLALFQSGRLVKDQEALMKSVKLLQALAQYQNHLQEQPRKALVDILSEVSKATLQEILPEVLKADLNIILSSPEQLELFLLAQQKVPSKLKKLVGSVNLFSDENVPRLVNVLKMAASSVKKDRKLPAIALDLLRLALKEDKFPRFWKEVVEQGLLKMQFWPASYLCFHLLGAALPLLTKEQLHLVMQGDVIRHYGEHVCTAKLPKQFKFAPEMDDYVGTFLEGCQDDPERQLAVLVAFSSVTNQGLPVTPTFWRVVRFLSPPALQGYVAWLRAMFLQPDLDSLVDFSTNNQKKAQDSSLHMPERAVFRLRKWIIFRLVSIVDSLHLEMEEALTEQVARFCLFHSFFVTKKPTSQIPETKHPFSFPLENQAREAVSSAFFSLLQTLSTQFKQAPGQTQGGQPWTYHLVQFADLLLNHSHNVTTVTPFTAQQRQAWDRMLQTLKELEAHSAEARAAAFQHLLLLVGIHLLKSPAESCDLLGDIQTCIRKSLGEKPRRSRTKTIDPQEPPWVEVLVEILLALLAQPSHLMRQVARSVFGHICSHLTPRALQLILDVLNPETSEDENDRVVVTDDSDERRLKGAEDKSEEGEDNRSSESEEESEGEESEEEERDGDVDQGFREQLMTVLQAGKALGGEDSENEEELGDEAMMALDQSLASLFAEQKLRIQARRDEKNKLQKEKALRRDFQIRVLDLVEVLVTKQPENALVLELLEPLLSIIRRSLRSSSSKQEQDLLHKTARIFTHHLCRARRYCHDLGERAGALHAQVERLVQQAGRQPDSPTALYHFNASLYLLRVLKGNTAEGCVHETQEKQKAGTDPSHMPTGPQAASCLDLNLVTRVYSTALSSFLTKRNSPLTVPMFLSLFSRHPVLCQSLLPILVQHITGPVRPRHQACLLLQKTLSMREVRSCFEDPEWKQLMGQVLAKVTENLRVLGEAQTKAQHQQALSSLELLNVLFRTCKHEKLTLDLTVLLGVLQGQQQSLQQGAHSTGSSRLHDLYWQAMKTLGVQRPKLEKKDAKEIPSATQSPISKKRKKKGFLPETKKRKKRKSEDGTPAEDGTPAATGGSQPPSMGRKKRNRTKAKVPAQANGTPTTKSPAPGAPTRSPSTPAKSPKLQKKNQKPSGLGPWLQGHVQGSGVCLGWCRLMCWLQAGVTISRACHLFAPRLFCCEGATRG

SEQ ID NO: 811616 - protein, 185 aa, Homo sapiens
MARPRPVLQALLLPLQHTQSPISKKRKKKGFLPETKKRKKRKSEDGTPAEDGTPAATGGSQPPSMGRKKRNRTKAKVPAQANGTPTTKSPAPGAPTRSPSTPAKSPKLQKKNQKPSQVNGAPGSPTEPAGQKQHQKALPKKGVLGKSPLSALARKKARLSLVIRSPSLLQSGAKKKAQVRKAGKP

SEQ ID NO: 811617 - protein, 106 aa, Homo sapiens
MPAASVWVGAASPGASASALGQEALWIAASSSSRSPGYCPMDSGNGLLGPAPGKGSAQPRGRSGVLAWGVVAGREALQSWAGVHLPETLSLGAQVVYSCSQGLHPW

SEQ ID NO: 811618 - protein, 154 aa, Homo sapiens
SGTWVGSAWRSRVDRECSDQLIVLTTHRHHLCRARRYCHDLGERAGALHAQVERLVQQAGRQPDSPTALYHFNASLYLLRVLKGNTAEGCVHETQEKQKAGTDPSHMPTGPQVSRAWPRSSPRHFTAREWRPGLPQGPTLSLLMKVGQALLPSQ

SEQ ID NO: 811619 - protein, 112 aa, Homo sapiens
TWRMGDMCWVCGAVARWPGEFFSSTFSRASSLEMTCCSSCTTLRRLWFSTFRLVIRTTSSLWSPLGPLEAPGPEFPARDFWMFSLALAMSRRITLASFSWREAPATGPFICS

SEQ ID NO: 811620 - protein, 112 aa, Homo sapiens; identical to SEQ ID NO: 811619

SEQ ID NO: 811621 - protein, 351 aa, Homo sapiens [sequence omitted]

SEQ ID NO: 811622 - protein, 1528 aa, Homo sapiens
MSVAIRKRSWEEHVTHWMGQPFNSDDRNTACHHGLVADSLQASMEKDATLNVDRKEKCVSLPDCCHGSELRDFPGRPMGHLSKDVDENDSHEGEDQFLSLEASTETLVHVSDEDNNADLCLTDDKQVLNTQGQKTSGQHMIQGAGSLEKALPIIQSNQVSSNSWGIAGETELALVKESGERKVTDSISKSLELCNEISLSEIKDAPKVNAVDTLNVKDIAPEKQLLNSAVIAQQRRKPDPPKDENERSTCNVVHDEFLDIPCTNRGLPLLKTDFGSCLLQPPSCPNGMSAENGLEKSGFSQHQNKSPPKVKAEDGMQCLQLKETLATQEPTDNQVRLRKRKEIREDRDRARLDSMVLLIMKLDQLDQDIENALSTSSSPSGTPTNLRRHVPDLESGSESGADTISVNQTRVNLSSDTESTDLPSSTPVANSGTKPKTTAIQGISEKEKAEIEAKEACDWLRATGFPQYAQLYEDFLFPIDISLVKREHDFLDRDAIEALCRRLNTLNKCAVMKLEISPHRKRSDDSDEDEPCAISGKWTFQRDSKRWSRLEEFDVFSPKQDLVPGSPDDSHPKDGPSPGGTLMDLSERQEVSSVRSLSSTGSLPSHAPPSEDAATPRTNSVISVCSSSNLAGNDDSFGSLPSPKELSSFSFSMKGHEKTAKSKTRSLLKRMESLKLKSSHHSKHKAPSKLGLIISGPILQEGMDEEKLKQLNCVEISALNGNRINVPMVRKRSVSNSTQTSSSSSQSETSSAVSTPSPVTRTRSLSACNKRVGMYLEGFDPFNQSTFNNVVEQNFKNRESYPEDTVFYIPEDHKPGTFPKALTNGSFSPSGNNGSVNWRTGSFHGPGHISLRRENSSDSPKELKRRNSSSSMSSRLSIYDNVPGSILYSSSGDLADLENEDIFPELDDILYHVKGMQRIVNQWSEKFSDEGDSDSALDSVSPCPSSPKQIHLDVDNDRTTPSDLDSTGNSLNEPEEPSEIPERRDSGVGASLTRSNRHRLRWHSFQSSHRPSLNSVSLQINCQSVAQMNLLQKYSLLKLTALLEKYTPSNKHGFSWAVPKFMKRIKVPDYKDRSVFGVPLTVNVQRTGQPLPQSIQQAMRYLRNHCLDQVGLFRKSGVKSRIQALRQMNEGAIDCVNYEGQSAYDVADMLKQYFRDLPEPLMTNKLSETFLQIYQYVPKDQRLQAIKAAIMLLPDENREVLQTLLYFLSDVTAAVKENQMTPTNLAVCLAPSLFHLNTLKRENSSPRVMQRKQSLGKPDQKDLNENLAATQGLAHMIAECKKLFQVPEEMSRCRNSYTEQELKPLTLEALGHLGNDDSADYQHFLQDCVDGLFKEVKEKFKGWVSYSTSEQAELSYKKVSEGPPLRLWRSVIEVPAVPEEILKRLLKEQHLWDVDLLDSKVIEILDSQTEIYQYVQNSMAPHPARDYVVLRTWRTNLPKGACALLLTSVDHDRAPVVGVRVNVLLSRYLIEPCGPGKSKLTYMCRVDLRGHMPEWYTKSFGHLCAAEVVKIRDSFSNQNTETKDTKSR

SEQ ID NO: 811623 - protein, 499 aa, Homo sapiens
MSVAIRKRSWEEHVTHWMGQPFNSDDRNTACHHGLVADSLQASMEKDATLNVDRKEKCVSLPDCCHGSELRDFPGRPMGHLSKDVDENDSHEGEDQFLSLEASTETLVHVSDEDNNADLCLTDDKQVLNTQGQKTSGQHMIQGAGSLEKALPIIQSNQVSSNSWGIAGETELALVKESGERKVTDSISKSLELCNEISLSEIKDAPKVNAVDTLNVKDIAPEKQLLNSAVIAQQRRKPDPPKDENERSTCNVVHDEFLDIPCTNRGLPLLKTDFGSCLLQPPSCPNGMSAENGLEKSGFSQHQNKSPPKVKAEDGMQCLQLKETLATQEPTDNQVRLRKRKEIREDRDRARLDSMVLLIMKLDQLDQDIENALSTSSSPSGTPTNLRRHVPDLESGSESGADTISVNQTRVNLSSDTESTDLPSSTPVANSGTKPKTTAIQGISEKEKAAAVKSVKLEVDEDKSTKGSNFSNSEVAIGLSPYTFPQKRLFHVAGEENIT

SEQ ID NO: 811624 - protein, 1083 aa, Homo sapiens [sequence omitted]

SEQ ID NO: 811625 - protein, 1083 aa, Homo sapiens [sequence omitted]

SEQ ID NO: 811626 - protein, 1125 aa, Homo sapiens
MGDPKAHVMARPLRAPLRRSFSDHIRDSTARALDVIWKNTRDRRLAEIEAKEACDWLRATGFPQYAQLYEDFLFPIDISLVKREHDFLDRDAIEALCRRLNTLNKCAVMKLEISPHRKRSDDSDEDEPCAISGKWTFQRDSKRWSRLEEFDVFSPKQDLVPGSPDDSHPKDGPSPGGTLMDLSERQEVSSVRSLSSTGSLPSHAPPSEDAATPRTNSVISVCSSSNLAGNDDSFGSLPSPKELSSFSFSMKGHEKTAKSKTRSLLKRMESLKLKSSHHSKHKAPSKLGLIISGPILQEGMDEEKLKQLNCVEISALNGNRINVPMVRKRSVSNSTQTSSSSSQSETSSAVSTPSPVTRTRSLSACNKRVGMYLEGFDPFNQSTFNNVVEQNFKNRESYPEDTVFYIPEDHKPGTFPKALTNGSFSPSGNNGSVNWRTGSFHGPGHISLRRENSSDSPKELKRRNSSSSMSSRLSIYDNVPGSILYSSSGDLADLENEDIFPELDDILYHVKGMQRIVNQWSEKFSDEGDSDSALDSVSPCPSSPKQIHLDVDNDRTTPSDLDSTGNSLNEPEEPSEIPERRDSGVGASLTRSNRHRLRWHSFQSSHRPSLNSVSLQINCQSVAQMNLLQKYSLLKLTALLEKYTPSNKHGFSWAVPKFMKRIKVPDYKDRSVFGVPLTVNVQRTGQPLPQSIQQAMRYLRNHCLDQVGLFRKSGVKSRIQALRQMNEGAIDCVNYEGQSAYDVADMLKQYFRDLPEPLMTNKLSETFLQIYQYVPKDQRLQAIKAAIMLLPDENREVLQTLLYFLSDVTAAVKENQMTPTNLAVCLAPSLFHLNTLKRENSSPRVMQRKQSLGKPDQKDLNENLAATQGLAHMIAECKKLFQVPEEMSRCRNSYTEQELKPLTLEALGHLGNDDSADYQHFLQDCVDGLFKEVKEKFKGWVSYSTSEQAELSYKKVSEGPPLRLWRSVIEVPAVPEEILKRLLKEQHLWDVDLLDSKVIEILDSQTEIYQYVQNSMAPHPARDYVVLRTWRTNLPKGACALLLTSVDHDRAPVVGVRVNVLLSRYLIEPCGPGKSKLTYMCRVDLRGHMPEWYTKSFGHLCAAEVVKIRDSFSNQNTETKDTKSR

SEQ ID NO: 811627 - protein, 1083 aa, Homo sapiens [sequence omitted]

SEQ ID NO: 811628 - protein, 1083 aa, Homo sapiens [sequence omitted]

SEQ ID NO: 811629 - protein, 551 aa, Homo sapiens
MFSGSSAADFILTSGHSLLSSGVGSHCVRLSLLFSHHVLSAPFDPKCFRSHQELRSDSYPFFKTKGTLFFTLYQMHLIRAVPKFMKRIKVPDYKDRSVFGVPLTVNVQRTGQPLPQSIQQAMRYLRNHCLDQVGLFRKSGVKSRIQALRQMNEGAIDCVNYEGQSAYDVADMLKQYFRDLPEPLMTNKLSETFLQIYQYVPKDQRLQAIKAAIMLLPDENREVLQTLLYFLSDVTAAVKENQMTPTNLAVCLAPSLFHLNTLKRENSSPRVMQRKQSLGKPDQKDLNENLAATQGLAHMIAECKKLFQVPEEMSRCRNSYTEQELKPLTLEALGHLGNDDSADYQHFLQDCVDGLFKEVKEKFKGWVSYSTSEQAELSYKKVSEGPPLRLWRSVIEVPAVPEEILKRLLKEQHLWDVDLLDSKVIEILDSQTEIYQYVQNSMAPHPARDYVVLRTWRTNLPKGACALLLTSVDHDRAPVVGVRVNVLLSRYLIEPCGPGKSKLTYMCRVDLRGHMPEWYTKSFGHLCAAEVVKIRDSFSNQNTETKDTKSR

SEQ ID NO: 811630 - protein, 1174 aa, Homo sapiens
MVLLIMKLDQLDQDIENALSTSSSPSGTPTNLRRHVPDLESGSESGADTISVNQTRVNLSSDTESTDLPSSTPVANSGTKPKTTAIQGISEKEKAEIEAKEACDWLRATGFPQYAQLYEDFLFPIDISLVKREHDFLDRDAIEALCRRLNTLNKCAVMKLEISPHRKRSDDSDEDEPCAISGKWTFQRDSKRWSRLEEFDVFSPKQDLVPGSPDDSHPKDGPSPGGTLMDLSERQEVSSVRSLSSTGSLPSHAPPSEDAATPRTNSVISVCSSSNLAGNDDSFGSLPSPKELSSFSFSMKGHEKTAKSKTRSLLKRMESLKLKSSHHSKHKAPSKLGLIISGPILQEGMDEEKLKQLNCVEISALNGNRINVPMVRKRSVSNSTQTSSSSSQSETSSAVSTPSPVTRTRSLSACNKRVGMYLEGFDPFNQSTFNNVVEQNFKNRESYPEDTVFYIPEDHKPGTFPKALTNGSFSPSGNNGSVNWRTGSFHGPGHISLRRENSSDSPKELKRRNSSSSMSSRLSIYDNVPGSILYSSSGDLADLENEDIFPELDDILYHVKGMQRIVNQWSEKFSDEGDSDSALDSVSPCPSSPKQIHLDVDNDRTTPSDLDSTGNSLNEPEEPSEIPERRDSGVGASLTRSNRHRLRWHSFQSSHRPSLNSVSLQINCQSVAQMNLLQKYSLLKLTALLEKYTPSNKHGFSWAVPKFMKRIKVPDYKDRSVFGVPLTVNVQRTGQPLPQSIQQAMRYLRNHCLDQVGLFRKSGVKSRIQALRQMNEGAIDCVNYEGQSAYDVADMLKQYFRDLPEPLMTNKLSETFLQIYQYVPKDQRLQAIKAAIMLLPDENREVLQTLLYFLSDVTAAVKENQMTPTNLAVCLAPSLFHLNTLKRENSSPRVMQRKQSLGKPDQKDLNENLAATQGLAHMIAECKKLFQVPEEMSRCRNSYTEQELKPLTLEALGHLGNDDSADYQHFLQDCVDGLFKEVKEKFKGWVSYSTSEQAELSYKKVSEGPPLRLWRSVIEVPAVPEEILKRLLKEQHLWDVDLLDSKVIEILDSQTEIYQYVQNSMAPHPARDYVVLRTWRTNLPKGACALLLTSVDHDRAPVVGVRVNVLLSRYLIEPCGPGKSKLTYMCRVDLRGHMPEWYTKSFGHLCAAEVVKIRDSFSNQNTETKDTKSR

SEQ ID NO: 811631 - protein, 1083 aa, Homo sapiens [sequence omitted]

SEQ ID NO: 811632 - protein, 182 aa, Homo sapiens
IALALKNTSSFQVSEGPPLRLWRSVIEVPAVPEEILKRLLKEQHLWDVDLLDSKVIEILDSQTEIYQYVQNSMAPHPARDYVVLRTWRTNLPKGACALLLTSVDHDRAPVVGVRVNVLLSRYLIEPCGPGKSKLTYMCRVDLRGHMPEWYTKSFGHLCAAEVVKIRDSFSNQNTETKDTKSR

SEQ ID NO: 811633 - protein, 369 aa, Homo sapiens
YNRVARARASLPAQSPARSMAATSLMSALAARLLQPAHSCSLRLRPFHLAAVRNEAVVISGRKLAQQIKQEVRQEVEEWVASGNKRPHLSVILVGENPASHSYVLNKTRAAAVVGINSETIMKPASISEEELLNLINKLNNDDNVDGLLVQLPLPEHIDERRICNAVSPDKDVDGFHVINVGRMCLDQYSMLPATPWGVWEIIKRTGIPTLGKNVVVAGRSKNVGMPIAMLLHTDGAHERPGGDATVTISHRYTPKEQLKKHTILADIVISAAGIPNLITADMIKEGAAVIDVGINRVHDPVTAKPKLVGDVDFEGVRQKAGYITPVPGGVGPMTVAMLMKNTIIAAKKVLRLEEREVLKSKELGVATN

SEQ ID NO: 811634 - protein, 248 aa, Homo sapiens
MKPASISEEELLNLINKLNNDDNVDGLLVQLPLPEHIDERRICNAVSPDKDVDGFHVINVGRMCLDQYSMLPATPWGVWEIIKRTGIPTLGKNVVVAGRSKNVGMPIAMLLHTDGAHERPGGDATVTISHRYTPKEQLKKHTILADIVISAAGIPNLITADMIKEGAAVIDVGINRVHDPVTAKPKLVGDVDFEGVRQKAGYITPVPGGVGPMTVAMLMKNTIIAAKKVLRLEEREVLKSKELGVATN

SEQ ID NO: 811635 - protein, 228 aa, Homo sapiens
YNRVARARASLPAQSPARSMAATSLMSALAARLLQPAHSCSLRLRPFHLAAVRNEAVVISGRKLAQQIKQEVRQEVEEWVASGNKRPHLSVILVGENPASHSYVLNKTRAAAVVGINSETIMKPASISEEELLNLINKLNNDDNVDGLLVQLPLPEHIDERRICNAVSPDKDVDGFHVINVGRMCLDQYSMLPATPWGVWEIIKRTASRLAFQPKEWGLGWVTVGCPC

SEQ ID NO: 811636 - protein, 361 aa, Homo sapiens
MVIGRGSPARSMAATSLMSALAARLLQPAHSCSLRLRPFHLAAVRNEAVVISGRKLAQQIKQEVRQEVEEWVASGNKRPHLSVILVGENPASHSYVLNKTRAAAVVGINSETIMKPASISEEELLNLINKLNNDDNVDGLLVQLPLPEHIDERRICNAVSPDKDVDGFHVINVGRMCLDQYSMLPATPWGVWEIIKRTGIPTLGKNVVVAGRSKNVGMPIAMLLHTDGAHERPGGDATVTISHRYTPKEQLKKHTILADIVISAAGIPNLITADMIKEGAAVIDVGINRVHDPVTAKPKLVGDVDFEGVRQKAGYITPVPGGVGPMTVAMLMKNTIIAAKKVLRLEEREVLKSKELGVATN

SEQ ID NO: 811637 - protein, 369 aa, Homo sapiens; identical to SEQ ID NO: 811633

SEQ ID NO: 811638 - protein, 369 aa, Homo sapiens; identical to SEQ ID NO: 811633

SEQ ID NO: 811639 - protein, 369 aa, Homo sapiens; identical to SEQ ID NO: 811633

SEQ ID NO: 811640 - protein, 248 aa, Homo sapiens; identical to SEQ ID NO: 811634

SEQ ID NO: 811641 - protein, 248 aa, Homo sapiens; identical to SEQ ID NO: 811634

SEQ ID NO: 811642 - protein, 239 aa, Homo sapiens
YNRVARARASLPAQSPARSMAATSLMSALAARLLQPAHSCSLRLRPFHLAAVRNEAVVISGRKLAQQIKQEVRQEVEEWVASGNKRPHLSVILVGENPASHSYVLNKTRAAAVVGINSETIMKPASISEEELLNLINKLNNDDNVDGLLVQLPLPEHIDERRICNAVSPDKDVDGFHVINVGRMCLDQYSMLPATPWGVWEIIKRTGIPTLGKNVVVAGRSKNVMPLLQYLIDILPKSS

SEQ ID NO: 811643 - protein, 197 aa, Homo sapiens
MRGSTHASVGRMCLDQYSMLPATPWGVWEIIKRTGIPTLGKNVVVAGRSKNVGMPIAMLLHTDGAHERPGGDATVTISHRYTPKEQLKKHTILADIVISAAGIPNLITADMIKEGAAVIDVGINRVHDPVTAKPKLVGDVDFEGVRQKAGYITPVPGGVGPMTVAMLMKNTIIAAKKVLRLEEREVLKSKELGVATN

SEQ ID NO: 811644 - protein, 140 aa, Homo sapiens [sequence omitted]

SEQ ID NO: 811645 - protein, 109 aa, Homo sapiens
EGAAVIDVGISAAGIPNLITADMIKEGAAVIDVGINRVHDPVTAKPKLVGDVDFEGVRQKAGYITPVPGGVGPMTVAMLMKNTIIAAKKVLRLEEREVLKSKELGVATN

SEQ ID NO: 811646 - protein, 400 aa, Homo sapiens
YNRVARARASLPAQSPARSMAATSLMSALAARLLQPAHSCSLRLRPFHLAAVRNEAVVISGRKLAQQIKQEVRQEVEEWVASGNKRPHLSVILVGENPASHSYVLNKTRAAAVVGINSETIMKPASISEEELLNLINKLNNDDNVDGLLVQLPLPEHIDERRICNAVSPDKDVDGFHVINVGRMCLDQYSMLPATPWGVWEIIKRTGIPTLGKNVVVAGRSKNVGMPIAMLLHTDGAHERPGGDATVTISHRYTPKEQLKKHTILADIVISAAGIPNLITADMIKEGAAVIDVGINRVHDPVTAKPKLVGDVDFEGVRQKAGYITPVPGGVGPMTVAMLMKNTIIAAARAQLLPSPSPFPPRGSSNEAVVISGRKLAQQIKQEVRQEVEEWVPQATNGHT

SEQ ID NO: 811647 - protein, 361 aa, Homo sapiens
YNRVARARASLPAQSPARSMAATSLMSALAARLLQPAHSCSLRLRPFHLAAVRNEAVVISGRKLAQQIKQEVRQEVEEWVASGNKRPHLSVILVGENPASHSYVLNKTRAAAVVGINSETIMKPASISEEELLNLINKLNNDDNVDGLLVQLPLPEHIDERRICNAVSPDKDVDGFHVINVGRMCLDQYSMLPATPWGVWEIIKRTGIPTLGKNVVVAGRSKNVGMPIAMLLHTDGAHERPGGDATVTISHRYTPKEQLKKHTILADIVISAAGIPNLITADMIKEGAAVIDVGINRVHDPVTAKPKLVGDVDFEDGSLTLLPRLECSGAISAHCNLCLLGSSYSSASASRVAGTPKVLGL

SEQ ID NO: 811648 - protein, 218 aa, Homo sapiens
YNRVARARASLPAQSPARSMAATSLMSALAARLLQPAHSCSLRLRPFHLAAVRNEAVVISGRKLAQQIKQEVRQEVEEWVASGNKRPHLSVILVGENPASHSYVLNKTRAAAVVGINSETIMKPASISEEELLNLINKLNNDDNVDGLLVQLPLPEHIDERRICNAVSPDKDVDGFHVINVGRMCLDQYSMLPATPWGVWEIIKRTDSTLGRVSVVYR

SEQ ID NO: 811649 - protein, 121 aa, Homo sapiens
YNRVARARASLPAQSPARSMAATSLMSALAARLLQPAHSCSLRLRPFHLAAVRNEAVVISGRKLAQQIKQEVRQEVEEWVASGNKRPHLSVILVGENPASHSYVLNKTRAAAVVGNPSRGG

SEQ ID NO: 811650 - protein, 166 aa, Homo sapiens
PSQEKLKDFPVCVSTKPEPEDDAEEGLGGLPSNISSVSSLLLFNTTENLYKKYVFLDPLAGAVTKTHVMLGAETEEKLFDAPLSISKREQLEQQVPENYFYVPDLGQVPEIDVPSYLPDLPGIANDLMYIADLGPGIAPSAPGTIPELPTFHTEVAEPLKTYKMGY

SEQ ID NO: 811651 - protein, 128 aa, Homo sapiens
PPQVSPRKQYAMFKIELGTVGDTDGTKTHVMLGAETEEKLFDAPLSISKREQLEQQVPENYFYVPDLGQVPEIDVPSYLPDLPGIANDLMYIADLGPGIAPSAPGTIPELPTFHTEVAEPLKTYKMGY

SEQ ID NO: 811652 - protein, 166 aa, Homo sapiens; identical to SEQ ID NO: 811650

SEQ ID NO: 811653 - protein, 187 aa, Homo sapiens
PSQEKLKDFPVCVSTKPEPEDDAEEGLGGLPSNISSVSSLLLFNTTENLYKKYVFLDPLAGAVTKTHVMLGAETEEKLFDAPLSISKREQLEQQVPENYFYVPDLGQVPEIDVPSYLPDLPGIANDLMYIADLGPGIAPSAPGTIPELPTFHTEVAEPLKTPHTLCFRPTRWGTNTTPTAPTTTPSS

SEQ ID NO: 811654 - protein, 121 aa, Homo sapiens
ALPGEAEGLSCVREHQAGARGRCRRGTWGSSQQHQLCQLLAALQHHREPVPENYFYVPDLGQVPEIDVPSYLPDLPGIANDLMYIADLGPGIAPSAPGTIPELPTFHTEVAEPLKTYKMGY

SEQ ID NO: 811655 - protein, 110 aa, Homo sapiens
MSSSFLCCYSTHGRCTQGLVGCPCRSLSPLTCPCLILQVPENYFYVPDLGQVPEIDVPSYLPDLPGIANDLMYIADLGPGIAPSAPGTIPELPTFHTEVAEPLKTYKMGY

SEQ ID NO: 811656 - protein, 166 aa, Homo sapiens; identical to SEQ ID NO: 811650

SEQ ID NO: 811657 - protein, 166 aa, Homo sapiens; identical to SEQ ID NO: 811650

SEQ ID NO: 811658 - protein, 166 aa, Homo sapiens; identical to SEQ ID NO: 811650

SEQ ID NO: 811659 - protein, 166 aa, Homo sapiens; identical to SEQ ID NO: 811650

SEQ ID NO: 811660 - protein, 166 aa, Homo sapiens; identical to SEQ ID NO: 811650

SEQ ID NO: 811661 - protein, 166 aa, Homo sapiens; identical to SEQ ID NO: 811650

SEQ ID NO: 811662 - protein, 166 aa, Homo sapiens; identical to SEQ ID NO: 811650

SEQ ID NO: 811663 - protein, 161 aa, Homo sapiens
PSQEKLKDFPVCVSTKPEPEDDAEEGLGGLPSNISSVSSLLLFNTTENLYKKYVFLDPLAGAVTKTHVMLGAETEEKLFDAPLSISKREQLEQQVPENYFYVPDLGQVPEIDVPSYLPDLPGIANDLMYIADLGPGIAPSAPGTIPELPTFHTEVAEPLKT

SEQ ID NO: 811664 - protein, 110 aa, Homo sapiens
AATGRGGRGRLGIVGGSMTPSPPDPDLGHCSDMDTARTSCSDLLPWVGVTEPALCGDQLQGAEGWPEATQLGRGLLSACAPWGDGSTQPAPLCSSLKRLPEKMAHQSIKN

SEQ ID NO: 811665 - protein, 477 aa, Homo sapiens
SPTHPGPGMASPRELTQNPLKKIWMPYSNGRPALHACQRGVCMTNCPTLIVMVGLPARGKTYISKKLTRYLNWIGVPTREFNVGQYRRDVVKTYKSFEFFLPDNEEGLKIRKQCALAALRDVRRFLSEEGGHVAVFDATNTTRERRATIFNFGEQNGYKTFFVESICVDPEVIAANIVQVKLGSPDYVNRDSDEATEDFMRRIECYENSYESLDEDLDRDLSYIKIMDVGQSYVVNRVADHIQSRIVYYLMNIHVTPRSIYLCRHGESELNLKGRIGGDPGLSPRGREFAKSLAQFISDQNIKDLKVWTSQMKRTIQTAEALGVPYEQWKVLNEIDAGVCEEMTYEEIQDNYPLEFALRDQDKYRYRYPKGESYEDLVQRLEPVIMELERQENVLVICHQAVMRCLLAYFLDKAAEQLPYLKCPLHTVLKLTPVAYGCKVESIFLNVAAVNTHRDRPQNVDISRPPEEALVTVPAHQ

SEQ ID NO: 811666 - protein, 477 aa, Homo sapiens; identical to SEQ ID NO: 811665

SEQ ID NO: 811667 - protein, 458 aa, Homo sapiens
MDRGSLGGSSLTDLGPGSSRRVCMTNCPTLIVMVGLPARGKTYISKKLTRYLNWIGVPTREFNVGQYRRDVVKTYKSFEFFLPDNEEGLKIRKQCALAALRDVRRFLSEEGGHVAVFDATNTTRERRATIFNFGEQNGYKTFFVESICVDPEVIAANIVQVKLGSPDYVNRDSDEATEDFMRRIECYENSYESLDEDLDRDLSYIKIMDVGQSYVVNRVADHIQSRIVYYLMNIHVTPRSIYLCRHGESELNLKGRIGGDPGLSPRGREFAKSLAQFISDQNIKDLKVWTSQMKRTIQTAEALGVPYEQWKVLNEIDAGVCEEMTYEEIQDNYPLEFALRDQDKYRYRYPKGESYEDLVQRLEPVIMELERQENVLVICHQAVMRCLLAYFLDKAAEQLPYLKCPLHTVLKLTPVAYGCKVESIFLNVAAVNTHRDRPQNVDISRPPEEALVTVPAHQ

SEQ ID NO: 811668 - protein, 472 aa, Homo sapiens
MRARDSTGHPLMLREQTLGQHLHGEDTGEWEHTCEVCMTNCPTLIVMVGLPARGKTYISKKLTRYLNWIGVPTREFNVGQYRRDVVKTYKSFEFFLPDNEEGLKIRKQCALAALRDVRRFLSEEGGHVAVFDATNTTRERRATIFNFGEQNGYKTFFVESICVDPEVIAANIVQVKLGSPDYVNRDSDEATEDFMRRIECYENSYESLDEDLDRDLSYIKIMDVGQSYVVNRVADHIQSRIVYYLMNIHVTPRSIYLCRHGESELNLKGRIGGDPGLSPRGREFAKSLAQFISDQNIKDLKVWTSQMKRTIQTAEALGVPYEQWKVLNEIDAGVCEEMTYEEIQDNYPLEFALRDQDKYRYRYPKGESYEDLVQRLEPVIMELERQENVLVICHQAVMRCLLAYFLDKAAEQLPYLKCPLHTVLKLTPVAYGCKVESIFLNVAAVNTHRDRPQNVDISRPPEEALVTVPAHQ

SEQ ID NO: 811669 - protein, 121 aa, Homo sapiens
MYEPVESDEAVRYLKESYEDLVQRLEPVIMELERQENVLVICHQAVMRCLLAYFLDKAAEQLPYLKCPLHTVLKLTPVAYGCKVESIFLNVAAVNTHRDRPQNVDISRPPEEALVTVPAHQ

SEQ ID NO: 811670 - protein, 93 aa, Homo sapiens
MDRGSLGGSSLTDLGPGSSRRVCMTNCPTLIVMVGLPARGKTYISKKLTRYLNWIGVPTREFNVGQYRRDVVKTYKSFEFFLPDNEEGLKIRK

SEQ ID NO: 811671 - protein, 387 aa, Homo sapiens
RVYPLNAGTLQPGPMGRAGLEAPPPPCGVTGTPGARGLQGRVGPRPQSLAFRGCPPRASSLPGSPRCRRRCHTMAFVTRQFMRSVSSSSTASASAKKIIVKHVTVIGGGLMGAGIAQVAAATGHTVVLVDQTEDILAKSKKGIEESLRKVAKKKFAENPKAGDEFVEKTLSTIATSTDAASVVHSTDLVVEAIVENLKVKNELFKRLDKFAAEHTIFASNTSSLQITSIANATTRQDRFAGLHFFNPVPVMKLVEVIKTPMTSQKTFESLVDFSKALGKHPVSCKDTPGFIVNRLLVPYLMEAIRLYERGDASKEDIDTAMKLGAGYPMGPFELLDYVGLDTTKFIVDGWHEMDAENPLHQPSPSLNKLVAENKFGKKTGEGFYKYK

SEQ ID NO: 811672 - protein, 387 aa, Homo sapiens; identical to SEQ ID NO: 811671

SEQ ID NO: 811673 - protein, 387 aa, Homo sapiens; identical to SEQ ID NO: 811671

SEQ ID NO: 811674 - protein, 387 aa, Homo sapiens; identical to SEQ ID NO: 811671

SEQ ID NO: 811675 - protein, 404 aa, Homo sapiens
RVYPLNAGTLQPGPMGRAGLEAPPPPCGVTGTPGARGLQGRVGPRPQSLAFRGCPPRASSLPGSPRCRRRCHTMAFVTRQFMRSVSSSSTASASAKKIIVKHVTVIGGGLMGAGIAQVAAATGHTVVLVDQTEDILAKSKKGIEESLRKVAKKKFAENPKAGDEFVEKTLSTIATSTDAASVVHSTDLVVEAIVENLKVKNELFKRLDKFAAEHTIFASNTSSLQITSIANATTRQDRFAGLHFFNPVPVMKLVEVIKTPMTSQKTFESLVDFSKALGKHPVSCKDTPGFIVNRLLVPYLMEAIRLYERDFQTCGDSNSGLGFSLKGDASKEDIDTAMKLGAGYPMGPFELLDYVGLDTTKFIVDGWHEMDAENPLHQPSPSLNKLVAENKFGKKTGEGFYKYK

SEQ ID NO: 811676 - protein, 472 aa, Homo sapiens
RVYPLNAGTLQPGPMGRAGLEAPPPPCGVTGTPGARGLQGRVGPRPQSLAFRGCPPRASSLPGSPRCRRRCHTMAFVTRQFMRSVSSSSTASASAKKIIVKHVTVIGGGLMGAGIAQERGVASAAMRDNSFKKGMKREVRWKRDFEGQKKQLKNMCRTALGVTTLQDLGVCWRKEHDPAEMLRVGRAELGGWKPSWEAIVKEVAAATGHTVVLVDQTEDILAKSKKGIEESLRKVAKKKFAENPKAGDEFVEKTLSTIATSTDAASVVHSTDLVVEAIVENLKVKNELFKRLDKFAAEHTIFASNTSSLQITSIANATTRQDRFAGLHFFNPVPVMKLVEVIKTPMTSQKTFESLVDFSKALGKHPVSCKDTPGFIVNRLLVPYLMEAIRLYERGDASKEDIDTAMKLGAGYPMGPFELLDYVGLDTTKFIVDGWHEMDAENPLHQPSPSLNKLVAENKFGKKTGEGFYKYK

SEQ ID NO: 811677 - protein, 387 aa, Homo sapiens; identical to SEQ ID NO: 811671

SEQ ID NO: 811678 - protein, 256 aa, Homo sapiens
RVYPLNAGTLQPGPMGRAGLEAPPPPCGVTGTPGARGLQGRVGPRPQSLAFRGCPPRASSLPGSPRCRRRCHTMAFVTRQFMRSVSSSSTASASAKKIIVKHVTVIGGGLMGAGIAQVAAATGHTVVLVDQTEDILAKSKKGIEESLRKVAKKKFAENPKAGDEFVEKTLSTIATSTDAASVVHSTDLVVEAIVENLKVKNELFKRLDKFAAEHTIFASNTSSLQITSIANATTRQDRFAGLHFFNPVPVMKLVEP

SEQ ID NO: 811679 - protein, 352 aa, Homo sapiens
RVYPLNAGTLQPGPMGRAGLEAPPPPCGVTGTPGARGLQGRVGPRPQSLAFRGCPPRASSLPGSPRCRRRCHTMAFVTRQFMRSVSSSSTASASAKKIIVKHVTVIGGGLMGAGIAQVAAATGHTVVLVDQTEDILAKSKKGIEESLRKVAKKKFAENPKAGDEFVEKTLSTIATSTDAASVVHSTDLVVEAIVENLKVKNELFKRLDKFAAEHTIFASNTSSLQITSIANATTRQDRFAGLHFFNPVPVMKLVEVIKTPMTSQKTFESLVDFSKALGKHPVSCKDTPGFIVNRLLVPYLMEAIRLYERGILLTQARSSRPQLLAPLSGILSVSRRGRAVHNGGSSVCFLAL

SEQ ID NO: 811680 - protein, 382 aa, Homo sapiens
RVYPLNAGTLQPGPMGRAGLEAPPPPCGVTGTPGARGLQGRVGPRPQSLAFRGCPPRASSLPGSPRCRRRCHTMAFVTRQFMRSVSSSSTASASAKKIIVKHVTVIGGGLMGAGIAQVAAATGHTVVLVDQTEDILAKSKKGIEESLRKVAKKKFAENPKAGDEFVEKTLSTIATSTDAASVVHSTDLVVEAIVENLKVKNELFKRLDKFAAEHTIFASNTSSLQITSIANATTRQDRFAGLHFFNPVPVMKLVEVIKTPMTSQKTFESLVDFSKALGKHPVSCKDTPGFIVNRLLVPYLMEAIRLYERGLQEEIVLFELEPVPQGPIEVLNILAGNHTHSGGEKEWNHICRPYNVGKWDRRVNNGFGEKGQHAGASPIEKD

SEQ ID NO: 811681 - protein, 404 aa, Homo sapiens; identical to SEQ ID NO: 811675

SEQ ID NO: 811682 - protein, 152 aa, Homo sapiens
RLCRAPARPPRRRRLLFPAGARGALKQGPRQPAPERVLRSKDGWGFLCVFSGRGWDGVVAAPRGNRGGLREDGTSALELSSPDLLFRSTLAEEVGTDMVFVGQRCEQWSHQKGLLPASSPTTDIPGPTRPPGQVLSPASQIWGPFTCLYYCK

SEQ ID NO: 811683 - protein, 152 aa, Homo sapiens; identical to SEQ ID NO: 811682

SEQ ID NO: 811684 - protein, 124 aa, Homo sapiens
RLCRAPARPPRRRRLLFPAGARGALKQGPRQPAPERVLRSKDGWGFLCVFSGRGWDGVVAAPREEVGTDMVFVGQRCEQWSHQKGLLPASSPTTDIPGPTRPPGQVLSPASQIWGPFTCLYYCK

SEQ ID NO: 811685 - protein, 147 aa, Homo sapiens
RLCRAPARPPRRRRLLFPAGARGALKQGPRQPAPERVLRSKDGWGFLCVFSGRGWDGVVAAPRGNRGGLREDGTSALELSSPDLLFRSTLAEEVGTDMVFVGQRCEQWSHQKGLLPASSPTTDIPGPTRPPGQVLSPASQFLKEGPK

SEQ ID NO: 811686 - protein, 1321 aa, Homo sapiens [sequence omitted]

SEQ ID NO: 811687 - protein, 1156 aa, Homo sapiens
MVLTLGESWPVLVGRRFLSLSAADGSDGSHDSWDVERVAEWPWLSGTIRAVSHTDVTKKDLKVCVEFDGESWRKRRWIEVYSLLRRAFLVEHNLVLAERKSPEISERIVQWPAITYKPLLDKAGLGSITSVRFLGDQQRVFLSKDLLKPIQDVNSLRLSLTDNQIVSKEFQALIVKHLDESHLLKGDKNLVGSEVKIYSLDPSTQWFSATVVNGNPASKTLQVNCEEIPALKIVDPSLIHVEVVHDNLVTCGNSARIGAVKRKSSENNGTLVSKQAKSCSEASPSMCPVQSVPTTVFKEILLGCTAATPPSKDPRQQSTPQAANSPPNLGAKIPQGCHKQSLPEEISSCLNTKSEALRTKPDVCKAGLLSKSSQIGTGDLKILTEPKGSCTQPKTNTDQENRLESVPQALTGLPKECLPTKASSKAELEIANPPELQKHLEHAPSPSDVSNAPEVKAGVNSDSPNNCSGKKVEPSALACRSQNLKESSVKVDNESCCSRSNNKIQNAPSRKSVLTDPAKLKKLQQSGEAFVQDDSCVNIVAQLPKCRECRLDSLRKDKEQQKDSPVFCRFFHFRRLQFNKHGVLRVEGFLTPNKYDNEAIGLWLPLTKNVVGIDLDTAKYILANIGDHFCQMVISEKEAMSTIEPHRQVAWKRAVKGVREMCDVCDTTIFNLHWVCPRCGFGVCVDCYRMKRKNCQQGAAYKTFSWLKCVKSQIHEPENLMPTQIIPGKALYDVGDIVHSVRAKWGIKANCPCSNRQFKLFSKPASKEDLKQTSLAGEKPTLGAVLQQNPSVLEPAAVGGEAASKPAGSMKPACPASTSPLNWLADLTSGNVNKENKEKQPTMPILKNEIKCLPPLPPLSKSSTVLHTFNSTILTPVSNNNSGFLRNLLNSSTGKTENGLKNTPKILDDIFASLVQNKTTSDLSKRPQGLTIKPSILGFDTPHYWLCDNRLLCLQDPNNKSNWNVFRECWKQGQPVMVSGVHHKLNSELWKPESFRKEFGEQEVDLVNCRTNEIITGATVGDFWDGFEDVPNRLKNEKEPMVLKLKDWPPGEDFRDMMPSRFDDLMANIPLPEYTRRDGKLNLASRLPNYFVRPDLGPKMYNAYGLITPEDRKYGTTNLHLDVSDAANVMVYVGIPKGQCEQEEGRVLSIKGGLTL

SEQ ID NO: 811688 - protein, 643 aa, Homo sapiens
MCDVCDTTIFNLHWVCPRCGFGVCVDCYRMKRKNCQQGAAYKTFSWLKCVKSQIHEPENLMPTQIIPGKALYDVGDIVHSVRAKWGIKANCPCSNRQFKLFSKPASKEDLKQTSLAGEKPTLGAVLQQNPSVLEPAAVGGEAASKPAGSMKPACPASTSPLNWLADLTSGNVNKENKLPPLSKSSTVLHTFNSTILTPVSNNNSGFLRNLLNSSTGKTENGLKNTPKILDDIFASLVQNKTTSDLSKRPQGLTIKPSILGFDTPHYWLCDNRLLCLQDPNNKSNWNVFRECWKQGQPVMVSGVHHKLNSELWKPESFRKEFGEQEVDLVNCRTNEIITGATVGDFWDGFEDVPNRLKNEKEPMVLKLKDWPPGEDFRDMMPSRFDDLMANIPLPEYTRRDGKLNLASRLPNYFVRPDLGPKMYNAYGLITPEDRKYGTTNLHLDVSDAANVMVYVGIPKGQCEQEEEVLKTIQDGDSDELTIKRFIEGKEKPGALWHIYAAKDTEKIREFLKKVSEEQGQENPADHDPIHDQSWYLDRSLRKRLHQEYGVQGWAIVQFLGDVVFIPAGAPHQVHNLYSCIKVAEDFVSPEHVKHCFWLTQEFRYLSQTHTNHEDKLQVKNVIYHAVKDAVAMLKASESSFGKP

SEQ ID NO: 811689 - protein, 302 aa, Homo sapiens
GDLYFAAPCCLLDRLKNEKEPMVLKLKDWPPGEDFRDMMPSRFDDLMANIPLPEYTRRDGKLNLASRLPNYFVRPDLGPKMYNAYGLITPEDRKYGTTNLHLDVSDAANVMVYVGIPKGQCEQEEEVLKTIQDGDSDELTIKRFIEGKEKPGALWHIYAAKDTEKIREFLKKVSEEQGQENPADHDPIHDQSWYLDRSLRKRLHQEYGVQGWAIVQFLGDVVFIPAGAPHQVHNLYSCIKVAEDFVSPEHVKHCFWLTQEFRYLSQTHTNHEDKLQVKNVIYHAVKDAVAMLKASESSFGKP

SEQ ID NO: 811690 - protein, 1198 aa, Homo sapiens [sequence omitted]

SEQ ID NO: 811691 - protein, 1069 aa, Homo sapiens
MVLTLGESWPVLVGRRFLSLSAADGSDGSHDSWDVERVAEWPWLSGTIRAVSHTDVTKKDLKVCVEFDGESWRKRRWIEVYSLLRRAFLVEHNLVLAERKSPEISERIVQWPAITYKPLLDKAGLGSITSVRFLGDQQRVFLSKDLLKPIQDVNSLRLSLTDNQIVSKEFQALIVKHLDESHLLKGDKNLVGSEVKIYSLDPSTQWFSATVVNGNPASKTLQVNCEEIPALKIVDPSLIHVEVVHDNLVTCGNSARIGAVKRKSSENNGTLVSKQAKSCSEASPSMCPVQSVPTTVFKEILLGCTAATPPSKDPRQQSTPQAANSPPNLGAKIPQGCHKQSLPEEISSCLNTKSEALRTKPDVCKAGLLSKSSQIGTGDLKILTEPKGSCTQPKTNTDQENRLESVPQALTGLPKECLPTKASSKAELEIANPPELQKHLEHAPSPSDVSNAPEVKAGVNSDSPNNCSGKKVEPSALACRSQNLKESSVKVDNESCCSRSNNKIQNAPSRKSVLTDPAKLKKLQQSGEAFVQDDSCVNIVAQLPKCRECRLDSLRKDKEQQKDSPVFCRFFHFRRLQFNKHGVLRVEGFLTPNKYDNEAIGLWLPLTKNVVGIDLDTAKYILANIGDHFCQMVISEKEAMSTIEPHRQVAWKRAVKGVREMCDVCDTTIFNLHWVCPRCGFGVCVDCYRMKRKNCQQGAAYKTFSWLKCVKSQIHEPENLMPTQIIPGKALYDVGDIVHSVRAKWGIKANCPCSNRQFKLFSKPASKEDLKQTSLAGEKPTLGAVLQQNPSVLEPAAVGGEAASKPAGSMKPACPASTSPLNWLADLTSGNVNKENKEKQPTMPILKNEIKCLPPLPPLSKSSTVLHTFNSTILTPVSNNNSGFLRNLLNSSTGKTENGLKNTPKILDDIFASLVQNKTTSDLSKRPQGLTIKPSILGFDTPHYWLCDNRLLCLQDPNNKSNWNVFRECWKQGQPVMVSGVHHKLNSELWKPESFRKEFGEQEVDLVNCRTNEIITGATVGDFWDGFEDVPNRLKNEKEPMVLKLKDWPPGEDFRDMMPSRYDYEGGER

SEQ ID NO: 811692 - protein, 262 aa, Homo sapiens
MVLTLGESWPVLVGRRFLSLSAADGSDGSHDSWDVERVAEWPWLSGTIRAVSHTDVTKKDLKVCVEFDGESWRKRRWIEVYSLLRRAFLVEHNLVLAERKSPEISERIVQWPAITYKPLLDKAGLGSITSVRFLGDQQRVFLSKDLLKPIQDVNSLRLSLTDNQIVSKEFQALIVKHLDESHLLKGDKNLVGSEVKIYSLDPSTQWFSATVVNGNPASKTLQVNCEEVKTTITLCKITRQSMITIQSIYDFLGTKYLYYFIG

SEQ ID NO: 811693 - protein, 122 aa, Homo sapiens
AAPRGAGPGGCACLVRALEPSQRWSRLGGWKRRLPPVTQGGGRRGRSSSCRRGNHGAHARRKLAGIGGEEVSQSVRSRRQRWQPRQLGRGARRRVALALRDHSSCFPHRRYQEGSEDLFKDR

SEQ ID NO: 811694 - protein, 1321 aa, Homo sapiens [sequence omitted]

SEQ ID NO: 811695 - protein, 512 aa, Homo sapiens
MKPACPASTSPLNWLADLTSGNVNKENKEKQPTMPILKNEIKCLPPLPPLSKSSTVLHTFNSTILTPVSNNNSGFLRNLLNSSTGKTENGLKNTPKILDDIFASLVQNKTTSDLSKRPQGLTIKPSILGFDTPHYWLCDNRLLCLQDPNNKSNWNVFRECWKQGQPVMVSGVHHKLNSELWKPESFRKEFGEQEVDLVNCRTNEIITGATVGDFWDGFEDVPNRLKNEKEPMVLKLKDWPPGEDFRDMMPSRFDDLMANIPLPEYTRRDGKLNLASRLPNYFVRPDLGPKMYNAYGLITPEDRKYGTTNLHLDVSDAANVMVYVGIPKGQCEQEEEVLKTIQDGDSDELTIKRFIEGKEKPGALWHIYAAKDTEKIREFLKKVSEEQGQENPADHDPIHDQSWYLDRSLRKRLHQEYGVQGWAIVQFLGDVVFIPAGAPHQVHNLYSCIKVAEDFVSPEHVKHCFWLTQEFRYLSQTHTNHEDKLQVKNVIYHAVKDAVAMLKASESSFGKP

SEQ ID NO: 811696 - protein, 192 aa, Homo sapiens [sequence omitted]

SEQ ID NO: 811697 - protein, 613 aa, Homo sapiens
MVLTLGESWPVLVGRRFLSLSAADGSDGSHDSWDVERVAEWPWLSGTIRAVSHTDVTKKDLKVCVEFDGESWRKRRWIEVYSLLRRAFLVEHNLVLAERKSPEISERIVQWPAITYKPLLDKAGLGSITSVRFLGDQQRVFLSKDLLKPIQDVNSLRLSLTDNQIVSKEFQALIVKHLDESHLLKGDKNLVGSEVKIYSLDPSTQWFSATVVNGNPASKTLQVNCEEIPALKIVDPSLIHVEVVHDNLVTCGNSARIGAVKRKSSENNGTLVSKQAKSCSEASPSMCPVQSVPTTVFKEILLGCTAATPPSKDPRQQSTPQAANSPPNLGAKIPQGCHKQSLPEEISSCLNTKSEALRTKPDVCKAGLLSKSSQIGTGDLKILTEPKGSCTQPKTNTDQENRLESVPQALTGLPKECLPTKASSKAELEIANPPELQKHLEHAPSPSDVSNAPEVKAGVNSDSPNNCSGKKVEPSALACRSQNLKESSVKVDNESCCSRSNNKIQNAPSRKSVLTDPAKLKKLQQSGEAFVQDDSCVNIVAQLPKCRECRLDSLRKDKEQQKDSPVFCRFFHFRRLQFNKHGVLRVEGFLTPNKYDNEDGGVLNKSGGCLASK

SEQ ID NO: 811698 - protein, 108 aa, Homo sapiens
MVLTLGESWPVLVGRRFLSLSAADGSDGSHDSWDVERVAEWPWLSGTIRAVSHTDVTKKDLKVRRLRASATGRFAVTVVTRPSVPSFRFLKTETRKLAYDLKVQEARS

SEQ ID NO: 811699 - protein, 79 aa, Homo sapiens
FDDLMANIPLPEYTRRDGKLNLASRLPNYFVRPDLGPKMYNAYGKEEMANFKMEIKQFKMFGKLILWEGEVENTHNPNA

SEQ ID NO: 811700 - protein, 1259 aa, Homo sapiens
GVSRAGYLSSRAYGAACPTAAGAAAVMGFLKLIEIENFKSYKGRQIIGPFQRFTAIIGPNGSGKSNLMDAISFVLGEKTSNLRVKTLRDLIHGAPVGKPAANRAFVSMVYSEEGAEDRTFARVIVGGSSEYKINNKVVQLHEYSEELEKLGILIKARNFLVFQGAVESIAMKNPKERTALFEEISRSGELAQEYDKRKKEMVKAEEDTQFNYHRKKNIAAERKEAKQEKEEADRYQRLKDEVVRAQVQLQLFKLYHNEVEIEKLNKELASKNKEIEKDKKRMDKVEDELKEKKKELGKMMREQQQIEKEIKEKDSELNQKRPQYIKAKENTSHKIKKLEAAKKSLQNAQKHYKKRKGDMDELEKEMLSVEKARQEFEERMEEESQSQGRDLTLEENQVKKYHRLKEEASKRAATLAQELEKFNRDQKADQDRLDLEERKKVETEAKIKQKLREIEENQKRIEKLEEYITTSKQSLEEQKKLEGELTEEVEMAKRRIDEINKELNQVMEQLGDARIDRQESSRQQRKAEIMESIKRLYPGSVYGRLIDLCQPTQKKYQIAVTKVLGKNMDAIIVDSEKTGRDCIQYIKEQRGEPETFLPLDYLEVKPTDEKLRELKGAKLVIDVIRYEPPHIKKALQYACGNALVCDNVEDARRIAFGGHQRHKTVALDGTLFQKSGVISGGASDLKAKARRWDEKAVDKLKEKKERLTEELKEQMKAKRKEAELRQVQSQAHGLQMRLKYSQSDLEQTKTRHLALNLQEKSKLESELANFGPRINDIKRIIQSREREMKDLKEKMNQVEDEVFEEFCREIGVRNIREFEEEKVKRQNEIAKKRLEFENQKTRLGIQLDFEKNQLKEDQDKVHMWEQTVKKDENEIEKLKKEEQRHMKIIDETMAQLQDLKNQHLAKKSEVNDKNHEMEEIRKKLGGANKEMTHLQKEVTAIETKLEQKRSDRHNLLQACKMQDIKLPLSKGTMDDISQEEGSSQGEDSVSGSQRISSIYAREALIEIDYGDLCEDLKDAQAEEEIKQEMNTLQQKLNEQQSVLQRIAAPNMKAMEKLESVRDKFQETSDEFEAARKRAKKAKQAFEQIKKERFDRFNACFESVATNIDEIYKALSRNSSAQAFLGPENPEEPYLDGINYNCVAPGKRFRPMDNLSGGEKTVAALALLFAIHSYKPAPFFVLDEIDAALDNTNIGKVANYIKEQSTCNFQAIVISLKEEFYTKAESLIGVYPEQGDCVISKVLTFDLTKYPDANPNPNEQ

SEQ ID NO: 811701 - protein, 1259 aa, Homo sapiens; identical to SEQ ID NO: 811700

SEQ ID NO: 811702 - protein, 1259 aa, Homo sapiens; identical to SEQ ID NO: 811700

SEQ ID NO: 811703 - protein, 1099 aa, Homo sapiens [sequence omitted]

SEQ ID NO: 811704 - protein, 843 aa, Homo sapiens
TWHFSEEENQVKKQQKSIETGRKKVETEAKIKQKLREIEENQKRIEKLEEYITTSKQSLEEQKKLEGELTEEVEMAKRRIDEINKELNQVMEQLGDARIDRQESSRQQRKAEIMESIKRLYPGSVYGRLIDLCQPTQKKYQIAVTKVLGKNMDAIIVDSEKTGRDCIQYIKEQRGEPETFLPLDYLEVKPTDEKLRELKGAKLVIDVIRYEPPHIKKALQYACGNALVCDNVEDARRIAFGGHQRHKTVALDGTLFQKSGVISGGASDLKAKARRWDEKAVDKLKEKKERLTEELKEQMKAKRKEAELRQVQSQAHGLQMRLKYSQSDLEQTKTRHLALNLQEKSKLESELANFGPRINDIKRIIQSREREMKDLKEKMNQVEDEVFEEFCREIGVRNIREFEEEKVKRQNEIAKKRLEFENQKTRLGIQLDFEKNQLKEDQDKVHMWEQTVKKDENEIEKLKKEEQRHMKIIDETMAQLQDLKNQHLAKKSEVNDKNHEMEEIRKKLGGANKEMTHLQKEVTAIETKLEQKRSDRHNLLQACKMQDIKLPLSKGTMDDISQEEGSSQGEDSVSGSQRISSIYAREALIEIDYGDLCEDLKDAQAEEEIKQEMNTLQQKLNEQQSVLQRIAAPNMKAMEKLESVRDKFQETSDEFEAARKRAKKAKQAFEQIKKERFDRFNACFESVATNIDEIYKALSRNSSAQAFLGPENPEEPYLDGINYNCVAPGKRFRPMDNLSGGEKTVAALALLFAIHSYKPAPFFVLDEIDAALDNTNIGKVANYIKEQSTCNFQAIVISLKEEFYTKAESLIGVYPEQGDCVISKVLTFDLTKYPDANPNPNEQ

SEQ ID NO: 811705 - protein, 629 aa, Homo sapiens
WIPLPRLELDRLSTGDSFVQLLPLFSLPPAVCETVALDGTLFQKSGVISGGASDLKAKARRWDEKAVDKLKEKKERLTEELKEQMKAKRKEAELRQVQSQAHGLQMRLKYSQSDLEQTKTRHLALNLQEKSKLESELANFGPRINDIKRIIQSREREMKDLKEKMNQVEDEVFEEFCREIGVRNIREFEEEKVKRQNEIAKKRLEFENQKTRLGIQLDFEKNQLKEDQDKVHMWEQTVKKDENEIEKLKKEEQRHMKIIDETMAQLQDLKNQHLAKKSEVNDKNHEMEEIRKKLGGANKEMTHLQKEVTAIETKLEQKRSDRHNLLQACKMQDIKLPLSKGTMDDISQEEGSSQGEDSVSGSQRISSIYAREALIEIDYGDLCEDLKDAQAEEEIKQEMNTLQQKLNEQQSVLQRIAAPNMKAMEKLESVRDKFQETSDEFEAARKRAKKAKQAFEQIKKERFDRFNACFESVATNIDEIYKALSRNSSAQAFLGPENPEEPYLDGINYNCVAPGKRFRPMDNLSGGEKTVAALALLFAIHSYKPAPFFVLDEIDAALDNTNIGKVANYIKEQSTCNFQAIVISLKEEFYTKAESLIGVYPEQGDCVISKVLTFDLTKYPDANPNPNEQ

SEQ ID NO: 811706 - protein, 473 aa, Homo sapiens
RTKTEISEMNRVEDEVFEEFCREIGVRNIREFEEEKVKRQNEIAKKRLEFENQKTRLGIQLDFEKNQLKEDQDKVHMWEQTVKKDENEIEKLKKEEQRHMKIIDETMAQLQDLKNQHLAKKSEVNDKNHEMEEIRKKLGGANKEMTHLQKEVTAIETKLEQKRSDRHNLLQACKMQDIKLPLSKGTMDDISQEEGSSQGEDSVSGSQRISSIYAREALIEIDYGDLCEDLKDAQAEEEIKQEMNTLQQKLNEQQSVLQRIAAPNMKAMEKLESVRDKFQETSDEFEAARKRAKKAKQAFEQIKKERFDRFNACFESVATNIDEIYKALSRNSSAQAFLGPENPEEPYLDGINYNCVAPGKRFRPMDNLSGGEKTVAALALLFAIHSYKPAPFFVLDEIDAALDNTNIGKVANYIKEQSTCNFQAIVISLKEEFYTKAESLIGVYPEQGDCVISKVLTFDLTKYPDANPNPNEQ

SEQ ID NO: 811707 - protein, 472 aa, Homo sapiens [sequence omitted]

SEQ ID NO: 811708 - protein, 1259 aa, Homo sapiens; identical to SEQ ID NO: 811700

SEQ ID NO: 811709 - protein, 961 aa, Homo sapiens
GVSRAGYLSSRAYGAACPTAAGAAAVMGFLKLIEIENFKSYKGRQIIGPFQRFTAIIGPNGSGKSNLMDAISFVLGEKTSNLRVKTLRDLIHGAPVGKPAANRAFVSMVYSEEGAEDRTFARVIVGGSSEYKINNKVVQLHEYSEELEKLGILIKARNFLVFQGAVESIAMKNPKERTALFEEISRSGELAQEYDKRKKEMVKAEEDTQFNYHRKKNIAAERKEAKQEKEEADRYQRLKDEVVRAQVQLQLFKLYHNEVEIEKLNKELASKNKEIEKDKKRMDKVEDELKEKKKELGKMMREQQQIEKEIKEKDSELNQKRPQYIKAKENTSHKIKKLEAAKKSLQNAQKHYKKRKGDMDELEKEMLSVEKARQEFEERMEEESQSQGRDLTLEENQVKKYHRLKEEASKRAATLAQELEKFNRDQKADQDRLDLEERKKVETEAKIKQKLREIEENQKRIEKLEEYITTSKQSLEEQKKLEGELTEEVEMAKRRIDEINKELNQVMEQLGDARIDRQESSRQQRKAEIMESIKRLYPGSVYGRLIDLCQPTQKKYQIAVTKVLGKNMDAIIVDSEKTGRDCIQYIKEQRGEPETFLPLDYLEVKPTDEKLRELKGAKLVIDVIRYEPPHIKKALQYACGNALVCDNVEDARRIAFGGHQRHKTVALDGTLFQKSGVISGGASDLKAKARRWDEKAVDKLKEKKERLTEELKEQMKAKRKEAELRQVQSQAHGLQMRLKYSQSDLEQTKTRHLALNLQEKSKLESELANFGPRINDIKRIIQSREREMKDLKEKMNQVEDEVFEEFCREIGVRNIREFEEEKVKRQNEIAKKRLEFENQKTRLGIQLDFEKNQLKEDQDKVHMWEQTVKKDENEIEKLKKELASKNKEIEKDKKRMDKVEDELNEKKKELGKMMREQQQIDKEIHGEGLSIEPEAGFVSMVYSEEGAEAVPWPLSGYQLES

SEQ ID NO: 811710 - protein, 614 aa, Homo sapiens
  misc_feature (605)..(605): Xaa can be any naturally occurring amino acid
  misc_feature (609)..(609): Xaa can be any naturally occurring amino acid
  misc_feature (613)..(614): Xaa can be any naturally occurring amino acid
GVSRAGYLSSRAYGAACPTAAGAAAVMGFLKLIEIENFKSYKGRQIIGPFQRFTAIIGPNGSGKSNLMDAISFVLGEKTSNLRVKTLRDLIHGAPVGKPAANRAFVSMVYSEEGAEDRTFARVIVGGSSEYKINNKVVQLHEYSEELEKLGILIKARNFLVFQGAVESIAMKNPKERTALFEEISRSGELAQEYDKRKKEMVKAEEDTQFNYHRKKNIAAERKEAKQEKEEADRYQRLKDEVVRAQVQLQLFKLYHNEVEIEKLNKELASKNKEIEKDKKRMDKVEDELKEKKKELGKMMREQQQIEKEIKEKDSELNQKRPQYIKAKENTSHKIKKLEAAKKSLQNAQKHYKKRKGDMDELEKEMLSVEKARQEFEERMEEESQSQGRDLTLEENQVKKYHRLKEEASKRAATLAQELEKFNRDQKADQDRLDLEERKKVETEAKIKQKLREIEENQKRIEKLEEYITTSKQSLEEQKKLEGELTEEVEMAKRRIDEINKELNQVMEQLGDARIDRQESSRQQRKAEIMESIKRLYPGSVYGRLIDLCQPTQKKYQIAVTKVLGKNMDAIIVDSEKTGRDCIQYIKEQRGEPETFLPLDYLEMXPFRXATRXX

SEQ ID NO: 811711 - protein, 538 aa, Homo sapiens
GVSRAGYLSSRAYGAACPTAAGAAAVMGFLKLIEIENFKSYKGRQIIGPFQRFTAIIGPNGSGKSNLMDAISFVLGEKTSNLRVKTLRDLIHGAPVGKPAANRAFVSMVYSEEGAEDRTFARVIVGGSSEYKINNKVVQLHEYSEELEKLGILIKARNFLVFQGAVESIAMKNPKERTALFEEISRSGELAQEYDKRKKEMVKAEEDTQFNYHRKKNIAAERKEAKQEKEEADRYQRLKDEVVRAQVQLQLFKLYHNEVEIEKLNKELASKNKEIEKDKKRMDKVEDELKEKKKELGKMMREQQQIEKEIKEKDSELNQKRPQYIKAKENTSHKIKKLEAAKKSLQNAQKHYKKRKGDMDELEKEMLSVEKARQEFEERMEEESQSQGRDLTLEENQVKKYHRLKEEASKRAATLAQELEKFNRDQKADQDRLDLEERKKVETEAKIKQKLREIEENQKRIEKLEEYITTSKQSLEEQKKLEGELTEEVEMAKRRIDEINKELNQGHTWTFWGQGLYAFVYCCILGSKLALNKYWLNK

SEQ ID NO: 811712 - protein, 479 aa, Homo sapiens
GVSRAGYLSSRAYGAACPTAAGAAAVMGFLKLIEIENFKSYKGRQIIGPFQRFTAIIGPNGSGKSNLMDAISFVLGEKTSNLRVKTLRDLIHGAPVGKPAANRAFVSMVYSEEGAEDRTFARVIVGGSSEYKINNKVVQLHEYSEELEKLGILIKARNFLVFQGAVESIAMKNPKERTALFEEISRSGELAQEYDKRKKEMVKAEEDTQFNYHRKKNIAAERKEAKQEKEEADRYQRLKDEVVRAQVQLQLFKLYHNEVEIEKLNKELASKNKEIEKDKKRMDKVEDELKEKKKELGKMMREQQQIEKEIKEKDSELNQKRPQYIKAKENTSHKIKKLEAAKKSLQNAQKHYKKRKGDMDELEKEMLSVEKARQEFEERMEEESQSQGRDLTLEENQNEKKKELGKMMREQQQIDKEIHGEGLSIEPEAAQYIKAKEDTSHNIKKLEAAKKSLQNAQELYTKRKGDMDEPGEGDALSEK

SEQ ID NO: 811713 - protein, 347 aa, Homo sapiens
GVSRAGYLSSRAYGAACPTAAGAAAVMGFLKLIEIENFKSYKGRQIIGPFQRFTAIIGPNGSGKSNLMDAISFVLGEKTSNLRVKTLRDLIHGAPVGKPAANRAFVSMVYSEEGAEDRTFARVIVGGSSEYKINNKVVQLHEYSEELEKLGILIKARNFLVFQGAVESIAMKNPKERTALFEEISRSGELAQEYDKRKKEMVKAEEDTQFNYHRKKNIAAERKEAKQEKEEADRYQRLKDEVVRAQVQLQLFKLYHNEVEIEKLNKELASKNKEIEKDKKRMDKVEDELKEKKKELGKMMREQQQIEKEIKEKDSALNQNRAFVSMVYSEEGAEAVPWPLSGYQLES

SEQ ID NO: 811714 - protein, 316 aa, Homo sapiens
GVSRAGYLSSRAYGAACPTAAGAAAVMGFLKLIEIENFKSYKGRQIIGPFQRFTAIIGPNGSGKSNLMDAISFVLGEKTSNLRVKTLRDLIHGAPVGKPAANRAFVSMVYSEEGAEDRTFARVIVGGSSEYKINNKVVQLHEYSEELEKLGILIKARNFLVFQGAVESIAMKNPKERTALFEEISRSGELAQEYDKRKKEMVKAEEDTQFNYHRKKNIAAERKEAKQEKEEADRYQRLKDEVVRAQVQLQLFKLYHNEVEIEKLNKELASKNKEIEKDKKRMDKVEDSSFEEISRSGELAQEYDKRKKEMVNAGIL

SEQ ID NO: 811715 - protein, 164 aa, Homo sapiens
MPEPAKFAPAPKKGSKKAVTKAQKKDGKKRKRSRKESYSIYVYKVLKRVHPDTGIWCKAMGIMNSFLNDIFERIAGEASRLAHYNKRSTITSRRSRRPCACCCPASWPSTPCPRAPRRSPSTPAPSESLPGPGARSLPPSLPPRVAGCFVSKGSFQGHLTPLVK

SEQ ID NO: 811716 - protein, 164 aa, Homo sapiens
QRALPAPSQAGMLRLRSGLRHLRATPNTRGSARLLRAEMPKKAGATTKGKSQSKEPERPLPPLGPVAVDPKGCVTIAIHAKPGSKQNAVTDLTAEAVNVAIAAPPSEGEANAELCRYLSKVLELRKSDVVLDKKLRDLLKIVPCKLATRTQILGLLVECSFSRL

SEQ ID NO: 811717 - protein, 178 aa, Homo sapiens
QRALPAPSQAGMLRLRSGLRHLRATPNTRGSARLLRAEMPKKAGATTKGKSQSKEPERPLPPLGPVAVDPKGCVTIAIHAKPGSKQNAVTDLTAEAVNVAIAAPPSEGEANAELCRYLSKVLELRKSDVVLDKVGLALFFFFLRQNLALSPKLECSGVVLAHCNLHLLGSSYSPASAS

SEQ ID NO: 811718 - protein, 164 aa, Homo sapiens
QRALPAPSQAGMLRLRSGLRHLRATPNTRGSARLLRAEMPKKAGATTKGKSQSKEPERPLPPLGPVAVDPKGCVTIAIHAKPGSKQNAVTDLTAEAVNVAIAAPPSEGEANAELCRYLSKVLELRKSDVVLDKGGKSREKVVKLLASTTPEEILEKLKKEAKKT

SEQ ID NO: 811719 - protein, 79 aa, Homo sapiens
QRALPAPSQAGMLRLRSGLRHLRATPNTRGSARLLRAEMPKKAGATTKGGKSREKVVKLLASTTPEEILEKLKKEAKKT

SEQ ID NO: 811720 - protein, 418 aa, Homo sapiens
MRTKAAGCAERRPLQPRTEAAAAPAGRAMPSEYTYVKLRSDCSRPSLQWYTRAQSKMRRPSLLLKDILKCTLLVFGVWILYILKLNYTTEECDMKKMHYVDPDHVKRAQKYAQQVLQKECRPKFAKTSMALLFEHRYSVDLLPFVQKAPKDSEAESKYDPPFGFRKFSSKVQTLLELLPEHDLPEHLKAKTCRRCVVIGSGGILHGLELGHTLNQFDVVIRLNSAPVEGYSEHVGNKTTIRMTYPEGAPLSDLEYYSNDLFVAVLFKSVDFNWLQAMVKKETLPFWVRLFFWKQVAEKIPLQPKHFRILNPVIIKETAFDILQYSEPQSRFWGRDKNVPTIGVIAVVLATHLCDEVSLAGFGYDLNQPRTPLHYFDSQCMAAMNFQTMHNVTTETKFLLKLVKEGVVKDLSGGIDREF

SEQ ID NO: 811721 - protein, 390 aa, Homo sapiens
MPSEYTYVKLRSDCSRPSLQWYTRAQSKMRRPSLLLKDILKCTLLVFGVWILYILKLNYTTEECDMKKMHYVDPDHVKRAQKYAQQVLQKECRPKFAKTSMALLFEHRYSVDLLPFVQKAPKDSEAESKYDPPFGFRKFSSKVQTLLELLPEHDLPEHLKAKTCRRCVVIGSGGILHGLELGHTLNQFDVVIRLNSAPVEGYSEHVGNKTTIRMTYPEGAPLSDLEYYSNDLFVAVLFKSVDFNWLQAMVKKETLPFWVRLFFWKQVAEKIPLQPKHFRILNPVIIKETAFDILQYSEPQSRFWGRDKNVPTIGVIAVVLATHLCDEVSLAGFGYDLNQPRTPLHYFDSQCMAAMNFQTMHNVTTETKFLLKLVKEGVVKDLSGGIDREF

SEQ ID NO: 811722 - protein, 114 aa, Homo sapiens
MRTKAAGCAERRPLQPRTEAAAAPAGRAMPSEYTYVKLRSDCSRPSLQWYTRAQSKMRRPSLLLKDILKCTLLVFGVWILYILKLNYTTEECDMKKMHYVDPDHVKVRYPIGVV

SEQ ID NO: 811723 - protein, 390 aa, Homo sapiens; identical to SEQ ID NO: 811721

SEQ ID NO: 811724 - protein, 404 aa, Homo sapiens
LSCLAATQDMASVPMPSEYTYVKLRSDCSRPSLQWYTRAQSKMRRPSLLLKDILKCTLLVFGVWILYILKLNYTTEECDMKKMHYVDPDHVKRAQKYAQQVLQKECRPKFAKTSMALLFEHRYSVDLLPFVQKAPKDSEAESKYDPPFGFRKFSSKVQTLLELLPEHDLPEHLKAKTCRRCVVIGSGGILHGLELGHTLNQFDVVIRLNSAPVEGYSEHVGNKTTIRMTYPEGAPLSDLEYYSNDLFVAVLFKSVDFNWLQAMVKKETLPFWVRLFFWKQVAEKIPLQPKHFRILNPVIIKETAFDILQYSEPQSRFWGRDKNVPTIGVIAVVLATHLCDEVSLAGFGYDLNQPRTPLHYFDSQCMAAMNFQTMHNVTTETKFLLKLVKEGVVKDLSGGIDREF

SEQ ID NO: 811725 - protein, 290 aa, Homo sapiens
MALLFEHRYSVDLLPFVQKAPKDSEAESKYDPPFGFRKFSSKVQTLLELLPEHDLPEHLKAKTCRRCVVIGSGGILHGLELGHTLNQFDVVIRLNSAPVEGYSEHVGNKTTIRMTYPEGAPLSDLEYYSNDLFVAVLFKSVDFNWLQAMVKKETLPFWVRLFFWKQVAEKIPLQPKHFRILNPVIIKETAFDILQYSEPQSRFWGRDKNVPTIGVIAVVLATHLCDEVSLAGFGYDLNQPRTPLHYFDSQCMAAMNFQTMHNVTTETKFLLKLVKEGVVKDLSGGIDREF

SEQ ID NO: 811726 - protein, 290 aa, Homo sapiens; identical to SEQ ID NO: 811725

SEQ ID NO: 811727 - protein, 290 aa, Homo sapiens; identical to SEQ ID NO: 811725

SEQ ID NO: 811728 - protein, 350 aa, Homo sapiens
MPSEYTYVKLRSDCSRPSLQWYTRAQSKMRRPSLLLKDILKCTLLVFGVWILYILKLNYTTEECDMKKMHYVDPDHVKKAPKDSEAESKYDPPFGFRKFSSKVQTLLELLPEHDLPEHLKAKTCRRCVVIGSGGILHGLELGHTLNQFDVVIRLNSAPVEGYSEHVGNKTTIRMTYPEGAPLSDLEYYSNDLFVAVLFKSVDFNWLQAMVKKETLPFWVRLFFWKQVAEKIPLQPKHFRILNPVIIKETAFDILQYSEPQSRFWGRDKNVPTIGVIAVVLATHLCDEVSLAGFGYDLNQPRTPLHYFDSQCMAAMNFQTMHNVTTETKFLLKLVKEGVVKDLSGGIDREF

SEQ ID NO: 811729 - protein, 319 aa, Homo sapiens
KPEINLLRAQKYAQQVLQKECRPKFAKTSMALLFEHRYSVDLLPFVQKAPKDSEAESKYDPPFGFRKFSSKVQTLLELLPEHDLPEHLKAKTCRRCVVIGSGGILHGLELGHTLNQFDVVIRLNSAPVEGYSEHVGNKTTIRMTYPEGAPLSDLEYYSNDLFVAVLFKSVDFNWLQAMVKKETLPFWVRLFFWKQVAEKIPLQPKHFRILNPVIIKETAFDILQYSEPQSRFWGRDKNVPTIGVIAVVLATHLCDEVSLAGFGYDLNQPRTPLHYFDSQCMAAMNFQTMHNVTTETKFLLKLVKEGVVKDLSGGIDREF

SEQ ID NO: 811730 - protein, 237 aa, Homo sapiens
MALLFEHRYSVDLLPFVQKAPKDSEAESKYDPPFGFRKFSSKVQTLLELLPEHDLPEHLKAKTCRRCVVIGSGGILHGLELGHTLNQFDVVIRLNSAPVEGYSEHVGNKTTIRMTYPEGAPLSDLEYYSNDLFVAVLFKSVDFNWLQAMVKKETLNVPTIGVIAVVLATHLCDEVSLAGFGYDLNQPRTPLHYFDSQCMAAMNFQTMHNVTTETKFLLKLVKEGVVKDLSGGIDREF

SEQ ID NO: 811731 - protein, 231 aa, Homo sapiens
MRTKAAGCAERRPLQPRTEAAAAPAGRAMPSEYTYVKLRSDCSRPSLQWYTRAQSKMRRPSLLLKDILKCTLLVFGVWILYILKLNYTTEECDMKKMHYVDPDHVKRAQKYAQQVLQKECRPKFAKTSMALLFEHRYSVDLLPFVQKAPKDSEAESKYDPPFGFRKFSSKVQTLLELLPEHDLPEHLKAKTCRRCVVIGSGGILHGLELGHTLNQFDVVIRVLISTGFKQW

SEQ ID NO: 811732 - protein, 177 aa, Homo sapiens
MTYPEGAPLSDLEYYSNDLFVAVLFKSVDFNWLQAMVKKETLPFWVRLFFWKQVAEKIPLQPKHFRILNPVIIKETAFDILQYSEPQSRFWGRDKNVPTIGVIAVVLATHLCDEVSLAGFGYDLNQPRTPLHYFDSQCMAAMNFQTMHNVTTETKFLLKLVKEGVVKDLSGGIDREF

SEQ ID NO: 811733 - protein, 292 aa, Homo sapiens
MRTKAAGCAERRPLQPRTEAAAAPAGRAMPSEYTYVKLRSDCSRPSLQWYTRAQSKMRRPSLLLKDILKCTLLVFGVWILYILKLNYTTEECDMKKMHYVDPDHVKRAQKYAQQVLQKECRPKFAKTSMALLFEHRYSVDLLPFVQKAPKDSEAESKYDPPFGFRKFSSKVQTLLELLPEHDLPEHLKAKTCRRCVVIGSGGILHGLELGHTLNQFDVVIRLNSAPVEGYSEHVGNKTTIRMTYPEGAPLSDLEYYSNDLFVAVLFKSVDFNWLQAMVKKETLPFWVRRRWC

SEQ ID NO: 811734 - protein, 110 aa, Homo sapiens
MPSEYTYVKLRSDCSRPSLQWYTRAQSKMRRPSLLLKDILKCTLLVFGVWILYILKLNYTTEECDMKKMHYVDPDHVKTYTVPLKEAGPSLLKHSVSPGTSIFKPSLFSP

SEQ ID NO: 811735 - protein, 191 aa, Homo sapiens
MASCDFSIRTYTYADTPDDFQLHNFSLPEEDTKLKIPLIHRALQLAQRPVSLLASPWTSPTWLKTNGAVNGKGSLKGQPGDIYHQTWARYFVKFLDAYAEHKLQFWAVTAENEPSAGLLSGYPFQCLGFTPEHQRDFIARDLGPTLANSTHHNVRLLMLDDQRLLLPHWAKVVLTDPEAAKTPKGDPLDHQ

SEQ ID NO: 811736 - protein, 160 aa, Homo sapiens
MASCDFSIRTYTYADTPDDFQLHNFSLPEEDTKLKIPLIHRALQLAQRPVSLLASPWTSPTWLKTNGAVNGKGSLKGQPGDIYHQTWARYFVKKGISKDVGSGLASHLAMLICVPTLNLVPLPDLPVLSSPFYLLGLSALGLSILPTPSGFLFSRSGPLS

SEQ ID NO: 811737 - protein, 536 aa, Homo sapiens
MEFSSPSREECPKPLSRVSIMAGSLTGLLLLQAVSWASGARPCIPKSFGYSSVVCVCNATYCDSFDPPTFPALGTFSRYESTRSGRRMELSMGPIQANHTGTGLLLTLQPEQKFQKVKGFGGAMTDAAALNILALSPPAQNLLLKSYFSEEGIGYNIIRVPMASCDFSIRTYTYADTPDDFQLHNFSLPEEDTKLKIPLIHRALQLAQRPVSLLASPWTSPTWLKTNGAVNGKGSLKGQPGDIYHQTWARYFVKFLDAYAEHKLQFWAVTAENEPSAGLLSGYPFQCLGFTPEHQRDFIARDLGPTLANSTHHNVRLLMLDDQRLLLPHWAKVVLTDPEAAKYVHGIAVHWYLDFLAPAKATLGETHRLFPNTMLFASEACVGSKFWEQSVRLGSWDRGMQYSHSIITNLLYHVVGWTDWNLALNPEGGPNWVRNFVDSPIIVDITKDTFYKQPMFYHLGHFSKFIPEGSQRVGLVASQKNDLDAVALMHPDGSAVVVVLNRSSKDVPLTIKDPAVGFLETISPGYSIHTYLWRRQ

SEQ ID NO: 811738 - protein, 536 aa, Homo sapiens; identical to SEQ ID NO: 811737

SEQ ID NO: 811739 - protein, 536 aa, Homo sapiens; identical to SEQ ID NO: 811737

SEQ ID NO: 811740 - protein, 606 aa, Homo sapiens
AVIGRAASCLQSLTARGPSLQSRPGAFAGCGGISFCLRLGLLFLFADVDPLSFRDSGTPVVFSSSNDPEGMEFSSPSREECPKPLSRVSIMAGSLTGLLLLQAVSWASGARPCIPKSFGYSSVVCVCNATYCDSFDPPTFPALGTFSRYESTRSGRRMELSMGPIQANHTGTGLLLTLQPEQKFQKVKGFGGAMTDAAALNILALSPPAQNLLLKSYFSEEGIGYNIIRVPMASCDFSIRTYTYADTPDDFQLHNFSLPEEDTKLKIPLIHRALQLAQRPVSLLASPWTSPTWLKTNGAVNGKGSLKGQPGDIYHQTWARYFVKFLDAYAEHKLQFWAVTAENEPSAGLLSGYPFQCLGFTPEHQRDFIARDLGPTLANSTHHNVRLLMLDDQRLLLPHWAKVVLTDPEAAKYVHGIAVHWYLDFLAPAKATLGETHRLFPNTMLFASEACVGSKFWEQSVRLGSWDRGMQYSHSIITNLLYHVVGWTDWNLALNPEGGPNWVRNFVDSPIIVDITKDTFYKQPMFYHLGHFSKFIPEGSQRVGLVASQKNDLDAVALMHPDGSAVVVVLNRSSKDVPLTIKDPAVGFLETISPGYSIHTYLWRRQ

SEQ ID NO: 811741 - protein, 536 aa, Homo sapiens; identical to SEQ ID NO: 811737

SEQ ID NO: 811742 - protein, 536 aa, Homo sapiens; identical to SEQ ID NO: 811737

SEQ ID NO: 811743 - protein, 218 aa, Homo sapiens
MEFSSPSREECPKPLSRVSIMAGSLTGLLLLQAVSWASGARPCIPKSFGYSSVVCVCNATYCDSFDPPTFPALGTFSRYESTRSGRRMELSMGPIQANHTGTGLLLTLQPEQKFQKVKGFGGAMTDAAALNILALSPPAQNLLLKSYFSEEGIGYNIIRVPMASCDFSIRTYTYADTPDDFQLHNFSLPEEDTKLKIPLIHRALQLAQRPVSTSLPVT

SEQ ID NO: 811744 - protein, 375 aa, Homo sapiens [sequence omitted]

SEQ ID NO: 811745 - protein, 430 aa, Homo sapiens
MEFSSPSRENVPSLRVGCLQPLQEQKQWALDGAEYRTIQANCTGTGIGYNIIRVPMASCDFSIRTYTYADTPDDFQLHNFSLPEEDTKLKIPLIHRALQLAQRPVSLLASPWTSPTWLKTNGAVNGKGSLKGQPGDIYHQTWARYFVKFLDAYAEHKLQFWAVTAENEPSAGLLSGYPFQCLGFTPEHQRDFIARDLGPTLANSTHHNVRLLMLDDQRLLLPHWAKVVLTDPEAAKYVHGIAVHWYLDFLAPAKATLGETHRLFPNTMLFASEACVGSKFWEQSVRLGSWDRGMQYSHSIITNLLYHVVGWTDWNLALNPEGGPNWVRNFVDSPIIVDITKDTFYKQPMFYHLGHFSKFIPEGSQRVGLVASQKNDLDAVALMHPDGSAVVVVLNRSSKDVPLTIKDPAVGFLETISPGYSIHTYLWRRQ

SEQ ID NO: 811746 - protein, 356 aa, Homo sapiens
ISRYEEYTAEEDTKLKIPLIHRALQLAQRPVSLLASPWTSPTWLKTNGAVNGKGSLKGQPGDIYHQTWARYFVKFLDAYAEHKLQFWAVTAENEPSAGLLSGYPFQCLGFTPEHQRDFIARDLGPTLANSTHHNVRLLMLDDQRLLLPHWAKVVLTDPEAAKYVHGIAVHWYLDFLAPAKATLGETHRLFPNTMLFASEACVGSKFWEQSVRLGSWDRGMQYSHSIITNLLYHVVGWTDWNLALNPEGGPNWVRNFVDSPIIVDITKDTFYKQPMFYHLGHFSKFIPEGSQRVGLVASQKNDLDAVALMHPDGSAVVVVLNRSSKDVPLTIKDPAVGFLETISPGYSIHTYLWRRQ

SEQ ID NO: 811747 - protein, 218 aa, Homo sapiens [sequence omitted]

SEQ ID NO: 811748 - protein, 163 aa, Homo sapiens [sequence omitted]

SEQ ID NO: 811749 - protein, 463 aa, Homo sapiens
MEFSSPSREECPKPLSRVSIMAGSLTGLLLLQAVSWASGARPCIPKSFGYSSVVCVCNATYCDSFDPPTFPALGTFSRYESTRSGRRMELSMGPIQANHTGTGLLLTLQPEQKFQKVKGFGGAMTDAAALNILALSPPAQNLLLKSYFSEEGIGYNIIRVPMASCDFSIRTYTYADTPDDFQLHNFSLPEEDTKLKIPLIHRALQLAQRPVSLLASPWTSPTWLKTNGAVNGKGSLKGQPGDIYHQTWARYFVKFLDAYAEHKLQFWAVTAENEPSAGLLSGYPFQCLGFTPEHQRDFIARDLGPTLANSTHHNVRLLMLDDQRLLLPHWAKVVLTDPEAAKYVHGIAVHWYLDFLAPAKATLGETHRLFPNTMLFASEACVGSKFWEQSVRLGSWDRGMQYSHSIITNLLYHVVGWTDWNLALNPEGGPNWVRNFVDSPIIVDITKDTFYKQPMFYHLGHFR

SEQ ID NO: 811750 - protein, 165 aa, Homo sapiens
SRGSRLRLDTRSRVAGEQSVRLGSWDRGMQYSHSIITNLLYHVVGWTDWNLALNPEGGPNWVRNFVDSPIIVDITKDTFYKQPMFYHLGHFSKFIPEGSQRVGLVASQKNDLDAVALMHPDGSAVVVVLNRSSKDVPLTIKDPAVGFLETISPGYSIHTYLWRRQ

SEQ ID NO: 811751 - protein, 140 aa, Homo sapiens
TWTLSADNSIITNLLYHVVGWTDWNLALNPEGGPNWVRNFVDSPIIVDITKDTFYKQPMFYHLGHFSKFIPEGSQRVGLVASQKNDLDAVALMHPDGSAVVVVLNRSSKDVPLTIKDPAVGFLETISPGYSIHTYLWRRQ

SEQ ID NO: 811752 - protein, 352 aa, Homo sapiens
MEFSSPSREECPKPLSRVSIMAGSLTGLLLLQAVSWASGARPCIPKSFGYSSVVCVCNATYCDSFDPPTFPALGTFSRYESTRSGRRMELSMGPIQANHTGTGLLLTLQPEQKFQKVKGFGGAMTDAAALNILALSPPAQNLLLKSYFSEEGIGYNIIRVPMASCDFSIRTYTYADTPDDFQLHNFSLPEEDTKLKIPLIHRALQLAQRPVSLLASPWTSPTWLKTNGAVNGKGSLKGQPGDIYHQTWARYFVKFLDAYAEHKLQFWAVTAENEPSAGLLSGYPFQCLGFTPEHQRDFIARDLGPTLANSTHHNVRLLMLDDQRLLLPHWAKVVLTDPEAAKTPKGDPLDHQ

SEQ ID NO: 811753 - protein, 160 aa, Homo sapiens
MEFSSPSREECPKPLSRVSIMAGSLTGLLLLQAVSWASGARPCIPKSFGYSSVVCVCNATYCDSFDPPTFPALGTFSRYESTRSGRRMELSMGPIQANHTGTGLLLTLQPEQKFQKVKGFGGAMTDAAALNILALSPPAQNLLLKSYFSEEGEEEGDKMT

SEQ ID NO: 811754 - protein, 56 aa, Homo sapiens
QTAHVLPPWPLQVSGGRAPPFHTRPIISYIGWLTSLYTTREQEGVQGGTSEEAHPS

SEQ ID NO: 811755 - protein, 1091 aa, Homo sapiens
MAAGCLLALTLTLFQSLLIGPSSEEPFPSAVTIKSWVDKMQEDLVTLAKTASGVNQLVDIYEKYQDLYTVEPNNARQLVEIAARDIEKLLSNRSKALVSLALEAEKVQAAHQWREDFASNEVVYYNAKDDLDPEKNDSEPGSQRIKPVFIEDANFGRQISYQHAAVHIPTDIYEGSTIVLNELNWTSALDEVFKKNREEDPSLLWQVFGSATGLARYYPASPWVDNSRTPNKIDLYDVRRRPWYIQGAASPKDMLILVDVSGSVSGLTLKLIRTSVSEMLETLSDDDFVNVASFNSNAQDVSCFQHLVQANVRNKKVLKDAVNNITAKGITDYKKGFSFAFEQLLNYNVSRANCNKIIMLFTDGGEERAQEIFNKYNKDKKVRVFRFSVGQHNYERGPIQWMACENKGYYYEIPSIGAIRINTQEYLDVLGRPMVLAGDKAKQVQWTNVYLDALELGLVITGTLPVFNITGQFENKTNLKNQLILGVMGVDVSLEDIKRLTPRFTLCPNGYYFAIDPNGYVLLHPNLQPKNPKSQEPVTLDFLDAELENDIKVEIRNKMIDGESGEKTFRTLVKSQDERYIDKGNRTYTWTPVNGTDYSLALVLPTYSFYYIKAKLEETITQARSKKGKMKDSETLKPDNFEESGYTFIAPRDYCNDLKISDNNTEFLLNFNEFIDRKTPNNPSCNADLINRVLLDAGFTNELVQNYWSKQKNIKGVKARFVVTDGGITRVYPKEAGENWQENPETYEDSFYKRSLDNDNYVFTAPYFNKSGPGAYESGIMVSKAVEIYIQGKLLKPAVVGIKIDVNSWIENFTKTSIRDPCAGPVCDCKRNSDVMDCVILDDGGFLLMANHDDYTNQIGRFFGEIDPSLMRHLVNISVYAFNKSYDYQSVCEPGAAPKQGAGHRSAYVPSVADILQIGWWATAAAWSILQQFLLSLTFPRLLEAVEMEDDDFTASLSKQSCITEQTQYFFDNDSKSFSGVLDCGNCSRIFHGEKLMNTNLIFIMVESKGTCPCDTRLLIQAEQTSDGPNPCDMVKQPRYRKGPDVCFDNNVLEDYTDCGGVSGLNPSLWYIIGIQFLLLWLVSGSTHRLL

SEQ ID NO: 811756 - protein, 377 aa, Homo sapiens
FSISYIAERLEHKTPFRPSWDHSIKSWVDKMQEDLVTLAKTASGVNQLVDIYEKYQDLYTVEPNNARQLVEIAARDIEKLLSNRSKALVRLALEAEKVQAAHQWREDFASNEVVYYNAKDDLDPEKNDSEPGSQRIKPVFIEDANFGRQISYQHAAVHIPTDIYEGSTIVLNELNWTSALDEVFKKNREEDPSLLWQVFGSATGLARYYPASPWVDNSRTPNKIDLYDVRRRPWYIQGAASPKDMLILVDVSGSVSGLTLKLIRTSVSEMLETLSDDDFVNVASFNSNAQDVSCFQHLVQANVRNKKVLKDAVNNITAKGITDYKKGFSFAFEQLLNYNVSRANCNKIIMLFTDGGEERAQEIFNKYNKDKKVSVIL

SEQ ID NO: 811757 - protein, 448 aa, Homo sapiens
FSISYIAERLEHKTPFRPSWDHSIKSWVDKMQEDLVTLAKTASGVNQLVDIYEKYQDLYTVEPNNARQLVEIAARDIEKLLSNRSKALVRLALEAEKVQAAHQWREDFASNEVVYYNAKDDLDPEKNDSEPGSQRIKPVFIEDANFGRQISYQHAAVHIPTDIYEGSTIVLNELNWTSALDEVFKKNREEDPSLLWQVFGSATGLARYYPASPWVDNSRTPNKIDLYDVRRRPWYIQGAASPKDMLILVDVSGSVSGLTLKLIRTSVSEMLETLSDDDFVNVASFNSNAQDVSCFQHLVQANVRNKKVLKDAVNNITAKGITDYKKGFSFAFEQLLNYNVSRANCNKIIMLFTDGGEERAQEIFNKYNKDKKVRVFTFSVGQHNYDRGPIQWMACENKGYYYEIPSIGAIRINTQEYLDVLGRPMVLAGDKAKQVQWTNVYLDALVRG

SEQ ID NO: 811758 - protein, 281 aa, Homo sapiens
TTKVTTFPVKEDLETRSCFAQSKGYLDPEKNDSEPGSQRIKPVFIEDANFGRQISYQHAAVHIPTDIYEGSTIVLNELNWTSALDEVFKKNREEDPSLLWQVFGSATGLARYYPASPWVDNSRTPNKIDLYDVRRRPWYIQGAASPKDMLILVDVSGSVSGLTLKLIRTSVSEMLETLSDDDFVNVASFNSNAQDVSCFQHLVQANVRNKKVLKDAVNNITAKGITDYKKGFSFAFEQLLNYNVSRANCNKIIMLFTDGGEERAQEIFNKYNKDKKVSVIL

SEQ ID NO: 811759 - protein, 1075 aa, Homo sapiens
FSISYIAERLEHKTPFRPSWDHSIKSWVDKMQEDLVTLAKTASGVNQLVDIYEKYQDLYTVEPNNARQLVEIAARDIEKLLSNRSKALVSLALEAEKVQAAHQWREDFASNEVVYYNAKDDLDPEKNDSEPGSQRIKPVFIEDANFGRQISYQHAAVHIPTDIYEGSTIVLNELNWTSALDEVFKKNREEDPSLLWQVFGSATGLARYYPASPWVDNSRTPNKIDLYDVRRRPWYIQGAASPKDMLILVDVSGSVSGLTLKLIRTSVSEMLETLSDDDFVNVASFNSNAQDVSCFQHLVQANVRNKKVLKDAVNNITAKGITDYKKGFSFAFEQLLNYNVSRANCNKIIMLFTDGGEERAQEIFNKYNKDKKVRVFRFSVGQHNYERGPIQWMACENKGYYYEIPSIGAIRINTQEYLDVLGRPMVLAGDKAKQVQWTNVYLDALELGLVITGTLPVFNITGQFENKTNLKNQLILGVMGVDVSLEDIKRLTPRFTLCPNGYYFAIDPNGYVLLHPNLQPKNPKSQEPVTLDFLDAELENDIKVEIRNKMIDGESGEKTFRTLVKSQDERYIDKGNRTYTWTPVNGTDYSLALVLPTYSFYYIKAKLEETITQARYSETLKPDNFEESGYTFIAPRDYCNDLKISDNNTEFLLNFNEFIDRKTPNNPSCNADLINRVLLDAGFTNELVQNYWSKQKNIKGVKARFVVTDGGITRVYPKEAGENWQENPETYEDSFYKRSLDNDNYVFTAPYFNKSGPGAYESGIMVSKAVEIYIQGKLLKPAVVGIKIDVNSWIENFTKTSIRDPCAGPVCDCKRNSDVMDCVILDDGGFLLMANHDDYTNQIGRFFGEIDPSLMRHLVNISVYAFNKSYDYQSVCEPGAAPKQGAGHRSAYVPSVADILQIGWWATAAAWSILQQFLLSLTFPRLLEAVEMEDDDFTASLSKQSCITEQTQYFFDNDSKSFSGVLDCGNCSRIFHGEKLMNTNLIFIMVESKGTCPCDTRLLIQAEQTSDGPNPCDMVKQPRYRKGPDVCFDNNVLEDYTDCGGVSGLNPSLWYIIGIQFLLLWLVSGSTHRLL

SEQ ID NO: 811760 - protein, 104 aa, Homo sapiens [sequence omitted]

SEQ ID NO: 811761 - protein, 104 aa, Homo sapiens [sequence omitted]

SEQ ID NO: 811762 - protein, 246 aa, Homo sapiens
PTWGDFRGATFAKCSELIAPPPSTRSRRPLAWKDTAVPPEDLRDRVGGGSSASTGGRKRRGWLVTRGWGGPRALGGCGEGESRQRAAGSSMEPAAGSSMEPSADWLATAAARGRVEEVRALLEAGALPNAPNSYGRRPIQVMMMGSARVAELLLLHGAEPNCADPATLTRPVHDAAREGFLDTLVVLHRAGARLDVRDAWGRLPVDLAEELGHRDVARYLRAAAGGTRGSNHARIDAAEGPSDIPD

SEQ ID NO: 811763 - protein, 104 aa, Homo sapiens [sequence omitted]

SEQ ID NO: 811764 - protein, 156 aa, Homo sapiens
MEPAAGSSMEPSADWLATAAARGRVEEVRALLEAGALPNAPNSYGRRPIQVMMMGSARVAELLLLHGAEPNCADPATLTRPVHDAAREGFLDTLVVLHRAGARLDVRDAWGRLPVDLAEELGHRDVARYLRAAAGGTRGSNHARIDAAEGPSDIPD

SEQ ID NO: 811765 - protein, 337 aa, Homo sapiens
PTWGDFRGATFAKCSELIAPPPSTRSRRPLAWKDTAVPPEDLRDRVGGGSSASTGGRKRRGWLVTRGWGGPRALGGCGEGESRQRAAGSSMEPAAGSSMEPSADWLATAAARGRVEEVRALLEAGALPNAPNSYGRRPIQVGRGSAAGAGDGGRLWRTKFAGELESGSASILRKKGRLPGEFSEGVCNHRPPPGDALGAWEAKEEECGATRVQISRMLRRSEGGNIFVLMEVMMMGSARVAELLLLHGAEPNCADPATLTRPVHDAAREGFLDTLVVLHRAGARLDVRDAWGRLPVDLAEELGHRDVARYLRAAAGGTRGSNHARIDAAEGPSDIPD

SEQ ID NO: 811766 - protein, 105 aa, Homo sapiens
MMMGSARVAELLLLHGAEPNCADPATLTRPVHDAAREGFLDTLVVLHRAGARLDVRDAWGRLPVDLAEELGHRDVARYLRAAAGGTRGSNHARIDAAEGPSDIPD

SEQ ID NO: 811767 - protein, 104 aa, Homo sapiens [sequence omitted]

SEQ ID NO: 811768 - protein, 228 aa, Homo sapiens
PTWGDFRGATFAKCSELIAPPPSTRSRRPLAWKDTAVPPEDLRDRVGGGSSASTGGRKRRGWLVTRGWGGPRALGGCGEGESRQRAAGSSMEPAAGSSMEPSADWLATAAARGRVEEVRALLEAGALPNAPNSYGRRPIQVMMMGSARVAELLLLHGAEPNCADPATLTRPVHDAAREGFLDTLVVLHRAGARLDVRDAWGRLPVDLAEELGHRDVARHPRLKEPERL

SEQ ID NO: 811769 - protein, 120 aa, Homo sapiens
MMGSARVAELLLLHGAEPNCADPATLTRPVHDAAREGFLDTLVVLHRAGARLDVRDAWGRLPVDLAEELGHRDVARYLRAAAGGTRGSNHARIDAAEGPSVTASIQVPGGEEGDFGSSYS

SEQ ID NO: 811770 - protein, 854 aa, Homo sapiens
MDFSMVAGAAAYNEKSGRITSLSLLFQKVFAQIFPQWRKGNTEECLPYKCSETGALGENYSWQIPINHNDFKILKNNERQLCEVLQNKFGCISTLVSPVQEGNSKSLQVFRKMLTPRIELSVWKDDLTTHAVDAVVNAANEDLLHGGGLALALVKAGGFEIQEESKQFVARYGKVSAGEIAVTGAGRLPCKQIIHAVGPRWMEWDKQGCTGKLQRAIVSILNYVIYKNTHIKTVAIPALSSGIFQFPLNLCTKTIVETIRVSLQGKPMMSNLKEIHLVSNEDPTVAAFKAASEFILGKSELGQETTPSFNAMVVNNLTLQIVQGHIEWQTADVIVNSVNPHDITVGPVAKSILQQAGVEMKSEFLATKAKQFQRSQLVLVTKGFNLFCKYIYHVLWHSEFPKPQILKHAMKECLEKCIEQNITSISFPALGTGNMEIKKETAAEILFDEVLTFAKDHVKHQLTVKFVIFPTDLEIYKAFSSEMAKRSKMLSLNNYSVPQSTREEKRENGLEARSPAINLMGFNVEEMCEAHAWIQRILSLQNHHIIENNHILYLGRKEHDILSQLQKTSSVSITEIISPGRTELEIEGARADLIEVVMNIEDMLCKVQEEMARKKERGLWRSLGQWTIQQQKTQDEMKENIIFLKCPVPPTQELLDQKKQFEKCGLQVLKVEKIDNEVLMAAFQRKKKMMEEKLHRQPVSHRLFQQVPYQFCNVVCRVGFQRMYSTPCDPKYGAGIYFTKNLKNLAEKAKKISAADKLIYVFEAEVLTGFFCQGHPLNIVPPPLSPGAIDGHDSVVDNVSSPETFVIFSGMQAIPQYLWTCTQEYVQSQDYSSGPMRPFAQHPWRGFASGSPVD

SEQ ID NO: 811771 - protein, 819 aa, Homo sapiens [sequence omitted]

SEQ ID NO: 811772 - protein, 854 aa, Homo sapiens; identical to SEQ ID NO: 811770

SEQ ID NO: 811773 - protein, 819 aa, Homo sapiens [sequence omitted]

SEQ ID NO: 811774 - protein, 819 aa, Homo sapiens [sequence omitted]

SEQ ID NO: 811775 - protein, 166 aa, Homo sapiens
MMEEKLHRQPVSHRLFQQVPYQFCNVVCRVGFQRMYSTPCDPKYGAGIYFTKNLKNLAEKAKKISAADKLIYVFEAEVLTGFFCQGHPLNIVPPPLSPGAIDGHDSVVDNVSSPETFVIFSGMQAIPQYLWTCTQEYVQSQDYSSGPMRPFAQHPWRGFASGSPVD

SEQ ID NO: 811776 - protein, 854 aa, Homo sapiens; identical to SEQ ID NO: 811770

SEQ ID NO: 811777 - protein, 815 aa, Homo sapiens
MDFSMVAGAAAYNEKSGRITSLSLLFQKVFAQIFPQWRKGNTEECLPYKCSETGALGENYSWQIPINHNDFKILKNNERQLCEVLQNKFGCISTLVSPVQEGNSKSLQVFRKMLTPRIELSVWKDDLTTHAVDAVVNAANEDLLHGGGLALALVKAGGFEIQEESKQFVARYGKVSAGEIAVTGAGRLPCKQIIHAVGPRWMEWDKQGCTGKLQRAIVSILNYVIYKNTHIKTVAIPALSSGIFQFPLNLCTKTIVETIRVSLQGKPMMSNLKEIHLVSNEDPTVAAFKAASEFILGKSELGQETTPSFNAMVVNNLTLQIVQGHIEWQTADVIVNSVNPHDITVGPVAKSILQQAGVEMKSEFLATKAKQFQRSQLVLVTKGFNLFCKYIYHVLWHSEFPKPQILKHAMKECLEKCIEQNITSISFPALGTGNMEIKKETAAEILFDEVLTFAKDHVKHQLTVKFVIFPTDLEIYKAFSSEMAKRSKMLSLNNYSVPQSTREEKRENGLEARSPAINLMGFNVEEMCEAHAWIQRILSLQNHHIIENNHILYLGRKEHDILSQLQKTSSVSITEIISPGRTELEIEGARADLIEVVMNIEDMLCKVQEEMARKKERGLWRSLGQWTIQQQKTQDEMKENIIFLKCPVPPTQELLDQKKQFEKCGLQVLKVEKIDNEVLMAAFQRKKKMMEEKLHRQPVSHRLFQQVPYQFCNVVCRVGFQRMYSTPCDPKYGAGIYFTKNLKNLAEKAKKISAADKLIYVFEAEVLTGFFCQGHPLNIVPPPLSPGAIDGHDSVVDNVSSPETFVIFSGMQAIP

SEQ ID NO: 811778 - protein, 786 aa, Homo sapiens
MDFSMVAGAAAYNEKSGRITSLSLLFQKVFAQIFPQWRKGNTEECLPYKCSETGALGENYSWQIPINHNDFKILKNNERQLCEVLQNKFGCISTLVSPVQEGNSKSLQVFRKMLTPRIELSVWKDDLTTHAVDAVVNAANEDLLHGGGLALALVKAGGFEIQEESKQFVARYGKVSAGEIAVTGAGRLPCKQIIHAVGPRWMEWDKQGCTGKLQRAIVSILNYVIYKNTHIKTVAIPALSSGIFQFPLNLCTKTIVETIRVSLQGKPMMSNLKEIHLVSNEDPTVAAFKAASEFILGKSELGQETTPSFNAMVVNNLTLQIVQGHIEWQTADVIVNSVNPHDITVGPVAKSILQQAGVEMKSEFLATKAKQFQRSQLVLVTKGFNLFCKYIYHVLWHSEFPKPQILKHAMKECLEKCIEQNITSISFPALGTGNMEIKKETAAEILFDEVLTFAKDHVKHQLTVKFVIFPTDLEIYKAFSSEMAKRSKMLSLNNYSVPQSTREEKRENGLEARSPAINLMGFNVEEMCEAHAWIQRILSLQNHHIIENNHILYLGRKEHDILSQLQKTSSVSITEIISPGRTELEIEGARADLIEVVMNIEDMLCKVQEEMARKKERGLWRSLGQWTIQQQKTQDEMKENIIFLKCPVPPTQELLDQKKQFEKCGLQVLKVEKIDNEVLMAAFQRKKKMMEEKLHRQPVSHRLFQQVPYQFCNVVCRVGFQRMYSTPCETRFHHVGQADLQLLVIRPPQPPKVLGLQIQNTELAYTSPRTSKTWQRRPRKSLLQIS

SEQ ID NO: 811779 - protein, 738 aa, Homo sapiens
MDFSMVAGAAAYNEKSGRITSLSLLFQKVFAQIFPQWRKGNTEECLPYKCSETGALGENYSWQIPINHNDFKILKNNERQLCEVLQNKFGCISTLVSPVQEGNSKSLQVFRKMLTPRIELSVWKDDLTTHAVDAVVNAANEDLLHGGGLALALVKAGGFEIQEESKQFVARYGKVSAGEIAVTGAGRLPCKQIIHAVGPRWMEWDKQGCTGKLQRAIVSILNYVIYKNTHIKTVAIPALSSGIFQFPLNLCTKTIVETIRVSLQGKPMMSNLKEIHLVSNEDPTVAAFKAASEFILGKSELGQETTPSFNAMVVNNLTLQIVQGHIEWQTADVIVNSVNPHDITVGPVAKSILQQAGVEMKSEFLATKAKQFQRSQLVLVTKGFNLFCKYIYHVLWHSEFPKPQILKHAMKECLEKCIEQNITSISFPALGTGNMEIKKETAAEILFDEVLTFAKDHVKHQLTVKFVIFPTDLEIYKAFSSEMAKRSKMLSLNNYSVPQSTREEKRENGLEARSPAINLMGFNVEEMCEAHAWIQRILSLQNHHIIENNHILYLGRKEHDILSQLQKTSSVSITEIISPGRTELEIEGARADLIEVVMNIEDMLCKVQEEMARKKERGLWRSLGQWTIQQQKTQDEMKENIIFLKCPVPPTQELLDQKKQFEKCGLQVLKVEKIDNEVLMAAFQRKKKMMEEKLHRQPVSHRLFQQVPYQFCNVVCRVGFQRMYSTPCEIGSHCVAPG

SEQ ID NO: 811780 - protein, 745 aa, Homo sapiens
MDFSMVAGAAAYNEKSGRITSLSLLFQKVFAQIFPQWRKGNTEECLPYKCSETGALGENYSWQIPINHNDFKILKNNERQLCEVLQNKFGCISTLVSPVQEGNSKSLQVFRKMLTPRIELSVWKDDLTTHAVDAVVNAANEDLLHGGGLALALVKAGGFEIQEESKQFVARYGKVSAGEIAVTGAGRLPCKQIIHAVGPRWMEWDKQGCTGKLQRAIVSILNYVIYKNTHIKTVAIPALSSGIFQFPLNLCTKTIVETIRVSLQGKPMMSNLKEIHLVSNEDPTVAAFKAASEFILGKSELGQETTPSFNAMVVNNLTLQIVQGHIEWQTADVIVNSVNPHDITVGPVAKSILQQAGVEMKSEFLATKAKQFQRSQLVLVTKGFNLFCKYIYHVLWHSEFPKPQILKHAMKECLEKCIEQNITSISFPALGTGNMEIKKETAAEILFDEVLTFAKDHVKHQLTVKFVIFPTDLEIYKAFSSEMAKRSKMLSLNNYSVPQSTREEKRENGLEARSPAINLMGFNVEEMCEAHAWIQRILSLQNHHIIENNHILYLGRKEHDILSQLQKTSSVSITEIISPGRTELEIEGARADLIEVVMNIEDMLCKVQEEMARKKERGLWRSLGQWTIQQQKTQDEMKENIIFLKCPVPPTQELLDQKKQFEKCGLQVLKVEKIDNEVLMAAFQRKKKMMEEKLHRQPVSHRLFQQVPYQFCNVVCRVGFQRMYSTPCGRCQCLIIGATLWNLVS

SEQ ID NO: 811781 - protein, 219 aa, Homo sapiens
MDFSMVAGAAAYNEKSETGALGENYSWQIPINHNDFKILKNNERQLCEVLQNKFGCISTLVSPVQEGNSKSLQVFRKMLTPRIELSVWKDDLTTHAVDAVVNAANEDLLHGGGLALALVKAGGFEIQEESKQFVARYGKVSAGEIAVTGAGRLPCKQIIHAVGPRWMEWDKQGCTGKLQRAIVSILNYVIYKNTHIKTVVELPLIWFSSVSPPKSHVKL

SEQ ID NO: 811782 - protein, 97 aa, Homo sapiens
PEEERSRELRRWWLGHQREAGVAQAAGAGTDLERRKRGRKVVLSGWGLPGIRRPAVEPQGSTGQICLPGCLSYAESLAQGGGFSYWPRYLNGMEDRS

SEQ ID NO: 811783 - protein, 97 aa, Homo sapiens; identical to SEQ ID NO: 811782

SEQ ID NO: 811784 - protein, 587 aa, Homo sapiens
MATAAYEQLKLHITPEKFYVEACDDGADDVLTIDRVSTEVTLAVKKDVPPSAVTRPIFGILGTIHLVAGNYLIVITKKIKVGEFFSHVVWKATDFDVLSYKKTMLHLTDIQLQDNKTFLAMLNHVLNVDGFYFSTTYDLTHTLQRLSNTSPEFQEMSLLERADQRFVWNGHLLRELSAQPEVHRFALPVLHGFITMHSCSINGKYFDWILISRRSCFRAGVRYYVRGIDSEGHAANFVETEQIVHYNGSKASFVQTRGSIPVFWSQRPNLKYKPLPQISKVANHMDGFQRHFDSQVIIYGKQVIINLINQKGSEKPLEQTFATMVSSLGSGMMRYIAFDFHKECKNMRWDRLSILLDQVAEMQDELSYFLVDSAGQVVANQEGVFRSNCMDCLDRTNVIQSLLARRSLQAQLQRLGVLHVGQKLEEQDEFEKIYKNAWADNANACAKQYAGTGALKTDFTRTGKRTHLGLIMDGWNSMIRYYKNNFSDGFRQDSIDLFLGNYSVDELESHSPLSVPRDWKFLALPIIMVVAFSMCIICLLMAGDTWTETLAYVLFWGVASIGTFFIILYNGKDFVDAPRLVQKEKID

SEQ ID NO: 811785 - protein, 90 aa, Homo sapiens
VKFAVLPGFLLKDLPPPRLKVPKNQKPPTLEKDFEFALMDLKEVADHGNADTIHHSRDCRYAARGPGAGELTDINDGVAVTKGMTVSQRK

SEQ ID NO: 811786 - protein, 587 aa, Homo sapiens; identical to SEQ ID NO: 811784

SEQ ID NO: 811787 - protein, 264 aa, Homo sapiens
MVSSLGSGMMRYIAFDFHKECKNMRWDRLSILLDQVAEMQDELSYFLVDSAGQVVANQEGVFRSNCMDCLDRTNVIQSLLARRSLQAQLQRLGVLHVGQKLEEQDEFEKIYKNAWADNANACAKQYAGTGALKTDFTRTGKRTHLGLIMDGWNSMIRYYKNNFSDGFRQDSIDLFLGNYSVDELESHSPLSVPRDWKFLALPIIMVVAFSMCIICLLMAGDTWTETLAYVLFWGVASIGTFFIILYNGKDFVDAPRLVQKEKID

SEQ ID NO: 811788 - protein, 587 aa, Homo sapiens; identical to SEQ ID NO: 811784

SEQ ID NO: 811789 - protein, 215 aa, Homo sapiens
MATAAYEQLKLHITPEKFYVEACDDGADDVLTIDRVSTEVTLAVKKDVPPSAVTRPIFGILGTIHLVAGNYLIVITKKIKVGEFFSHVVWKATDFDVLSYKKTMLHLTDIQLQDNKTFLAMLNHVLNVDGFYFSTTYDLTHTLQRLSNTSPEFQEMSLLERADQRFVWNGHLLRELSAQPEVQSVCAFPGLTWLYYHAFMFYLRENTLTGFSSKE

SEQ ID NO: 811790 - protein, 186 aa, Homo sapiens
MATAAYEQLKLHITPEKFYVEACDDGADDVLTIDRVSTEVTLAVKKDVPPSAVTRPIFGILGTIHLVAGNYLIVITKKIKVGEFFSHVVWKATDFDVLSYKKTMLHLTDIQLQDNKTFLAMLNHVLNVDGFYFSTTYDLTHTLQRLSNTSPEFQEMSLLERADQRFVWNGHLLRELSAQPEVMYTK

SEQ ID NO: 811791 - protein, 111 aa, Homo sapiens
MATAAYEQLKLHITPEKFYVEACDDGADDVLTIDRVSTEVTLAVKKDVPPSAVTRPIFGILGTIHLVAGNYLIVITKKIKVGEFFSHVVWKATDFDVLSYKKTMLHLTDIQ

SEQ ID NO: 811792 - protein, 194 aa, Homo sapiens
MATAAYEQLKLHITPEKFYVEACDDGADDVLTIDRVSTEVTLAVKKDVPPSAVTRPIFGILGTIHLVAGNYLIVITKKIKVGEFFSHVVWKATDFDVLSYKKTMLHLTDIQFSTTYDLTHTLQRLSNTSPEFQEMSLLERADQRFVWNGHLLRELSAQPEVQSVCAFPGLTWLYYHAFMFYLRENTLTGFSSKE

SEQ ID NO: 811793 - protein, 98 aa, Homo sapiens
IRCKGRRLHCIFTVPVVLQFTLLPGVSMASVGIAIYTSMMTSDNYYYTHSIWHILLAGSAALLLPPPDQPAEPWACSQKFPCHYQICKNDREELYAVT

SEQ ID NO: 811794 - protein, 771 aa, Homo sapiens [sequence omitted]

SEQ ID NO: 811795 - protein, 771 aa, Homo sapiens [sequence omitted]

SEQ ID NO: 811796 - protein, 771 aa, Homo sapiens [sequence omitted]

SEQ ID NO: 811797 - protein, 771 aa, Homo sapiens [sequence omitted]

SEQ ID NO: 811798 - protein, 693 aa, Homo sapiens
RLGSEAWVVCASTLLHRRWRYRHFRSGAPPVINPLGTSFPDDTAVQPSFQVGVPLSTAPRSNASVNVSHPAPGDWFVAAHLPPSSQKIELKGLAPTCAYVFQPELLVTRVVEISIMEPDVPLPQTLLSHPSYLKVFVPDYTRELLLELRDCVSNGSLGCPVRLTVGPVTLPSNFQKVLTCTGAPWPCRLLLPSPPWDRWLQVTAESLVGPLGTVAFSAVAALTACRPRSVTVQPLLQSSQNQSFNASSGLLSPSPDHQDLGRSGRVDRSPFCLTNYPVTREDMDVVSVHFQPLDRVSVRVCSDTPSVMRLRLNTGMDSGGSLTISLRANKTEMRNETVVVACVNAASPFLGFNTSLNCTTAFFQGYPLSLSAWSRRANLIIPYPETDNWYLSLQLMCPENAEDCEQAVVHVETTLYLVPCLNDCGPYGQCLLLRRHSYLYASCSCKAGWRGWSCTDNSTAQTVAQQRAATLLLTLSNLMFLAPIAVSVRRFFLVEASVYAYTMFFSTFYHACDQPGEAVLCILSYDTLQYCDFLGSGAAIWVTILCMARLKTVLKYVLFLLGTLVIAMSLQLDRRGMWNMLGPCLFAFVIMASMWAYRCGHRRQCYPTSWQRWAFYLLPGVSMASVGIAIYTSMMTSDNYYYTHSIWHILLAGSAALLLPPPDQPAEPWACSQKFPCHYQICKNDREELYAVT

SEQ ID NO: 811799 - protein, 795 aa, Homo sapiens
MGRAGTGTGGEAVAAVVAGPLLLLLLARPPPASAGYSGKSEVGLVSEHFSQAPQRLSFYSWYGSARLFRFRVPPDAVLLRWLLQVSRESGAACTDAEITVHFRSGAPPVINPLGTSFPDDTAVQPSFQVGVPLSTAPRSNASVNVSHPAPGDWFVAAHLPPSSQKIELKGLAPTCAYVFQPELLVTRVVEISIMEPDVPLPQTLLSHPSYLKVFVPDYTRELLLELRDCVSNGSLGCPVRLTVGPVTLPSNFQKVLTCTGAPWPCRLLLPSPPWDRWLQVTAESLVGPLGTVAFSAVAALTACRPRSVTVQPLLQSSQNQSFNASSGLLSPSPDHQDLGRSGRVDRSPFCLTNYPVTREDMDVVSVHFQPLDRVSVRVCSDTPSVMRLRLNTGMDSGGSLTISLRANKTEMRNETVVVACVNAASPFLGFNTSLNCTTAFFQGYPLSLSAWSRRANLIIPYPETDNWYLSLQLMCPENADLLGALVAAGLQITAPAFLWPLPQRDCEQAVVHVETTLYLVPCLNDCGPYGQCLLLRRHSYLYASCSCKAGWRGWSCTDNSTAQTVAQQRAATLLLTLSNLMFLAPIAVSVRRFFLVEASVYAYTMFFSTFYHACDQPGEAVLCILSYDTLQYCDFLGSGAAIWVTILCMARLKTVLKYVLFLLGTLVIAMSLQLDRRGMWNMLGPCLFAFVIMASMWAYRCGHRRQCYPTSWQRWAFYLLPGVSMASVGIAIYTSMMTSDNYYYTHSIWHILLAGSAALLLPPPDQPAEPWACSQKFPCHYQICKNDREELYAVT

SEQ ID NO: 811800 - protein, 732 aa, Homo sapiens [sequence omitted]

SEQ ID NO: 811801 - protein, 695 aa, Homo sapiens
MGRAGTGTGGEAVAAVVAGPLLLLLLARPPPASAGYSGKSEVGLVSEHFSQAPQRLSFYSWYGSARLFRFRVPPDAVLLRWLLQVSRESGAACTDAEITVHFRSGAPPVINPLGTSFPDDTAVQPSFQVGVPLSTAPRSNASVNVSHPAPGDWFVAAHLPPSSQKIELKGLAPTCAYVFQPELLVTRVVEISIMEPDVPLPQTLLSHPSYLKVFVPDYTRELLLELRDCVSNGSLGCPVRLTVGPVTLPSNFQKVLTCTGAPWPCRLLLPSPPWDRWLQVTAESLVGPLGTVAFSAVAALTACRPRSVTVQPLLQSSQNQSFNASSGLLSPSPDHQDLGRSGRVDRSPFCLTNYPVTREDMDVVSVHFQPLDRVSVRVCSDTPSVMRLRLNTGMDSGGSLTISLRANKTEMRNETVVVACVNAASPFLGFNTSLNCTTAFFQGYPLSLSAWSRRANLIIPYPETDNWYLSLQLMCPENAEDCEQAVVHVETTLYLVPCLNDCGPYGQCLLLRRHSYLYASCSCKAGWRGWSCTDNSTAQTVAQQRAATLLLTLSNLMFLAPIAVSVRRFFLVEASVYAYTMFFSTFYHACDQPGEAVLCILSYDTLQYCDFLGSGAAIWVTILCMARLKTVLKYVLFLLGTLVIAMSLQLDRRGMWNMLGPCLFAFVIMASMWVRSRAGWHCCPGARRREPGPLL

SEQ ID NO: 811802 - protein, 311 aa, Homo sapiens
MAALGVLESDLPSAVTLLKNLQEQVMAVTAQVKSLTQKVQAGAYPTEKGLSFLEVKDQLLLMYLMDLTHLILDKASGGSLQGHDAVLRLVEIRTVLEKLRPLDQKLKYQIDKLIKTAVTGSLSENDPLRFKPHPSNMMSKLSSEDEEEDEAEDDQSEASGKKSVKGVSKKYVPPRLVPVHYDETEAEREKKRLERAKRRALSSSVIRELKEQYSDAPEEIRDARHPHVTRQSQEDQHRINYEESMMVRLSVSKREKGRRKRANVMSSQLHSLTHFSDISALTGGTVHLDEDQNPIKKRKKIPQKGRKKKGQ

SEQ ID NO: 811803 - protein, 155 aa, Homo sapiens
PQHELFLFSLFLDNPAYFHHVDETEAEREKKRLERAKRRALSSSVIRELKEQYSDAPEEIRDARHPHVTRQSQEDQHRINYEESMMVRLSVSKREKGRRKRANVMSSQLHSLTHFSDISALTGGTVHLDEDQNPIKKRKKIPQKGRKKKGFRRRR

SEQ ID NO: 811804 - protein, 315 aa, Homo sapiens
MAALGVLESDLPSAVTLLKNLQEQVMAVTAQVKSLTQKVQAGAYPTEKGLSFLEVKDQLLLMYLMDLTHLILDKASGGSLQGHDAVLRLVEIRTVLEKLRPLDQKLKYQIDKLIKTAVTGSLSENDPLRFKPHPSNMMSKLSSEDEEEDEAEDDQSEASGKKSVKGVSKKYVPPRLVPVHYDETEAEREKKRLERAKRRALSSSVIRELKEQYSDAPEEIRDARHPHVTRQSQEDQHRINYEESMMVRLSVSKREKGRRKRANVMSSQLHSLTHFSDISALTGGTVHLDEDQNPIKKRKKIPQKGRKKKGFRRRR

SEQ ID NO: 811805 - protein, 315 aa, Homo sapiens; identical to SEQ ID NO: 811804

SEQ ID NO: 811806 - protein, 311 aa, Homo sapiens; identical to SEQ ID NO: 811802

SEQ ID NO: 811807 - protein, 300 aa, Homo sapiens
MAALGVLESDLPSAVTLLKNLQEQVMAVTAQVKSLTQKVQAGAYPTEKGLSFLEVKDQLLLMYLMDLTHLILDKASGGSLQGHDAVLRLVEIRTVLEKLRPLDQKLKYQIDKLIKTAVTGSLSENDPLRFKPHPSNMMSKLSSEDEEEDEAEDDQSEASGKKSVKGVSKKYVPPRLVPVHYDETEAEREKKRLERAKRRALSSSVIRELKEQYSDAPEEIRDARHPHVTRQSQEDQHRINYEESMMVRLSVSKREKGRRKRANVMSSQLHSLTHFSDISALTGGTVHLDEVRLRYGCSRM

SEQ ID NO: 811808 - protein, 326 aa, Homo sapiens
MAALGVLESDLPSAVTLLKNLQEQVMAVTAQVKSLTQKVQAGAYPTEKGLSFLEVKDQLLLMYLMDLTHLILDKASGGSLQGHDAVLRLVEIRTVLEKLRPLDQKLKYQIDKLIKTAVTGSLSENDPLRFKPHPSNMMSKLSSEDEEEDEAEDDQSEASGKKSVKGVSKKYVPPRLVPVHYDETEAEREKKRLERAKRRALSSSVIRELKEQYSDAPEEIRDARHPHVTRQSQEDQHRINYEESMMVRLSVSKREKGRRKRANVMSSQLHSLTHFSDISALTGGTVHLDEDQNPIKKRKKIPQKGRKKKGFRGGGDYGCTSAATTL

SEQ ID NO: 811809 - protein, 300 aa, Homo sapiens; identical to SEQ ID NO: 811807

SEQ ID NO: 811810 - protein, 315 aa, Homo sapiens; identical to SEQ ID NO: 811804

SEQ ID NO: 811811 - protein, 290 aa, Homo sapiens
MAVTAQVKSLTQKVQAGAYPTEKGLSFLEVKDQLLLMYLMDLTHLILDKASGGSLQGHDAVLRLVEIRTVLEKLRPLDQKLKYQIDKLIKTAVTGSLSENDPLRFKPHPSNMMSKLSSEDEEEDEAEDDQSEASGKKSVKGVSKKYVPPRLVPVHYDETEAEREKKRLERAKRRALSSSVIRELKEQYSDAPEEIRDARHPHVTRQSQEDQHRINYEESMMVRLSVSKREKGRRKRANVMSSQLHSLTHFSDISALTGGTVHLDEDQNPIKKRKKIPQKGRKKKGFRRRR

SEQ ID NO: 811812 - protein, 274 aa, Homo sapiens
FLFCSTQGLSFLEVKDQLLLMYLMDLTHLILDKASGGSLQGHDAVLRLVEIRTVLEKLRPLDQKLKYQIDKLIKTAVTGSLSENDPLRFKPHPSNMMSKLSSEDEEEDEAEDDQSEASGKKSVKGVSKKYVPPRLVPVHYDETEAEREKKRLERAKRRALSSSVIRELKEQYSDAPEEIRDARHPHVTRQSQEDQHRINYEESMMVRLSVSKREKGRRKRANVMSSQLHSLTHFSDISALTGGTVHLDEDQNPIKKRKKIPQKGRKKKGFRRRR

SEQ ID NO: 811813 - protein, 278 aa, Homo sapiens
AHVPYGFEQQLVFHFQEAEDQLLLMYLMDLTHLILDKASGGSLQGHDAVLRLVEIRTVLEKLRPLDQKLKYQIDKLIKTAVTGSLSENDPLRFKPHPSNMMSKLSSEDEEEDEAEDDQSEASGKKSVKGVSKKYVPPRLVPVHYDETEAEREKKRLERAKRRALSSSVIRELKEQYSDAPEEIRDARHPHVTRQSQEDQHRINYEESMMVRLSVSKREKGRRKRANVMSSQLHSLTHFSDISALTGGTVHLDEDQNPIKKRKKIPQKGRKKKGFRRRR

SEQ ID NO: 811814 - protein, 273 aa, Homo sapiens
MKRSTSLYYAQARKDQLLLMYLMDLTHLILDKASGGSLQGHDAVLRLVEIRTVLEKLRPLDQKLKYQIDKLIKTAVTGSLSENDPLRFKPHPSNMMSKLSSEDEEEDEAEDDQSEASGKKSVKGVSKKYVPPRLVPVHYDETEAEREKKRLERAKRRALSSSVIRELKEQYSDAPEEIRDARHPHVTRQSQEDQHRINYEESMMVRLSVSKREKGRRKRANVMSSQLHSLTHFSDISALTGGTVHLDEDQNPIKKRKKIPQKGRKKKGFRRRR

SEQ ID NO: 811815 - protein, 179 aa, Homo sapiens
MMSKLSSEDEEEDEAEDDQSEASGKKSVKGVSKKYVPPRLVPVHYDETEAEREKKRLERAKRRALSSSVIRELKEQYSDAPEEIRDARHPHVTRQSQEDQHRINYEESMMVRLSVSKREKGRRKRANVMSSQLHSLTHFSDISALTGGTVHLDEDQNPIKKRKKIPQKGRKKKGFRRRR

SEQ ID NO: 811816 - protein, 151 aa, Homo sapiens
MAALGVLESDLPSAVTLLKNLQEQVMAVTAQVKSLTQKVQAGAYPTEKGLSFLEVKDQLLLMYLMDLTHLILDKASGGSLQGHDAVLRLVEIRTVLEKLRPLDQKLKYQIDKLIKTAVTGSLSENDPLRFKPHPSNMMSKVRGCSILLIFF

SEQ ID NO: 811817 - protein, 179 aa, Homo sapiens; identical to SEQ ID NO: 811815

SEQ ID NO: 811818 - protein, 770 aa, Homo sapiens
SLGFELTSVEKSLREWSRLSREVIAWLCPSSPNFILNFPPPPSASSVSMVQLFSSPFGYQSPSGHSEEEREGNMKSAKPQVNHSQHGESQRALSPLQSTLSSAASPSQAYETYIENGLICLKHKIRNIEKKKLKLEDYKDRLKSGEHLNPDQLEAVEKYEEVLHNLEFAKELQKTFSGLSLDLLKAQKKAQRREHMLKLEAEKKKLRTILQVQYVLQNLTQEHVQKDFKGGLNGAVYLPSKELDYLIKFSKLTCPERNESLNKHLKDLLSKLLNSGYFESIPVPKNAKEKEVPLEEEMLIQSEKKTQLSKTESVKESESLMEFAQPEIQPQEFLNRRYMTEVDYSNKQGEEQPWEADYARKPNLPKRWDMLTEPDGQEKKQESFKSWEASGKHQEVSKPAVSLEQRKQDTSKLRSTLPEEQKKQEISKSKPSPSQWKQDTPKSKAGYVQEEQKKQETPKLWPVQLQKEQDPKKQTPKSWTPSMQSEQNTTKSWTTPMCEEQDSKQPETPKSWENNVESQKHSLTSQSQISPKSWGVATASLIPNDQLLPRKLNTEPKDVPKPVHQPVGSSSTLPKDPVLRKEKLQDLMTQIQGTCNFMQESVLDFDKPSSAIPTSQPPSATPGSPVASKEQNLSSQSDFLQEPLQATSSPVTCSSNACLVTTDQASSGSETEFMTSETPEAAIPPGKQPSSLASPNPPMAKGSEQGFQSPPASSSSVTINTAPFQAMQTVFNVNAPLPPRKRNKEIKESPYSPGYNQSFTTASTQTPPQC

SEQ ID NO: 811819 - protein, 727 aa, Homo sapiens
PGAGRGSRGPRSVRFPQSPSGHSEEEREGNMKSAKPQVNHSQHGESQRALSPLQSTLSSAASPSQAYETYIENGLICLKHKIRNIEKKKLKLEDYKDRLKSGEHLNPDQLEAVEKYEEVLHNLEFAKELQKTFSGLSLDLLKAQKKAQRREHMLKLEAEKKKLRTILQVQYVLQNLTQEHVQKDFKGGLNGAVYLPSKELDYLIKFSKLTCPERNESLNKHLKDLLSKLLNSGYFESIPVPKNAKEKEVPLEEEMLIQSEKKTQLSKTESVKESESLMEFAQPEIQPQEFLNRRYMTEVDYSNKQGEEQPWEADYARKPNLPKRWDMLTEPDGQEKKQESFKSWEASGKHQEVSKPAVSLEQRKQDTSKLRSTLPEEQKKQEISKSKPSPSQWKQDTPKSKAGYVQEEQKKQETPKLWPVQLQKEQDPKKQTPKSWTPSMQSEQNTTKSWTTPMCEEQDSKQPETPKSWENNVESQKHSLTSQSQISPKSWGVATASLIPNDQLLPRKLNTEPKDVPKPVHQPVGSSSTLPKDPVLRKEKLQDLMTQIQGTCNFMQESVLDFDKPSSAIPTSQPPSATPGSPVASKEQNLSSQSDFLQEPLQATSSPVTCSSNACLVTTDQASSGSETEFMTSETPEAAIPPGKQPSSLASPNPPMAKGSEQGFQSPPASSSSVTINTAPFQAMQTVFNVNAPLPPRKRNKEIKESPYSPGYNQSFTTASTQTPPQC

SEQ ID NO: 811820 - protein, 773 aa, Homo sapiens
GGVGWVSGAAEAAGEDREGRGRRQEEETRVRGGAGPPPQRSCLPQALEGGPGLRQRRPRLPGESPSGHSEEEREGNMKSAKPQVNHSQHGESQRALSPLQSTLSSAASPSQAYETYIENGLICLKHKIRNIEKKKLKLEDYKDRLKSGEHLNPDQLEAVEKYEEVLHNLEFAKELQKTFSGLSLDLLKAQKKAQRREHMLKLEAEKKKLRTILQVQYVLQNLTQEHVQKDFKGGLNGAVYLPSKELDYLIKFSKLTCPERNESLNKHLKDLLSKLLNSGYFESIPVPKNAKEKEVPLEEEMLIQSEKKTQLSKTESVKESESLMEFAQPEIQPQEFLNRRYMTEVDYSNKQGEEQPWEADYARKPNLPKRWDMLTEPDGQEKKQESFKSWEASGKHQEVSKPAVSLEQRKQDTSKLRSTLPEEQKKQEISKSKPSPSQWKQDTPKSKAGYVQEEQKKQETPKLWPVQLQKEQDPKKQTPKSWTPSMQSEQNTTKSWTTPMCEEQDSKQPETPKSWENNVESQKHSLTSQSQISPKSWGVATASLIPNDQLLPRKLNTEPKDVPKPVHQPVGSSSTLPKDPVLRKEKLQDLMTQIQGTCNFMQESVLDFDKPSSAIPTSQPPSATPGSPVASKEQNLSSQSDFLQEPLQATSSPVTCSSNACLVTTDQASSGSETEFMTSETPEAAIPPGKQPSSLASPNPPMAKGSEQGFQSPPASSSSVTINTAPFQAMQTVFNVNAPLPPRKRNKEIKESPYSPGYNQSFTTASTQTPPQC

SEQ ID NO: 811821 - protein, 560 aa, Homo sapiens
SLGFELTSVEKSLREWSRLSREVIAWLCPSSPNFILNFPPPPSASSVSMVQLFSSPFGYQSPSGHSEEEREGNMKSAKPQVNHSQHGESQRALSPLQSTLSSAASPSQAYETYIENGLICLKHKIRNIEKKKLKLEDYKDRLKSGEHLNPDQLEAVEKYEEVLHNLEFAKELQKTFSGLSLDLLKAQKKAQRREHMLKLEAEKKKLRTILQVQYVLQNLTQEHVQKDFKGGLNGAVYLPSKELDYLIKFSKLTCPERNESLNKHLKDLLSKLLNSGYFESIPVPKNAKEKEVPLEEEMLIQSEKKTQLSKTESVKESESLMEFAQPEIQPQEFLNRRYMTEVDYSNKQGEEQPWEADYARKPNLPKRWDMLTEPDGQEKKQESFKSWEASGKHQEVSKPAVSLEQRKQDTSKLRSTLPEEQKKQEISKSKPSPSQWKQDTPKSKAGYVQEEQKKQETPKLWPVQLQKEQDPKKQTPKSWTPSMQSEQNTTKSWTTPMCEEQDSKQPETPKSWENNVESQKHSLTSQSQISPKSWGVATASLIPNDQLLPRKLNTEPKDVS

SEQ ID NO: 811822 - protein, 588 aa, Homo sapiens
SLGFELTSVEKSLREWSRLSREVIAWLCPSSPNFILNFPPPPSASSVSMVQLFSSPFGYQSPSGHSEEEREGNMKSAKPQVNHSQHGESQRALSPLQSTLSSAASPSQAYETYIENGLICLKHKIRNIEKKKLKLEDYKDRLKSGEHLNPDQLEAVEKYEEVLHNLEFAKELQKTFSGLSLDLLKAQKKAQRREHMLKLEAEKKKLRTILQVQYVLQNLTQEHVQKDFKGGLNGAVYLPSKELDYLIKFSKLTCPERNESLSVEDQMEQSSLYFWDLLEGSEKAVVGTTYKHLKDLLSKLLNSGYFESIPVPKNAKEKEVPLEEEMLIQSEKKTQLSKTESVKESESLMEFAQPEIQPQEFLNRRYMTEVDYSNKQGEEQPWEADYARKPNLPKRWDMLTEPDGQEKKQESFKSWEASGKHQEVSKPAVSLEQRKQDTSKLRSTLPEEQKKQEISKSKPSPSQWKQDTPKSKAGYVQEEQKKQETPKLWPVQLQKEQDPKKQTPKSWTPSMQSEQNTTKSWTTPMCEEQDSKQPETPKSWENNVESQKHSLTSQSQISPKSWGVATASLIPNDQLLPRKLNTEPKDVS

SEQ ID NO: 811823 - protein, 686 aa, Homo sapiens
SLGFELTSVEKSLREWSRLSREVIAWLCPSSPNFILNFPPPPSASSVSMVQLFSSPFGYQSPSGHSEEEREGNMKSAKPQVNHSQHGESQRALSPLQSTLSSAASPSQAYETYIENGLICLKHKIRNIEKKKLKLEDYKDRLKSGEHLNPDQLEAVEKYEEVLHNLEFAKELQKTFSGLSLDLLKAQKKAQRREHMLKLEAEKKKLRTILQVQYVLQNLTQEHVQKDFKGGLNGAVYLPSKELDYLIKFSKLTCPERNESLNKHLKDLLSKLLNSGYFESIPVPKNAKEKEVPLEEEMLIQSEKKTQLSKTESVKESESLMEFAQPEIQPQEFLNRRYMTEVDYSNKQGEEQPWEADYARKPNLPKRWDMLTEPDGQEKKQESFKSWEASGKHQEVSKPAVSLEQRKQDTSKLRSTLPEEQKKQEISKSKPSPSQWKQDTPKSKAGYVQEEQKKQETPKLWPVQLQKEQDPKKQTPKSWTPSMQSEQNTTKSWTTPMCEEQDSKQPETPKSWENNVESQKHSLTSQSQISPKSWGVATASLIPNDQLLPRKLNTEPKDVPKPVHQPVGSSSTLPKDPVLRKEKLQDLMTQIQGTCNFMQESVLDFDKPSSAIPTSQPPSATPGSPVASKEQNLSSQSDFLQEPLQVFNVNAPLPPRKRNKEIKESPYSPGYNQSFTTASTQTPPQC

SEQ ID NO: 811824 - protein, 630 aa, Homo sapiens
SLGFELTSVEKSLREWSRLSREVIAWLCPSSPNFILNFPPPPSASSVSMVQLFSSPFGYQSPSGHSEEEREGNMKSAKPQVNHSQHGESQRALSPLQSTLSSAASPSQAYETYIENGLICLKHKIRNIEKKKLKLEDYKDRLKSGEHLNPDQLEAVEKYEEVLHNLEFAKELQKTFSGLSLDLLKAQKKAQRREHMLKLEAEKKKLRTILQVQYVLQNLTQEHVQKDFKGGLNGAVYLPSKELDYLIKFSKLTCPERNESLRVSNGIVPSQRYNHKSFLTDSYMTEVDYSNKQGEEQPWEADYARKPNLPKRWDMLTEPDGQEKKQESFKSWEASGKHQEVSKPAVSLEQRKQDTSKLRSTLPEEQKKQEISKSKPSPSQWKQDTPKSKAGYVQEEQKKQETPKLWPVQLQKEQDPKKQTPKSWTPSMQSEQNTTKSWTTPMCEEQDSKQPETPKSWENNVESQKHSLTSQSQISPKSWGVATASLIPNDQLLPRKLNTEPKDVPKPVHQPVGSSSTLPKDPVLRKEKLQDLMTQIQGTCNFMQESVLDFDKPSSAIPTSQPPSATPGSPVASKEQNLSSQSDFLQEPLQVFNVNAPLPPRKRNKEIKESPYSPGYNQSFTTASTQTPPQ

SEQ ID NO: 811825 - protein, 424 aa, Homo sapiens
MATLSFVFLLLGAVSWPPASASGQEFWPGQSAADILSGAASRRRYLLYDVNPPEGFNLRRDVYIRIASLLKTLLKTEEWVLVLPPWGRLYHWQSPDIHQVRIPWSEFFDLPSLNKNIPVIEYEQFIAESGGPFIDQVYVLQSYAEGWKEGTWEEKVDERPCIDQLLYSQDKHEYYRGWFWGYEETRGLNVSCLSVQGSASIVAPLLLRNTSARSVMLDRAENLLHDHYGGKEYWDTRRSMVFARHLREVGDEFRSRHLNSTDDADRIPFQEDWMKMKVKLGSALGGPYLGVHLRRKDFIWGHRQDVPSLEGAVRKIRSLMKTHRLDKVFVATDAVRKEYEELKKLLPEMVRFEPTWEELELYKDGGVAIIDQWICAHARCLPTSLSAESGSGGFQRFFCPKYSVSEQMVACVHSGHFHTVCLLV

SEQ ID NO: 811826 - protein, 380 aa, Homo sapiens
MATLSFVFLLLGAVSWPPASASGQEFWPGQSAADILSGAASRRRYLLYDVNPPEGFNLRRDVYIRIASLLKTLLKTEEWVLVLPPWGRLYHWQSPDIHQVRIPWSEFFDLPSLNKNIPVIEYEQFIAESGGPFIDQVYVLQSYAEGWKEGTWEEKVDERPCIDQLLYSQDKHEYYRGWFWGYEETRGLNVSCLSVQGSASIVAPLLLRNTSARSVMLDRAENLLHDHYGGKEYWDTRRSMVFARHLREVGDEFRSRHLNSTDDADRIPFQEDWMKMKVKLGSALGGPYLGVHLRRKDFIWGHRQDVPSLEGAVRKIRSLMKTHRLDKVFVATDAVRKEYEELKKLLPEMVRFEPTWEELELYKDGGVAIIDQWICAHASS

SEQ ID NO: 811827 - protein, 113 aa, Homo sapiens
MASLPRNRCSSGFELESVNLFPGSLCEPLLFVKENLPPPSPPQARLQLAIAVGGSWIPSLLPTVKYTPQIRRYFSLMSFCSLTVGIKALSEPWCGGQTAACLCLSHNHPTRPG

SEQ ID NO: 811828 - protein, 438 aa, Homo sapiens
AGSAWPPGAMATLSFVFLLLGAVSWPPASASGQEFWPGQSAADILSGAASRRRYLLYDVNPPEGFNLRRDVYIRIASLLKTLLKTEEWVLVLPPWGRLYHWQSPDIHQVRIPWSEFFDLPSLNKNIPVIEYEQFIAESGGPFIDQVYVLQSYAEGWKEGTWEEKVDERPCIDQLLYSQDKHEYYRGWFWGYEETRGLNVSCLSVQGSASIVAPLLLRNTSARSVMLDRAENLLHDHYGGKEYWDTRRSMVFARHLREVGDEFRSRHLNSTDDADRIPFQEDWMKMKVKLGSALGGPYLGVHLRRKDFIWGHRQDVPSLEGAVRKIRSLMKTHRLDKVFVATDAVRKEYEELKKLLPEMVRFEPTWEELELYKDGGVAIIDQWICAHARFFIGTSVSTFSFRIHEEREILGLDPKTTYNRFCGDQEKACEQPTHWKITY

SEQ ID NO: 811829 - protein, 424 aa, Homo sapiens; identical to SEQ ID NO: 811825

SEQ ID NO: 811830 - protein, 214 aa, Homo sapiens
MLDRAENLLHDHYGGKEYWDTRRSMVFARHLREVGDEFRSRHLNSTDDADRIPFQEDWMKMKVKLGSALGGPYLGVHLRRKDFIWGHRQDVPSLEGAVRKIRSLMKTHRLDKVFVATDAVRKEYEELKKLLPEMVRFEPTWEELELYKDGGVAIIDQWICAHARFFIGTSVSTFSFRIHEEREILGLDPKTTYNRFCGDQEKACEQPTHWKITY

SEQ ID NO: 811831 - protein, 424 aa, Homo sapiens; identical to SEQ ID NO: 811825

SEQ ID NO: 811832 - protein, 185 aa, Homo sapiens [sequence omitted]

SEQ ID NO: 811833 - protein, 209 aa, Homo sapiens [sequence omitted]

SEQ ID NO: 811834 - protein, 424 aa, Homo sapiens; identical to SEQ ID NO: 811825

SEQ ID NO: 811835 - protein, 353 aa, Homo sapiens
MATLSFVFLLLGAVSWPPASASGQEFWPGQSAADILSGAASRRRYLLYDVNPPEGFNLRRDVYIRIASLLKTLLKTEEWVLVLPPWGRLYHWQSPDIHQVRIPWSEFFDLPSLNKNIPVIEYEQFIAESGGPFIDQVYVLQSYAEGWKEGTWEEKVDERPCIDQLLYSQDKHEYYRGWFWGYEETRGLNVSCLSVQGSASIVAPLLLRNTSARSVMLDRAENLLHDHYGGKEYWDTRRSMVFARHLREVGDEFRSRHLNSTDDADRIPFQEDWMKMKVKLGSALGGPYLGVHLRRKDFIWGHRQDVPSLEGAVRKIRSLMKTHRLDKVFVATDAVRKETVPFSSVAFSRLRAV

SEQ ID NO: 811836 - protein, 178 aa, Homo sapiens
MATLSFVFLLLGAVSWPPASASGQEFWPGQSAADILSGAASRRRYLLYDVNPPEGFNLRRDVYIRIASLLKTLLKTEEWVLVLPPWGRLYHWQSPDIHQVRIPWSEFFDLPSLNKNIPVIEYEQFIAESGGPFIDQVYVLQSYAEGWKEGTWEEKVDERPCIDQLLYSQDKHEYYSPH

SEQ ID NO: 811837 - protein, 255 aa, Homo sapiens
MATLSFVFLLLGAVSWPPASASGQEFWPGQSAADILSGAASRRRYLLYDVNPPEGFNLRRDVYIRIASLLKTLLKTEEWVLVLPPWGRLYHWQSPDIHQVRIPWSEFFDLPSLNKNIPVIEYEQFIAESGGPFIDQVYVLQSYAEGWKEGTWEEKVDERPCIDQLLYSQDKHEYYRGWFWGYEETRGLNVSCLSVQGSASIVAPLLLRNTSARSVMLDRAENLLHDHYGGKEYWDVSVSSGAFFSVSVCCPLFSF

SEQ ID NO: 811838 - protein, 485 aa, Homo sapiens [sequence omitted]

SEQ ID NO: 811839 - protein, 485 aa, Homo sapiens [sequence omitted]

SEQ ID NO: 811840 - protein, 114 aa, Homo sapiens
  misc_feature (4)..(4): Xaa can be any naturally occurring amino acid
  misc_feature (10)..(10): Xaa can be any naturally occurring amino acid
CCFXRVHGMXRPLGREAPVVSDTEATILCLLAWAGLAAGDRVYIHPFHLVIHNESTCEQLAKANAGKPKDPTFIPAPIQAKTSPVDEKALQDLFFVFWWRRLTPNTGLGGGPGQ

SEQ ID NO: 811841 - protein, 467 aa, Homo sapiens
MRKRAPQSEMAPAGVSLRATILCLLAWAGLAAGDRVYIHPFHLVIHNESTCEQLAKANAGKPKDPTFIPAPIQAKTSPVDEKALQDQLVLVAAKLDTEDKLRAAMVGMLANFLGFRIYGMHSELWGVVHGATVLSPTAVFGTLASLYLGALDHTADRLQAILGVPWKDKNCTSRLDAHKVLSALQAVQGLLVAQGRADSQAQLLLSTVVGVFTAPGLHLKQPFVQGLALYTPVVLPRSLDFTELDVAAEKIDRFMQAVTGWKTGCSLTGASVDSTLAFNTYVHFQGKMKGFSLLAEPQEFWVDNSTSVSVPMLSGMGTFQHWSDIQDNFSVTQVPFTESACLLLIQPHYASDLDKVEGLTFQQNSLNWMKKLSPRTIHLTMPQLVLQGSYDLQDLLAQAELPAILHTELNLHELEADEREPTESTQQLNKPEVLEVTLNRPFLFAVYDQSATALHFLGRVANPLSTA

SEQ ID NO: 811842 - protein, 485 aa, Homo sapiens [sequence omitted]

SEQ ID NO: 811843 - protein, 485 aa, Homo sapiens [sequence omitted]

SEQ ID NO: 811844 - protein, 485 aa, Homo sapiens [sequence omitted]

SEQ ID NO: 811845 - protein, 485 aa, Homo sapiens [sequence omitted]

SEQ ID NO: 811846 - protein, 500 aa, Homo sapiens
THASADAWGVLQQKGMRKRAPQSEMAPAGVSLRATILCLLAWAGLAAGDRVYIHPFHLVIHNESTCEQLAKANAGKPKDPTFIPAPIQAKTSPVDEKALQDQLVLVAAKLDTEDKLRAAMVGMLANFLGFRIYGMHSELWGVVHGATVLSPTAVFGTLASLYLGALDHTADRLQAILGVPWKDKNCTSRLDAHKVLSALQAVQGLLVAQGRADSQAQLLLSTVVGVFTAPGLHLKQPFVQGLALYTPVVLPRSLDFTELDVAAEKIDRFMQAVTGWKTGCSLTGASVDSTLAFNTYVHFQGKMKGFSLLAEPQEFWVDNSTSVSVPMLSGMGTFQHWSDIQDNFSVTQVPFTESACLLLIQPHYASDLDKVEGLTFQQNSLNWMKKLSPRTIHLTMPQLVLQGSYDLQDLLAQAELPAILHTELNLQKLSNDRIRVGEVLNSIFFELEADEREPTESTQQLNKPEVLEVTLNRPFLFAVYDQSATALHFLGRVANPLSTA

SEQ ID NO: 811847 - protein, 467 aa, Homo sapiens
MRKRAPQSEMAPAGVSLRATILCLLAWAGLAAGDRVYIHPFHLVIHNESTCEQLAKANAGKPKDPTFIPAPIQAKTSPVDEKALQDQLVLVAAFLGFRIYGMHSELWGVVHGATVLSPTAVFGTLASLYLGALDHTADRLQAILGVPWKDKNCTSRLDAHKVLSALQAVQGLLVAQGRADSQAQLLLSTVVGVFTAPGLHLKQPFVQGLALYTPVVLPRSLDFTELDVAAEKIDRFMQAVTGWKTGCSLTGASVDSTLAFNTYVHFQGKMKGFSLLAEPQEFWVDNSTSVSVPMLSGMGTFQHWSDIQDNFSVTQVPFTESACLLLIQPHYASDLDKVEGLTFQQNSLNWMKKLSPRTIHLTMPQLVLQGSYDLQDLLAQAELPAILHTELNLQKLSNDRIRVGEVLNSIFFELEADEREPTESTQQLNKPEVLEVTLNRPFLFAVYDQSATALHFLGRVANPLSTA

SEQ ID NO: 811848 - protein, 485 aa, Homo sapiens [sequence omitted]

SEQ ID NO: 811849 - protein, 455 aa, Homo sapiens
MRKRAPQSEMAPAGVSLRATILCLLAWAGLAAGDRVYIHPFHLVIHNESTCEQLAKANAGKPKDPTFIPAPIQAKTSPVDEKALQDQLVLVAAKLDTEDKLRAAMVGMLANFLGFRIYGMHSELWGVVHGATVLSPTAVFGTLASLYLGALDHTADRLQAILGVPWKDKNCTSRLDAHKVLSALQAVQGLLVAQGRADSQAQLLLSTVVGVFTAPGLHLKQPFVQGLALYTPVVLPRSLDFTELDVAAEKIDRFMQAVTGWKTGCSLTGASVDSTLAFNTYVHFQGKMKGFSLLAEPQEFWVDNSTSVSVPMLSGMGTFQHWSDIQDNFSVTQVPFTESACLLLIQPHYASDLDKVEGLTFQQNSLNWMKKLSPRTIHLTMPQLVLQGSYDLQDLLAQAELPAILHTELNLQKLSNDRIRVGEVLNSIFFELEADEREPTESTSLPTFSFLMSRL

SEQ ID NO: 811850 - protein, 207 aa, Homo sapiens
LSPVWISGKMKGFSLLAEPQEFWVDNSTSVSVPMLSGMGTFQHWSDIQDNFSVTQVPFTESACLLLIQPHYASDLDKVEGLTFQQNSLNWMKKLSPRTIHLTMPQLVLQGSYDLQDLLAQAELPAILHTELNLQKLSNDRIRVGEVLNSIFFELEADEREPTESTQQLNKPEVLEVTLNRPFLFAVYDQSATALHFLGRVANPLSTA

SEQ ID NO: 811851 - protein, 122 aa, Homo sapiens
  misc_feature (1)..(1): Xaa can be any naturally occurring amino acid
XRHSWMKKLSPRTIHLTMPQLVLQGSYDLQDLLAQAELPAILHTELNLQKLSNDRIRVGEVLNSIFFELEADEREPTESTQQLNKPEVLEVTLNRPFLFAVYDQSATALHFLGRVANPLSTA

SEQ ID NO: 811852 - protein, 172 aa, Homo sapiens
MRKRAPQSEMAPAGVSLRATILCLLAWAGLAAGDRVYIHPFHLVIHNESTCEQLAKANAGKPKDPTFIPAPIQAKTSPVDEKALQDQLVLVAAKLDTEDKLRAAMVGMLANFLGFRIYGMHSELWGVVHGATVLSPTAVFGTLASLYLGALDHTADRLQAILGRVANPLSTA

SEQ ID NO: 811853 - protein, 73 aa, Homo sapiens
DELQVFFGPMLRVLHQLIDACRRCRRGFRPSPASGTFHQRSTMTVPWRPGKRRITYKEEEDLTLQPRSCLQCS

SEQ ID NO: 811854 - protein, 174 aa, Homo sapiens
IRHERHEPVPASSAPESLVGLQEGKSTEQGNHDQLKELYSAGNLTVLATDPLLHQDPVQLDFHFRLTSQTSAHWHGLLCDRRLFLDIPYQALDQGNRESLTATLEYVEEKTNVDSVFVNFQNDRNDRGALLRAFSYMGFEVVRPDHPALPPLDNVIFMVYPLERDVGHLPSEPP

SEQ ID NO: 811855 - protein, 130 aa, Homo sapiens
MTDTAEAVPKFEEMFASRFTENDKEYQEYLKRPPESPPIVEEWNSRAVTAFCLEPGFAWMAMVTHPLGSTATGPKGGSGLSGSLLWLLPLVVAPAFLGISAQRSRAEPRVLGVARRCLSPLRSRSIPAWE

SEQ ID NO: 811856 - protein, 118 aa, Homo sapiens
MTDTAEAVPKFEEMFASRFTENDKEYQEYLKRPPESPPIVEEWNSRAGGNQRNRGNRLQDNRQFRGRDNRWGWPSDNRSNQWHGRSWGNNYPQHRQEPYYPQQYGHYGYNQRPPYGYY

SEQ ID NO: 811857 - protein, 118 aa, Homo sapiens; identical to SEQ ID NO: 811856

SEQ ID NO: 811858 - protein, 118 aa, Homo sapiens; identical to SEQ ID NO: 811856

SEQ ID NO: 811859 - protein, 118 aa, Homo sapiens; identical to SEQ ID NO: 811856

SEQ ID NO: 811860 - protein, 134 aa, Homo sapiens
MTDTAEAVPKFEEMFASRFTENDKEYQEYLKRPPESPPIVEEWNSRAGGNQRNRGNRLQDNRQFRGRDNRWGWPSDNRSNQWHGRSWGNNYPQHRQEPYYPQQYGHYGYNQRPRSVSPSIGYACIPPSLLRLFF

SEQ ID NO: 811861 - protein, 295 aa, Homo sapiens
DPLPECDVRITMASYPYRQGCPGAAGQAPGAPPGSYYPGPPNSGGQYGSGLPPGGGYGGPAPGGPYGPPAGGGPYGHPNPGMFPSGTPGGPYGGAAPGGPYGQPPPSSYGAQQPGLYGQGGAPPNVDPEAYSWFQSVDSDHSGYISMKELKQALVNCNWSSFNDETCLMMINMFDKTKSGRIDVYGFSALWKFIQQWKNLFQQYDRDRSGSISYTELQQALSQMGYNLSPQFTQLLVSRYCPRSANPAMQLDRFIQVCTQLQVLTEAFREKDTAVQGNIRLSFEDFVTMTASRML

SEQ ID NO: 811862 - protein, 295 aa, Homo sapiens; identical to SEQ ID NO: 811861

SEQ ID NO: 811863 - protein, 295 aa, Homo sapiens; identical to SEQ ID NO: 811861

SEQ ID NO: 811864 - protein, 295 aa, Homo sapiens; identical to SEQ ID NO: 811861

SEQ ID NO: 811865 - protein, 295 aa, Homo sapiens; identical to SEQ ID NO: 811861

SEQ ID NO: 811866 - protein, 293 aa, Homo sapiens
HASDHASTHACGYPYRQGCPGAAGQAPGAPPGSYYPGPPNSGGQYGSGLPPGGGYGGPAPGGPYGPPAGGGPYGHPNPGMFPSGTPGGPYGGAAPGGPYGQPPPSSYGAQQPGLYGQGGAPPNVDPEAYSWFQSVDSDHSGYISMKELKQALVNCNWSSFNDETCLMMINMFDKTKSGRIDVYGFSALWKFIQQWKNLFQQYDRDRSGSISYTELQQALSQMGYNLSPQFTQLLVSRYCPRSANPAMQLDRFIQVCTQLQVLTEAFREKDTAVQGNIRLSFEDFVTMTASRML

SEQ ID NO: 811867 - protein, 348 aa, Homo sapiens
LGPHRSRLALAWAPQPPKALMGALGGGISHDRRFRVLVPPISFGASDKNPGFRTHPTLHQSHQETLVVAGPQGCPGAAGQAPGAPPGSYYPGPPNSGGQYGSGLPPGGGYGGPAPGGPYGPPAGGGPYGHPNPGMFPSGTPGGPYGGAAPGGPYGQPPPSSYGAQQPGLYGQGGAPPNVDPEAYSWFQSVDSDHSGYISMKELKQALVNCNWSSFNDETCLMMINMFDKTKSGRIDVYGFSALWKFIQQWKNLFQQYDRDRSGSISYTELQQALSQMGYNLSPQFTQLLVSRYCPRSANPAMQLDRFIQVCTQLQVLTEAFREKDTAVQGNIRLSFEDFVTMTASRML

SEQ ID NO: 811868 - protein, 295 aa, Homo sapiens
LVRGRVLIGRGMASYPLPAGCPGAAGQAPGAPPGSYYPGPPNSGGQYGSGLPPGGGYGGPAPGGPYGPPAGGGPYGHPNPGMFPSGTPGGPYGGAAPGGPYGQPPPSSYGAQQPGLYGQGGAPPNVDPEAYSWFQSVDSDHSGYISMKELKQALVNCNWSSFNDETCLMMINMFDKTKSGRIDVYGFSALWKFIQQWKNLFQQYDRDRSGSISYTELQQALSQMGYNLSPQFTQLLVSRYCPRSANPAMQLDRFIQVCTQLQVLTEAFREKDTAVQGNIRLSFEDFVTMTASRML

SEQ ID NO: 811869 - protein, 285 aa, Homo sapiens
MLKCTLVSEGCPGAAGQAPGAPPGSYYPGPPNSGGQYGSGLPPGGGYGGPAPGGPYGPPAGGGPYGHPNPGMFPSGTPGGPYGGAAPGGPYGQPPPSSYGAQQPGLYGQGGAPPNVDPEAYSWFQSVDSDHSGYISMKELKQALVNCNWSSFNDETCLMMINMFDKTKSGRIDVYGFSALWKFIQQWKNLFQQYDRDRSGSISYTELQQALSQMGYNLSPQFTQLLVSRYCPRSANPAMQLDRFIQVCTQLQVLTEAFREKDTAVQGNIRLSFEDFVTMTASRML

SEQ ID NO: 811870 - protein, 412 aa, Homo sapiens
LGPHRSRLALAWAPQPPKALMGALGGGISHDRRFRVLVPPISFGASDKNPGFRTHPTLHQSHQETLVVAGATSELVVTTDLVQHRHFACRKVNPEKTQNLPEVTRQLGSRAEVRTRAIFRCLFPSVSCFSQEYRSKGCPGAAGQAPGAPPGSYYPGPPNSGGQYGSGLPPGGGYGGPAPGGPYGPPAGGGPYGHPNPGMFPSGTPGGPYGGAAPGGPYGQPPPSSYGAQQPGLYGQGGAPPNVDPEAYSWFQSVDSDHSGYISMKELKQALVNCNWSSFNDETCLMMINMFDKTKSGRIDVYGFSALWKFIQQWKNLFQQYDRDRSGSISYTELQQALSQMGYNLSPQFTQLLVSRYCPRSANPAMQLDRFIQVCTQLQVLTEAFREKDTAVQGNIRLSFEDFVTMTASRML

SEQ ID NO: 811871 - protein, 388 aa, Homo sapiens
LGPHRSRLALAWAPQPPKALMGALGGGISHDRRFRVLVPPISFGASDKNPGFRTHPTLHQSHQETLVVAGATSELVVTTDLVQHRHFACRKVNPEKTQNLPEVTRQLGSRAEGCPGAAGQAPGAPPGSYYPGPPNSGGQYGSGLPPGGGYGGPAPGGPYGPPAGGGPYGHPNPGMFPSGTPGGPYGGAAPGGPYGQPPPSSYGAQQPGLYGQGGAPPNVDPEAYSWFQSVDSDHSGYISMKELKQALVNCNWSSFNDETCLMMINMFDKTKSGRIDVYGFSALWKFIQQWKNLFQQYDRDRSGSISYTELQQALSQMGYNLSPQFTQLLVSRYCPRSANPAMQLDRFIQVCTQLQVLTEAFREKDTAVQGNIRLSFEDFVTMTASRML

SEQ ID NO: 811872 - protein, 295 aa, Homo sapiens; identical to SEQ ID NO: 811861

SEQ ID NO: 811873 - protein, 332 aa, Homo sapiens
DPLPECDVRITMASYPYRQGCPGAAGQAPGAPPGSYYPGPPNSGGQYGSGLPPGGGYGGPAPGGPYGPPAGGGPYGHPNPGMFPSGTPGGPYGGAAPGGPYGQPPPSSYGAQQPGLYGQGIHAEGAAPVWDMLSLWQREGAGELARMHNASYSFSGSGAPPNVDPEAYSWFQSVDSDHSGYISMKELKQALVNCNWSSFNDETCLMMINMFDKTKSGRIDVYGFSALWKFIQQWKNLFQQYDRDRSGSISYTELQQALSQMGYNLSPQFTQLLVSRYCPRSANPAMQLDRFIQVCTQLQVLTEAFREKDTAVQGNIRLSFEDFVTMTASRML

SEQ ID NO: 811874 - protein, 149 aa, Homo sapiens
MKELKQALVNCNWSSFNDETCLMMINMFDKTKSGRIDVYGFSALWKFIQQWKNLFQQYDRDRSGSISYTELQQALSQMGYNLSPQFTQLLVSRYCPRSANPAMQLDRFIQVCTQLQVLTEAFREKDTAVQGNIRLSFEDFVTMTASRML

SEQ ID NO: 811875 - protein, 295 aa, Homo sapiens; identical to SEQ ID NO: 811861

SEQ ID NO: 811876 - protein, 295 aa, Homo sapiens; identical to SEQ ID NO: 811861

SEQ ID NO: 811877 - protein, 126 aa, Homo sapiens
  misc_feature (8)..(8): Xaa can be any naturally occurring amino acid
  misc_feature (19)..(19): Xaa can be any naturally occurring amino acid
  misc_feature (26)..(26): Xaa can be any naturally occurring amino acid
IASFVSSXSFVQSWDGRPXAPLGWPXKQYQHIIPWSGQVFPDHVGSHKALAVGPIFWGMIQSEPQLLVSRYCPRSANPAMQLDRFIQVCTQLQVLTEAFREKDTAVQGNIRLSFEDFVTMTASRML

SEQ ID NO: 811878 - protein, 413 aa, Homo sapiens
CLVLVEPLHRDGHRMSSKYPRSVRRCLPLWALTLEAALILLFYFFTHYDASLEDQKGLVASYQVGQDLTVMAAIGLGFLTSSFRRHSWSSVAFNLFMLALGVQWAILLDGFLSQFPSGKVVITLFSIRLATMSALSVLISVDAVLGKVNLAQLVVMVLVEVTALGNLRMVISNIFNTDYHMNMMHIYVFAAYFGLSVAWCLPKPLPEGTEDKDQTATIPSLSAMLGALFLWMFWPSVNSALLRSPIQRKNAMFNTYYALAVSVVTAISGSSLAHPQRKISKTYVHSAVLAGGVAVGTSCHLIPSPWLAMVLGLVAGLISVGGAKYLPVCCNRVLGIHHISIMGSIFSLLGLLGEIIYIVLLVLDTVWSRQWHDWLPGPPQHWGTQLGHRDSSHVWSPDRFAPKSQNMESTSCG

SEQ ID NO: 811879 - protein, 413 aa, Homo sapiens; identical to SEQ ID NO: 811878

SEQ ID NO: 811880 - protein, 413 aa, Homo sapiens; identical to SEQ ID NO: 811878

SEQ ID NO: 811881 - protein, 335 aa, Homo sapiens
CLVLVEPLHRDGHRMSSKYPRSVRRCLPLWALTLEAALILLFYFFTHYDASLEDQKGLVASYQVGQDLTVMAAIGLGFLTSSFRRHSWSSVAFNLFMLALGVQWAILLDGFLSQFPSGKVVITLFSIRLATMSALSVLISVDAVLGKVNLAQLVVMVLVEVTALGNLRMVISNIFNTDYHMNMMHIYVFAAYFGLSVAWCLPKPLPEGTEDKDQTATIPSLSAMLGALFLWMFWPSVNSALLRSPIQRKNAMFNTYYALAVSVVTAISGSSLAHPQRKISKTYVHSAVLAGGVAVGTSCHLIPSPWLAMVLGLVAGLISVGGAKYLPFPHLAVGF

SEQ ID NO: 811882 - protein, 67 aa, Homo sapiens
LLSYLDRHKLDVVSCGKSTVRVQKAICSGFFRNAAKKDPQEGYRTLIDQQVVYIHPSSALFNRQPEW

SEQ ID NO: 811883 - protein, 400 aa, Homo sapiens
QTRIFDPAPPGSRKVVIATNIAETSLTIDGIYYVVDPGFVKQKVYNSKTGIDQLVVTPISQAQAKQRAGRAGRTGPGKCYRLYTERAYRDEMLTTNVPEIQRTNLASTVLSLKAMGINDLLSFDFMDAPPMETLITAMEQLYTLGALDDEGLLTRLGRRMAEFPLEPMLCKMLIMSVHLGCSEEMLTIVSMLSVQNVFYRPKDKQALADQKKAKFHQTEGDHLTLLAVYNSWKNNKFSNPWCYENFIQARSLRRAQDIRKQMLGIMDRHKLDVVSCGKSTVRVQKAICSGFFRNAAKKDPQEGYRTLIDQQVVYIHPSSALFNRQPEWVVYHELVLTTKEYMREVTTIDPRWLVEFAPAFFKVSDPTKLSKQKKQQRLEPLYNRYEEPNAWRISRAFRRR

SEQ ID NO: 811884 - protein, 241 aa, Homo sapiens
MAEFPLEPMLCKMLIMSVHLGCSEEMLTIVSMLSVQNVFYRPKDKQALADQKKAKFHQTEGDHLTLLAVYNSWKNNKFSNPWCYENFIQARSLRRAQDIRKQMLGIMDRHKLDVVSCGKSTVRVQKAICSGFFRNAAKKDPQEGYRTLIDQQVVYIHPSSALFNRQPEWVVYHELVLTTKEYMREVTTIDPRWLVEFAPAFFKVSDPTKLSKQKKQQRLEPLYNRYEEPNAWRISRAFRRR

SEQ ID NO: 811885 - protein, 76 aa, Homo sapiens
RWGLALSPSLECSGAISAHCNLGLLGSTILLPLPPKALGLQLRATVLCTEEAPYLAEHQAGLARPGFGTYGKLVWM

SEQ ID NO: 811886 - protein, 400 aa, Homo sapiens; identical to SEQ ID NO: 811883

SEQ ID NO: 811887 - protein, 349 aa, Homo sapiens
QTRIFDPAPPGSRKVVIATNIAETSLTIDGIYYVVDPGFVKQKVYNSKTGIDQLVVTPISQAQAKQRAGRAGRTGPGKCYRLYTERAYRDEMLTTNVPEIQRTNLASTVLSLKAMGINDLLSFDFMDAPPMETLITAMEQLYTLGALDDEGLLTRLGRRMAEFPLEPMLCKMLIMSVHLGCSEEMLTIVSMLSVQNVFYRPKDKQALADQKKAKFHQTEGDHLTLLAVYNSWKNNKFSNPWCYENFIQARSLRRAQDIRKQMLGIMDRHKLDVVSCGKSTVRVQKAICSGFFRNAAKKDPQEGYRTLIDQQVVYIHPSSALFNRQPEWDLYSRFSEWKSGTNCSSLSGT

SEQ ID NO: 811888 - protein, 327 aa, Homo sapiens
QTRIFDPAPPGSRKVVIATNIAETSLTIDGIYYVVDPGFVKQKVYNSKTGIDQLVVTPISQAQAKQRAGRAGRTGPGKCYRLYTERAYRDEMLTTNVPEIQRTNLASTVLSLKAMGINDLLSFDFMDAPPMETLITAMEQLYTLGALDDEGLLTRLGRRMAEFPLEPMLCKMLIMSVHLGCSEEMLTIVSMLSVQNVFYRPKDKQALADQKKAKFHQTEGDHLTLLAVYNSWKNNKFSNPWCYENFIQARSLRRAQDIRKQMLGIMDRHKLDVVSCGKSTVRVQKAICSGFFRNAAKKDPQEGYRTLIDQQVVYIHPSSALFNRQPE

SEQ ID NO: 811889 - protein, 335 aa, Homo sapiens
QTRIFDPAPPGSRKVVIATNIAETSLTIDGIYYVVDPGFVKQKVYNSKTGIDQLVVTPISQAQAKQRAGRAGRTGPGKCYRLYTERAYRDEMLTTNVPEIQRTNLASTVLSLKAMGINDLLSFDFMDAPPMETLITAMEQLYTLGALDDEGLLTRLGRRMAEFPLEPMLCKMLIMSVHLGCSEEMLTIVSMLSVQNVFYRPKDKQALADQKKAKFHQTEGDHLTLLAVYNSWKNNKFSNPWCYENFIQARSLRRAQDIRKQMLGIMDRHKLDVVSCGKSTVRVQKAICSGFFRNAAKKDPQEGYRTLIDQQVVYIHPSSALFNRQPEWTVPMGHV

SEQ ID NO: 811890 - protein, 138 aa, Homo sapiens
STRIPVPVGLHQQAPVLRVPGILGVGWVGEFLPTGRYGRTGRHTFATLGGSGRGRAGVSPRAAVAGRAAVMDQVMQFVEPSRQFVKDSIRLVKRCTKPDRKEFQKIAMATAIGFAIMGFIGFFVKLIHIPINNIIVGG

SEQ ID NO: 811891 - protein, 119 aa, Homo sapiens
GGRGAEQPTHASGSARHRPFLGVRSRPCRPPRGSAPRAPGAASPPDARGPGGVCCSSSARGFQRRSFPRLGREGALIFDREDGCWLPAGLDSDTFPIFAHRPLVGGAVPFGRHYQIMGG

SEQ ID NO: 811892 - protein, 153 aa, Homo sapiens
LDKVLKTAYILSIAVNEATFTKSSSERVSNISETDVRISLSVNPLTLPLTSTRISMSLGDAAPWMYLVFCVHHKGQSYLEFYYYIKSWVDKMQEDLVTLAKTASGVNQLVDIYEKYQDLYTVEPNNARQLVEIAARDIEKLLSNRSKALVVSV

SEQ ID NO: 811893 - protein, 105 aa, Homo sapiens
MAAGCLLALTLTLFQSLLIGPSSEEPFPSAVTIKSWVDKMQEDLVTLAKTASGVNQLVDIYEKYQDLYTVEPNNARQLVEIAARDIEKLLSNRSKALVVSVSRSK

SEQ ID NO: 811894 - protein, 136 aa, Homo sapiens
MAAGCLLALTLTLFQSLLIGPSSEEPFPSAVTIKSWVDKMQEDLVTLAKTASGVNQLVDIYEKYQDLYTVEPNNARQLVEIAARDIEKLLSNRSKALVKMKMKLKEKIYLRSSTWNRKIQRNKRFSVVFLKSLQLM

SEQ ID NO: 811895 - protein, 113 aa, Homo sapiens
MAAGCLLALTLTLFQSLLIGPSSEEPFPSAVTIKSWVDKMQEDLVTLAKTASGVNQLVDIYEKYQDLYTVEPNNARQLVEIAARDIEKLLSNRSKALVEATGGSAPTKQGNKQ

SEQ ID NO: 811896 - protein, 70 aa, Homo sapiens
EAAAGAMSGREGGKKKPLKQPKKQAKEMDEEDKAFKQKQKEEQKKLEELKAKAAGKGALATGGIKKSGKK

SEQ ID NO: 811897 - protein, 70 aa, Homo sapiens; identical to SEQ ID NO: 811896

SEQ ID NO: 811898 - protein, 518 aa, Homo sapiens
MTCPDKPGQLINWFICSLCVPRVRKLWSSRRPRTRRNLLLGTACAIYLGFLVSQVGRASLQHGQAAEKGPHRSRDTAEPSFPEIPLDGTLAPPESQGNGSTLQPNVVYITLRSKRSKPANIRGTVKPKRRKKHAVASAAPGQEALVGPSLQPQEAAREADAVAPGYAQGANLVKIGERPWRLVRVRECEPGAQTSCSPAPGRATLGSTARAPSWLSKDDIRRMRLLADSAVAGLRPVSSRSGARLLVLEGGAPGAVLRCGPSPCGLLKQPLDMSEVFAFHLDRILGLNRTLPSVSRKAEFIQDGRPCPIILWDASLSSASNDTHSSVKLTWGTYQQLLKQKCWQNGRVPKPESGCTEIHHHEWSKMALFDFLLQIYNRLDTNCCGFRPRKEDACVQNGLRPKCDDQGSAALAHIIQRKHDPRHLVFIDNKGFFDRSEDNLNFKLLEGIKEFPASAVSVLKSQHLRQKLLQSLFLDKVYWESQGGRQGIEKLIDVIEHRAKILITYINAHGVKVLPMNE

SEQ ID NO: 811899 - protein, 518 aa, Homo sapiens; identical to SEQ ID NO: 811898

SEQ ID NO: 811900 - protein, 518 aa, Homo sapiens; identical to SEQ ID NO: 811898

SEQ ID NO: 811901 - protein, 500 aa, Homo sapiens
MTCPDKPGQLINWFICSLCVPRVRKLWSSRRPRTRRNLLLGTACAIYLGFLVSQVGRASLQHGQAAEKGPHRSRDTAEPSFPEIPLDGTLAPPESQGNGSTLQPNVVYITLRSKRSKPANIRGTVKPKRRKKHAVASAAPGQEALVGPSLQPQEAAREADAVAPGYAQGANLVKIGERPWRLVRVRECEPGAQTSCSPAPGRATLGSTARAPSWLSKDDIRRMRLLADSAVAGLRPVSSRSGARLLVLEGGAPGAVLRCGPSPCGLLKQPLDMSEVFAFHLDRILGLNRTLPSVSRKAEFIQDGRPCPIILWDASLSSASNDTHSSVKLTWGTYQQLLKQKCWQNGRVPKPESGCTEIHHHEWSKMALFDFLLQIYNRLDTNCCGFRPRKEDACVQNGLRPDPRHLVFIDNKGFFDRSEDNLNFKLLEGIKEFPASAVSVLKSQHLRQKLLQSLFLDKVYWESQGGRQGIEKLIDVIEHRAKILITYINAHGVKVLPMNE

SEQ ID NO: 811902 - protein, 225 aa, Homo sapiens
MLLISETLQDGRPCPIILWDASLSSASNDTHSSVKLTWGTYQQLLKQKCWQNGRVPKPESGCTEIHHHEWSKMALFDFLLQIYNRLDTNCCGFRPRKEDACVQNGLRPKCDDQGSAALAHIIQRKHDPRHLVFIDNKGFFDRSEDNLNFKLLEGIKEFPASAVSVLKSQHLRQKLLQSLFLDKVYWESQGGRQGIEKLIDVIEHRAKILITYINAHGVKVLPMNE

SEQ ID NO: 811903 - protein, 243 aa, Homo sapiens
PVGGARCSSRSLRTRNRAAAGGGPESRDGRPCPIILWDASLSSASNDTHSSVKLTWGTYQQLLKQKCWQNGRVPKPESGCTEIHHHEWSKMALFDFLLQIYNRLDTNCCGFRPRKEDACVQNGLRPKCDDQGSAALAHIIQRKHDPRHLVFIDNKGFFDRSEDNLNFKLLEGIKEFPASAVSVLKSQHLRQKLLQSLFLDKVYWESQGGRQGIEKLIDVIEHRAKILITYINAHGVKVLPMNE

SEQ ID NO: 811904 - protein, 93 aa, Homo sapiens
LVIVSHRCHREVREDGCYGPSRAGYHSWGSRRQGLTQGRLPPLCVCQAFGAAGLSSDYPLAQFFTWARALRFADGPDEVHRATVAKLELKHRI

SEQ ID NO: 811905 - protein, 285 aa, Homo sapiens
MCVRSCFQSPRLQWVWRTAFLKHTQRRHQGSHRWTHLGGSTYRAVIFDMGGVLIPSPGRVAAEWEVQNRIPSGTILKALMEGGENGPWMRFMRAEITAEGFLREFGRLCSEMLKTSVPVDSFFSLLTSERVAKQFPVMTEAITQIRAKGLQTAVLSNNFYLPNQKSFLPLDRKQFDVIVESCMEGICKPDPRIYKLCLEQLGLQPSESIFLDDLGTNLKEAARLGIHTIKVNDPETAVKELEALLGFTLRVGVPNTRPVKKTMEIPKDSLQKYLKDLLGIQTTGL

SEQ ID NO: 811906 - protein, 107 aa, Homo sapiens
SLNPSMYQCIPLLHILLPIEWEVQNRIPSGTILKALMEGGENGPWMRFMRAEITAEGFLREFGRLCSEMLKTSVPVDSFFSLLTSERVAKQFPVMTEAMITPVCSCY

SEQ ID NO: 811907 - protein, 1128 aa, Homo sapiens
MCVRSCFQSPRLQWVWRTAFLKHTQRRHQGSHRWTHLGGSTYRAVIFDMGGVLIPSPGRVAAEWEVQNRIPSGTILKALMEGGENGPWMRFMRAEITAEGFLREFGRLCSEMLKTSVPVDSFFSLLTSERVAKQFPVMTEAITQIRAKGLQTAVLSNNFYLPNQKSFLPLDRKQFDVIVESCMEGICKPDPRIYKLCLEQLGLQPSESIFLDDLGTNLKEAARLGIHTIKVNDPETAVKELEALLGFTLRVGVPNTRPVKKTMEIPKDSLQKYLKDLLGIQTTGPLELLQFDHGQSNPTYYIRLANRDLVLRKKPPGTLLPSAHAIEREFRIMKALANAGVPVPNVLDLCEDSSVIGTPFYVMEYCPGLIYKDPSLPGLEPSHRRAIYTAMNTVLCKIHSVDLQAVGLEDYGKQGDYIPRQVRTWVKQYRASETSTIPAMERLIEWLPLHLPRQQRTTVVHGDFRLDNLVFHPEEPEVLAVLDWELSTLGDPLADVAYSCLAHYLPSSFPVLRGINDCDLTQLGIPAAEEYFRMYCLQMGLPPTENWNFYMAFSFFRVAAILQGVYKRSLTGQASSTYAEQTGKLTEFVSNLAWDFAVKEGFRVFKEMPFTNPLTRSYHTWARPQSQWCPTGSRSYSSVPEASPAHTSRGGLVISPESLSPPVRELYHRLKHFMEQRVYPAEPELQSHQASAARWSPSPLIEDLKEKAKAEGLWNLFLPLEADPEKKYGAGLTNVEYAHLCELMGTSLYAPEVCNCSAPDTGNMELLVRYGTEAQKARWLIPLLEGKARSCFAMTEPQVASSDATNIEASIREEDSFYVINGHKWWITGILDPRCQLCVFMGKTDPHAPRHRQQSVLLVPMDTPGIKIIRPLTVYGLEDAPGGHGEVRFEHVRVPKENMVLGPGRGFEIAQGRLGPGRIHHCMRLIGFSERALALMKARVKSRLAFGKPLVEQGTVLADIAQSRVEIEQARLLVLRAAHLMDLAGNKAAALDIAMIKMVAPSMASRVIDRAIQKTSLQEAWSLFQARRRGFAEGQGGSGTESGKLVFRLSVPGWAGTVTSLQPFSPSLSACGNLDTFWEASQGCGTCLLWQLQGSCLASLVSRGAATAGGGLETQDLGAWENGMQPTL

SEQ ID NO: 811908 - protein, 1059 aa, Homo sapiens
MCVRSCFQSPRLQWVWRTAFLKHTQRRHQGSHRWTHLGGSTYRAVIFDMGGVLIPSPGRVAAEWEVQNRIPSGTILKALMEGGENGPWMRFMRAEITAEGFLREFGRLCSEMLKTSVPVDSFFSLLTSERVAKQFPVMTEAITQIRAKGLQTAVLSNNFYLPNQKSFLPLDRKQFDVIVESCMEGICKPDPRIYKLCLEQLGLQPSESIFLDDLGTNLKEAARLGIHTIKVNDPETAVKELEALLGFTLRVGVPNTRPVKKTMEIPKDSLQKYLKDLLGIQTTGPLELLQFDHGQSNPTYYIRLANRDLVLRKKPPGTLLPSAHAIEREFRIMKALANAGVPVPNVLDLCEDSSVIGTPFYVMEYCPGLIYKDPSLPGLEPSHRRAIYTAMNTVLCKIHSVDLQAVGLEDYGKQGDYIPRQVRTWVKQYRASETSTIPAMERLIEWLPLHLPRQQRTTVVHGDFRLDNLVFHPEEPEVLAVLDWELSTLGDPLADVAYSCLAHYLPSSFPVLRGINDCDLTQLGIPAAEEYFRMYCLQMGLPPTENWNFYMAFSFFRVAAILQGVYKRSLTGQASSTYAEQTGKLTEFVSNLAWDFAVKEGFRVFKEMPFTNPLTRSYHTWARPQSQWCPTGSRSYSSVPEASPAHTSRGGLVISPESLSPPVRELYHRLKHFMEQRVYPAEPELQSHQASAARWSPSPLIEDLKEKAKAEGLWNLFLPLEADPEKKYGAGLTNVEYAHLCELMGTSLYAPEVCNCSAPDTGNMELLVRYGTEAQKARWLIPLLEGKARSCFAMTEPQVASSDATNIEASIREEDSFYVINGHKWWITGILDPRCQLCVFMGKTDPHAPRHRQQSVLLVPMDTPGIKIIRPLTVYGLEDAPGGHGEVRFEHVRVPKENMVLGPGRGFEIAQGRLGPGRIHHCMRLIGFSERALALMKARVKSRLAFGKPLVEQGTVLADIAQSRVEIEQARLLVLRAAHLMDLAGNKAAALDIAMIKMVAPSMASRVIDRAIQAFGAAGLSSDYPLAQFFTWARALRFADGPDEVHRATVAKLELKHRI

SEQ ID NO: 811909 - protein, 971 aa, Homo sapiens
MCVRSCFQSPRLQWVWRTAFLKHTQRRHQGSHRWTHLGGSTYRAVIFDMGGVLIPSPGRVAAEWEVQNRIPSGTILKALMEGGENGPWMRFMRAEITAEGFLREFGRLCSEMLKTSVPVDSFFSLLTSERVAKQFPVMTEAITQIRAKGLQTAVLSNNFYLPNQKSFLPLDRKQFDVIVESCMEGICKPDPRIYKLCLEQLGLQPSESIFLDDLGTNLKEAARLGIHTIKVNDPETAVKELEALLGFTLRVGVPNTRPVKKTMEIPKDSLQKYLKDLLGIQTTGPLELLQFDHGQSNPTYYIRLANRDLVLRKKPPGTLLPSAHAIEREFRIMKALANAGVPVPNVLDLCEDSSVIGTPFYVMEYCPGLIYKDPSLPGLEPSHRRAIYTAMNTVLCKIHSVDLQAVGLEDYGKQGQASSTYAEQTGKLTEFVSNLAWDFAVKEGFRVFKEMPFTNPLTRSYHTWARPQSQWCPTGSRSYSSVPEASPAHTSRGGLVISPESLSPPVRELYHRLKHFMEQRVYPAEPELQSHQASAARWSPSPLIEDLKEKAKAEGLWNLFLPLEADPEKKYGAGLTNVEYAHLCELMGTSLYAPEVCNCSAPDTGNMELLVRYGTEAQKARWLIPLLEGKARSCFAMTEPQVASSDATNIEASIREEDSFYVINGHKWWITGILDPRCQLCVFMGKTDPHAPRHRQQSVLLVPMDTPGIKIIRPLTVYGLEDAPGGHGEVRFEHVRVPKENMVLGPGRGFEIAQGRLGPGRIHHCMRLIGFSERALALMKARVKSRLAFGKPLVEQGTVLADIAQSRVEIEQARLLVLRAAHLMDLAGNKAAALDIAMIKMVAPSMASRVIDRAIQKTSLQEAWSLFQARRRGFAEGQGGSGTESGKLVFRLSVPGWAGTVTSLQPFSPSLSACGNLDTFWEASQGCGTCLLWQLQGSCLASLVSRGAATAGGGLETQDLGAWENGMQPTL

SEQ ID NO: 811910 - protein, 881 aa, Homo sapiens
MCVRSCFQSPRLQWVWRTAFLKHTQRRHQGSHRWTHLGGSTYRAVIFDMGGVLIPSPGRVAAEWEVQNRIPSGTILKALMEGGENGPWMRFMRAEITAEGFLREFGRLCSEMLKTSVPVDSFFSLLTSERVAKQFPVMTEAITQIRAKGLQTAVLSNNFYLPNQKSFLPLDRKQFDVIVESCMEGICKPDPRIYKLCLEQLGLQPSESIFLDDLGTNLKEAARLGIHTIKVNDPETAVKELEALLGFTLRVGVPNTRPVKKTMEIPKDSLQKYLKDLLGIQTTGPLELLQFDHGQSNPTYYIRLANRDLVLRKKPPGTLLPSAHAIEREFRIMKALANAGVPVPNVLDLCEDSSVIGTPFYVMEYCPGLIYKDPSLPGLEPSHRRAIYTAMNTVLCKIHSVDLQAVGLEDYGKQGDYIPRQVRTWVKQYRASETSTIPAMERLIEWLPLHLPRQQRTTVVHGDFSITPLHSSLRNKVRPRLQKNNKKKKEKEVNKTRKKKEYLEPFLMPCDFQNLKSPLQIRPPTAEGRERDGAEGTLLPLELQGRKGCCGQQKGTLRLRRVQCLQSLPHSQEVALGQMLAQIYNCSCLVARPAQMCNGWNKGFLEAICYRHPVGLWLAVAHVKVVCQTYSLDMAQWLHTGTLAEKMHSPGFTLLPCPVLSASTQLCRPPAPASRGHPQPSMSSAAHLLCRQVKSRLAFGKPLVEQGTVLADIAQSRVEIEQARLLVLRAAHLMDLAGNKAAALDIAMIKMVAPSMASRVIDRAIQKTSLQEAWSLFQARRRGFAEGQGGSGTESGKLVFRLSVPGWAGTVTSLQPFSPSLSACGNLDTFWEASQGCGTCLLWQLQGSCLASLVSRGAATAGGGLETQDLGAWENGMQPTL

SEQ ID NO: 811911 - protein, 521 aa, Homo sapiens
MPFTNPLTRSYHTWARPQSQWCPTGSRSYSSVPEASPAHTSRGGLVISPESLSPPVRELYHRLKHFMEQRVYPAEPELQSHQASAARWSPSPLIEDLKEKAKAEGLWNLFLPLEADPEKKYGAGLTNVEYAHLCELMGTSLYAPEVCNCSAPDTGNMELLVRYGTEAQKARWLIPLLEGKARSCFAMTEPQVASSDATNIEASIREEDSFYVINGHKWWITGILDPRCQLCVFMGKTDPHAPRHRQQSVLLVPMDTPGIKIIRPLTVYGLEDAPGGHGEVRFEHVRVPKENMVLGPGRGFEIAQGRLGPGRIHHCMRLIGFSERALALMKARVKSRLAFGKPLVEQGTVLADIAQSRVEIEQARLLVLRAAHLMDLAGNKAAALDIAMIKMVAPSMASRVIDRAIQKTSLQEAWSLFQARRRGFAEGQGGSGTESGKLVFRLSVPGWAGTVTSLQPFSPSLSACGNLDTFWEASQGCGTCLLWQLQGSCLASLVSRGAATAGGGLETQDLGAWENGMQPTL

SEQ ID NO: 811912 - protein, 374 aa, Homo sapiens
MPCDFQNLKSPLQIRPPTAEGRERDGAEGTLLPLELQGRKGCCGQQKGTLRLRRVQCLQSLPHSQEVALGQMLAQIYNCSCLVARPAQMCNGWNKGFLEAICYRHPVGLWLAVAHVKVVCQTYSLDMAAWLHTGTLAEKMHSPGFTLLPCPVLSASTQLCRPPAPASRGHPQPSMSSAAHLLCRQVKSRLAFGKPLVEQGTVLADIAQSRVEIEQARLLVLRAAHLMDLAGNKAAALDIAMIKMVAPSMASRVIDRAIQKTSLQEAWSLFQARRRGFAEGQGGSGTESGKLVFRLSVPGWAGTVTSLQPFSPSLSACGNLDTFWEASQGCGTCLLWQLQGSCLASLVSRGAATAGGGLETQDLGAWENGMQPTL

SEQ ID NO: 811913 - protein, 259 aa, Homo sapiens
MAIAHSDRLGLSGGHGEVRFEHVRVPKENMVLGPGRGFEIAQGRLGPGRIHHCMRLIGFSERALALMKARVKSRLAFGKPLVEQGTVLADIAQSRVEIEQARLLVLRAAHLMDLAGNKAAALDIAMIKMVAPSMASRVIDRAIQKTSLQEAWSLFQARRRGFAEGQGGSGTESGKLVFRLSVPGWAGTVTSLQPFSPSLSACGNLDTFWEASQGCGTCLLWQLQGSCLASLVSRGAATAGGGLETQDLGAWENGMQPTL

SEQ ID NO: 811914 - protein, 939 aa, Homo sapiens
MCVRSCFQSPRLQWVWRTAFLKHTQRRHQGSHRWTHLGGSTYRAVIFDMGGVLIPSPGRVAAEWEVQNRIPSGTILKALMEGGENGPWMRFMRAEITAEGFLREFGRLCSEMLKTSVPVDSFFSLLTSERVAKQFPVMTEAITQIRAKGLQTAVLSNNFYLPNQKSFLPLDRKQFDVIVESCMEGICKPDPRIYKLCLEQLGLQPSESIFLDDLGTNLKEAARLGIHTIKVNDPETAVKELEALLGFTLRVGVPNTRPVKKTMEIPKDSLQKYLKDLLGIQTTGPLELLQFDHGQSNPTYYIRLANRDLVLRKKPPGTLLPSAHAIEREFRIMKALANAGVPVPNVLDLCEDSSVIGTPFYVMEYCPGLIYKDPSLPGLEPSHRRAIYTAMNTVLCKIHSVDLQAVGLEDYGKQGDYIPRQVRTWVKQYRASETSTIPAMERLIEWLPLHLPRQQRTTVVHGDFRLDNLVFHPEEPEVLAVLDWELSTLGDPLADVAYSCLAHYLPSSFPVLRGINDCDLTQLGIPAAEEYFRMYCLQMGLPPTENWNFYMAFSFFRVAAILQGVYKRSLTGQASSTYAEQTGKLTEFVSNLAWDFAVKEGFRVFKEMPFTNPLTRSYHTWARPQSQWCPTGSRSYSSVPEASPAHTSRGGLVISPESLSPPVRELYHRLKHFMEQRVYPAEPELQSHQASAARWSPSPLIEDLKEKAKAEGLWNLFLPLEADPEKKYGAGLTNVEYAHLCELMGTSLYAPEVCNCSAPDTGNMELLVRYGTEAQKARWLIPLLEGKARSCFAMTEPQVASSDATNIEASIREEDSFYVINGHKWWITGILDPRCQLCVFMGKTDPHAPRHRQQSVLLVPMDTPGIKIIRPLTVYGLEDAPGGHGEVRFEHVRVPKENMVLGPGRGFEIAQGRLGPGRIHHCMRLIGFSERALALMKAR

SEQ ID NO: 811915 - protein, 710 aa, Homo sapiens
MCVRSCFQSPRLQWVWRTAFLKHTQRRHQGSHRWTHLGGSTYRAVIFDMGGVLIPSPGRVAAEWEVQNRIPSGTILKALMEGGENGPWMRFMRAEITAEGFLREFGRLCSEMLKTSVPVDSFFSLLTSERVAKQFPVMTEAITQIRAKGLQTAVLSNNFYLPNQKSFLPLDRKQFDVIVESCMEGICKPDPRIYKLCLEQLGLQPSESIFLDDLGTNLKEAARLGIHTIKVNDPETAVKELEALLGFTLRVGVPNTRPVKKTMEIPKDSLQKYLKDLLGIQTTGPLELLQFDHGQSNPTYYIRLANRDLVLRKKPPGTLLPSAHAIEREFRIMKALANAGVPVPNVLDLCEDSSVIGTPFYVMEYCPGLIYKDPSLPGLEPSHRRAIYTAMNTVLCKIHSVDLQAVGLEDYGKQGDYIPRQVRTWVKQYRASETSTIPAMERLIEWLPLHLPRQQRTTVVHGDFRLDNLVFHPEEPEVLAVLDWELSTLGDPLADVAYSCLAHYLPSSFPVLRGINDCDLTQLGIPAAEEYFRMYCLQMGLPPTENWNFYMAFSFFRVAAILQGVYKRSLTGQASSTYAEQTGKLTEFVSNLAWDFAVKEGFRVFKEMPFTNPLTRSYHTWARPQSQWCPTGSRSYSSVPEASPAHTSRGGLVISPESLSPPVRELYHRLKHFMEQRVYPAEPELQSHQASAARWSPSPLIEDLKVKQPW

SEQ ID NO: 811916 - protein, 1041 aa, Homo sapiens [sequence omitted]

SEQ ID NO: 811917 - protein, 939 aa, Homo sapiens; identical to SEQ ID NO: 811914

SEQ ID NO: 811918 - protein, 794 aa, Homo sapiens
MCVRSCFQSPRLQWVWRTAFLKHTQRRHQGSHRWTHLGGSTYRAVIFDMGGVLIPSPGRVAAEWEVQNRIPSGTILKALMEGGENGPWMRFMRAEITAEGFLREFGRLCSEMLKTSVPVDSFFSLLTSERVAKQFPVMTEAITQIRAKGLQTAVLSNNFYLPNQKSFLPLDRKQFDVIVESCMEGICKPDPRIYKLCLEQLGLQPSESIFLDDLGTNLKEAARLGIHTIKVNDPETAVKELEALLGFTLRVGVPNTRPVKKTMEIPKDSLQKYLKDLLGIQTTGPLELLQFDHGQSNPTYYIRLANRDLVLRKKPPGTLLPSAHAIEREFRIMKALANAGVPVPNVLDLCEDSSVIGTPFYVMEYCPGLIYKDPSLPGLEPSHRRAIYTAMNTVLCKIHSVDLQAVGLEDYGKQGDYIPRQVRTWVKQYRASETSTIPAMERLIEWLPLHLPRQQRTTVVHGDFSITPLHSSLRNKVRPRLQKNNKKKKEKEVNKTRKKKEYLEPFLMPCDFQNLKSPLQIRPPTAEGRERDGAEGTLLPLELQGRKGCCGQQKGTLRLRRVQCLQSLPHSQEVALGQMLAQIYNCSCLVARPAQMCNGWNKGFLEAICYRHPVGLWLAVAHVKVVCQTYSLDMAQWLHTGTLAEKMHSPGFTLLPCPVLSASTQLCRPPAPASRGHPQPSMSSAAHLLCRQVKSRLAFGKPLVEQGTVLADIAQSRVEIEQARLLVLRAAHLMDLAGNKAAALDIAMIKMVAPSMASRVIDRAIQVSTDQTVGLFEPSILDAKLSYLQPPSLP

SEQ ID NO: 811919 - protein, 476 aa, Homo sapiens
MCVRSCFQSPRLQWVWRTAFLKHTQRRHQGSHRWTHLGGSTYRAVIFDMGGVLIPSPGRVAAEWEVQNRIPSGTILKALMEGGENGPWMRFMRAEITAEGFLREFGRLCSEMLKTSVPVDSFFSLLTSERVAKQFPVMTEAITQIRAKGLQTAVLSNNFYLPNQKSFLPLDRKQFDVIVESCMEGICKPDPRIYKLCLEQLGLQPSESIFLDDLGTNLKEAARLGIHTIKVNDPETAVKELEALLGFTLRVGVPNTRPVKKTMEIPKDSLQKYLKDLLGIQTTGPLELLQFDHGQSNPTYYIRLANRDLVLRKKPPGTLLPSAHAIEREFRIMKALANAGVPVPNVLDLCEDSSVIGTPFYVMEYCPGLIYKDPSLPGLEPSHRRAIYTAMNTVLCKIHSVDLQAVGLEDYGKQGDYIPRQVRTWVKQYRASETSTIPAMERLIEWLPLHLPRQQRTTVVHGDFRSRHCTPACATK

SEQ ID NO: 811920 - protein, 354 aa, Homo sapiens
MCVRSCFQSPRLQWVWRTAFLKHTQRRHQGSHRWTHLGGSTYRAVIFDMGGVLIPSPGRVAAEWEVQNRIPSGTILKALMEGGENGPWMRFMRAEITAEGFLREFGRLCSEMLKTSVPVDSFFSLLTSERVAKQFPVMTEAITQIRAKGLQTAVLSNNFYLPNQKSFLPLDRKQFDVIVESCMEGICKPDPRIYKLCLEQLGLQPSESIFLDDLGTNLKEAARLGIHTIKVNDPETAVKELEALLGFTLRVGVPNTRPVKKTMEIPKDSLQKYLKDLLGIQTTGPLELLQFDHGQSNPTYYIRLANRDLVLRKKPPGTLLPSAHAIEREFRIMKALANAGVPVPNVLDLCEDSR

SEQ ID NO: 811921 - protein, 85 aa, Homo sapiens
LIYKDPSLPGLEPSHRRAIYTAMNTVLCKIHSVDLQAVGLEDYGKQGEQEATSPMLVVSSLVLLLLGSESFWVVLSISTPSVRQT

SEQ ID NO: 811922 - protein, 606 aa, Homo sapiens
FCVASRGQRRWRRRRRRRWRRGGGEEAQLPLHRDRRCGASPPAPGARLPGAPPPSPPPQRRCLLQMSDSPAGSNPRTPESSGSGSGGGGKRPAVPAAVSLLPPADPLRQANRLPIRVLKMLSAHTGHLLHPEYLQPLSSTPVSPIELDAKKSPLALLAQTCSQIGKPDPPPSSKLNSVAAAANGLGAEKDPGRSAPGAASAAAALKQLGDSPAEDKSSFKPYSKGSGGGDSRKDSGSSSVSSTSSSSSSSPGDKAGFRVPSAACPPFPPHGAPVSASSSSSSPGGSRGGSPHHSDCKNGGGVGGGELDKKDQEPKPSPEPAAVSRGGGGEPGAHGGAESGASGRKSEPPSALVGAGHVAPVSPYKPGHSVFPLPPSSIGYHGSIVGAYAGYPSQFVPGLDPSKSGLVGGQLSGGLGLPPGKPPSSSPLTGASPPSFLQGLCRDPYCLGGYHGASHLGGSSCSTCSAHDPAGPSLKAGGYPLVYPGHPLQPAALSSSAAQAALPGHPLYTYGFMLQNEPLPHSCNWVAASGPCDKRFATSEELLSHLRTHTALPGAEKLLAAYPGASGLGSAAAAAAAAASCHLHLPPPAAPAAPGRCPCGIHTLWA

SEQ ID NO: 811923 - protein, 606 aa, Homo sapiens; identical to SEQ ID NO: 811922

SEQ ID NO: 811924 - protein, 487 aa, Homo sapiens
ARNPSQAKFPQTKGISFFLGLEEGDIELDAKKSPLALLAQTCSQIGKPDPPPSSKLNSVAAAANGLGAEKDPGRSAPGAASAAAALKQLGDSPAEDKSSFKPYSKGSGGGDSRKDSGSSSVSSTSSSSSSSPGDKAGFRVPSAACPPFPPHGAPVSASSSSSSPGGSRGGSPHHSDCKNGGGVGGGELDKKDQEPKPSPEPAAVSRGGGGEPGAHGGAESGASGRKSEPPSALVGAGHVAPVSPYKPGHSVFPLPPSSIGYHGSIVGAYAGYPSQFVPGLDPSKSGLVGGQLSGGLGLPPGKPPSSSPLTGASPPSFLQGLCRDPYCLGGYHGASHLGGSSCSTCSAHDPAGPSLKAGGYPLVYPGHPLQPAALSSSAAQAALPGHPLYTYGFMLQNEPLPHSCNWVAASGPCDKRFATSEELLSHLRTHTALPGAEKLLAAYPGASGLGSAAAAAAAAASCHLHLPPPAAPAAPGRCPCGIHTLWA

SEQ ID NO: 811925 - protein, 655 aa, Homo sapiens
MSSSNVEVFIPVSQGNTNGFPATASNDLKAFTEGAVLSFHNICYRVKLKSGFLPCRKPVEKEILSNINGIMKPGLNAILGPTGGGKSSLLDVLAARKDPSGLSGDVLINGAPRPANFKCNSGYVVQDDVVMGTLTVRENLQFSAALRLATTMTNHEKNERINRVIQELGLDKVADSKVGTQFIRGVSGGERKRTSIGMELITDPSILFLDEPTTGLDSSTANAVLLLLKRMSKQGRTIIFSIHQPRYSIFKLFDSLTLLASGRLMFHGPAQEALGYFESAGYHCEAYNNPADFFLDIINGDSTAVALNREEDFKATEIIEPSKQDKPLIEKLAEIYVNSSFYKETKAELHQLSGGEKKKKITVFKEISYTTSFCHQLRWVSKRSFKNLLGNPQASIAQIIVTVVLGLVIGAIYFGLKNDSTGIQNRAGVLFFLTTNQCFSSVSAVELFVVEKKLFIHEYISGYYRVSSYFLGKLLSDLLPMRMLPSIIFTCIVYFMLGLKPKADAFFVMMFTLMMVAYSASSMALAIAAGQSVVSVATLLMTICFVFMMIFSGLLVNLTTIASWLSWLQYFSIPRYGFTALQHNEFLGQNFCPGLNATGNNPCNYATCTGEEYLVKQGIDLSPWGLWKNHVALACMIVIFLTIAYLKLLFLKKYS

SEQ ID NO: 811926 - protein, 655 aa, Homo sapiens; identical to SEQ ID NO: 811925

SEQ ID NO: 811927 - protein, 655 aa, Homo sapiens; identical to SEQ ID NO: 811925

SEQ ID NO: 811928 - protein, 655 aa, Homo sapiens; identical to SEQ ID NO: 811925

SEQ ID NO: 811929 - protein, 775 aa, Homo sapiens
GPLRSALAVHSPKRGLGSSCQRCLSSSPGCPGLPRRPPAGSHRDLQPQRLPRRPPREGSARARRVWLGEGVVPRAGCVLCPLKRFRARRREEAVPATPTEIERRGKEAACGGTGKIKTLQMSSSNVEVFIPVSQGNTNGFPATASNDLKAFTEGAVLSFHNICYRVKLKSGFLPCRKPVEKEILSNINGIMKPGLNAILGPTGGGKSSLLDVLAARKDPSGLSGDVLINGAPRPANFKCNSGYVVQDDVVMGTLTVRENLQFSAALRLATTMTNHEKNERINRVIQELGLDKVADSKVGTQFIRGVSGGERKRTSIGMELITDPSILFLDEPTTGLDSSTANAVLLLLKRMSKQGRTIIFSIHQPRYSIFKLFDSLTLLASGRLMFHGPAQEALGYFESAGYHCEAYNNPADFFLDIINGDSTAVALNREEDFKATEIIEPSKQDKPLIEKLAEIYVNSSFYKETKAELHQLSGGEKKKKITVFKEISYTTSFCHQLRWVSKRSFKNLLGNPQASIAQIIVTVVLGLVIGAIYFGLKNDSTGIQNRAGVLFFLTTNQCFSSVSAVELFVVEKKLFIHEYISGYYRVSSYFLGKLLSDLLPMRMLPSIIFTCIVYFMLGLKPKADAFFVMMFTLMMVAYSASSMALAIAAGQSVVSVATLLMTICFVFMMIFSGLLVNLTTIASWLSWLQYFSIPRYGFTALQHNEFLGQNFCPGLNATGNNPCNYATCTGEEYLVKQGIDLSPWGLWKNHVALACMIVIFLTIAYLKLLFLKKYS

SEQ ID NO: 811930 - protein, 688 aa, Homo sapiens
GQPVRQRPRCFGAPASDGDQTQLGQTRKIKTLQMSSSNVEVFIPVSQGNTNGFPATASNDLKAFTEGAVLSFHNICYRVKLKSGFLPCRKPVEKEILSNINGIMKPGLNAILGPTGGGKSSLLDVLAARKDPSGLSGDVLINGAPRPANFKCNSGYVVQDDVVMGTLTVRENLQFSAALRLATTMTNHEKNERINRVIQELGLDKVADSKVGTQFIRGVSGGERKRTSIGMELITDPSILFLDEPTTGLDSSTANAVLLLLKRMSKQGRTIIFSIHQPRYSIFKLFDSLTLLASGRLMFHGPAQEALGYFESAGYHCEAYNNPADFFLDIINGDSTAVALNREEDFKATEIIEPSKQDKPLIEKLAEIYVNSSFYKETKAELHQLSGGEKKKKITVFKEISYTTSFCHQLRWVSKRSFKNLLGNPQASIAQIIVTVVLGLVIGAIYFGLKNDSTGIQNRAGVLFFLTTNQCFSSVSAVELFVVEKKLFIHEYISGYYRVSSYFLGKLLSDLLPMRMLPSIIFTCIVYFMLGLKPKADAFFVMMFTLMMVAYSASSMALAIAAGQSVVSVATLLMTICFVFMMIFSGLLVNLTTIASWLSWLQYFSIPRYGFTALQHNEFLGQNFCPGLNATGNNPCNYATCTGEEYLVKQGIDLSPWGLWKNHVALACMIVIFLTIAYLKLLFLKKYS

SEQ ID NO: 811931 - protein, 632 aa, Homo sapiens
MSSSNVEVFIPVSQGNTNGFPATASNDLKAFTEGAVLSFHNICYRVKLKSGFLPCRKPVEKEILSNINGIMKPGLNAILGPTGGGKSSLLDVLAARKDPSGLSGDVLINGAPRPANFKCNSGYVVQDDVVMGTLTVRENLQFSAALRLATTMTNHEKNERINRVIQELGLDKVADSKVGTQFIRGVSGGERKRTSIGMELITDPSILFLDEPTTGLDSSTANAVLLLLKRMSKQGRTIIFSIHQPRYSIFKLFDSLTLLASGRLMFHGPAQEALGYFESAGYHCEAYNNPADFFLDIINGDSTAVALNREEDFKATEIIEPSKQDKPLIEKLAEIYVNSSFYKETKAELHQLSGGEKKKKITVFKEISYTTSFCHQLRWVSKRSFKNLLGNPQASIAQIIVTVVLGLVIGAIYFGLKNDSTGIQNRAGVLFFLTTNQCFSSVSAVELFVVEKKLFIHEYISGYYRVSSYFLGKLLSDLLPMRMLPSIIFTCIVYFMLGLKPKADAFFVMMFTLMMVAYSASSMALAIAAGQSVVSVATLLMTICFVFMMIFSGLLVNLTTIASWLSWLQYFSIPRYGFTALQHNEFLGQNFCPGLNATGNIFLLFSVPLPSHCCTAAIVLKRYIFRNHNKLN

SEQ ID NO: 811932 - protein, 623 aa, Homo sapiens
MSSSNVEVFIPVSQGNTNGFPATASNDLKAFTEGAVLSFHNICYRVKLKSGFLPCRKPVEKEILSNINGIMKPGLNAILGPTGGGKSSLLDVLAARKDPSGLSGDVLINGAPRPANFKCNSGYVVQDDVVMGTLTVRENLQFSAALRLATTMTNHEKNERINRVIQELGLDKVADSKVGTQFIRGVSGGERKRTSIGMELITDPSILFLDEPTTGLDSSTANAVLLLLKRMSKQGRTIIFSIHQPRYSIFKLFDSLTLLASGRLMFHGPAQEALGYFESAGYHCEAYNNPADFFLDIINGDSTAVALNREEDFKATEIIEPSKQDKPLIEKLAEIYVNSSFYKETKAELHQLSGGEKKKKITVFKEISYTTSFCHQLRWVSKRSFKNLLGNPQASIAQIIVTVVLGLVIGAIYFGLKNDSTGIQNRAGVLFFLTTNQCFSSVSAVELFVVEKKLFIHEYISGYYRVSSYFLGKLLSDLLPMRMLPSIIFTCIVYFMLGLKPKADAFFVMMFTLMMVAYSASSMALAIAAGQSVVSVATLLMTICFVFMMIFSGLLVNLTTIASWLSWLQYFSIPRYGFTMYWRRIFGKAGHRSLTLGLVEESRGLGLYDCYFPHNCLPEIVIS

SEQ ID NO: 811933 - protein, 405 aa, Homo sapiens
GHDQGRPAPSAGPALEEVSSAKLGLELGGNSSMRPSRRLSLRAKNTAALGTGLGLSVWAAPAGPLCCPTWHGLGYRHGLTSATSNQGNQIPREPAPLGARGPKPEVPAPPRQAAPPTPVAVPPPAAAPPPAWSRVPAPPAENRSMEGGLGRAVCLLTGASRGFGRTLAPLLASLLSPGSVLVLSARNDEALRQLEAELGAERSGLRVVRVPADLGAEAGLQQLLGALRELPRPKGLQRLLLINNAGSLGDVSKGFVDLSDSTQVNNYWALNLTSMLCLTSSVLKAFPDSPGLNRTVVNISSLCALQPFKGWALYCAGKAARDMLFQVLALEEPNVRVLNYAPGPLDTDMQQLARETSVDPDMRKGLQELKAKGKLVDCKVSAQKLLSLLEKDEFKSGAHVDFYDK

SEQ ID NO: 811934 - protein, 405 aa, Homo sapiens; identical to SEQ ID NO: 811933

SEQ ID NO: 811935 - protein, 405 aa, Homo sapiens; identical to SEQ ID NO: 811933

SEQ ID NO: 811936 - protein, 190 aa, Homo sapiens [sequence omitted]

SEQ ID NO: 811937 - protein, 131 aa, Homo sapiens [sequence omitted]

SEQ ID NO: 811938 - protein, 360 aa, Homo sapiens
GHDQGRPAPSAGPALEEVSSAKLGLELGGNSSMRPSRRLSLRAKNTAALGTGLGLSVWAAPAGPLCCPTWHGLGYRHGLTSATSNQGNQIPREPAPLGARGPKPEVPAPPRQAAPPTPVAVPPPAAAPPPAWSRVPAPPAENRSMEGGLGRAVCLLTGASRGFGRTLAPLLASLLSPGSVLVLSARNDEALRQLEAELGAERSGLRVVRVPADLGAEAGLQQLLGALRELPRPKGLQRLLLINNAGSLGDVSKGFVDLSDSTQVNNYWALNLTSMLCLTSSVLKAFPDSPGLNRTVVNISSLCALQPFKGWALYCAGKAARDMLFQVLALEEPNVLWTQTCSSWPGRPPWTQTCEKGCRS

SEQ ID NO: 811939 - protein, 152 aa, Homo sapiens
MDNVQPKIKHRPFCFSVKGHVKMLRLALTVTSMTFFIIAQAPEPYIVITGFEVTVILFFILLYVLRLDRLMKWLFWPLLDIINSLVTTVFMLIVSVLALIPETTTLTVGGGVFALVTAVCCLADGALIYRKLLFNPSGPYQKKPVHEKKEVL

SEQ ID NO: 811940 - protein, 117 aa, Homo sapiens
DRKTPQESWSAAVINARPEHGGLTGLLACVPTSRSANMCPALGPLMCYAITERQHKPERTAAGSRWGACARANAAPCACAQESGKPSWARSRGGRCSAAVAVAIASQNLLRQPAEKS

SEQ ID NO: 811941 - protein, 152 aa, Homo sapiens; identical to SEQ ID NO: 811939

SEQ ID NO: 811942 - protein, 99 aa, Homo sapiens
MDNVQPKIKHRPFCFSVKGHVKMLRLDIINSLVTTVFMLIVSVLALIPETTTLTVGGGVFALVTAVCCLADGALIYRKLLFNPSGPYQKKPVHEKKEVL

SEQ ID NO: 811943 - protein, 120 aa, Homo sapiens
MDNVQPKIKHRPFCFSVKGHVKMLRLALTVTSMTFFIIAQAPEPYIVITGFEVTVILFFILLYVLRLDRLMKWLFWPLLVFALVTAVCCLADGALIYRKLLFNPSGPYQKKPVHEKKEVL

SEQ ID NO: 811944 - protein, 117 aa, Homo sapiens; identical to SEQ ID NO: 811940

SEQ ID NO: 811945 - protein, 103 aa, Homo sapiens
MIQPRTRTRRELLVSGSRLPTGSTAVTSEQDIINSLVTTVFMLIVSVLALIPETTTLTVGGGVFALVTAVCCLADGALIYRKLLFNPSGPYQKKPVHEKKEVL

SEQ ID NO: 811946 - protein, 120 aa, Homo sapiens [sequence omitted]

SEQ ID NO: 811947 - protein, 772 aa, Homo sapiens
MRRREGHGTDSEMGQGPVRESQSSDPPALQFRISEYKPLNMAGVEQPPSPELRQEGVTEYEDGGAPAGDGEAGPQQAEDHPQNPPEDPNQDPPEDDSTCQCQACGPHQAAGPDLGSSNDGCPQLFQERSVIVENSSGSTSASELLKPMKKRKRREYQSPSEEESEPEAMEKQEEGKDPEGQPTASTPESEEWSSSQPATGEKKECWSWESYLEEQKAITAPVSLFQDSQAVTHNKNGFKLGMKLEGIDPQHPSMYFILTVAEVCGYRLRLHFDGYSECHDFWVNANSPDIHPAGWFEKTGHKLQPPKGYKEEEFSWSQYLRSTRAQAAPKHLFVSQSHSPPPLGFQVGMKLEAVDRMNPSLVCVASVTDVVDSRFLVHFDNWDDTYDYWCDPSSPYIHPVGWCQKQGKPLTPPQDYPDPDNFCWEKYLEETGASAVPTWAFKVRPPHSFLVNMKLEAVDRRNPALIRVASVEDVEDHRIKIHFDGWSHGYDFWIDADHPDIHPAGWCSKTGHPLQPPLGPREPSSASPGGCPPLSYRSLPHTRTSKYSFHHRKCPTPGCDGSGHVTGKFTAHHCLSGCPLAERNQSRLKAELSDSEASARKKNLSGFSPRKKPRHHGRIGRPPKYRKIPQEDFQTLTPDVVHQSLFMSALSAHPDRSLSVCWEQHCKLLPGVAGISASTVAKWTIDEVFGFVQTLTGCEDQARLFKDEARIVRVTHVSGKTLVWTVAQLGDLVCSDHLQEGKGILETGVHSLLCSLPTHLLAKLSFASDSQY

SEQ ID NO: 811948 - protein, 752 aa, Homo sapiens
MRRREGHGTDSEMGQGPVRESQSSDPPALQFRISEYKPLNMAGVEQPPSPELRQEGVTEYEDGGAPAGDGEAGPQQAEDHPQNPPEDPNQDPPEDDSTCQCQACGPHQAAGPDLGSSNDGCPQLFQERSVIVENSSGSTSASELLKPMKKRKRREYQSPSEEESEPEAMEKQEEGKDPEGQPTASTPESEEWSSSQPATGEKKECWSWESYLEEQKAITAPVSLFQDSQAVTHNKNGFKLGMKLEGIDPQHPSMYFILTVAEVCGYRLRLHFDGYSECHDFWVNANSPDIHPAGWFEKTGHKLQPPKGYKEEEFSWSQYLRSTRAQAAPKHLFVSQSHSPPPLGFQVGMKLEAVDRMNPSLVCVASVTDVVDSRFLVHFDNWDDTYDYWCDPSSPYIHPVGWCQKQGKPLTPPQDYPDPDNFCWEKYLEETGASAVPTWAFKVRPPHSFLVNMKLEAVDRRNPALIRVASVEDVEDHRIKIHFDGWSHGYDFWIDADHPDIHPAGWCSKTGHPLQPPLGPREPSSASPGGCPPLSYRSLPHTRTSKYSFHHRKCPTPGCDGSGHVTGKFTAHHCLSGCPLAERNQSRLKAELSDSEASARKKNLSGFSPRKKPRHHGRIGRPPKYRKIPQEDFQTLTPDVVHQSLFMSALSAHPDRSLSVCWEQHCKLLPGVAGISASTVAKWTIDEVFGFVQTLTGCEDQARLFKDEMIDGEAFLLLTQADIVKIMSVKLGPALKIYNAILMFKNADDTLK

SEQ ID NO: 811949 - protein, 916 aa, Homo sapiens
GLCLACRPARMEGHAGMEGHAEMEMLRTLKGPSTGEVSMHLVAGDSPGSGPHLPATAFIIPASSATLGLPSSALDVSCFPREPIHVGAPEQVAGCEPVSATVLPQLSAGPASSSTSTVRLLEWTEAAAPPPGGGLRFRISEYKPLNMAGVEQPPSPELRQEGVTEYEDGGAPAGDGEAGPQQAEDHPQNPPEDPNQDPPEDDSTCQCQACGPHQAAGPDLGSSNDGCPQLFQERSVIVENSSGSTSASELLKPMKKRKRREYQSPSEEESEPEAMWIGGCLLELHSCWRPRRNSACLGQNTTWPESQEGPGSDPRASSQTMRRRSWDQACLLQEKQEEGKDPEGQPTASTPESEEWSSSQPATGEKKECWSWESYLEEQKAITAPVSLFQDSQAVTHNKNGFKLGMKLEGIDPQHPSMYFILTVAEVCGYRLRLHFDGYSECHDFWVNANSPDIHPAGWFEKTGHKLQPPKGYKEEEFSWSQYLRSTRAQAAPKHLFVSQSHSPPPLGFQVGMKLEAVDRMNPSLVCVASVTDVVDSRFLVHFDNWDDTYDYWCDPSSPYIHPVGWCQKQGKPLTPPQDYPDPDNFCWEKYLEETGASAVPTWAFKVRPPHSFLVNMKLEAVDRRNPALIRVASVEDVEDHRIKIHFDGWSHGYDFWIDADHPDIHPAGWCSKTGHPLQPPLGPREPSSASPGGCPPLSYRSLPHTRTSKYSFHHRKCPTPGCDGSGHVTGKFTAHHCLSGCPLAERNQSRLKAELSDSEASARKKNLSGFSPRKKPRHHGRIGRPPKYRKIPQEDFQTLTPDVVHQSLFMSALSAHPDRSLSVCWEQHCKLLPGVAGISASTVAKWTIDEVFGFVQTLTGCEDQARLFKDEMIDGEAFLLLTQADIVKIMSVKLGPALKIYNAILMFKNADDTLK

SEQ ID NO: 811950 - protein, 343 aa, Homo sapiens
MRRREGHGTDSEMGQGPVRESQSSDPPALQFRISEYKPLNMAGVEQPPSPELRQEGVTEYEDGGAPAGDGEAGPQQAEDHPQNPPEDPNQDPPEDDSTCQCQACGPHQAAGPDLGSSNDGCPQLFQERSVIVENSSGSTSASELLKPMKKRKRREYQSPSEEESEPEAMEKQEEGKDPEGQPTASTPESEEWSSSQPATGEKKECWSWESYLEEQKAITAPVSLFQDSQAVTHNKNGFKLGMKLEGIDPQHPSMYFILTVAEVCGYRLRLHFDGYSECHDFWVNANSPDIHPAGWFEKTGHKLQPPKGYKEEEFSWSQYLRSTRAQAAPKHLFVSQSHVSAPE

SEQ ID NO: 811951 - protein, 541 aa, Homo sapiens
MSAVSSQPPHCCHNCLRTSWEGLVWVGKIYTWFTRFFGRTHSLLPGTYLLTQARPLSAPWRPEVPECLRAQVMILPWRALFPSLFLLPFSLPTPQAFLENLFLCLPMGSGLVLASLALAVAAPFFPQSPPPLGFQVGMKLEAVDRMNPSLVCVASVTDVVDSRFLVHFDNWDDTYDYWCDPSSPYIHPVGWCQKQGKPLTPPQDYPDPDNFCWEKYLEETGASAVPTWAFKVRPPHSFLVNMKLEAVDRRNPALIRVASVEDVEDHRIKIHFDGWSHGYDFWIDADHPDIHPAGWCSKTGHPLQPPLGPREPSSASPGGCPPLSYRSLPHTRTSKYSFHHRKCPTPGCDGSGHVTGKFTAHHCLSGCPLAERNQSRLKAELSDSEASARKKNLSGFSPRKKPRHHGRIGRPPKYRKIPQEDFQTLTPDVVHQSLFMSALSAHPDRSLSVCWEQHCKLLPGVAGISASTVAKWTIDEVFGFVQTLTGCEDQARLFKDEMIDGEAFLLLTQADIVKIMSVKLGPALKIYNAILMFKNADDTLK

SEQ ID NO: 811952 - protein, 328 aa, Homo sapiens
MPLENVVAKTDYCRVGPLVLSIQDLASDRSQGWGEDLLAELGSMRNASLPRAFPPQIHFDGWSHGYDFWIDADHPDIHPAGWCSKTGHPLQPPLGPREPSSASPGGCPPLSYRSLPHTRTSKYSFHHRKCPTPGCDGSGHVTGKFTAHHCLSGCPLAERNQSRLKAELSDSEASARKKNLSGFSPRKKPRHHGRIGRPPKYRKIPQEDFQTLTPDVVHQSLFMSALSAHPDRSLSVCWEQHCKLLPGVAGISASTVAKWTIDEVFGFVQTLTGCEDQARLFKDEMIDGEAFLLLTQADIVKIMSVKLGPALKIYNAILMFKNADDTLK

SEQ ID NO: 811953 - protein, 462 aa, Homo sapiens
LWPSLCTALCSCPSRGLGYKEEEFSWSQYLRSTRAQAAPKHLFVSQSHSPPPLGFQVGMKLEAVDRMNPSLVCVASVTDVVDSRFLVHFDNWDDTYDYWCDPSSPYIHPVGWCQKQGKPLTPPQDYPDPDNFCWEKYLEETGASAVPTWAFKVRPPHSFLVNMKLEAVDRRNPALIRVASVEDVEDHRIKIHFDGWSHGYDFWIDADHPDIHPAGWCSKTGHPLQPPLGPREPSSASPGGCPPLSYRSLPHTRTSKYSFHHRKCPTPGCDGSGHVTGKFTAHHCLSGCPLAERNQSRLKAELSDSEASARKKNLSGFSPRKKPRHHGRIGRPPKYRKIPQEDFQTLTPDVVHQSLFMSALSAHPDRSLSVCWEQHCKLLPGVAGISASTVAKWTIDEVFGFVQTLTGCEDQARLFKDEMIDGEAFLLLTQADIVKIMSVKLGPALKIYNAILMFKNADDTLK

SEQ ID NO: 811954 - protein, 541 aa, Homo sapiens; identical to SEQ ID NO: 811951

SEQ ID NO: 811955 - protein, 343 aa, Homo sapiens; identical to SEQ ID NO: 811950

SEQ ID NO: 811956 - protein, 343 aa, Homo sapiens; identical to SEQ ID NO: 811950

SEQ ID NO: 811957 - protein, 170 aa, Homo sapiens
MRRREGHGTDSEMGQGPVRESQSSDPPALQFRISEYKPLNMAGVEQPPSPELRQEGVTEYEDGGAPAGDGEAGPQQAEDHPQNPPEDPNQDPPEDDSTCQCQACGPHQAAGPDLGSSNDGCPQLFQERRSKKKERTQRDNPLLAPQRVRSGAAASLQQVRRRNAGRGSPT

SEQ ID NO: 811958 - protein, 45 aa, Homo sapiens
SGAPWDWTPQVIGGVAWSEGLAGVAWSEAPWRGVLRPAEGVSWHE

SEQ ID NO: 811959 - protein, 283 aa, Homo sapiens
MASGTTTTAVKIGIIGGTGLDDPEILEGRTEKYVDTPFGKPSDALILGKIKNVDCILLARHGRQHTIMPSKVNYQANIWALKEEGCTHVIVTTACGSLREEIQPGDIVIIDQFIDRTTMRPQSFYDGSHSCARGVCHIPMAEPFCPKTREVLIETAKKLGLRCHSKGTMVTIEGPRFSSRAESFMFRTWGADVINMTTVPEVVLAKEAGICYASIAMATDYDCWKEHEEAVSVDRVLKTLKENANKAKSLLLTTIPQIGSTEWSETLHNLKNMAQFSVLLPRH

SEQ ID NO: 811960 - protein, 281 aa, Homo sapiens
MASGTTTTAVKIGIIGGTGLDDPEILEGRTEKYVDTPFGKPSDALILGKIKNVDCILLARHGRQHTIMPSKVNYQANIWALKEEGCTHVIVTTACGSLREEIQPGDIVIIDQFIDRTTMRPQSFYDGSHSCARGVCHIPMAEPFCPKTREVLIETAKKLGLRCHSKGTMVTIEGPRFSSRAESFMFRTWGADVINMTTVPEVVLAKEAGICYASIAMATDYDCWKEHEEAVSVDRVLKTLKENANKAKSLLLTTIPQIGSTEWSETLHNLKKKSAGMALNF

SEQ ID NO: 811961 - protein, 143 aa, Homo sapiens [sequence omitted]

SEQ ID NO: 811962 - protein, 283 aa, Homo sapiens; identical to SEQ ID NO: 811959

SEQ ID NO: 811963 - protein, 283 aa, Homo sapiens; identical to SEQ ID NO: 811959

SEQ ID NO: 811964 - protein, 300 aa, Homo sapiens
MASGTTTTAVKIGIIGGTGLDDPEILEGRTEKYVDTPFGKPSDALILGKIKNVDCILLARHGRQHTIMPSKVNYQANIWALKEEGCTHVIVTTACGSLREEIQPGDIVIIDQFIDRTTMRPQSFYDGSHSCARGVCHIPMAEPFCPKTREVLIETAKKLGLRCHSKGTMVTIEGPRFSSRAESFMFRTWGADVINMTTVPEVVLAKEAGICYASIAMATDYDCWKEHEEAVSVDRVLKTLKENANKAKSLLLTTIPQIGSTEWSETLHNLKEREVRNQEFRVPEVPHLNMAQFSVLLPRH

SEQ ID NO: 811965 - protein, 300 aa, Homo sapiens
MRPARASLAAAGRDWGAALGTHLPREERIGIIGGTGLDDPEILEGRTEKYVDTPFGKPSDALILGKIKNVDCILLARHGRQHTIMPSKVNYQANIWALKEEGCTHVIVTTACGSLREEIQPGDIVIIDQFIDRTTMRPQSFYDGSHSCARGVCHIPMAEPFCPKTREVLIETAKKLGLRCHSKGTMVTIEGPRFSSRAESFMFRTWGADVINMTTVPEVVLAKEAGICYASIAMATDYDCWKEHEEAVSVDRVLKTLKENANKAKSLLLTTIPQIGSTEWSETLHNLKNMAQFSVLLPRH

SEQ ID NO: 811966 - protein, 321 aa, Homo sapiens
MAICGRIDILILNSACDCTNTYITQCPDSGPRAVQNQTARERIRDSLVTWSIVLRMSRYKFSSGDRTDSLWSCTPFGKPSDALILGKIKNVDCILLARHGRQHTIMPSKVNYQANIWALKEEGCTHVIVTTACGSLREEIQPGDIVIIDQFIDRTTMRPQSFYDGSHSCARGVCHIPMAEPFCPKTREVLIETAKKLGLRCHSKGTMVTIEGPRFSSRAESFMFRTWGADVINMTTVPEVVLAKEAGICYASIAMATDYDCWKEHEEAVSVDRVLKTLKENANKAKSLLLTTIPQIGSTEWSETLHNLKNMAQFSVLLPRH

SEQ ID NO: 811967 - protein, 293 aa, Homo sapiens
MASGTTTTAVKIGIIGGTGLDDPEILEGRTEKYVDTPFGKPSDALILGKIKNVDCILLARHGRQHTIMPSKVNYQANIWALKEEGCTHVIVTTACGSLREEIQPGDIVIIDQFIDRTTMRPQSFYDGSHSCARGVCHIPMAEPFCPKTREVLIETAKKLGLRCHSKGTMVTIEGPRFSSRAESFMFRTWGADVINMTTVPEVVLAKEAGICYASIAMATDYDCWKEHEEAMIKFQMILSEGYHPFNIQESPFYRGLLDFPSVGHGRGEILPLSPLDLAGYCFQQPMQPPCPDS

SEQ ID NO: 811968 - protein, 117 aa, Homo sapiens
MASGTTTTAVKIGIIGGTGLDDPEILEGRTEKYVDTPFGKPSDALILGKIKNVDCILLARHGRQHTIMPSKVNYQANIWALKEEGCTHVIVTTACGSLREEIQPGDIVIIDQFIDRL

SEQ ID NO: 811969 - protein, 226 aa, Homo sapiens
MTVQRLVAAAVLVALVSLILNNVAAFTSNWVCQTLEDGRRRSVGLWRSCWLVDRTRGGPSPGARAGQVDAHDCEALGWGSEAAGFQESRGTVKLQFDMMRACNLVATAALTAGQLTFLLGLVGLPLLSPDAPCWEEAMAAAFQLASFVLVIGLVTFYRIGPYTNLSWSCYLNIGACLLATLAAAMLIWNILHKREDCMAPRVIVISRSLTARFRRGLDNDYVESPC

SEQ ID NO: 811970 - protein, 226 aa, Homo sapiens; identical to SEQ ID NO: 811969

SEQ ID NO: 811971 - protein, 226 aa, Homo sapiens; identical to SEQ ID NO: 811969

SEQ ID NO: 811972 - protein, 226 aa, Homo sapiens; identical to SEQ ID NO: 811969

SEQ ID NO: 811973 - protein, 163 aa, Homo sapiens
AAASGAGAAGALRRPGLLGAPRCCRLGGLGYLQSLFSEFLMSGGPEARPPMLVEGGGPESLQKAPCTRGPPSHPVPPALAFTVGNGSGPGVRCPRNMAEGHPGPERRQSQQGLFRAAWLPGSRPSPLFCVCSVTSPGWDVPQVHRVEVGHGRRQETHPVRRRA

SEQ ID NO: 811974 - protein, 120 aa, Homo sapiens
AVLGRGRAFSLNSLCPGAVSGRVAPRVSAVSPLLRLFRDFAWVGCTAGASRRGGARPPARNPPCPEAGVRQAQPARAHLSSFFDQFIQNCSIIYQLYVFNLFLWKKKVFHYIFISEFQTA

SEQ ID NO: 811975 - protein, 64 aa, Homo sapiens
MVSNGCLNQMVPFLTPKEVPTARGLCDALMSSGEERGPHMKGPLGQILRVAHLSADSWAPPQTY

SEQ ID NO: 811976 - protein, 64 aa, Homo sapiens; identical to SEQ ID NO: 811975

SEQ ID NO: 811977 - protein, 64 aa, Homo sapiens; identical to SEQ ID NO: 811975

SEQ ID NO: 811978 - protein, 1441 aa, Homo sapiens
AAAVVAAREVWILVPSARSLRARIMAAVPQNNLQEQLERHSARTLNNKLSLSKPKFSGFTFKKKTSSDNNVSVTNVSVAKTPVLRNKDVNVTEDFSFSEPLPNTTNQQRVKDFFKNAPAGQETQRGGSKSLLPDFLQTPKEVVCTTQNTPTVKKSRDTALKKLEFSSSPDSLSTINDWDDMDDFDTSETSKSFVTPPQSHFVRVSTAQKSKKGKRNFFKAQLYTTNTVKTDLPPPSSESEQIDLTEEQKDDSEWLSSDVICIDDGPIAEVHINEDAQESDSLKTHLEDERDNSEKKKNLEEAELHSTEKVPCIEFDDDDYDTDFVPPSPEEIISASSSSSKCLSTLKDLDTSDRKEDVLSTSKDLLSKPEKMSMQELNPETSTDCDARQISLQQQLIHVMEHICKLIDTIPDDKLKLLDCGNELLQQRNIRRKLLTEVDFNKSDASLLGSLWRYRPDSLDGPMEGDSCPTGNSMKELNFSHLPSNSVSPGDCLLTTTLGKTGFSATRKNLFERPLFNTHLQKSFVSSNWAETPRLGKKNESSYFPGNVLTSTAVKDQNKHTASINDLERETQPSYDIDNFDIDDFDDDDDWEDIMHNLAASKSSTAAYQPIKEGRPIKSVSERLSSAKTDCLPVSSTAQNINFSESIQNYTDKSAQNLASRNLKHERFQSLSFPHTKEMMKIFHKKFGLHNFRTNQLEAINAALLGEDCFILMPTGGGKSLCYQLPACVSPGVTVVISPLRSLIVDQVQKLTSLDIPATYLTGDKTDSEATNIYLQLSKKDPIIKLLYVTPEKICASNRLISTLENLYERKLLARFVIDEAHCVSQWGHDFRQDYKRMNMLRQKFPSVPVMALTATANPRVQKDILTQLKILRPQVFSMSFNRHNLKYYVLPKKPKKVAFDCLEWIRKHHPYDSGIIYCLSRRECDTMADTLQRDGLAALAYHAGLSDSARDEVQQKWINQDGCQVICATIAFGMGIDKPDVRFVIHASLPKSVEGYYQESGRAGRDGEISHCLLFYTYHDVTRLKRLIMMEKDGNHHTRETHFNNLYSMVHYCENITECRRIQLLAYFGENGFNPDFCKKHPDVSCDNCCKTKDYKTRDVTDDVKSIVRFVQEHSSSQGMRNIKHVGPSGRFTMNMLVDIFLGSKSAKIQSGIFGKGSAYSRHNAERLFKKLILDKILDEDLYINANDQAIAYVMLGNKAQTVLNGNLKVDFMETENSSSVKKQKALVAKVSQREEMVKKCLGELTEVCKSLGKVFGVHYFNIFNTVTLKKLAESLSSDPEVLLQIDGVTEDKLEKYGAEVISVLQKYSEWTSPAEDSSPGISLSSSRGPGRSAAEELDEEIPVSSHYFASKTRNERKRKKMPASQRSKRRKTASSGSKAKGGSATCRKISSKTKSSSIIGSSSASHTSQATSGANSKLGIMAPPKPINRPFLKPSYAFS

SEQ ID NO: 811979 - protein, 213 aa, Homo sapiens
MSTGHGNSGQEQICSTPRTWHRSHPQLPPALALALALPWPMPLELDESLSSDPEVLLQIDGVTEDKLEKYGAEVISVLQKYSEWTSPAEDSSPGISLSSSRGPGRSAAEELDEEIPVSSHYFASKTRNERKRKKMPASQRSKRRKTASSGSKAKGGSATCRKISSKTKSSSIIGSSSASHTSQATSGANSKLGIMAPPKPINRPFLKPSYAFS

SEQ ID NO: 811980 - protein, 1441 aa, Homo sapiens; identical to SEQ ID NO: 811978

SEQ ID NO: 811981 - protein, 1070 aa, Homo sapiens
MSMQELNPETSTDCDARQISLQQQLIHVMEHICKLIDTIPDDKLKLLDCGNELLQQRNIRRKLLTEVDFNKSDASLLGSLWRYRPDSLDGPMEGDSCPTGNSMKELNFSHLPSNSVSPGDCLLTTTLGKTGFSATRKNLFERPLFNTHLQKSFVSSNWAETPRLGKKNESSYFPGNVLTSTAVKDQNKHTASINDLERETQPSYDIDNFDIDDFDDDDDWEDIMHNLAASKSSTAAYQPIKEGRPIKSVSERLSSAKTDCLPVSSTAQNINFSESIQNYTDKSAQNLASRNLKHERFQSLSFPHTKEMMKIFHKKFGLHNFRTNQLEAINAALLGEDCFILMPTGGGKSLCYQLPACVSPGVTVVISPLRSLIVDQVQKLTSLDIPATYLTGDKTDSEATNIYLQLSKKDPIIKLLYVTPEKICASNRLISTLENLYERKLLARFVIDEAHCVSQWGHDFRQDYKRMNMLRQKFPSVPVMALTATANPRVQKDILTQLKILRPQVFSMSFNRHNLKYYVLPKKPKKVAFDCLEWIRKHHPYDSGIIYCLSRRECDTMADTLQRDGLAALAYHAGLSDSARDEVQQKWINQDGCQVICATIAFGMGIDKPDVRFVIHASLPKSVEGYYQESGRAGRDGEISHCLLFYTYHDVTRLKRLIMMEKDGNHHTRETHFNNLYSMVHYCENITECRRIQLLAYFGENGFNPDFCKKHPDVSCDNCCKTKDYKTRDVTDDVKSIVRFVQEHSSSQGMRNIKHVGPSGRFTMNMLVDIFLGSKSAKIQSGIFGKGSAYSRHNAERLFKKLILDKILDEDLYINANDQAIAYVMLGNKAQTVLNGNLKVDFMETENSSSVKKQKALVAKVSQREEMVKKCLGELTEVCKSLGKVFGVHYFNIFNTVTLKKLAESLSSDPEVLLQIDGVTEDKLEKYGAEVISVLQKYSEWTSPAEDSSPGISLSSSRGPGRSAAEELDEEIPVSSHYFASKTRNERKRKKMPASQRSKRRKTASSGSKAKGGSATCRKISSKTKSSSIIGSSSASHTSQATSGANSKLGIMAPPKPINRPFLKPSYAFS

SEQ ID NO: 811982 - protein, 1207 aa, Homo sapiens
AAAVVAAREVWILVPSARSLRARIMAAVPQNNLQEQLERHSARTLNNKLSLSKPKFSGFTFKKKTSSDNNVSVTNVSVAKTPVLRNKDVNVTEDFSFSEPLPNTTNQQRVKDFFKNAPAGQETQRGGSKSLLPDFLQTPKEVVCTTQNTPTVKKSRDTALKKLEFSSSPDSLSTINDWDDMDDFDTSETSKSFVTPPQSHFVRVSTAQKSKKGKRNFFKAQLYTTNTVKTDLPPPSSESEQIDLTEEQKDDSEWLSSDVICIDDGPIAEVHINEDAQESDSLKTHLEDERDNSEKKKNLEEAELHSTEKVPCIEFDDDDYDTDFVPPSPEEIISASSSSSKCLSTLKDLDTSDRKEDVLSTSKDLLSKPEKMSMQELNPETSTDCDARQISLQQQLIHVMEHICKLIDTIPDDKLKLLDCGNELLQQRNIRRKLLTEVDFNKSDASLLGSLWRYRPDSLDGPMEGDSCPTGNSMKELNFSHLPSNSVSPGDCLLTTTLGKTGFSATRKNLFERPLFNTHLQKSFVSSNWAETPRLGKKNESSYFPGNVLTSTAVKDQNKHTASINDLERETQPSYDIDNFDIDDFDDDDDWEDIMHNLAASKSSTAAYQPIKEGRPIKSVSERLSSAKTDCLPVSSTAQNINFSESIQNYTDKSAQNLASRNLKHERFQSLSFPHTKEMMKIFHKKFGLHNFRTNQLEAINAALLGEDCFILMPTGGGKSLCYQLPACVSPGVTVVISPLRSLIVDQVQKLTSLDIPATYLTGDKTDSEATNIYLQLSKKDPIIKLLYVTPEKICASNRLISTLENLYERKLLARFVIDEAHCVSQWGHDFRQDYKRMNMLRQKFPSVPVMALTATANPRVQKDILTQLKILRPQVFSMSFNRHNLKYYVLPKKPKKVAFDCLEWIRKHHPYDSGIIYCLSRRECDTMADTLQRDGLAALAYHAGLSDSARDEVQQKWINQDGCQVICATIAFGMGIDKPDVRFVIHASLPKSVEGYYQESGRAGRDGEISHCLLFYTYHDVTRLKRLIMMEKDGNHHTRETHFNNLYSMVHYCENITECRRIQLLAYFGENGFNPDFCKKHPDVSCDNCCKTKDYKTRDVTDDVKSIVRFVQEHSSSQGMRNIKHVGPSGRFTMNMLVDIFLGSKSAKIQSGIFGKGSAYSRHNAERLFKKLILDKILDEDLYINANDQAIAYVMLGNKSLASLAS

SEQ ID NO: 811983 - protein, 979 aa, Homo sapiens
MEGDSCPTGNSMKELNFSHLPSNSVSPGDCLLTTTLGKTGFSATRKNLFERPLFNTHLQKSFVSSNWAETPRLGKKNESSYFPGNVLTSTAVKDQNKHTASINDLERETQPSYDIDNFDIDDFDDDDDWEDIMHNLAASKSSTAAYQPIKEGRPIKSVSERLSSAKTDCLPVSSTAQNINFSESIQNYTDKSAQNLASRNLKHERFQSLSFPHTKEMMKIFHKKFGLHNFRTNQLEAINAALLGEDCFILMPTGGGKSLCYQLPACVSPGVTVVISPLRSLIVDQVQKLTSLDIPATYLTGDKTDSEATNIYLQLSKKDPIIKLLYVTPEKICASNRLISTLENLYERKLLARFVIDEAHCVSQWGHDFRQDYKRMNMLRQKFPSVPVMALTATANPRVQKDILTQLKILRPQVFSMSFNRHNLKYYVLPKKPKKVAFDCLEWIRKHHPYDSGIIYCLSRRECDTMADTLQRDGLAALAYHAGLSDSARDEVQQKWINQDGCQVICATIAFGMGIDKPDVRFVIHASLPKSVEGYYQESGRAGRDGEISHCLLFYTYHDVTRLKRLIMMEKDGNHHTRETHFNNLYSMVHYCENITECRRIQLLAYFGENGFNPDFCKKHPDVSCDNCCKTKDYKTRDVTDDVKSIVRFVQEHSSSQGMRNIKHVGPSGRFTMNMLVDIFLGSKSAKIQSGIFGKGSAYSRHNAERLFKKLILDKILDEDLYINANDQAIAYVMLGNKAQTVLNGNLKVDFMETENSSSVKKQKALVAKVSQREEMVKKCLGELTEVCKSLGKVFGVHYFNIFNTVTLKKLAESLSSDPEVLLQIDGVTEDKLEKYGAEVISVLQKYSEWTSPAEDSSPGISLSSSRGPGRSAAEELDEEIPVSSHYFASKTRNERKRKKMPASQRSKRRKTASSGSKAKGGSATCRKISSKTKSSSIIGSSSASHTSQATSGANSKLGIMAPPKPINRPFLKPSYAFS

SEQ ID NO: 811984 - protein, 467 aa, Homo sapiens
MGIDKPDVRFVIHASLPKSVEGYYQESGRAGRDGEISHCLLFYTYHDVTRLKRLIMMEKDGNHHTRETHFNNLYSMVHYCENITECRRIQLLAYFGENGFNPDFCKKHPDVSCDNCCKTKDYKTRDVTDDVKSIVRFVQEHSSSQGMRNIKHVGPSGRFTMNMLVDIFLGSKSAKIQSGIFGKGSAYSRHNAERLFKKLILDKILDEDLYINANDQAIAYVMLGNKAQTVLNGNLKVDFMETENSSSVKKQKALVAKVSQREEMVKKCLGELTEVCKSLGKVFGVHYFNIFNTVTLKKLAESLSSDPEVLLQIDGVTEDKLEKYGAEVISVLQKYSEWTSPAEDSSPGISLSSSRGPGRSAAEELDEEIPVSSHYFASKTRNERKRKKMPASQRSKRRKTASSGSKAKGGSATCRKISSKTKSSSIIGSSSASHTSQATSGANSKLGIMAPPKPINRPFLKPSYAFS

SEQ ID NO: 811985 - protein, 380 aa, Homo sapiens
RGVPRQRRPGGPGTQESMATLRRLREAPRHLLVCEKSNFGNHKSRHRHLVQTHYYNYRVSFLIPECGILSEELKNLVMNTGPYYFVKNLPLHELITPEFISTFIKKGSCYALTYNTHIDEDNTVALLPNGKLILSLDKDTYEETGLQGHPSQFSGRKIMKFIVSIDLMELSLNLDSKKYERISWSFKEKKPLKFDFLLAWHKTGSEESTMMSYFSKYQIQEHQPKVALSTLRDLQCPVLQSSELEGTPEVSCRALELFDWLGAVFSNVDLNNEPNNFISTYCCPEPSTVVAKAYLCTITGFILPEKICLLLEHLCHYFDEPKLAPWVTLSVQGFADSPVSWEKNEHGFRKGGEHLYNFVIFNNQDYWLQMAVGANDHCPP

SEQ ID NO: 811986 - protein, 357 aa, Homo sapiens
RGVPRQRRPGGPGTQESMATLRRLREAPRHLLVCEKSNFGNHKSRHRHLVQTHYYNYRVSFLIPECGILSEELKNLVMNTGPYYFVKNLPLHELITPEFISTFIKKGKLILSLDKDTYEETGLQGHPSQFSGRKIMKFIVSIDLMELSLNLDSKKYERISWSFKEKKPLKFDFLLAWHKTGSEESTMMSYFSKYQIQEHQPKVALSTLRDLQCPVLQSSELEGTPEVSCRALELFDWLGAVFSNVDLNNEPNNFISTYCCPEPSTVVAKAYLCTITGFILPEKICLLLEHLCHYFDEPKLAPWVTLSVQGFADSPVSWEKNEHGFRKGGEHLYNFVIFNNQDYWLQMAVGANDHCPP

SEQ ID NO: 811987 - protein, 315 aa, Homo sapiens
RGVPRQRRPGGPGTQESMATLRRLREAPRHLLVCEKSNFGNHKSRHRHLVQTHYYNYRVSFLIPECGILSEELKNLVMNTGPYYFVKNLPLHELITPEFISTFIKKGSCYALTYNTHIDEDNTVALLPNGKLILSLDKDTYEETGLQGHPSQFSGRKIMKFIVSIDLMELSLNLDSKKYERISWSFKEKKPLKFDFLLAWHKTGSEESTMMSYFSKYQIQEHQPKVALSTLRDLQCPVLQSSELEGTPEVSCRALELFDWLGAVFSNVDLNNEPNNFISTYCCPEPSTVVAKAYLCTITGFILPEKICLLLEHLW

SEQ ID NO: 811988 - protein, 276 aa, Homo sapiens
RGVPRQRRPGGPGTQESMATLRRLREAPRHLLVCEKSNFGNHKSRHRHLVQTHYYNYRVSFLIPECGILSEELKNLVMNTGPYYFVKNLPLHELITPEFISTFIKKGSCYALTYNTHIDEDNTVALLPNGKLILSLDKDTYEETGLQGHPSQFSGRKIMKFIVSIDLMELSLNLDSKKYERISWSFKEKKPLKFDFLLAWHKTGSEESTMMSYFSKYQIQEHQPKVALSTLRDLQCPVLQSSELEGTPEVSCRALELFDWLGAVFSNVDLRVPELR

SEQ ID NO: 811989 - protein, 498 aa, Homo sapiens
MVTWLYRFLPTSNMAAKLRSLLPPDLRLQFWLHARLQKCFLSRGCGSYCAGAKASPLPPGKMAMGLMCGRRELLRLLQSGRRVHSVAGPSQWLGKPLTTRLLFPVAPCCCRPHYLFLAASGPRSLSTSAISFAEVQVQAPPVVAATPSPTAVPEVASGETADVVQTAAEQSFAELGLGSYTPVGLIQNLLEFMHVDLGLPWWGAIAACTVFARCLIFPLIVTGQREAARIHNHLPEIQKFSSRIREAKLAGDHIEYYKASSEMALYQKKHGIKLYKPLILPVTQAPIFISFFIALREMANLPVPSLQTGGLWWFQDLTVSDPIYILPLAVTATMWAVLELGAETGVQSSDLQWMRNVIRMMPLITLPITMHFPTAVFMYWLSSNLFSLVQVSCLRIPAVRTVLKIPQRVVHDLDKLPPREGFLESFKKGWKNAEMTRQLREREQRMRNQLELAARGPLRQTFTHNPLLQPGKDNPPNIPSSSSSSKPKSKYPWHDTLG

SEQ ID NO: 811990 - protein, 437 aa, Homo sapiens
MAMGLMCGRRELLRLLQSGRRVHSVAGPSQWLGKPLTTRLLFPVAPCCCRPHYLFLAASGPRSLSTSAISFAEVQVQAPPVVAATPSPTAVPEVASGETADVVQTAAEQSFAELGLGSYTPVGLIQNLLEFMHVDLGLPWWGAIAACTVFARCLIFPLIVTGQREAARIHNHLPEIQKFSSRIREAKLAGDHIEYYKASSEMALYQKKHGIKLYKPLILPVTQAPIFISFFIALREMANLPVPSLQTGGLWWFQDLTVSDPIYILPLAVTATMWAVLELGAETGVQSSDLQWMRNVIRMMPLITLPITMHFPTAVFMYWLSSNLFSLVQVSCLRIPAVRTVLKIPQRVVHDLDKLPPREGFLESFKKGWKNAEMTRQLREREQRMRNQLELAARGPLRQTFTHNPLLQPGKDNPPNIPSSSSSSKPKSKYPWHDTLG

SEQ ID NO: 811991 - protein, 498 aa, Homo sapiens; identical to SEQ ID NO: 811989

SEQ ID NO: 811992 - protein, 498 aa, Homo sapiens; identical to SEQ ID NO: 811989

SEQ ID NO: 811993 - protein, 498 aa, Homo sapiens; identical to SEQ ID NO: 811989

SEQ ID NO: 811994 - protein, 504 aa, Homo sapiens
MVTWLYRFLPTSNMAAKLRSLLPPDLRLQFWLHARLQKCFLSRGCGSYCAGAKASPLPPGKMAMGLMCGRRELLRLLQSGRRVHSVAGPSQWLGKPLTTRLLFPVAPCCCRPHYLFLAASGPRSLSTSAISFAEVQVQAPPVVAATPSPTAVPEVASGETADVVQTAAEQSFAELGLGSYTPVGLIQNLLEFMHVDLGLPWWGAIAACTVFARCLIFPLIVTGQREAARIHNHLPEIQKFSSRIREAKLAGDHIEYYKASSEMALYQKKHGIKLYKPLILPVTQAPIFISFFIALREMANLPVPSLQTGGLWWFQDLTVSDPIYILPLAVTATMWAVLELGAETGVQSSDLQWMRNVIRMMPLITLPITMHFPTAVFMYWLSSNLFSLVQVSCLRIPAVRTVLKIPQRVVHDLDKLPPREGFLESFKKGWKNAEMTRQLREREQRMRNQLELAARGPLRQTFTHNPLLQPGKDNPPNIPSSSSSSKPKSKYPWHCLDSGHCLDS

SEQ ID NO: 811995 - protein, 306 aa, Homo sapiens
MHVDLGLPWWGAIAACTVFARCLIFPLIVTGQREAARIHNHLPEIQKFSSRIREAKLAGDHIEYYKASSEMALYQKKHGIKLYKPLILPVTQAPIFISFFIALREMANLPVPSLQTGGLWWFQDLTVSDPIYILPLAVTATMWAVLELGAETGVQSSDLQWMRNVIRMMPLITLPITMHFPTAVFMYWLSSNLFSLVQVSCLRIPAVRTVLKIPQRVVHDLDKLPPREGFLESFKKGWKNAEMTRQLREREQRMRNQLELAARGPLRQTFTHNPLLQPGKDNPPNIPSSSSSSKPKSKYPWHDTLG

SEQ ID NO: 811996 - protein, 306 aa, Homo sapiens; identical to SEQ ID NO: 811995

SEQ ID NO: 811997 - protein, 474 aa, Homo sapiens
MVTWLYRFLPTSNMAAKLRSLLPPDLRLQFWLHARLQKCFLSRGCGSYCAGAKASPLPPGKMAMGLMCGRRELLRLLQSGRRVHSVAGPSQWLGKPLTTRLLFPVAPCCCRPHYLFLAASGPRSLSTSAISFAEVQVQAPPVVAATPSPTAVPEVASGETADVVQTAAEQSFAELGLGSYTPVGLIQNLLEFMHVDLGLPWWGAIAACTVFARCLIFPLIVTGQREAARIHNHLPEIQKFSSRIREAKLAGDHIEYYKASSEMALYQKKHGIKLYKPLILPVTQAPIFISFFIALREMANLPVPSLQTGGLWWFQDLTVSDPIYILPLAVTATMWAVLELGAETGVQSSDLQWMRNVIRMMPLITLPITMHFPTAVFMYWLSSNLFSLVQVSCLRIPAVRTVLKIPQRVVHDLDKLPPREGFLESFKKGWKNAEMTRQLREREQRMRNQLELAARAPLAQTFTRDPIIQGVWKQ

SEQ ID NO: 811998 - protein, 326 aa, Homo sapiens
MVTWLYRFLPTSNMAAKLRSLLPPDLRLQFWLHARLQKCFLSRGCGSYCAGAKASPLPPGKMAMGLMCGRRELLRLLQSGRRVHSVAGPSQWLGKPLTTRLLFPVAPCCCRPHYLFLAASGPRSLSTSAISFAEVQVQAPPVVAATPSPTAVPEVASGETADVVQTAAEQSFAELGLGSYTPVGLIQNLLEFMHVDLGLPWWGAIAACTVFARCLIFPLIVTGQREAARIHNHLPEIQKFSSRIREAKLAGDHIEYYKASSEMALYQKKHGIKLYKPLILPVTQVSKNISFLISSSTHEISSLCFMCPRSPKKQVVVDYTWLSVVG

SEQ ID NO: 811999 - protein, 501 aa, Homo sapiens
PQLPPFSPQKKRKIGKLTGQNGDGTNVRTPGASALATVRASAHHASTEALSTGFGKSLYHYGVLFPVATVPAVSLTRIALSFAVSSQVTPSSTSCTSTDYHRSCWNFQVLGAPSLIVGLSDIPSTHDYSTLPESWLLERLARSVGRKTQLAVVTTLLLKLVAWVVTTIPMLRTLDPRNVYVCILVLSLFCNSRGLALGCGRVHLAVFDDRSTVFARCLIFPLIVTGQREAARIHNHLPEIQKFSSRIREAKLAGDHIEYYKASSEMALYQKKHGIKLYKPLILPVTQAPIFISFFIALREMANLPVPSLQTGGLWWFQDLTVSDPIYILPLAVTATMWAVLELGAETGVQSSDLQWMRNVIRMMPLITLPITMHFPTAVFMYWLSSNLFSLVQVSCLRIPAVRTVLKIPQRVVHDLDKLPPREGFLESFKKGWKNAEMTRQLREREQRMRNQLELAARGPLRQTFTHNPLLQPGKDNPPNIPSSSSSSKPKSKYPWHDTLG

SEQ ID NO: 812000 - protein, 236 aa, Homo sapiens
MALYQKKHGIKLYKPLILPVTQAPIFISFFIALREMANLPVPSLQTGGLWWFQDLTVSDPIYILPLAVTATMWAVLELGAETGVQSSDLQWMRNVIRMMPLITLPITMHFPTAVFMYWLSSNLFSLVQVSCLRIPAVRTVLKIPQRVVHDLDKLPPREGFLESFKKGWKNAEMTRQLREREQRMRNQLELAARGPLRQTFTHNPLLQPGKDNPPNIPSSSSSSKPKSKYPWHDTLG

SEQ ID NO: 812001 - protein, 523 aa, Homo sapiens
MAMGLMCGRRELLRLLQSGRRVHSVAGPSQWLGKPLTTRLLFPVAPCCCRPHYLFLAASGPRSLSTSAISFAEVQVQAPPVVAATPSPTAVPEVASGETADVVQTAAEQSFAELGLGSYTPVGLIQNLLEFMHVDLGLPWWGAIAACTVFARCLIFPLIVTGQREAARIHNHLPEIQKFSSRIREAKLAGDHIECESVQNERGRSPHLHFSLHSAGGKEQCKSEVATVGKVLKVYLFLRPNAPKEWPGLVRNFTGQVDNEDVPPPLMYLLPQPLISPHLTDYKASSEMALYQKKHGIKLYKPLILPVTQAPIFISFFIALREMANLPVPSLQTGGLWWFQDLTVSDPIYILPLAVTATMWAVLELGAETGVQSSDLQWMRNVIRMMPLITLPITMHFPTAVFMYWLSSNLFSLVQVSCLRIPAVRTVLKIPQRVVHDLDKLPPREGFLESFKKGWKNAEMTRQLREREQRMRNQLELAARGPLRQTFTHNPLLQPGKDNPPNIPSSSSSSKPKSKYPWHDTLG

SEQ ID NO: 812002 - protein, 484 aa, Homo sapiens
  misc_feature (473)..(473): Xaa can be any naturally occurring amino acid
  misc_feature (478)..(478): Xaa can be any naturally occurring amino acid
  misc_feature (482)..(482): Xaa can be any naturally occurring amino acid
MVTWLYRFLPTSNMAAKLRSLLPPDLRLQFWLHARLQKCFLSRGCGSYCAGAKASPLPPGKMAMGLMCGRRELLRLLQSGRRVHSVAGPSQWLGKPLTTRLLFPVAPCCCRPHYLFLAASGPRSLSTSAISFAEVQVQAPPVVAATPSPTAVPEVASGETADVVQTAAEQSFAELGLGSYTPVGLIQNLLEFMHVDLGLPWWGAIAACTVFARCLIFPLIVTGQREAARIHNHLPEIQKFSSRIREAKLAGDHIEYYKASSEMALYQKKHGIKLYKPLILPVTQAPIFISFFIALREMANLPVPSLQTGGLWWFQDLTVSDPIYILPLAVTATMWAVLELGAETGVQSSDLQWMRNVIRMMPLITLPITMHFPTHQQCPGLALTARPLLMLMGLLFSFLSYSFAKPLLMTFTTVTHIISFKPHSNSVRDCYLHFMDEEADSEEMNFQIHPTGKEKGSLLGDFEFQNCFRFQVXGGSIXFKAXPW

SEQ ID NO: 812003 - protein, 200 aa, Homo sapiens
MAMGLMCGRRELLRLLQSGRRVHSVAGPSQWLGKPLTTRLLFPVAPCCCRPHYLFLAASGPRSLSTSAISFAEVQVQAPPVVAATPSPTAVPEVASGETADVVQTAAEQSFAELGLGSYTPVGLIQNLLEFMHVDLGLPWWGAIAACTVFARCLIFPLIVTGQREAARIHNHLPEIQKFSSRIREAKLAGDHIECESVAE

SEQ ID NO: 812004 - protein, 389 aa, Homo sapiens
MAMGLMCGRRELLRLLQSGRRVHSVAGPSQWLGKPLTTRLLFPVAPCCCRPHYLFLAASGPRSLSTSAISFAEVQVQAPPVVAATPSPTAVPEVASGETADVVQTAAEQSFAELGLGSYTPVGLIQNLLEFMHVDLGLPWWGAIAAYYKASSEMALYQKKHGIKLYKPLILPVTQAPIFISFFIALREMANLPVPSLQTGGLWWFQDLTVSDPIYILPLAVTATMWAVLELGAETGVQSSDLQWMRNVIRMMPLITLPITMHFPTAVFMYWLSSNLFSLVQVSCLRIPAVRTVLKIPQRVVHDLDKLPPREGFLESFKKGWKNAEMTRQLREREQRMRNQLELAARGPLRQTFTHNPLLQPGKDNPPNIPSSSSSSKPKSKYPWHDTLG

SEQ ID NO: 812005 - protein, 217 aa, Homo sapiens
MAMGLMCGRRELLRLLQSGRRVHSVAGPSQWLGKPLTTRLLFPVAPCCCRPHYLFLAASGPRSLSTSAISFAEVQVQAPPVVAATPSPTAVPEVASGETADVVQTAAEQSFAELGLGSYTPVGLIQNLLEFMHVDLGLPWWGAIAAYYKASSEMALYQKKHGIKLYKPLILPVTQVSKNISFLISSSTHEISSLCFMCPRSPKKQVVVDYTWLSVVG

SEQ ID NO: 812006 - protein, 263 aa, Homo sapiens
  misc_feature (1)..(1): Xaa can be any naturally occurring amino acid
  misc_feature (6)..(6): Xaa can be any naturally occurring amino acid
  misc_feature (8)..(8): Xaa can be any naturally occurring amino acid
XGRGIXGXGYPFKLAGDHIEYYKASSEMALYQKKHGIKLYKPLILPVTQAPIFISFFIALREMANLPVPSLQTGGLWWFQDLTVSDPIYILPLAVTATMWAVLELGAETGVQSSDLQWMRNVIRMMPLITLPITMHFPTAVFMYWLSSNLFSLVQVSCLRIPAVRTVLKIPQRVVHDLDKLPPREGFLESFKKGWKNAEMTRQLREREQRMRNQLELAARGPLRQTFTHNPLLQPGKDNPPNIPSSSSSSKPKSKYPWHDTLG

SEQ ID NO: 812007 - protein, 143 aa, Homo sapiens
ASSEMALYQKKHGIKLYKPLILPGVQAPPVVAATPSPTAVPEVASGETADVVQTAAEQSFAELGLGSYTPVGLIQNLLEFMHVDLGLPWWGAIAACTVFARCLIFPLIVTGQREAARIHNHLPEIQKFSSRIREAKLAGDHIE

SEQ ID NO: 812008 - protein, 345 aa, Homo sapiens
MVTWLYRFLPTSNMAAKLRSLLPPDLRLQFWLHARLQKCFLSRGCGSYCAGAKASPLPPGKMAMGLMCGRRELLRLLQSGRRVHSVAGPSQWLGKPLTTRLLFPVAPCCCRPHYLFLAASGPRSLSTSAISFAEVQVQAPPVVAATPSPTAVPEVASGETADVVQTAAEQSFAELGLGSYTPVGLIQNLLEFMHVDLGLPWWGAIAACTVFARCLIFPLIVTGQREAARIHNHLPEIQKFSSRIREAKLAGDHIEYYKASSEMALYQKKHGIKLYKPLILPVTQPPIFISFFIGFEEQWAPCGSQESHGIRSHLNINQWLITWEHCGWLLGNGPEQGVKGSAFNG

SEQ ID NO: 812009 - protein, 326 aa, Homo sapiens; identical to SEQ ID NO: 811998

SEQ ID NO: 812010 - protein, 113 aa, Homo sapiens
MAMGLMCGRRELLRLLQSGRRVHSVAGPSQWLGKPLTTRLLFPVAPCCCRPHYLFLAASGPRSLSTSAISFAEVQVQAPPVVAATPSPTAVPEVASGETADVVQTAAETKNFR

SEQ ID NO: 812011 - protein, 669 aa, Homo sapiens
MGTALVYHEDMTATRLLWDDPECEIERPERLTAALDRLRQRGLEQRCLRLSAREASEEELGLVHSPEYVSLVRETQVLGKEELQALSGQFDAIYFHPSTFHCARLAAGAGLQLVDAVLTGAVQNGLALVRPPGHHGQRAAANGFCVFNNVAIAAAHAKQKHGLHRILVVDWDVHHGQGIQYLFEDDPSVLYFSWHRYEHGRFWPFLRESDADAVGRGQGLGFTVNLPWNQVGMGNADYVAAFLHLLLPLAFEFDPELVLVSAGFDSAIGDPEGQMQATPECFAHLTQLLQVLAGGRVCAVLEGGYHLESLAESVCMTVQTLLGDPAPPLSGPMAPCQSALESIQSARAAQAPHWKSLQQQDVTAVPMSPSSHSPEGRPPPLLPGGPVCKAAASAPSSLLDQPCLCPAPSVRTAVALTTPDITLVLPPDVIQQEASALREETEAWARPHESLAREEALTALGKLLYLLDGMLDGQVNSGIAATPASAAAATLDVAVRRGLSHGAQRLLCVALGQLDRPPDLAHDGRSLWLNIRGKEAAALSMFHVSTPLPVMTGGFLSCILGLVLPLAYGFQPDLVLVALGPGHGLQGPHAALLAAMLRGLAGGRVLALLEENSTPQLAGILARVLNGEAPPSLGPSSVASPEDVQALMYLRGQLEPQWKMLQCHPHLVA

SEQ ID NO: 812012 - protein, 669 aa, Homo sapiens; identical to SEQ ID NO: 812011

SEQ ID NO: 812013 - protein, 649 aa, Homo sapiens
MGTALVYHEDMTATRLLWDDPECEIERPERLTAALDRLRQRGLEQRCLRLSAREASEEELGLVHSPEYVSLVRETQVLGKEELQALSGQFDAIYFHPSTFHCARLAAGAGLQLVDAVLTGAVQNGLALVRPPGHHGQRAAANGFCVFNNVAIAAAHAKQKHGLHRILVVDWDVHHGQGIQYLFEDDPSVLYFSWHRYEHGRFWPFLRESDADAVGRGQGLGFTVNLPWNQVGMGNADYVAAFLHLLLPLAFEGQMQATPECFAHLTQLLQVLAGGRVCAVLEGGYHLESLAESVCMTVQTLLGDPAPPLSGPMAPCQSALESIQSARAAQAPHWKSLQQQDVTAVPMSPSSHSPEGRPPPLLPGGPVCKAAASAPSSLLDQPCLCPAPSVRTAVALTTPDITLVLPPDVIQQEASALREETEAWARPHESLAREEALTALGKLLYLLDGMLDGQVNSGIAATPASAAAATLDVAVRRGLSHGAQRLLCVALGQLDRPPDLAHDGRSLWLNIRGKEAAALSMFHVSTPLPVMTGGFLSCILGLVLPLAYGFQPDLVLVALGPGHGLQGPHAALLAAMLRGLAGGRVLALLEENSTPQLAGILARVLNGEAPPSLGPSSVASPEDVQALMYLRGQLEPQWKMLQCHPHLVA

SEQ ID NO: 812014 - protein, 437 aa, Homo sapiens [sequence omitted]

SEQ ID NO: 812015 - protein, 437 aa, Homo sapiens [sequence omitted]

SEQ ID NO: 812016 - protein, 437 aa, Homo sapiens [sequence omitted]

SEQ ID NO: 812017 - protein, 508 aa, Homo sapiens
MGNADYVAAFLHLLLPLAFEVTARRAPPGQPGGRGTLCLECASEGRRRVMSCPTPVWLGKVLRRGWDGPGSPSPGLQPLSVDPPHSGLACEFDPELVLVSAGFDSAIGDPEGQMQATPECFAHLTQLLQVLAGGRVCAVLEGGYHLESLAESVCMTVQTLLGDPAPPLSGPMAPCQSALESIQSARAAQAPHWKSLQQQDVTAVPMSPSSHSPEGRPPPLLPGGPVCKAAASAPSSLLDQPCLCPAPSVRTAVALTTPDITLVLPPDVIQQEASALREETEAWARPHESLAREEALTALGKLLYLLDGMLDGQVNSGIAATPASAAAATLDVAVRRGLSHGAQRLLCVALGQLDRPPDLAHDGRSLWLNIRGKEAAALSMFHVSTPLPVMTGGFLSCILGLVLPLAYGFQPDLVLVALGPGHGLQGPHAALLAAMLRGLAGGRVLALLEENSTPQLAGILARVLNGEAPPSLGPSSVASPEDVQALMYLRGQLEPQWKMLQCHPHLVA

SEQ ID NO: 812018 - protein, 437 aa, Homo sapiens [sequence omitted]

SEQ ID NO: 812019 - protein, 437 aa, Homo sapiens [sequence omitted]

SEQ ID NO: 812020 - protein, 303 aa, Homo sapiens
MSPSSHSPEGRPPPLLPGGPVCKAAASAPSSLLDQPCLCPAPSVRTAVALTTPDITLVLPPDVIQQEASALREETEAWARPHESLAREEALTALGKLLYLLDGMLDGQVNSGIAATPASAAAATLDVAVRRGLSHGAQRLLCVALGQLDRPPDLAHDGRSLWLNIRGKEAAALSMFHVSTPLPVMTGGFLSCILGLVLPLAYGFQPDLVLVALGPGHGLQGPHAALLAAMLRGLAGGRVLALLEENSTPQLAGILARVLNGEAPPSLGPSSVASPEDVQALMYLRGQLEPQWKMLQCHPHLVA

SEQ ID NO: 812021 - protein, 395 aa, Homo sapiens [sequence omitted]

SEQ ID NO: 812022 - protein, 395 aa, Homo sapiens [sequence omitted]

SEQ ID NO: 812023 - protein, 508 aa, Homo sapiens; identical to SEQ ID NO: 812017

SEQ ID NO: 812024 - protein, 303 aa, Homo sapiens; identical to SEQ ID NO: 812020

SEQ ID NO: 812025 - protein, 313 aa, Homo sapiens
MGTALVYHEDMTATRLLWDDPECEIERPERLTAALDRLRQRGLEQRCLRLSAREASEEELGLVHSTLVLPPDVIQQEASALREETEAWARPHESLAREEALTALGKLLYLLDGMLDGQVNSGIAATPASAAAATLDVAVRRGLSHGAQRLLCVALGQLDRPPDLAHDGRSLWLNIRGKEAAALSMFHVSTPLPVMTGGFLSCILGLVLPLAYGFQPDLVLVALGPGHGLQGPHAALLAAMLRGLAGGRVLALLEENSTPQLAGILARVLNGEAPPSLGPSSVASPEDVQALMYLRGQLEPQWKMLQCHPHLVA

SEQ ID NO: 812026 - protein, 285 aa, Homo sapiens
MGNADYVAAFLHLLLPLAFEVTARRAPPGQPGGRGTLCLECASEGRRRVMSCPTPVWLGKVLRRGWDGPGSPSPGLQPLSVDPPHSGLACEFDPELVLVSAGFDSAIGDPEGQMQATPECFAHLTQLLQVLAGGRVCAVLEGGYHLESLAESVCMTVQTLLGDPAPPLSGPMAPCQSALESIQSARAAQAPHWKSLQQQDVTAVPMSPSSHSPEGRPPPLLPGGPVCKAAASAPSSLLDQPCLCPAPSVRTAVALTTPDITLVLPPDVIQQEASALREETEAWAR

SEQ ID NO: 812027 - protein, 176 aa, Homo sapiens
MNTCPEASSSSRLLCVALGQLDRPPDLAHDGRSLWLNIRGKEAAALSMFHVSTPLPVMTGGFLSCILGLVLPLAYGFQPDLVLVALGPGHGLQGPHAALLAAMLRGLAGGRVLALLEENSTPQLAGILARVLNGEAPPSLGPSSVASPEDVQALMYLRGQLEPQWKMLQCHPHLVA

SEQ ID NO: 812028 - protein, 205 aa, Homo sapiens
MAGGFILIIVVNSGIAATPASAAAATLDVAVRRGLSHGAQRLLCVALGQLDRPPDLAHDGRSLWLNIRGKEAAALSMFHVSTPLPVMTGGFLSCILGLVLPLAYGFQPDLVLVALGPGHGLQGPHAALLAAMLRGLAGGRVLALLEENSTPQLAGILARVLNGEAPPSLGPSSVASPEDVQALMYLRGQLEPQWKMLQCHPHLVA

SEQ ID NO: 812029 - protein, 110 aa, Homo sapiens
MGNADYVAAFLHLLLPLAFEFDPELVLVSAGFDSAIGDPEGQMQATPECFAHLTQLLQVLAGGRVCAVLEGGYHLESLAESVCMTVQTLLGDPAPPLSGPMAPCQRCEGR

SEQ ID NO: 812030 - protein, 427 aa, Homo sapiens
MGNADYVAAFLHLLLPLAFEFDPELVLVSAGFDSAIGDPEGQMQATPECFAHLTQLLQVLAGGRVCAVLEGGYHLESLAESVCMTVQTLLGDPAPPLSGPMAPCQSALESIQSARAAQAPHWKSLQQQDVTAVPMSPSSHSPEGRPPPLLPGGPVCKAAASAPSSLLDQPCLCPAPSVRTAVALTTPDITLVLPPDVIQQEASALREETEAWARPHESLAREEALTALGKLLYLLDGMLDGQVNSGIAATPASAAAATLDVAVRRGLSHGAQRLLCVALGQLDRPPDLAHDGRSLWLNIRGKEAAALSMFHVSTPLPVMTGGFLSCILGLVLPLAYGFQPDLVLVALGPGHGLQGPHAALLAAMLRGLAGGRVLALLEEEVSWAGWRCCGVGRGEGPVTASVFAPGPELHTPASRDPGPGAEWRGTS

SEQ ID NO: 812031 - protein, 110 aa, Homo sapiens; identical to SEQ ID NO: 812029

SEQ ID NO: 812032 - protein, 237 aa, Homo sapiens
MLGGSLGSRLLRGVGGSHGRFGARGVREGGAAMAAGESMAQRMVWVDLEMTGLDIEKDQIIEMACLITDSDLNILAEGPNLIIKQPDELLDSMSDWCKEHHGKSGLTKAVKESTITLQQAEYEFLSFVRQQTPPGLCPLAGNSVHEDKKFLDKYMPQFMKHLHYRIIDVSTVKELCRRWYPEEYEFAPKKAASHRALDDISESIKELQFYRNNIFKKKIDEKKRKIIENGENEKTVS

SEQ ID NO: 812033 - protein, 105 aa, Homo sapiens
NSLISTATGNSVHEDKKFLDKYMPQFMKHLHYRIIDVSTVKELCRRWYPEEYEFAPKKAASHRALDDISESIKELQFYRNNIFKKKIDEKKRKIIENGENEKTVS

SEQ ID NO: 812034 - protein, 105 aa, Homo sapiens; identical to SEQ ID NO: 812033

SEQ ID NO: 812035 - protein, 146 aa, Homo sapiens
KRDDSLNLPPLHSGLTKAVKESTITLQQAEYEFLSFVRQQTPPGLCPLAGNSVHEDKKFLDKYMPQFMKHLHYRIIDVSTVKELCRRWYPEEYEFAPKKAASHRALDDISESIKELQFYRNNIFKKKIDEKKRKIIENGENEKTVS

SEQ ID NO: 812036 - protein, 87 aa, Homo sapiens
ARGLPVVLRRLATIAPAPAPAARLGPWLLVPGDARRLPGLQAVAGCRWESRTVRGPRCPRRWRSHGGRGEHGSADGLGGPGDDRIGH

SEQ ID NO: 812037 - protein, 87 aa, Homo sapiens; identical to SEQ ID NO: 812036

SEQ ID NO: 812038 - protein, 87 aa, Homo sapiens; identical to SEQ ID NO: 812036

SEQ ID NO: 812039 - protein, 237 aa, Homo sapiens; identical to SEQ ID NO: 812032

SEQ ID NO: 812040 - protein, 237 aa, Homo sapiens; identical to SEQ ID NO: 812032

SEQ ID NO: 812041 - protein, 237 aa, Homo sapiens; identical to SEQ ID NO: 812032

SEQ ID NO: 812042 - protein, 237 aa, Homo sapiens; identical to SEQ ID NO: 812032

SEQ ID NO: 812043 - protein, 237 aa, Homo sapiens; identical to SEQ ID NO: 812032

SEQ ID NO: 812044 - protein, 237 aa, Homo sapiens; identical to SEQ ID NO: 812032

SEQ ID NO: 812045 - protein, 237 aa, Homo sapiens; identical to SEQ ID NO: 812032

SEQ ID NO: 812046 - protein, 138 aa, Homo sapiens
MLGGSLGSRLLRGVGGSHGRFGARGVREGGAAMAAGESMAQRMVWVDLEMTGLDIEKDQIIEMACLITDSDLNILAEGPNLIIKQPDELLDSMSDWCKEHHGKVTLPNNRIAALGISSKLFAPTPESDTIVGWYFKKA

SEQ ID NO: 812047 - protein, 149 aa, Homo sapiens
  misc_feature (6)..(6): Xaa can be any naturally occurring amino acid
PPGSQXFGTREHHGKSGLTKAVKESTITLQQAEYEFLSFVRQQTPPGLCPLAGNSVHEDKKFLDKYMPQFMKHLHYRIIDVSTVKELCRRWYPEEYEFAPKKAASHRALDDISESIKELQFYRNNIFKKKIDEKKRKIIENGENEKTVS

SEQ ID NO: 812048 - protein, 121 aa, Homo sapiens
MLGGSLGSRLLRGVGGSHGRFGARGVREGGAAMAAGESMAQRMVWVDLEMTGLDIEKDQIIEMACLITDSDLNILAEGPNLIIKQPDELLDSMSDWCKEHHGKEIQFMKIRSFLTNTCPSS

SEQ ID NO: 812049 - protein, 87 aa, Homo sapiens; identical to SEQ ID NO: 812036

SEQ ID NO: 812050 - protein, 234 aa, Homo sapiens
MLTNETGFEISSSDATVKILITTVPPNLRKLDPELHLDIKVLQSALAAIRHARWFEENASQSTVKVLIRLLKDLRIRFPGFEPLTPWILDLLGHYAVMNNPTRQPLALNVAYRRCLQILAAGLFLPGSVGITDPCESGNFRVHTVMTLEQQDMVCYTAQTLVRILSHGGFRKILGQEGDASYLASEISTWDGVIVTPSEKAYEKPPEKKEGEEEEENTEEPPQGEEEESMETQE

SEQ ID NO: 812051 - protein, 234 aa, Homo sapiens; identical to SEQ ID NO: 812050

SEQ ID NO: 812052 - protein, 390 aa, Homo sapiens
MRGDRGRGRGGRFGSRGGPGGGFRPFVPHIPFDFYLCEMAFPRVKPAPDETSFSEALLKRNQDLAPNSAEQASILSLVTKINNVIDNLIVAPGTFEVQIEEVRQVGSYKKGTMTTGHNVADLVVILKILPTLEAVAALGNKVVESLRAQDPSEVLTMLTNETGFEISSSDATVKILITTVPPNLRKLDPELHLDIKVLQSALAAIRHARWFEENASQSTVKVLIRLLKDLRIRFPGFEPLTPWILDLLGHYAVMNNPTRQPLALNVAYRRCLQILAAGLFLPGSVGITDPCESGNFRVHTVMTLEQQDMVCYTAQTLVRILSHGGFRKILGQEGDASYLASEISTWDGVIVTPSEKAYEKPPEKKEGEEEEENTEEPPQGEEEESMETQE

SEQ ID NO: 812053 - protein, 390 aa, Homo sapiens; identical to SEQ ID NO: 812052

SEQ ID NO: 812054 - protein, 390 aa, Homo sapiens; identical to SEQ ID NO: 812052

SEQ ID NO: 812055 - protein, 390 aa, Homo sapiens; identical to SEQ ID NO: 812052

SEQ ID NO: 812056 - protein, 390 aa, Homo sapiens; identical to SEQ ID NO: 812052

SEQ ID NO: 812057 - protein, 390 aa, Homo sapiens; identical to SEQ ID NO: 812052

SEQ ID NO: 812058 - protein, 390 aa, Homo sapiens; identical to SEQ ID NO: 812052

SEQ ID NO: 812059 - protein, 390 aa, Homo sapiens; identical to SEQ ID NO: 812052

SEQ ID NO: 812060 - protein, 390 aa, Homo sapiens; identical to SEQ ID NO: 812052

SEQ ID NO: 812061 - protein, 275 aa, Homo sapiens
MRGDRGRGRGGRFGSRGGPGGGFRPFVPHIPFDFYLCEMAFPRVKPAPDETSFSEALLKRNQDLAPNSAEQASILSLVTKINNVIDNLIVAPGTFEVQIEEVRQVGSYKKGTMTTGHNVADLVVILKILPTLEAVAALGNKVVESLRAQDPSEVLTMLTNETGFEISSSDATVKILITTVPPNLRKLDPELHLDIKVLQSALAAIRHARWFEENASQSTVKVLIRLLKDLRIRFPGFEPLTPWILDLLGHYAVMNNPTRQPLALNVAYRYSMLWV

SEQ ID NO: 812062 - protein, 390 aa, Homo sapiens; identical to SEQ ID NO: 812052

SEQ ID NO: 812063 - protein, 318 aa, Homo sapiens
MRGDRGRGRGGRFGSRGGPGGGFRPFVPHIPFDFYLCEMAFPRVKPAPDETSFSEALLKRNQDLAPNSAEQASILSLVTKINNVIDNLIVAPGTFEVQIEEVRQVGSYKKGTMTTGHNVADLVVILKILPTLEAVAALGNKVVESLRAQDPSEVLTMLTNETGFEISSSDATVKILITTVPPNLRKLDPELHLDIKVLQSALAAIRHARWFEENASQSTVKVLIRLLKDLRIRFPGFEPLTPWILDLLGHYAVMNNPTRQPLALNVAYRRCLQILAAGLFLPGSVGITDPCESGNFRVHTVMTLEQQILLLKYLPGME

SEQ ID NO: 812064 - protein, 275 aa, Homo sapiens; identical to SEQ ID NO: 812061

SEQ ID NO: 812065 - protein, 390 aa, Homo sapiens; identical to SEQ ID NO: 812052

SEQ ID NO: 812066 - protein, 340 aa, Homo sapiens
DAWVDPRVERNQDLAPNSAEQASILSLVTKINNVIDNLIVAPGTFEVQIEEVRQVGSYKKGTMTTGHNVADLVVILKILPTLEAVAALGNKVVESLRAQDPSEVLTMLTNETGFEISSSDATVKILITTVPPNLRKLDPELHLDIKVLQSALAAIRHARWFEENASQSTVKVLIRLLKDLRIRFPGFEPLTPWILDLLGHYAVMNNPTRQPLALNVAYRRCLQILAAGLFLPGSVGITDPCESGNFRVHTVMTLEQQDMVCYTAQTLVRILSHGGFRKILGQEGDASYLASEISTWDGVIVTPSEKAYEKPPEKKEGEEEEENTEEPPQGEEEESMETQE

SEQ ID NO: 812067 - protein, 333 aa, Homo sapiens
KPITYNYSQIKAENSSILSLVTKINNVIDNLIVAPGTFEVQIEEVRQVGSYKKGTMTTGHNVADLVVILKILPTLEAVAALGNKVVESLRAQDPSEVLTMLTNETGFEISSSDATVKILITTVPPNLRKLDPELHLDIKVLQSALAAIRHARWFEENASQSTVKVLIRLLKDLRIRFPGFEPLTPWILDLLGHYAVMNNPTRQPLALNVAYRRCLQILAAGLFLPGSVGITDPCESGNFRVHTVMTLEQQDMVCYTAQTLVRILSHGGFRKILGQEGDASYLASEISTWDGVIVTPSEKAYEKPPEKKEGEEEEENTEEPPQGEEEESMETQE

SEQ ID NO: 812068 - protein, 368 aa, Homo sapiens
MRGDRGRGRGGRFGSRGGPGGGFRPFVPHIPFDFYLCEMAFPRVKPAPDETSFSEALLKRNQDLAPNSAEQASILSLVTKINNVIDNLIVAPGTFEVQIEEVRQVGSYKKGTMTTGHNVADLVVILKILPTLEAVAALGNKVVESLRAQDPSEVLTMLTNETGFEISSSDATVKILITTVPPNLRKLDPELHLDIKVLQSALAAIRHARWFEENASQSTVKVLIRLLKDLRIRFPGFEPLTPWILDLLGHYAVMNNPTRQPLALNVAYRRCLQILAAGLFLPGSVGITDPCESGNFRVHTVMTLEQQDMVCYTAQTLVRILSHGGFRKILGQEGDASYLASEISTWDGVIVTPSDQKTTPGEEEEALN

SEQ ID NO: 812069 - protein, 339 aa, Homo sapiens
MRGDRGRGRGGRFGSRGGPGGGFRPFVPHIPFDFYLCEMAFPRVKPAPDETSFSEALLKRNQDLAPNSAEQASILSLVTKINNVIDNLIVAPGTFEVQIEEVRQVGSYKKGTMTTGHNVADLVVILKILPTLEAVAALGNKVVESLRAQDPSEVLTMLTNETGFEISSSDATVKILITTVPPNLRKLDPELHLDIKVLQSALAAIRHARWFEENASQSTVKVLIRLLKDLRIRFPGFEPLTPWILDLLGHYAVMNNPTRQPLALNVAYRRCLQILAAGLFLPGSVGITDPCESGNFRVHTVMTLEQQDMVCYTAQTLVRILSHGGFRKILGQEGDASCE

SEQ ID NO: 812070 - protein, 278 aa, Homo sapiens
MTTGHNVADLVVILKILPTLEAVAALGNKVVESLRAQDPSEVLTMLTNETGFEISSSDATVKILITTVPPNLRKLDPELHLDIKVLQSALAAIRHARWFEENASQSTVKVLIRLLKDLRIRFPGFEPLTPWILDLLGHYAVMNNPTRQPLALNVAYRRCLQILAAGLFLPGSVGITDPCESGNFRVHTVMTLEQQDMVCYTAQTLVRILSHGGFRKILGQEGDASYLASEISTWDGVIVTPSEKAYEKPPEKKEGEEEEENTEEPPQGEEEESMETQE

SEQ ID NO: 812071 - protein, 219 aa, Homo sapiens
MRGDRGRGRGGRFGSRGGPGGGFRPFVPHIPFDFYLCEMAFPRVKPAPDETSFSEALLKRNQDLAPNSAEQASILSLVTKINNVIDNLIVAPGTFEVQIEEVRQVGSYKKGTMTTGHNVADLVVILKILPTLEAVAALGNKVVESLRAQDPSEVLTMLTNETGFEISSSDATVKILITTVPPNLRKLDPELHLDIKVLQSALAAIRHARWFEENASQST

SEQ ID NO: 812072 - protein, 193 aa, Homo sapiens
MRGDRGRGRGGRFGSRGGPGGGFRPFVPHIPFDFYLCEMAFPRVKPAPDETSFSEALLKRNQDLAPNSAEQASILSLVTKINNVIDNLIVAPGTFEVQIEEVRQVGSYKKGTMTTGHNVADLVVILKILPTLEAVAALGNKVVESLRAQDPSEVLTMLTNETGFEISSSDATVKILITTVPPNLRKLDPELHC

SEQ ID NO: 812073 - protein, 372 aa, Homo sapiens
MRGDRGRGRGGRFGSRGGPGGGFRPFVPHIPFDFYLCEMAFPRVKPAPDETSFSEALLKRNQDLAPNSAEQASILSLVTKINNVIDNLIVAPGTFEVQIEEVRQVGSYKKGTMTTGHNVADLVVILKILPTLEAVAALGNKVVESLRAQDPSEVLTMLTNETGFEISSSDATVKILITTVPPNLRKLDPELHLDIKVLQSALAAIRHARWFEEIRFPGFEPLTPWILDLLGHYAVMNNPTRQPLALNVAYRRCLQILAAGLFLPGSVGITDPCESGNFRVHTVMTLEQQDMVCYTAQTLVRILSHGGFRKILGQEGDASYLASEISTWDGVIVTPSEKAYEKPPEKKEGEEEEENTEEPPQGEEEESMETQE

SEQ ID NO: 812074 - protein, 227 aa, Homo sapiens
IQNSIWIQFSKIGWHCCNENLRKLDPELHLDIKVLQSALAAIRHARWFEENASQSTVKVLIRLLKDLRIRFPGFEPLTPWILDLLGHYAVMNNPTRQPLALNVAYRRCLQILAAGLFLPGSVGITDPCESGNFRVHTVMTLEQQDMVCYTAQTLVRILSHGGFRKILGQEGDASYLASEISTWDGVIVTPSEKAYEKPPEKKEGEEEEENTEEPPQGEEEESMETQE

SEQ ID NO: 812075 - protein, 199 aa, Homo sapiens
LRLGTRLGVNLAAIRHARWFEENASQSTVKVLIRLLKDLRIRFPGFEPLTPWILDLLGHYAVMNNPTRQPLALNVAYRRCLQILAAGLFLPGSVGITDPCESGNFRVHTVMTLEQQDMVCYTAQTLVRILSHGGFRKILGQEGDASYLASEISTWDGVIVTPSEKAYEKPPEKKEGEEEEENTEEPPQGEEEESMETQE

SEQ ID NO: 812076 - protein, 295 aa, Homo sapiens
MRGDRGRGRGGRFGSRGGPGGGFRPFVPHIPFDFYLCEMAFPRVKPAPDETSFSEALLKRNQDLAPNSAEQASILSLVTKINNVIDNLIVAPGTFEVQIEEVRQVGSYKKGTMTTGHNVADLVVILKILPTLEAVAALGNKVVESLRAQDPSEGHYAVMNNPTRQPLALNVAYRRCLQILAAGLFLPGSVGITDPCESGNFRVHTVMTLEQQDMVCYTAQTLVRILSHGGFRKILGQEGDASYLASEISTWDGVIVTPSEKAYEKPPEKKEGEEEEENTEEPPQGEEEESMETQE

SEQ ID NO: 812077 - protein, 135 aa, Homo sapiens
YPRPMAHGLNVAYRRCLQILAAGLFLPGSVGITDPCESGNFRVHTVMTLEQQDMVCYTAQTLVRILSHGGFRKILGQEGDASYLASEISTWDGVIVTPSEKAYEKPPEKKEGEEEEENTEEPPQGEEEESMETQE

SEQ ID NO: 812078 - protein, 270 aa, Homo sapiens
MRGDRGRGRGGRFGSRGGPGGGFRPFVPHIPFDFYLCEMAFPRVKPAPDETSFSEALLKRNQDLAPNSAEQASILSLVTKINNVIDNLIVAPGTFEVQIEEVRQVGSYKKGTMTTGHNVADLVVILKILPTLEAVAALGNKVVESLRAQDPSEVLTMLTNETGFEISSSDATVKILITTVPPNLRKLDPELHLDIKVLQSALAAIRHARWFEENASQSTVKVLIRLLKDLRIRFPGFEPLTPWILDLLGHNAVNEQARTLIQPRTRIEVR

SEQ ID NO: 812079 - protein, 263 aa, Homo sapiens [sequence omitted]

SEQ ID NO: 812080 - protein, 255 aa, Homo sapiens
MRGDRGRGRGGRFGSRGGPGGGFRPFVPHIPFDFYLCEMAFPRVKPAPDETSFSEALLKRNQDLAPNSAEQASILSLVTKINNVIDNLIVAPGTFEVQIEEVRQVGSYKKGTMTTGHNVADLVVILKILPTLEAVAALGNKVVESLRAQDPSEVLTMLTNETGFEISSSDATVKILITTVPPNLRKLDPELHLDIKVLQSALAAIRHARWFEENASQSTVKVLIRLLKDLRIRFPGFEPLTPWILDLLVKPAPPI

SEQ ID NO: 812081 - protein, 193 aa, Homo sapiens; identical to SEQ ID NO: 812072

SEQ ID NO: 812082 - protein, 241 aa, Homo sapiens
MNSGRPETMENLPALYTIFQGEVAMVTDYGAFIKIPGCRKQGLVHRTHMSSCRVDKPSEIVDVGDKVWVKLIGREMKNDRIKVSLSMKVVNQGTGKDLDPNNVIIEQEERRRRSFQDYTGQKITLEAVLNTTCKKCGCKGHFAKDCFMQPGGTKYSLIPDEEEEKEEAKSAEFEKPDPTRNPSRKRKKEKKKKKHRDRKSSDSDSSDSESDTGKRARHTSKDSKAAKKKKKKKKHKKKHKE

SEQ ID NO: 812083 - protein, 241 aa, Homo sapiens; identical to SEQ ID NO: 812082

SEQ ID NO: 812084 - protein, 241 aa, Homo sapiens; identical to SEQ ID NO: 812082

SEQ ID NO: 812085 - protein, 241 aa, Homo sapiens; identical to SEQ ID NO: 812082

SEQ ID NO: 812086 - protein, 233 aa, Homo sapiens [sequence omitted]

SEQ ID NO: 812087 - protein, 264 aa, Homo sapiens
MTRKNGVGGCLSLEATPRLCSLNLPFSAEGADSKGWEAGPESPAVVAMVTDYGAFIKIPGCRKQGLVHRTHMSSCRVDKPSEIVDVGDKVWVKLIGREMKNDRIKVSLSMKVVNQGTGKDLDPNNVIIEQEERRRRSFQDYTGQKITLEAVLNTTCKKCGCKGHFAKDCFMQPGGTKYSLIPDEEEEKEEAKSAEFEKPDPTRNPSRKRKKEKKKKKHRDRKSSDSDSSDSESDTGKRARHTSKDSKAAKKKKKKKKHKKKHKE

SEQ ID NO: 812088 - protein, 233 aa, Homo sapiens
MKQLIEDTEKNKVYVAMVTDYGAFIKIPGCRKQGLVHRTHMSSCRVDKPSEIVDVGDKVWVKLIGREMKNDRIKVSLSMKVVNQGTGKDLDPNNVIIEQEERRRRSFQDYTGQKITLEAVLNTTCKKCGCKGHFAKDCFMQPGGTKYSLIPDEEEEKEEAKSAEFEKPDPTRNPSRKRKKEKKKKKHRDRKSSDSDSSDSESDTGKRARHTSKDSKAAKKKKKKKKHKKKHKE

SEQ ID NO: 812089 - protein, 146 aa, Homo sapiens
MNSGRPETMENLPALYTIFQGEVAMVTDYGAFIKIPGCRKQGLVHRTHMSSCRVDKPSEIVDVGDKVWVKLIGREMKNDRIKVSLSMKVVNQGTGKDLDPNNVIIEQEERRRRSFQDYTGQKITLEAVLNTTCKKCGCKGEEEKET

SEQ ID NO: 812090 - protein, 168 aa, Homo sapiens
MNSGRPETMENLPALYTIFQGEVAMVTDYGAFIKIPGCRKQGLVHRTHMSSCRVDKPSEIVDVGDKVWVKLIGREMKNDRIKVSLSMKVVNQGTGKDLDPNNVIIERRRKRNIEIGSHLTLTAQTLRVIQARGQGTHQKTARQQRRRKRRRSTRRSTRSESIKSVGGG

SEQ ID NO: 812091 - protein, 138 aa, Homo sapiens
MKQLIEDTEKNKVYVAMVTDYGAFIKIPGCRKQGLVHRTHMSSCRVDKPSEIVDVGDKVWVKLIGREMKNDRIKVSLSMKVVNQGTGKDLDPNNVIIEQEERRRRSFQDYTGQKITLEAVLNTTCKKCGCKGEEEKET

SEQ ID NO: 812092 - protein, 195 aa, Homo sapiens
MNSGRPETMENLPALYTIFQGEVAMVTDYGAFIKIPGCRKQGLVHRTHMSSCRVDKPSEIVDVGDKVWVKLIGREMKNDRIKVSLSMKVVNQGTGKDLDPNNVIIEQEERRRRSFQDYTGQKITLEAVLNTTCKKCGCKGHFAKDCFMQPGGTKYSLIPDEEEVQSSGEVQSSGEVQSSGEVHSSGEVHLPERST

SEQ ID NO: 812093 - protein, 201 aa, Homo sapiens
MKQLIEDTEKNKVYVAMVTDYGAFIKIPGCRKQGLVHRTHMSSCRVDKPSEIVDVGDKVWVKLIGREMKNDRIKVSLSMKVVNQGTGKDLDPNNVIIEQEERRRRSFQDYTGQKITLEAVLNTTCKKCGCKGHFAKDCFMQPGGTKYSLIPDEEEEKEEAKSAEFEKPDPTRNPSRKRKKEGEEEKKHRDRKSSDSDSSDL

SEQ ID NO: 812094 - protein, 139 aa, Homo sapiens
  misc_feature (119)..(119): Xaa can be any naturally occurring amino acid
MNSGRPETMENLPALYTIFQGEVAMVTDYGAFIKIPGCRKQGLVHRTHMSSCRVDKPSEIVDVGDKVWVKLIGREMKNDRIKVSLSMKVVNQGTGKDLDPNNVIIERRRRGGRIPFPRXLTTGARKNHPLRRLTLLQVC

SEQ ID NO: 812095 - protein, 224 aa, Homo sapiens
  misc_feature (96)..(96): Xaa can be any naturally occurring amino acid
  misc_feature (100)..(100): Xaa can be any naturally occurring amino acid
  misc_feature (128)..(128): Xaa can be any naturally occurring amino acid
  misc_feature (138)..(138): Xaa can be any naturally occurring amino acid
  misc_feature (141)..(141): Xaa can be any naturally occurring amino acid
  misc_feature (143)..(143): Xaa can be any naturally occurring amino acid
  misc_feature (150)..(150): Xaa can be any naturally occurring amino acid
  misc_feature (160)..(160): Xaa can be any naturally occurring amino acid
  misc_feature (162)..(163): Xaa can be any naturally occurring amino acid
  misc_feature (167)..(168): Xaa can be any naturally occurring amino acid
  misc_feature (171)..(171): Xaa can be any naturally occurring amino acid
  misc_feature (178)..(178): Xaa can be any naturally occurring amino acid
  misc_feature (191)..(191): Xaa can be any naturally occurring amino acid
  misc_feature (194)..(194): Xaa can be any naturally occurring amino acid
  misc_feature (199)..(199): Xaa can be any naturally occurring amino acid
  misc_feature (203)..(203): Xaa can be any naturally occurring amino acid
  misc_feature (212)..(212): Xaa can be any naturally occurring amino acid
MASADELTFHEFEEATNLLADTPDAATTSRSDQLTPQGHVAVAVGSGGSYGAEDEVEEESDKAALLQEQQQQQQPGFWTFSYYQSFFDVDTSQFPXPYKXPPPRAFARDNVFFVHRSFVNRSVIVYFXRSFIVFDVFXFFXFXSRFNRYXFFVSRYLFYXAXXTYDXXISXNFYRFRXDDDRTSYSFSFFXVSXFFSFXSFFXEFFSDLSRXFRVHVPVYTFFR

SEQ ID NO: 812096 - protein, 316 aa, Homo sapiens
MASADELTFHEFEEATNLLADTPDAATTSRSDQLTPQGHVAVAVGSGGSYGAEDEVEEESDKAALLQEQQQQQQPGFWTFSYYQSFFDVDTSQVLDRIKGSLLPRPGHNFVRHHLRNRPDLYGPFWICATLAFVLAVTGNLTLVLAQRRDPSIHYSPQFHKVTVAGISIYCYAWLVPLALWGFLRWRKGVQERMGPYTFLETVCIYGYSLFVFIPMVVLWLIPVPWLQWLFGALALGLSAAGLVFTLWPVVREDTRLVATVLLSVVVLLHALLAMGCKLYFFQSLPPENVAPPPQITSLPSNIALSPTLPQSLAPS

SEQ ID NO: 812097 - protein, 316 aa, Homo sapiens; identical to SEQ ID NO: 812096

SEQ ID NO: 812098 - protein, 316 aa, Homo sapiens; identical to SEQ ID NO: 812096

SEQ ID NO: 812099 - protein, 316 aa, Homo sapiens; identical to SEQ ID NO: 812096

SEQ ID NO: 812100 - protein, 287 aa, Homo sapiens
MASADELTFHEFEEATNLLADTPDAATTSRSDQLTPQGHVAVAVGSGGSYGAEDEVEEESDKAAVLDRIKGSLLPRPGHNFVRHHLRNRPDLYGPFWICATLAFVLAVTGNLTLVLAQRRDPSIHYSPQFHKVTVAGISIYCYAWLVPLALWGFLRWRKGVQERMGPYTFLETVCIYGYSLFVFIPMVVLWLIPVPWLQWLFGALALGLSAAGLVFTLWPVVREDTRLVATVLLSVVVLLHALLAMGCKLYFFQSLPPENVAPPPQITSLPSNIALSPTLPQSLAPS

SEQ ID NO: 812101 - protein, 343 aa, Homo sapiens
MASADELTFHEFEEATNLLADTPDAATTSRSDQLTPQGHVAVAVGSGGSYGAEDEVEEESDKAALLQEQQQQQQPGFWTFSYYQSFFDVDTSQVLDRIKGSLLPRPGHNFVRHHLRNRPDLYGPFWICATLAFVLAVTGNLTLVLAQRRDPSIHYSPQFHKASTAMRGWCPWPCGASCGGARVSRSAWGPTPSWRLCASTATPSLSSSPWWSCGSSLCLGCSGSLGRWPWACQPPGWYSPSGPWSVRTPGWWPQCCCPWSCCSTPSWPWAVSCTSSSRCLRRTWLLHPKSHLCPQTSRCPLPCRSPWPPPRKARVPQATPKWTNPSACPAPQTMTEGSFDTLR

SEQ ID NO: 812102 - protein, 108 aa, Homo sapiens [sequence omitted]

SEQ ID NO: 812103 - protein, 1019 aa, Homo sapiens
QKYLEKIWVITEEMYEYSKVRSWGKQLLHNHQATNMIALLTGALVTGVDKGSKANIWKQAVVDVMEKTMFLLSHIVDGSLDEGVAYGSYTAKSVTQYVFLAQRHFNINNLDNNWLKMHFWFYYATLLPGFQRTVGIADSNYNWFYGPESQLVFLDKFILKNGAGNWLAQQIRKHRPKDGPMVPSTAQRWSTLHTEYIWYDPQLTPQPPADYGTAKIHTFPNWGVVTYGAGLPNTQTNTFVSFKSGKLGGRAVYDIVHFQPYSWIDGWRSFNPGHEHPDQNSFTFAPNGQVFVSEALYGPKLSHLNNVLVFAPSPSSQCNKPWEGQLGECAQWLKWTGEEVGDAAGEIITASQHGEMVFVSGEAVSAYSSAMRLKSVYRALLLLNSQTLLVVDHIERQEDSPINSVSAFFHNLDIDFKYIPYKFMNRYNGAMMDVWDAHYKMFWFDHHGNSPMASIQEAEQAAEFKKRWTQFVNVTFQMESTITRIAYVFYGPYINVSSCRFIDSSNPGLQISLNVNNTEHVVSIVTDYHNLKTRFNYLGFGGFASVADQGQITRFGLGTQAIVKPVRHDRIIFPFGFKFNIAVGLILCISLVILTFQWRFYLSFRKLMRWILILVIALWFIELLDVWSTCSQPICAKWTRTEAEGSKKSLSSEGHHMDLPDVVITSLPGSGAEILKQLFFNSSDFLYIRVPTAYIDIPETELEIDSFVDACEWKVSDIRSGHFRLLRGWLQSLVQDTKLHLQNIHLHEPNRGKLAQYFAMNKDKKRKFKRRESLPEQRSQMKGAFDRDAEYIRALRRHLVYYPSARPVLSLSSGSWTLKLHFFQEVLGASMRALYIVRDPRAWIYSMLYNSKPSLYSLKNVPEHLAKLFKIEGGKGKCNLNSGYAFEYEPLRKELSKSKSNAVSLLSHLWLANTAAALRINTDLLPTSYQLVKFEDIVHFPQKTTERIFAFLGIPLSPASLNQILFATSTNLFYLPYEGEISPTNTNVWKQNLPRDEIKLIENICWTLMDRLGYPKFMD

SEQ ID NO: 812104 - protein, 997 aa, Homo sapiens
QKYLEKIWVITEEMYEYSKVRSWGKQLLHNHQATNMIALLTGALVTGVDKGSKANIWKQAVVDVMEKTMFLLSHIVDGSLDEGVAYGSYTAKSVTQYVFLAQRHFNINNLDNNWLKMHFWFYYATLLPGFQRTVGIADSNYNWFYGPESQLVFLDKFILKNGAGNWLAQQIRKHRPKDGPMVPSTAQRWSTLHTEYIWYDPQLTPQPPADYGTAKIHTFPNWGVVTYGAGLPNTQTNTFVSFKSGKLGGRAVYDIVHFQPYSWIDGWRSFNPGHEHPDQNSFTFAPNGQVFVSEALYGPKLSHLNNVLVFAPSPSSQCNKPWEGQLGECAQWLKWTGEEVGDAAGEIITASQHGEMVFVSGEAVSAYSSAMRLKSVYRALLLLNSQTLLVVDHIERQEDSPINSVSAFFHNLDIDFKYIPYKFMNRYNGAMMDVWDAHYKMFWFDHHGNSPMASIQEAEQAAEFKKRWTQFVNVTFQMESTITRIAYVFYGPYINVSSCRFIDSSNPGLQISLNVNNTEHVVSIVTDYHNLKTRFNYLGFGGFASVADQGQITRFGLGTQAIVKPVRHDRIIFPFGFKFNIAVGLILCISLVILTFQWRFYLSFRKLMRWILILVIALWFIELLDVWSTCSQPICAKWTRTEAEGSKKSLSSEGHHMDLPDVVITSLPGSGAEILKQLFFNSSDFLYIRVPTAYIDIPETELEIDSFVDACEWKVSDIRSGHFRLLRGWLQSLVQDTKLHLQNIHLHEPNRGKLAQYFAMNKDKKRKFKRRESLPEQRSQMKGAFDRDAEYIRALRRHLVYYPSARPVLSLSSGSWTLKLHFFQEVLGASMRALYIVRDPRAWIYSMLYNSKPSLYSLKNVPEHLAKLFKIEGGKGKCNLNSGYAFEYEPLRKELSKSKSNAVSLLSHLWLANTAAALRINTDLLPTSYQLVKFEDIVHFPQKTTERIFAFLGIPLSPASLNQILFATSTNLFYLPYEGEISPTNTNVWKQNLHRVQ

SEQ ID NO: 812105 - protein, 560 aa, Homo sapiens
MALMFTGHLLFLALLMFAFSTFEESVSNYSEWAVFTDDIDQFKTQKVQDFRPNQKLKKSMLHPSLYFDAGEIQAMRQKSRASHLHLFRAIRSAVTVMLSNPTYYLPPPKHADFAAKWNEIYGNNLPPLALYCLLCPEDKVAFEFVLEYMDRMVGYKDWLVENAPGDEVPIGHSLTGFATAFDFLYNCKKSLSSEGHHMDLPDVVITSLPGSGAEILKQLFFNSSDFLYIRVPTAYIDIPETELEIDSFVDACEWKVSDIRSGHFRLLRGWLQSLVQDTKLHLQNIHLHEPNRGKLAQYFAMNKDKKRKFKRRESLPEQRSQMKGAFDRDAEYIRALRRHLVYYPSARPVLSLSSGSWTLKLHFFQEVLGASMRALYIVRDPRAWIYSMLYNSKPSLYSLKNVPEHLAKLFKIEGGKGKCNLNSGYAFEYEPLRKELSKSKSNAVSLLSHLWLANTAAALRINTDLLPTSYQLVKFEDIVHFPQKTTERIFAFLGIPLSPASLNQILFATSTNLFYLPYEGEISPTNTNVWKQNLPRDEIKLIENICWTLMDRLGYPKFMD

SEQ ID NO: 812106 - protein, 76 aa, Homo sapiens
ELAQRILGRGDITAWGRGRCSGYGATERTRRPRVSVLRSVVAPTSVRRFLRAGVSGPCGSRGPSAAEETELGQRLP

SEQ ID NO: 812107 - protein, 113 aa, Homo sapiens
RARVPYIVRPRSWRRRSGSLDFISAPEPALSSCSLGTSAGWSPTMAAIRKKLVIVGDGACGKTCLLIVFSKDQFPEVYVPTVFENYIADIEVDGKLKPRRKGTYSADRASLLL

SEQ ID NO: 812108 - protein, 118 aa, Homo sapiens
EGTMGRGCGRWGVLGTRPQESTFPSSLARRSGPVRGGASAWAWTPFPPSGVGIRAGRWSDRVGPSPGCSEGARTCRQGLWPPEVRVGAPSLLLPASRNLPRRARGEGTSTQTPQPPGW

SEQ ID NO: 812109 - protein, 128 aa, Homo sapiens
MIDCGLSPTRTLMSSSCASPSTALTAWENIPEKWTPEVKHFCPNVPIILVGNKKDLRQDEHTRRELAKMKQEPVRSEEGRDMANRISAFGYLECSAKTKEGVREVFEMATRAGLQVRKNKRRRGCPIL

SEQ ID NO: 812110 - protein, 128 aa, Homo sapiens; identical to SEQ ID NO: 812109

SEQ ID NO: 812111 - protein, 128 aa, Homo sapiens; identical to SEQ ID NO: 812109

SEQ ID NO: 812112 - protein, 128 aa, Homo sapiens; identical to SEQ ID NO: 812109

SEQ ID NO: 812113 - protein, 128 aa, Homo sapiens; identical to SEQ ID NO: 812109

SEQ ID NO: 812114 - protein, 128 aa, Homo sapiens; identical to SEQ ID NO: 812109

SEQ ID NO: 812115 - protein, 128 aa, Homo sapiens; identical to SEQ ID NO: 812109

SEQ ID NO: 812116 - protein, 128 aa, Homo sapiens; identical to SEQ ID NO: 812109

SEQ ID NO: 812117 - protein, 128 aa, Homo sapiens; identical to SEQ ID NO: 812109

SEQ ID NO: 812118 - protein, 128 aa, Homo sapiens; identical to SEQ ID NO: 812109

SEQ ID NO: 812119 - protein, 128 aa, Homo sapiens; identical to SEQ ID NO: 812109

SEQ ID NO: 812120 - protein, 128 aa, Homo sapiens; identical to SEQ ID NO: 812109

SEQ ID NO: 812121 - protein, 128 aa, Homo sapiens; identical to SEQ ID NO: 812109

SEQ ID NO: 812122 - protein, 128 aa, Homo sapiens; identical to SEQ ID NO: 812109

SEQ ID NO: 812123 - protein, 128 aa, Homo sapiens; identical to SEQ ID NO: 812109

SEQ ID NO: 812124 - protein, 128 aa, Homo sapiens; identical to SEQ ID NO: 812109

SEQ ID NO: 812125 - protein, 128 aa, Homo sapiens; identical to SEQ ID NO: 812109

SEQ ID NO: 812126 - protein, 128 aa, Homo sapiens; identical to SEQ ID NO: 812109

SEQ ID NO: 812127 - protein, 346 aa, Homo sapiens
PCNPSSRGVSLSLRHRPRSWRRRSGSLDFISAPEPALSSCSLGTSAGWSPTMAAIRKKLVIVGDGACGKTCLLIVFSKDQFPEVYVPTVFENYIADIEVDGKQVELALWDTAGQEDYDRLRPLSYPDTDVILMCFSIDSPDSLGEGIGGRGLRTPWNQPEVSCLGLSSVIFRGGGGDAGEHSGPVGLLYCGNWPSEGILLLRFLSCERDHHAEWLLRLLWEDEGPPRGAFYLSGGTDTCWCMSTQENIPEKWTPEVKHFCPNVPIILVGNKKDLRQDEHTRRELAKMKQEPVRSEEGRDMANRISAFGYLECSAKTKEGVREVFEMATRAGLQVRKNKRRRGCPIL

SEQ ID NO: 812128 - protein, 119 aa, Homo sapiens
ELGYPILSGRAAGGGGAEENIPEKWTPEVKHFCPNVPIILVGNKKDLRQDEHTRRELAKMKQEPVRSEEGRDMANRISAFGYLECSAKTKEGVREVFEMATRAGLQVRKNKRRRGCPIL

SEQ ID NO: 812129 - protein, 153 aa, Homo sapiens
PCNPSSRGVSLSLRHRPRSWRRRSGSLDFISAPEPALSSCSLGTSAGWSPTMAAIRKKLVIVGDGACGKTCLLIVFSKDQFPEVYVPTVFENYIADIEVDGKQVELALWDTAGQEDYDRLRPLSYPDTDVILMCFSIDSPDSLPSSWWGIRRT

SEQ ID NO: 812130 - protein, 203 aa, Homo sapiens
PCNPSSRGVSLSLRHRPRSWRRRSGSLDFISAPEPALSSCSLGTSAGWSPTMAAIRKKLVIVGDGACGKTCLLIVFSKDQFPEVYVPTVFENYIADIEVDGKQVELALWDTAGQEDYDRLRPLSYPDTDVILMCFSIDSPDSLGEGIGGRGLRTPWNQPEVSCLGLSSVIFRGGGGDAGEHSGPVGLLYCGNWPSEGILLLRF

SEQ ID NO: 812131 - protein, 102 aa, Homo sapiens
MAAIRKKLVIVGDGACGKTCLLIVFSKDQFPEVYVPTVFENYIADIEVDGKQVELALWDTAGQEDYDRLRPLSYPDTDVILMCFSIDSPDSLPSSWWGIRRT

SEQ ID NO: 812132 - protein, 147 aa, Homo sapiens
PCNPSSRGVSLSLRHRPRSWRRRSGSLDFISAPEPALSSCSLGTSAGWSPTMAAIRKKLVIVGDGACGKTCLLIVFSKDQFPEVYVPTVFENYIADIEVDGKQVELALWDTAGQEDYDRLRPLSYPDTDVILMCFSIDSPDSLGKHS

SEQ ID NO: 812133 - protein, 225 aa, Homo sapiens
PCNPSSRGVSLSLRHRPRSWRRRSGSLDFISAPEPALSSCSLGTSAGWSPTMAAIRKKLVIVGDGACGKTCLLIVFSKDQFPEVYVPTVFENYIADIEVDGKQVELALWDTAGQEDYDRLRPLSYPDTDVILMCFSIDSPDSLPFGLRKAGTWRTGSVPLATLSAQPRPRRECGRCLRWPLGLASRSARTSVGGAVPFSEIPKAFPTCPLPSQGYRNYPPTTPAS

SEQ ID NO: 812134 - protein, 111 aa, Homo sapiens
MIDCGLSPTRTLMSSSCASPSTALTAWENIPEKWTPEVKHFCPNVPIILVGNKKDPVRSEEGRDMANRISAFGYLECSAKTKEGVREVFEMATRAGLQVRKNKRRRGCPIL

SEQ ID NO: 812135 - protein, 147 aa, Homo sapiens; identical to SEQ ID NO: 812132

SEQ ID NO: 812136 - protein, 147 aa, Homo sapiens; identical to SEQ ID NO: 812132

SEQ ID NO: 812137 - protein, 128 aa, Homo sapiens; identical to SEQ ID NO: 812109

SEQ ID NO: 812138 - protein, 202 aa, Homo sapiens
  misc_feature (135)..(135): Xaa can be any naturally occurring amino acid
  misc_feature (178)..(178): Xaa can be any naturally occurring amino acid
  misc_feature (189)..(189): Xaa can be any naturally occurring amino acid
MIDCGLSPTRTLMSSSCASPSTALTAWENIPEKWTPEVKHFCPNVPIILVGNKKDLRQDEHTRRELAKMKQEPVRSEEGRDMANRISAFGYLECSAKTKEGVREVFEMATRAGLQVRKNKRRRGCPILQRCQGTXQRQPYFIYFPQIKTEKSGSIGAADSPENWEKVWDNWRLLTMAXIFDLLGAPRGXEMSCISYYHHYSG

SEQ ID NO: 812139 - protein, 148 aa, Homo sapiens
MIDCGLSPTRTLMSSSCASPSTALTAWENIPEKWTPEVKHFCPNVPIILVGNKKDLRQDEHTRRELAKMKQEPVRSEEGRDMANRISAFGYLECSAKTKEGVREVFEMATRAGLQVRKNKRRRGCPAAPARRGKECCLRLPSAGHSVA

SEQ ID NO: 812140 - protein, 147 aa, Homo sapiens; identical to SEQ ID NO: 812132

SEQ ID NO: 812141 - protein, 73 aa, Homo sapiens
PCNPSSRGVSLSLRHRPRSWRRRSGGNFSRLEPHHGCNPKEAGDRWGWCLWEDLPPHRLQQGSVSGGLRPYCL

SEQ ID NO: 812142 - protein, 147 aa, Homo sapiens; identical to SEQ ID NO: 812132

SEQ ID NO: 812143 - protein, 147 aa, Homo sapiens; identical to SEQ ID NO: 812132

SEQ ID NO: 812144 - protein, 52 aa, Homo sapiens
MIDCGLSPTRTLMSSSCASPSTALTAWENIPEKWTPEVKHFCPNVPVPSSIY

SEQ ID NO: 812145 - protein, 117 aa, Homo sapiens
  misc_feature (64)..(64): Xaa can be any naturally occurring amino acid
  misc_feature (80)..(80): Xaa can be any naturally occurring amino acid
MIDCGLSPTRTLMSSSCASPSTALTAWENIPEKWTPEVKHFCPNVPIHPGGADTEGPEAEQHTXESWPHEHEPVRLRRPXIGNRSELWYLSVSHTTRSAGVFNGTRLPQSQTVEGVS

SEQ ID NO: 812146 - protein, 121 aa, Homo sapiens
PCNPSSRGVSLSLRHRPRSWRRRSGSLDFISAPEPALSSCSLGTSAGWSPTMAAIRKKLVIVGDGACGKTCLLIVFSKDQFPEVYVPTVFENYIADIEVDGKQVKAEMPFPPHPETPPPSH

SEQ ID NO: 812147 - protein, 490 aa, Homo sapiens
MTSRASELSPGRSVTAGIIIVGDEILKGHTQDTNTFFLCRTLRSLGVQVCRVSVVPDEVATIAAEVTSFSNRFTHVLTAGGIGPTHDDVTFEAVAQAFGDELKPHPKLEAATKALGGEGWEKLSLVPSSARLHYGTDPCTGQPFRFPLVSVRNVYLFPGIPELLRRVLEGMKGLFQNPAVQFHSKELYVAADEASIAPILAEAQAHFGRRLGLGSYPDWGSNYYQVKLTLDSEEEGPLEECLAYLTARLPQGSLVPYMPNAVEQASEAVYKLAESGSSLGKKVAGALQTIETSLAQYSLTQLCVGFNGGKDCTALLHLFHAAVQRKLPDVPNPLQILYIRSISPFPELEQFLQDTIKRYNLQMLEAEGSMKQALGELQARHPQLEAVLMGTRRTDPYSCSLCPFSPTDPGWPAFMRINPLLDWTYRDIWDFLRQLFVPYCILYDRGYTSLGSRENTVRNPALKCLSPGGHPTYRPAYLLENEEEERNSRT

SEQ ID NO: 812148 - protein, 294 aa, Homo sapiens
MQPSSSTPPLHPYSTDGLIFPFNPQGHTQDTNTFFLCRTLRSLGVQVCRVSVVPDEVATIAAEVTSFSNRFTHVLTAGGIGPTHDDVTFEAVAQAFGDELKPHPKLEAATKALGGEGWEKLSLVPSSARLHYGTDPCTGQPFRFPLVSVRNVYLFPGIPELLRRVLEGMKGLFQNPAVQFHSKELYVAADEASIAPILAEAQAHFGRRLGLGSYPDWGSNYYQVKLTLDSEEEGPLEECLAYLTARLPQGSLVPYMPNAVEQASEAVYKLAESGRDLMEEGHYAQSHWWHPRSQ

SEQ ID NO: 812149 - protein, 511 aa, Homo sapiens
SWYGPSSLGSVKGQNRQVPSTQDPLFPGYGPQCPVDLAGPPCLRPLFGGLGGYWRALQRGREGRTMTSRASELSPGRSVTAGIIIVGDEILKGHTQDTNTFFLCRTLRSLGVQVCRVSVVPDEVATIAAEVTSFSNRFTHVLTAGGIGPTHDDVTFEAVAQAFGDELKPHPKLEAATKALGGEGWEKLSLVPSSARLHYGTDPCTGQPFRFPLVSVRNVYLFPGIPELLRRVLEGMKGLFQNPAVQFHSKELYVAADEASIAPILAEAQAHFGRRLGLGSYPDWGSNYYQVKLTLDSEEEGPLEECLAYLTARLPQGSLVPYMPNAVEQASEAVYKLAESGSSLGKKVAGALQTIETSLAQYSLTQLCVGFNGGKDCTALLHLFHAAVQRKLPDVPNPLQILYIRSISPFPELEQFLQDTIKRYNLQMLEAEGSMKQALGELQARHPQLEAVLMGTRRTDPYSCSLCPFSPTDPGWPAFMRINPLLDWTYRDIWDFLRQLFVPYCILYDRG

SEQ ID NO: 812150 - protein, 179 aa, Homo sapiens
LEDYWGNSGLRHFSAGFRRYSPDSPVMCILGHTGYSMGQTVDAEDPRYNLQMLEAEGSMKQALGELQARHPQLEAVLMGTRRTDPYSCSLCPFSPTDPGWPAFMRINPLLDWTYRDIWDFLRQLFVPYCILYDRGYTSLGSRENTVRNPALKCLSPGGHPTYRPAYLLENEEEERNSRT

SEQ ID NO: 812151 - protein, 490 aa, Homo sapiens; identical to SEQ ID NO: 812147

SEQ ID NO: 812152 - protein, 587 aa, Homo sapiens
MGWDLGTRLFQRQEQRSRLSRIWLEKTRVFLEGSTRTPALPHCLFWLLQVPSTQDPLFPGYGPQCPVDLAGPPCLRPLFGGLGGYWRALQRGREGRTMTSRASELSPGRSVTAGIIIVGDEILKGHTQDTNTFFLCRTLRSLGVQVCRVSVVPDEVATIAAEVTSFSNRFTHVLTAGGIGPTHDDVTFEAVAQAFGDELKPHPKLEAATKALGGEGWEKLSLVPSSARLHYGTDPCTGQPFRFPLVSVRNVYLFPGIPELLRRVLEGMKGLFQNPAVQFHSKELYVAADEASIAPILAEAQAHFGRRLGLGSYPDWGSNYYQVKLTLDSEEEGPLEECLAYLTARLPQGSLVPYMPNAVEQASEAVYKLAESGSSLGKKVAGALQTIETSLAQYSLTQLCVGFNGGKDCTALLHLFHAAVQRKLPDVPNPLQILYIRSISPFPELEQFLQDTIKRYNLQMLEAEGSMKQALGELQARHPQLEAVLMGTRRTDPYSCSLCPFSPTDPGWPAFMRINPLLDWTYRDIWDFLRQLFVPYCILYDRGYTSLGSRENTVRNPALKCLSPGGHPTYRPAYLLENEEEERNSRT

SEQ ID NO: 812153 - protein, 490 aa, Homo sapiens; identical to SEQ ID NO: 812147

SEQ ID NO: 812154 - protein, 518 aa, Homo sapiens
MTSRASELSPGRSVTAGIIIVGDEILKGHTQDTNTFFLCRTLRSLGVQVCRVSVVPDEVATIAAEVTSFSNRFTHVLTAGGIGPTHDDVTFEAVAQAFGDELKPHPKLEAATKALGGEGWEKLSLVPSSARLHYGTDPCTGQPFRFPLVSVRNVYLFPGIPELLRRVLEGMKGLFQNPAVQFHSKELYVAADEASIAPILAEAQAHFGRRLGLGSYPDWGSNYYQVKLTLDSEEEGPLEECLAYLTARLPQGSLVPYMPNAVEQASEAVYKLAESGSSLGKKVAGALQTIETSLAQYSLTQLCVGFNGGKDCTALLHLFHAAVQRKLPDVPNPLQILYIRSISPFPELEQFLQDTIKRYYGAWRFGLQEKLDRAHARPLLLFLPKVYNLQMLEAEGSMKQALGELQARHPQLEAVLMGTRRTDPYSCSLCPFSPTDPGWPAFMRINPLLDWTYRDIWDFLRQLFVPYCILYDRGYTSLGSRENTVRNPALKCLSPGGHPTYRPAYLLENEEEERNSRT

SEQ ID NO: 812155 - protein, 490 aa, Homo sapiens; identical to SEQ ID NO: 812147

SEQ ID NO: 812156 - protein, 488 aa, Homo sapiens [sequence omitted]

SEQ ID NO: 812157 - protein, 555 aa, Homo sapiens
SWYGPSSLGSVKGQNRQVPSTQDPLFPGYGPQCPVDLAGPPCLRPLFGGLGGYWRALQRGREGRTMTSRASELSPGRSVTAGIIIVGDEILKGHTQDTNTFFLCRTLRSLGVQVCRVSVVPDEVATIAAEVTSFSNRFTHVLTAGGIGPTHDDVTFEAVAQAFGDELKPHPKLEAATKALGGEGWEKLSLVPSSARLHYGTDPCTGQPFRFPLVSVRNVYLFPGIPELLRRVLEGMKGLFQNPAVQFHSKELYVAADEASIAPILAEAQAHFGRRLGLGSYPDWGSNYYQVKLTLDSEEEGPLEECLAYLTARLPQGSLVPYMPNAVEQASEAVYKLAESGSSLGKKVAGALQTIETSLAQYSLTQLCVGFNGGKDCTALLHLFHAAVQRKLPDVPNPLQILYIRSISPFPELEQFLQDTIKRYNLQMLEAEGSMKQALGELQARHPQLEAVLMGTRRTDPYSCSLCPFSPTDPGWPAFMRINPLLDWTYRDIWDFLRQLFVPYCILYDRGYTSLGSRENTVRNPALKCLSPGGHPTYRPAYLLENEEEERNSRT

SEQ ID NO: 812158 - protein, 488 aa, Homo sapiens [sequence omitted]

SEQ ID NO: 812159 - protein, 320 aa, Homo sapiens
MTSRASELSPGRSVTAGIIIVGDEILKGHTQDTNTFFLCRTLRSLGVQVCRVSVVPDEVATIAAEVTSFSNRFTHVLTAGGIGPTHDDVTFEAVAQAFGDELKPHPKLEAATKALGGEGWEKLSLVPSSARLHYGTDPCTGQPFRFPLVSVRNVYLFPGIPELLRRVLEGMKGLFQNPAVQFHSKELYVAADEASIAPILAEAQAHFGRRLGLGSYPDWGSNYYQVKLTLDSEEEGPLEECLAYLTARLPQGSLVPYMPNAVEQASEAVYKLAESGNYLMFQTPSRSCISAASPLSLSWNSFYRTLSRGIICRCWKLRAA

SEQ ID NO: 812160 - protein, 429 aa, Homo sapiens
MTSRASELSPGRSVTAGIIIVGDEILKGHTQDTNTFFLCRTLRSLGVQVCRVSVVPDEVATIAAEVTSFSNRFTHVLTAGGIGPTHDDVTFEAVAQAFGDELKPHPKLEAATKALGGEGWEKLSLVPSSARLHYGTDPCTGQPFRFPLVSVRNVYLFPGIPELLRRVLEGMKGLFQNPAVQFHSKELYVAADEASIAPILAEAQAHFGRRLGLGSYPDWGSNYYQVKLTLDSEEEGPLEECLAYLTARLPQGSLVPYMPNAVEQASEAVYKLAESGSSLGKKVAGALQTIETSLAQYSLTQLCVGFNGGKDCTALLHLFHAAVQRKLPDVPNPLQILYIRSISPFPELEQFLQDTIKRYNLQMLEAEGSMKQALGELQARHPQLEAVLMGTRRTDPYSCSLCPFSPTDPGWPAFMRINPLLSKLYQRIR

SEQ ID NO: 812161 - protein, 429 aa, Homo sapiens; identical to SEQ ID NO: 812160

SEQ ID NO: 812162 - protein, 296 aa, Homo sapiens [sequence omitted]

SEQ ID NO: 812163 - protein, 425 aa, Homo sapiens
MTSRASELSPGRSVTAGIIIVGDEILKGHTQDTNTFFLCRTLRSLGVQVCRVSVVPDEVATIAAEVTSFSNRFTHVLTAGGIGPTHDDVTFEAVAQAFGDELKPHPKLEAATKALGGEGWEKLSLVPSSARLHYGTDPCTGQPFRFPLVSVRNVYLFPGIPELLRRVLEGMKGLFQNPAVQFHSKELYVAADEASIAPILAEAQAHFGRRLGLGSYPDWGSNYYQVKLTLDSEEEGPLEECLAYLTARLPQGSLVPYMPNAVEQASEAVYKLAESGSSLGKKVAGALQTIETSLAQYSLTQLCVGFNGGKDCTALLHLFHAAVQRKLPDVPNPLQILYIRSIDPGWPAFMRINPLLDWTYRDIWDFLRQLFVPYCILYDRGYTSLGSRENTVRNPALKCLSPGGHPTYRPAYLLENEEEERNSRT

SEQ ID NO: 812164 - protein, 420 aa, Homo sapiens
MTSRASELSPGRSVTAGIIIVGDEILKGHTQDTNTFFLCRTLRSLGVQVCRVSVVPDEVATIAAEVTSFSNRFTHVLTAGGIGPTHDDVTFEAVAQAFGDELKPHPKLEAATKALGGEGWEKLSLVPSSARLHYGTDPCTGQPFRFPLVSVRNVYLFPGIPELLRRVLEGMKGLFQNPAVQFHSKELYVAADEASIAPILAEAQAHFGRRLGLGSYPDWGSNYYQVKLTLDSEEEGPLEECLAYLTARLPQGSLVPYMPNAVEQASEAVYKLAESGSSLGKKVAGALQTIETSLAQYSLTQLCVGFNGGKDCTALLHLFHAAVQRKLPDVPNPLQILYIRSISPFPELEQFDWTYRDIWDFLRQLFVPYCILYDRGYTSLGSRENTVRNPALKCLSPGGHPTYRPAYLLENEEEERNSRT

SEQ ID NO: 812165 - protein, 347 aa, Homo sapiens
MTSRASELSPGRSVTAGIIIVGDEILKGHTQDTNTFFLCRTLRSLGVQVCRVSVVPDEVATIAAEVTSFSNRFTHVLTAGGIGPTHDDVTFEAVAQAFGDELKPHPKLEAATKALGGEGWEKLSLVPSSARLHYGTDPCTGQPFRFPLVSVRNVYLFPGIPELLRRVLEGMKGLFQNPAVQFHSKELYVAADEASIAPILAEAQAHFGRRLGLGSYPDWGSNYYQVKLTLDSEEEGPLEECLAYLTARLPQGSLVPYMPNAVEQASEAVYKLAESGNYLMFQTPSRSCISAALTQAGPHSCASTHCWTGPTETSGIFCVSCLSHTVSCMTEDTHHWGVGRIPCGTRP

SEQ ID NO: 812166 - protein, 433 aa, Homo sapiens
MTSRASELSPGRSVTAGIIIVGDEILKGHTQDTNTFFLCRTLRSLGVQVCRVSVVPDEVATIAAEVTSFSNRFTHVLTAGGIGPTHDDVTFEAVAQAFGDELKPHPKLEAATKALGGEGWEKLSLVPSSARLHYGTDPCTGQPFRFPLVSVRNVYLFPGIPELLRRVLEGMKGLFQNPAVQFHSKELYVAADEASIAPILAEAQAHFGRRLGLGSYPDWGSNYYQVAGALQTIETSLAQYSLTQLCVGFNGGKDCTALLHLFHAAVQRKLPDVPNPLQILYIRSISPFPELEQFLQDTIKRYNLQMLEAEGSMKQALGELQARHPQLEAVLMGTRRTDPYSCSLCPFSPTDPGWPAFMRINPLLDWTYRDIWDFLRQLFVPYCILYDRGYTSLGSRENTVRNPALKCLSPGGHPTYRPAYLLENEEEERNSRT

SEQ ID NO: 812167 - protein, 320 aa, Homo sapiens
MKGLFQNPAVQFHSKELYVAADEASIAPILAEAQAHFGRRLGLGSYPDWGSNYYQVKLTLDSEEEGPLEECLAYLTARLPQGSLVPYMPNAVEQASEAVYKLAESGSSLGKKVAGALQTIETSLAQYSLTQLCVGFNGGKDCTALLHLFHAAVQRKLPDVPNPLQILYIRSISPFPELEQFLQDTIKRYNLQMLEAEGSMKQALGELQARHPQLEAVLMGTRRTDPYSCSLCPFSPTDPGWPAFMRINPLLDWTYRDIWDFLRQLFVPYCILYDRGYTSLGSRENTVRNPALKCLSPGGHPTYRPAYLLENEEEERNSRT

SEQ ID NO: 812168 - protein, 296 aa, Homo sapiens [sequence omitted]

SEQ ID NO: 812169 - protein, 233 aa, Homo sapiens [sequence omitted]

SEQ ID NO: 812170 - protein, 318 aa, Homo sapiens [sequence omitted]

SEQ ID NO: 812171 - protein, 338 aa, Homo sapiens
MQPSSSTPPLHPYSTDGLIFPFNPQGHTQDTNTFFLCRTLRSLGVQVCRVSVVPDEVATIAAEVTSFSNRFTHVLTAGGIGPTHDDVTFEAVAQAFGDELKPHPKLEAATKALGGEGWEKLSLVPSSARLHYGTDPCTGQPFRFPLVSVRNVYLFPGIPELLRRVLEGMKGLFQNPAVQFHSKELYVAADEASIAPILAEAQAHFGRRLGLGSYPDWGSNYYQVKLTLDSEEEGPLEECLAYLTARLPQGSLVPYMPNAVEQASEAVYKLAESGNYLMFQTPSRSCISAASPLSLSWNSFYRTLSREQAIPENQIASPPSEAKGAEEPWMGPFPGQQG

SEQ ID NO: 812172 - protein, 69 aa, Homo sapiens
RDMRKGTRERAGEGAEQAGSLDPGPPVPRLWPPVPCRPGRPPVLATPIWGSGWLLEGLAEGQRRQDHDI

SEQ ID NO: 812173 - protein, 140 aa, Homo sapiens [sequence omitted]

SEQ ID NO: 812174 - protein, 463 aa, Homo sapiens
MAQGLVTFADVAIDFSQEEWACLNSAQRDLYWDVMLENYSNLVSLDLESAYENKSLPTEKNIHEIRASKRNSDRRSKSLGRNWICEGTLERPQRSRGRYVNQMIINYVKRPATREGTPPRTHQRHHKENSFECKDCGKAFSRGYQLSQHQKIHTGEKPYECKECKKAFRWGNQLTQHQKIHTGEKPYECKDCGKAFRWGSSLVIHKRIHTGEKPYECKDCGKAFRRGDELTQHQRFHTGEKDYECKDCGKTFSRVYKLIQHKRIHSGEKPYECKDCGKAFICGSSLIQHKRIHTGEKPYECQECGKAFTRVNYLTQHQKIHTGEKPHECKECGKAFRWGSSLVKHERIHTGEKPYKCTECGKAFNCGYHLTQHERIHTGETPYKCKECGKAFIYGSSLVKHERIHTGVKPYGCTECGKSFSHGHQLTQHQKTHSGAKSYECKECGKACNHLNHLREHQRIHNS

SEQ ID NO: 812175 - protein, 463 aa, Homo sapiens; identical to SEQ ID NO: 812174

SEQ ID NO: 812176 - protein, 463 aa, Homo sapiens; identical to SEQ ID NO: 812174

SEQ ID NO: 812177 - protein, 463 aa, Homo sapiens; identical to SEQ ID NO: 812174

SEQ ID NO: 812178 - protein, 463 aa, Homo sapiens; identical to SEQ ID NO: 812174

SEQ ID NO: 812179 - protein, 463 aa, Homo sapiens; identical to SEQ ID NO: 812174

SEQ ID NO: 812180 - protein, 463 aa, Homo sapiens; identical to SEQ ID NO: 812174

SEQ ID NO: 812181 - protein, 151 aa, Homo sapiens
MAVLEPEVLSVHTTWTTRGSNLKNRIPFGEERAGLQEKHPGGGRRSVICPKVRFQAGVQWHDLSSLEPLRPGLQRFSCLSLPSSWNYRHPPPCLANFCIFSRDGVSSCWPGWSQTPDFKLSARLSLPKSWDYRCEPPCPAFVPIFNQIFFS

SEQ ID NO: 812182 - protein, 72 aa, Homo sapiens
GLVTFADVAIDFSQEEWACLNSAQRDLYWDVMLENYSNLVSLGELHASDNLDCLLEYPLSPVNFRTAFQETS

SEQ ID NO: 812183 - protein, 311 aa, Homo sapiens
GFRNCLLNLKRTMVGKARSSNFTLSEKLDLLKLVKPYVKILEEHTNKHSVIVEKNRCWDIIAVNYNAIGVDRPPRTAQGLRTLYKRLKEYAKQELLQQKETQSDFKSNISEPTKKVMEMIPQISSFCLVRDRNHIQSANLDEEAQAGTSSLQVMLDHHPVAITVEVKQEEDIKPPPPLVLNSQQSDTLEQREEHELVHVMERSLSPSLSSVDMRMTSSPSSIPRRDDFFRHESGEHFRSLLGYDPQILQMLKEEHQIILENQKNFGLYVQEKRDGLKRRQQLEEELLRAKIEVEKLKAIRLRHDLPEYNSL

SEQ ID NO: 812184 - protein, 140 aa, Homo sapiens
VTRRTSLQGQWFLSDFRRSRLLNMRRSAAPSQLQGNSFKKPKFIPPGRSNPGLNEEITKLNPDIKLFEGVAINNTFLPSQNDLRICSLNLPSEESTREINNRDNCSGKYCFEAPTLATLDPPHTVQTWMRRHRLVPVHYR

SEQ ID NO: 812185 - protein, 684 aa, Homo sapiens
MENLQTNFSLVQGSTKKLNGMGDDGSPPAKKMITDIHVNGKTINKVPTVKKEHLDDYGEAPVETDGEHVKRTCTSVPETLHLNPSLKHTLAQFHLSSQSSLGGPAAFSARHSQESMSPTVFLPLPSPQVLPGPLLIPSDSSTELTQTVLEGESISCFQVGGEKRLCLPQVLNSVLREFTLQQINTVCDELYIYCSRCTSDQLHILKVLGILPFNAPSCGLITLTDAQRLCNALLRPRTFPQNGSVLPAKSSLAQLKETGSAFEVEHECLGKCQGLFAPQFYVQPDAPCIQCLECCGMFAPQTFVMHSHRSPDKRTCHWGFESAKWHCYLHVNQKYLGTPEEKKLKIILEEMKEKFSMRSGKRNQSKTDAPSGMELQSWYPVIKQEGDHVSQTHSFLHPSYYLYMCDKVVAPNVSLTSAVSQSKELTKTEASKSISRQSEKAHSSGKLQKTVSYPDVSLEEQEKMDLKTSRELCSRLDASISNNSTSKRKSESATCNLVRDINKVGIGLVAAASSPLLVKDVICEDDKGKIMEEVMRTYLKQQEKLNLILQKKQQLQMEVKMLSSSKSMKELTEEQQNLQKELESLQNEHAQRMEEFYVEQKDLEKKLEQIMKQKCTCDSNLEKDKEAEYAGQLAELRQRLDHAEADRQELQDELRQEREARQKLEMMIKELKLQILKSSKTAKE

SEQ ID NO: 812186 - protein, 684 aa, Homo sapiens; identical to SEQ ID NO: 812185

SEQ ID NO: 812187 - protein, 638 aa, Homo sapiens [sequence omitted]

SEQ ID NO: 812188 - protein, 415 aa, Homo sapiens
MENLQTNFSLVQGSTKKLNGMGDDGSPPAKKMITDIHVNGKTINKVPTVKKEHLDDYGEAPVETDGEHVKRTCTSVPETLHLNPSLKHTLAQFHLSSQSSLGGPAAFSARHSQESMSPTVFLPLPSPQVLPGPLLIPSDSSTELTQTVLEGESISCFQVGGEKRLCLPQVLNSVLREFTLQQINTVCDELYIYCSRCTSDQLHILKVLGILPFNAPSCGLITLTDAQRLCNALLRPRTFPQNGSVLPAKSSLAQLKETGSAFEVEHECLGKCQGLFAPQFYVQPDAPCIQCLECCGMFAPQTFVMHSHRSPDKRTCHWGFESAKWHCYLHVNQKYLGTPEEKKLKIILEEMKEKFSMRSGKRNQSKASFLYQFLIMVMVYFEMKILCLVCNLTCMLNIAHATTTKYRLIYLYCSF

SEQ ID NO: 812189 - protein, 684 aa, Homo sapiens; identical to SEQ ID NO: 812185

SEQ ID NO: 812190 - protein, 137 aa, Homo sapiens
MLQAPRGRARAALRRLAVATRTMAGAPTVSLPELRSLLASGRARLFDVRSREEAAAGTIPGALNIPVSELESALQMEPAAFQALYSAEKPKLEDEHLVFFCQMGKRGLQATQLARSLGYTGARNYAGAYREWLEKES

SEQ ID NO: 812191 - protein, 137 aa, Homo sapiens; identical to SEQ ID NO: 812190

SEQ ID NO: 812192 - protein, 101 aa, Homo sapiens
LWLISEDPRCDVRSREEAAAGTIPGALNIPVSELESALQMEPAAFQALYSAEKPKLEDEHLVFFCQMGKRGLQATQLARSLGYTGARNYAGAYREWLEKES

SEQ ID NO: 812193 - protein, 109 aa, Homo sapiens
MAGAPTVSLPELRSLLASGRARLFDVRSREEAAAGTIPGALNIPVSELESALQMEPAAFQALYSAEKPKLEDEHLVFFCQMGKRGLQATQLARSLGYTGYGEVWLLAGR

SEQ ID NO: 812194 - protein, 299 aa, Homo sapiens
MGTKAQVERKLLCLFILAILLCSLALGSVTVHSSEPEVRIPENNPVKLSCAYSGFSSPRVEWKFDQGDTTRLVCYNNKITASYEDRVTFLPTGITFKSVTREDTGTYTCMVSEEGGNSYGEVKVKLIVLVPPSKPTVNIPSSATIGNRAVLTCSEQDGSPPSEYTWFKDGIVMPTNPKSTRAFSNSSYVLNPTTGELVFDPLSASDTGEYSCEARNGYGTPMTSNAVRMEAVERNVGVIVAAVLVTLILLGILVFGIWFAYSRGHFDRTKKGTSSKKVIYSQPSARSEGEFKQTSSFLV

SEQ ID NO: 812195 - protein, 299 aa, Homo sapiens; identical to SEQ ID NO: 812194

SEQ ID NO: 812196 - protein, 299 aa, Homo sapiens; identical to SEQ ID NO: 812194

SEQ ID NO: 812197 - protein, 299 aa, Homo sapiens; identical to SEQ ID NO: 812194

SEQ ID NO: 812198 - protein, 299 aa, Homo sapiens; identical to SEQ ID NO: 812194

SEQ ID NO: 812199 - protein, 299 aa, Homo sapiens; identical to SEQ ID NO: 812194

SEQ ID NO: 812200 - protein, 299 aa, Homo sapiens; identical to SEQ ID NO: 812194

SEQ ID NO: 812201 - protein, 299 aa, Homo sapiens; identical to SEQ ID NO: 812194

SEQ ID NO: 812202 - protein, 299 aa, Homo sapiens; identical to SEQ ID NO: 812194

SEQ ID NO: 812203 - protein, 299 aa, Homo sapiens; identical to SEQ ID NO: 812194

SEQ ID NO: 812204 - protein, 403 aa, Homo sapiens
  misc_feature (40)..(40): Xaa can be any naturally occurring amino acid
MASGVLCMHMLPEERAGPRYLRLSVTIVCSDVLIAVSHLXYGLSVTFVRYHSEASHISIIPRRLSYMRYVRLTLSGIHPRPITGSPTPAERSPSAAVVSVSLIAMGTKAQVERKLLCLFILAILLCSLALGSVTVHSSEPEVRIPENNPVKLSCAYSGFSSPRVEWKFDQGDTTRLVCYNNKITASYEDRVTFLPTGITFKSVTREDTGTYTCMVSEEGGNSYGEVKVKLIVLVPPSKPTVNIPSSATIGNRAVLTCSEQDGSPPSEYTWFKDGIVMPTNPKSTRAFSNSSYVLNPTTGELVFDPLSASDTGEYSCEARNGYGTPMTSNAVRMEAVERNVGVIVAAVLVTLILLGILVFGIWFAYSRGHFDRTKKGTSSKKVIYSQPSARSEGEFKQTSSFLV

SEQ ID NO: 812205 - protein, 299 aa, Homo sapiens; identical to SEQ ID NO: 812194

SEQ ID NO: 812206 - protein, 299 aa, Homo sapiens; identical to SEQ ID NO: 812194

SEQ ID NO: 812207 - protein, 273 aa, Homo sapiens
PSRVFAAVLPSAHLTLSAAVKLSCAYSGFSSPRVEWKFDQGDTTRLVCYNNKITASYEDRVTFLPTGITFKSVTREDTGTYTCMVSEEGGNSYGEVKVKLIVLVPPSKPTVNIPSSATIGNRAVLTCSEQDGSPPSEYTWFKDGIVMPTNPKSTRAFSNSSYVLNPTTGELVFDPLSASDTGEYSCEARNGYGTPMTSNAVRMEAVERNVGVIVAAVLVTLILLGILVFGIWFAYSRGHFDRTKKGTSSKKVIYSQPSARSEGEFKQTSSFLV

SEQ ID NO: 812208 - protein, 299 aa, Homo sapiens; identical to SEQ ID NO: 812194

SEQ ID NO: 812209 - protein, 337 aa, Homo sapiens
ARPLRMCLGPHKSFNVVAMSSLPMESSMGRGHSCLSFIDHLCDSLDELTIRFCDSLQNGAICRVDGTAYLITEESPIRMLNIPVKLSCAYSGFSSPRVEWKFDQGDTTRLVCYNNKITASYEDRVTFLPTGITFKSVTREDTGTYTCMVSEEGGNSYGEVKVKLIVLVPPSKPTVNIPSSATIGNRAVLTCSEQDGSPPSEYTWFKDGIVMPTNPKSTRAFSNSSYVLNPTTGELVFDPLSASDTGEYSCEARNGYGTPMTSNAVRMEAVERNVGVIVAAVLVTLILLGILVFGIWFAYSRGHFDRTKKGTSSKKVIYSQPSARSEGEFKQTSSFLV

SEQ ID NO: 812210 - protein, 188 aa, Homo sapiens
MGQAFHLEYASLASSSVLVPPSKPTVNIPSSATIGNRAVLTCSEQDGSPPSEYTWFKDGIVMPTNPKSTRAFSNSSYVLNPTTGELVFDPLSASDTGEYSCEARNGYGTPMTSNAVRMEAVERNVGVIVAAVLVTLILLGILVFGIWFAYSRGHFDRTKKGTSSKKVIYSQPSARSEGEFKQTSSFLV

SEQ ID NO: 812211 - protein, 82 aa, Homo sapiens
EGTLEDQYAVRMEAVERNVGVIVAAVLVTLILLGILVFGIWFAYSRGHFDRTKKGTSSKKVIYSQPSARSEGEFKQTSSFLV

SEQ ID NO: 812212 - protein, 299 aa, Homo sapiens; identical to SEQ ID NO: 812194

SEQ ID NO: 812213 - protein, 299 aa, Homo sapiens; identical to SEQ ID NO: 812194

SEQ ID NO: 812214 - protein, 299 aa, Homo sapiens; identical to SEQ ID NO: 812194

SEQ ID NO: 812215 - protein, 299 aa, Homo sapiens; identical to SEQ ID NO: 812194

SEQ ID NO: 812216 - protein, 299 aa, Homo sapiens; identical to SEQ ID NO: 812194

SEQ ID NO: 812217 - protein, 299 aa, Homo sapiens; identical to SEQ ID NO: 812194

SEQ ID NO: 812218 - protein, 299 aa, Homo sapiens; identical to SEQ ID NO: 812194

SEQ ID NO: 812219 - protein, 130 aa, Homo sapiens
AAVTPRPPLPEGCRAPSSAPTVSLPELRSLLASGRARLFDVRSREEAAAGTIPGALNIPVSELESALQMEPAAFQALYSAEKPKLEDEHLVFFCQMGKRGLQATQLARSLGYTGARNYAGAYREWLEKES

SEQ ID NO: 812220 - protein, 137 aa, Homo sapiens; identical to SEQ ID NO: 812190

SEQ ID NO: 812221 - protein, 137 aa, Homo sapiens; identical to SEQ ID NO: 812190

SEQ ID NO: 812222 - protein, 299 aa, Homo sapiens; identical to SEQ ID NO: 812194

SEQ ID NO: 812223 - protein, 101 aa, Homo sapiens; identical to SEQ ID NO: 812192

SEQ ID NO: 812224 - protein, 190 aa, Homo sapiens [sequence omitted]

SEQ ID NO: 812225 - protein, 297 aa, Homo sapiens
MGTKAQVERKLLCLFILAILLCSLALGSVTVHSSEPEVRIPENNPVKLSCAYSGFSSPRVEWKFDQGDTTRLVCYNNKITASYEDRVTFLPTGITFKSVTREDTGTYTCMVSEEGGNSYGEVKVKLIVLVPPSKPTVNIPSSATIGNRAVLTCSEQDGSPPSEYTWFKDGIVMPTNPKSTRAFSNSSYVLNPTTGELVFDPLSASDTGEYSCEARNGYGTPMTSNAVRMEAVERNVGVIVAAVLVTLILLGILVFGIWFAYSRGHFDRTKKGTSSKKVIYSQPSARSEVSMPPLGRG

SEQ ID NO: 812226 - protein, 291 aa, Homo sapiens
MGTKAQVERKLLCLFILAILLCSLALGSVTVHSSEPEVRIPENNPVKLSCAYSGFSSPRVEWKFDQGDTTRLVCYNNKITASYEDRVTFLPTGITFKSVTREDTGTYTCMVSEEGGNSYGEVKVKLIVLVPPSKPTVNIPSSATIGNRAVLTCSEQDGSPPSEYTWFKDGIVMPTNPKSTRAFSNSSYVLNPTTGELVFDPLSASDTGEYSCEARNGYGTPMTSNAVRMEAVERNVGVIVAAVLVTLILLGILVFGIWFAYSRGHFDRTKNLPPEALLCTAPIPGPGMGVI

SEQ ID NO: 812227 - protein, 299 aa, Homo sapiens
MGTKAQVERKLLCLFILAILLCSLALGSVTVHSSEPEVRIPENNPVKLSCAYSGFSSPRVEWKFDQGDTTRLVCYNNKITASYEDRVTFLPTGITFKSVTREDTGTYTCMVSEEGGNSYGEVKVKLIVLVPPSKPTVNIPSSATIGNRAVLTCSEQDGSPPSEYTWFKDGIVMPTNPKSTRAFSNSSYVLNPTTGELVFDPLSASDTGEYSCEARNGYGTPMTSNAVRMEAVERNVGVIVAAVLVTLILLGILVFGIWFAYSRGHFDRTKKRNRDIEVRQVTTQPGQATRSEERQSARP

SEQ ID NO: 812228 - protein, 108 aa, Homo sapiens [sequence omitted]

SEQ ID NO: 812229 - protein, 105 aa, Homo sapiens
NRLGTRPGGMLQAPRGRARAALRRLAVATRTMAGVSELESALQMEPAAFQALYSAEKPKLEDEHLVFFCQMGKRGLQATQLARSLGYTGARNYAGAYREWLEKES

SEQ ID NO: 812230 - protein, 178 aa, Homo sapiens
MGTKAQVERKLLCLFILAILLSLLALGSVTDAQIKNELLESEMKNLKKCVSELEEEKQQLVKEKTKVESEIRKEYLEKIQGAQKEPGNKSHAKELQELLKEKQQEVKQLQKDCIRYQEKISALERTVKALELFKLNLKKIGNNQRKSGLKQLNTSKKAQAELASFKVLLDDTQSEAAR

SEQ ID NO: 812231 - protein, 102 aa, Homo sapiens [sequence omitted]

SEQ ID NO: 812232 - protein, 102 aa, Homo sapiens [sequence omitted]

SEQ ID NO: 812233 - protein, 624 aa, Homo sapiens
MQPDPRPSGAGACCRFLPLQSQCPEGAGDAVMYASTECKAEVTPSQHGNRTFSYTLEDHTKQAFGIMNELRLSQQLCDVTLQVKYQDAPAAQFMAHKVVLASSSPVFKAMFTNGLREQGMEVVSIEGIHPKVMERLIEFAYTASISMGEKCVLHVMNGAVMYQIDSVVRACSDFLVQQLDPSNAIGIANFAEQIGCVELHQRAREYIYMHFGEVAKQEEFFNLSHCQLVTLISRDDLNVRCESEVFHACINWVKYDCEQRRFYVQALLRAVRCHSLTPNFLQMQLQKCEILQSDSRCKDYLVKIFEELTLHKPTQVMPCRAPKVGRLIYTAGGYFRQSLSYLEAYNPSDGTWLRLADLQVPRSGLAGCVVGGLLYAVGGRNNSPDGNTDSSALDCYNPMTNQWSPCAPMSVPRNRIGVGVIDGHIYAVGGSHGCIHHNSVERYEPERDEWHLVAPMLTRRIGVGVAVLNRLLYAVGGFDGTNRLNSAECYYPERNEWRMITAMNTIRSGAGVCVLHNCIYAAGGYDGQDQLNSVERYDVETETWTFVAPMKHRRSALGITVHQGRIYVLGGYDGHTFLDSVECYDPDTDTWSEVTRMTSGRSGVGVAVTMEPCRKQIDQQNCTC

SEQ ID NO: 812234 - protein, 624 aa, Homo sapiens; identical to SEQ ID NO: 812233

SEQ ID NO: 812235 - protein, 624 aa, Homo sapiens; identical to SEQ ID NO: 812233

SEQ ID NO: 812236 - protein, 565 aa, Homo sapiens
MQPDPRPSGAGACCRFLPLQSQCPEGAGDAVMYASTECKAEVTPSQHGNRTFSYTLEDHTKQAFGIMNELRLSQQLCDVTLQVKYQDAPAAQFMAHKVVLASSSPVFKAMFTNGLREQGMEVVSIEGIHPKVMERLIEFAYTASISMGEKCVLHVMNGAVMYQIDSVVRACSDFLVQQLDPSNAIGIANFAEQIGCVELHQRAREYIYMHFGEVAKQEEFFNLSHCQLVTLISRDDLNVRCESEVFHACINWVKYDCEQRRFYVQALLRAVRCHSLTPNFLQMQLQKCEILQSDSRCKDYLVKIFEELTLHKPTQVMPCRAPKVGRLIYTAGGYFRQSLSYLEAYNPSDGTWLRLADLQVPRSGLAGCVVGGLLYAVGGRNNSPDGNTDSSALDCYNPMTNQWSPCAPMSVPRNRIGVGVIDGHIYAVGGSHGCIHHNSVERYEPERDEWHLVAPMLTRRIGVGVAVLNRLLYAVGGFDGTNRLNSAECYYPERNEWRMITAMNTIRSGAGGYDGHTFLDSVECYDPDTDTWSEVTRMTSGRSGVGVAVTMEPCRKQIDQQNCTC

SEQ ID NO: 812237 - protein, 608 aa, Homo sapiens
MQPDPRPSGAGACCRFLPLQSQCPEGAGDAVMYASTECKAEVTPSQHGNRTFSYTLEDHTKQAFGIMNELRLSQQLCDVTLQVKYQDAPAAQFMAHKVVLASSSPVFKAMFTNGLREQGMEVVSIEGIHPKVMERLIEFAYTASISMGEKCVLHVMNGAVMYQIDSVVRACSDFLVQQLDPSNAIGIANFAEQIGCVELHQRAREYIYMHFGEVAKQEEFFNLSHCQLVTLISRDDLNVRCESEVFHACINWVKYDCEQRRFYVQALLRAVRCHSLTPNFLQMQLQKCEILQSDSRCKDYLVKIFEELTLHKPTQVMPCRAPKVGRLIYTAGGYFRQSLSYLEAYNPSDGTWLRLADLQVPRSGLAGCDGNTDSSALDCYNPMTNQWSPCAPMSVPRNRIGVGVIDGHIYAVGGSHGCIHHNSVERYEPERDEWHLVAPMLTRRIGVGVAVLNRLLYAVGGFDGTNRLNSAECYYPERNEWRMITAMNTIRSGAGVCVLHNCIYAAGGYDGQDQLNSVERYDVETETWTFVAPMKHRRSALGITVHQGRIYVLGGYDGHTFLDSVECYDPDTDTWSEVTRMTSGRSGVGVAVTMEPCRKQIDQQNCTC

SEQ ID NO: 812238 - protein, 456 aa, Homo sapiens
MQPDPRPSGAGACCRFLPLQSQCPEGAGDAVMYASTECKAEVTPSQHGNRTFSYTLEDHTKQAFGIMNELRLSQQLCDVTLQVKYQDAPAAQFMAHKVVLASSSPVFKAMFTNGLREQGMEVVSIEGIHPKVMERLIEFAYTASISMGEKCVLHVMNGAVMYQIDSVVRACSDFLVQQLDPSNAIGIANFAEQIGCVELHQRAREYIYMHFGEVAKQEEFFNLSHCQLVTLISRDDLNVRCESEVFHACINWVKYDCEQRRFYVQALLRAVRCHSLTPNFLQMQLQKCEILQSDSRCKDYLVKIFEELTLHKPTQVMPCRAPKVGRLIYTAGGYFRQSLSYLEAYNPSDGTWLRLADLQVPRSGLAGCVVGGLLYAVGGRNNSPDGNTDSSALDCYNPMTNQWSPCAPMSVPRNRIGVGVIDGHIYAVGGSHGCIHHNSVERRLRPAQLYLCCWGL

SEQ ID NO: 812239 - protein, 636 aa, Homo sapiens
MQPDPRPSGAGACCRFLPLQSQCPEGAGDAVMYASTECKAEVTPSQHGNRTFSYTLEDHTKQAFEAFQFGHRERPLAGAFQGPQEQRLCDVTLQVKYQDAPAAQFMAHKVVLASSSPVFKAMFTNGLREQGMEVVSIEGIHPKVMERLIEFAYTASISMGEKCVLHVMNGAVMYQIDSVVRACSDFLVQQLDPSNAIGIANFAEQIGCVELHQRAREYIYMHFGEVAKQEEFFNLSHCQLVTLISRDDLNVRCESEVFHACINWVKYDCEQRRFYVQALLRAVRCHSLTPNFLQMQLQKCEILQSDSRCKDYLVKIFEELTLHKPTQVMPCRAPKVGRLIYTAGGYFRQSLSYLEAYNPSDGTWLRLADLQVPRSGLAGCVVGGLLYAVGGRNNSPDGNTDSSALDCYNPMTNQWSPCAPMSVPRNRIGVGVIDGHIYAVGGSHGCIHHNSVERYEPERDEWHLVAPMLTRRIGVGVAVLNRLLYAVGGFDGTNRLNSAECYYPERNEWRMITAMNTIRSGAGVCVLHNCIYAAGGYDGQDQLNSVERYDVETETWTFVAPMKHRRSALGITVHQGRIYVLGGYDGHTFLDSVECYDPDTDTWSEVTRMTSGRSGVGVAVTMEPCRKQIDQQNCTC

SEQ ID NO: 812240 - protein, 136 aa, Homo sapiens
GGDGWGSQSQTPRVTFSAWCPLGVCVLHNCIYAAGGYDGQDQLNSVERYDVETETWTFVAPMKHRRSALGITVHQGRIYVLGGYDGHTFLDSVECYDPDTDTWSEVTRMTSGRSGVGVAVTMEPCRKQIDQQNCTC

SEQ ID NO: 812241 - protein, 278 aa, Homo sapiens
MQPDPRPSGAGACCRFLPLQSQCPEGAGDAVMYASTECKAEVTPSQHGNRTFSYTLEDHTKQAFGIMNELRLSQQLCDVTLQVKYQDAPAAQFMAHKVVLASSSPVFKAMFTNGLREQGMEVVSIEGIHPKVMERLIEFAYTASISMGEKCVLHVMNGAVMYQIDSVVRACSDFLVQQLDPSNAIGIANFAEQIGCVELHQRAREYIYMHFGEVAKQEEFFNLSHCQLVTLISRDDLNVRCESEVFHACINWVKYDCESVGQRCSQHASPSQPKRGTR

SEQ ID NO: 812242 - protein, 64 aa, Homo sapiens
DGNTDSSALDCYNPMTNQWSPCAPMSVPRNRIGVGVIDGHIYAVGGSHGCIHHNSVERLSGRAW

SEQ ID NO: 812243 - protein, 725 aa, Homo sapiens
MDTVPQLLMCLCVYSIFIKMVVSQYIYPDAVYYLFTNSRSLKVVNISISEGKPIADYVEPSYFFSFCIILFWFCAVIEVHLATLDNLALPLVWPRLLNPYTDILLKSKSHHFSRQILRGFSVLWTGSSLRRHPHPALLEEMGWGGRWLHHNYVLIWVILSMICKGLRQTVVEACFCGISELWQSLDPAPRGLFFKQHLAQFCEQKALLLKEVEEEFRVKRRKGWTDPGEERPGDWGSCHLSVNNQLASNTLAYQGRSSSPVGGVESPWARVFGGTGASAGWPGGVGEGNVFTGWCSAGTVQVGQVRDPRGPGALSWDGFEELITHHLFSFGFCCFCFVLFVLFCISLLFYWEGKRNVLIDHQTLVEGRSSHVIAQDKEVSVCDGSMLCRHIVESRNSLVPAAVPLLCSLPGEDCQLLRNIPGAVSAVPFVGDFRLPAFVVLFLGFVFLLPSLPTCRPQLWLDVIAFRPRWLPFIKLWSSTPFFFFLIWSGREGGGREKARKVLLVFQKIRGDDSTRELTDRSVCRAGKVRRHPTTTTRKAASPDRLGRGLDTLVYLKSISVNFFSYVLKFVNGVLFWTFLNMNSPKAFSLDLILNPKDFMYGFFATYLIFFKCLTSEVHKPVVCVLELKRNSLIHIGSPGIPSAGSIWLEKAVCLTHCNLPWLENAFNVSTLSFLCHVLVGIFKIGGRNRYFSETLPEYLLFPLTSNQLKEKEVFMLIFCLVLFY

SEQ ID NO: 812244 - protein, 730 aa, Homo sapiens
MDTVPQLLMCLCVYSIFIKMVVSQYIYPDAVYYLFTNSRSLKVVNISISEGKPIADLFWFCAVIEVHLATLDNLALPLVWPRLLNPYTDILLKSKSHHFSRQILRGFSVLWTGSSLRRHPHPALLEEMGWGGRWLHHNYVLIWVILSMICKGLRQTVVEACFCGISELWQSLDPAPRGLFFKQHLAQFCEQKALLLKEVEEEFRVKRRKGWTDPGEERPGDWGSCHLSVNNQLASNTLAYQGRSSSPVGGVESPWARVFGGTGASAGWPGGVGEGNVFTGWCSAGTVQVGQVRDPRGPGALSWDGFEELITHHLFSFGFCCFCFVLFVLFCISLLFYWEGKRNVLIDHQTLVEGGPSHVIAQDKEVSVCDGSMLCRHIVESRNSLVPAAVPLLCSLPGEDCQLLRNIPGAVSAVPFVGDFRLPAFVVLFLGFVFLLPSLPTCRPQLWLDVIAFRPRLASLHYSYDPPPHFFLFLIWSGREGGGREKARKVLLVFQKIRGDDSTRELTDRSVCRAGKVRRHPTTTTRKAASPDRLGRGLDTLVYLKSISVNFFSYVLKFVNGVLFWTFLNMNSPKAFSLDLILNPKDFMYGFFATYLIFFKCLTSEVHKPVVCVLELKRNSLIHIGSPGIPSAGSIWLEKAVCLTHCNLPWLENAFNVSTLSFLCHVLVGIFKIGGRNRYFSETLPEYLLFPLTSNQLKEKEVFMLIFCLVLFYCFKRYIEKCRPLKRNSM

SEQ ID NO: 812245 - protein, 725 aa, Homo sapiens; identical to SEQ ID NO: 812243

SEQ ID NO: 812246 - protein, 694 aa, Homo sapiens
MKVNQIADYVEPSYFFSFCIILFWFCAVIEVHLATLDNLALPLVWPRLLNPYTDILLKSKSHHFSRQILRGFSVLWTGSSLRRHPHPALLEEMGWGGRWLHHNYVLIWVILSMICKGLRQTVVEACFCGISELWQSLDPAPRGLFFKQHLAQFCEQKALLLKEVEEEFRVKRRKGWTDPGEERPGDWGSCHLSVNNQLASNTLAYQGRSSSPVGGVESPWARVFGGTGASAGWPGGVGEGNVFTGWCSAGTVQVGQVRDPRGPGALSWDGFEELITHHLFSFGFCCFCFVLFVLFCISLLFYWEGKRNVLIDHQTLVKAGPSHVIAQDKEVSVCDGSMLCRHIVESRNSLVPAAVPLLCSLPGEDCQLLRNIPGAVSAVPFVGDFRLPAFVVLFLGFVFLLPSLPTCRPQLWLDVIAFRPRWLPFLSYDPPPHFFVFLIWSGREGGGREKARKVLLVFQKIRGDDSTRELTDRSVCRAGKVRRHPTTTTRKAASPDRLGRGLDTLVYLKSISVNFFSYVLKFVNGVLFWTFLNMNSPKAFSLDLILNPKDFMYGFFATYLIFLKCLTSEVHKPVVCVLELKRNSLIHIGSPGIPSAGSIWLEKAVCLTHCNLPWLENAFNVSTLSFLCHVLVGIFKIGGRNRYFSETLPEYLLFPLTSNQLKEKEVFMLIFCLVLFYDFKRYIEKCRPLKRNSM

SEQ ID NO: 812247 - protein, 725 aa, Homo sapiens; identical to SEQ ID NO: 812243

SEQ ID NO: 812248 - protein, 725 aa, Homo sapiens; identical to SEQ ID NO: 812243

SEQ ID NO: 812249 - protein, 848 aa, Homo sapiens
EYARLVMEAQPEWLRAEVKRLSHELAETTREKIQAAEYGLAVLEEKHQLKLQFEELEVDYEAIRSEMEQLKEAFGQAHTNHKKVAADGESREESLIQESASKEQYYVRKVLELQTELKQLRNVLTNTQSENERLASVAQELKEINQNVEIQRGRLRDDIKEYKFREARLLQDYSELRSEENISLQKQVSVLRQNQVEFEGLKHEIKRLEEETEYLNSQLEDAIRLKEISERQLEEALETLKTEREQKNSLRKELSHYMSINDSFYTSHLHVSLDGLKFSDDAAEPNNDAEALVNGFEHGGLAKLPLDNKTSTPKKEGLAPPSPSLVSDLLSELNISEIQKLKQQLMQMEREKAGLLATLQDTQKQLEHTRGSLSEQQEKVTRLTENLSALRRLQASKERQTALDNEKDRDSHEDGDYYEVDINGPEILACKYHVAVAEAGELREQLKALRSTHEAREAQHAEEKGRYEAEGQALTEKVSLLEKASRQDRELLARLEKELKKVSDVAGETQGSLSVAQDELVTFSEELANLYHHVCMCNNETPNRVMLDYYREGQGGAGRTSPGGRTSPEARGRRSPILLPKGLLAPEAGRADGGTGDSSPSPGSSLPSPLSDPRREPMNIYNLIAIIRDQIKHLQAAVDRTTELSRQRIASQELGPAVDKDKEALMEEILKLKSLLSTKREQITTLRTVLKANKQTAEVALANLKSKYENEKAMVTETMMKLRNELKALKEDAATFSSLRAMFATRCDEYITQLDEMQRQLAAAEDEKKTLNSLLRMAIQQKLALTQRLELLELDHEQTRRGRAKAAPKTKPATPSVSHTCACASDRAEGTGLANQVFCSEKHSIYCD

SEQ ID NO: 812250 - protein, 753 aa, Homo sapiens
PQQTQLKEAFGQAHTNHKKVAADGESREESLIQESASKEQYYVRKVLELQTELKQLRNVLTNTQSENERLASVAQELKEINQNVEIQRGRLRDDIKEYKFREARLLQDYSELRSEENISLQKQVSVLRQNQVEFEGLKHEIKRLEEETEYLNSQLEDAIRLKEISERQLEEALETLKTEREQKNSLRKELSHYMSINDSFYTSHLHVSLDGLKFSDDAAEPNNDAEALVNGFEHGGLAKLPLDNKTSTPKKEGLAPPSPSLVSDLLSELNISEIQKLKQQLMQMEREKAGLLATLQDTQKQLEHTRGSLSEQQEKVTRLTENLSALRRLQASKERQTALDNEKDRDSHEDGDYYEVDINGPEILACKYHVAVAEAGELREQLKALRSTHEAREAQHAEEKGRYEAEGQALTEKVSLLEKASRQDRELLARLEKELKKVSDVAGETQGSLSVAQDELVTFSEELANLYHHVCMCNNETPNRVMLDYYREGQGGAGRTSPGGRTSPEARGRRSPILLPKGLLAPEAGRADGGTGDSSPSPGSSLPSPLSDPRREPMNIYNLIAIIRDQIKHLQAAVDRTTELSRQRIASQELGPAVDKDKEALMEEILKLKSLLSTKREQITTLRTVLKANKQTAEVALANLKSKYENEKAMVTETMMKLRNELKALKEDAATFSSLRAMFATRCDEYITQLDEMQRQLAAAEDEKKTLNSLLRMAIQQKLALTQRLELLELDHEQTRRGRAKAAPKTKPATPSL

SEQ ID NO: 812251 - protein, 753 aa, Homo sapiens; identical to SEQ ID NO: 812250

SEQ ID NO: 812252 - protein, 132 aa, Homo sapiens
MKLELDSVFLFVCLFFKTGSWSITGLECSGMITAHCSLHLLGSSDPPTSASPIAKIPGACCHAWLIFIFFVWRQGVSVLPRLVLNSWAQVILPPRSPKVLGVHVSHYSLSWTPLLVYGHSRCPVIEKKGNDD

SEQ ID NO: 812253 - protein, 211 aa, Homo sapiens
MDAPGALAQTAAPGPGRKELKIVIVGDGGCGKTSLLMVYSQGSFPEHYAPSVFEKYTASVTVGSKEVTLNLYDTAGQEDYDRLRPLSYQNTHLVLICYDVMNPTSYDNVLIKWFPEVTHFCRGIPMVLIGCKTDLRKDKEQLRKLRAAQLEPITYMQGLSACEQIRAALYLECSAKFRENVEDVFREAAKVALSALKKAQRQKKRRLCLLL

SEQ ID NO: 812254 - protein, 211 aa, Homo sapiens; identical to SEQ ID NO: 812253

SEQ ID NO: 812255 - protein, 211 aa, Homo sapiens; identical to SEQ ID NO: 812253

SEQ ID NO: 812256 - protein, 211 aa, Homo sapiens; identical to SEQ ID NO: 812253

SEQ ID NO: 812257 - protein, 211 aa, Homo sapiens; identical to SEQ ID NO: 812253

SEQ ID NO: 812258 - protein, 211 aa, Homo sapiens; identical to SEQ ID NO: 812253

SEQ ID NO: 812259 - protein, 111 aa, Homo sapiens
MNPTSYDNVLIKWFPEVTHFCRGIPMVLIGCKTDLRKDKEQLRKLRAAQLEPITYMQGLSACEQIRAALYLECSAKFRENVEDVFREAAKVALSALKKAQRQKKRRLCLLL

SEQ ID NO: 812260 - protein, 170 aa, Homo sapiens
MDAPGALAQTAAPGPGRKELKIVIVGDGGCGKTSLLMVYSQGSFPEHYAPSVFEKYTASVTVGSKEVTLNLYDTAGQEDYDRLRPLSYQNTHLVLICYDVMNPTSYDNVLIKWFPEVTHFCRGIPMVLIGCKTDLRKDKEQLRKLRAAQLEPITYMQVGRGQDPGAQPWL

SEQ ID NO: 812261 - protein, 94 aa, Homo sapiens
NPTSYDNVLIKVRPASWVVAPHLGPAAPLTRLLPPQWFPEVTHFCRGIPMVLIGCKTDLRKDKEQLRKLRAAQLEPITYMQVGRGQDPGAQPWL

SEQ ID NO: 812262 - protein, 146 aa, Homo sapiens
RPRAALRSPEGTGDEGTMYRDPEAASPGAPSRDVLLVSAIITVSLSVTVVLCGLCHWCQRKLGKRYKNSLETVGTPDSGRGRSEKKAINDLDRDFWNNNESTVQQKWSSYPPKEFILNISPYAPYGDPRLSLNGTLLSGAKVAAAA

SEQ ID NO: 812263 - protein, 420 aa, Homo sapiens
RPRAALRSPEGTGDEGTMYRDPEAASPGAPSRDVLLVSAIITVSLSVTVVLCGLCHWCQRKLGKRYKNSLETVGTPDSGRGRSEKKAIKLPAGGKAVNTAPVPGQTPHDESDRRTEPRSSVSDLVNSLTSEMLMLSPGSEEDEAHEGCSRENLGRIQFSVGYNFQESTLTVKIMKAQELPAKDFSGTSDPFVKDLPAARQEHKLETKVKRKNLNPHWNETFLFEGFPYEKVVQRILYLQVLDYDRFSRNDPIGEVSIPLNKVDLTQMQTFWKDLKPCSDGSGSRGELLLSLCYNPSANSIIVNIIKARNLKAMDIGGTSDPYVKVWLMYKDKRVEKKKTVTMKRNLNPIFNESFAFDIPTEKLRETTIIITVMDKDKLSRNDVIGKIYLSWKSGPGEVKHWKDMIARPRQPVAQWHQLKA

SEQ ID NO: 812264 - protein, 420 aa, Homo sapiens; identical to SEQ ID NO: 812263

SEQ ID NO: 812265 - protein, 420 aa, Homo sapiens; identical to SEQ ID NO: 812263

SEQ ID NO: 812266 - protein, 414 aa, Homo sapiens
MNLQRYWGEIPISSSQTNRSSFDLLPREFRLVEVHDPPLHQPSANKPKPPTMLDIPSEPCSLTIHTIQLIQHNRRLRNLIATAQAQNQQQTEGVKTEESEPLPSCPGSPPLPDDLLPLDCKNPNAPFQIRHSDPESDFYRGKGEPVTELSWHSCRQLLYQAVATILAHAGFDCANESVLETLTDVAHEYCLKFTKLLRFAVDREARLGQTPFPDVMEQVFHEVGIGSVLSLQKFWQHRIKDYHSYMLQISKQLSEEYERIVNPEKATEDAKPVKIKEEPVSDITFPVSEELEADLASGDQSLPMGVLGAQSERFPSNLEVEASPQASSAEVNASPLWNLAHVKMEPQESEEGNVSGHGVLGSDVFEEPMSGMSEAGIPQSPDDSDSSYGSHSTDSLMGSSPVFNQRCKKRMRKI

SEQ ID NO: 812267 - protein, 414 aa, Homo sapiens; identical to SEQ ID NO: 812266

SEQ ID NO: 812268 - protein, 412 aa, Homo sapiens
MLRYWGEIPISSSQTNRSSFDLLPREFRLVEVHDPPLHQPSANKPKPPTMLDIPSEPCSLTIHTIQLIQHNRRLRNLIATAQAQNQQQTEGVKTEESEPLPSCPGSPPLPDDLLPLDCKNPNAPFQIRHSDPESDFYRGKGEPVTELSWHSCRQLLYQAVATILAHAGFDCANESVLETLTDVAHEYCLKFTKLLRFAVDREARLGQTPFPDVMEQVFHEVGIGSVLSLQKFWQHRIKDYHSYMLQISKQLSEEYERIVNPEKATEDAKPVKIKEEPVSDITFPVSEELEADLASGDQSLPMGVLGAQSERFPSNLEVEASPQASSAEVNASPLWNLAHVKMEPQESEEGNVSGHGVLGSDVFEEPMSGMSEAGIPQSPDDSDSSYGSHSTDSLMGSSPVFNQRCKKRMRKI

SEQ ID NO: 812269 - protein, 140 aa, Homo sapiens
MNLQRYWGEIPISSSQTNRSSFDLLPREFRLVEVHDPPLHQPSANKPKPPTMLDIPSEPCSLTIHTIQLIQHNRRLRNLIATAQAQNQQQTEGVKTEESEPLPSCPGSPPLPDDLLPLDCKNPNAPFQIRHSDPESDFYR

SEQ ID NO: 812270 - protein, 414 aa, Homo sapiens; identical to SEQ ID NO: 812266

SEQ ID NO: 812271 - protein, 414 aa, Homo sapiens; identical to SEQ ID NO: 812266

SEQ ID NO: 812272 - protein, 412 aa, Homo sapiens; identical to SEQ ID NO: 812268

SEQ ID NO: 812273 - protein, 412 aa, Homo sapiens; identical to SEQ ID NO: 812268

SEQ ID NO: 812274 - protein, 199 aa, Homo sapiens [sequence omitted]

SEQ ID NO: 812275 - protein, 301 aa, Homo sapiens
MYEAGGGENPNAPFQIRHSDPESDFYRGKGEPVTELSWHSCRQLLYQAVATILAHAGFDCANESVLETLTDVAHEYCLKFTKLLRFAVDREARLGQTPFPDVMEQVFHEVGIGSVLSLQKFWQHRIKDYHSYMLQISKQLSEEYERIVNPEKATEDAKPVKIKEEPVSDITFPVSEELEADLASGDQSLPMGVLGAQSERFPSNLEVEASPQASSAEVNASPLWNLAHVKMEPQESEEGNVSGHGVLGSDVFEEPMSGMSEAGIPQSPDDSDSSYGSHSTDSLMGSSPVFNQRCKKRMRKI

SEQ ID NO: 812276 - protein, 434 aa, Homo sapiens
MNLQRYWGEIPISSSQTNRSSFDLLPREFRLVEVHDPPLHQPSANKPKPPTMLDIPSEPCSLTIHTIQLIQHNRRLRNLIATAQAQNQQQTEGVKTEESEPLPSCPGSPPLPDDLLPLDCKNPNAPFQIRHSDPESDFYRGKGEPVTELSWHSCRQLLYQAVATILAHAGFDCANESVLETLTDVAHEYCLKFTKLLRFAVDREARLGQTPFPDVMEQVFHEVGIGSVLSLQKFWQHRIKDYHSYMLQISKQLSEEYERIVNPEKATEDAKPVKIKEEPVSDITFPVSEELEADLASGDQSLPMGVLGAQSERFPSNLEVEASPQASSAEVNASPLWNLAHVKMEPQESEEGNVSGHGVLGSDVFEEPMSGMSEAGIPQSPDDSDSSYGSHSTDSLMGSSPVFNQRCSLVAMPRKIEEIKDFLLTARRKDAKSV

SEQ ID NO: 812277 - protein, 99 aa, Homo sapiens
LQDSARAKACYKPLESFPDNRTFNDKSPNAKGLVCSQRVYWEECGDLSAALLLWMAAADGPNAVVSSGGGSCGAADASLLEVNPEQKEQSESCSSCWPL

SEQ ID NO: 812278 - protein, 271 aa, Homo sapiens
MASADSRRVADGGGAGGTFQPYLDTLRQELQQTDPTLLSVVVAVLAVLLTLVFWKLIRSRRSSQRAVLLVGLCDSGKTLLFVRLLTGLYRDTQTSITDSCAVYRVNNNRGNSLTLIDLPGHESLRLQFLERFKSSARAIVFVVDSAAFQREVKDVAEFLYQVLIDSMGLKNTPSFLIACNKQDIAMAKSAKLIQQQLEKELNTLRVTRSAAPSTLDSSSTAPAQLGKKGKEFEFSQLPLKVEFLECSAKGGRGDVGSADIQDLEKWLAKIA

SEQ ID NO: 812279 - protein, 271 aa, Homo sapiens; identical to SEQ ID NO: 812278

SEQ ID NO: 812280 - protein, 285 aa, Homo sapiens
MAGWYWSGVYGYSSMASADSRRVADGGGAGGTFQPYLDTLRQELQQTDPTLLSVVVAVLAVLLTLVFWKLIRSRRSSQRAVLLVGLCDSGKTLLFVRLLTGLYRDTQTSITDSCAVYRVNNNRGNSLTLIDLPGHESLRLQFLERFKSSARAIVFVVDSAAFQREVKDVAEFLYQVLIDSMGLKNTPSFLIACNKQDIAMAKSAKLIQQQLEKELNTLRVTRSAAPSTLDSSSTAPAQLGKKGKEFEFSQLPLKVEFLECSAKGGRGDVGSADIQDLEKWLAKIA

SEQ ID NO: 812281 - protein, 271 aa, Homo sapiens; identical to SEQ ID NO: 812278

SEQ ID NO: 812282 - protein, 271 aa, Homo sapiens; identical to SEQ ID NO: 812278

SEQ ID NO: 812283 - protein, 271 aa, Homo sapiens; identical to SEQ ID NO: 812278

SEQ ID NO: 812284 - protein, 271 aa, Homo sapiens; identical to SEQ ID NO: 812278

SEQ ID NO: 812285 - protein, 271 aa, Homo sapiens; identical to SEQ ID NO: 812278

SEQ ID NO: 812286 - protein, 271 aa, Homo sapiens; identical to SEQ ID NO: 812278

SEQ ID NO: 812287 - protein, 271 aa, Homo sapiens; identical to SEQ ID NO: 812278

SEQ ID NO: 812288 - protein, 271 aa, Homo sapiens; identical to SEQ ID NO: 812278

SEQ ID NO: 812289 - protein, 271 aa, Homo sapiens; identical to SEQ ID NO: 812278

SEQ ID NO: 812290 - protein, 70 aa, Homo sapiens
KGRRSRSRTDAWVDDIGESGRLHTGSGTRSSSSVPVGSEVTGCQLSSPLRISLICGHSYEVSPHVKTGTK

SEQ ID NO: 812291 - protein, 102 aa, Homo sapiens [sequence omitted]

SEQ ID NO: 812292 - protein, 451 aa, Homo sapiens
MPREIITLQLGQCGNQIGFEFWKQLCAEHGISPEGIVEEFATEGTDRKDVFFYQADDEHYIPRAVLLDLEPRVIHSILNSPYAKLYNPENIYLSEHGGGAGNNWASGFSQGEKIHEDIFDIIDREADGSDSLEGFVLCHSIAGGTGSGLGSYLLERLNDRYPKKLVQTYSVFPNQDEMSDVVVQPYNSLLTLKRLTQNADCVVVLDNTALNRIATDRLHIQNPSFSQINQLVSTIMSASTTTLRYPGYMNNDLIGLIASLIPTPRLHFLMTGYTPLTTDQSVASVRKTTVLDVMRRLLQPKNVMVSTGRDRQTNHCYIAILNIIQGEVDPTQVHKSLQRIRERKLANFIPWGPASIQVALSRKSPYLPSAHRVSGLMMANHTSISSLFERTCRQYDKLRKREAFLEQFRKEDMFKDNFDEMDTSREIVQQLIDEYHAATRPDYISWGTQEQ

SEQ ID NO: 812293 - protein, 120 aa, Homo sapiens
LVRSEGPEIRERKLANFIPWGPASIQVALSRKSPYLPSAHRVSGLMMANHTSISSLFERTCRQYDKLRKREAFLEQFRKEDMFKDNFDEMDTSREIVQQLIDEYHAATRPDYISWGTQEQ

SEQ ID NO: 812294 - protein, 479 aa, Homo sapiens
MPREIITLQLGQCGNQIGFEFWKQLCAEHGISPEGIVEEFATEGTDRKDVFFYQADDEHYIPRAVLLDLEPRVIHSILNSPYAKLYNPENIYLSEHGGGAGNNWASGFSQGEKIHEDIFDIIDREADGSDSLEGFVLCHSIAGGTGSGLGSYLLERLNDRYPKKLVQTYSVFPNQDEMSDVVVQPYNSLLTLKRLTQNADCVVVLDNTALNRIATDRLHIQNPSFSQINQLVSTIMSASTTTLRYPGYMNNDLIGLIASLIPTPRLHFLMTGYTPLTTDQSVASVRKTTVLDVMRRLLQPKNVMVSTGRDRQTNHCYIAILNIIQGEVDPTQVGEAPSSHTLDLQEVEERPPPLLLCPPQVHKSLQRIRERKLANFIPWGPASIQVALSRKSPYLPSAHRVSGLMMANHTSISSLFERTCRQYDKLRKREAFLEQFRKEDMFKDNFDEMDTSREIVQQLIDEYHAATRPDYISWGTQEQ

SEQ ID NO: 812295 - protein, 429 aa, Homo sapiens
MPREIITLQLGQCGNQIGFEFWKQLCAEHGISPEGIVEEFATEGTDRKDVFFYQADDEHYIPRAVLLDLEPRVIHSILNSPYAKLYNPENIYLSEHGGGAGNNWASGFSQGEKIHEDIFDIIDREADGSDSLEGFVLCHSIAGGTGSGLGSYLLERLNDRYPKKLVQTYSVFPNQDEMSDVVVQPYNSLLTLKRLTQNADCVVVLDNTALNRIATDRLHIQNPSFSQINQLVSTIMSASTTTLRYPGYMNNDLCLLSYQVASVRKTTVLDVMRRLLQPKNVMVSTGRDRQTNHCYIAILNIIQGEVDPTQVHKSLQRIRERKLANFIPWGPASIQVALSRKSPYLPSAHRVSGLMMANHTSISSLFERTCRQYDKLRKREAFLEQFRKEDMFKDNFDEMDTSREIVQQLIDEYHAATRPDYISWGTQEQ

SEQ ID NO: 812296 - protein, 451 aa, Homo sapiens; identical to SEQ ID NO: 812292

SEQ ID NO: 812297 - protein, 203 aa, Homo sapiens
MNNDLIGLIASLIPTPRLHFLMTGYTPLTTDQSVASVRKTTVLDVMRRLLQPKNVMVSTGRDRQTNHCYIAILNIIQGEVDPTQVHKSLQRIRERKLANFIPWGPASIQVALSRKSPYLPSAHRVSGLMMANHTSISSLFERTCRQYDKLRKREAFLEQFRKEDMFKDNFDEMDTSREIVQQLIDEYHAATRPDYISWGTQEQ

SEQ ID NO: 812298 - protein, 444 aa, Homo sapiens
PKVGQIGDQIGFEFWKQLCAEHGISPEGIVEEFATEGTDRKDVFFYQADDEHYIPRAVLLDLEPRVIHSILNSPYAKLYNPENIYLSEHGGGAGNNWASGFSQGEKIHEDIFDIIDREADGSDSLEGFVLCHSIAGGTGSGLGSYLLERLNDRYPKKLVQTYSVFPNQDEMSDVVVQPYNSLLTLKRLTQNADCVVVLDNTALNRIATDRLHIQNPSFSQINQLVSTIMSASTTTLRYPGYMNNDLIGLIASLIPTPRLHFLMTGYTPLTTDQSVASVRKTTVLDVMRRLLQPKNVMVSTGRDRQTNHCYIAILNIIQGEVDPTQVHKSLQRIRERKLANFIPWGPASIQVALSRKSPYLPSAHRVSGLMMANHTSISSLFERTCRQYDKLRKREAFLEQFRKEDMFKDNFDEMDTSREIVQQLIDEYHAATRPDYISWGTQEQ

SEQ ID NO: 812299 - protein, 464 aa, Homo sapiens
MPREIITLQLGQCGNQIGFEFWKQLCAEHGISPEGIVEEFATEGTDRKDVFFYQADDEHYIPRAVLLDLEPRVIHSILNSPYAKLYNPENIYLSEHGGGAGNNWASGFSQVVSYSLAGPTTRWGEKIHEDIFDIIDREADGSDSLEGFVLCHSIAGGTGSGLGSYLLERLNDRYPKKLVQTYSVFPNQDEMSDVVVQPYNSLLTLKRLTQNADCVVVLDNTALNRIATDRLHIQNPSFSQINQLVSTIMSASTTTLRYPGYMNNDLIGLIASLIPTPRLHFLMTGYTPLTTDQSVASVRKTTVLDVMRRLLQPKNVMVSTGRDRQTNHCYIAILNIIQGEVDPTQVHKSLQRIRERKLANFIPWGPASIQVALSRKSPYLPSAHRVSGLMMANHTSISSLFERTCRQYDKLRKREAFLEQFRKEDMFKDNFDEMDTSREIVQQLIDEYHAATRPDYISWGTQEQ

SEQ ID NO: 812300 - protein, 398 aa, Homo sapiens
LGESAGPVVASSSSMFRQVDVLWVVELGIGGVEDGVDHPGFQVQQHGPGDVVLIVLPGEKIHEDIFDIIDREADGSDSLEGFVLCHSIAGGTGSGLGSYLLERLNDRYPKKLVQTYSVFPNQDEMSDVVVQPYNSLLTLKRLTQNADCVVVLDNTALNRIATDRLHIQNPSFSQINQLVSTIMSASTTTLRYPGYMNNDLIGLIASLIPTPRLHFLMTGYTPLTTDQSVASVRKTTVLDVMRRLLQPKNVMVSTGRDRQTNHCYIAILNIIQGEVDPTQVHKSLQRIRERKLANFIPWGPASIQVALSRKSPYLPSAHRVSGLMMANHTSISSLFERTCRQYDKLRKREAFLEQFRKEDMFKDNFDEMDTSREIVQQLIDEYHAATRPDYISWGTQEQ

SEQ ID NO: 812301 - protein, 339 aa, Homo sapiens
MTPGGGIDIIDREADGSDSLEGFVLCHSIAGGTGSGLGSYLLERLNDRYPKKLVQTYSVFPNQDEMSDVVVQPYNSLLTLKRLTQNADCVVVLDNTALNRIATDRLHIQNPSFSQINQLVSTIMSASTTTLRYPGYMNNDLIGLIASLIPTPRLHFLMTGYTPLTTDQSVASVRKTTVLDVMRRLLQPKNVMVSTGRDRQTNHCYIAILNIIQGEVDPTQVHKSLQRIRERKLANFIPWGPASIQVALSRKSPYLPSAHRVSGLMMANHTSISSLFERTCRQYDKLRKREAFLEQFRKEDMFKDNFDEMDTSREIVQQLIDEYHAATRPDYISWGTQEQ

SEQ ID NO: 812302 - protein, 409 aa, Homo sapiens
MPREIITLQLGQCGNQIGFEFWKQLCAEHGISPEGIVEEFATEGTDRKDVFFYQADDEHYIPRAVLLDLEPRVIHSILNSPYAKLYNPENIYLSEHGGGAGNNWASGFSQGEKIHEDIFDIIDREADGSDSLEDEMSDVVVQPYNSLLTLKRLTQNADCVVVLDNTALNRIATDRLHIQNPSFSQINQLVSTIMSASTTTLRYPGYMNNDLIGLIASLIPTPRLHFLMTGYTPLTTDQSVASVRKTTVLDVMRRLLQPKNVMVSTGRDRQTNHCYIAILNIIQGEVDPTQVHKSLQRIRERKLANFIPWGPASIQVALSRKSPYLPSAHRVSGLMMANHTSISSLFERTCRQYDKLRKREAFLEQFRKEDMFKDNFDEMDTSREIVQQLIDEYHAATRPDYISWGTQEQ

SEQ ID NO: 812303 - protein, 334 aa, Homo sapiens
VPTRMGWEADGSDSLEGFVLCHSIAGGTGSGLGSYLLERLNDRYPKKLVQTYSVFPNQDEMSDVVVQPYNSLLTLKRLTQNADCVVVLDNTALNRIATDRLHIQNPSFSQINQLVSTIMSASTTTLRYPGYMNNDLIGLIASLIPTPRLHFLMTGYTPLTTDQSVASVRKTTVLDVMRRLLQPKNVMVSTGRDRQTNHCYIAILNIIQGEVDPTQVHKSLQRIRERKLANFIPWGPASIQVALSRKSPYLPSAHRVSGLMMANHTSISSLFERTCRQYDKLRKREAFLEQFRKEDMFKDNFDEMDTSREIVQQLIDEYHAATRPDYISWGTQEQ

SEQ ID NO: 812304 - protein, 299 aa, Homo sapiens
MPREIITLQLGQCGNQIGFEFWKQLCAEHGISPEGIVEEFATEGTDRKDVFFYQADDEHYIPRAVLLDLEPRVIHSILNSPYAKLYNPENIYLSEHGGGAGNNWASGFSQGEKIHEDIFDIIDREADGSDSLEGFVLCHSIAGGTGSGLGSYLLERLNDRYPKKLVQTYSVFPNQDEMSDVVVQPYNSLLTLKRLTQNADCVVVLDNTALNRIATDRLHIQNPSFSQINQLVSTIMSASTTTLRYPGYMNNDLIGLIASLIPTPRLHFLMTGYTPLTTDQSVRAAFSVPGQAGPGPNRP

SEQ ID NO: 812305 - protein, 273 aa, Homo sapiens
MPREIITLQLGQCGNQIGFEFWKQLCAEHGISPEGIVEEFATEGTDRKDVFFYQADDEHYIPRAVLLDLEPRVIHSILNSPYAKLYNPENIYLSEHGGGAGNNWASGFSQGEKIHEDIFDIIDREADGSDSLEGFVLCHSIAGGTGSGLGSYLLERLNDRYPKKLVQTYSVFPNQDEMSDVVVQPYNSLLTLKRLTQNADCVVVLDNTALNRIATDRLHIQNPSFSQINQLVSTIMSASTTTLRYPGYMNNDLIGLIASLIPTPYMQGVRSSN

SEQ ID NO: 812306 - protein, 280 aa, Homo sapiens
MPREIITLQLGQCGNQIGFEFWKQLCAEHGISPEGIVEEFATEGTDRKDVFFYQADDEHYIPRAVLLDTTTLRYPGYMNNDLIGLIASLIPTPRLHFLMTGYTPLTTDQSVASVRKTTVLDVMRRLLQPKNVMVSTGRDRQTNHCYIAILNIIQGEVDPTQVHKSLQRIRERKLANFIPWGPASIQVALSRKSPYLPSAHRVSGLMMANHTSISSLFERTCRQYDKLRKREAFLEQFRKEDMFKDNFDEMDTSREIVQQLIDEYHAATRPDYISWGTQEQ

SEQ ID NO: 812307 - protein, 232 aa, Homo sapiens
MPREIITLQLGQCGNQIGFEFWKQLCAEHGISPEGIVEEFATEGTDRKDVFFYQADDEHYIPRAVLLDLEPRVIHSILNSPYAKLYNPENIYLSEHGGGAGNNWASGFSQGEKIHEDIFDIIDREADGSDSLEGFVLCHSIAGGTGSGLGSYLLERLNDRYPKKLVQTYSVFPNQYDKLRKREAFLEQFRKEDMFKDNFDEMDTSREIVQQLIDEYHAATRPDYISWGTQEQ

SEQ ID NO: 812308 - protein, 215 aa, Homo sapiens
MPREIITLQLGQCGNQIGFEFWKQLCAEHGISPEGIVEEFATEGTDRKDVFFYQADDEHYIPRAVLLDLEPRVIHSILNSPYAKLYNPENIYLSEHGGGAGNNWASGFSQGEKIHEDIFDIIDREADGSDSLEGFVLCHSIAGGTGSGLGSYLLERLNDRYPKKLVQTYSVFPNQDEMSDVVVQPYNSLLTLKRLTQNADCVQHSLNRDLRLVPS

SEQ ID NO: 812309 - protein, 228 aa, Homo sapiens
MPREIITLQLGQCGNQIGFEFWKQLCAEHGISPEGIVEEFATEGTDRKDVFFYQADDEHYIPRAVLLDLEPRVIHSILNSPYAKLYNPENIYLSEHGGGAGNNWASGFSQGEKIHEDIFDIIDREADGSDSLEGFVLCHSIAGGTGSGLGSYLLERLNDRYPKKLVQTYSVFPNQDEMSDVVVQPYNSLLTLKRLTQNADCVGESWILPLPTLNTPYPLESIKSFSCI

SEQ ID NO: 812310 - protein, 790 aa, Homo sapiens
MRTYRYFLLLFWVGQPYPTLSTPLSKRTSGFPAKKRALELSGNSKNELNRSKRSWMWNQFFLLEEYTGSDYQYVGKLHSDQDRGDGSLKYILSGDGAGDLFIINENTGDIQATKRLDREEKPVYILRAQAINRRTGRPVEPESEFIIKIHDINDNEPIFTKEVYTATVPEMSDVGTFVVQVTATDADDPTYGNSAKVVYSILQGQPYFSVESETGIIKTALLNMDRENREQYQVVIQAKDMGGQMGGLSGTTTVNITLTDVNDNPPRFPQSTYQFKTPESSPPGTPIGRIKASDADVGENAEIEYSITDGEGLDMFDVITDQETQEGIITVKKLLDFEKKKVYTLKVEASNPYVEPRFLYLGPFKDSATVRIVVEDVDEPPVFSKLAYILQIREDAQINTTIGSVTAQDPDAARNPVKYSVDRHTDMDRIFNIDSGNGSIFTSKLLDRETLLWHNITVIATEINNPKQSSRVPLYIKVLDVNDNAPEFAEFYETFVCEKAKADQLIQTLHAVDKDDPYSGHQFSFSLAPEAASGSNFTIQDNKDNTAGILTRKNGYNRHEMSTYLLPVVISDNDYPVQSSTGTVTVRVCACDHHGNMQSCHAEALIHPTGLSTGALVAILLCIVILLVTVVLFAALRRQRKKEPLIISKEDIRDNIVSYNDEGGGEEDTQAFDIGTLRNPEAIEDNKLRRDIVPEALFLPRRTPTARDNTDVRDFINQRLKENDTDPTAPPYDSLATYAYEGTGSVADSLSSLESVTTDADQDYDYLSDWGPRFKKLADMYGGVDSDKDS

SEQ ID NO: 812311 - protein, 663 aa, Homo sapiens
MRTYRYFLLLFWVGQPYPTLSTPLSKRTSGFPAKKRALELSGNSKNELNRSKRSWMWNQFFLLEEYTGSDYQYVGKLHSDQDRGDGSLKYILSGDGAGDLFIINENTGDIQATKRLDREEKPVYILRAQAINRRTGRPVEPESEFIIKIHDINDNEPIFTKEVYTATVPEMSDVGTFVVQVTATDADDPTYGNSAKVVYSILQGQPYFSVESETGIIKTALLNMDRENREQYQVVIQAKDMGGQMGGLSGTTTVNITLTDVNDNPPRFPQSTYQFKTPESSPPGTPIGRIKASDADVGENAEIEYSITDGEGLDMFDVITDQETQEGIITVKKLLDFEKKKVYTLKVEASNPYVEPRFLYLGPFKDSATVRIVVEDVDEPPVFSKLAYILQIREDAQINTTIGSVTAQDPDAARNPVKYSVDRHTDMDRIFNIDSGNGSIFTSKLLDRETLLWHNITVIATEINNPKQSSRVPLYIKVLDVNDNAPEFAEFYETFVCEKAKADQLIQTLHAVDKDDPYSGHQFSFSLAPEAASGSNFTIQDNKDNTAGILTRKNGYNRHEMSTYLLPVVISDNDYPVQSSTGTVTVRVCACDHHGNMQSCHAEALIHPTGLSTGALVAILLCIVILLGKLVLPASYLPMVRGSHCYCDTLDLSASPIKAYSLI

SEQ ID NO: 812312 - protein, 663 aa, Homo sapiens; identical to SEQ ID NO: 812311

SEQ ID NO: 812313 - protein, 568 aa, Homo sapiens
MPSTDLLMLKAFEPYLEILEVYSTKAKNYVNGHCTKYEPWQLIAWSVVWTLLIVWGYEFVFQPESLWSRFKKKCFKLTRKMPIIGRKIQDKLNKTKDDISKNMSFLKVDKEYVKALPSQGLSSSAVLEKLKEYSSMDAFWQEGRASGTVYSGEEKLTELLVKAYGDFAWSNPLHPDIFPGLRKIEAEIVRIACSLFNGGPDSCGCVTSGGTESILMACKAYRDLAFEKGIKTPEIVAPQSAHAAFNKAASYFGMKIVRVPLTKMMEVDVRAMRRAISRNTAMLVCSTPQFPHGVIDPVPEVAKLAVKYKIPLHVDACLGGFLIVFMEKAGYPLEHPFDFRVKGVTSISADTHKYGYAPKGSSLVLYSDKKYRNYQFFVDTDWQGGIYASPTIAGSRPGGISAACWAALMHFGENGYVEATKQIIKTARFLKSELENIKGIFVFGNPQLSVIALGSRDFDIYRLSNLMTAKGWNLNQLQFPPSIHFCITLLHARKRVAIQFLKDIRESVTQIMKNPKAKTTGMGAIYGMAQTTVDRNMVAELSSVFLDSLYSTDTVTQGSQMNGSPKPH

SEQ ID NO: 812314 - protein, 568 aa, Homo sapiens; identical to SEQ ID NO: 812313

SEQ ID NO: 812315 - protein, 405 aa, Homo sapiens
MPSTDLLMLKAFEPYLEILEVYSTKAKNYVNGHCTKYEPWQLIAWSVVWTLLIVWGYEFVFQPESLWSRFKKKCFKLTRKMPIIGRKIQDKLNKTKDDISKNMSFLKVDKEYVKALPSQGLSSSAVLEKLKEYSSMDAFWQEGRASGTVYSGEEKLTELLVKAYGDFAWSNPLHPDIFPGLRKIEAEIVRIACSLFNGGPDSCGCVTSGGTESILMACKAYRDLAFEKGIKTPEIVAPQSAHAAFNKAASYFGMKIVRVPLTKMMEVDVRAMRRAISRNTAMLVCSTPQFPHGVIDPVPEVAKLAVKYKIPLHVDACLGGFLIVFMEKAGYPLEHPFDFRVKGVTSISADTHKYGYAPKGSSLVLYSDKKYRNMVAELSSVFLDSLYSTDTVTQGSQMNGSPKPH

SEQ ID NO: 812316 - protein, 568 aa, Homo sapiens; identical to SEQ ID NO: 812313

SEQ ID NO: 812317 - protein, 568 aa, Homo sapiens; identical to SEQ ID NO: 812313

SEQ ID NO: 812318 - protein, 415 aa, Homo sapiens
MPSTDLLMLKAFEPYLEILEVYSTKAKNYVNGHCTKYEPWQLIAWSVVWTLLIVWGYEFVFQPESLWSRFKKKCFKLTRKMPIIGRKIQDKLNKTKDDISKNMSFLKVDKEYVKALPSQGLSSSAVLEKLKEYSSMDAFWQEGRASGTVYSGEEKLTELLVKAYGDFAWSNPLHPDIFPGLRKIEAEIVRIACSLFNGGPDSCGCVTSGGTESILMACKAYRDLAFEKGIKTPEIVAPQSAHAAFNKAASYFGMKIVRVPLTKMMEVDVRAMRRAISRNTAMLVCSTPQFPHGVIDPVPEVAKLAVKYKIPLHVDACLGGFLIVFMEKAGYPLEHPFDFRVKGVTSISADTHKQTPLWLASCQDGEACAPVERLPRTRPRATRFLCAVTTLVPGEMVFFKGTYCSHFNLQLRALV

SEQ ID NO: 812319 - protein, 568 aa, Homo sapiens; identical to SEQ ID NO: 812313

SEQ ID NO: 812320 - protein, 568 aa, Homo sapiens; identical to SEQ ID NO: 812313

SEQ ID NO: 812321 - protein, 219 aa, Homo sapiens
MPSTDLLMLKAFEPYLEILEVYSTKAKNYVNGHCTKYEPWQLIAWSVVWTLLIVWGYEFVFQPESLWSRFKKKCFKLTRKMPIIGRKIQDKLNKTKDDISKNMSFLKVDKEYVKALPSQGLSSSAVLEKLKEYSSMDAFWQEGRASGTVYSGEEKLTELLVKAYGDFAWSNPLHPDIFPGLRKIEAEIVRIACSLFNGGPDSCGCEALFLFCFSNMLAP

SEQ ID NO: 812322 - protein, 463 aa, Homo sapiens
MPSTDLLMLKAFEPYLEILEVYSTKAKNYVNGHCTKYEPWQLIAWSVVWTLLIVWGYEFVFQPESLWSRFKKKCFKLTRKMPIIGRKIQDKLNKTKDDISKNMSFLKVDKEYVKALPSQGLSSSAVLEKLKEYSSMDAFWQEGRASGTVYSGEEKLTELLVKAYGDFAWSNPLHPDIFPGLRKIEAEIVRIACSLFNGGPDSCGCVTSGGTESILMACKAYRDLAFEKGIKTPEIVAPQSAHAAFNKAASYFGMKIVRVPLTKMMEVDVRAMRRAISRNTAMLVCSTPQFPHGVIDPVPEVAKLAVKYKIPLHVDACLGGFLIVFMEKAGYPLEHPFDFRVKGVTSISADTHKYGYAPKGSSLVLYSDKKYRNYQFFVDTDWQGGIYASPTIAGSRPGGISAACWAALMHFGENGYVEATKQIIKTARFLKSELENIKGIFVFGNPQLSVIALGSRDCHTSLV

SEQ ID NO: 812323 - protein, 221 aa, Homo sapiens
MPSTDLLMLKAFEPYLEILEVYSTKAKNYVNGHCTKYEPWQLIAWSVVWTLLIVWGYEFVFQPESLWSRFKKKCFKLTRKMPIIGRKIQDKLNKTKDDISKNMSFLKVDKEYVKALPSQGLSSSAVLEKLKEYSSMDAFWQEGRASGTVYSGEEKLTELLVKAYGDFAWSNPLHPDIFPGLRKIEAEIVRIACSLFNGGPDSCGCVSICKGHPIALFFRLK

SEQ ID NO: 812324 - protein, 58 aa, Homo sapiens
EVYSTKAKNYVNGHCTKYEPWQLIAWSVVWTLLIVWGYEFVFQPESKYAVSSVKVEWC

SEQ ID NO: 812325 - protein, 382 aa, Homo sapiens
TKGGRTAQLTAVLRKFLDPRLISTEENTQAAETMGPISAPSCRWRIPWQGLLLTASLFTFWNPPTTAQLTIEAVPSNAAEGKEVLLLVHNLPQDPRGYNWYKGETVDANRRIIGYVISNQQITPGPAYSNRETIYPNASLLMRNVTRNDTGSYTLQVIKLNLMSEEVTGQFSVHPETPKPSISSNNSNPVEDKDAVAFTCEPETQNTTYLWWVNGQSLPVSPRLQLSNGNRTLTLLSVTRNDVGPYECEIQNPASANFSDPVTLNVLYGPDAPTISPSDTYYHAGVNLNLSCHAASNPPSQYSWSVNGTFQQYTQKLFIPNITTKNSGSYACHTTNSATGRNRTTVRMITVSDALVQGSSPGLSARATVSIMIGVLARVALI

SEQ ID NO: 812326 - protein, 237 aa, Homo sapiens
HWVDVETSLVTRETHLATAGLHVKTITVSAETPKPSISSNNSNPVEDKDAVAFTCEPETQNTTYLWWVNGQSLPVSPRLQLSNGNRTLTLLSVTRNDVGPYECEIQNPASANFSDPVTLNVLYGPDAPTISPSDTYYHAGVNLNLSCHAASNPPSQYSWSVNGTFQQYTQKLFIPNITTKNSGSYACHTTNSATGRNRTTVRMITVSDALVQGSSPGLSARATVSIMIGVLARVALI

SEQ ID NO: 812327 - protein, 225 aa, Homo sapiens
PPPPRRTRLILGAFCVHPETPKPSISSNNSNPVEDKDAVAFTCEPETQNTTYLWWVNGQSLPVSPRLQLSNGNRTLTLLSVTRNDVGPYECEIQNPASANFSDPVTLNVLYGPDAPTISPSDTYYHAGVNLNLSCHAASNPPSQYSWSVNGTFQQYTQKLFIPNITTKNSGSYACHTTNSATGRNRTTVRMITVSDALVQGSSPGLSARATVSIMIGVLARVALI

SEQ ID NO: 812328 - protein, 181 aa, Homo sapiens
MFSAIRSQHSGVDICINNAGLARPDTLLSGSTSGWKDMFNVNVLALSICTREAYQSMKERNVDDGHIININSMSGHRVLPLSVTHFYSATKYAVTALTEGLRQELREAQTHIRATCISPGVVETQFAFKLHDKDPEKAAATYEQMKCLKPEDVAEAVIYVLSTPAHIQIGDIQMRPTEQVT

SEQ ID NO: 812329 - protein, 111 aa, Homo sapiens
TLVATKPEKLAPSRQDIFQEQLAAIPEFLNIGPLFKSSEPVQLTEAETEYFVRCIKHMFTNHIVFQFDCTNTLNDQLLEKVTVQMEPSDSYEVLSCIPAPTLHGLPPASGF

SEQ ID NO: 812330 - protein, 217 aa, Homo sapiens
  misc_feature (58)..(58): Xaa can be any naturally occurring amino acid
VIENEELITGKRQELVTKIINEEDILSMFSAIRSEPRCLHFAVAGRLGGSGRLCMEAXESCHQDMVNVNVLALSICTREAYQSMKERNVDDGHIININSMSGHRVLPLSVTHFYSATKYAVTALTEGLRQELREAQTHIRATCISPGVVETQFAFKLHDKDPEKAAATYEQMKCLNPRCGAVFLRLRPPTHSDETSNKPPSRELRTGELFFPSNLIG

SEQ ID NO: 812331 - protein, 260 aa, Homo sapiens
MARPGMERWRDRLALVTGASGGIGAAVARALVQQGLKVVGCARTVGNIEELAAECKSAGYPGTLIPYRCDLSNEEDILSMFSAIRSQHSGVDICINNAGLARPDTLLSGSTSGWKDMFNVNVLALSICTREAYQSMKERNVDDGHIININSMSGHRVLPLSVTHFYSATKYAVTALTEGLRQELREAQTHIRATCISPGVVETQFAFKLHDKDPEKAAATYEQMKCLKPEDVAEAVIYVLSTPAHIQIGDIQMRPTEQVT

SEQ ID NO: 812332 - protein, 260 aa, Homo sapiens; identical to SEQ ID NO: 812331

SEQ ID NO: 812333 - protein, 229 aa, Homo sapiens
MARPGMERWRDRLALVTGASGGIGAAVARALVQQGLKVVGCARTVGNIEELAAECKSAGYPGTLIPYRCDLSNEEDILSMFSAIRSQHSGVDICINNAGLARPDTLLSGSTSGWKDMFNVNVLALSICTREAYQSMKERNVDDGHIININSMSGHRVLPLSVTHFYSATKYAVTALTEGLRQELREAQTHIRATCLKPEDVAEAVIYVLSTPAHIQIGDIQMRPTEQVT

SEQ ID NO: 812334 - protein, 255 aa, Homo sapiens [sequence omitted]

SEQ ID NO: 812335 - protein, 181 aa, Homo sapiens; identical to SEQ ID NO: 812328

SEQ ID NO: 812336 - protein, 260 aa, Homo sapiens; identical to SEQ ID NO: 812331

SEQ ID NO: 812337 - protein, 260 aa, Homo sapiens; identical to SEQ ID NO: 812331

SEQ ID NO: 812338 - protein, 260 aa, Homo sapiens; identical to SEQ ID NO: 812331

SEQ ID NO: 812339 - protein, 82 aa, Homo sapiens
FRLHSSSLCGSSWRVGVDVWMPQRSSVVGGNLSPFCPCLNPFPWCSQCLKPEDVAEAVIYVLSTPAHIQIGDIQMRPTEQVT

SEQ ID NO: 812340 - protein, 119 aa, Homo sapiens
MARPGMERWRDRLALVTGASGGIGAAVARALVQQGLKVVGCARTVGNIEELAAECKSAGYPGTLIPYRCDLSNEEDILSMFSAIRSQHSGVDICINNAGLARPDTLLSGSTSGWKDMFN

SEQ ID NO: 812341 - protein, 122 aa, Homo sapiens
WSPWNFILSSFPFLSPPSMSGHRVLPLSVTHFYSATKYAVTALTEGLRQELREAQTHIRATVRLWPSPGGHRVAQALPTHTHRSGSPCSECAAQSSWEWTGHRTGCCCSRHGPMQPFISSFH

SEQ ID NO: 812342 - protein, 104 aa, Homo sapiens
SSATAVLASVKREEERLRPQRLSTEPSSPVVKPSLTLSSCSPPGGRRPDHRSPAALTGGLREPLSPLHPRRLLLGTQETSPREAVTQDPASTSPSSVRRSERRR

SEQ ID NO: 812343 - protein, 104 aa, Homo sapiens; identical to SEQ ID NO: 812342

SEQ ID NO: 812344 - protein, 311 aa, Homo sapiens
WYAPEVMGSDTMQSDDVIWDTLGNKQFCSFKIRTKTQSFCRNEYSLTGLCNRSSCPLANSQYATIKEEKGQCYLYMKVIERAAFPRRLWERVRLSKNYEKALEQIDENLIYWPRFIRHKCKQRFTKITQYLIRIRKLTLKRQRKLVPLSKKVERREKRREEKALIAAQLDNAIEKELLERLKQDTYGDIYNFPIHAFDKALEQQEAESDSSDTEEKDDDDDDEEDVGKREFVEDGEVDESDISDFEDMDKLDASSDEDQDGKSSSEEEEEKALSAKHKGKMPLRGPLRRKRAYVEIEYEQETEPVAKAKTT

SEQ ID NO: 812345 - protein, 311 aa, Homo sapiens; identical to SEQ ID NO: 812344

SEQ ID NO: 812346 - protein, 300 aa, Homo sapiens
MQSDDVIWDTLGNKQFCSFKIRTKTQSFCRNEYSLTGLCNRSSCPLANSQYATIKEEKGQCYLYMKVIERAAFPRRLWERVRLSKNYEKALEQIDENLIYWPRFIRHKCKQRFTKITQYLIRIRKLTLKRQRKLVPLSKKVERREKRREEKALIAAQLDNAIEKELLERLKQDTYGDIYNFPIHAFDKALEQQEAESDSSDTEEKDDDDDDEEDVGKREFVEDGEVDESDISDFEDMDKLDASSDEDQDGKSSSEEEEEKALSAKHKGKMPLRGPLRRKRAYVEIEYEQETEPVAKAKTT

SEQ ID NO: 812347 - protein, 161 aa, Homo sapiens
SLVEPGGKSAEKALIAAQLDNAIEKELLERLKQDTYGDIYNFPIHAFDKALEQQEAESDSSDTEEKDDDDDDEEDVGKREFVEDGEVDESDISDFEDMDKLDASSDEDQDGKSSSEEEEEKALSAKHKGKMPLRGPLRRKRAYVEIEYEQETEPVAKAKTT

SEQ ID NO: 812348 - protein, 289 aa, Homo sapiens
RRRGRRGASGACDLRASRPEVPEGPRWSWGSRALGSAAGKAGAMTLIEGVGDEVTVLFSVLACLLVLALAWVSTHTAEGGDPLPQPSGTPTPSQPSAAMAATDSMRGEAPGAETPSLRHRGQAAQPEPSTGFTATPPAPDSPQEPLVLRLKFLNDSEQVARAWPHDTIGSLKRTQFPGREQQVRLIYQGQLLGDDTQTLGSLHLPPNCVLHCHVSTRVGPPNPPCPPGSEPGPSGLEIGSLLLPLLLLLLLLLWYCQIQYRPFFPLTATLGLAGFTLLLSLLAFAMYRP

SEQ ID NO: 812349 - protein, 246 aa, Homo sapiens
MTLIEGVGDEVTVLFSVLACLLVLALAWVSTHTAEGGDPLPQPSGTPTPSQPSAAMAATDSMRGEAPGAETPSLRHRGQAAQPEPSTGFTATPPAPDSPQEPLVLRLKFLNDSEQVARAWPHDTIGSLKRTQFPGREQQVRLIYQGQLLGDDTQTLGSLHLPPNCVLHCHVSTRVGPPNPPCPPGSEPGPSGLEIGSLLLPLLLLLLLLLWYCQIQYRPFFPLTATLGLAGFTLLLSLLAFAMYRP

SEQ ID NO: 812350 - protein, 246 aa, Homo sapiens; identical to SEQ ID NO: 812349

SEQ ID NO: 812351 - protein, 246 aa, Homo sapiens; identical to SEQ ID NO: 812349

SEQ ID NO: 812352 - protein, 289 aa, Homo sapiens; identical to SEQ ID NO: 812348

SEQ ID NO: 812353 - protein, 246 aa, Homo sapiens; identical to SEQ ID NO: 812349

SEQ ID NO: 812354 - protein, 164 aa, Homo sapiens
MGLGTSWVVPRWSWGSRAEPLVLRLKFLNDSEQVARAWPHDTIGSLKRTQFPGREQQVRLIYQGQLLGDDTQTLGSLHLPPNCVLHCHVSTRVGPPNPPCPPGSEPGPSGLEIGSLLLPLLLLLLLLLWYCQIQYRPFFPLTATLGLAGFTLLLSLLAFAMYRP

SEQ ID NO: 812355 - protein, 199 aa, Homo sapiens
MKTFIIGISGVTNSGKTTLAKNLQKHLPNCSVISQDDFFKPESEIETDKNGFLQYDVLEALNMEKMMSAISCWMESARHSVVSTDQESAEEIPILIIEGFLLFNYKPLDTIWNRSYFLTIPYEECKRRRSTRVYQPPDSPGYFDGHVWPMYLKYRQEMQDITWEVVYLDGTKSEEDLFLQVYEDLIQELAKQKCLQVTA

SEQ ID NO: 812356 - protein, 102 aa, Homo sapiens
PPEQSRARAGPTRKWTPPSRALIGSRAGSFAAAGARAARTAAEPAGAERGRSGRAPVQCRGPRALPIGKGRSCAGARGRGQASRSPAPPRPAPTGAGTRRRE

SEQ ID NO: 812357 - protein, 69 aa, Homo sapiens
MKTFIIGISGVTNSGKTTLAKNLQKHLPNCSVISQDDFFKPESEIETDMDFCSTMCLKHLTWNPDQGAE

SEQ ID NO: 812358 - protein, 203 aa, Homo sapiens
MGKRRHRRGNVISCVTNSGKTTLAKNLQKHLPNCSVISQDDFFKPESEIETDKNGFLQYDVLEALNMEKMMSAISCWMESARHSVVSTDQESAEEIPILIIEGFLLFNYKPLDTIWNRSYFLTIPYEECKRRRSTRVYQPPDSPGYFDGHVWPMYLKYRQEMQDITWEVVYLDGTKSEEDLFLQVYEDLIQELAKQKCLQVTA

SEQ ID NO: 812359 - protein, 203 aa, Homo sapiens; identical to SEQ ID NO: 812358

SEQ ID NO: 812360 - protein, 106 aa, Homo sapiens
MKTFIIGISGVTNSGKTTLAKNLQKHLPNCSVISQDDFFKPESEIETDKNGFLQYDVLEALNMEKMMSAISCWMESARHSVVSTDQESAEEIPILIIEGFLLFNYK

SEQ ID NO: 812361 - protein, 106 aa, Homo sapiens; identical to SEQ ID NO: 812360

SEQ ID NO: 812362 - protein, 203 aa, Homo sapiens; identical to SEQ ID NO: 812358

SEQ ID NO: 812363 - protein, 699 aa, Homo sapiens
MSASASVGGPVPQPPPGPAAALPPGSAARALHVELPSQQRRLRHLRNIAARNIVNRNGHQLLDTYFTLHLCSTEKIYKEFYRSEVIKNSLNPTWRSLDFGIMPDRLDTSVSCFVVKIWGGKENIYQLLIEWKVCLDGLKYLGQQIHARNQNEIIFGLNDGYYGAPFEHKGYSNAQKTILLQVDQNCVRNSYDVFSLLRLHRAQCAIKQTQVTVQKIGKEIEEKLRLTSTSNELKKKSECLQLKILVLQNELERQKKALGREVALLHKQQIALQDKGSAFSAEHLKLQLQKESLNELRKECTAKRELFLKTNAQLTIRCRQLLSELSYIYPIDLNEHKDYFVCGVKLPNSEDFQAKDDGSIAVALGYTAHLVSMISFFLQVPLRYPIIHKGSRSTIKDNINDKLTEKEREFPLYPKGGEKLQFDYGVYLLNKNIAQLRYQHGLGTPDLRQTLPNLKNFMEHGLMVRCDRHHTSSAIPVPKRQSSIFGGADVGFSGGIPSPDKGHRKRASSENERLQYKTPPPSYNSALAQPVTTVPSMGETERKITSLSSSLDTSLDFSKENKKKGEDLVGSLNGGHANVHPSQEQGEALSGHRATVNGTLLPSEQAGSASVQLPGEFHPVSEAELCCTVEQAEEIIGLEATGFASGDQLEAFNCIPVDSAVAVECDEQVLGEFEEFSRRIYALNENVSSFRRPRRSSDK

SEQ ID NO: 812364 - protein, 681 aa, Homo sapiens
MSASASVGGPVPQPPPGPAAALPPGSAARALHVELPSQQRRLRHLRNIAARNIVNRNGHQLLDTYFTLHLCSTEKIYKEFYRSEVIKNSLNPTWRSLDFGIMPDRLDTSVSCFVVKIWGGKENIYQLLIEWKVCLDGLKYLGQQIHARNQNEIIFGLNDGYYGAPFEHKGYSNAQKTILLQVDQNCVRNSYDVFSLLRLHRAQCAIKQTQVTVQKIGKEIEEKLRLTSTSNELKKKSECLQLKILVLQNELERQKKALGREVALLHKQQIALQDKGSAFSAEHLKLQLQKESLNELRKECTAKRELFLKTNAQLTIRCRQLLSELSYIYPIDLNEHKDYFVCGVKLPNSEDFQAKDDGSIAVALGYTAHLVSMISFFLQVPLRYPIIHKGSRSTIKDNINDKLTEKEREFPLYPKGGEKLQFDYGVYLLNKNIAQLRYQHGLGTPDLRQTLPNLKNFMEHGLMVRCDRHHTSSAIPVPKRQSSIFGGADVGFSGGIPSPDKGHRKRASSENERLQYKTPPPSYNSALAQPVTTVPSMGETERKITSLSSSLDTSLDFSKENKNSQEQGEALSGHRATVNGTLLPSEQAGSASVQLPGEFHPVSEAELCCTVEQAEEIIGLEATGFASGDQLEAFNCIPVDSAVAVECDEQVLGEFEEFSRRIYALNENVSSFRRPRRSSDK

SEQ ID NO: 812365 - protein, 699 aa, Homo sapiens; identical to SEQ ID NO: 812363

SEQ ID NO: 812366 - protein, 325 aa, Homo sapiens
MSASASVGGPVPQPPPGPAAALPPGSAARALHVELPSQQRRLRHLRNIAARNIVNRNGHQLLDTYFTLHLCSTEKIYKEFYRSEVIKNSLNPTWRSLDFGIMPDRLDTSVSCFVVKIWGGKENIYQLLIEWKVCLDGLKYLGQQIHARNQNEIIFGLNDGYYGAPFEHKGYSNAQKTILLQVDQNCVRNSYDVFSLLRLHRAQCAIKQTQVTVQKIGKEIEEKLRLTSTSNELKKKSECLQLKILVLQNELERQKKALGREVALLHKQQIALQDKGEWKYHTNSLTSTFSSSPFFFFTSSNSHFLCKYSHTSLNDRDIFWKCILW

SEQ ID NO: 812367 - protein, 699 aa, Homo sapiens; identical to SEQ ID NO: 812363

SEQ ID NO: 812368 - protein, 299 aa, Homo sapiens
MSASASVGGPVPQPPPGPAAALPPGSAARALHVELPSQQRRLRHLRNIAARNIVNRNGHQLLDTYFTLHLCSTEKIYKEFYRSEVIKNSLNPTWRSLDFGIMPDRLDTSVSCFVVKIWGGKENIYQLLIEWKVCLDGLKYLGQQIHARNQNEIIFGLNDGYYGAPFEHKGYSNAQKTILLQVDQNCVRNSYDVFSLLRLHRAQCAIKQTQVTVQKIGKEIEEKLRLTSTSNELKKKSECLQLKILVLQNELERQKKALGREVALLHKQQIALQDKASINYLHIYVGSPCLLSPVRSISG

SEQ ID NO: 812369 - protein, 205 aa, Homo sapiens
MSASASVGGPVPQPPPGPAAALPPGSAARALHVELPSQQRRLRHLRNIAARNIVNRNGHQLLDTYFTLHLCSTEKIYKEFYRSEVIKNSLNPTWRSLDFGIMPDRLDTSVSCFVVKIWGGKENIYQLLIEWKVCLDGLKYLGQQIHARNQNEIIFGLNDGYYGAPFEHKGYSNAQKTILLQVDQNCVRNSYDVFSLLRNILLLPV

SEQ ID NO: 812370 - protein, 707 aa, Homo sapiens
HKAVEIEQERVKSAGAWIIHPYSDFRFYWDLIMLLLMVGNLIVLPVGITFFKEENSPPWIVFNVLSDTFFLLDLVLNFRTGIVVEEGAEILLAPRAIRTRYLRTWFLVDLISSIPVDYIFLVVELEPRLDAEVYKTARALRIVRFTKILSLLRLLRLSRLIRYIHQWEEIFHMTYDLASAVVRIFNLIGMMLLLCHWDGCLQFLVPMLQDFPPDCWVSINHMVNHSWGRQYSHALFKAMSHMLCIGYGQQAPVGMPDVWLTMLSMIVGATCYAMFIGHATALIQSLDSSRRQYQEKYKQVEQYMSFHKLPADTRQRIHEYYEHRYQGKMFDEESILGELSEPLREEIINFTCRGLVAHMPLFAHADPSFVTAVLTKLRFEVFQPGDLVVREGSVGRKMYFIQHGLLSVLARGARDTRLTDGSYFGEICLLTRGRRTASVRADTYCRLYSLSVDHFNAVLEEFPMMRRAFETVAMDRLLRIGKKNSILQRKRSEPSPGSSGGIMEQHLVQHDRDMARGVRGRAPSTGAQLSGKPVLWEPLVHAPLQAAAVTSNVAIALTHQRGPLPLSPDSPATLLARSAWRSAGSPASPLVPVRAGPWASTSRLPAPPARTLHASLSRAGRSQVSLLGPPPGGGGRRLGPRGRPLSASQPSLPQRATGDGSPGRKGSGSERLPPSGLLAKPPRTAQPPRPPVPEPATPRGLQLSANM

SEQ ID NO: 812371 - protein, 94 aa, Homo sapiens
LVVREGSVGRKMYFIQHGLLSVLARGARDTRLTDGSYFGGQQASGRVAGSRADSGEGNCSQALGPCLSTLQNHRAPAPPQAYSVRISGLGSGAL

SEQ ID NO: 812372 - protein, 63 aa, Homo sapiens
MPGLVDSNPAPPESQEKKPLKPCCACPETKKARDACIIEKGEEHCGHLIEAHKECMRALGFKI

SEQ ID NO: 812373 - protein, 63 aa, Homo sapiens; identical to SEQ ID NO: 812372

SEQ ID NO: 812374 - protein, 63 aa, Homo sapiens; identical to SEQ ID NO: 812372

SEQ ID NO: 812375 - protein, 199 aa, Homo sapiens
MSIVTVQLGQCGNQIGFEVFDALLSDSHSSQGLCSMRENEAYQASCKERFFSEEENGGIDRHVWPPLSGLPPLSKMSLNKDLHFNTSIANLVILRGKDVQSADVEGFKDPALYTSWLKPVNAFNVWKTQRAFSKYEKSAVLVSNSQFLVKPLDMIVGKAWNMFASKAYIHQYTKFGIEEEDFLDSFTSLEQVVASYCNL

SEQ ID NO: 812376 - protein, 453 aa, Homo sapiens
MSIVTVQLGQCGNQIGFEVFDALLSDSHSSQGLCSMRENEAYQASCKERFFSEEENGVPIARAVLVDMEPKVINQMLSKAAQSGQWKYGQHACFCQKQGSGNNWAYGYSVHGPRHEESIMNIIRKEVEKCDSFSGFFIIMSMAGGTGSGLGAFVTQNLEDQYSNSLKMNQIIWPYGTGEVIVQNYNSILTLSHLYRSSDALLLHENDAIHKICAKLMNIKQISFSDINQVLAHQLGSVFQPTYSAESSFHYRRNPLGRLMEHLVPHPEFKMLSVRNIPHMSENSLAYTTFTWAGLLKHLRQMLISNAKMEEGIDRHVWPPLSGLPPLSKMSLNKDLHFNTSIANLVILRGKDVQSADVEGFKDPALYTSWLKPVNAFNVWKTQRAFSKYEKSAVLVSNSQFLVKPLDMIVGKAWNMFASKAYIHQYTKFGIEEEDFLDSFTSLEQVVASYCNL

SEQ ID NO: 812377 - protein, 398 aa, Homo sapiens
MSIVTVQLGQCGNQIGFEVFDALLSDSHSSQGLCSMRENEAYQASCKERFFSEEENGVPIARAVLVDMEPKVINQMLSKAAQSGQWKYGQHACFCQKQGSGNNWAYGYSVHGPRHEESIMNIIRKEVEKCDSFSGFFIIMSMAGGTGSGLGAFVTQNLEDQYSNSLKMNQIIWPYGTGEVIVQNYNSILTLSHLYRSSDALLLHENDAIHKICAKLMNIKQISFSDINQVLAHQLGSVFQPTYSAESSFHYRRNPLGIDRHVWPPLSGLPPLSKMSLNKDLHFNTSIANLVILRGKDVQSADVEGFKDPALYTSWLKPVNAFNVWKTQRAFSKYEKSAVLVSNSQFLVKPLDMIVGKAWNMFASKAYIHQYTKFGIEEEDFLDSFTSLEQVVASYCNL

SEQ ID NO: 812378 - protein, 398 aa, Homo sapiens; identical to SEQ ID NO: 812377

SEQ ID NO: 812379 - protein, 163 aa, Homo sapiens
MRHIKHLAKKDSSVRRRMEFQLPGLFLLTWNPKLSIKCCQRLPSLANGNMVNMHASVKNKVLETTGHMEGFKDPALYTSWLKPVNAFNVWKTQRAFSKYEKSAVLVSNSQFLVKPLDMIVGKAWNMFASKAYIHQYTKFGIEEEDFLDSFTSLEQVVASYCNL

SEQ ID NO: 812380 - protein, 453 aa, Homo sapiens; identical to SEQ ID NO: 812376

SEQ ID NO: 812381 - protein, 131 aa, Homo sapiens
MRQLENAGQHHTLQFTLPSSCANWNHPLAVLRNGPQCCCGCVKSPFILKSSLLPLDYFNTVISLFASRKGTNVPIPLFCCVPLAQRSKAVRGWAETWEESPSPIHSTQRQCTQRNDMEIDAGRLVPAVINE

SEQ ID NO: 812382 - protein, 131 aa, Homo sapiens; identical to SEQ ID NO: 812381

SEQ ID NO: 812383 - protein, 231 aa, Homo sapiens
RGPVAKRLGGGPRSRSASGRDPAYLEAAGGVLLVALTHPVRVYLQGHLVVASSDLAVGGLASHAQHPVKVGGAEHFLAKVQQPHAGRRYDPGGSSRSQLRGYNPGLLLFRAQKAQGACVTSTEGAWPRRASALYGGRKMRCGESGAGPDPRSNSAEVSSSQPALASKSQSKWGPTSNNPRGALTTTEFEMAGNRSQNIKHKQTALIAIPMSSQTPRMLGRPRNQGQLYPQP

SEQ ID NO: 812384 - protein, 259 aa, Homo sapiens
RGPVAKRLGGGPRSRSASGRDPAYLEAAGGVLLVALTHPVRVYLQGHLVVASSDLAVGGLASHAQHPVKVGGAEHFLAKVQQPHAGRRYDPGGSSRSQLRGYNPGLLLFRAQKAQGACVTSTEGAWPRRASALYGGRKMRCGESGAGPDPRSNSAEVSSSQPALASKSQSKWGPTSNNPRGALTTTEFEMAGNRSQNIKHKRSHQDIYKPWSFRCKVGNPQELTLMCASFSDFSTHSGLSDTFIVFFLYIVHPFLEVKI

SEQ ID NO: 812385 - protein, 399 aa, Homo sapiens
MSSKYPRSVRRCLPLWALTLEAALILLFYFFTHYDASLEDQKGLVASYQVGQDLTVMAALGLGFLTSSFRRHSWSSVAFNLFMLALGVQWAILLDGFLSQFPPGKVVITLFSIRLATMSAMSVLISAGAVLGKVNLAQLVVMVLVEVTALGTLRMVISNIFNTDYHMNMMHIYVFAAYFGLSVAWCLPKPLPEGTEDKDQRATIPSLSAMLGALFLWMFWPSVNSALLRSPIERKNAVFNTYYAVAVSVVTAISGSSLAHPQRKISKTYVHSAVLAGGVAVGTSCHLIPSPWLAMVLGLVAGLISIGGAKYLPVCCNRVLGIHHISVMHSIFSLLGLLGEITYIVLLVLHTVWRRQWHDWLPGPPQHWGTQLGHRDSSHVWSPDRFAPKSQNMESTSCG

SEQ ID NO: 812386 - protein, 256 aa, Homo sapiens
MSSKYPRSVRRCLPLWALTLEAALILLFYFFTHYDASLEDQKGLVASYQVGQDLTVMAALGLGFLTSSFRRHSWSSVAFNLFMLALGVQWAILLDGFLSQFPPGKVVITLFSIRLATMSAMSVLISAGAVLGKVNLAQLVVMVLVEVTALGTLRMVISNIFNTYVHSAVLAGGVAVGTSCHLIPSPWLAMVLGLVAGLISIGGAKYLPVCCNRVLGIHHISVMHSIFSLLGLLGEITYIVLLVLHTVWRRQWHVCS

SEQ ID NO: 812387 - protein, 248 aa, Homo sapiens
MSSKYPRSVRRCLPLWALTLEAALILLFYFFTHYDASLEDQKGLVASYQVGQDLTVMAALGLGFLTSSFRRHSWSSVAFNLFMLALGVQWAILLDGFLSQFPPGKVVITLFSIRLATMSAMSVLISAGAVLGKVNLAQLVVMVLVEVTALGTLRMVISNIFNVCCNRVLGIHHISVMHSIFSLLGLLGEITYIVLLVLHTVWRRQWHDWLPGPPQHWGTQLGHRDSSHVWSPDRFAPKSQNMESTSCG

SEQ ID NO: 812388 - protein, 186 aa, Homo sapiens
PAPIQSLRLTLRHTHHAIMQGRIGFQVLLSIGELSLAIVIALTSGLLTGLLLNLKIWKAPHVAKYFDDQVFWKSRSLIMALRQIIPTLIPEIPQTSGHIHNQLSIPSPVALRSCTDRQRSMTTTRLTYHLLNPPRNLTHPHHHNDDRLPSQPSSPLVCTRPPLRQTSRATIHFRLLRRRVLTPEPP

SEQ ID NO: 812389 - protein, 196 aa, Homo sapiens
ACAAVRPGLHVHRLGSAVGPAGAESAGPARALPRSIGLRAGPGRTGSLLGGSGLLQGGDAGPATLHASYSLSADFMPGTVLDLPVPGRENPFCFEGHPELVTVGTHPPFPGYARGWEVCMLSINPEPEVGQDLTVMAALGLGFLTSSFRRHSWSSVAFNLFMLALGVQWAILLDGFLSQFPPGKVVITLFRYWDGG

SEQ ID NO: 812390 - protein, 399 aa, Homo sapiens; identical to SEQ ID NO: 812385

SEQ ID NO: 812391 - protein, 354 aa, Homo sapiens
MSSKYPRSVRRCLPLWALTLEAALILLFYFFTHYDASLEDQKGLVASYQVGQDLTVMAALGLGFLTSSFRRHSWSSVAFNLFMLALGVQWAILLDGFLSQFPPGKVVITLFSIRLATMSAMSVLISAGAVLGKVNLAQLVVMVLVEVTALGTLRMVISNIFNTDYHMNMMHIYVFAAYFGLSVAWCLPKPLPEGTEDKDQRATIPSLSAMLGALFLWMFWPSVNSALLRSPIERKNAVFNTYYAVAVSVVTAISGSSLAHPQRKISKTYVHSAVLAGGVAVGTSCHLIPSPWLAMVLGLVAGLISIGGAKYLPDWLPGPPQHWGTQLGHRDSSHVWSPDRFAPKSQNMESTSCG

SEQ ID NO: 812392 - protein, 36 aa, Homo sapiens
MMHIYVFAAYFGLSVAWCLPKPLPEGTEDKDQRATI

SEQ ID NO: 812393 - protein, 122 aa, Homo sapiens
RGSGRAAGDGGAGRANGRWVAGGRAWRPGALGRGAGGRPDRLTCELHRGRRMAGMALARAWKQMSWFYYQYLLVTALYMLEPWERTVFNSMLVSIVGMALYTGYVFMPQHIMAILHYFEIVQ

SEQ ID NO: 812394 - protein, 122 aa, Homo sapiens; identical to SEQ ID NO: 812393

SEQ ID NO: 812395 - protein, 122 aa, Homo sapiens; identical to SEQ ID NO: 812393

SEQ ID NO: 812396 - protein, 122 aa, Homo sapiens; identical to SEQ ID NO: 812393

SEQ ID NO: 812397 - protein, 122 aa, Homo sapiens; identical to SEQ ID NO: 812393

SEQ ID NO: 812398 - protein, 122 aa, Homo sapiens; identical to SEQ ID NO: 812393

SEQ ID NO: 812399 - protein, 121 aa, Homo sapiens
MTSVFLNQSCTQHSSQQLLRGMLRKPQGRTFPAVAEPEQPGPEKALSCGRITAKQESFSFCKAGTEGSSLNVVICISAQESCWLKSRVSFLIPEVDEQPRHHKEEQAQHEAPDSTQHSSQQ

SEQ ID NO: 812400 - protein, 1015 aa, Homo sapiens
MYVSSEHKGRRVTALCWDTAILRVFVGDHAGKVSAIKLNTSKQAKAAAAFVMFPVQTITTVDSCVVQLDYLDGRLLISSLTRSFLCDTEREKFWKIGNKERDGEYGACFFPGRCSGGQQPLIYCARPGSRMWEVNFDGEVISTHQFKKLLSLPPLPVITLRSEPQYDHTAGSSQSLSFPKLLHLSEHCVLTWTERGIYIFIPQNVQVLLWSEVKDIQDVAVCRNELFCLHLNGKVSHLSLISVERCVERLLRRGLWNLAARTCCLFQNSVIASRARKTLTADKLEHLKSQLDHGTYNDLISQLEELILKFEPLDSACSSRRSSISSHESFSILDSGIYRIISSRRGSQSDEDSCSLHSQTLSEDERFKEFTSQQEEDLPDQCCGSHGNEDNVSHAPVMFETDKNETFLPFGIPLPFRSPSPLVSLQAVKESVSSFVRKTTEKIGTLHTSPDLKVRPELRGDEQSCEEDVSSDTCPKEEDTEEEKEVTSPPPEEDRFQELKVATAEAMTKLQDPLVLFESESLRMVLQEWLSHLEKTFAMKDFSGVSDTDNSSMKLNQDVLLVNESKKGILDEDNEKEKRDSLGNEESVDKTACECVRSPRESLDDLFQICSPCAIASGLRNDLAELTTLCLELNVLNSKIKSTSGHVDHTLQQYSPEILACQFLKKYFFLLNLKRAKESIKLSYSNSPSVWDTFIEGLKEMASSNPVYMEMEKGDLPTRLKLLDDEVPFDSPLLVVYATRLYEKFGESALRSLIKFFPSILPSDIIQLCHHHPAEFLAYLDSLVKSRPEDQRSSFLESLLQPESLRLDWLLLAVSLDAPPSTSTMDDEGYPRPHSHLLSWGYSQLILHLIKLPADFITKEKMTDICRSCGFWPGYLILCLELERRREAFTNIVYLNDMSLMEGDNGWIPETVEEWKLLLHLIQSKSTRPAPQESLNGSLSDGPSPINVENVALLLAKAMGPDRAWSLLQECGLALELSEKFTRTCDILRIAEKRQRALIQSMLEKCDRFLWSQQA

SEQ ID NO: 812401 - protein, 1015 aa, Homo sapiens; identical to SEQ ID NO: 812400

SEQ ID NO: 812402 - protein, 1129 aa, Homo sapiens
MAFVPVIPESYSHVLAEFESLDPLLSALRLDSSRLKCTSIAVSRKWLALGSSGGGLHLIQKEGWKHRLFLSHREGAISQVACCLHDDDYVAVATSQGLVVVWELNQERRGKPEQMYVSSEHKGRRVTALCWDTAILRVFVGDHAGKVSAIKLNTSKQAKAAAAFVMFPVQTITTVDSCVVQLDYLDGRLLISSLTRSFLCDTEREKFWKIGNKERDGEYGACFFPGRCSGGQQPLIYCARPGSRMWEVNFDGEVISTHQFKKLLSLPPLPVITLRSEPQYDHTAGSSQSLSFPKLLHLSEHCVLTWTERGIYIFIPQNVQVLLWSEVKDIQDVAVCRNELFCLHLNGKVSHLSLISVERCVERLLRRGLWNLAARTCCLFQNSVIASRARKTLTADKLEHLKSQLDHGTYNDLISQLEELILKFEPLDSACSSRRSSISSHESFSILDSGIYRIISSRRGSQSDEDSCSLHSQTLSEDERFKEFTSQQEEDLPDQCCGSHGNEDNVSHAPVMFETDKNETFLPFGIPLPFRSPSPLVSLQAVKESVSSFVRKTTEKIGTLHTSPDLKVRPELRGDEQSCEEDVSSDTCPKEEDTEEEKEVTSPPPEEDRFQELKVATAEAMTKLQDPLVLFESESLRMVLQEWLSHLEKTFAMKDFSGVSDTDNSSMKLNQDVLLVNESKKGILDEDNEKEKRDSLGNEESVDKTACECVRSPRESLDDLFQICSPCAIASGLRNDLAELTTLCLELNVLNSKIKSTSGHVDHTLQQYSPEILACQFLKKYFFLLNLKRAKESIKLSYSNSPSVWDTFIEGLKEMASSNPVYMEMEKGDLPTRLKLLDDEVPFDSPLLVVYATRLYEKFGESALRSLIKFFPSILPSDIIQLCHHHPAEFLAYLDSLVKSRPEDQRSSFLESLLQPESLRLDWLLLAVSLDAPPSTSTMDDEGYPRPHSHLLSWGYSQLILHLIKLPADFITKEKMTDICRSCGFWPGYLILCLELERRREAFTNIVYLNDMSLMEGDNGWIPETVEEWKLLLHLIQSKSTRPAPQESLNGSLSDGPSPINVENVALLLAKAMGPDRAWSLLQECGLALELSEKFTRTCDILRIAEKRQRALIQSMLEKCDRFLWSQQA

SEQ ID NO: 812403 - protein, 1129 aa, Homo sapiens; identical to SEQ ID NO: 812402

SEQ ID NO: 812404 - protein, 1015 aa, Homo sapiens; identical to SEQ ID NO: 812400

SEQ ID NO: 812405 - protein, 1178 aa, Homo sapiens
GSPGLHEFGTRETEVHVPLLVRGEFPGAKPGDKIRSTESCEVLPWMWWSWAGTSGLLVCEPGFENWLLGLLSRNLKILKLLLLKSCTSIAVSRKWLALGSSGGGLHLIQKEGWKHRLFLSHREGAISQVACCLHDDDYVAVATSQGLVVVWELNQERRGKPEQMYVSSEHKGRRVTALCWDTAILRVFVGDHAGKVSAIKLNTSKQAKAAAAFVMFPVQTITTVDSCVVQLDYLDGRLLISSLTRSFLCDTEREKFWKIGNKERDGEYGACFFPGRCSGGQQPLIYCARPGSRMWEVNFDGEVISTHQFKKLLSLPPLPVITLRSEPQYDHTAGSSQSLSFPKLLHLSEHCVLTWTERGIYIFIPQNVQVLLWSEVKDIQDVAVCRNELFCLHLNGKVSHLSLISVERCVERLLRRGLWNLAARTCCLFQNSVIASRARKTLTADKLEHLKSQLDHGTYNDLISQLEELILKFEPLDSACSSRRSSISSHESFSILDSGIYRIISSRRGSQSDEDSCSLHSQTLSEDERFKEFTSQQEEDLPDQCCGSHGNEDNVSHAPVMFETDKNETFLPFGIPLPFRSPSPLVSLQAVKESVSSFVRKTTEKIGTLHTSPDLKVRPELRGDEQSCEEDVSSDTCPKEEDTEEEKEVTSPPPEEDRFQELKVATAEAMTKLQDPLVLFESESLRMVLQEWLSHLEKTFAMKDFSGVSDTDNSSMKLNQDVLLVNESKKGILDEDNEKEKRDSLGNEESVDKTACECVRSPRESLDDLFQICSPCAIASGLRNDLAELTTLCLELNVLNSKIKSTSGHVDHTLQQYSPEILACQFLKKYFFLLNLKRAKESIKLSYSNSPSVWDTFIEGLKEMASSNPVYMEMEKGDLPTRLKLLDDEVPFDSPLLVVYATRLYEKFGESALRSLIKFFPSILPSDIIQLCHHHPAEFLAYLDSLVKSRPEDQRSSFLESLLQPESLRLDWLLLAVSLDAPPSTSTMDDEGYPRPHSHLLSWGYSQLILHLIKLPADFITKEKMTDICRSCGFWPGYLILCLELERRREAFTNIVYLNDMSLMEGDNGWIPETVEEWKLLLHLIQSKSTRPAPQESLNGSLSDGPSPINVENVALLLAKAMGPDRAWSLLQECGLALELSEKFTRTCDILRIAEKRQRALIQSMLEKCDRFLWSQQA

SEQ ID NO: 812406 - protein, 669 aa, Homo sapiens
GSPGLHEFGTRETEVHVPLLVRGEFPGAKPGDKIRSTESCEVLPWMWWSWAGTSGLLVCEPGFENWLLGLLSRNLKILKLLLLKSVSSFVRKTTEKIGTLHTSPDLKVRPELRGDEQSCEEDVSSDTCPKEEDTEEEKEVTSPPPEEDRFQELKVATAEAMTKLQDPLVLFESESLRMVLQEWLSHLEKTFAMKDFSGVSDTDNSSMKLNQDVLLVNESKKGILDEDNEKEKRDSLGNEESVDKTACECVRSPRESLDDLFQICSPCAIASGLRNDLAELTTLCLELNVLNSKIKSTSGHVDHTLQQYSPEILACQFLKKYFFLLNLKRAKESIKLSYSNSPSVWDTFIEGLKEMASSNPVYMEMEKGDLPTRLKLLDDEVPFDSPLLVVYATRLYEKFGESALRSLIKFFPSILPSDIIQLCHHHPAEFLAYLDSLVKSRPEDQRSSFLESLLQPESLRLDWLLLAVSLDAPPSTSTMDDEGYPRPHSHLLSWGYSQLILHLIKLPADFITKEKMTDICRSCGFWPGYLILCLELERRREAFTNIVYLNDMSLMEGDNGWIPETVEEWKLLLHLIQSKSTRPAPQESLNGSLSDGPSPINVENVALLLAKAMGPDRAWSLLQECGLALELSEKFTRTCDILRIAEKRQRALIQSMLEKCDRFLWSQQA

SEQ ID NO: 812407 - protein, 645 aa, Homo sapiens
MAFVPVIPESYSHVLAEFESLDPLLSALRLDSSRLKCTSIAVSRKWLALGSSGGGLHLIQKEGWKHRLFLSHREGAISQVACCLHDDDYVAVATSQGLVVVWELNQERRGKPEQMYVSSEHKGRRVTALCWDTAILRVFVGDHAGKVSAIKLNTSKQAKAAAAFVMFPVQTITTVDSCVVQLDYLDGRLLISSLTRSFLCDTEREKFWKIGNKERDGEYGACFFPGRCSGGQQPLIYCARPGSRMWEVNFDGEVISTHQFKKLLSLPPLPVITLRSEPQYDHTAGSSQSLSFPKLLHLSEHCVLTWTERGIYIFIPQNVQVLLWSEVKDIQDVAVCRNELFCLHLNGKVSHLSLISVERCVERLLRRGLWNLAARTCCLFQNSVIASRARKTLTADKLEHLKSQLDHGTYNDLISQLEELILKFEPLDSACSSRRSSISSHESFSILDSGIYRIISSRRGSQSDEDSCSLHSQTLSEDERFKEFTSQQEEDLPDQCCGSHGNEDNVSHAPVMFETDKNETFLPFGIPLPFRSPSPLVSLQAVKESVSSFVRKTTEKIGTLHTSPDLKVRPELRGDEQSCEEDVSSDTCPKEEDTEEEKEVTSPPPEEDRFQELKVATAEAINGKFQSCVYGDGKRRSTNKVKVTR

SEQ ID NO: 812408 - protein, 236 aa, Homo sapiens [sequence omitted]

SEQ ID NO: 812409 - protein, 1129 aa, Homo sapiens; identical to SEQ ID NO: 812402

SEQ ID NO: 812410 - protein, 1045 aa, Homo sapiens
MAFVPVIPESYSHVLAEFESLDPLLSALRLDSSRLKCTSIAVSRKWLALGSSGGGLHLIQKEGWKHRLFLSHREGAISQVACCLHDDDYVAVATSQGLVVVWELNQERRGKPEQMYVSSEHKGRRVTALCWDTAILRVFVGDHAGKVSAIKLNTSKQAKAAAAFVMFPVQTITTVDSCVVQLDYLDGRLLISSLTRSFLCDTEREKFWKIGNKERDGEYGACFFPGRCSGGQQPLIYCARPGSRMWEVNFDGEVISTHQFKKLLSLPPLPVITLRSEPQYDHTAGSSQSLSFPKLLHLSEHCVLTWTERGIYIFIPQNVQVLLWSEVKDIQDVAVCRNELFCLHLNGKVSHLSLISVERCVERLLRRGLWNLAARTCCLFQNSVIASRARKTLTADKLEHLKSQLDHGTYNDLISQLEELILKFEPLDSACSSRRSSISSHESFSILDSGIYRIISSRRGSQSDEDSCSLHSQTLSEDERFKEFTSQQEEDLPDQCCGSHGNEDNVSHAPVMFETDKNETFLPFGIPLPFRSPSPLVSLQAVKESVSSFVRKTTEKIGTLHTSPDLKVRPELRGDEQSCEEDVSSDTCPKEEDTEEEKEVTSPPPEEDRFQELKVATAEAMTKLQDPLVLFESESLRMVLQEWLSHLEKTFAMKDFSGVSDTDNSSMKLNQDVLLVNESKKGILDEDNEKEKRDSLGNEESVDKTACECVRSPRESLDDLFQICSPCAIASGLRNDLAELTTLCLELNVLNSKIKSTSGHVDHTLQQYSPEILACQFLKKYFFLLNLKRAKESIKLSYSNSPSVWDTFIEGLKEMASSNPVYMEMEKGDLPTRLKLLDDEVPFDSPLLVVYATRLYEKFGESALRSLIKFFPSILPSDIIQLCHHHPAEFLAYLDSLVKSRPEDQRSSFLESLLQPESLRLDWLLLAVSLDAPPSTSTMDDEGYPRPHSHLLSWGYSQLILHLIKLPADFITKEKMTDICRSCGFWPGYLILCLELERRREAFTNIVYLNDMSLMEGDNGMSILTGYSWLSIFRSYSRPLNKKIW

SEQ ID NO: 812411 - protein, 134 aa, Homo sapiens
GSPGLHEFGTRETEVHVPLLVRGEFPGAKPGDKIRSTESCEVLPWMWWSWAGTSGLLVCEPGFENWLLGLLSRNLKILKLLLLKRLHEHSCVSEMVGFGQFRRRTPSHSERRLEAQAFSFTQGRCNFSSRLLFT

SEQ ID NO: 812412 - protein, 67 aa, Homo sapiens
CCALLAGFLAIVATALETLHQNSITQVSIYEVDKQDCRKFCTTGIDGAMTIWDFKTLESSIQGLRIM

SEQ ID NO: 812413 - protein, 215 aa, Homo sapiens
FRDLSAAPSGLPSSARARRSLFASTAQSPRILRSEPVRTPPIPAFSPLKTLRIMSLHQFLLEPITCHAWNRDRTQIALSPNNHEVHIYKKNGSQWVKAHELKEHNGHITATIPQAVIFFLRGGEKKKGPPRFFLGGGGWGPSPPKGRARGKPPGAYVVQLWLGGGRPQCGPYVWSQKDGVRKPTLVILRINPAPGGPKGLLTLFFFGLEKLGSPR

SEQ ID NO: 812414 - protein, 423 aa, Homo sapiens
FRDLSAAPSGLPSSARARRSLFASTAQSPRILRSEPVRTPPIPAFSPLKTLRIMSLHQFLLEPITCHAWNRDRTQIALSPNNHEVHIYKKNGSQWVKAHELKEHNGHITGIDWAPKSDRIVTCGADRNAYVWSQKDGVWKPTLVILRINRAATFVKWSPLENKFAVGSGARLISVCYFESENDWWVSKHIKKPIRSTVLSLDWHPNNVLLAAGSCDFKCRVFSAYIKEVDEKPASTPWGSKMPFGQLMSEFGGSGTGGWVHGVSFSASGSRLAWVSHDSTVSVADASKSVQVSTLKTEFLPLLSVSFVSENSVVAAGHDCCPMLFNYDDRGCLTFVSKLDIPKQSIQRNMSAMERFRNMDKRATTEDRNTALETLHQNSITQVSIYEVDKQDCRKFCTTGIDGAMTIWDFKTLESSIQGLRIM

SEQ ID NO: 812415 - protein, 423 aa, Homo sapiens; identical to SEQ ID NO: 812414

SEQ ID NO: 812416 - protein, 423 aa, Homo sapiens; identical to SEQ ID NO: 812414

SEQ ID NO: 812417 - protein, 423 aa, Homo sapiens; identical to SEQ ID NO: 812414

SEQ ID NO: 812418 - protein, 423 aa, Homo sapiens; identical to SEQ ID NO: 812414

SEQ ID NO: 812419 - protein, 423 aa, Homo sapiens; identical to SEQ ID NO: 812414

SEQ ID NO: 812420 - protein, 423 aa, Homo sapiens; identical to SEQ ID NO: 812414

SEQ ID NO: 812421 - protein, 429 aa, Homo sapiens
FRDLSAAPSGLPSSARARRSLFASTAQSPRILRSEPVRTPPIPAFSPLKTLRIMSLHQFLLEPITCHAWNRDRTQIALSPNNHEVHIYKKNGSQWVKAHELKEHNGHITGIDWAPKSDRIVTCGADRNAYVWSQKDGVWKPTLVILRINRAATFVKWSPLENKFAVGSGARLISVCYFESENDWWVSKHIKKPIRSTVLSLDWHPNNVLLAAGSCDFKCRVFSAYIKEVDEKPASTPWGSKMPFGQLMSEFGGSGTGGWVHGVSFSASGSRLAWVSHDSTVSVADASKSVQVSTLKTEFLPLLSVSFVSENSVVAAGHDCCPMLFNYDDRGCLTFVSKLDIPKQSIQRNMSAMERFRNMDKRATTEDRNTALETLHQNSITQVSIYEVDKQDCRKFCTTGIDGAMTIWDFKTSSLPIQGLPDNTFARYR

SEQ ID NO: 812422 - protein, 385 aa, Homo sapiens
FRDLSAAPSGLPSSARARRSLFASTAQSPRILRSEPVRTPPIPAFSPLKTLRIMSLHQFLLEPITCHAWNRDRTQIALSPNNHEVHIYKKNGSQWVKAHELKEHNGHITGIDWAPKSDRIVTCGADRNAYVWSQKDGVWKPTLVILRINRAATFVKWSPLENKFAVGSGARLISVCYFESENDWWVSKHIKKPIRSTVLSLDWHPNNVLLAAGSCDFKCRVFSAYIKEVDEKPASTPWGSKMPFGQLMSEFGGSGTGGWVHGVSFSASGSRLAWVSHDSTVSVADASKSVQVSTLKTEFLPLLSVSFVSENSVVAAGHDCCPMLFNYDDRGCLTFVSKLDIPKQSIQRNMSAMERFRNMDKRATTEDRNTALETLHQNSITLCLY

SEQ ID NO: 812423 - protein, 409 aa, Homo sapiens
FRDLSAAPSGLPSSARARRSLFASTAQSPRILRSEPVRTPPIPAFSPLKTLRIMSLHQFLLEPITCHAWNRDRTQIALSPNNHEVHIYKKNGSQWVKAHELKEHNGHITGIDWAPKSDRIVTCGADRNAYVWSQKDGVWKPTLVILRINRAATFVKWSPLENKFAVGSGARLISVCYFESENDWWVSKHIKKPIRSTVLSLDWHPNNVLLAAGSCDFKCRVFSAYIKEVDEKPASTPWGSKMPFGQLMSEFGGSGTGGWVHGVSFSASGSRLAWVSHDSTVSVADASKSVQVSTLKTEFLPLLSVSFVSENSVVAAGHDCCPMLFNYDDRGCLTFVSKLDIPKQSIQRNMSAMERFRNMDKRATTEDRNTALETLHQNSITCRLQGSSQQEQCRPCCNLRWWGLRAAAS

SEQ ID NO: 812424 - protein, 182 aa, Homo sapiens
MPFGQLMSEFGGSGTGGWVHGVSFSASGSRLAWVSHDSTVSVADASKSVQVSTLKTEFLPLLSVSFVSENSVVAAGHDCCPMLFNYDDRGCLTFVSKLDIPKQSIQRNMSAMERFRNMDKRATTEDRNTALETLHQNSITQVSIYEVDKQDCRKFCTTGIDGAMTIWDFKTLESSIQGLRIM

SEQ ID NO: 812425 - protein, 182 aa, Homo sapiens; identical to SEQ ID NO: 812424

SEQ ID NO: 812426 - protein, 182 aa, Homo sapiens; identical to SEQ ID NO: 812424

SEQ ID NO: 812427 - protein, 352 aa, Homo sapiens
FRDLSAAPSGLPSSARARRSLFASTAQSPRILRSEPVRTPPIPAFSPLKTLRIMSLHQFLLEPITCHAWNRDRTQIALSPNNHEVHIYKKNGSQWVKAHELKEHNGHITGIDWAPKSDRIVTCGADRNAYVWSQKDGVWKPTLVILRINRAATFVKWSPLENKFAVGSGARLISVCYFESENDWWVSKHIKKPIRSTVLSLDWHPNNVLLAAGSCDFKCRVSTLKTEFLPLLSVSFVSENSVVAAGHDCCPMLFNYDDRGCLTFVSKLDIPKQSIQRNMSAMERFRNMDKRATTEDRNTALETLHQNSITQVSIYEVDKQDCRKFCTTGIDGAMTIWDFKTLESSIQGLRIM

SEQ ID NO: 812428 - protein, 291 aa, Homo sapiens
FRDLSAAPSGLPSSARARRSLFASTAQSPRILRSEPVRTPPIPAFSPLKTLRIMSLHQFLLEPITCHAWNRDRTQIALSPNNHEVHIYKKNGSQWVKAHELKEHNGHITGIDWAPKSDRIVTCGADRNAYVWSQKDGVWKPTLVILRINRAATFVKWSPLENKFAVGSGARLISVCYFESENDWWVSKHIKKPIRSTVLSLDWHPNNVLLAAGSCDFKCRVFSAYIKEVDEKPASTPWGSKMPFGQLMSEFGGSGTGGWVHGVSFSASGSRLAWVSHDSTVSVADASKSVQ

SEQ ID NO: 812429 - protein, 178 aa, Homo sapiens
MGAAWQRSLPRWSQPPVPLVSASGSRLAWVSHDSTVSVADASKSVQVSTLKTEFLPLLSVSFVSENSVVAAGHDCCPMLFNYDDRGCLTFVSKLDIPKQSIQRNMSAMERFRNMDKRATTEDRNTALETLHQNSITQVSIYEVDKQDCRKFCTTGIDGAMTIWDFKTLESSIQGLRIM

SEQ ID NO: 812430 - protein, 118 aa, Homo sapiens
MLILPVDEVTVGHDCCPMLFNYDDRGCLTFVSKLDIPKQSIQRNMSAMERFRNMDKRATTEDRNTALETLHQNSITQVSIYEVDKQDCRKFCTTGIDGAMTIWDFKTLESSIQGLRIM

SEQ ID NO: 812431 - protein, 282 aa, Homo sapiens
FRDLSAAPSGLPSSARARRSLFASTAQSPRILRSEPVRTPPIPAFSPLKTLRIMSLHQFLLEPITCHAWNRDRTQIALSPNNHEVHIYKKNGSQWVKAHELKEHNGHITGIDWAPKSDRIVTCGADRNAYVWSQKDGVWKPTLVILRINRAATFVKWSPLENKFAVGSGARLISVCYFESENDWWVSKHIKKPIRSTVLSLDWHPNNVLLAAGSCDFKCRVFSAYIKEVDEKPASTPWGSKMPFGQLMSEFGGSGTGGWVHGVSLALAEEALLVTEPVGDPR

SEQ ID NO: 812432 - protein, 156 aa, Homo sapiens
FRDLSAAPSGLPSSARARRSLFASTAQSPRILRSEPVRTPPIPAFSPLKTLRIMSLHQFLLEPITCHAWNRDRTQIALSPNNHEVHIYKKNGSQWVKAHELKEHNGHITGIDWAPKSDRIVTCGADRNAYVWSQKDGVWKPTLVILRINRAATFVN

SEQ ID NO: 812433 - protein, 69 aa, Homo sapiens
RHLAIHRHLAIHRHRWSHDNLGFQDPRVFHPGPPDNVKLSEPPPSSMTNCGRPQLCRGTMARKPAPRKH

SEQ ID NO: 812434 - protein, 84 aa, Homo sapiens
FRDLSAAPSGLPSSARARRSLFASTAQSPRILRSEPVRTPPIPAFSPLKTLRIMSLHQFLLEPNCGRPQLCRGTMARKPAPRKH

SEQ ID NO: 812435 - protein, 110 aa, Homo sapiens
FRDLSAAPSGLPSSARARRSLFASTAQSPRILRSEPVRTPPIPAFSPLKTLRIMSLHQFLLEPITCHAWNRDRTQIALSPNNHEVHIYKKNGSQWVKAHELKEHNGHITG

SEQ ID NO: 812436 - protein, 84 aa, Homo sapiens
DAWVDPRVPALCLEGTRRHLRSLGFARAHRRKLTTRFCNPYGRPTLCLREIHSPTWKRTGSQASKKALPPRSALGLSGRNSQRR

SEQ ID NO: 812437 - protein, 115 aa, Homo sapiens
DLADGHLPDSDDDSELSVEEHQRERQALFDLSSCSLRPKSFKCQTCKKSYIGKWGLAQHFKLNPGHGQLDPEMVLSEKANGSTLRGCTEERTLSLTFPGLSVPALRVREGPAPAW

SEQ ID NO: 812438 - protein, 83 aa, Homo sapiens
RDSRTRRIAPEQSRPCELSQDSLQYGREELNFIETKGWGVFKCRGEMLRRNWRHQEEVRKCRKAICVGSLEFFKTGNLPFYKN

SEQ ID NO: 812439 - protein, 68 aa, Homo sapiens
CGPSHTPSEGQHFKLNPGHGQLDPEMVLSEKANGSTLRGCTEERTLSLTFPGLSVPALRVREGPAPAW

SEQ ID NO: 812440 - protein, 84 aa, Homo sapiens; identical to SEQ ID NO: 812436

SEQ ID NO: 812441 - protein, 84 aa, Homo sapiens; identical to SEQ ID NO: 812436

SEQ ID NO: 812442 - protein, 84 aa, Homo sapiens; identical to SEQ ID NO: 812436

SEQ ID NO: 812443 - protein, 84 aa, Homo sapiens; identical to SEQ ID NO: 812436

SEQ ID NO: 812444 - protein, 110 aa, Homo sapiens
MVLSEKANGSTLRGCTEERTLSLTFPGLSVPAAPREGGARSCLVRESARSGLQGYRVESPTIFFFSIFRKTLTSWRECKEGNACLYTVGELSPLQLSLQPALATSFPTLS

SEQ ID NO: 812445 - protein, 84 aa, Homo sapiens; identical to SEQ ID NO: 812436

SEQ ID NO: 812446 - protein, 84 aa, Homo sapiens; identical to SEQ ID NO: 812436

SEQ ID NO: 812447 - protein, 84 aa, Homo sapiens; identical to SEQ ID NO: 812436

SEQ ID NO: 812448 - protein, 249 aa, Homo sapiens
WRGTPRSLAPGLGRGRGGARAKATPPAPRPRPGGFRPPLQRARCYRAAGGRGRETGNAQGPRLALQARAAAPAFPAASRRSVPAPRGRRLLLPGAVAACAVSDGQPLSPPLRQPRPAARAPEGALASCGLRAGWAGWPPQAAWRAWGASVDAAAPPSEAASAEARLPERSGPARRPGPECVPMKAPGLAQAAVAEETPDWAPELCPSSEARSPEPPANRLQDFDTLVTVGKQLEAICVKVTSGETKGQE

SEQ ID NO: 812449 - protein, 84 aa, Homo sapiens; identical to SEQ ID NO: 812436

SEQ ID NO: 812450 - protein, 259 aa, Homo sapiens
WRGTPRSLAPGLGRGRGGARAKATPPAPRPRPGGFRPPLQRARCYRAAGGRGRETGNAQGPRLALQARAAAPAFPAASRRSVPAPRGRRLLLPGAVAACAVSDGQPLSPPLRQPRPAARAPEGALASCGLRAGWAGWPPQAAWRAWGASVDAAAPPSEAASAEARLPERSGPARRPGPECVPMKAPGLAQAAVAEETPDWAPELCPSSEARSPEPPANRLQDFDTLVTVGKQLEAICVKKNVDLLARMQRRERLLIHCW

SEQ ID NO: 812451 - protein, 70 aa, Homo sapiens
RARYPGKVEKLSQDSLQYGREELNFIETKGWGVFKCRGEMLRRNWRHQEEKNVDLLARMQRRERLLIHCW

SEQ ID NO: 812452 - protein, 1265 aa, Homo sapiens
MSPALQDLSQPEGLKKTLRDEINAILQKRIMVLDGGMGTMIQREKLNEEHFRGQEFKDHARPLKGNNDILSITQPDVIYQIHKEYLLAGADIIETNTFSSTSIAQADYGLEHLAYRMNMCSAGVARKAAEEVTLQTGIKRFVAGALGPTNKTLSVSPSVERPDYRNITFDELVEAYQEQAKGLLDGGVDILLIETIFDTANAKAALFALQNLFEEKYAPRPIFISGTIVDKSGRTLSGQTGEGFVISVSHGEPLCIGLNCALGAAEMRPFIEIIGKCTTAYVLCYPNAGLPNTFGDYDETPSMMAKHLKDFAMDGLVNIVGGCCGSTPDHIREIAEAVKNCKPRVPPATAFEGHMLLSGLEPFRIGPYTNFVNIGERCNVAGSRKFAKLIMAGNYEEALCVAKVQVEMGAQVLDVNMDDGMLDGPSAMTRFCNLIASEPDIAKVPLCIDSSNFAVIEAGLKCCQGKCIVNSISLKEGEDDFLEKARKIKKYGAAMVVMAFDEEGQATETDTKIRVCTRAYHLLVKKLGFNPNDIIFDPNILTIGTGMEEHNLYAINFIHATKVIKETLPGARISGGLSNLSFSFRGMEAIREAMHGVFLYHAIKSGMDMGIVNAGNLPVYDDIHKELLQLCEDLIWNKDPEATEKLLRYAQTQGTGGKKVIQTDEWRNGPVEERLEYALVKGIEKHIIEDTEEARLNQKKYPRPLNIIEGPLMNGMKIVGDLFGAGKMFLPQVIKSARVMKKAVGHLIPFMEKEREETRVLNGTVEEEDPYQGTIVLATVKGDVHDIGKNIVGVVLGCNNFRVIDLGVMTPCDKILKAALDHKADIIGLSGLITPSLDEMIFVAKEMERLAIRIPLLIGGATTSKTHTAVKIAPRYSAPVIHVLDASKSVVVCSQLLDENLKDEYFEEIMEEYEDIRQDHYESLKERRYLPLSQARKSGFQMDWLSEPHPVKPTFIGTQVFEDYDLQKLVDYIDWKPFFDVWQLRGKYPNRGFPKIFNDKTVGGEARKVYDDAHNMLNTLISQKKLRARGVVGFWPAQSIQDDIHLYAEAAVPQAAEPIATFYGLRQQAEKDSASTEPYYCLSDFIAPLHSGIRDYLGLFAVACFGVEELSKAYEDDGDDYSSIMVKALGDRLAEAFAEELHERVRRELWAYCGSEQLDVADLRRLRYKGIRPAPGYPSQPDHTEKLTMWRLADIEQSTGIRLTESLAMAPASAVSGLYFSNLKSKYFAVGKISKDQVEDYALRKNISVAEVEKWLGPILGYDTD

SEQ ID NO: 812453 - protein, 151 aa, Homo sapiens
KGSKCLRGSEPDVTSSSSAGFLLGPFPCRPATPPLAARVWLLGRHQGLAGYPGRKHVLQQLPRPAPREALGRCGLSGSAVPPRREPTGGVKRPGPCVAGSPGAGWRGPWPSSPVESTSSLPRPLRKEETRQHVTRAPRPVATRRSEENPAG

SEQ ID NO: 812454 - protein, 1265 aa, Homo sapiens; identical to SEQ ID NO: 812452

SEQ ID NO: 812455 - protein, 1120 aa, Homo sapiens
MCSAGVARKAAEEVTLQTGIKRFVAGALGPTNKTLSVSPSVERPDYRNITFDELVEAYQEQAKGLLDGGVDILLIETIFDTANAKAALFALQNLFEEKYAPRPIFISGTIVDKSGRTLSGQTGEGFVISVSHGEPLCIGLNCALGAAEMRPFIEIIGKCTTAYVLCYPNAGLPNTFGDYDETPSMMAKHLKDFAMDGLVNIVGGCCGSTPDHIREIAEAVKNCKPRVPPATAFEGHMLLSGLEPFRIGPYTNFVNIGERCNVAGSRKFAKLIMAGNRNGPSAMTRFCNLIASEPDIAKVPLCIDSSNFAVIEAGLKCCQGKCIVNSISLKEGEDDFLEKARKIKKYGAAMVVMAFDEEGQATETDTKIRVCTRAYHLLVKKLGFNPNDIIFDPNILTIGTGMEEHNLYAINFIHATKVIKETLPGARISGGLSNLSFSFRGMEAIREAMHGVFLYHAIKSGMDMGIVNAGNLPVYDDIHKELLQLCEDLIWNKDPEATEKLLRYAQTQGTGGKKVIQTDEWRNGPVEERLEYALVKGIEKHIIEDTEEARLNQKKYPRPLNIIEGPLMNGMKIVGDLFGAGKMFLPQVIKSARVMKKAVGHLIPFMEKEREETRVLNGTVEEEDPYQGTIVLATVKGDVHDIGKNIVGVVLGCNNFRVIDLGVMTPCDKILKAALDHKADIIGLSGLITPSLDEMIFVAKEMERLAIRIPLLIGGATTSKTHTAVKIAPRYSAPVIHVLDASKSVVVCSQLLDENLKDEYFEEIMEEYEDIRQDHYESLKERRYLPLSQARKSGFQMDWLSEPHPVKPTFIGTQVFEDYDLQKLVDYIDWKPFFDVWQLRGKYPNRGFPKIFNDKTVGGEARKVYDDAHNMLNTLISQKKLRARGVVGFWPAQSIQDDIHLYAEAAVPQAAEPIATFYGLRQQAEKDSASTEPYYCLSDFIAPLHSGIRDYLGLFAVACFGVEELSKAYEDDGDDYSSIMVKALGDRLAEAFAEELHERVRRELWAYCGSEQLDVADLRRLRYKGIRPAPGYPSQPDHTEKLTMWRLADIEQSTGIRLTESLAMAPASAVSGLYFSNLKSKYFAVGKISKDQVEDYALRKNISVAEVEKWLGPILGYDTD

SEQ ID NO: 812456 - protein, 401 aa, Homo sapiens
MCSAGVARKAAEEVTLQTGIKRFVAGALGPTNKTLSVSPSVERPDYRNITFDELVEAYQEQAKGLLDGGVDILLIETIFDTANAKAALFALQNLFEEKYAPRPIFISGTIVDKSGRTLSGQTGEGFVISVSHGEPLCIGLNCALGAAEMRPFIEIIGKCTTAYVLCYPNAGLPNTFGDYDETPSMMAKHLKDFAMDGLVNIVGGCCGSTPDHIREIAEAVKNCKPRVPPATAFEGHMLLSGLEPFRIGPYTNFVNIGERCNVAGSRKFAKLIMAGNYEEALCVAKVQVEMGAQVLDVNMDDGMLDGPSAMTRFCNLIASEPDIAKVPLCIDSSNFAVIEAGLKCCQGKCIVNSISLKEGEDDFLEKARKIKKYGAAMVVMAFDEEGQVSGFFWPNPLCFPG

SEQ ID NO: 812457 - protein, 234 aa, Homo sapiens
MPHRKERPSGSSLHTHGSTGTAEGGNMSRLSLTRSPVSPLAAQGIPLPAQLTKSNAPVHIDVGGHMYTSSLATLTKYPDSRISRLFNGTEPIVLDSLKQHYFIDRDGEIFRYVLSFLRTSKLLLPDDFKDFSLLYEEARYYQLQPMVRELERWQQEQEQRRRSRACDCLVVRVTPDLGERIALSGEKALIEEVFPETGDVMCNSVNAGWNQDPTHVIRFPLNGYCRLNSVQDVL

SEQ ID NO: 812458 - protein, 283 aa, Homo sapiens
MPHRKERPSGSSLHTHGSTGTAEGGNMSRLSLTRSPVSPLAAQGIPLPAQLTKSNAPVHIDVGGHMYTSSLATLTKYPDSRISRLFNGTEPIVLDSLKQHYFIDRDGEIFRYVLSFLRTSKLLLPDDFKDFSLLYEEARYYQLQPMVRELERWQQEQEQRRRSRACDCLVVRVTPDLGERIALSGEKALIEEVFPETGDVMCNSVNAGWNQDPTHVIRFPLNGYCRLNSVQVLERLFQRGFSVAASCGGGVDSSQFSEYVLCREERRPQPTPTAVRIKQEPLD

SEQ ID NO: 812459 - protein, 283 aa, Homo sapiens; identical to SEQ ID NO: 812458

SEQ ID NO: 812460 - protein, 283 aa, Homo sapiens; identical to SEQ ID NO: 812458

SEQ ID NO: 812461 - protein, 283 aa, Homo sapiens; identical to SEQ ID NO: 812458

SEQ ID NO: 812462 - protein, 283 aa, Homo sapiens; identical to SEQ ID NO: 812458

SEQ ID NO: 812463 - protein, 283 aa, Homo sapiens; identical to SEQ ID NO: 812458

SEQ ID NO: 812464 - protein, 418 aa, Homo sapiens
MPHRKERPSGSSLHTHGSTGTAEGGNMSRLSLTRSPVSPLAAQGIPLPAQLTKSNAPVHIDVGGHMYTSSLATLTKYPDSRISRLFNGTEPIVLDSLKQHYFIDRDGEIFRYVLSFLRTSKLLLPDDFKDFSLLYEEARYYQLQPMVRELERWQQEQEQRRRSRACDCLVVRVTPDLGERIALSGEKALIEEVFPETGDVMCNSVNAGWNQDPTHVIRFPLNGYCRLNSVQVLERLFQRGFSVAASCGGGVDSSQFSEYVLCREERRPQPTPTAFSAHLGPPRDLETVLGSSACVYLAVGMRPRVRLEGPKLAQRAPGSQVSWQQNVGCWRHACRRTVDATQRYSGGISAASSPSPSASQPGAASSEAPGPVGAGLEEPSAATSEELFIPLHAGQTLAGLLASERWLIFLQYLKWMQP

SEQ ID NO: 812465 - protein, 264 aa, Homo sapiens
MPHRKERPSGSSLHTHGSTGTAEGGNMSRLSLTRSPVSPLAAQGIPLPAQLTKSNAPVHIDVGGHMYTSSLATLTKYPDSRISRLFNGTEPIVLDSLKQHYFIDRDGEIFRYVLSFLRTSKLLLPDDFKDFSLLYEEARYYQLQPMVRELERWQQEQEQRRRSRACDCLVVRVTPDLGERIALSGEKALIEEVFPETGDVMCNSVNAGWNQDPTHVIRFPLNGYCRLNSVQVRAARCPLPAAPPASAEPSRGRVSWREARSLKR

SEQ ID NO: 812466 - protein, 283 aa, Homo sapiens; identical to SEQ ID NO: 812458

SEQ ID NO: 812467 - protein, 404 aa, Homo sapiens
FLGAAGAPEGSGSNSSSSSSGGGVEMAAAAAQGGGGGEPRRTEGVGPGVPGEVEMVKGQPFDVGPRYTQLQYIGEGAYGMVSSAYDHVRKTRVAIKKISPFEHQTYCQRTLREIQILLRFRHENVIGIRDILRASTLEAMRDVYIVQDLMETDLYKLLKSQQLSNDHICYFLYQILRGLKYIHSANVLHRDLKPSNLLINTTCDLKICDFGLARIADPEHDHTGFLTEYVATRWYRAPEIMLNSKGYTKSIDIWSVGCILAEMLSNRPIFPGKHYLDQLNHILGILGSPSQEDLNCIINMKARNYLQSLPSKTKVAWAKLFPKSDSKALDLLDRMLTFNPNKRITVEEALAHPYLEQYYDPTDEPVAEEPFTFAMELDDLPKERLKELIFQETARFQPGVLEAP

SEQ ID NO: 812468 - protein, 294 aa, Homo sapiens
RLVPPGYGMSAFRDVETRSVPRSSAYDHVRKTRVAIKKISPFEHQTYCQRTLREIQILLRFRHENVIGIRDILRASTLEAMRDVYIVQDLMETDLYKLLKSQQLSNDHICYFLYQILRGLKYIHSANVLHRDLKPSNLLINTTCDLKICDFGLARIADPEHDHTGFLTEYVATRWYRAPEIMLNSKGYTKSIDIWSVGCILAEMLSNRPIFPGKHYLDQLNHILDILGSPSQGGPDIVINPTMECAPKNVPTRTSVPFRRTKGGLGAASELSTPRSDSRRPLNTAGTGNVQPLK

SEQ ID NO: 812469 - protein, 379 aa, Homo sapiens
MAAAAAQGGGGGEPRRTEGVGPGVPGEVEMVKGQPFDVGPRYTQLQYIGEGAYGMVSSAYDHVRKTRVAIKKISPFEHQTYCQRTLREIQILLRFRHENVIGIRDILRASTLEAMRDVYIVQDLMETDLYKLLKSQQLSNDHICYFLYQILRGLKYIHSANVLHRDLKPSNLLINTTCDLKICDFGLARIADPEHDHTGFLTEYVATRWYRAPEIMLNSKGYTKSIDIWSVGCILAEMLSNRPIFPGKHYLDQLNHILGILGSPSQEDLNCIINMKARNYLQSLPSKTKVAWAKLFPKSDSKALDLLDRMLTFNPNKRITVEEALAHPYLEQYYDPTDEPVAEEPFTFAMELDDLPKERLKELIFQETARFQPGVLEAP

SEQ ID NO: 812470 - protein, 379 aa, Homo sapiens; identical to SEQ ID NO: 812469

SEQ ID NO: 812471 - protein, 379 aa, Homo sapiens; identical to SEQ ID NO: 812469

SEQ ID NO: 812472 - protein, 379 aa, Homo sapiens; identical to SEQ ID NO: 812469

SEQ ID NO: 812473 - protein, 381 aa, Homo sapiens
MYRPSLGCSGGGGGEPRRTEGVGPGVPGEVEMVKGQPFDVGPRYTQLQYIGEGAYGMVSSAYDHVRKTRVAIKKISPFEHQTYCQRTLREIQILLRFRHENVIGIRDILRASTLEAMRDVYIVQDLMETDLYKLLKSQQLSNDHICYFLYQILRGLKYIHSANVLHRDLKPSNLLINTTCDLKICDFGLARIADPEHDHTGFLTEYVATRWYRAPEIMLNSKGYTKSIDIWSVGCILAEMLSNRPIFPGKHYLDQLNHILGILGSPSQEDLNCIINMKARNYLQSLPSKTKVAWAKLFPKSDSKALDLLDRMLTFNPNKRITVEEALAHPYLEQYYDPTDEPVAEEPFTFAMELDDLPKERLKELIFQETARFQPGVLEAP

SEQ ID NO: 812474 - protein, 379 aa, Homo sapiens; identical to SEQ ID NO: 812469

SEQ ID NO: 812475 - protein, 360 aa, Homo sapiens
MAAAAAQGGGGGEPRRTEGVGPGVPGEVEMVKGQPFDVGPRYTQLQYIGEGAYGMVSSAYDHVRKTRVAIKKISPFEHQTYCQRTLREIQILLRFRHENVIGIRDILRASTLEAMRDVYIVQDLMETDLYKLLKSQQLSNDHICYFLYQILRGLKYIHSANVLHRDLKPSNLLINTTCDLKICDFGLARIADPEHDHTGFLTEYVATRWYRAPEIMLNSKGYTKSIDIWSVGCILAEMLSNRPIFPGKHYLDQLNHILGILGSPSQEDLNCIINMKARNYLQSLPSKTKVAWAKLFPKSDSKALDLLDRMLTFNPNKRITPVAEEPFTFAMELDDLPKERLKELIFQETARFQPGVLEAP

SEQ ID NO: 812476 - protein, 379 aa, Homo sapiens; identical to SEQ ID NO: 812469

SEQ ID NO: 812477 - protein, 379 aa, Homo sapiens; identical to SEQ ID NO: 812469

SEQ ID NO: 812478 - protein, 343 aa, Homo sapiens
MYEAGGAQLQYIGEGAYGMVSSAYDHVRKTRVAIKKISPFEHQTYCQRTLREIQILLRFRHENVIGIRDILRASTLEAMRDVYIVQDLMETDLYKLLKSQQLSNDHICYFLYQILRGLKYIHSANVLHRDLKPSNLLINTTCDLKICDFGLARIADPEHDHTGFLTEYVATRWYRAPEIMLNSKGYTKSIDIWSVGCILAEMLSNRPIFPGKHYLDQLNHILGILGSPSQEDLNCIINMKARNYLQSLPSKTKVAWAKLFPKSDSKALDLLDRMLTFNPNKRITVEEALAHPYLEQYYDPTDEPVAEEPFTFAMELDDLPKERLKELIFQETARFQPGVLEAP

SEQ ID NO: 812479 - protein, 361 aa, Homo sapiens
SRFLSLNGSIPEEQCGPNPLPVKAVTSRYIGEGAYGMVSSAYDHVRKTRVAIKKISPFEHQTYCQRTLREIQILLRFRHENVIGIRDILRASTLEAMRDVYIVQDLMETDLYKLLKSQQLSNDHICYFLYQILRGLKYIHSANVLHRDLKPSNLLINTTCDLKICDFGLARIADPEHDHTGFLTEYVATRWYRAPEIMLNSKGYTKSIDIWSVGCILAEMLSNRPIFPGKHYLDQLNHILGILGSPSQEDLNCIINMKARNYLQSLPSKTKVAWAKLFPKSDSKALDLLDRMLTFNPNKRITVEEALAHPYLEQYYDPTDEPVAEEPFTFAMELDDLPKERLKELIFQETARFQPGVLEAP

SEQ ID NO: 812480 - protein, 362 aa, Homo sapiens
MIDQSQLLLSPLPAKAWVGPPGPDSPFVRPQQQPLSGPLSSAYDHVRKTRVAIKKISPFEHQTYCQRTLREIQILLRFRHENVIGIRDILRASTLEAMRDVYIVQDLMETDLYKLLKSQQLSNDHICYFLYQILRGLKYIHSANVLHRDLKPSNLLINTTCDLKICDFGLARIADPEHDHTGFLTEYVATRWYRAPEIMLNSKGYTKSIDIWSVGCILAEMLSNRPIFPGKHYLDQLNHILGILGSPSQEDLNCIINMKARNYLQSLPSKTKVAWAKLFPKSDSKALDLLDRMLTFNPNKRITVEEALAHPYLEQYYDPTDEPVAEEPFTFAMELDDLPKERLKELIFQETARFQPGVLEAP

SEQ ID NO: 812481 - protein, 405 aa, Homo sapiens
FLGAAGAPEGSGSNSSSSSSGGGVEMAAAAAQGGGGGEPRRTEGVGPGVPGEVEMVKGQPFDVGPRYTQLQYIGEVRVTGMVSSAYDHVRKTRVAIKKISPFEHQTYCQRTLREIQILLRFRHENVIGIRDILRASTLEAMRDVYIVQDLMETDLYKLLKSQQLSNDHICYFLYQILRGLKYIHSANVLHRDLKPSNLLINTTCDLKICDFGLARIADPEHDHTGFLTEYVATRWYRAPEIMLNSKGYTKSIDIWSVGCILAEMLSNRPIFPGKHYLDQLNHILGILGSPSQEDLNCIINMKARNYLQSLPSKTKVAWAKLFPKSDSKALDLLDRMLTFNPNKRITVEEALAHPYLEQYYDPTDEPVAEEPFTFAMELDDLPKERLKELIFQETARFQPGVLEAP

SEQ ID NO: 812482 - protein, 418 aa, Homo sapiens
  misc_feature (354)..(354): Xaa can be any naturally occurring amino acid
MAAAAAQGGGGGEPRRTEGVGPGVPGEVEMVKGQPFDVGPRYTQLQYIGEGAYGMVSSAYDHVRKTRVAIKKISPFEHQTYCQRTLREIQILLRFRHENVIGIRDILRASTLEAMRDVYIVQDLMETDLYKLLKSQQLSNDHICYFLYQILRGLKYIHSANVLHRDLKPSNLLINTTCDLKICDFGLARIADPEHDHTGFLTEYVATRWYRAPEIMLNSKGYTKSIDIWSVGCILAEMLSNRPIFPGKHYLDQLNHILGILGSPSQEDLNCIINMKARNYLQSLPSKTKVAWAKLFPKSDSKALDLLDRMLTFNPNKRITVEEALAHPYLEQYYDPTDEPVARSLHFHGVDDYXEGEESTSGTAVQADGGGARQKFSGRGRSSGSPIEEVAPSDAEGGVIAEGHTIETITFIEAVRRP

SEQ ID NO: 812483 - protein, 332 aa, Homo sapiens
ALAASPSRGGSAYDHVRKTRVAIKKISPFEHQTYCQRTLREIQILLRFRHENVIGIRDILRASTLEAMRDVYIVQDLMETDLYKLLKSQQLSNDHICYFLYQILRGLKYIHSANVLHRDLKPSNLLINTTCDLKICDFGLARIADPEHDHTGFLTEYVATRWYRAPEIMLNSKGYTKSIDIWSVGCILAEMLSNRPIFPGKHYLDQLNHILGILGSPSQEDLNCIINMKARNYLQSLPSKTKVAWAKLFPKSDSKALDLLDRMLTFNPNKRITVEEALAHPYLEQYYDPTDEPVAEEPFTFAMELDDLPKERLKELIFQETARFQPGVLEAP

SEQ ID NO: 812484 - protein, 331 aa, Homo sapiens
DTSVLRCLQINTCMITVSVLGCNNISPFEHQTYCQRTLREIQILLRFRHENVIGIRDILRASTLEAMRDVYIVQDLMETDLYKLLKSQQLSNDHICYFLYQILRGLKYIHSANVLHRDLKPSNLLINTTCDLKICDFGLARIADPEHDHTGFLTEYVATRWYRAPEIMLNSKGYTKSIDIWSVGCILAEMLSNRPIFPGKHYLDQLNHILGILGSPSQEDLNCIINMKARNYLQSLPSKTKVAWAKLFPKSDSKALDLLDRMLTFNPNKRITVEEALAHPYLEQYYDPTDEPVAEEPFTFAMELDDLPKERLKELIFQETARFQPGVLEAP

SEQ ID NO: 812485 - protein, 255 aa, Homo sapiens
EGNTKCGELKSQQLSNDHICYFLYQILRGLKYIHSANVLHRDLKPSNLLINTTCDLKICDFGLARIADPEHDHTGFLTEYVATRWYRAPEIMLNSKGYTKSIDIWSVGCILAEMLSNRPIFPGKHYLDQLNHILGILGSPSQEDLNCIINMKARNYLQSLPSKTKVAWAKLFPKSDSKALDLLDRMLTFNPNKRITVEEALAHPYLEQYYDPTDEPVAEEPFTFAMELDDLPKERLKELIFQETARFQPGVLEAP

SEQ ID NO: 812486 - protein, 395 aa, Homo sapiens
  misc_feature (193)..(193): Xaa can be any naturally occurring amino acid
MAAAAAQGGGGGEPRRTEGVGPGVPGEVEMVKGQPFDVGPRYTQLQYIGEGAYGMVSSAYDHVRKTRVAIKKISPFEHQTYCQRTLREIQILLRFRHENVIGIRDILRASTLEAMRDVYIVQDLMETDLYKLLKSQQLSNDHICYFLYQILRGLKYIHSANVLHRDLKPSNLLINTTCDLKICDFGLAPDLPXPEHEPTPGPFFPPWKRGRFIGWGLTGRPGVPGGPHEISAERPSGYTKSIDIWSVGCILAEMLSNRPIFPGKHYLDQLNHILGILGSPSQEDLNCIINMKARNYLQSLPSKTKVAWAKLFPKSDSKALDLLDRMLTFNPNKRITVEEALAHPYLEQYYDPTDEPVAEEPFTFAMELDDLPKERLKELIFQETARFQPGVLEAP

SEQ ID NO: 812487 - protein, 340 aa, Homo sapiens
MAAAAAQGGGGGEPRRTEGVGPGVPGEVEMVKGQPFDVGPRYTQLQYIGEGAYGMVSSAYDHVRKTRVAIKKISPFEHQTYCQRTLREIQILLRFRHENVIGIRDILRASTLEAMRDVYIVQDLMETDLYKLLKSQQLSNDHICYFLYQILRGLKYIHSANVLHRDLKPSNLLINTTCDLKGYTKSIDIWSVGCILAEMLSNRPIFPGKHYLDQLNHILGILGSPSQEDLNCIINMKARNYLQSLPSKTKVAWAKLFPKSDSKALDLLDRMLTFNPNKRITVEEALAHPYLEQYYDPTDEPVAEEPFTFAMELDDLPKERLKELIFQETARFQPGVLEAP

SEQ ID NO: 812488 - protein, 313 aa, Homo sapiens
TGYYGNIREQPLIWIGPGVVTFELSHEGQMGVGQMERKGMVLGSGREDVNGQKDQYVQRHIAGEKGMGMFRKVQGEGIAPEAEQFHLAKWNCSANVLHRDLKPSNLLINTTCDLKICDFGLARIADPEHDHTGFLTEYVATRWYRAPEIMLNSKGYTKSIDIWSVGCILAEMLSNRPIFPGKHYLDQLNHILGILGSPSQEDLNCIINMKARNYLQSLPSKTKVAWAKLFPKSDSKALDLLDRMLTFNPNKRITVEEALAHPYLEQYYDPTDEPVAEEPFTFAMELDDLPKERLKELIFQETARFQPGVLEAP

SEQ ID NO: 812489 - protein, 335 aa, Homo sapiens
MAAAAAQGGGGGEPRRTEGVGPGVPGEVEMVKGQPFDVGPRYTQLQYIGEGAYGMVSSAYDHVRKTRVAIKKISPFEHQTYCQRTLREIQILLRFRHENVIGIRDILRASTLEAMRDVYIVQDLMETDLYKLLKSQQLSNDHICYFLYQILRGLKYIHSANVLHRDLKPSNLLINTTCDLKICDFGLARIADPEHDHTGFLTEYVATRWYRAPEIMLNSKGYTKSIDIWSVGCILAEMLSNRPIFPGKHYLDQLNHILALDLLDRMLTFNPNKRITVEEALAHPYLEQYYDPTDEPVAEEPFTFAMELDDLPKERLKELIFQETARFQPGVLEAP

SEQ ID NO: 812490 - protein, 173 aa, Homo sapiens
CGDLEDPLRNVISQGYTKSIDIWSVGCILAEMLSNRPIFPGKHYLDQLNHILGILGSPSQEDLNCIINMKARNYLQSLPSKTKVAWAKLFPKSDSKALDLLDRMLTFNPNKRITVEEALAHPYLEQYYDPTDEPVAEEPFTFAMELDDLPKERLKELIFQETARFQPGVLEAP

SEQ ID NO: 812491 - protein, 88 aa, Homo sapiens
FPVTPDSCPSIALDLLDRMLTFNPNKRITVEEALAHPYLEQYYDPTDEPVAEEPFTFAMELDDLPKERLKELIFQETARFQPGVLEAP

SEQ ID NO: 812492 - protein, 259 aa, Homo sapiens
MAAAAAQGGGGGEPRRTEGVGPGVPGEVEMVKGQPFDVGPRYTQLQYIGEGAYGMVSSAYDHVRKTRVAIKKISPFEHQTYCQRTLREIQILLRFRHENVIGIRDILRASTLEAMRDVYIVQDLMETDLYKLLKSQQLSNDHICYFLYQILRGLKYIHSANVLHRDLKPSNLLINTTCDLKICDFGLARIADPEHDHTGFLTEYVATRWYRAPEIMLNSKGYTKSIDIWSVGCILAEMLIFNDLVFSDQRMTRLLKNTL

SEQ ID NO: 812493 - protein, 263 aa, Homo sapiens
FLGAAGAPEGSGSNSSSSSSGGGVEMAAAAAQGGGGGEPRRTEGVGPGVPGEVEMVKGQPFDVGPRYTQLQYIGEGAYGMVRPQQQPLSGPLSSAYDHVRKTRVAIKKISPFEHQTYCQRTLREIQILLRFRHENVIGIRDILRASTLEAMRDVYIVQDLMETDLYKLLKSQQLSNDHICYFLYQILRGLKYIHSANVLHRDLKPSNLLINTTCDLKICDFGLARIADPEHDHTGFLTEYVATRWYRAPEIMLNSKVGGAAHS

SEQ ID NO: 812494 - protein, 111 aa, Homo sapiens [sequence omitted]

SEQ ID NO: 812495 - protein, 283 aa, Homo sapiens
  misc_feature (8)..(8): Xaa can be any naturally occurring amino acid
  misc_feature (10)..(10): Xaa can be any naturally occurring amino acid
  misc_feature (13)..(13): Xaa can be any naturally occurring amino acid
SELEPLVXTXCPXKKSRHFIAFASLFFILVSITTFCLETHEAFNIVKNKTEPVINGTSVVLQYEIETDPALTYVEGVCVVWFTFEFLVRIVFSPNKLEFIKNLLNIIDFVAILPFYLEVGLSGLSSKAAKDVLGFLRVVRFVRILRIFKLTRHFVGLRVLGHTLRASTNEFLLLIIFLALGVLIFATMIYYAERVGAQPNDPSASEHTQFKNIPIGFWWAVVTMTTLGYGDMYPQTWSGMLVGALCALAGVLTIAMPVPVIVNNFGMYYSLAMAKQKLPRKRK

SEQ ID NO: 812496 - protein, 494 aa, Homo sapiens
MGKIENNERVILNVGGTRHETYRSTLKTLPGTRLALLASSEPPGDCLTTAGDKLQPSPPPLSPPPRAPPLSPGPGGCFEGGAGNCSSRGGRASDHPGGGREFFFDRHPGVFAYVLNYYRTGKLHCPADVCGPLFEEELAFWGIDETDVEPCCWMTYRQHRDAEEALDIFETPDLIGGDPGDDEDLAAKRLGIEDAAGLGGPDGKSGRWRRLQPRMWALFEDPYSSRAARFIAFASLFFILVSITTFCLETHEAFNIVKNKTEPVINGTSVVLQYEIETDPALTYVEGVCVVWFTFEFLVRIVFSPNKLEFIKNLLNIIDFVAILPFYLEVGLSGLSSKAAKDVLGFLRVVRFVRILRIFKLTRHFVGLRVLGHTLRASTNEFLLLIIFLALGVLIFATMIYYAERVGAQPNDPSASEHTQFKNIPIGFWWAVVTMTTLGYGDMYPQTWSGMLVGALCALAGVLTIAMPVPVIVNNFGMYYSLAMAKQKLPRKRK

SEQ ID NO: 812497 - protein, 297 aa, Homo sapiens
MGKIENNERVILNVGGTRHETYRSTLKTLPGTRLALLASSEPPGDCLTTAGDKLQPSPPPLSPPPRAPPLSPGPGGCFEGGAGNCSSRGGRASDHPGGGREFFFDRHPGVFAYVLNYYRTGKLHCPADVCGPLFEEELAFWGIDETDVEPCCWMTYRQHRDAEEALDIFETPDLIGGDPGDDEDLAAKRLGIEDAAGLGGPDGKSGRWRRLQPRMWALFEDPYSSRAARFIAFASLFFILVSITTFCLETHEAFNIVKNKTEPVINGTSVVLQYEIETDPALTYVEGVCVVWFTFEF

SEQ ID NO: 812498 - protein, 554 aa, Homo sapiens
RPAAPRHPLADSAAATAWADSAPCAGAELDLAAAPIASGSLTHRVRPLARQCSPRRLPSPVPPVPALRTPMAELRPSGAPGPTAPPAPGPTAPPAFASLFPPGLHAIYGECRRLYPDQPNPLQVTAIVKYWLGGPDPLDYVSMYRNVGSPSANIPEHWHYISFGLSDLYGDNRVHEFTGTDGPSGFGFELTFRLKRETGESAPPTWPAELMQGLARYVFQSENTFCSGDHVSWHSPLDNSESRIQHMLLTEDPQMQPVQTPFGVVTFLQIVGVCTEELHSAQQWNGQGILELLRTVPIAGGPWLITDMRRGETIFEIDPHLQERVDKGIETDGSNLSGVSAKCAWDDLSRPPEDDEDSRSICIGTQPRRLSGKDTEQIRETLRRGLEINSKPVLPPINPQRQNGLAHDRAPSRKDSLESDSSTAIIPHELIRTRQLESVHLKFNQESGALIPLCLRGRLLHGRHFTYKSITGDMAITFVSTGVEGAFATEEHPYAAHGPWLQILLTEEFVEKMLEDLEDLTSPEEFKLPKEYSWPEKKLKVSILPDVVFDSPLH

SEQ ID NO: 812499 - protein, 551 aa, Homo sapiens
RPAAPRHPLADSAAATAWADSAPCAGAELDLAAAPIASGSLTHRVRPLARQCSPRRLPSPVPPVPALRTPMAELRPSGAPGPTAPPAPGPTAPPAFASLFPPGLHAIYGECRRLYPDQPNPLQVTAIVKYWLGGPDPLDYVSMYRNVGSPSANIPEHWHYISFGLSDLYGDNRVHEFTGTDGPSGFGFELTFRLKRETGESAPPTWPAELMQGLARYVFQSENTFCSGDHVSWHSPLDNSESRIQHMLLTEDPQMQPVQTPFGVVTFLQIVGVCTEELHSAQQWNGQGILELLRTVPIAGGPWLITDMRRGETIFEIDPHLQERVDKGIETDGSNLSGVSAKCAWDDLSRPPEDDEDSRSICIGTQPRRLSGKDTEQIRETLRRGLEINSKPVLPPINPQRQNGLAHDRAPSRKDSLESDSSTAIIPHELIRTRQLESVHLKFNQESGALIPLCLRGRLLHGRHFTYKSITGDMAITFVSTGVEGAFATEEHPYAAHGPWLQVRRPFFFSLLPFIDFLAHPSSSPLAALDGTPSWGAGHECLMDSGPGACV

SEQ ID NO: 812500 - protein, 503 aa, Homo sapiens
RPAAPRHPLADSAAATAWADSAPCAGAELDLAAAPIASGSLTHRVRPLARQCSPRRLPSPVPPVPALRTPMAELRPSGAPGPTAPPAPGPTAPPAFASLFPPGLHAIYGECRRLYPDQPNPLQVTAIVKYWLGGPDPLDYVSMYRNVGSPSANIPEHWHYISFGLSDLYGDNRVHEFTGTDGPSGFGFELTFRLKRETGESAPPTWPAELMQGLARYVFQSENTFCSGDHVSWHSPLDNSESRIQHMLLTEDPQMQPVQTPFGVVTFLQIVGVCTEELHSAQQWNGQGILELLRTVPIAGGPWLITDMRRGETIFEIDPHLQERVDKGIETDGSNLSGVSAKCAWDDLSRPPEDDEDSRSICIGTQPRRLSGKDTEQIRETLRRGLEINSKPVLPPINPQRQNGLAHDRAPSRKDSLESDSSTAIIPHELIRTRQLESVHLKFNQESGALIPLCLRGRLLHGRHFTYKSITGDMAITFVSTGVEGAFATEEHPYAAHGPWLQL

SEQ ID NO: 812501 - protein, 129 aa, Homo sapiens
RPAAPRHPLADSAAATAWADSAPCAGAELDLAAAPIASGSLTHRVRPLARQCSPRRLPSPVPPVPALRTPMAELRPSGAPGQRWVRVTLGRRRQGYSSSGRPRSVIVTDVKRERRKAAHKQCTYEDTRR

SEQ ID NO: 812502 - protein, 554 aa, Homo sapiens; identical to SEQ ID NO: 812498

SEQ ID NO: 812503 - protein, 538 aa, Homo sapiens
RPAAPRHPLADSAAATAWADSAPCAGAELDLAAAPIASGSLTHRVRPLARQCSPRRLPSPVPPVPALRTPMAELRPSGAPGPTAPPAPGPTAPPAFASLFPPGLHAIYGECRRLYPDQPNPLQVTAIVKYWLGGPDPLDYVSMYRNVGSPSANIPEHWHYISFGLSDLYGDNRVHEFTGTDGPSGFGFELTFRLKRETGESAPPTWPAELMQGLARYVFQSENTFCSGDHVSWHSPLDNSESRIQHMLLTEDPQMQPVQTPFGVVTFLQIVGVCTEELHSAQQWNGQGILELLRTVPIAGGPWLITDMRRGETIFEIDPHLQERVDKGIETDGSNLSGVSAKCAWDDLSRPPEDDEDNTEQIRETLRRGLEINSKPVLPPINPQRQNGLAHDRAPSRKDSLESDSSTAIIPHELIRTRQLESVHLKFNQESGALIPLCLRGRLLHGRHFTYKSITGDMAITFVSTGVEGAFATEEHPYAAHGPWLQILLTEEFVEKMLEDLEDLTSPEEFKLPKEYSWPEKKLKVSILPDVVFDSPLH

SEQ ID NO: 812504 - protein, 308 aa, Homo sapiens [sequence omitted]

SEQ ID NO: 812505 - protein, 554 aa, Homo sapiens; identical to SEQ ID NO: 812498

SEQ ID NO: 812506 - protein, 554 aa, Homo sapiens; identical to SEQ ID NO: 812498

SEQ ID NO: 812507 - protein, 417 aa, Homo sapiens
MSRHLPWICDQRCSSPSSPGRWPPAARMWLPRFSSKTVTVLLLAQTTCLLLFIISRPGPSSPAGGEDRVHVLVLSSWRSGSSFLGQLFSQHPDVFYLMEPAWHVWTTLSQGSAATLHMAVRDLMRSIFLCDMDVFDAYMPQSRNLSAFFNWATSRALCSPPACSAFPRGTISKQDVCKTLCTRQPFSLAREACRSYSHVVLKEVRFFNLQVLYPLLSDPALNLRIVHLVRDPRAVLRSREAAGPILARDNGIVLGTNGKWVEADPHLRLIREVCRSHVRIAEAATLKPPPFLRGRYRLVRFEDLAREPLAEIRALYAFTGLTLTPQLEAWIHNITHGSGIGKPIEAFHTSSRNARNVSQAWRHALPFTKILRVQEVCAGALQLLGYRPVYSADQQRDLTLDLVLPRGPDHFSWASPD

SEQ ID NO: 812508 - protein, 411 aa, Homo sapiens
MGMRARVPKVAHSTRRPPAARMWLPRFSSKTVTVLLLAQTTCLLLFIISRPGPSSPAGGEDRVHVLVLSSWRSGSSFLGQLFSQHPDVFYLMEPAWHVWTTLSQGSAATLHMAVRDLMRSIFLCDMDVFDAYMPQSRNLSAFFNWATSRALCSPPACSAFPRGTISKQDVCKTLCTRQPFSLAREACRSYSHVVLKEVRFFNLQVLYPLLSDPALNLRIVHLVRDPRAVLRSREAAGPILARDNGIVLGTNGKWVEADPHLRLIREVCRSHVRIAEAATLKPPPFLRGRYRLVRFEDLAREPLAEIRALYAFTGLTLTPQLEAWIHNITHGSGIGKPIEAFHTSSRNARNVSQAWRHALPFTKILRVQEVCAGALQLLGYRPVYSADQQRDLTLDLVLPRGPDHFSWASPD

SEQ ID NO: 812509 - protein, 113 aa, Homo sapiens
PLPGGRTSRHPSQWGVGKRRGGVEEREEVGERGDPVVFRGGEGSSSQPSPLLLALIRQTHVPRRRKQLSFTLTRLKPSHLIGTLGRSTDLLASSPLSVFPPSLVLFPPPPSLL

SEQ ID NO: 812510 - protein, 113 aa, Homo sapiens; identical to SEQ ID NO: 812509

SEQ ID NO: 812511 - protein, 202 aa, Homo sapiens
MSCKVFVPQPHPCLLPSGNPPWESSVGGSRCLLQSSPALGDAGGPCRPEGLFAAHLPAEPNLRARCSVQPGIWHPSSFHVLCMCVVCPFLPLFEFTENPHVSPTGSPQTTSEGLTCCHSLLLPQSRVMRMDGVQGFRWGLRRCPCWPCPSWLSRPGFTVQLHLYAGRGADSSGTPWFWIPFLGSLWRQPGFSGAASQQLSQG

SEQ ID NO: 812512 - protein, 145 aa, Homo sapiens
LVEAAPLILCRVKSLFPSPTPASSHRETPHGSHQWAGVGACSSPALPWEMLEDPVALKACLLHICLQSQTSGPGAVSSLVSGIPVASMFCVCVWCAPSSHCLNSLKSHKGGLLLEIWPPLAPPRSPHVSPTGSPQTTSEGLTCCH

SEQ ID NO: 812513 - protein, 445 aa, Homo sapiens
TRPPAPMTNMSWSFLTRLLEEIHNHSTFVGKVWLTVLVVFRIVLTAVGGEAIYSDEQAKFTCNTRQPGCDNVCYDAFAPLSHVRFWVFQIVVISTPSVMYLGYAVHRLARASEQERRRALRRRPGPRRAPRAHLPPPHAGWPEPADLGEEEPMLGLGEEEEEEETGAAEGAGEEAEEAGAEEACTKAVGADGKAAGTPGPTGQHDGRRRIQREGLMRVYVAQLVARAAFEVAFLVGQYLLYGFEVRPFFPCSRQPCPHVVDCFVSRPTEKTVFLLVMYVVSCLCLLLNLCEMAHLGLGSAQDAVRGRRGPPASAPAPAPRPPPCAFPAAAAGLACPPDYSLVVRAAERARAHDQNLANLALQALRDGAAAGDRDRDSSPCVGLPAASRGPPRAGAPASRTGSATSAGTVGEQGRPGTHERPGAKPRAGSEKGSASSRDGKTTVWI

SEQ ID NO: 812514 - protein, 120 aa, Homo sapiens
SGVVRPIGTNMAEASFGSSSPVGSLSSEDHDFDPTAEMLVHDYDDERTLEEEEMMDEGKNFSSEIEDLEKEGTMPLEDLLAFYGYEPTIPAVANSSANSSPSELADELPDMTLDKVSVSI

SEQ ID NO: 812515 - protein, 208 aa, Homo sapiens
SGVVRPIGTNMAEASFGSSSPVGSLSSEDHDFDPTAEMLVHDYDDERTLEEEEMMDEGKNFSSEIEDLEKEGTMPLEDLLAFYGYEPTIPAVANSSANSSPSELADELPDMTLDKEEIAKDLLSGDDEETQSSADDLTPSVTSHETSDFFPRPLRSNTACDGDKESEVEDVETDSGNSPEDLRKEIMIGLQYQAEIPPYLGEYDGNEK

SEQ ID NO: 812516 - protein, 106 aa, Homo sapiens
  misc_feature (1)..(1): Xaa can be any naturally occurring amino acid
XRATRREDDRRGPAVTTYAHENMPLAKDLLHPSPEEEKRKHKKKRLVQSPNSYFMDVKCPGCYKITTVFSHAQTVVLCVGCSTVLCQPTGGKARLTEGCSFRRKQH

SEQ ID NO: 812517 - protein, 106 aa, Homo sapiens; identical to SEQ ID NO: 812516
  misc_feature (1)..(1): Xaa can be any naturally occurring amino acid

SEQ ID NO: 812518 - protein, 102 aa, Homo sapiens
AGFPLSPFPAVTTYAHENMPLAKDLLHPSPEEEKRKHKKKRLVQSPNSYFMDVKCPGCYKITTVFSHAQTVVLCVGCSTVLCQPTGGKARLTEGCSFRRKQH

SEQ ID NO: 812519 - protein, 102 aa, Homo sapiens; identical to SEQ ID NO: 812518

SEQ ID NO: 812520 - protein, 102 aa, Homo sapiens; identical to SEQ ID NO: 812518

SEQ ID NO: 812521 - protein, 102 aa, Homo sapiens; identical to SEQ ID NO: 812518

SEQ ID NO: 812522 - protein, 99 aa, Homo sapiens
AGFPLSPFPAVTTYAHENMPDINSRDRSGPRATRIDGSGEEIRWRPSCADTRGGEGRALPARKGSPSSLSRRGEEETQEETPGAEPQFLLHGCEMPRML

SEQ ID NO: 812523 - protein, 102 aa, Homo sapiens; identical to SEQ ID NO: 812518

SEQ ID NO: 812524 - protein, 102 aa, Homo sapiens; identical to SEQ ID NO: 812518

SEQ ID NO: 812525 - protein, 69 aa, Homo sapiens
AGFPLSPFPAVTTYAHENMPLAKDLLHPSPEEEKRKHKKKRLVQSPNSYFMDVKCPGCYKITTVFSHAL

SEQ ID NO: 812526 - protein, 69 aa, Homo sapiens; identical to SEQ ID NO: 812525

SEQ ID NO: 812527 - protein, 93 aa, Homo sapiens
YAATTLLITTAQAKGVVNTAVSAAVQAVRGRGRGTLTRGAFVGATAAPGYIAPGYGTPYGYSTAAPAYGLPKRMVLLPVMKFPTYPVPHYSFF

SEQ ID NO: 812528 - protein, 93 aa, Homo sapiens; identical to SEQ ID NO: 812527

SEQ ID NO: 812529 - protein, 672 aa, Homo sapiens
MRSIRSFANDDRHVMVKHSTIYPSPEELEAVQNMVSTVECALKHVSDWLDETNKGTKTEGETEVKKDEAGENYSKDQGGRTLCGVMRIGLVAKGLLIKDDMDLELVLMCKDKPTETLLNTVKDNLPIQIQKLTEEKYQVEQCVNEASIIIRNTKEPTLTLKVILTSPLIRDELEKKDGENVSMKDPPDLLDRQKCLNALASLRHAKWFQARANGLKSCVIVLRILRDLCNRVPTWAPLKGWPLELICEKSIGTCNRPLGAGEALRRVMECLASGILLPGGPGLHDPCERDPTDALSYMTIQQKEDITHSAQHALRLSAFGQIYKVLEMDPLPSSKPFQKYSWSVTDKEGAGSSALKRPFEDGLGDDKDPNKKMKRNLRKILDSKAIDLMNALMRLNQIRPGLQYKLLSQSGPVHAPVFTMSVDVDGTTYEASGPSKKTAKLHVAVKVLQAMGYPTGFDADIECMSSDEKSDNESKNETVSSNSSNNTGNSTTETSSTLEVRTQGPILTASGKNPVMELNEKRRGLKYELISETGGSHDKRFVMEVEVDGQKFRGAGPNKKVAKASAALAALEKLFSGPNAANNKKKKIIPQAKGVVNTAVSAAVQAVRGRGRGTLTRGAFVGATAAPGYIAPGYGTPYGYSTAAPAYGLPKRMVLLPVMKFPTYPVPHYSFF

SEQ ID NO: 812530 - protein, 658 aa, Homo sapiens
MVKHSTIYPSPEELEAVQNMVSTVECALKHVSDWLDETNKGTKTEGETEVKKDEAGENYSKDQGGRTLCGVMRIGLVAKGLLIKDDMDLELVLMCKDKPTETLLNTVKDNLPIQIQKLTEEKYQVEQCVNEASIIIRNTKEPTLTLKVILTSPLIRDELEKKDGENVSMKDPPDLLDRQKCLNALASLRHAKWFQARANGLKSCVIVLRILRDLCNRVPTWAPLKGWPLELICEKSIGTCNRPLGAGEALRRVMECLASGILLPGGPGLHDPCERDPTDALSYMTIQQKEDITHSAQHALRLSAFGQIYKVLEMDPLPSSKPFQKYSWSVTDKEGAGSSALKRPFEDGLGDDKDPNKKMKRNLRKILDSKAIDLMNALMRLNQIRPGLQYKLLSQSGPVHAPVFTMSVDVDGTTYEASGPSKKTAKLHVAVKVLQAMGYPTGFDADIECMSSDEKSDNESKNETVSSNSSNNTGNSTTETSSTLEVRTQGPILTASGKNPVMELNEKRRGLKYELISETGGSHDKRFVMEVEVDGQKFRGAGPNKKVAKASAALAALEKLFSGPNAANNKKKKIIPQAKGVVNTAVSAAVQAVRGRGRGTLTRGAFVGATAAPGYIAPGYGTPYGYSTAAPAYGLPKRMVLLPVMKFPTYPVPHYSFF

SEQ ID NO: 812531 - protein, 672 aa, Homo sapiens; identical to SEQ ID NO: 812529

SEQ ID NO: 812532 - protein, 672 aa, Homo sapiens; identical to SEQ ID NO: 812529

SEQ ID NO: 812533 - protein, 658 aa, Homo sapiens; identical to SEQ ID NO: 812530

SEQ ID NO: 812534 - protein, 619 aa, Homo sapiens
MRSIRSFANDDRHVMVKHSTIYPSPEELEAVQNMVSTVECALKHVSDWLDETNKGTKTEGETEVKKDEAGENYSKDQGGRTLCGVMRIGLVAKGLLIKDDMDLELVLMCKDKPTETLLNTVKDNLPIQIQKLTEEKYQVEQCVNEASIIIRNTKEPTLTLKVILTSPLIRDELEKKDGENVSMKDPPDLLDRQKCLNALASLRHAKWFQARANGLKSCVIVLRILRDLCNRVPTWAPLKGWPLELICEKSIGTCNRPLGAGEALRRVMECLASGILLPGGPGLHDPCERDPTDALSYMTIQQKEDITHSAQHALRLSAFGQIYKVLEMDPLPSSKPFQKYSWSVTDKEGAGSSALKRPFEDGLGDDKDPNKKMKRNLRKILDSKAIDLMNALMRLNQIRPGLQYKLLSQSGPVHAPVFTMSVDVDGTTYEASGPSKKTAKLHVAVKVRTQGPILTASGKNPVMELNEKRRGLKYELISETGGSHDKRFVMEVEVDGQKFRGAGPNKKVAKASAALAALEKLFSGPNAANNKKKKIIPQAKGVVNTAVSAAVQAVRGRGRGTLTRGAFVGATAAPGYIAPGYGTPYGYSTAAPAYGLPKRMVLLPVMKFPTYPVPHYSFF

SEQ ID NO: 812535 - protein, 657 aa, Homo sapiens
MRSIRSFANDDRHVMVKHSTIYPSPEELEAVQNMVSTVECALKHVSDWLDETNKGTKTEGETEVKKDEAGENYSKDQGGRTLCGVMRIGLVAKGLLIKDDMDLELVLMCKDKPTETLLNTVKDNLPIQIQKLTEEKYQVEQCVNEASIIIRNTKEPTLTLKVILTSPLIRDELEKKDGENVSMKDPPDLLDRQKCLNALASLRHAKWFQARANGLKSCVIVLRILRDLCNRVPTWAPLKGWPLELICEKSIGTCNRPLGAGEALRRVMECLASGILLPGGPGLHDPCERDPTDALSYMTIQQKEDITHSAQHALRLSAFGQIYKVLEMDPLPSSKPFQKYSWSVTDKEGAGSSALKRPFEDGLGDDKDPNKKMKRNLRKILDSKAIDLMNALMRLNQIRPGLQYKLLSQSGPVHAPVFTMSVDVDGTTYEASGPSKKTAKLHVAVKVLQAMGYPTGFDADIECMSSDEKSDNESKNETVSSNSSNNTGNSTTETSSTLEVRTQGPILTASGKNPVMELNEKRRGLKYELISETGGSHDKRFVMEVEVDGQKFRGAGPNKKVAKASAALAALEKLFSGPNAANNKKKKIIPQAKGVVNTAVSAAVQAVRGRGRGTLTRGAFVGATAAPGYIAPGLPKRMVLLPVMKFPTYPVPHYSFF

SEQ ID NO: 812536 - protein, 648 aa, Homo sapiens
MRSIRSFANDDRHVMVKHSTIYPSPEELEAVQNMVSTVECALKHVSDWLDETNKGTKTEGETEVKKDEAGENYSKDQGGRTLCGVMRIGLVAKGLLIKDDMDLELVLMCKDKPTETLLNTVKDNLPIQIQKLTEEKYQVEQCVNEASIIIRNTKEPTLTLKVILTSPLIRDELEKKDGENVSMKDPPDLLDRQKCLNALASLRHAKWFQARANGLKSCVIVLRILRDLCNRVPTWAPLKGWPLELICEKSIGTCNRPLGAGEALRRVMECLASGILLPGGPGLHDPCERDPTDALSYMTIQQKEDITHSAQHALRLSAFGQIYKVLEMDPLPSSKPFQKYSWSVTDKEGAGSSALKRPFEDGLGDDKDPNKKMKRNLRKILDSKAIDLMNALMRLNQIRPGLQYKLLSQSGPVHAPVFTMSVDVDGTTYEASGPSKKTAKLHVAVKVLQAMGYPTGFDADIECMSSDEKSDNESKNETVSSNSSNNTGNSTTETSSTLEVRTQGPILTASGKNPVMELNEKRRGLKYELISETGGSHDKRFVMEVEVDGQKFRGAGPNKKVAKASAALAALEKLFSGPNAANNKKKKIIPQAKGVVNTAVSAAVQAVRGRGRGTLTRGAFVGATAAPGYIAPGYGTPYGYSTAAPAYG

SEQ ID NO: 812537 - protein, 648 aa, Homo sapiens; identical to SEQ ID NO: 812536

SEQ ID NO: 812538 - protein, 93 aa, Homo sapiens; identical to SEQ ID NO: 812527

SEQ ID NO: 812539 - protein, 592 aa, Homo sapiens
MRSIRSFANDDRHVMVKHSTIYPSPEELEAVQNMVSTVECALKHVSDWLDETNKGTKTEGETEVKKDEAGENYSKDQGGRTLCGVMRIGLVAKGLLIKDDMDLELVLMCKDKPTETLLNTVKDNLPIQIQKLTEEKYQVEQCVNEASIIIRNTKEPTLTLKVILTSPLIRDELEKKDGENVSMKDPPDLLDRQKCLNALASLRHAKWFQARANGLKSCVIVLRILRDLCNRVPTWAPLKGWPLELICEKSIGTCNRPLGAGEALRRVMECLASGILLPGGPGLHDPCERDPTDALSYMTIQQKEDITHSAQHALRLSAFGQIYKVLEMDPLPSSKPFQKYSWSVTDKEGAGSSALKRPFEDGLGDDKDPNKKMKRNLRKILDSKAIDLMNALMRLNQIRPGLQYKLLSQSGPVHAPVFTMSVDVDGTTYEASGPSKKTAKLHVAVKVLQAMGYPTGFDADIECMSSDEKSDNESKNETVSSNSSNNTGNSTTETSSTLEVRTQGPILTASGKNPVMELNEKRRGLKYELISETGGSHDKRFVMEVEVDGQKFRGAGPNKKVAKASAALAALEKLFSGPNAANNKKKKIIPQV

SEQ ID NO: 812540 - protein, 359 aa, Homo sapiens
MCLQPLQEQKQWALDGAEYRTIQANCTGTGIGYNIIWVPMASCDFSIRTYTYADTPDDFQLHNFSLPEEDTKLKIPLIHRALQLAQRPVSLLASPWTSPTWLKTKGAGNGKGPLKGQPRDIYHQTWARYIVKFLDAYAEHKLQFWAVTAENEPSAGLLSGYPFQCLGFTPEHQRDFIARDLGPTLANGTHHNVRLLMLDDQRLLLPHWAKVVLTDPEAAKGLCGFQVLGAECAARLLGSRDAVQPQHHHKPPVPCGRLDRLEPIIVDITKHTFYKQPMFYHLGHFSKFIPEGSQRVGLVASQKNDPDAVALMHPDGSPVVVVLNRSSKDVPLTIKDPAVGFLETISPGYSIHTYLWRRQ

SEQ ID NO: 812541 - protein, 357 aa, Homo sapiens
MASCDFSIRTYTYADTPDDFQLHNFSLPEEDTKLKIPLIHRALQLAQRPVSLLASPWTSPTWLKTKGAGNGKGPLKGQPRDIYHQTWARYIVKFLDAYAEHKLQFWAVTAENEPSAGLLSGYPFQCLGFTPEHQRDFIARDLGPTLANGTHHNVRLLMLDDQRLLLPHWAKVVLTDPEAAKYVHGIAVHWYLDFLAPAKATLRETHHLFPNTMLFASEACVGSKFWEQSVRLGSWDRGMQYSHSIITNLLYHVVGWNRLEPIIVDITKHTFYKQPMFYHLGHFSKFIPEGSQRVGLVASQKNDPDAVALMHPDGSPVVVVLNRSSKDVPLTIKDPAVGFLETISPGYSIHTYLWRRQ

SEQ ID NO: 812542 - protein, 470 aa, Homo sapiens
MEFSSPSREECPKPSGRVSIMAGSLTGLLLLQAVSWASDECLQPLQEQKQWALDGAEYRTIQANCTGTGIGYNIIWVPMASCDFSIRTYTYADTPDDFQLHNFSLPEEDTKLKIPLIHRALQLAQRPVSLLASPWTSPTWLKTKGAGNGKGPLKGQPRDIYHQTWARYIVKFLDAYAEHKLQFWAVTAENEPSAGLLSGYPFQCLGFTPEHQRDFIARDLGPTLANGTHHNVRLLMLDDQRLLLPHWAKVVLTDPEAAKYVHGIAVHWYLDFLAPAKATLRETHHLFPNTMLFASEACVGSKFWEQSVRLGSWDRGMQYSHSIITNLLYHVVGWNRLEPIIVDITKHTFYKQPMFYHLGHFSKFIPEGSQRVGLVASQKNDPDAVALMHPDGSPVVVVLNRSSKDVPLTIKDPAVGFLETISPGYSIHTYLCVASDGADTQGGTGLSLGIKGTESAHTLSVTKEGTTGPA

SEQ ID NO: 812543 - protein, 470 aa, Homo sapiens; identical to SEQ ID NO: 812542

SEQ ID NO: 812544 - protein, 357 aa, Homo sapiens; identical to SEQ ID NO: 812541

SEQ ID NO: 812545 - protein, 432 aa, Homo sapiens
MRCLQPLQEQKQWALDGAEYRTIQANCTGTGIGYNIIWVPMASCDFSIRTYTYADTPDDFQLHNFSLPEEDTKLKIPLIHRALQLAQRPVSLLASPWTSPTWLKTKGAGNGKGPLKGQPRDIYHQTWARYIVKFLDAYAEHKLQFWAVTAENEPSAGLLSGYPFQCLGFTPEHQRDFIARDLGPTLANGTHHNVRLLMLDDQRLLLPHWAKVVLTDPEAAKYVHGIAVHWYLDFLAPAKATLRETHHLFPNTMLFASEACVGSKFWEQSVRLGSWDRGMQYSHSIITNLLYHVVGWNRLEPIIVDITKHTFYKQPMFYHLGHFSKFIPEGSQRVGLVASQKNDPDAVALMHPDGSPVVVVLNRSSKDVPLTIKDPAVGFLETISPGYSIHTYLCVASDGADTQGGTGLSLGIKGTESAHTLSVTKEGTTGPA

SEQ ID NO: 812546 - protein, 334 aa, Homo sapiens
MEFSSPSREECPKPSGRVSIMAGSLTGLLLLQAVSWASDECLQPLQEQKQWALDGAEYRTIQANCTGTGIGYNIIWVPMASCDFSIRTYTYADTPDDFQLHNFSLPEEDTKLKIPLIHRALQLAQRPVSLLASPWTSPTWLKTKGAGNGKGPLKGQPRDIYHQTWARYIVKFLDAYAEHKLQFWAVTAENEPSAGLLSGYPFQCLGFTPEHQRDFIARDLGPTLANGTHHNVRLLMLDDQRLLLPHWAKVVLTDPEAAKYVHGIAVHWYLDFLAPAKATLRETHHLFPNTMLFASEACVGSKFWEQSVRLGSWDRGMQYSHSINHSKPPQSPFL

SEQ ID NO: 812547 - protein, 217 aa, Homo sapiens
MCLQPLQEQKQWALDGAEYRTIQANCTGTGIGYNIIWVPMASCDFSIRTYTYADTPDDFQLHNFSLPEEDTKLKIPLIHRALQLAQRPVSLLASPWTSPTWLKTKGAGNGKGPLKGQPRDIYHQTWARYIVKFLDAYAEHKLQFWAVTAENEPSAGLLSGYPFQCLGFTPEHQRDFIARDLGPTPCQRYSPQCPPTHVEAPRKRSVSPSVPPAPMLM

SEQ ID NO: 812548 - protein, 200 aa, Homo sapiens
MCLQPLQEQKQWALDGAEYRTIQANCTGTGIGYNIIWVPMASCDFSIRTYTYADTPDDFQLHNFSLPEEDTKLKIPLIHRALQLAQRPVSLLASPWTSPTWLKTKGAGNGKGPLKGQPRDIYHQTWARYIVKFLDAYAEHKLQFWAVTAENEPSAGLLSGYPFQCLGFTPEHQAEALKQQRVCPGTQMIPMAPARKNGSS

SEQ ID NO: 812549 - protein, 132 aa, Homo sapiens
MCLQPLQEQKQWALDGAEYRTIQANCTGTGIGYNIIWVPMASCDFSIRTYTYADTPDDFQLHNFSLPEEDTKLKIPLIHRALQLAQRPVSLLASPWTSPTWLKTKGAGNGKGPLKGQPRDIYHQGQRELTAT

SEQ ID NO: 812550 - protein, 32 aa, Homo sapiens
MASCDFSIRTYTYADTPDDFQLHNFSLPEEDT

SEQ ID NO: 812551 - protein, 225 aa, Homo sapiens
METIHFLMKVKAVQYVHRVLAHELLCPQGGPSCEYYLVLAQTHILKKNFAKAEEYLQQAAQMDYLNPNVWGLKGHLYFLSGNHSEAKACYERTISFVVDASEMHFIFLRLGLIYLEEKEYEKAKKTYMQACKRSPSCLTWLGLGIACYRLEELTEAEDALSEANALNNYNAEVWAYLALVCLKVGRQLEAEQAYKYMIKLKLKDEALLAEIHTLQETVGFGNPSF

SEQ ID NO: 812552 - protein, 338 aa, Homo sapiens
AVLLENYEQAEIFFEDATCLEPTNVVAWTLLGLYYEIQNNDIRMEMAFHEASKQLQATDASGTRPGAALSILDKFLEESSKLQSDSQEPILTTQTWDPSISQKPSNTFIKEIPTKKEASKCQDSSALLHPGLHYGVSQTTTIFMETIHFLMKVKAVQYVHRVLAHELLCPQGGPSCEYYLVLAQTHILKKNFAKAEEYLQQAAQMDYLNPNVWGLKGHLYFLSGNHSEAKACYERTISFVVDASEMHFIFLRLGLIYLEEKELEELTEAEDALSEANALNNYNAEVWAYLALVCLKVGRQLEAEQAYKYMIKLKLKDEALLAEIHTLQETVGFGNPSF

SEQ ID NO: 812553 - protein, 225 aa, Homo sapiens; identical to SEQ ID NO: 812551

SEQ ID NO: 812554 - protein, 107 aa, Homo sapiens
METIHFLMKVKAVQYVHRVLAHELLCPQGGPSCEYYLVLAQTHILKKNFAKAEEYLQQAAQMDYLNPNVWGLKGHLYFLSGNHSEAKACYERTISFVVDAQPRRDPL

SEQ ID NO: 812555 - protein, 71 aa, Homo sapiens
AVLLENYEQAEIFFEDATCLEPTNVVAWTLLGLYYEIQNNDIRMEMAFHEASKQLQARMLQAQDQELHYLF

SEQ ID NO: 812556 - protein, 574 aa, Homo sapiens
MPPNINWKEIMKVDPDDLPRQEELADNLLISLSKVEVNELKSEKQENVIHLFRITQSLMKMKAQEVELALEEVEKAGEEQAKFENQLKTKVMKLENELEMAQQSAGGRDTRFLRNEICQLEKQLEQKDRELEDMEKELEKEKKVNEQLALRNEEAENENSKLRRENKRLKKKNEQLCQDIIDYQKQIDSQKETLLSRRGEDSDYRSQLSKKNYELIQYLDEIQTLTEANEKIEVQNQEMRKNLEESVQEMEKMTDEYNRMKAIVHQTDNVIDQLKKENDHYQLQVQELTDLLKSKNEEDDPIMVAVNAKVEEWKLILSSKDDEIIEYQQMLHNLREKLKNAQLDADKSNVMALQQGIQERDSQIKMLTEQVEQYTKEMEKNTCIIEDLKNELQRNKGASTLSQQTHMKIQSTLDILKEKTKEAERTAELAEADAREKDKELVEALKRLKDYESGVYGLEDAVVEIKNCKNQIKIRDREIEILTKEINKLELKISDFLDENEALRERVGLEPKTMIDLTEFRNSKHLKQQQYRAENQILLKEIESLEEERLDLKKKNSSNGSRKRKKKCNFRINH

SEQ ID NO: 812557 - protein, 218 aa, Homo sapiens
MARKKVRPRLIAELARRVRALREQLNRPRDSQLYAVDYETLTRPFSGRRLPVRAWADVRRESRLLQLLGRLPLFGLGRLVTRKSWLWQHDEPCYWRLTRVRPDYTAQNLDHGKAWGILTFKGKTESEAREIEHVMYHDWRLVPKHEEEAFTAFTPAPEDSLASVPYPPLLRAMIIAERQKNGDTSTEEPMLNVQRIRMEPWDYPAKQEDKGRAKGTPV

SEQ ID NO: 812558 - protein, 218 aa, Homo sapiens; identical to SEQ ID NO: 812557

SEQ ID NO: 812559 - protein, 178 aa, Homo sapiens
MHCRAFPTLTSVAISLQFKASLSPQTSYSGPCNAKLGRLVTRKSWLWQHDEPCYWRLTRVRPDYTAQNLDHGKAWGILTFKGKTESEAREIEHVMYHDWRLVPKHEEEAFTAFTPAPEDSLASVPYPPLLRAMIIAERQKNGDTSTEEPMLNVQRIRMEPWDYPAKQEDKGRAKGTPV

SEQ ID NO: 812560 - protein, 208 aa, Homo sapiens
MARYEAVVCNSLRTRHGAEEGASAADRGAGPPRARPAGATEQAARLPALRGGLRDLDAAVLWTPALGRLVTRKSWLWQHDEPCYWRLTRVRPDYTAQNLDHGKAWGILTFKGKTESEAREIEHVMYHDWRLVPKHEEEAFTAFTPAPEDSLASVPYPPLLRAMIIAERQKNGDTSTEEPMLNVQRIRMEPWDYPAKQEDKGRAKGTPV

SEQ ID NO: 812561 - protein, 270 aa, Homo sapiens
MARKKVRPRLIAELARRVRALREQLNRPRDSQLYAVDYETLTRPFSGRRLPVRAWADVRRESRLLQLLGRLPLFGLGRLVTRKSWLWQHDEPCYWRLTRVRPDYTAQVGACTPSAPRPCSRLVSPPPLLPAEFAWLRLPPPDLGGRELCELTPFLLALQNLDHGKAWGILTFKGKTESEAREIEHVMYHDWRLVPKHEEEAFTAFTPAPEDSLASVPYPPLLRAMIIAERQKNGDTSTEEPMLNVQRIRMEPWDYPAKQEDKGRAKGTPV

SEQ ID NO: 812562 - protein, 218 aa, Homo sapiens; identical to SEQ ID NO: 812557

SEQ ID NO: 812563 - protein, 218 aa, Homo sapiens; identical to SEQ ID NO: 812557

SEQ ID NO: 812564 - protein, 225 aa, Homo sapiens
MARKKVRPRLIAELARRVRALREQLNRPRDSQLYAVDYETLTRPFSGRRLPVRAWADVRRESRLLQLLGRLPLFGLGRLVTRKSWLWQHDEPCYWRLTRVRPDYTAQNLDHGKAWGILTFKDASFSSSGKTESEAREIEHVMYHDWRLVPKHEEEAFTAFTPAPEDSLASVPYPPLLRAMIIAERQKNGDTSTEEPMLNVQRIRMEPWDYPAKQEDKGRAKGTPV

SEQ ID NO: 812565 - protein, 248 aa, Homo sapiens
MARKKVRPRLIAELARRVRALREQLNRPRDSQLYAVDYETLTRPFSGRRLPVRAWADVRRESRLLQLLGRLPLFGLGRLVTRKSWLWQHDEPCYWRLTRVRPDYTAQNLDHGKAWGILTFKGKARESGCPAVRCRPPTAQQVCADASFSSSGKTESEAREIEHVMYHDWRLVPKHEEEAFTAFTPAPEDSLASVPYPPLLRAMIIAERQKNGDTSTEEPMLNVQRIRMEPWDYPAKQEDKGRAKGTPV

SEQ ID NO: 812566 - protein, 240 aa, Homo sapiens
MARKKVRPRLIAELARRVRALREQLNRPRDSQLYAVDYETLTRPFSGRRLPVRAWADVRRESRLLQLLGRLPLFGLGRLVTRKSWLWQHDEPCYWRLTRVRPDYTAQNLDHGKAWGILTFKGKTESEAREIEHVMYHDWRLVPKHEEEAFTAFTPAPEDSLASVPYPPLLRAMIIAERQKNGDTSTEEPMLNVQRIRMEPWDYPAKQEDKGRAKGTPLPPHPTPRAHAGESGKRSLPFPH

SEQ ID NO: 812567 - protein, 357 aa, Homo sapiens
GRAGEARDGGGRRRVPLWRWRDGARRLGSCGRGFEPANFSSRPGRAPARRPGRVTRRAEAMVHQVLYRALVSTKWLAESIRTGKLGPGLRVLDASWYSPGTREARKEYLERHVPGASFFDIEECRDTASPYEMMLPSEAGFAEYVGRLGISNHTHVVVYDGEHLGSFYAPRVWWMFRVFGHRTVSVLNGGFRNWLKEGHPVTSEPSRPEPAVFKATLDRSLLKTYEQVLENLESKRFQLVDSRSQGRFLGTEPEPDAVGLDSGHIRGAVNMPFMDFLTEDGFEKGPEELRALFQTKKVDLSQPLIATCRKGVTACHVALAAYLCGKPDVAVYDGSWSEWFRRAPPESRVSQGKSEKA

SEQ ID NO: 812568 - protein, 83 aa, Homo sapiens
AYYYYTAARRRQKGEDIKQTKKEKSITNYHCQHTKRKKHACHVALAAYLCGKPDVAVYDGSWSEWFRRAPPESRVSQGKSEKA

SEQ ID NO: 812569 - protein, 297 aa, Homo sapiens
MVHQVLYRALVSTKWLAESIRTGKLGPGLRVLDASWYSPGTREARKEYLERHVPGASFFDIEECRDTASPYEMMLPSEAGFAEYVGRLGISNHTHVVVYDGEHLGSFYAPRVWWMFRVFGHRTVSVLNGGFRNWLKEGHPVTSEPSRPEPAVFKATLDRSLLKTYEQVLENLESKRFQLVDSRSQGRFLGTEPEPDAVGLDSGHIRGAVNMPFMDFLTEDGFEKGPEELRALFQTKKVDLSQPLIATCRKGVTACHVALAAYLCGKPDVAVYDGSWSEWFRRAPPESRVSQGKSEKA

SEQ ID NO: 812570 - protein, 251 aa, Homo sapiens
MSDIGDWFRSIPAITRYWFAATVAVPLVGKLGLISPAYLFLWPEAFLYRFQIWRPITATFYFPVGPGTGFLYLVNLYFLYQYSTRLETGAFDGRPADYLFMLLFNWICIVITGLAMDMQLLMIPLIMSVLYVWAQLNRDMIVSFWFGTRFKACYLPWVILGFNYIIGGSVINELIGNLVGHLYFFLMFRYPMDLGGRNFLSTPQFLYRWLPSRRGGVSGFGVPPASMRRAADQNGGGGRHNWGQGFRLGDQ

SEQ ID NO: 812571 - protein, 617 aa, Homo sapiens
MVKLYLFKMEEVSIGRYNCFSKWNADTFVSPFSIPFRVVISSLYTLNFVFKRGFWPGVVAHVGNPSILGGRRVDHEVRRSRPSWLHGETLAPLKIQKLAGHGSGRLLSQLLGRLRQENCLNPGGGGCSELRSCYCTPAWCQSETPSQKKTKKQKPELLSVLGRGMKVIEYDVNRLQSLTAVPSQAGCMSITSSAGRRLWNQADYVGILSLSKRFTQCWLNFLVYKTGVIVMPTSWGYCEDADEFISRQHLVKAIITEYNSHSNCSSIRSSIKPVLFRVSAVDKSPVMTYSCCQEGFKRRYQIMLSAFKQNFKHYGSAKWNRFKHILSLLIKESKMGNELENTIESVGLGLSSLSCSVNSEFINFKVGNHLTVWGPSSPTICEKGRMYLEGRFCINFKTYPYFQHRKPSSPVSFDGLSWEPFRNAVQGSNMQAVDLAFESECILYPLIQFEPYLDIPRCYQSFFGCWACGCNIFVSILFCMDYFYKQRKKRSECEFSWNLNTFKKHEKLNAVCGQVMGLSTEKTKLNKTSLAAFNMTSAMGTAGEGGVLGGQIICGSDFVLFSPFVSPSFCTRYRWLPSRRGGVSGFGVPPASMRRAADQNGGGGRHNWGQGFRLGDQ

SEQ ID NO: 812572 - protein, 251 aa, Homo sapiens; identical to SEQ ID NO: 812570

SEQ ID NO: 812573 - protein, 251 aa, Homo sapiens; identical to SEQ ID NO: 812570

SEQ ID NO: 812574 - protein, 251 aa, Homo sapiens; identical to SEQ ID NO: 812570

SEQ ID NO: 812575 - protein, 251 aa, Homo sapiens; identical to SEQ ID NO: 812570

SEQ ID NO: 812576 - protein, 172 aa, Homo sapiens
MTFGLFLFPGAFDGRPADYLFMLLFNWICIVITGLAMDMQLLMIPLIMSVLYVWAQLNRDMIVSFWFGTRFKACYLPWVILGFNYIIGGSVINELIGNLVGHLYFFLMFRYPMDLGGRNFLSTPQFLYRWLPSRRGGVSGFGVPPASMRRAADQNGGGGRHNWGQGFRLGDQ

SEQ ID NO: 812577 - protein, 251 aa, Homo sapiens; identical to SEQ ID NO: 812570

SEQ ID NO: 812578 - protein, 206 aa, Homo sapiens
MSDIGDWFRSIPAITRYWFAATVAVPLVGKLGLISPAYLFLWPEAFLYRFQIWRPITATFYFPVGPGTGFLYLVNLYFLYQYSTRLETGAFDGRPADYLFMLLFNWICIVITGLAMDMQLLMIPLIMSVLYVWAQLNRDMIVSFWFGTRFKACYLPWVILGFNYIIGGSVINELIGNLVGHLYFFLPVLGALNNCVLANTVGPDPH

SEQ ID NO: 812579 - protein, 251 aa, Homo sapiens; identical to SEQ ID NO: 812570

SEQ ID NO: 812580 - protein, 134 aa, Homo sapiens
MSDIGDWFRSIPAITRYWFAATVAVPLVGKLGLISPAYLFLWPEAFLYRFQIWRPITATFYFPVGPGTGFLYLVNLYFLYQYSTRLETVGPGLSTWRPVKGRPRAAAPLKPHFLPVLGALNNCVLANTVGPDPH

SEQ ID NO: 812581 - protein, 120 aa, Homo sapiens
MSDIGDWFRSIPAITRYWFAATVAVPLVGKLGLISPAYLFLWPEAFLYRFQIWRPITATFYFPVGPGTGFLYLVNLYFLYHTRQSFLNPEEKYKCSTSFTILIQVLTAVKNKYQLCKLQN

SEQ ID NO: 812582 - protein, 251 aa, Homo sapiens; identical to SEQ ID NO: 812570

SEQ ID NO: 812583 - protein, 1129 aa, Homo sapiens
MASACGAPGPGGALGSQAPSWYHRDLSRAAAEELLARAGRDGSFLVRDSESVAGAFALCVLYQKHVHTYRILPDGEDFLAVQTSQGVPVRRFQTLGELIGLYAQPNQGLVCALLLPVEGEREPDPPDDRDASDGEDEKPPLPPRSGSTSISAPTGPSSPLPAPETPTAPAAESAPNGLSTVSHDYLKGSYGLDLEAVRGGASHLPHLTRTLATSCRRLHSEVDKVLSGLEILSKVFDQQSSPMVTRLLQQQNLPQTGEQELESLVLKLSVLKDFLSGIQKKALKALQDMSSTAPPAPQPSTRKAKTIPVQAFEVKLDVTLGDLTKIGKSQKFTLSVDVEGGRLVLLRRQRDSQEDWTTFTHDRIRQLIKSQRVQNKLGVVFEKEKDRTQRKDFIFVSARKREAFCQLLQLMKNKHSKQDEPDMISVFIGTWNMGSVPPPKNVTSWFTSKGLGKTLDEVTVTIPHDIYVFGTQENSVGDREWLDLLRGGLKELTDLDYRPIAMQSLWNIKVAVLVKPEHENRISHVSTSSVKTGIANTLGNKGAVGVSFMFNGTSFGFVNCHLTSGNEKTARRNQNYLDILRLLSLGDRQLNAFDISLRFTHLFWFGDLNYRLDMDIQEILNYISRKEFEPLLRVDQLNLEREKHKVFLRFSEEEISFPPTYRYERGSRDTYAWHKQKPTGVRTNVPSWCDRILWKSYPETHIICNSYGCTDDIVTSDHSPVFGTFEVGVTSQFISKKGLSKTSDQAYIEFESIEAIVKTASRTKFFIEFYSTCLEEYKKSFENDAQSSDNINFLKVQWSSRQLPTLKPILADIEYLQDQHLLLTVKSMDGYESYGECVVALKSMIGSTAQQFLTFLSHRGEETGNIRGSMKVRVPTERLGTRERLYEWISIDKDEAGAKSKAPSVSRGSQEPRSGSRKPAFTEASCPLSRLFEEPEKPPPTGRPPAPPRAAPREEPLTPRLKPEGAPEPEGVAAPHPRTASITLPTTSLKGSRTSCCPRSHPRLPGPLSHLPPRTKWPLQCLLHSLGTTGTLVWERGVLQMRSLEAHCPLQTFHLHHCRTQPSSCPPAWILYQGQWSGAVVGLRPVAHHLPRPIQGLHCPQAPHQPALSWGKWPVGMTGPARCCRWPRR

SEQ ID NO: 812584 - protein, 1069 aa, Homo sapiens
MYQKHVHTYRILPDGEDFLAVQTSQGVPVRRFQTLGELIGLYAQPNQGLVCALLLPVEGEREPDPPDDRDASDGEDEKPPLPPRSGSTSISAPTGPSSPLPAPETPTAPAAESAPNGLSTVSHDYLKGSYGLDLEAVRGGASHLPHLTRTLATSCRRLHSEVDKVLSGLEILSKVFDQQSSPMVTRLLQQQNLPQTGEQELESLVLKLSVLKDFLSGIQKKALKALQDMSSTAPPAPQPSTRKAKTIPVQAFEVKLDVTLGDLTKIGKSQKFTLSVDVEGGRLVLLRRQRDSQEDWTTFTHDRIRQLIKSQRVQNKLGVVFEKEKDRTQRKDFIFVSARKREAFCQLLQLMKNKHSKQDEPDMISVFIGTWNMGSVPPPKNVTSWFTSKGLGKTLDEVTVTIPHDIYVFGTQENSVGDREWLDLLRGGLKELTDLDYRPIAMQSLWNIKVAVLVKPEHENRISHVSTSSVKTGIANTLGNKGAVGVSFMFNGTSFGFVNCHLTSGNEKTARRNQNYLDILRLLSLGDRQLNAFDISLRFTHLFWFGDLNYRLDMDIQEILNYISRKEFEPLLRVDQLNLEREKHKVFLRFSEEEISFPPTYRYERGSRDTYAWHKQKPTGVRTNVPSWCDRILWKSYPETHIICNSYGCTDDIVTSDHSPVFGTFEVGVTSQFISKKGLSKTSDQAYIEFESIEAIVKTASRTKFFIEFYSTCLEEYKKSFENDAQSSDNINFLKVQWSSRQLPTLKPILADIEYLQDQHLLLTVKSMDGYESYGECVVALKSMIGSTAQQFLTFLSHRGEETGNIRGSMKVRVPTERLGTRERLYEWISIDKDEAGAKSKAPSVSRGSQEPRSGSRKPAFTEASCPLSRLFEEPEKPPPTGRPPAPPRAAPREEPLTPRLKPEGAPEPEGVAAPHPRTASITLPTTSLKGSRTSCCPRSHPRLPGPLSHLPPRTKWPLQCLLHSLGTTGTLVWERGVLQMRSLEAHCPLQTFHLHHCRTQPSSCPPAWILYQGQWSGAVVGLRPVAHHLPRPIQGLHCPQAPHQPALSWGKWPVGMTGPARCCRWPRR

SEQ ID NO: 812585 - protein, 104 aa, Homo sapiens [sequence omitted]

SEQ ID NO: 812586 - protein, 104 aa, Homo sapiens [sequence omitted]

SEQ ID NO: 812587 - protein, 198 aa, Homo sapiens
EVTLEDSGILDWKREAFCQLLQLMKNKHSKQDEPDMISVFIGTWNMGSVPPPKNVTSWFTSKGLGKTLDEVTVTIPHDIYVFGTQENSVGDREWLDLLRGGLKELTDLDYRPIAMQSLWNIKVAVLVKPEHENRISHVSTSSVKTGIANTLGNKGAVGVSFMFNGTSFGFVNCHLTSGNEKTARGPNYSTSPVRSRSI

SEQ ID NO: 812588 - protein, 168 aa, Homo sapiens
ANWQGIPVDGGLPGCLPAPEWLLFPQKREAFCQLLQLMKNKHSKQDEPDMISVFIGTWNMGSVPPPKNVTSWFTSKGLGKTLDEVTVTIPHDIYVFGTQENSVGDREWLDLLRGGLKELTDLDYRPVRGGHLVQDPVLTHHLQTSLLDFMGNPGSTASLAFSLVPEHI

SEQ ID NO: 812589 - protein, 904 aa, Homo sapiens
SKITVFWKELIDPRLIIESPSNTQVQNLPQTGEQELESLVLKLSVLKDFLSGIQKKALKALQDMSSTAPPAPQPSTRKAKTIPVQAFEVKLDVTLGDLTKIGKSQKFTLSVDVEGGRLVLLRRQRDSQEDWTTFTHDRIRQLIKSQRVQNKLGVVFEKEKDRTQRKDFIFVSARKREAFCQLLQLMKNKHSKQDEPDMISVFIGTWNMGSVPPPKNVTSWFTSKGLGKTLDEVTVTIPHDIYVFGTQENSVGDREWLDLLRGGLKELTDLDYRPIAMQSLWNIKVAVLVKPEHENRISHVSTSSVKTGIANTLGNKGAVGVSFMFNGTSFGFVNCHLTSGNEKTARRNQNYLDILRLLSLGDRQLNAFDISLRFTHLFWFGDLNYRLDMDIQEILNYISRKEFEPLLRVDQLNLEREKHKVFLRFSEEEISFPPTYRYERGSRDTYAWHKQKPTGVRTNVPSWCDRILWKSYPETHIICNSYGCTDDIVTSDHSPVFGTFEVGVTSQFISKKGLSKTSDQAYIEFESIEAIVKTASRTKFFIEFYSTCLEEYKKSFENDAQSSDNINFLKVQWSSRQLPTLKPILADIEYLQDQHLLLTVKSMDGYESYGECVVALKSMIGSTAQQFLTFLSHRGEETGNIRGSMKVRVPTERLGTRERLYEWISIDKDEAGAKSKAPSVSRGSQEPRSGSRKPAFTEASCPLSRLFEEPEKPPPTGRPPAPPRAAPREEPLTPRLKPEGAPEPEGVAAPHPRTASITLPTTSLKGSRTSCCPRSHPRLPGPLSHLPPRTKWPLQCLLHSLGTTGTLVWERGVLQMRSLEAHCPLQTFHLHHCRTQPSSCPPAWILYQGQWSGAVVGLRPVAHHLPRPIQGLHCPQAPHQPALSWGKWPVGMTGPARCCRWPRR

SEQ ID NO: 812590 - protein, 742 aa, Homo sapiens
EVTLEDSGILDWKREAFCQLLQLMKNKHSKQDEPDMISVFIGTWNMGSVPPPKNVTSWFTSKGLGKTLDEVTVTIPHDIYVFGTQENSVGDREWLDLLRGGLKELTDLDYRPIAMQSLWNIKVAVLVKPEHENRISHVSTSSVKTGIANTLGNKGAVGVSFMFNGTSFGFVNCHLTSGNEKTARRNQNYLDILRLLSLGDRQLNAFDISLRFTHLFWFGDLNYRLDMDIQEILNYISRKEFEPLLRVDQLNLEREKHKVFLRFSEEEISFPPTYRYERGSRDTYAWHKQKPTGVRTNVPSWCDRILWKSYPETHIICNSYGCTDDIVTSDHSPVFGTFEVGVTSQFISKKGLSKTSDQAYIEFESIEAIVKTASRTKFFIEFYSTCLEEYKKSFENDAQSSDNINFLKVQWSSRQLPTLKPILADIEYLQDQHLLLTVKSMDGYESYGECVVALKSMIGSTAQQFLTFLSHRGEETGNIRGSMKVRVPTERLGTRERLYEWISIDKDEAGAKSKAPSVSRGSQEPRSGSRKPAFTEASCPLSRLFEEPEKPPPTGRPPAPPRAAPREEPLTPRLKPEGAPEPEGVAAPHPRTASITLPTTSLKGSRTSCCPRSHPRLPGPLSHLPPRTKWPLQCLLHSLGTTGTLVWERGVLQMRSLEAHCPLQTFHLHHCRTQPSSCPPAWILYQGQWSGAVVGLRPVAHHLPRPIQGLHCPQAPHQPALSWGKWPVGMTGPARCCRWPRR

SEQ ID NO: 812591 - protein, 1129 aa, Homo sapiens; identical to SEQ ID NO: 812583

SEQ ID NO: 812592 - protein, 1129 aa, Homo sapiens; identical to SEQ ID NO: 812583

SEQ ID NO: 812593 - protein, 1129 aa, Homo sapiens; identical to SEQ ID NO: 812583

SEQ ID NO: 812594 - protein, 1129 aa, Homo sapiens; identical to SEQ ID NO: 812583

SEQ ID NO: 812595 - protein, 529 aa, Homo sapiens
IASFLTSLMCNLIWGLQEILNYISRKEFEPLLRVDQLNLEREKHKVFLRFSEEEISFPPTYRYERGSRDTYAWHKQKPTGVRTNVPSWCDRILWKSYPETHIICNSYGCTDDIVTSDHSPVFGTFEVGVTSQFISKKGLSKTSDQAYIEFESIEAIVKTASRTKFFIEFYSTCLEEYKKSFENDAQSSDNINFLKVQWSSRQLPTLKPILADIEYLQDQHLLLTVKSMDGYESYGECVVALKSMIGSTAQQFLTFLSHRGEETGNIRGSMKVRVPTERLGTRERLYEWISIDKDEAGAKSKAPSVSRGSQEPRSGSRKPAFTEASCPLSRLFEEPEKPPPTGRPPAPPRAAPREEPLTPRLKPEGAPEPEGVAAPHPRTASITLPTTSLKGSRTSCCPRSHPRLPGPLSHLPPRTKWPLQCLLHSLGTTGTLVWERGVLQMRSLEAHCPLQTFHLHHCRTQPSSCPPAWILYQGQWSGAVVGLRPVAHHLPRPIQGLHCPQAPHQPALSWGKWPVGMTGPARCCRWPRR

SEQ ID NO: 812596 - protein, 133 aa, Homo sapiens [sequence omitted]

SEQ ID NO: 812597 - protein, 510 aa, Homo sapiens
MKNLVRLAVFTMASMLSNSMKAWSEVFESPFLEMNWEVTPTYRYERGSRDTYAWHKQKPTGVRTNVPSWCDRILWKSYPETHIICNSYGCTDDIVTSDHSPVFGTFEVGVTSQFISKKGLSKTSDQAYIEFESIEAIVKTASRTKFFIEFYSTCLEEYKKSFENDAQSSDNINFLKVQWSSRQLPTLKPILADIEYLQDQHLLLTVKSMDGYESYGECVVALKSMIGSTAQQFLTFLSHRGEETGNIRGSMKVRVPTERLGTRERLYEWISIDKDEAGAKSKAPSVSRGSQEPRSGSRKPAFTEASCPLSRLFEEPEKPPPTGRPPAPPRAAPREEPLTPRLKPEGAPEPEGVAAPHPRTASITLPTTSLKGSRTSCCPRSHPRLPGPLSHLPPRTKWPLQCLLHSLGTTGTLVWERGVLQMRSLEAHCPLQTFHLHHCRTQPSSCPPAWILYQGQWSGAVVGLRPVAHHLPRPIQGLHCPQAPHQPALSWGKWPVGMTGPARCCRWPRR

SEQ ID NO: 812598 - protein, 1129 aa, Homo sapiens; identical to SEQ ID NO: 812583

SEQ ID NO: 812599 - protein, 428 aa, Homo sapiens
SYPLSPGCTDDIVTSDHSPVFGTFEVGVTSQFISKKGLSKTSDQAYIEFESIEAIVKTASRTKFFIEFYSTCLEEYKKSFENDAQSSDNINFLKVQWSSRQLPTLKPILADIEYLQDQHLLLTVKSMDGYESYGECVVALKSMIGSTAQQFLTFLSHRGEETGNIRGSMKVRVPTERLGTRERLYEWISIDKDEAGAKSKAPSVSRGSQEPRSGSRKPAFTEASCPLSRLFEEPEKPPPTGRPPAPPRAAPREEPLTPRLKPEGAPEPEGVAAPHPRTASITLPTTSLKGSRTSCCPRSHPRLPGPLSHLPPRTKWPLQCLLHSLGTTGTLVWERGVLQMRSLEAHCPLQTFHLHHCRTQPSSCPPAWILYQGQWSGAVVGLRPVAHHLPRPIQGLHCPQAPHQPALSWGKWPVGMTGPARCCRWPRR

SEQ ID NO: 812600 - protein, 406 aa, Homo sapiens
DSRIPLCSLFISKKGLSKTSDQAYIEFESIEAIVKTASRTKFFIEFYSTCLEEYKKSFENDAQSSDNINFLKVQWSSRQLPTLKPILADIEYLQDQHLLLTVKSMDGYESYGECVVALKSMIGSTAQQFLTFLSHRGEETGNIRGSMKVRVPTERLGTRERLYEWISIDKDEAGAKSKAPSVSRGSQEPRSGSRKPAFTEASCPLSRLFEEPEKPPPTGRPPAPPRAAPREEPLTPRLKPEGAPEPEGVAAPHPRTASITLPTTSLKGSRTSCCPRSHPRLPGPLSHLPPRTKWPLQCLLHSLGTTGTLVWERGVLQMRSLEAHCPLQTFHLHHCRTQPSSCPPAWILYQGQWSGAVVGLRPVAHHLPRPIQGLHCPQAPHQPALSWGKWPVGMTGPARCCRWPRR

SEQ ID NO: 812601 - protein, 1129 aa, Homo sapiens; identical to SEQ ID NO: 812583

SEQ ID NO: 812602 - protein, 1129 aa, Homo sapiens; identical to SEQ ID NO: 812583

SEQ ID NO: 812603 - protein, 1129 aa, Homo sapiens; identical to SEQ ID NO: 812583

SEQ ID NO: 812604 - protein, 1129 aa, Homo sapiens; identical to SEQ ID NO: 812583

SEQ ID NO: 812605 - protein, 1129 aa, Homo sapiens; identical to SEQ ID NO: 812583

SEQ ID NO: 812606 - protein, 1129 aa, Homo sapiens; identical to SEQ ID NO: 812583

SEQ ID NO: 812607 - protein, 282 aa, Homo sapiens
APFKDVVEQYYVLEGVPHQLLPPEPPSPARAPVPSATKNKVAITVPAPQLGHHRHPRVGEGSSSDEESGGTLPPPDFPPPPLPDSAIFLPPSLDPLPGPVVRGRGGAEARGPPPPKAHPRPPLPPGPSPASTFLGEVASGDDRSCSVLQMAKTLSEVDYAPAGPARSALLPGPLELQPPRGLPSDYGRPLSFPPPRIRESIQEDLAEEAPCLQGGRASGLGEAGMSAWLRAIGLERYEEGLVHNGWDDLEFLSDITEEDLEEAGVQDPAHKRLLLDTLQLSK

SEQ ID NO: 812608 - protein, 1129 aa, Homo sapiens; identical to SEQ ID NO: 812583

SEQ ID NO: 812609 - protein, 245 aa, Homo sapiens
MGKVAITVPAPQLGHHRHPRVGEGSSSDEESGGTLPPPDFPPPPLPDSAIFLPPSLDPLPGPVVRGRGGAEARGPPPPKAHPRPPLPPGPSPASTFLGEVASGDDRSCSVLQMAKTLSEVDYAPAGPARSALLPGPLELQPPRGLPSDYGRPLSFPPPRIRESIQEDLAEEAPCLQGGRASGLGEAGMSAWLRAIGLERYEEGLVHNGWDDLEFLSDITEEDLEEAGVQDPAHKRLLLDTLQLSK

SEQ ID NO: 812610 - protein, 1025 aa, Homo sapiens
MASACGAPGPGGALGSQAPSWYHRDLSRAAAEELLARAGRDGSFLVRDSESVAGAFALCVLYQKHVHTYRILPDGEDFLAVQTSQGVPVRRFQTLGELIGLYAQPNQGLVCALLLPVEGEREPDPPDDRDASDGEDEKPPLPPRSGSTSISAPTGPSSPLPAPETPTAPAAESAPNGLSTVSHDYLKGSYGLDLEAVRGGASHLPHLTRTLATSCRRLHSEVDKVLSGLEILSKVFDQQSSPMVTRLLQQQNLPQTGEQELESLVLKLSVLKDFLSGIQKKALKALQDMSSTAPPAPQPSTRKAKTIPVQAFEVKLDVTLGDLTKIGKSQKFTLSVDVEGGRLVLLRRQRDSQEDWTTFTHDRIRQLIKSQRVQNKLGVVFEKEKDRTQRKDFIFVSARKREAFCQLLQLMKNKHSKQDEPDMISVFIGTWNMGSVPPPKNVTSWFTSKGLGKTLDEVTVTIPHDIYVFGTQENSVGDREWLDLLRGGLKELTDLDYRPIAMQSLWNIKVAVLVKPEHENRISHVSTSSVKTGIANTLGNKGAVGVSFMFNGTSFGFVNCHLTSGNEKTARRNQNYLDILRLLSLGDRQLNAFDISLRFTHLFWFGDLNYRLDMDIQEILNYISRKEFEPLLRVDQLNLEREKHKVFLRFSEEEISFPPTYRYERGSRDTYAWHKQKPTGVRTNVPSWCDRILWKSYPETHIICNSYGCTDDIVTSDHSPVFGTFEVGVTSQFISKKGLSKTSDQAYIEFESIEAIVKTASRTKFFIEFYSTCLEEYKKSFENDAQSSDNINFLKVQWSSRQLPTLKPILADIEYLQDQHLLLTVKSMDGYESYGECVVALKSMIGSTAQQFLTFLSHRGEETGNIRGSMKVRVPTERLGTRERLYEWISIDKDEAGAKSKAPSVSRGSQEPRSGSRKPAFTEASCPLSRLFEEPEKPPPTGRPPAPPRAAPREEPLTPRLKPEGAPEPEGVAAPHPRTASITLPTLVLSCFTGPRLPAPGVPVGVHLGTSGPPLSPVSAAFHRA

SEQ ID NO: 812611 - protein, 913 aa, Homo sapiens
MASACGAPGPGGALGSQAPSWYHRDLSRAAAEELLARAGRDGSFLVRDSESVAGAFALCVLYQKHVHTYRILPDGEDFLAVQTSQGVPVRRFQTLGELIGLYAQPNQGLVCALLLPVEGEREPDPPDDRDASDGEDEKPPLPPRSGSTSISAPTGPSSPLPAPETPTAPAAESAPNGLSTVSHDYLKGSYGLDLEAVRGGASHLPHLTRTLATSCRRLHSEVDKVLSGLEILSKVFDQQSSPMVTRLLQQQNLPQTGEQELESLVLKLSVLKDFLSGIQKKALKALQDMSSTAPPAPQPSTRKAKTIPVQAFEVKLDVTLGDLTKIGKSQKFTLSVDVEGGRLVLLRRQRDSQEDWTTFTHDRIRQLIKSQRVQNKLGVVFEKEKDRTQRKDFIFVSARKREAFCQLLQLMKNKHSKQDEPDMISVFIGTWNMGSVPPPKNVTSWFTSKGLGKTLDEVTVTIPHDIYVFGTQENSVGDREWLDLLRGGLKELTDLDYRPIAMQSLWNIKVAVLVKPEHENRISHVSTSSVKTGIANTLGNKGAVGVSFMFNGTSFGFVNCHLTSGNEKTARRNQNYLDILRLLSLGDRQLNAFDISLRFTHLFWFGDLNYRLDMDIQEILNYISRKEFEPLLRVDQLNLEREKHKVFLRFSEEEISFPPTYRYERGSRDTYAWHKQKPTGVRTNVPSWCDRILWKSYPETHIICNSYGCTDDIVTSDHSPVFGTFEVGVTSQFISKKGLSKTSDQAYIEFESIEAIVKTASRTKFFIEFYSTCLEEYKKSFENDAQSSDNINFLKVQWSSRQLPTLKPILADIEYLQDQHLLLTVKSMDGYESYGECVVALKSMIGSTAQQFLTFLSHRGEETGNIRGSMKVRVPTERLGTRERLYEWISIDKDEAGAKSKAPSVSRGSQEPR

SEQ ID NO: 812612 - protein, 910 aa, Homo sapiens
MASACGAPGPGGALGSQAPSWYHRDLSRAAAEELLARAGRDGSFLVRDSESVAGAFALCVLYQKHVHTYRILPDGEDFLAVQTSQGVPVRRFQTLGELIGLYAQPNQGLVCALLLPVEGEREPDPPDDRDASDGEDEKPPLPPRSGSTSISAPTGPSSPLPAPETPTAPAAESAPNGLSTVSHDYLKGSYGLDLEAVRGGASHLPHLTRTLATSCRRLHSEVDKVLSGLEILSKVFDQQSSPMVTRLLQQQNLPQTGEQELESLVLKLSVLKDFLSGIQKKALKALQDMSSTAPPAPQPSTRKAKTIPVQAFEVKLDVTLGDLTKIGKSQKFTLSVDVEGGRLVLLRRQRDSQEDWTTFTHDRIRQLIKSQRVQNKLGVVFEKEKDRTQRKDFIFVSARKREAFCQLLQLMKNKHSKQDEPDMISVFIGTWNMGSVPPPKNVTSWFTSKGLGKTLDEVTVTIPHDIYVFGTQENSVGDREWLDLLRGGLKELTDLDYRPIAMQSLWNIKVAVLVKPEHENRISHVSTSSVKTGIANTLGNKGAVGVSFMFNGTSFGFVNCHLTSGNEKTARRNQNYLDILRLLSLGDRQLNAFDISLRFTHLFWFGDLNYRLDMDIQEILNYISRKEFEPLLRVDQLNLEREKHKVFLRFSEEEISFPPTYRYERGSRDTYAWHKQKPTGVRTNVPSWCDRILWKSYPETHIICNSYGCTDDIVTSDHSPVFGTFEVGVTSQFISKKGLSKTSDQAYIEFESIEAIVKTASRTKFFIEFYSTCLEEYKKSFENDAQSSDNINFLKVQWSSRQLPTLKPILADIEYLQDQHLLLTVKSMDGYESYVIAIHGRKSKRAGREHRGGQRRVQHVGWYPRPGSDRDMAGDTGQRGPQLPPHQRIHLVAGTGAAPERFSGYAELEA

SEQ ID NO: 812613 - protein, 818 aa, Homo sapiens
MASACGAPGPGGALGSQAPSWYHRDLSRAAAEELLARAGRDGSFLVRDSESVAGAFALCVLYQKHVHTYRILPDGEDFLAVQTSQGVPVRRFQTLGELIGLYAQPNQGLVCALLLPVEGEREPDPPDDRDASDGEDEKPPLPPRSGSTSISAPTGPSSPLPAPETPTAPAAESAPNGLSTVSHDYLKGSYGLDLEAVRGGASHLPHLTRTLATSCRRLHSEVDKVLSGLEILSKVFDQQSSPMVTRLLQQQNLPQTGEQELESLVLKLSVLKDFLSGIQKKALKALQDMSSTAPPAPQPSTRKAKTIPVQAFEVKLDVTLGDLTKIGKSQKFTLSVDVEGGRLVLLRRQRDSQEDWTTFTHDRIRQLIKSQRVQNKLGVVFEKEKDRTQRKDFIFVSARKREAFCQLLQLMKNKHSKQDEPDMISVFIGTWNMGSVPPPKNVTSWFTSKGLGKTLDEVTVTIPHDIYVFGTQENSVGDREWLDLLRGGLKELTDLDYRPIAMQSLWNIKVAVLVKPEHENRISHVSTSSVKTGIANTLGNKGAVGVSFMFNGTSFGFVNCHLTSGNEKTARRNQNYLDILRLLSLGDRQLNAFDISLRFTHLFWFGDLNYRLDMDIQEILNYISRKEFEPLLRVDQLNLEREKHKVFLRFSEEEISFPPTYRYERGSRDTYAWHKQKPTGVRTNVPSWCDRILWKSYPETHIICNSYGCTDDIVTSDHSPVFGTFEVGVTSQFISKKGLSKTSDQAYIEFESIEAIVKTASRTKFFIEFYSTCLEEYKKSFENDAQSSDNINFLKVQWSSRQLPTPGTGSCKQPPGQS

SEQ ID NO: 812614 - protein, 283 aa, Homo sapiens
KNRLRSRLPVNRQRVKTASRTKFFIEFYSTCLEEYKKSFENDAQSSDNINFLKVQWSSRQLPTLKPILADIEYLQDQHLLLTVKSMDGYESYGECVVALKSMIGSTAQQFLTFLSHRGEETGNIRGSMKVRVPTERLGTRERLYEWISIDKDEAGAKSKAPSVSRGSQEPRSGSRKPAFTEASCPLSRLFEEPEKPPPTGRPPAPPRAAPREEPLTPRLKPEGAPEPEGVAAPHPRTASITLPTLVLSCFTGPRLPAPGVPVGVHLGTSGPPLSPVSAAFHRA

SEQ ID NO: 812615 - protein, 737 aa, Homo sapiens
MASACGAPGPGGALGSQAPSWYHRDLSRAAAEELLARAGRDGSFLVRDSESVAGAFALCVLYQKHVHTYRILPDGEDFLAVQTSQGVPVRRFQTLGELIGLYAQPNQGLVCALLLPVEGEREPDPPDDRDASDGEDEKPPLPPRSGSTSISAPTGPSSPLPAPETPTAPAAESAPNGLSTVSHDYLKGSYGLDLEAVRGGASHLPHLTRTLATSCRRLHSEVDKVLSGLEILSKVFDQQSSPMVTRLLQQQNLPQTGEQELESLVLKLSVLKDFLSGIQKKALKALQDMSSTAPPAPQPSTRKAKTIPVQAFEVKLDVTLGDLTKIGKSQKFTLSVDVEGGRLVLLRRQRDSQEDWTTFTHDRIRQLIKSQRVQNKLGVVFEKEKDRTQRKDFIFVSARKREAFCQLLQLMKNKHSKQDEPDMISVFIGTWNMGSVPPPKNVTSWFTSKGLGKTLDEVTVTIPHDIYVFGTQENSVGDREWLDLLRGGLKELTDLDYRPIAMQSLWNIKVAVLVKPEHENRISHVSTSSVKTGIANTLGNKGAVGVSFMFNGTSFGFVNCHLTSGNEKTARRNQNYLDILRLLSLGDRQLNAFDISLRFTHLFWFGDLNYRLDMDIQEILNYISRKEFEPLLRVDQLNLEREKHKVFLRFSEEEISFPPTYRYERGSRDTYAWHKQKPTGVRTNVPSWCDRILWKSYPETHIICNSYGCTDDIVTSDHSPVFERALSSVGSLSTLGR

SEQ ID NO: 812616 - protein, 173 aa, Homo sapiens
MASACGAPGPGGALGSQAPSWYHRDLSRAAAEELLARAGRDGSFLVRDSESVAGAFALCVLYQKHVHTYRILPDGEDFLAVQTSQGVPVRRFQTLGELIGLYAQPNQGLVCALLLPVEGEREPDPPDDRDASDGEDEKPPLPPRSGSTSISAPTGPSSPLPAPETPTAPAAER

SEQ ID NO: 812617 - protein, 188 aa, Homo sapiens
VLLPFSSGLSKTSDQAYIEFESIEAIVKTASRTKFFIEFYSTCLEEYKKSFENDAQSSDNINFLKVQWSSRQLPTLKPILADIEYLQDQHLLLTVKSMDGYESYVFCVGLGRESTLILLGLVGVGQDLSHKVPVCLVLTVSWSVLPCSGDARRQGGGGRFLAGLSPGQGLASSLLGSRKGCGVMSSIN

SEQ ID NO: 812618 - protein, 175 aa, Homo sapiens
MASACGAPGPGGALGSQAPSWYHRDLSRAAAEELLARAGRDGSFLVRDSESVAGAFALCVLYQKHVHTYRILPDGEDFLAVQTSQGVPVRRFQTLGELIGLYAQPNQGLVCALLLPVEGEREPDPPDDRDASGTSQCAGPLPAPVPWLYLPLPIPPSQPHLSCNPLSLGHDAGAL

SEQ ID NO: 812619 - protein, 73 aa, Homo sapiens
GSGDHALSTQIAMQSLWNIKVAVLVKPEHENRISHVSTSSVKTGIANTLGKWGWQVPKSGSVSLSMASASSQA

SEQ ID NO: 812620 - protein, 754 aa, Homo sapiens
MLVAGLLLWASLLTGAWPSFPTQDHLPATPRVRLSFKELKATGTAHFFNFLLNTTDYRILLKDEDHDRMYVGSKDYVLSLDLHDINREPLIIHWAASPQRIEECVLSGKDVNGECGNFVRLIQPWNRTHLYVCGTGAYNPMCTYVNRGRRAQDYIFYLEPERLESGKGKCPYDPKLDTASALINEELYAGVYIDFMGTDAAIFRTLGKQTAMRTDQYNSRWLNDPSFIHAELIPDSAERNDDKLYFFFRERSAEAPQSPAVYARIGRICLNDDGGHCCLVNKWSTFLKARLVCSVPGEDGIETHFDELQDVFVQQTQDVRNPVIYAVFTSSGSVFRGSAVCVYSMADIRMVFNGPFAHKEGPNYQWMPFSGKMPYPRPGTCPGGTFTPSMKSTKDYPDEVINFMRSHPLMYQAVYPLQRRPLVVRTGAPYRLTTIAVDQVDAADGRYEVLFLGTDRGTVQKVIVLPKDDQEMEELMLEEVEVFKDPAPVKTMTISSKRQQLYVASAVGVTHLSLHRCQAYGAACADCCLARDPYCAWDGQACSRYTASSKRRSRRQDVRHGNPIRQCRGFNSNANKNAVESVQYGVAGSAAFLECQPRSPQATVKWLFQRDPGDRRREIRAEDRFLRTEQGLLLRALQLSDRGLYSCTATENNFKHVVTRVQLHVLGRDAVHAALFPPLSMSAPPPPGAGPPTPPYQELAQLLAQPEVGLIHQYCQGYWRHVPPSPREAPGAPRSPEPQDQKKPRNRRHHPPDT

SEQ ID NO: 812621 - protein, 785 aa, Homo sapiens
MLVAGLLLWASLLTGAWPSFPTQDHLPATPRVRLSFKELKATGTAHFFNFLLNTTDYRILLKDEDHDRMYVGSKDYVLSLDLHDINREPLIIHWAASPQRIEECVLSGKDVNGECGNFVRLIQPWNRTHLYVCGTGAYNPMCTYVNRGRRAQATPWTQTQAVRGRGSRATDGALRPMPTAPRQDYIFYLEPERLESGKGKCPYDPKLDTASALINEELYAGVYIDFMGTDAAIFRTLGKQTAMRTDQYNSRWLNDPSFIHAELIPDSAERNDDKLYFFFRERSAEAPQSPAVYARIGRICLNDDGGHCCLVNKWSTFLKARLVCSVPGEDGIETHFDELQDVFVQQTQDVRNPVIYAVFTSSGSVFRGSAVCVYSMADIRMVFNGPFAHKEGPNYQWMPFSGKMPYPRPGTCPGGTFTPSMKSTKDYPDEVINFMRSHPLMYQAVYPLQRRPLVVRTGAPYRLTTIAVDQVDAADGRYEVLFLGTDRGTVQKVIVLPKDDQEMEELMLEEVEVFKDPAPVKTMTISSKRQQLYVASAVGVTHLSLHRCQAYGAACADCCLARDPYCAWDGQACSRYTASSKRRSRRQDVRHGNPIRQCRGFNSNANKNAVESVQYGVAGSAAFLECQPRSPQATVKWLFQRDPGDRRREIRAEDRFLRTEQGLLLRALQLSDRGLYSCTATENNFKHVVTRVQLHVLGRDAVHAALFPPLSMSAPPPPGAGPPTPPYQELAQLLAQPEVGLIHQYCQGYWRHVPPSPREAPGAPRSPEPQDQKKPRNRRHHPPDT

SEQ ID NO: 812622 - protein, 280 aa, Homo sapiens
MIGVSWIGVLRISTRQDMTISSKRQQLYVASAVGVTHLSLHRCQAYGAACADCCLARDPYCAWDGQACSRYTASSKRRSRRQDVRHGNPIRQCRGFNSNANKNAVESVQYGVAGSAAFLECQPRSPQATVKWLFQRDPGDRRREIRAEDRFLRTEQGLLLRALQLSDRGLYSCTATENNFKHVVTRVQLHVLGRDAVHAALFPPLSMSAPPPPGAGPPTPPYQELAQLLAQPEVGLIHQYCQGYWRHVPPSPREAPGAPRSPEPQDQKKPRNRRHHPPDT

SEQ ID NO: 812623 - protein, 94 aa, Homo sapiens
RPRRRSRLRRSGERSRAGPWPRGAASADRPNGSRSVPPPPPGRPGPAAAEEVSREWSLLPGPQPLLPSPPGQGRATPLYLLSFPCATLTQRLGA

SEQ ID NO: 812624 - protein, 96 aa, Homo sapiens
MLVAGLLLWASLLTGAWPSFPTQDHLPATPRVRLSFKELKATGTAHFFNFLLNTTDYRILLKDEDHDRMYVGSKDYVLSLDLHDINREPLIVRAGP

SEQ ID NO: 812625 - protein, 290 aa, Homo sapiens
MLVAGLLLWASLLTGAWPSFPTQDHLPATPRVRLSFKELKATGTAHFFNFLLNTTDYRILLKASCLCLPWASLALVPFNIKDIYIYIYIYKISIFYTHPAPAKTVFIGGLNIACLSGSILQNLDPCWSETAENRACLTRPSQLVGPGQDHTVPRLSWKSTCWTGLRQDLQDKGREQALLGWGTDCPPFLMCVVSLCCGIDMDARTTLETGVASRAHREGKKGPSQDASPCLGWGHSATTSPFLGIYSLFIGDRRRGILPGWDSPFSPFSPPRLARAGPPHSTSLAFPVPL

SEQ ID NO: 812626 - protein, 75 aa, Homo sapiens
MYTRIDVLWGAHVFTCVPGLCGVRGWQPEPAPPAPATPSSNPFSSSSQATPWTQTQAVRGRGSRATDGALRPMPT

SEQ ID NO: 812627 - protein, 601 aa, Homo sapiens
LPPATASATDAEGTAPRPPPLAAAIAASDFRTSVVLNHLAEKWFPGQRERARAAGRLGELLHQGRYREALAAACEALRAEPSDLIVKIYRAESYAGLQEFKAAIEDLNAVLFQLPDWPEVYFRKGKVLCDAGFLGDALQLFLQCLALDEDFAPAKLQVQKILCDLLLPENLKEGLKESSWSSLPCTKNRPFDFHSVMEESQSLNEPSPKQSEEIPEVTSEPVKGSLNRAQSAQSINSTEMPAREDCLKRVSSEPVLSVQEKGVLLKRKLSLLEQDVIVNEDGRNKLKKQGAYGDIPEELIDVSDFECSLCMRLFFEPVTTPCGHSFCKNCLERCLDHAPYCPLCKESLKEYLADRRYCVTQLLEELIVKYLPDELSERKKIYDEETAELSHLTKNVPIFVCTMAYPTVPCPLHVFEPRYRLMIRRSIQTGTKQFGMCVSDTQNSFADYGCMLQIRNVHFLPDGRSVVDTVGGKRFRVLKRGMKDGYCTADIEYLEDVKVENEDEIKNLRELHDLVYSQACSWFQNLRDRFRSQILQHFGSMPEREENLQAAPNGPAWCWWLLAVLPVDPRYQLSVLSMKSLKERLTKIQHILTYFSRDQSK

SEQ ID NO: 812628 - protein, 612 aa, Homo sapiens
LPPATASATDAEGTAPRPPPLAAAIAASDFRTSVVLNHLAEKWFPGQRERARAAGRLGELLHQGRYREALAAACEALRAEPSDLIVKIYRAESYAGLQEFKAAIEDLNAVLFQLPDWPEVYFRKGKVLCDAGFLGDALQLFLQCLALDEDFAPAKLQVQKILCDLLLPENLKEGLKESSWSSLPCTKNRPFDFHSVMEESQSLNEPSPKQSEEIPEVTSEPVKGSLNRAQSAQSINSTEMPAREDCLKRVSSEPVLSVQEKGVLLKRKLSLLEQDVIVNEDGRNKLKKQGETPNEVCMFSLAYGDIPEELIDVSDFECSLCMRLFFEPVTTPCGHSFCKNCLERCLDHAPYCPLCKESLKEYLADRRYCVTQLLEELIVKYLPDELSERKKIYDEETAELSHLTKNVPIFVCTMAYPTVPCPLHVFEPRYRLMIRRSIQTGTKQFGMCVSDTQNSFADYGCMLQIRNVHFLPDGRSVVDTVGGKRFRVLKRGMKDGYCTADIEYLEDVKVENEDEIKNLRELHDLVYSQACSWFQNLRDRFRSQILQHFGSMPEREENLQAAPNGPAWCWWLLAVLPVDPRYQLSVLSMKSLKERLTKIQHILTYFSRDQSK

SEQ ID NO: 812629 - protein, 555 aa, Homo sapiens
GPARARSTGTSGELLHQGRYREALAAACEALRAEPSDLIVKIYRAESYAGLQEFKAAIEDLNAVLFQLPDWPEVYFRKGKVLCDAGFLGDALQLFLQCLALDEDFAPAKLQVQKILCDLLLPENLKEGLKESSWSSLPCTKNRPFDFHSVMEESQSLNEPSPKQSEEIPEVTSEPVKGSLNRAQSAQSINSTEMPAREDCLKRVSSEPVLSVQEKGVLLKRKLSLLEQDVIVNEDGRNKLKKQGAYGDIPEELIDVSDFECSLCMRLFFEPVTTPCGHSFCKNCLERCLDHAPYCPLCKESLKEYLADRRYCVTQLLEELIVKYLPDELSERKKIYDEETAELSHLTKNVPIFVCTMAYPTVPCPLHVFEPRYRLMIRRSIQTGTKQFGMCVSDTQNSFADYGCMLQIRNVHFLPDGRSVVDTVGGKRFRVLKRGMKDGYCTADIEYLEDVKVENEDEIKNLRELHDLVYSQACSWFQNLRDRFRSQILQHFGSMPEREENLQAAPNGPAWCWWLLAVLPVDPRYQLSVLSMKSLKERLTKIQHILTYFSRDQSK

SEQ ID NO: 812630 - protein, 199 aa, Homo sapiens
MAYPTVPCPLHVFEPRYRLMIRRSIQTGTKQFGMCVSDTQNSFADYGCMLQIRNVHFLPDGRSVVDTVGGKRFRVLKRGMKDGYCTADIEYLEDVKVENEDEIKNLRELHDLVYSQACSWFQNLRDRFRSQILQHFGSMPEREENLQAAPNGPAWCWWLLAVLPVDPRYQLSVLSMKSLKERLTKIQHILTYFSRDQSK

SEQ ID NO: 812631 - protein, 601 aa, Homo sapiens; identical to SEQ ID NO: 812627

SEQ ID NO: 812632 - protein, 601 aa, Homo sapiens; identical to SEQ ID NO: 812627

SEQ ID NO: 812633 - protein, 601 aa, Homo sapiens; identical to SEQ ID NO: 812627

SEQ ID NO: 812634 - protein, 570 aa, Homo sapiens
MPGETEEPRPPEQQDQEGGEAAKAAPEEPQQRPPEAVAAAPAGTTSSRVLRGGRDRGRAAAAAAAAAVSRRRKAEYPRRRRSSPSARPPDVPGQQPQAAKSPSPVQGKKSPRLLCIEKVTTDKDPKEEKEEEDDSALPQEVSIAASRPSRGWRSSRTSVSRHRDTENTRSSRSKTGSLQLICKSEPNTDQLDYDVGEEHQSPGGISSEEEEEEEEEMLISEEEIPFKDDPRDETYKPHLERETPKPRRKSGKVKEEKEKKEIKVEVEVEVKEEENEIREDEEPPRKRGRRRKDDKSPRLPKRRKKPPIQYVRCEMEGCGTVLAHPRYLQHHIKYQHLLKKKYVCPHPSCGRLFRLQKQLLRHAKHHTDQRDYICEYCARAFKSSHNLAVHRMIHTGEKPLQCEICGFTCRQKASLNWHMKKHDADSFYQFSCNICGKKFEKKDSVVAHKAKSHPEVLIAEALAANAGALITSTDILGTNPESLTQPSDGQGLPLLPEPLGNSTSGECLLLEAEGMSKSYCSGTERVSLMADGKIFVGSGSSGGTEGLVMNSDILGATTEVLIEDSDSAGP

SEQ ID NO: 812635 - protein, 721 aa, Homo sapiens
MPGETEEPRPPEQQDQEGGEAAKAAPEEPQQRPPEAVAAAPAGTTSSRVLRGGRDRGRAAAAAAAAAVSRRRKAEYPRRRRSSPSARPPDVPGQQPQAAKSPSPVQGKKSPRLLCIEKVTTDKDPKEEKEEEDDSALPQEVSIAASRPSRGWRSSRTSVSRHRDTENTRSSRSKTGSLQLICKSEPNTDQLDYDVGEEHQSPGGISSEEEEEEEEEMLISEEEIPFKDDPRDETYKPHLERETPKPRRKSGKVKEEKEKKEIKVEVEVEVKEEENEIREDEEPPRKRGRRRKDDKSPRLPKRRKKPPIQYVRCEMEGCGTVLAHPRYLQHHIKYQHLLKKKYVCPHPSCGRLFRLQKQLLRHAKHHTDQRDYICEYCARAFKSSHNLAVHRMIHTGEKPLQCEICGFTCRQKASLNWHMKKHDADSFYQFSCNICGKKFEKKDSVVAHKAKSHPEVLIAEALAANAGALITSTDILGTNPESLTQPSDGQGLPLLPEPLGNSTSGECLLLEAEGMSKSYCSGTERSIHLLTPHRRDLCSRSIWLARKIRSDLTALTESYVKHQGLNKNINLDSADGMPVASTDQWSELTEAERLQENLQAYRTFHVLLARLLEDQQVHFTPTEGDFHQAIHTLLLQVAAFAYQIEELMILLEYKIPRNEADGMPINVGDGGLFEKKLWGLKVLQELSQWTVRSIHDLRFISSHQTGIPARGSHYIANNKKM

SEQ ID NO: 812636 - protein, 570 aa, Homo sapiens; identical to SEQ ID NO: 812634

SEQ ID NO: 812637 - protein, 570 aa, Homo sapiens; identical to SEQ ID NO: 812634

SEQ ID NO: 812638 - protein, 570 aa, Homo sapiens; identical to SEQ ID NO: 812634

SEQ ID NO: 812639 - protein, 255 aa, Homo sapiens
MPGETEEPRPPEQQDQEGGEAAKAAPEEPQQRPPEAVAAAPAGTTSSRVLRGGRDRGRAAAAAAAAAVSRRRKAEYPRRRRSSPSARPPDVPGQQPQAAKSPSPVQGKKSPRLLCIEKVTTDKDPKEEKEEEDDSALPQEVSIAASRPSRGWRSSRTSVSRHRDTENTRSSRSKTGSLQLICKSEPNTDQLDYDVGEEHQSPGGISSEEEEEEEEEMLISEEEIPFKDDPRDETYKPHLERHVSDFTADMLMKYK

SEQ ID NO: 812640 - protein, 570 aa, Homo sapiens; identical to SEQ ID NO: 812634

SEQ ID NO: 812641 - protein, 570 aa, Homo sapiens; identical to SEQ ID NO: 812634

SEQ ID NO: 812642 - protein, 466 aa, Homo sapiens [sequence omitted]

SEQ ID NO: 812643 - protein, 354 aa, Homo sapiens
MLISEEEIPFKDDPRDETYKPHLERETPKPRRKSGKVKEEKEKKEIKVEVEVEVKEEENEIREDEEPPRKRGRRRKDDKSPRLPKRRKKPPIQYVRCEMEGCGTVLAHPRYLQHHIKYQHLLKKKYVCPHPSCGRLFRLQKQLLRHAKHHTDQRDYICEYCARAFKSSHNLAVHRMIHTGEKPLQCEICGFTCRQKASLNWHMKKHDADSFYQFSCNICGKKFEKKDSVVAHKAKSHPEVLIAEALAANAGALITSTDILGTNPESLTQPSDGQGLPLLPEPLGNSTSGECLLLEAEGMSKSYCSGTERVSLMADGKIFVGSGSSGGTEGLVMNSDILGATTEVLIEDSDSAGP

SEQ ID NO: 812644 - protein, 570 aa, Homo sapiens; identical to SEQ ID NO: 812634

SEQ ID NO: 812645 - protein, 256 aa, Homo sapiens [sequence omitted]

SEQ ID NO: 812646 - protein, 570 aa, Homo sapiens; identical to SEQ ID NO: 812634

SEQ ID NO: 812647 - protein, 380 aa, Homo sapiens
MPGETEEPRPPEQQDQEGGEAAKAAPEEPQQRPPEAVAAAPAGTTSSRVLRGGRDRGRAAAAAAAAAVSRRRKAEYPRRRRSSPSARPPDVPGQQPQAAKSPSPVQGKKSPRLLCIEKVTTDKDPKEEKEEEDDSALPQEVSIAASRPSRGWRSSRTSVSRHRDTENTRSSRSKTGSLQLICKSEPNTDQLDYDVGEEHQSPGGISSEEEEEEEEEMLISEEEIPFKDDPRDETYKPHLERETPKPRRKSGKVKEEKEKKEIKVEVEVEVKEEENEIREDEEPPRKRGRRRKDDKSPRLPKRRKKPPIQYVRCEMEGCGTVLAHPRYLQHHIKYQHLLKKKYVCPHPSCGRLFRLQKQLLRHAKHHTVYSHIQTRTPPCR

SEQ ID NO: 812648 - protein, 286 aa, Homo sapiens
MPGETEEPRPPEQQDQEGGEAAKAAPEEPQQRPPEAVAAAPAGTTSSRVLRGGRDRGRAAAAAAAAAVSRRRKAEYPRRRRSSPSARPPDVPGQQPQAAKSPSPVQGKKSPRLLCIEKVTTDKDPKEEKEEEDDSALPQEVSIAASRPSRGWRSSRTSVSRHRDTENTRSSRSKTGSLQLICKSEPNTDQLDYDVGEEHQSPGGISSEEEEEEEEEMLISEEEIPFKDDPRDETYKPHLERETPKPRRKSGKVKEEKEKKEIKVEVEVEVKEEENEIREDEEPPRK

SEQ ID NO: 812649 - protein, 255 aa, Homo sapiens; identical to SEQ ID NO: 812639

SEQ ID NO: 812650 - protein, 214 aa, Homo sapiens
EAWYQRRGPITAVGPTAMAEPVQEELSVLAAIFCRPHEWEVLSRSETDGTVFRIHTKAEGFMDADIPLELVFHLPVNYPSCLPGISINSEQLTRAQCVTVKEKLLEQAESLLSEPMVHELVLWIQQNLRHILSQPETGSGSEKCTFSTSTTMDDGLWITLLHLDHMRAKTKYVKIVEKWASDLRLTGRLMFMGKIILILLQGDRNNLKVPVSGI

SEQ ID NO: 812651 - protein, 286 aa, Homo sapiens
EAWYQRRGPITAVGPTAMAEPVQEELSVLAAIFCRPHEWEVLSRSETDGTVFRIHTKAEGFMDADIPLELVFHLPVNYPSCLPGISINSEQLTRAQCVTVKEKLLEQAESLLSEPMVHELVLWIQQNLRHILSQPETGSGSEKCTFSTSTTMDDGLWITLLHLDHMRAKTKYVKIVEKWASDLRLTGRLMFMGKIILILLQGDRNNLKVPEYLILQKTSKVDVDSSGKKCKEKMISVLFETKVQTEHKRFLAFEVKEYSALDELQKEFETAGLKKLFSEFVLALVK

SEQ ID NO: 812652 - protein, 214 aa, Homo sapiens; identical to SEQ ID NO: 812650

SEQ ID NO: 812653 - protein, 227 aa, Homo sapiens
RAVLLLAGGGGGCGSGRGSAEAVGPTAMAEPVQEELSVLAAIFCRPHEWEVLSRSETDGTVFRIHTKAEGFMDADIPLELVFHLPVNYPSCLPGISINSEQLTRAQCVTVKEKLLEQAESLLSEPMVHELVLWIQQNLRHILSQPETGSGSEKCTFSTSTTMDDGLWITLLHLDHMRAKTKYVKIVEKWASDLRLTGRLMFMGVLDSSENLQSRCGLKWKEMQREND

SEQ ID NO: 812654 - protein, 429 aa, Homo sapiens
MEINTKLLISVTCISFFTFQLLFYFVSYWFSAKVSPGFNSLSFKKKIEWNSRVVSTCHSLVVGIFGLYIFLFDEATKADPLWGGPSLANVNIAIASGYLISDLSIIILYWKVIGDKFFIMHHCASLYAYYLVLKNGVLAYIGNFRLLAELSSPFVNQRPKAVVTGNMDLFSSLTLHLSTLSLQSPANNKTDGTVFRIHTKAEGFMDADIPLELVFHLPVNYPSCLPGISINSEQLTRAQCVTVKEKLLEQAESLLSEPMVHELVLWIQQNLRHILSQPETGSGSEKCTFSTSTTMDDGLWITLLHLDHMRAKTKYVKIVEKWASDLRLTGRLMFMGKIILILLQGDRNNLKVPEYLILQKTSKVDVDSSGKKCKEKMISVLFETKVQTEHKRFLAFEVKEYSALDELQKEFETAGLKKLFSEFVLALVK

SEQ ID NO: 812655 - protein, 225 aa, Homo sapiens
MDADIPLELVFHLPVNYPSCLPGISINSEQLTRAQCVTVKEKLLEQAESLLSEPMVHELVLWIQQNLRHILSQPETGSGSEKCTFSTSTTMDDGLWITLLHLDHMRAKTKYVKIVEKWASDLRLTGRLMFMGKIILILLQGDRNNLKVPEYLILQKTSKVDVDSSGKKCKEKMISVLFETKVQTEHKRFLAFEVKEYSALDELQKEFETAGLKKLFSEFVLALVK

SEQ ID NO: 812656 - protein, 355 aa, Homo sapiens
MEINTKLLISVTCISFFTFQLLFYFVSYWFSAKVSPGFNSLSFKKKIEWNSRVVSTCHSLVVGIFGLYIFLFDEATKADPLWGGPSLANVNIAIASGYLISDLSIIILYWKVIGDKFFIMHHCASLYAYYLVLKNGVLAYIGNFRLLAELSSPFVNQRPKAVVTGNMDLFSSLTLHLSTLSLQSPANNKTDGTVFRIHTKAEGFMDADIPLELVFHLPVNYPSCLPGISINSEQLTRAQCVTVKEKLLEQAESLLSEPMVHELVLWIQQNLRHILSQPETGSGSEKCTFSTSTTMDDGLWITLLHLDHMRAKTKYVKIVEKWASDLRLTGRLMFMGKIILILLQGDRNNLKVPKS

SEQ ID NO: 812657 - protein, 384 aa, Homo sapiens
GSMVSTQRAHYGGGAHSHGGACAGGALGPGRDFLQAPRVGGAEPLRPENNTETKLKTDHMRATDSTYVNNRGQAGLPDLKADRHRLHVHWELPDFFTQTPPTAEHVDLNVEKTTAPRTTDLALLLRPHTRYPTEHNKVSRHSRTVTSRYFSRSELNSTNTTDPPEHPARTPRNAFFLPHILVPCLPVHTDTRKRPANSFPATPSRQRPTPPAPRRICALSAGDAALHLAPLAHTPHHALPLPRPPLHHGPSLPKPPRGHPKPSYSSLMRNITHPLASEPPRSIILHASAPGPRGPSATATQCTHPPHSNPPTHAPPTRLRPPCSPPPPPIPTQPPAPRTQCSAPRRIPPPVIHTHPPPPPPTTTPAHPHTQPRPAPPPPPPPPP

SEQ ID NO: 812658 - protein, 429 aa, Homo sapiens; identical to SEQ ID NO: 812654

SEQ ID NO: 812659 - protein, 360 aa, Homo sapiens
MEINTKLLISVTCISFFTFQLLFYFVSYWFSAKVSPGFNSLSFKKKIEWNSRVVSTCHSLVVGIFGLYIFLFDEATKADPLWGGPSLANVNIAIASGYLISDLSIIILYWKVIGDKFFIMHHCASLYAYYLVLKNGVLAYIGNFRLLAELSSPFVNQRPKAVVTGNMDLFSSLTLHLSTLSLQSPANNKTDGTVFRIHTKAEGFMDADIPLELVFHLPVNYPSCLPGISINSEQLTRAQCVTVKEKLLEQAESLLSEPMVHELVLWIQQNLRHILSQPETGSGSEKCTFSTSTTMDDGLWITLLHLDHMRAKTKYVKIVEKWASDLRLTGRLMFMGVLDSSENLQSRCGLKWKEMQREND

SEQ ID NO: 812660 - protein, 429 aa, Homo sapiens; identical to SEQ ID NO: 812654

SEQ ID NO: 812661 - protein, 254 aa, Homo sapiens
MFLSCGSLHQRGPETDGTVFRIHTKAEGFMDADIPLELVFHLPVNYPSCLPGISINSEQLTRAQCVTVKEKLLEQAESLLSEPMVHELVLWIQQNLRHILSQPETGSGSEKCTFSTSTTMDDGLWITLLHLDHMRAKTKYVKIVEKWASDLRLTGRLMFMGKIILILLQGDRNNLKVPEYLILQKTSKVDVDSSGKKCKEKMISVLFETKVQTEHKRFLAFEVKEYSALDELQKEFETAGLKKLFSEFVLALVK

SEQ ID NO: 812662 - protein, 263 aa, Homo sapiens
MEINTKLLISVTCISFFTFQLLFYFVSYWFSAKVSPGFNSLSFKKKIEWNSRVVSTCHSLVVGIFGLYIFLFDEATKADPLWGGPSLANVNIAIASGYLISDLSIIILYWKVIGDKFFIMHHCASLYAYYLVLKNGVLAYIGNFRLLAELSSPFVNQRWFFEALKYPKFSKAIVINGILMTVVFFIVRIASMLPHYGFMYSVYGTEPYIRLGVLIQLSWVISCVVLDVMNVMWMIKISKGCIKVISHIRQEKAKNSLQNGKLD

SEQ ID NO: 812663 - protein, 135 aa, Homo sapiens
EDVFGQLECTGPRATAMQPLEVGLVPAPAGEPRLTRWLRRGSGILAHLVALGFTIFLTALSRPGTKTGPLMEDRSEGGRARWVMPEIPKCCDYRREPPCLARSCFENLTVGDSGILPKPAGRCAKACSELIIIIS

SEQ ID NO: 812664 - protein, 754 aa, Homo sapiens
MWKLLPAAGPAGGEPYRLLTGVEYVVGRKNCAILIENDQSISRNHAVLTANFSVTNLSQTDEIPVLTLKDNSKYGTFVNEEKMQNGFSRTLKSGDGITFGVFGSKFRIEYEPLVACSSCLDVSGKTALNQAILQLGGFTVNNWTEECTHLVMVSVKVTIKTICALICGRPIVKPEYFTEFLKAVESKKQPPQIESFYPPLDEPSIGSKNVDLSGRQERKQIFKGKTFIFLNAKQHKKLSSAVVFGGGEARLITEENEEEHNFFLAPGTCVVDTGITNSQTLIPDCQKKWIQSIMDMLQRQGLRPIPEAEIGLAVIFMTTKNYCDPQGHPSTGLKTTTPGPSLSQGVSVDEKLMPSAPVNTTTYVADTESEQADTWDLSERPKEIKVSKMEQKFRMLSQDAPTVKESCKTSSNNNSMVSNTLAKMRIPNYQLSPTKLPSINKSKDRASQQQQTNSIRNYFQPSTKKRERDEENQEMSSCKSARIETSCSLLEQTQPATPSLWKNKEQHLSENEPVDTNSDNNLFTDTDLKSIVKNSASKSHAAEKLRSNKKREMDDVAIEDEVLEQLFKDTKPELEIDVKVQKQEEDVNVRKRPRMDIETNDTFSDEAVPESSKISQENEIGKKRELKEDSLWSAKEISNNDKLQDDSEMLPKKLLLTEFRSLVIKNSTSRNPSGINDDYGQLKNFKKFKKVTYPGAGKLPHIIGGSDLIAHHARKNTELEEWLRQEMEVQNQHAKEESLADDLFRYNPYLKRRR

SEQ ID NO: 812665 - protein, 672 aa, Homo sapiens
MQNGFSRTLKSGDGITFGVFGSKFRIEYEPLVACSSCLDVSGKTALNQAILQLGGFTVNNWTEECTHLVMVSVKVTIKTICALICGRPIVKPEYFTEFLKAVESKKQPPQIESFYPPLDEPSIGSKNVDLSGRQERKQIFKGKTFIFLNAKQHKKLSSAVVFGGGEARLITEENEEEHNFFLAPGTCVVDTGITNSQTLIPDCQKKWIQSIMDMLQRQGLRPIPEAEIGLAVIFMTTKNYCDPQGHPSTGLKTTTPGPSLSQGVSVDEKLMPSAPVNTTTYVADTESEQADTWDLSERPKEIKVSKMEQKFRMLSQDAPTVKESCKTSSNNNSMVSNTLAKMRIPNYQLSPTKLPSINKSKDRASQQQQTNSIRNYFQPSTKKRERDEENQEMSSCKSARIETSCSLLEQTQPATPSLWKNKEQHLSENEPVDTNSDNNLFTDTDLKSIVKNSASKSHAAEKLRSNKKREMDDVAIEDEVLEQLFKDTKPELEIDVKVQKQEEDVNVRKRPRMDIETNDTFSDEAVPESSKISQENEIGKKRELKEDSLWSAKEISNNDKLQDDSEMLPKKLLLTEFRSLVIKNSTSRNPSGINDDYGQLKNFKKFKKVTYPGAGKLPHIIGGSDLIAHHARKNTELEEWLRQEMEVQNQHAKEESLADDLFRYNPYLKRRR

SEQ ID NO: 812666 - protein, 603 aa, Homo sapiens
MVSVKVTIKTICALICGRPIVKPEYFTEFLKAVESKKQPPQIESFYPPLDEPSIGSKNVDLSGRQERKQIFKGKTFIFLNAKQHKKLSSAVVFGGGEARLITEENEEEHNFFLAPGTCVVDTGITNSQTLIPDCQKKWIQSIMDMLQRQGLRPIPEAEIGLAVIFMTTKNYCDPQGHPSTGLKTTTPGPSLSQGVSVDEKLMPSAPVNTTTYVADTESEQADTWDLSERPKEIKVSKMEQKFRMLSQDAPTVKESCKTSSNNNSMVSNTLAKMRIPNYQLSPTKLPSINKSKDRASQQQQTNSIRNYFQPSTKKRERDEENQEMSSCKSARIETSCSLLEQTQPATPSLWKNKEQHLSENEPVDTNSDNNLFTDTDLKSIVKNSASKSHAAEKLRSNKKREMDDVAIEDEVLEQLFKDTKPELEIDVKVQKQEEDVNVRKRPRMDIETNDTFSDEAVPESSKISQENEIGKKRELKEDSLWSAKEISNNDKLQDDSEMLPKKLLLTEFRSLVIKNSTSRNPSGINDDYGQLKNFKKFKKVTYPGAGKLPHIIGGSDLIAHHARKNTELEEWLRQEMEVQNQHAKEESLADDLFRYNPYLKRRR

SEQ ID NO: 812667 - protein, 736 aa, Homo sapiens
MWKLLPAAGPAGGEPYRLLTGVEYVVGRKNCAILIENDQSISRNHAVLTANFSVTNLSQTDEIPVLTLKDNSKYGTFVNEEKMQNGFSRTLKSGDGITFGVFGSKFRIEYEPLVACSSCLDVSGKTALNQAILQLGGFTVNNWTEECTHLVMVSVKVTIKTICALICGRPIVKPEYFTEFLKAVESKKQPPQIESFYPPLDEPSIGSKNVDLSGRQERKQIFKGVFGGGEARLITEENEEEHNFFLAPGTCVVDTGITNSQTLIPDCQKKWIQSIMDMLQRQGLRPIPEAEIGLAVIFMTTKNYCDPQGHPSTGLKTTTPGPSLSQGVSVDEKLMPSAPVNTTTYVADTESEQADTWDLSERPKEIKVSKMEQKFRMLSQDAPTVKESCKTSSNNNSMVSNTLAKMRIPNYQLSPTKLPSINKSKDRASQQQQTNSIRNYFQPSTKKRERDEENQEMSSCKSARIETSCSLLEQTQPATPSLWKNKEQHLSENEPVDTNSDNNLFTDTDLKSIVKNSASKSHAAEKLRSNKKREMDDVAIEDEVLEQLFKDTKPELEIDVKVQKQEEDVNVRKRPRMDIETNDTFSDEAVPESSKISQENEIGKKRELKEDSLWSAKEISNNDKLQDDSEMLPKKLLLTEFRSLVIKNSTSRNPSGINDDYGQLKNFKKFKKVTYPGAGKLPHIIGGSDLIAHHARKNTELEEWLRQEMEVQNQHAKEESLADDLFRYNPYLKRRR

SEQ ID NO: 812668 - protein, 399 aa, Homo sapiens
MWKLLPAAGPAGGEPYRLLTGVEYVVGRKNCAILIENDQSISRNHAVLTANFSVTNLSQTDEIPVLTLKDNSKYGTFVNEEKMQNGFSRTLKSGDGITFGVFGSKFRIEYEPLVACSSCLDVSGKTALNQAILQLGGFTVNNWTEECTHLVMVSVKVTIKTICALICGRPIVKPEYFTEFLKAVESKKQPPQIESFYPPLDEPSIGSKNVDLSGRQERKQIFKGKTFIFLNAKQHKKLSSAVVFGGGEARLITEENEEEHNFFLAPGTCVVDTGITNSQTLIPDCQKKWIQSIMDMLQRQGLRPIPEAEIGLAVIFMTTKNYCDPQGHPSTGLKTTTPGPSLSQGVSVDEKLMPSAPVNTTTYVADTESEQADTWDLSERPKEIKVSKMEQKHQLNCQV

SEQ ID NO: 812669 - protein, 702 aa, Homo sapiens
MWKLLPAAGPAGGEPYRLLTGVEYVVGRKNCAILIENDQSISRNHAVLTANFSVTNLSQTDEIPVLTLKDNSKYGTFVNEEKMQNGFSRTLKSGDGITFGVFGSKFRIEYEPLVACSSCLDVSGKTALNQAILQLGGFTVNNWTEECTHLVMVSVKVTIKTICALICGRPIVKPEYFTEFLKAVESKKQPPQIESFYPPLDEPSIGSKNVDLSGRQERKQIFKGKTFIFLNAKQHKKLSSAVVFGGGEARLITEENEEEHNFFLAPGTCVVDTGITNSQTLIPDCQKKWIQSIMDMLQRQGLRPIPEAEIGLAVIFMTTKNYCDPQGHPSTGLKTTTPGPSLSQGVSVDEKLMPSAPVNTTTYVADTESEQADTWDLSERPKEIKVSKMEQKFRMLSQDAPTVKESCKTSSNNNSMVSNTLAKMRIPNYQLSPTKLPSINKSKDRASQQQQTNSIRNYFQPSTKKRERDEENQEMSSCKSARIETSCSLLEQTQPATPSLWKNKEQHLSENEPVDTNSDNNLFTDTDLKSIVKNSASKSHAAEKLRSNKKREMDDVAIEDEVLEQLFKDTKPELEIDVKVQKQEEDVNVRKRPRMDIETNDTFSDEAVPESSKISQENEIGKKRELKEDSLWSAKEISVTYPGAGKLPHIIGGSDLIAHHARKNTELEEWLRQEMEVQNQHAKEESLADDLFRYNPYLKRRR

SEQ ID NO: 812670 - protein, 151 aa, Homo sapiens
SQLNAYASQGFSPTSSSHLGRSASFHFTPRHRTIANNDKLQDDSEMLPKKLLLTEFRSLVIKNSTSRNPSGINDDYGQLKNFKKFKKVTYPGAGKLPHIIGGSDLIAHHARKNTELEEWLRQEMEVQNQHAKEESLADDLFRYNPYLKRRR

SEQ ID NO: 812671 - protein, 754 aa, Homo sapiens; identical to SEQ ID NO: 812664

SEQ ID NO: 812672 - protein, 374 aa, Homo sapiens
MWKLLPAAGPAGGEPYRLLTGVEYVVGRKNCAILIENDQSISRNHAVLTANFSVTNLSQTDEIPVLTLKDNSKYGTFVNEEKMQNGFSRTLKSGDGITFGVFGSKFRIEYEPLVACSSCLDVSGKTALNQAILQLGGFTVNNWTEECTHLVMVSVKVTIKTICALICGRPIVKPEYFTEFLKAVESKKQPPQIESFYPPLDEPSIGSKNVDLSGRQERKQIFKGKTFIFLNAKQHKKLSSAVVFGGGEARLITEENEEEHNFFLAPGTCVVDTGITNSQTLIPDCQKKWIQSIMDMLQRQGLRPIPEAEIGLAVIFMTTKNYCDPQGHPSTGLKTTTPGPSLSQGVSVDEKLMPSAPVNTTTYVADTESEQADT

SEQ ID NO: 812673 - protein, 221 aa, Homo sapiens
SWAPSLGDSAPPDFLRATGDRAEPSVYWAAVTLRFQMKMFESADSTATRSGQDLWAEICSCLPNPEQEDGANNAFSDSFVDSCPEGEGQREVADFAVQPAVKPWAPLQDSEVYLASLEKKLRRIKGLNQEVTSKDMLRTLAQAKKECWDRFLQEKLASEFFVDGLDSDESTLEHFKRWLQPDKVAVSTEEVQYLIPPESQVEKPVAEDEPAAGDKPAAAEQ

SEQ ID NO: 812674 - protein, 170 aa, Homo sapiens
SWAPSLGDSAPPDFLRATGDRAEPSVYWAAVTLRFQMKMFESADSTATRSGQDLWAEICSCLPNPEQEDGANNAFSDSFVDSCPEGEGQREVADFAVQPAVKPWAPLQDSEVYLASLEKKLRRIKGLNQEVTSKDMLRTLAQAKKECWDRFLQEKLASEFFVDGLDSDER

SEQ ID NO: 812675 - protein, 135 aa, Homo sapiens
SWAPSLGDSAPPDFLRATGDRAEPSVYWAAVTLRFQMKMFESADSTATRSGQDLWAEICSCLPNPEQEDGANNAFSDSFVDSCPEGEGQREVADFAVQPAVKPWAPLQDSEVYLASLARRAGDAADPRPGAARRR

SEQ ID NO: 812676 - protein, 154 aa, Homo sapiens
SWAPSLGDSAPPDFLRATGDRAEPSVYWAAVTLRFQMKMFESADSTATRSGQDLWAEICSCLPNPEQEDGANNAFSDSFVDSCPEGEGQREVADFAVQPAVKPWAPLQDSEVYLASLAILFEKYFLTSDVAGAGRRGGPETLQTRDPEQLGGGE

SEQ ID NO: 812677 - protein, 221 aa, Homo sapiens; identical to SEQ ID NO: 812673

SEQ ID NO: 812678 - protein, 221 aa, Homo sapiens; identical to SEQ ID NO: 812673

SEQ ID NO: 812679 - protein, 183 aa, Homo sapiens
MFESADSTATRSGQDLWAEICSCLPNPEQEDGANNAFSDSFVDSCPEGEGQREVADFAVQPAVKPWAPLQDSEVYLASLEKKLRRIKGLNQEVTSKDMLRTLAQAKKECWDRFLQEKLASEFFVDGLDSDESTLEHFKRWLQPDKVAVSTEEVQYLIPPESQVEKPVAEDEPAAGDKPAAAEQ

SEQ ID NO: 812680 - protein, 221 aa, Homo sapiens; identical to SEQ ID NO: 812673

SEQ ID NO: 812681 - protein, 183 aa, Homo sapiens; identical to SEQ ID NO: 812679

SEQ ID NO: 812682 - protein, 170 aa, Homo sapiens; identical to SEQ ID NO: 812674

SEQ ID NO: 812683 - protein, 183 aa, Homo sapiens
SWAPSLGDSAPPDFLRATGDRAEPSVYWAAVTLRFQMKMFESADSTATRSGQDLWAEICSCLPNPEQEDGANNAFSDSFVDSCPEGEGQREVADFAVQPAVKPWAPLQDSEVYLASLEKKLRRIKGLNQEVTSKDMLRTLAQAKKECWDRFLQEKLASEFFVDGLDSDERFELHWSTDRQSFF

SEQ ID NO: 812684 - protein, 116 aa, Homo sapiens
NHFSSAAISYQPYSIIRQLKPNNIYIKSRKQGKVIWDWQTGVDKMIHILGFVGYVLFLLHIPLLFFKQYLKNVKTIFSVWTSLLTAGQEQPHHDRNAGICSPTARNTKSIPESTSR

SEQ ID NO: 812685 - protein, 105 aa, Homo sapiens
MSGEVSWMQAVCAGTRAPATDEVAGVHRSLLRSSRGFQGRLTRFLGRRFMTAEFLLEDPSSGSLIPQESSWKTRACEGSAAAPRQPDSQPRTAGVDMHGSLDAIS

SEQ ID NO: 812686 - protein, 105 aa, Homo sapiens; identical to SEQ ID NO: 812685

SEQ ID NO: 812687 - protein, 242 aa, Homo sapiens
LSTWNQVVLLQGPPGTGKTFLCKALAHKLTIKLSSRYWYGQLIEINSPNLFSKRFSEIDKLITKTFQKIQDLIDYKDALAFSLIDEIESLTATHNESHSGAIGMVNAVLTQINQIKRHFNVVIPATSNITVKIDMAFVDRSDIKQYISLRSAAAIFKIYVFCLEELVKCQVIYPPQQLLTLQKLEMIGFIENNVSKLSFLLSDISKKIEGLHGQFLRKLLFLVHTLCVQATPGFLSGRGQAG

SEQ ID NO: 812688 - protein, 105 aa, Homo sapiens
MAPKAKKEAPAPPKAEAKAKALKAKKAVLKGVHSHKKKKIRTSPPPSGGPKTLRLRRQPQISLGRALPRRNKLDPPMPIIKFPLTTESAHEEDRRQQHTCVHCGC

SEQ ID NO: 812689 - protein, 105 aa, Homo sapiens; identical to SEQ ID NO: 812688

SEQ ID NO: 812690 - protein, 105 aa, Homo sapiens; identical to SEQ ID NO: 812688

SEQ ID NO: 812691 - protein, 105 aa, Homo sapiens; identical to SEQ ID NO: 812688

SEQ ID NO: 812692 - protein, 106 aa, Homo sapiens
ISERAAKKEAPAPPKAEAKAKALKAKKAVLKGVHSHKKKKIRTSPPPSGGPKTLRLRRQPQISLGRALPRRNKLDPPMPIIKFPLTTESAHEEDRRQQHTCVHCGC

SEQ ID NO: 812693 - protein, 107 aa, Homo sapiens
MARYEAGGEGAPAPPKAEAKAKALKAKKAVLKGVHSHKKKKIRTSPPPSGGPKTLRLRRQPQISLGRALPRRNKLDPPMPIIKFPLTTESAHEEDRRQQHTCVHCGC

SEQ ID NO: 812694 - protein, 105 aa, Homo sapiens; identical to SEQ ID NO: 812688

SEQ ID NO: 812695 - protein, 105 aa, Homo sapiens; identical to SEQ ID NO: 812688

SEQ ID NO: 812696 - protein, 105 aa, Homo sapiens; identical to SEQ ID NO: 812688

SEQ ID NO: 812697 - protein, 105 aa, Homo sapiens; identical to SEQ ID NO: 812688

SEQ ID NO: 812698 - protein, 105 aa, Homo sapiens; identical to SEQ ID NO: 812688

SEQ ID NO: 812699 - protein, 105 aa, Homo sapiens; identical to SEQ ID NO: 812688

SEQ ID NO: 812700 - protein, 105 aa, Homo sapiens; identical to SEQ ID NO: 812688

SEQ ID NO: 812701 - protein, 105 aa, Homo sapiens; identical to SEQ ID NO: 812688

SEQ ID NO: 812702 - protein, 106 aa, Homo sapiens
HWLELMSRASPAPPKAEAKAKALKAKKAVLKGVHSHKKKKIRTSPPPSGGPKTLRLRRQPQISLGRALPRRNKLDPPMPIIKFPLTTESAHEEDRRQQHTCVHCGC

SEQ ID NO: 812703 - protein, 105 aa, Homo sapiens; identical to SEQ ID NO: 812688

SEQ ID NO: 812704 - protein, 105 aa, Homo sapiens; identical to SEQ ID NO: 812688

SEQ ID NO: 812705 - protein, 105 aa, Homo sapiens; identical to SEQ ID NO: 812688

SEQ ID NO: 812706 - protein, 105 aa, Homo sapiens; identical to SEQ ID NO: 812688

SEQ ID NO: 812707 - protein, 116 aa, Homo sapiens
  misc_feature (5)..(5): Xaa can be any naturally occurring amino acid
MAARXRQKGSQMAPKAKKEAPAPPKAEAKAKALKAKKAVLKGVHSHKKKKIRTSPPPSGGPKTLRLRRQPQISLGRALPRRNKLDPPMPIIKFPLTTESAHEEDRRQQHTCVHCGC

SEQ ID NO: 812708 - protein, 105 aa, Homo sapiens; identical to SEQ ID NO: 812688

SEQ ID NO: 812709 - protein, 82 aa, Homo sapiens
ERERERERETLRLRRVGDVPSAAGRWVKTLRLRRQPQISLGRALPRRNKLDPPMPIIKFPLTTESAHEEDRRQQHTCVHCGC

SEQ ID NO: 812710 - protein, 106 aa, Homo sapiens; identical to SEQ ID NO: 812692

SEQ ID NO: 812711 - protein, 105 aa, Homo sapiens; identical to SEQ ID NO: 812688

SEQ ID NO: 812712 - protein, 105 aa, Homo sapiens; identical to SEQ ID NO: 812688

SEQ ID NO: 812713 - protein, 105 aa, Homo sapiens; identical to SEQ ID NO: 812688

SEQ ID NO: 812714 - protein, 77 aa, Homo sapiens
PVAAQPHQKKKIRTSPPPSGGPKTLRLRRQPQISLGRALPRRNKLDPPMPIIKFPLTTESAHEEDRRQQHTCVHCGC

SEQ ID NO: 812715 - protein, 105 aa, Homo sapiens; identical to SEQ ID NO: 812688

SEQ ID NO: 812716 - protein, 105 aa, Homo sapiens; identical to SEQ ID NO: 812688

SEQ ID NO: 812717 - protein, 105 aa, Homo sapiens; identical to SEQ ID NO: 812688

SEQ ID NO: 812718 - protein, 105 aa, Homo sapiens; identical to SEQ ID NO: 812688

SEQ ID NO: 812719 - protein, 105 aa, Homo sapiens; identical to SEQ ID NO: 812688

SEQ ID NO: 812720 - protein, 105 aa, Homo sapiens; identical to SEQ ID NO: 812688

SEQ ID NO: 812721 - protein, 466 aa, Homo sapiens
MELRKLYGPLCGYYLGRRMFIVISEPDMIKQVLVENFSNFTNRMASGLEFKSVADSVLFLRDKRWEEVRGALMSAFSPEKLNEMVPLISQACDLLLAHLKRYAESGDAFDIQRCYCNYTTDVVASVAFGTPVDSWQAPEDPFVKHCKRFFEFCIPRPILVLLLSFPSIMVPLARILPNKNRDELNGFFNKLIRNVIALRDQQAAEERRRDFLQMVLDARHSASPMGVQDFDIVRDVFSSTGCKPNPSRQHQPSPMARPLTVDEIVGQAFIFLIAGYEIITNTLSFATYLLATNPDCQEKLLREVDVFKEKHMAPEFCSLEEGLPYLDMVIAETLRMYPPAFRFTREAAQDCEVLGQRIPAGAVLEMAVGALHHDPEHWPSPETFNPERFTAEARQQHRPFTYLPFGAGPRSCLGVRLGLLEVKLTLLHVLHKFRFQACPETQVPLQLESKSALGPKNGVYIKIVSR

SEQ ID NO: 812722 - protein, 99 aa, Homo sapiens
SERAGLDPAGARLRAQRSRAGLQRGPQNFVCVCARARVCAQVRGFARVLAGREPTRKRAPRWQSGSPISQPVGARGGSQNISCLLLTLCCPQHTRTLDG

SEQ ID NO: 812723 - protein, 69 aa, Homo sapiens
SERAGLDPAGARLRAQRSRAGLQRGPQNFVCAGGEGTDPKESPTLAKWLAHLTAGWRSRRRHILPGLPG

SEQ ID NO: 812724 - protein, 533 aa, Homo sapiens
MEALGFLKLEVNGPMVTVALSVALLALLKWYSTSAFSRLEKLGLRHPKPSPFIGNLTFFRQGFWESQMELRKLYGPLCGYYLGRRMFIVISEPDMIKQVLVENFSNFTNRMASGLEFKSVADSVLFLRDKRWEEVRGALMSAFSPEKLNEMVPLISQACDLLLAHLKRYAESGDAFDIQRCYCNYTTDVVASVAFGTPVDSWQAPEDPFVKHCKRFFEFCIPRPILVLLLSFPSIMVPLARILPNKNRDELNGFFNKLIRNVIALRDQQAAEERRRDFLQMVLDARHSASPMGVQDFDIVRDVFSSTGCKPNPSRQHQPSPMARPLTVDEIVGQAFIFLIAGYEIITNTLSFATYLLATNPDCQEKLLREVDVFKEKHMAPEFCSLEEGLPYLDMVIAETLRMYPPAFRFTREAAQDCEVLGQRIPAGAVLEMAVGALHHDPEHWPSPETFNPERFTAEARQQHRPFTYLPFGAGPRSCLGVRLGLLEVKLTLLHVLHKFRFQACPETQVPLQLESKSALGPKNGVYIKIVSR

SEQ ID NO: 812725 - protein, 533 aa, Homo sapiens; identical to SEQ ID NO: 812724

SEQ ID NO: 812726 - protein, 533 aa, Homo sapiens; identical to SEQ ID NO: 812724

SEQ ID NO: 812727 - protein, 533 aa, Homo sapiens; identical to SEQ ID NO: 812724

SEQ ID NO: 812728 - protein, 459 aa, Homo sapiens
MEALGFLKLEVNGPMVTVALSVALLALLKWYSTSAFSRLEKLGLRHPKPSPFIGNLTFFRQGFWESQMELRKLYGPLCGYYLGRRMFIVISEPDMIKQVLVENFSNFTNRMASGLEFKSVADSVLFLRDKRWEEVRGALMSAFSPEKLNEMVPLISQACDLLLAHLKRYAESGDAFDIQRCYCNYTTDVVASVAFGTPVDSWQAPEDPFVKHCKRFFEFCIPRPILVLLLSFPSIMVPLARILPNKNRDELNGFFNKLIRNVIALRDQQAAEERRRDFLQMVLDARHSASPMGVQDFDIVRDVFSSTGCKPNPSRQHQPSPMARPLTVDEIVGQAFIFLIAGYEIITNTLSFATYLLATNPDCQEKLLREVDVFKEKHMAPEFCSLEEGLPYLDMVIAETLRMYPPAFRFTREAAQDCEVLGQRIPAGAVLEMAVGALHHDPEHWPSPETFNPERYRCS

SEQ ID NO: 812729 - protein, 459 aa, Homo sapiens; identical to SEQ ID NO: 812728

SEQ ID NO: 812730 - protein, 459 aa, Homo sapiens; identical to SEQ ID NO: 812728

SEQ ID NO: 812731 - protein, 533 aa, Homo sapiens; identical to SEQ ID NO: 812724

SEQ ID NO: 812732 - protein, 391 aa, Homo sapiens [sequence omitted]

SEQ ID NO: 812733 - protein, 514 aa, Homo sapiens
MVLHISILKTGEVRPQTSQAFSFHWKLDIFPPGFLGKPNGAQKAVWTSVWVRRKLNVSIMYYLGRRMFIVISEPDMIKQVLVENFSNFTNRMASGLEFKSVADSVLFLRDKRWEEVRGALMSAFSPEKLNEMVPLISQACDLLLAHLKRYAESGDAFDIQRCYCNYTTDVVASVAFGTPVDSWQAPEDPFVKHCKRFFEFCIPRPILVLLLSFPSIMVPLARILPNKNRDELNGFFNKLIRNVIALRDQQAAEERRRDFLQMVLDARHSASPMGVQDFDIVRDVFSSTGCKPNPSRQHQPSPMARPLTVDEIVGQAFIFLIAGYEIITNTLSFATYLLATNPDCQEKLLREVDVFKEKHMAPEFCSLEEGLPYLDMVIAETLRMYPPAFRFTREAAQDCEVLGQRIPAGAVLEMAVGALHHDPEHWPSPETFNPERFTAEARQQHRPFTYLPFGAGPRSCLGVRLGLLEVKLTLLHVLHKFRFQACPETQVPLQLESKSALGPKNGVYIKIVSR

SEQ ID NO: 812734 - protein, 195 aa, Homo sapiens
SPPPPAAAAAAAGLGVNKSRRLRTRARGGRRPPGAPPTPRPAHPGGPGPARPGEALGSLCSPWAAPRVGPLPPAPAMVRISKPKTFQAYLDDCHRRYSCAHCRAHLANHDDLISKSFQGSQGRAYLFNSVVNVGCGPAEERVLLTGLHAVADIHCENCKTTLGWKYEQAFESSQKYKEGKYIIELNHMIKDNGWD

SEQ ID NO: 812735 - protein, 137 aa, Homo sapiens
MCVAQVLTAHLLPPRQALGSLCSPWAAPRVGPLPPAPAMVRISKPKTFQAYLDDCHRRYSCAHCRAHLANHDDLISKSFQGSQGRAYLFNSVVNVGCGPAEERVLLTGLHAVADIHCENCKTTLGWKYVSHPPLTPG

SEQ ID NO: 812736 - protein, 100 aa, Homo sapiens
MRGLSGARAADKRGSLYSSPPEHASQRHPLPRSAPGLDPPTPPLRGPQAGMRAGLGRAGRSRISGPAGAGGGGGAVGACAGRRVTRPLICMRSAHWPRRP

SEQ ID NO: 812737 - protein, 119 aa, Homo sapiens
MVRISKPKTFQAYLDDCHRRYSCAHCRAHLANHDDLISKSFQGSQGRAYLFNSVVNVGCGPAEERVLLTGLHAVADIHCENCKTTLGWKYEQAFESSQKYKEGKYIIELNHMIKDNGWD

SEQ ID NO: 812738 - protein, 119 aa, Homo sapiens; identical to SEQ ID NO: 812737

SEQ ID NO: 812739 - protein, 126 aa, Homo sapiens
FGTSHDDLISNPSRAVRGVPTSSTQCEYLASLLAFPDLCCDLLTPGILLRLPEFPGAGRKLVNVGCGPAEERVLLTGLHAVADIHCENCKTTLGWKYEQAFESSQKYKEGKYIIELNHMIKDNGWD

SEQ ID NO: 812740 - protein, 161 aa, Homo sapiens
MCVAQVLTAHLLPPRQALGSLCSPWAAPRVGPLPPAPAMVRISKPKTFQAYLDDCHRRYSCAHCRAHLANHDDLISKSFQGSQGRAYLFNSVLSIWPPFLLSLTSVVTCDPWHPAETPRVPRCRQEIVSIISWMLRTDTVLEGVGPVMAGPSLGLPHVPTG

SEQ ID NO: 812741 - protein, 195 aa, Homo sapiens; identical to SEQ ID NO: 812734

SEQ ID NO: 812742 - protein, 195 aa, Homo sapiens; identical to SEQ ID NO: 812734

SEQ ID NO: 812743 - protein, 95 aa, Homo sapiens
QAGTVRSRMIDLISNSFQGSQGRAYLFNSVVNVGCGPAEERVLLTGLHAVADIHCENCKTTLGWKYEQAFESSQKYKEGKYIIELNHMIKDNGWD

SEQ ID NO: 812744 - protein, 157 aa, Homo sapiens
MCVAQVLTAHLLPPRQALGSLCSPWAAPRVGPLPPAPAMVRISKPKTFQAYLDDCHRRYSCAHCRAHLANHDDLISKSFQGSQGRAYLFNSVVNVGCGPAEERVLLTGLHAVADIHCENCKTTLGWKYEQAFESSQKYKEGKYIIELNHMIKDNGWD

SEQ ID NO: 812745 - protein, 132 aa, Homo sapiens
  misc_feature (37)..(37): Xaa can be any naturally occurring amino acid
MVAGISTCTNDCFNSHMIVTRVSSTEKVCTHDVPNVXVASTLTNHDGCSSQSPSRISLDVCYLFNSVVNVGCGPAEERVLLTGLHAVADIHCENCKTTLGWKYEQAFESSQKYKEGKYIIELNHMIKDNGWD

SEQ ID NO: 812746 - protein, 128 aa, Homo sapiens
MCVAQVLTAHLLPPRQALGSLCSPWAAPRVGPLPPAPAMVRISKPKTFQAYLDDCHRRYSCAHCRAHLANHDDLISKSFQGSQGRAYLFNSVVNVGCGPAEERVLLTGLHAVADIHCENCKTTLGWKY

SEQ ID NO: 812747 - protein, 195 aa, Homo sapiens; identical to SEQ ID NO: 812734

SEQ ID NO: 812748 - protein, 74 aa, Homo sapiens
SLSSSFPSVLQAIRKTICDWEGGREPPNDPCLRGEKDPKGGFDIKVPRRAVGPSSTQLYWCGPCLNHHQNLPVP

SEQ ID NO: 812749 - protein, 1300 aa, Homo sapiens
QRGRGGAERGAAERGRASCAPARGPAVASGPSPGPAAEPVQNTETAAMTTHVTLEDALSNVDLLEELPLPDQQPCIEPPPSSIMYQANFDTNFEDRNAFVTGIARYIEQATVHSSMNEMLEEGHEYAVMLYTWRSCSRAIPQVKCNEQPNRVEIYEKTVEVLEPEVTKLMKFMYFQRKAIERFCSEVKRLCHAERRKDFVSEAYLLTLGKFINMFAVLDELKNMKCSVKNDHSAYKRAAQFLRKMADPQSIQESQNLSMFLANHNRITQCLHQQLEVIPGYEELLADIVNICVDYYENKMYLTPSEKHMLLKVMGFGLYLMDGNVSNIYKLDAKKRINLSKIDKFFKQLQVVPLFGDMQIELARYIKTSAHYEENKSKWTCTQSSISPQYNICEQMVQIRDDHIRFISELARYSNSEVVTGSGLDSQKSDEEYRELFDLALRGLQLLSKWSAHVMEVYSWKLVHPTDKFCNKDCPGTAEEYERATRYNYTSEEKFAFVEVIAMIKGLQVLMGRMESVFNQAIRNTIYAALQDFAQVTLREPLRQAVRKKKNVLISVLQAIRKTICDWEGGREPPNDPCLRGEKDPKGGFDIKVPRRAVGPSSTQLYMVRTMLESLIADKSGSKKTLRSSLDGPIVLAIEDFHKQSFFFTHLLNISEALQQCCDLSQLWFREFFLELTMGRRIQFPIEMSMPWILTDHILETKEPSMMEYVLYPLDLYNDSAYYALTKFKKQFLYDEIEAEVNLCFDQFVYKLADQIFAYYKAMAGSVLLDKRFRAECKNYGVIIPYPPSNRYETLLKQRHVQLLGRSIDLNRLITQRISAAMYKSLDQAISRFESEDLTSIVELEWLLEINRLTHRLLCKHMTLDSFDAMFREANHNVSAPYGRITLHVFWELNFDFLPNYCYNGSTNRFVRTAIPFTQEPQRDKPANVQPYYLYGSKPLNIAYSHIYSSYRNFVGPPHFKTICRLLGYQGIAVVMEELLKIVKSLLQGTILQYVKTLIEVMPKICRLPRHEYGSPGILEFFHHQLKDIIEYAELKTDVFQSLREVGNAILFCLLIEQALSQEEVCDLLHAAPFQNILPRVYIKEGERLEVRMKRLEAKYAPLHLVPLIERLGTPQQIAIAREGDLLTKERLCCGLSMFEVILTRIRSYLQDPIWRGPPPTNGVMHVDECVEFHRLWSAMQFVYCIPVGTNEFTAEQCFGDGLNWAGCSIIVLLGQQRRFDLFDFCYHLLKVQRQDGKDEIIKNVPLKKMADRIRKYQILNNEVFAILNKYMKSVETDSSTVEHVRCFQPPIHQSLATTC

SEQ ID NO: 812750 - protein, 1300 aa, Homo sapiens; identical to SEQ ID NO: 812749

SEQ ID NO: 812751 - protein, 1253 aa, Homo sapiens
MTTHVTLEDALSNVDLLEELPLPDQQPCIEPPPSSIMYQANFDTNFEDRNAFVTGIARYIEQATVHSSMNEMLEEGHEYAVMLYTWRSCSRAIPQVKCNEQPNRVEIYEKTVEVLEPEVTKLMKFMYFQRKAIERFCSEVKRLCHAERRKDFVSEAYLLTLGKFINMFAVLDELKNMKCSVKNDHSAYKRAAQFLRKMADPQSIQESQNLSMFLANHNRITQCLHQQLEVIPGYEELLADIVNICVDYYENKMYLTPSEKHMLLKVMGFGLYLMDGNVSNIYKLDAKKRINLSKIDKFFKQLQVVPLFGDMQIELARYIKTSAHYEENKSKWTCTQSSISPQYNICEQMVQIRDDHIRFISELARYSNSEVVTGSGLDSQKSDEEYRELFDLALRGLQLLSKWSAHVMEVYSWKLVHPTDKFCNKDCPGTAEEYERATRYNYTSEEKFAFVEVIAMIKGLQVLMGRMESVFNQAIRNTIYAALQDFAQVTLREPLRQAVRKKKNVLISVLQAIRKTICDWEGGREPPNDPCLRGEKDPKGGFDIKVPRRAVGPSSTQLYMVRTMLESLIADKSGSKKTLRSSLDGPIVLAIEDFHKQSFFFTHLLNISEALQQCCDLSQLWFREFFLELTMGRRIQFPIEMSMPWILTDHILETKEPSMMEYVLYPLDLYNDSAYYALTKFKKQFLYDEIEAEVNLCFDQFVYKLADQIFAYYKAMAGSVLLDKRFRAECKNYGVIIPYPPSNRYETLLKQRHVQLLGRSIDLNRLITQRISAAMYKSLDQAISRFESEDLTSIVELEWLLEINRLTHRLLCKHMTLDSFDAMFREANHNVSAPYGRITLHVFWELNFDFLPNYCYNGSTNRFVRTAIPFTQEPQRDKPANVQPYYLYGSKPLNIAYSHIYSSYRNFVGPPHFKTICRLLGYQGIAVVMEELLKIVKSLLQGTILQYVKTLIEVMPKICRLPRHEYGSPGILEFFHHQLKDIIEYAELKTDVFQSLREVGNAILFCLLIEQALSQEEVCDLLHAAPFQNILPRVYIKEGERLEVRMKRLEAKYAPLHLVPLIERLGTPQQIAIAREGDLLTKERLCCGLSMFEVILTRIRSYLQDPIWRGPPPTNGVMHVDECVEFHRLWSAMQFVYCIPVGTNEFTAEQCFGDGLNWAGCSIIVLLGQQRRFDLFDFCYHLLKVQRQDGKDEIIKNVPLKKMADRIRKYQILNNEVFAILNKYMKSVETDSSTVEHVRCFQPPIHQSLATTC

SEQ ID NO: 812752 - protein, 1253 aa, Homo sapiens; identical to SEQ ID NO: 812751

SEQ ID NO: 812753 - protein, 1325 aa, Homo sapiens
QRGRGGAERGAAERGRASCAPARGPAVASGPSPGPAAEPVQNTETAAMTTHVTLEDALSNVDLLEELPLPDQQPCIEPPPSSIMYQANFDTNFEDRNAFVTGIARYIEQATVHSSMNEMLEEGHEYAVMLYTWRSCSRAIPQVKCNEQPNRVEIYEKTVEVLEPEVTKLMKFMYFQRKAIERFCSEVKRLCHAERRKDFVSEAYLLTLGKFINMFAVLDELKNMKCSVKNDHSAYKRAAQFLRKMADPQSIQESQNLSMFLANHNRITQCLHQQLEVIPGYEELLADIVNICVDYYENKMYLTPSEKHMLLKVMGFGLYLMDGNVSNIYKLDAKKRINLSKIDKFFKQLQVVPLFGDMQIELARYIKTSAHYEENKSKWTCTQSSISPQYNICEQMVQIRDDHIRFISELARYSNSEVVTGSGLDSQKSDEEYRELFDLALRGLQLLSKWSAHVMEVYSWKLVHPTDKFCNKDCPGTAEEYERATRYNYTSEEKFAFVEVIAMIKGLQVLMGRMESVFNQAIRNTIYAALQDFAQVTLREPLRQAVRKKKNVLISVLQAIRKTICDWEGGREPPNDPCLRGEKDPKGGFDIKVPRRAVGPSSTQACQWSPRALFHPTGGTQGRRGCRSLLYMVRTMLESLIADKSGSKKTLRSSLDGPIVLAIEDFHKQSFFFTHLLNISEALQQCCDLSQLWFREFFLELTMGRRIQFPIEMSMPWILTDHILETKEPSMMEYVLYPLDLYNDSAYYALTKFKKQFLYDEIEAEVNLCFDQFVYKLADQIFAYYKAMAGSVLLDKRFRAECKNYGVIIPYPPSNRYETLLKQRHVQLLGRSIDLNRLITQRISAAMYKSLDQAISRFESEDLTSIVELEWLLEINRLTHRLLCKHMTLDSFDAMFREANHNVSAPYGRITLHVFWELNFDFLPNYCYNGSTNRFVRTAIPFTQEPQRDKPANVQPYYLYGSKPLNIAYSHIYSSYRNFVGPPHFKTICRLLGYQGIAVVMEELLKIVKSLLQGTILQYVKTLIEVMPKICRLPRHEYGSPGILEFFHHQLKDIIEYAELKTDVFQSLREVGNAILFCLLIEQALSQEEVCDLLHAAPFQNILPRVYIKEGERLEVRMKRLEAKYAPLHLVPLIERLGTPQQIAIAREGDLLTKERLCCGLSMFEVILTRIRSYLQDPIWRGPPPTNGVMHVDECVEFHRLWSAMQFVYCIPVGTNEFTAEQCFGDGLNWAGCSIIVLLGQQRRFDLFDFCYHLLKVQRQDGKDEIIKNVPLKKMADRIRKYQILNNEVFAILNKYMKSVETDSSTVEHVRCFQPPIHQSLATTC

SEQ ID NO: 812754 - protein, 1278 aa, Homo sapiens
MTTHVTLEDALSNVDLLEELPLPDQQPCIEPPPSSIMYQANFDTNFEDRNAFVTGIARYIEQATVHSSMNEMLEEGHEYAVMLYTWRSCSRAIPQVKCNEQPNRVEIYEKTVEVLEPEVTKLMKFMYFQRKAIERFCSEVKRLCHAERRKDFVSEAYLLTLGKFINMFAVLDELKNMKCSVKNDHSAYKRAAQFLRKMADPQSIQESQNLSMFLANHNRITQCLHQQLEVIPGYEELLADIVNICVDYYENKMYLTPSEKHMLLKVMGFGLYLMDGNVSNIYKLDAKKRINLSKIDKFFKQLQVVPLFGDMQIELARYIKTSAHYEENKSKWTCTQSSISPQYNICEQMVQIRDDHIRFISELARYSNSEVVTGSGLDSQKSDEEYRELFDLALRGLQLLSKWSAHVMEVYSWKLVHPTDKFCNKDCPGTAEEYERATRYNYTSEEKFAFVEVIAMIKGLQVLMGRMESVFNQAIRNTIYAALQDFAQVTLREPLRQAVRKKKNVLISVLQAIRKTICDWEGGREPPNDPCLRGEKDPKGGFDIKVPRRAVGPSSTQACQWSPRALFHPTGGTQGRRGCRSLLYMVRTMLESLIADKSGSKKTLRSSLDGPIVLAIEDFHKQSFFFTHLLNISEALQQCCDLSQLWFREFFLELTMGRRIQFPIEMSMPWILTDHILETKEPSMMEYVLYPLDLYNDSAYYALTKFKKQFLYDEIEAEVNLCFDQFVYKLADQIFAYYKAMAGSVLLDKRFRAECKNYGVIIPYPPSNRYETLLKQRHVQLLGRSIDLNRLITQRISAAMYKSLDQAISRFESEDLTSIVELEWLLEINRLTHRLLCKHMTLDSFDAMFREANHNVSAPYGRITLHVFWELNFDFLPNYCYNGSTNRFVRTAIPFTQEPQRDKPANVQPYYLYGSKPLNIAYSHIYSSYRNFVGPPHFKTICRLLGYQGIAVVMEELLKIVKSLLQGTILQYVKTLIEVMPKICRLPRHEYGSPGILEFFHHQLKDIIEYAELKTDVFQSLREVGNAILFCLLIEQALSQEEVCDLLHAAPFQNILPRVYIKEGERLEVRMKRLEAKYAPLHLVPLIERLGTPQQIAIAREGDLLTKERLCCGLSMFEVILTRIRSYLQDPIWRGPPPTNGVMHVDECVEFHRLWSAMQFVYCIPVGTNEFTAEQCFGDGLNWAGCSIIVLLGQQRRFDLFDFCYHLLKVQRQDGKDEIIKNVPLKKMADRIRKYQILNNEVFAILNKYMKSVETDSSTVEHVRCFQPPIHQSLATTC

SEQ ID NO: 812755 - protein, 1318 aa, Homo sapiens
QRGRGGAERGAAERGRASCAPARGPAVASGPSPGPAAEPVQNTETAAMTTHVTLEDALSNVDLLEELPLPDQQPCIEPPPSSIMYQANFDTNFEDRNAFVTGIARYIEQATVHSSMNEMLEEGHEYAVMLYTWRSCSRAIPQVKCNEQPNRVEIYEKTVEVLEPEVTKLMKFMYFQRKAIERFCSEVKRLCHAERRKDFVSEAYLLTLGKFINMFAVLDELKNMKCSVKNDHSAYKRAAQFLRKMADPQSIQESQNLSMFLANHNRITQCLHQQLEVIPGYEELLADIVNICVDYYENKMYLTPSEKHMLLKVMGFGLYLMDGNVSNIYKLDAKKRINLSKIDKFFKQLQVVPLFGDMQIELARYIKTSAHYEENKSKWTCTQSSISPQYNICEQMVQIRDDHIRFISELARYSNSEVVTGSGLDSQKSDEEYRELFDLALRGLQLLSKWSAHVMEVYSWKLVHPTDKFCNKDCPGTAEEYERATRYNYTSEEKFAFVEVIAMIKGLQVLMGRMESVFNQAIRNTIYAALQDFAQVTLREPLRQAVRKKKNVLISVLQAIRKTICDWEGGREPPNDPCLRGEKDPKGGFDIKVPRRAVGPSSTQLYMVRTMLESLIADKSGSKKTLRSSLDGPIVLAIEDFHKQSFFFTHLLNISEALQQCCDLSQLWFREFFLELTMGRRIQFPIEMSMPWILTDHILETKEPSMMEYVLYPLDLYNDSAYYALTKFKKQFLYDEIEAEVNLCFDQFVYKLADQIFAYYKAMAGSVLLDKRFRAECKNYGVIIPYPPSNRYETLLKQRHVQLLGRSIDLNRLITQRISAAMYKSLDQAISRFESEDLTSIVELEWLLEINRVTHRLLCKHMTLDSFDAMLTHRLLCKHMTLDSFDAMFREANHNVSAPYGRITLHVFWELNFDFLPNYCYNGSTNRFVRTAIPFTQEPQRDKPANVQPYYLYGSKPLNIAYSHIYSSYRNFVGPPHFKTICRLLGYQGIAVVMEELLKIVKSLLQGTILQYVKTLIEVMPKICRLPRHEYGSPGILEFFHHQLKDIIEYAELKTDVFQSLREVGNAILFCLLIEQALSQEEVCDLLHAAPFQNILPRVYIKEGERLEVRMKRLEAKYAPLHLVPLIERLGTPQQIAIAREGDLLTKERLCCGLSMFEVILTRIRSYLQDPIWRGPPPTNGVMHVDECVEFHRLWSAMQFVYCIPVGTNEFTAEQCFGDGLNWAGCSIIVLLGQQRRFDLFDFCYHLLKVQRQDGKDEIIKNVPLKKMADRIRKYQILNNEVFAILNKYMKSVETDSSTVEHVRCFQPPIHQSLATTC

SEQ ID NO: 812756 - protein, 1029 aa, Homo sapiens
QRGRGGAERGAAERGRASCAPARGPAVASGPSPGPAAEPVQNTETAAMTTHVTLEDALSNVDLLEELPLPDQQPCIEPPPSSIMYQANFDTNFEDRNAFVTGIARYIEQATVHSSMNEMLEEGHEYAVMLYTWRSCSRAIPQVKCNEQPNRVEIYEKTVEVLEPEVTKLMKFMYFQRKAIERFCSEVKRLCHAERRKDFVSEAYLLTLGKFINMFAVLDELKNMKCSVKNDHSAYKRAAQFLRKMADPQSIQESQNLSMFLANHNRITQCLHQQLEVIPGYEELLADIVNICVDYYENKMYLTPSEKHMLLKVMGFGLYLMDGNVSNIYKLDAKKRINLSKIDKFFKQLQVVPLFGDMQIELARYIKTSAHYEENKSKWTCTQSSISPQYNICEQMVQIRDDHIRFISELARYSNSEVVTGSGLDSQKSDEEYRELFDLALRGLQLLSKWSAHVMEVYSWKLVHPTDKFCNKDCPGTAEEYERATRYNYTSEEKFAFVEVIAMIKGLQVLMGRMESVFNQAIRNTIYAALQDFAQVTLREPLRQAVRKKKNVLISVLQAIRKTICDWEGGREPPNDPCLRGEKDPKGGFDIKVPRRAVGPSSTQLYMVRTMLESLIADKSGSKKTLRSSLDGPIVLAIEDFHKQSFFFTHLLNISEALQQCCDLSQLWFREFFLELTMGRRIQFPIEMSMPWILTDHILETKEPSMMEYVLYPLDLYNDSAYYALTKFKKQFLYDEIEAEVNLCFDQFVYKLADQIFAYYKAMAGSVLLDKRFRAECKNYGVIIPYPPSNRYETLLKQRHVQLLGRSIDLNRLITQRISAAMYKSLDQAISRFESEDLTSIVELEWLLEINRLTHRLLCKHMTLDSFDAMFREANHNVSAPYGRITLHVFWELNFDFLPNYCYNGSTNRFVRTAIPFTQEPQRDKPANVQPYYLYGSKPLNIAYSHIYSSYRNFVGPPHFKTICRLLGYQGIAVVMEELLKIVKSLLQGTILQYVKTLIEVMPKICPAPPGPSDRAAGDPSANRHCSRG

SEQ ID NO: 812757 - protein, 538 aa, Homo sapiens
MAGSVLLDKRFRAECKNYGVIIPYPPSNRYETLLKQRHVQLLGRSIDLNRLITQRISAAMYKSLDQAISRFESEDLTSIVELEWLLEINRLTHRLLCKHMTLDSFDAMFREANHNVSAPYGRITLHVFWELNFDFLPNYCYNGSTNRFVRTAIPFTQEPQRDKPANVQPYYLYGSKPLNIAYSHIYSSYRNFVGPPHFKTICRLLGYQGIAVVMEELLKIVKSLLQGTILQYVKTLIEVMPKICRLPRHEYGSPGILEFFHHQLKDIIEYAELKTDVFQSLREVGNAILFCLLIEQALSQEEVCDLLHAAPFQNILPRVYIKEGERLEVRMKRLEAKYAPLHLVPLIERLGTPQQIAIAREGDLLTKERLCCGLSMFEVILTRIRSYLQDPIWRGPPPTNGVMHVDECVEFHRLWSAMQFVYCIPVGTNEFTAEQCFGDGLNWAGCSIIVLLGQQRRFDLFDFCYHLLKVQRQDGKDEIIKNVPLKKMADRIRKYQILNNEVFAILNKYMKSVETDSSTVEHVRCFQPPIHQSLATTC

SEQ ID NO: 812758 - protein, 1246 aa, Homo sapiens
QRGRGGAERGAAERGRASCAPARGPAVASGPSPGPAAEPVQNTETAAMTTHVTLEDALSNVDLLEELPLPDQQPCIEPPPSSIMYQANFDTNFEDRNAFVTGIARYIEQATVHSSMNEMLEEGHEYAVMLYTWRSCSRAIPQVKCNEQPNRVEIYEKTVEVLEPEVTKLMKFMYFQRKAIERFCSEVKRLCHAERRKDFVSEAYLLTLGKFINMFAVLDELKNMKCSVKNDHSAYKRAAQFLRKMADPQSIQESQNLSMFLANHNRITQCLHQQLEVIPGYEELLADIVNICVDYYENKMYLTPSEKHMLLKVMGFGLYLMDGNVSNIYKLDAKKRINLSKIDKFFKQLQVVPLFGDMQIELARYIKTSAHYEENKSKWTCTQSSISPQYNICEQMVQIRDDHIRFISELARYSNSEVVTGSGLDSQKSDEEYRELFDLALRGLQLLSKWSAHVMEVYSWKLVHPTDKFCNKDCPGTAEEYERATRYNYTSEEKFAFVEVIAMIKGLQVLMGRMESVFNQAIRNTIYAALQDFAQVTLREPLRQAVRKKKNVLISVLQAIRKTICDWEGGREPPNDPCLRGEKDPKGGFDIKVPRRAVGPSSTQLYMVRTMLESLIADKSGSKKTLRSSLDGPIVLAIEDFHKQSFFFTHLLNISEALQQCCDLSQLWFREFFLELTMGRRIQFPIEMSMPWILTDHILETKEPSMMEYVLYPLDLYNDSAYYALTKFKKQFLYDEIEAEVNLCFDQFVYKLADQIFAYYKAMAGSVLLDKRFRAECKNYGVIIPYPPSNRYETLLKQRHVQLLGRSIDLNRLITQRISAAMYKSLDQAISRFESEDLTSIVELEWLLEINRLTHRLLCKHMTLDSFDAMFREANHNVSAPYGRITLHVFWELNFDFLPNYCYNGSTNRFVRTAIPFTQEPQRDKPANVQPYYLYGSKPLNIAYSHIYSSYRNFVGPPHFKTICRLLGYQGIAVVMEELLKIVKSLLQGTILQYVKTLIEVMPKICRLPRHEYGSPGILEFFHHQLKDIIEYAELKTDVFQSLREVGNAILFCLLIEQALSQEEVCDLLHAAPFQNILPRVYIKEGERLEVRMKRLEAKYAPLHLVPLIERLGTPQQIAIAREGDLLTKERLCCGLSMFEVILTRIRSYLQDPIWRGPPPTNGVMHVDECVEFHRLWSAMQFVYCIPVGTNEFTAEQCFGDGLNWAGCSIIVLLGQQRRFDLFDFCYHLLKVQRQDGKDEIIKNVP

SEQ ID NO: 812759 - protein, 1196 aa, Homo sapiens
QRGRGGAERGAAERGRASCAPARGPAVASGPSPGPAAEPVQNTETAAMTTHVTLEDALSNVDLLEELPLPDQQPCIEPPPSSIMYQANFDTNFEDRNAFVTGIARYIEQATVHSSMNEMLEEGHEYAVMLYTWRSCSRAIPQVKCNEQPNRVEIYEKTVEVLEPEVTKLMKFMYFQRKAIERFCSEVKRLCHAERRKDFVSEAYLLTLGKFINMFAVLDELKNMKCSVKNDHSAYKRAAQFLRKMADPQSIQESQNLSMFLANHNRITQCLHQQLEVIPGYEELLADIVNICVDYYENKMYLTPSEKHMLLKVMGFGLYLMDGNVSNIYKLDAKKRINLSKIDKFFKQLQVVPLFGDMQIELARYIKTSAHYEENKSKWTCTQSSISPQYNICEQMVQIRDDHIRFISELARYSNSEVVTGSGLDSQKSDEEYRELFDLALRGLQLLSKWSAHVMEVYSWKLVHPTDKFCNKDCPGTAEEYERATRYNYTSEEKFAFVEVIAMIKGLQVLMGRMESVFNQAIRNTIYAALQDFAQVTLREPLRQAVRKKKNVLISVLQAIRKTICDWEGGREPPNDPCLRGEKDPKGGFDIKVPRRAVGPSSTQLYMVRTMLESLIADKSGSKKTLRSSLDGPIVLAIEDFHKQSFFFTHLLNISEALQQCCDLSQLWFREFFLELTMGRRIQFPIEMSMPWILTDHILETKEPSMMEYVLYPLDLYNDSAYYALTKFKKQFLYDEIEAEVNLCFDQFVYKLADQIFAYYKAMAGSVLLDKRFRAECKNYGVIIPYPPSNRYETLLKQRHVQLLGRSIDLNRLITQRISAAMYKSLDQAISRFESEDLTSIVELEWLLEINRLTHRLLCKHMTLDSFDAMFREANHNVSAPYGRITLHVFWELNFDFLPNYCYNGSTNRFVRTAIPFTQEPQRDKPANVQPYYLYGSKPLNIAYSHIYSSYRNFVGPPHFKTICRLLGYQGIAVVMEELLKIVKSLLQGTILQYVKTLIEVMPKICRLPRHEYGSPGILEFFHHQLKDIIEYAELKTDVFQSLREVGNAILFCLLIEQALSQEEVCDLLHAAPFQNILPRVYIKEGERLEVRMKRLEAKYAPLHLVPLIERLGTPQQIAIAREGDLLTKERLCCGLSMFEVILTRIRSYLQDPIWRGPPPTNGVMHVDECVEFHRLWSAMQFVYCIPVGTNEFTAE

SEQ ID NO: 812760 - protein, 382 aa, Homo sapiens
PRVGLVLDRERRPFYLYGSKPLNIAYSHIYSSYRNFVGPPHFKTICRLLGYQGIAVVMEELLKIVKSLLQGTILQYVKTLIEVMPKICRLPRHEYGSPGILEFFHHQLKDIIEYAELKTDVFQSLREVGNAILFCLLIEQALSQEEVCDLLHAAPFQNILPRVYIKEGERLEVRMKRLEAKYAPLHLVPLIERLGTPQQIAIAREGDLLTKERLCCGLSMFEVILTRIRSYLQDPIWRGPPPTNGVMHVDECVEFHRLWSAMQFVYCIPVGTNEFTAEQCFGDGLNWAGCSIIVLLGQQRRFDLFDFCYHLLKVQRQDGKDEIIKNVPLKKMADRIRKYQILNNEVFAILNKYMKSVETDSSTVEHVRCFQPPIHQSLATTC

SEQ ID NO: 812761 - protein, 356 aa, Homo sapiens
RYKGQWITGNPQEGTLKMEWAGPGDCRGEKENRLMAQAKISKKYRPPCLLCPHTVLKHVPASAPDRGLGGLGSQPNMASDTFLNFPEPQFLLKSGAADPVPEAVVSLRFGHSVKWGQVLWNLNISPLTAPPRQEGGKQPGSKDCLPEVGGALYAYKAPLHLVPLIERLGTPQQIAIAREGDLLTKERLCCGLSMFEVILTRIRSYLQDPIWRGPPPTNGVMHVDECVEFHRLWSAMQFVYCIPVGTNEFTAEQCFGDGLNWAGCSIIVLLGQQRRFDLFDFCYHLLKVQRQDGKDEIIKNVPLKKMADRIRKYQILNNEVFAILNKYMKSVETDSSTVEHVRCFQPPIHQSLATTC

SEQ ID NO: 812762 - protein, 136 aa, Homo sapiens
MHVDECVEFHRLWSAMQFVYCIPVGTNEFTAEQCFGDGLNWAGCSIIVLLGQQRRFDLFDFCYHLLKVQRQDGKDEIIKNVPLKKMADRIRKYQILNNEVFAILNKYMKSVETDSSTVEHVRCFQPPIHQSLATTC

SEQ ID NO: 812763 - protein, 120 aa, Homo sapiens
KKKSKQGSLCFFFSPPSTILRTPSFTLFSIIVLLGQQRRFDLFDFCYHLLKVQRQDGKDEIIKNVPLKKMADRIRKYQILNNEVFAILNKYMKSVETDSSTVEHVRCFQPPIHQSLATTC

SEQ ID NO: 812764 - protein, 316 aa, Homo sapiens
QRGRGGAERGAAERGRASCAPARGPAVASGPSPGPAAEPVQNTETAAMTTHVTLEDALSNVDLLEELPLPDQQPCIEPPPSSIMYQANFDTNFEDRNAFVTGIARYIEQATVHSSMNEMLEEGHEYAVMLYTWRSCSRAIPQVKCNEQPNRVEIYEKTVEVLEPEVTKLMKFMYFQRKAIERFCSEVKRLCHAERRKDFVSEAYLLTLGKFINMFAVLDELKNMKCSVKNDHSAYKRAAQFLRKMADPQSIQESQNLSMFLANHNRITQCLHQQLEVIPGYEELLADIVNICVDYYENKMYLTPSEKHMLLKVKLP

SEQ ID NO: 812765 - protein, 96 aa, Homo sapiens
SKRRCVAQQDNELEQPALFDFCYHLLKVQRQDGKDEIIKNVPLKKMADRIRKYQILNNEVFAILNKYMKSVETDSSTVEHVRCFQPPIHQSLATTC

SEQ ID NO: 812766 - protein, 279 aa, Homo sapiens
QRGRGGAERGAAERGRASCAPARGPAVASGPSPGPAAEPVQNTETAAMTTHVTLEDALSNVDLLEELPLPDQQPCIEPPPSSIMYQANFDTNFEDRNAFVTGIARYIEQATVHSSMNEMLEEGHEYAVMLYTWRSCSRAIPQVKCNEQPNRVEIYEKTVEVLEPEVTKLMKFMYFQRKAIERFCSEVKRLCHAERRKDFVSEAYLLTLGKFINMFAVLDELKNMKCSVKNDHSAYKRAAQFLRKMADPQSIQESQNLSMFLANHNRITQVRADSLLGLA

SEQ ID NO: 812767 - protein, 256 aa, Homo sapiens
QRGRGGAERGAAERGRASCAPARGPAVASGPSPGPAAEPVQNTETAAMTTHVTLEDALSNVDLLEELPLPDQQPCIEPPPSSIMYQANFDTNFEDRNAFVTGIARYIEQATVHSSMNEMLEEGHEYAVMLYTWRSCSRAIPQVKCNEQPNRVEIYEKTVEVLEPEVTKLMKFMYFQRKAIERFCSEVKRLCHAERRKDFVSEAYLLTLGKFINMFAVLDELKNMKCSVKNDHSAYKRAAQLLRKMADPRCVGANLE

SEQ ID NO: 812768 - protein, 77 aa, Homo sapiens
IAFSPDELWLASAGYSRMVKVWDCNTGKCLETLKQGVLDVAHTCAFTPDGKILVSGAADQTRRQISRTSKSPRDPQT

SEQ ID NO: 812769 - protein, 1016 aa, Homo sapiens
MLDNRQQLLRKRHIGNDIVTIVFQEPGALPFTPKSIRSHFQHVFVIVKVHNPCTENVCYSVGVSRSKDVPPFGPPIPKGVTFPKSAVFRDFLLAKVINAENAAHKSEKFRAMATRTRQEYLKDLAENFVTTATVDTSVKFSFITLGAKKKEKVKPRKDAHLFSIGAIMWHVIARDFGQSADIECLLGISNEFIMLIEKDSKNVVFNCSCRDVIGWTSGLVSIKVFYERGECVLLSSVDNCAEDIREIVQRLVIVTRGCETVEMTLRRNGLGQLGFHVNFEGIVADVEPFGFAWKAGLRQGSRLVEICKVAVATLTHEQMIDLLRTSVTVKVVIIQPHDDGSPRRGCSELCRIPMVEYKLDSEGTPCEYKTPFRRNTTWHRVPTPALQPLSRASPIPGTPDRLPCQQLLQQAQAAIPRSTSFDRKLPDGTRSSPSNQSSSSDPGPGGSGPWRPQVGYDGCQSPLLLEHQGSGPLECDGAREREDTMEASRHPETKWHGPPSKVLGSYKERALQKDGSCKDSPNKLSHIGDKSCSSHSSSNTLSSNTSSNSDDKHFGSGDLMDPELLGLTYIKGASTDSGIDTAPCMPATILGPVHLAGSRSLIHSRAEQWADAADVSGPDDEPAKLYSVHGYASTISAGSAAEGSMGDLSEISSHSSGSHHSGSPSAHCSKSSGSLDSSKVYIVSHSSGQQVPGSMSKPYHRQGAVNKYVIGWKKSEGSPPPEEPEVTECPGMYSEMDVMSTATQHQTVVGDAVAETQHVLSKEDFLKLMLPDSPLVEEGRRKFSFYGNLSPRRSLYRTLSDESICSNRRGSSFGSSRSSVLDQALPNDILFSTTPPYHSTLPPRAHPAPSMGSLRNEFWFSDGSLSDKSKCADPGLMPLPDTATGLDWTHLVDAARAFEDQRVASFCTLTDMQHGQDLEGAQELPLCVDPGSGKEFMDTTGERSPSPLTGKVNQLELILRQLQTDLRKEKQDKAVLQAEVQHLRQDNMRLQEESQTATAQLRKFTEWFFTTIDKKS

SEQ ID NO: 812770 - protein, 1016 aa, Homo sapiens; identical to SEQ ID NO: 812769

SEQ ID NO: 812771 - protein, 1016 aa, Homo sapiens; identical to SEQ ID NO: 812769

SEQ ID NO: 812772 - protein, 731 aa, Homo sapiens
MLDNRQQLLRKRHIGNDIVTIVFQEPGALPFTPKSIRSHFQHVFVIVKVHNPCTENVCYSVGVSRSKDVPPFGPPIPKGVTFPKSAVFRDFLLAKVINAENAAHKSEKFRAMATRTRQEYLKDLAENFVTTATVDTSVKFSFITLGAKKKEKVKPRKDAHLFSIGAIMWHVIARDFGQSADIECLLGISNEFIMLIEKDSKNVVFNCSCRDVIGWTSGLVSIKVFYERGECVLLSSVDNCAEDIREIVQRLVIVTRGCETVEMTLRRNGLGQLGFHVNFEGIVADVEPFGFAWKAGLRQGSRLVEICKVAVATLTHEQMIDLLRTSVTVKVVIIQPHDDGSPRRGCSELCRIPMVEYKLDSEGTPCEYKTPFRRNTTWHRVPTPALQPLSRASPIPGTPDRLPCQQLLQQAQAAIPRSTSFDRKLPDGTRSSPSNQSSSSDPGPGGSGPWRPQVGYDGCQSPLLLEHQGSGPLECDGAREREDTMEASRHPETKWHGPPSKVLGSYKERALQKDGSCKDSPNKLSHIGDKSCSSHSSSNTLSSNTSSNSDDKHFGSGDLMDPELLGLTYIKGASTDSGIDTAPCMPATILGPVHLAGSRSLIHSRAEQWADAADVSGPDDEPAKLYSVHGYASTISAGSAAEGSMGDLSEISSHSSGSHHSGSPSAHCSKSSGSLDSSKVYIVSHSSGQQVPGSMSKPYHRQGAVNKYVIGWKKSEGSPPPEEPEVTECPG

SEQ ID NO: 812773 - protein, 67 aa, Homo sapiens
GGMNVSISLHDSVYFYSDQEKQDKAVLQAEVQHLRQDNMRLQEESQTATAQLRKFTEWFFTTIDKKS

SEQ ID NO: 812774 - protein, 991 aa, Homo sapiens
MLDNRQQLLRKRHIGNDIVTIVFQEPGALPFTPKSIRSHFQHVFVIVKVHNPCTENVCYSVGVSRSKDVPPFGPPIPKGVTFPKSAVFRDFLLAKVINAENAAHKSEKFRAMATRTRQEYLKDLAENFVTTATVDTSVKFSFITLGAKKKEKVKPRKDAHLFSIGAIMWHVIARDFGQSADIECLLGISNEFIMLIEKDSKNVVFNCSCRDVIGWTSGLVSIKVFYERGECVLLSSVDNCAEDIREIVQRLVIVTRGCETVEMTLRRNGLGQLGFHVNFEGIVADVEPFGFAWKAGLRQGSRLVEICKVAVATLTHEQMIDLLRTSVTVKVVIIQPHDDGSPRRGCSELCRIPMVEYKLDSEGTPCEYKTPFRRNTTWHRVPTPALQPLSRASPIPGTPDRLPCQQLLQQAQAAIPRSTSFDRKLPDGTRSSPSNQSSSSDPGPGGSGPWRPQVGYDGCQSPLLLEHQGSGPLECDGAREREDTMEASRHPETKWHGPPSKVLGSYKERALQKDGSCKDSPNKLSHIGDKSCSSHSSSNTLSSNTSSNSDDKHFGSGDLMDPELLGLTYIKGASTDSGIDTAPCMPATILGPVHLAGSRSLIHSRAEQWADAADVSGPDDEPAKLYSVHGYASTISAGSAAEGSMGDLSEISSHSSGSHHSGSPSAHCSKSSGSLDSSKVYIVSHSSGQQVPGSMSKPYHRQGAVNKYVIGWKKSEGSPPPEEPEVTECPGMYSEMDVMSTATQHQTVVGDAVAETQHVLSKEDFLKLMLPDSPLVEEGRRKFSFYGNLSPRRSLYRTLSDESICSNRRGSSFGSSRSSVLDQALPNDILFSTTPPYHSTLPPRAHPAPSMGSLRNEFWFSDGSLSDKSKCADPGLMPLPDTATGLDWTHLVDAARAFEDQRVASFCTLTDMQHGQDLEGAQELPLCVDPGSGKEFMDTTGERSPSPLTGKVNQLELILRQLQTDLRKVINWKSIIRTVSLIKSAPYNYYR

SEQ ID NO: 812775 - protein, 1016 aa, Homo sapiens; identical to SEQ ID NO: 812769

SEQ ID NO: 812776 - protein, 84 aa, Homo sapiens
GLEGPHTMLDNRQQLLRKRHIGNDIVTIVFQEPGALPFTPKSIRSHFQHVFVIVKVHNPCTENVCYSVGVSRSKDVPQAPGRRW

SEQ ID NO: 812777 - protein, 158 aa, Homo sapiens
ACSVVVQWPSQPCAPKHLEHIALQNFYLPASLPLAMACRCLSFLLMGTFLSVSQTVLAQLDALLVFPGQVAQLSCTLSPQHVTIRDYGVSWYQQRAGSAPRYLLYYRSEEDHHRPADIPDRFSAAKDEAHNACVLTISPVQPEDDADYYCSVGYGFSP

SEQ ID NO: 812778 - protein, 142 aa, Homo sapiens
ACSVVVQWPSQPCAPKHLEHIALQNFYLPASLPLAMACRCLSFLLMGTFLSGQVAQLSCTLSPQHVTIRDYGVSWYQQRAGSAPRYLLYYRSEEDHHRPADIPDRFSAAKDEAHNACVLTISPVQPEDDADYYCSVGYGFSP

SEQ ID NO: 812779 - protein, 36 aa, Homo sapiens
MYQHFIINYSFLVLCLSCFRTFSQVKSFLVLKLLVS

SEQ ID NO: 812780 - protein, 36 aa, Homo sapiens; identical to SEQ ID NO: 812779

SEQ ID NO: 812781 - protein, 1162 aa, Homo sapiens
MYLSICCCFLLWAPALTLKNLNYSVPEEQGAGTVIGNIGRDARLQPGLPPAERGGGGRSKSGSYRVLENSAPHLLDVDADSGLLYTKQRIDRESLCRHNAKCQLSLEVFANDKEICMIKVEIQDINDNAPSFSSDQIEMDISENAAPGTRFPLTSAHDPDAGENGLRTYLLTRDDHGLFGLDVKSRGDGTKFPELVIQKALDREQQNHHTLVLTALDGGEPPRSATVQINVKVIDSNDNSPVFEAPSYLVELPENAPLGTVVIDLNATDADEGPNGEVLYSFSSYVPDRVRELFSIDPKTGLIRVKGNLDYEENGMLEIDVQARDLGPNPIPAHCKVTVKLIDRNDNAPSIGFVSVRQGALSEAAPPGTVIALVRVTDRDSGKNGQLQCRVLGGGGTGGGGGLGGPGGSVPFKLEENYDNFYTVVTDRPLDRETQDEYNVTIVARDGGSPPLNSTKSFAIKILDENDNPPRFTKGLYVLQVHENNIPGEYLGSVLAQDPDLGQNGTVSYSILPSHIGDVSIYTYVSVNPTNGAIYALRSFNFEQTKAFEFKVLAKDSGAPAHLESNATVRVTVLDVNDNAPVIVLPTLQNDTAELQVPRNAGLGYLVSTVRALDSDFGESGRLTYEIVDGNDDHLFEIDPSSGEIRTLHPFWEDVTPVVELVVKVTDHGKPTLSAVAKLIIRSVSGSLPEGVPRVNGEQHHWDMSLPLIVTLSTISIILLAAMITIAVKCKRENKEIRTYNCRIAEYSHPQLGGGKGKKKKINKNDIMLVQSEVEERNAMNVMNVVSSPSLATSPMYFDYQTRLPLSSPRSEVMYLKPASNNLTVPQGHAGCHTSFTGQGTNASETPATRMSIIQTDNFPAEPNYMGSRQQFVQSISVAPRLRTQKEPAMRDSGHGDSDQADSDQDTNKGSCCDMSVREALKMKTTSTKSQPLEQEPEECVNCTDECRVLGHSDRCWMPQFPAANQAENADYRTNLFVPTVEANVETETYETVNPTGKKTFCTFGKDKREHTILIANVKPYLKAKRALSPLLQEVPSASSSPTKACIEPCTSTKGSLDGCEAKPGALAEASSQYLPTDSQYLSPSKQPRDPPFMASDQMARVFADVHSRASRDSSEMGAVLEQLDHPNRDLGRESVDAEEVVREIDKLLQDCRGNDPVAVRK

SEQ ID NO: 812782 - protein, 122 aa, Homo sapiens
DDPVAVRKLINFSHNFLCTTDSLPRSLAEASSQYLPTDSQYLSPSKQPRDPPFMASDQMARVFADVHSRASRDSSEMGAVLEQLDHPNRDLGRESVDAEEVVREIDKLLQDCRGNDPVAVRK

SEQ ID NO: 812783 - protein, 1162 aa, Homo sapiens; identical to SEQ ID NO: 812781

SEQ ID NO: 812784 - protein, 1162 aa, Homo sapiens; identical to SEQ ID NO: 812781

SEQ ID NO: 812785 - protein, 475 aa, Homo sapiens
MGMWASLDALWEMPAEKRIFGAVLLFSWTVYLWETFLAQRQRRIYKTTTHVPPELGQIMDSETFEKSRLYQLDKSTFSFWSGLYSETEGTLILLFGGIPYLWRLSGRFCGYAGFGPEYEITQSLVFLLLATLFSALTGLPWSLYNTFVIEEKHGFNQQTLGFFMKDAIKKFVVTQCILLPVSSLLLYIIKIGGDYFFIYAWLFTLVVSLVLVTIYADYIAPLFDKFTPLPEGKLKEEIEVMAKSIDFPLTKVYVVEGSKRSSHSNAYFYGFFKNKRIVLFDTLLEEYSVLNKDIQEDSGMEPRNEEEGNSEEIKAKVKNKKQGCKNEEVLAVLGHELGHWKLGHTVKNIIISQMNSFLCFFLFAVLIGRKELFAAFGFYDSQPTLIGLLIIFQFIFSPYNEVLSFCLTVLSRRFEFQADAFAKKLGKAKDLYSALIKLNKDNLGFPVSDWLFSMWHYSHPPLLERLQALKTMKQH

SEQ ID NO: 812786 - protein, 176 aa, Homo sapiens [sequence omitted]

SEQ ID NO: 812787 - protein, 281 aa, Homo sapiens
MGMWASLDALWEMPAEKRIFGAVLLFSWTVYLWETFLAQRQRRIYKTTTHVPPELGQIMDSETFEKSRLYQLDKSTFSFWSGLYSETEGTLILLFGGIPYLWRLSGRFCGYAGFGPEYEITQSLVFLLLATLFSALTGLPWSLYNTFVIEEKHGFNQQTLGFFMKDAIKKFVVTQCILLPVSSLLLYIIKIGGDYFFIYAWLFTLVVSLVLVTIYADYIAPLFDKFTPLPEGKLKEEIEVMAKSIDFPLTKVYVVEGSKRSSHSNAYFYGFFKNKRIVYAA

SEQ ID NO: 812788 - protein, 475 aa, Homo sapiens; identical to SEQ ID NO: 812785

SEQ ID NO: 812789 - protein, 475 aa, Homo sapiens; identical to SEQ ID NO: 812785

SEQ ID NO: 812790 - protein, 475 aa, Homo sapiens; identical to SEQ ID NO: 812785

SEQ ID NO: 812791 - protein, 773 aa, Homo sapiens
MSRRKQGKPQHLSKREFSPEPLEAILTDDEPDHGPLGAPEGDHDLLTCGQCQMNFPLGDILIFIEHKRKQCNGSLCLEKAVDKPPSPSPIEMKKASNPVEVGIQVTPEDDDCLSTSSRGICPKQEHIADKLLHWRGLSSPRSAHGALIPTPGMSAEYAPQGICKDEPSSYTCTTCKQPFTSAWFLLQHAQNTHGLRIYLESEHGSPLTPRVGIPSGLGAECPSQPPLHGIHIADNNPFNLLRIPGSVSREASGLAEGRFPPTPPLFSPPPRHHLDPHRIERLGAEEMALATHHPSAFDRVLRLNPMAMEPPAMDFSRRLRELAGNTSSPPLSPGRPSPMQRLLQPFQPGSKPPFLATPPLPPLQSAPPPSQPPVKSKSCEFCGKTFKFQSNLVVHRRSHTGEKPYKCNLCDHACTQASKLKRHMKTHMHKSSPMTVKSDDGLSTASSPEPGTSDLVGSASSALKSVVAKFKSENDPNLIPENGDEEEEEDDEEEEEEEEEEEEELTESERVDYGFGLSLEAARHHENSSRGAVVGVGDESRALPDVMQGMVLSSMQHFSEAFHQVLGEKHKRGHLAEAEGHRDTCDEDSVAGESDRIDDGTVNGRGCSPGESASGGLSKKLLLGSPSSLSPFSKRIKLEKEFDLPPAAMPNTENVYSQWLAGYAASRQLKDPFLSFGDSRQSPFASSSEHSSENGSLRFSTPPGELDGGISGRSGTGSGGSTPHISGPGPGRPSSKEGRRSDTCSSHTPIRRSTQRAQDVWQFSDGSSRALKF

SEQ ID NO: 812792 - protein, 243 aa, Homo sapiens
MSRRKQGKPQHLSKREFSPEPLEAILTDDEPDHGPLGAPEGDHDLLTCGQCQMNFPLGDILIFIEHKRKQCNGSLCLEKAVDKPPSPSPIEMKKASNPVEVGIQVTPEDDDCLSTSSRGICPKQEHIADKLLHWRGLSSPRSAHGALIPTPGMSAEYAPQGICKDEPSSYTCTTCKQPFTSAWFLLQHAQNTHGLRIYLESEHGSPLTPRVLHTPPFGVVPRELKMCGSFRMEAREPLSSEKI

SEQ ID NO: 812793 - protein, 801 aa, Homo sapiens
MSRRKQGKPQHLSKREFSPEPLEAILTDDEPDHGPLGAPEGDHDLLTCGQCQMNFPLGDILIFIEHKRKQCNGSLCLEKAVDKPPSPSPIEMKKASNPVEVGIQVTPEDDDCLSTSSRGICPKQEHIAGKDEPSSYTCTTCKQPFTSAWFLLQHAQNTHGLRIYLESEHGSPLTPRVGIPSGLGAECPSQPPLHGIHIADNNPFNLLRIPGSVSREASGLAEGRFPPTPPLFSPPPRHHLDPHRIERLGAEEMALATHHPSAFDRVLRLNPMAMEPPAMDFSRRLRELAGNTSSPPLSPGRPSPMQRLLQPFQPGSKPPFLATPPLPPLQSAPPPSQPPVKSKSCEFCGKTFKFQSNLVVHRRSHTGEKPYKCNLCDHACTQASKLKRHMKTHMHKSSPMTVKSDDGLSTASSPEPGTSDLVGSASSALKSVVAKFKSENDPNLIPENGDEEEEEDDEEEEEEEEEEEEELTESERVDYGFGLSLEAARHHENSSRGAVVGVGDESRALPDVMQGMVLSSMQHFSEAFHQVLGEKHKRGHLAEAEGHRDTCDEDSVAGESDRIDDGTVNGRGCSPGESASGGLSKKLLLGSPSSLSPFSKRIKLEKEFDLPPAAMPNTENVYSQWLAGYAASRQLKDPFLSFGDSRQSPFASSSEHSSENGSLRFSTPPGELDGGISGRSGTGSGGSTPHISGPGPGRPSSKEGRRSDTCEYCGKVFKNCSNLTVHRRSHTGERPYKCELCNYACAQSSKLTRHMKTHGQVGKDVYKCEICKMPFSVYSTLEKHMKKWHSDRVLNNDIKTE

SEQ ID NO: 812794 - protein, 683 aa, Homo sapiens
MSAEYAPQGICKDEPSSYTCTTCKQPFTSAWFLLQHAQNTHGLRIYLESEHGSPLTPRVGIPSGLGAECPSQPPLHGIHIADNNPFNLLRIPGSVSREASGLAEGRFPPTPPLFSPPPRHHLDPHRIERLGAEEMALATHHPSAFDRVLRLNPMAMEPPAMDFSRRLRELAGNTSSPPLSPGRPSPMQRLLQPFQPGSKPPFLATPPLPPLQSAPPPSQPPVKSKSCEFCGKTFKFQSNLVVHRRSHTGEKPYKCNLCDHACTQASKLKRHMKTHMHKSSPMTVKSDDGLSTASSPEPGTSDLVGSASSALKSVVAKFKSENDPNLIPENGDEEEEEDDEEEEEEEEEEEEELTESERVDYGFGLSLEAARHHENSSRGAVVGVGDESRALPDVMQGMVLSSMQHFSEAFHQVLGEKHKRGHLAEAEGHRDTCDEDSVAGESDRIDDGTVNGRGCSPGESASGGLSKKLLLGSPSSLSPFSKRIKLEKEFDLPPAAMPNTENVYSQWLAGYAASRQLKDPFLSFGDSRQSPFASSSEHSSENGSLRFSTPPGELDGGISGRSGTGSGGSTPHISGPGPGRPSSKEGRRSDTCEYCGKVFKNCSNLTVHRRSHTGERPYKCELCNYACAQSSKLTRHMKTHGQVGKDVYKCEICKMPFSVYSTLEKHMKKWHSDRVLNNDIKTE

SEQ ID NO: 812795 - protein, 730 aa, Homo sapiens
RPPPQPPQAQAPQPPPPPQLGGAGGGSSRHEKSLGLLTTKFVSLLQEAKDGVLDLKAGKDEPSSYTCTTCKQPFTSAWFLLQHAQNTHGLRIYLESEHGSPLTPRVGIPSGLGAECPSQPPLHGIHIADNNPFNLLRIPGSVSREASGLAEGRFPPTPPLFSPPPRHHLDPHRIERLGAEEMALATHHPSAFDRVLRLNPMAMEPPAMDFSRRLRELAGNTSSPPLSPGRPSPMQRLLQPFQPGSKPPFLATPPLPPLQSAPPPSQPPVKSKSCEFCGKTFKFQSNLVVHRRSHTGEKPYKCNLCDHACTQASKLKRHMKTHMHKSSPMTVKSDDGLSTASSPEPGTSDLVGSASSALKSVVAKFKSENDPNLIPENGDEEEEEDDEEEEEEEEEEEEELTESERVDYGFGLSLEAARHHENSSRGAVVGVGDESRALPDVMQGMVLSSMQHFSEAFHQVLGEKHKRGHLAEAEGHRDTCDEDSVAGESDRIDDGTVNGRGCSPGESASGGLSKKLLLGSPSSLSPFSKRIKLEKEFDLPPAAMPNTENVYSQWLAGYAASRQLKDPFLSFGDSRQSPFASSSEHSSENGSLRFSTPPGELDGGISGRSGTGSGGSTPHISGPGPGRPSSKEGRRSDTCEYCGKVFKNCSNLTVHRRSHTGERPYKCELCNYACAQSSKLTRHMKTHGQVGKDVYKCEICKMPFSVYSTLEKHMKKWHSDRVLNNDIKTE

SEQ ID NO: 812796 - protein, 243 aa, Homo sapiens; identical to SEQ ID NO: 812792

SEQ ID NO: 812797 - protein, 142 aa, Homo sapiens
MSRRKQGKPQHLSKREFSPEPLEAILTDDEPDHGPLGAPEGDHDLLTCGQCQMNFPLGDILIFIEHKRKQCNGSLCLEKAVDKPPSPSPIEMKKASNPVEVGIQVTPEDDDCLSTSSRGICPKQEHIAAQTELEDVFVYLMV

SEQ ID NO: 812798 - protein, 835 aa, Homo sapiens
MSRRKQGKPQHLSKREFSPEPLEAILTDDEPDHGPLGAPEGDHDLLTCGQCQMNFPLGDILIFIEHKRKQCNGSLCLEKAVDKPPSPSPIEMKKASNPVEVGIQVTPEDDDCLSTSSRGICPKQEHIADKLLHWRGLSSPRSAHGALIPTPGMSAEYAPQGICKDEPSSYTCTTCKQPFTSAWFLLQHAQNTHGLRIYLESEHGSPLTPRVGIPSGLGAECPSQPPLHGIHIADNNPFNLLRIPGSVSREASGLAEGRFPPTPPLFSPPPRHHLDPHRIERLGAEEMALATHHPSAFDRVLRLNPMAMEPPAMDFSRRLRELAGNTSSPPLSPGRPSPMQRLLQPFQPGSKPPFLATPPLPPLQSAPPPSQPPVKSKSCEFCGKTFKFQSNLVVHRRSHTGEKPYKCNLCDHACTQASKLKRHMKTHMHKSSPMTVKSDDGLSTASSPEPGTSDLVGSASSALKSVVAKFKSENDPNLIPENGDEEEEEDDEEEEEEEEEEEEELTESERVDYGFGLSLEAARHHENSSRGAVVGVGDESRALPDVMQGMVLSSMQHFSEAFHQVLGEKHKRGHLAEAEGHRDTCDEDSVAGESDRIDDGTVNGRGCSPGESASGGLSKKLLLGSPSSLSPFSKRIKLEKEFDLPPAAMPNTENVYSQWLAGYAASRQLKDPFLSFGDSRQSPFASSSEHSSENGSLRFSTPPGELDGGISGRSGTGSGGSTPHISGPGPGRPSSKEGRRSDTCEYCGKVFKNCSNLTVHRRSHTGERPYKCELCNYACAQSSKLTRHMKTHGQVGKDVYKCEICKMPFSVYSTLEKHMKKWHSDRVLNNDIKTE

SEQ ID NO: 812799 - protein, 773 aa, Homo sapiens; identical to SEQ ID NO: 812791

SEQ ID NO: 812800 - protein, 797 aa, Homo sapiens
MSKGTDEDIFSGVSFFLTRLSRCEPSRRPPAPQPTMSRRKQGKPQHLSKREFSPEPLEAILTDDEPDHGPLGAPEGDHDLLTCGQCQMNFPLGDILIFIEHKRKQCNGSLCLEKAVDKPPSPSPIEMKKASNPVEVGIQVTPEDDDCLSTSSRGICPKQEHIADKLLHWRGLSSPRSAHGALIPTPGMSAEYAPQGICKDEPSSYTCTTCKQPFTSAWFLLQHAQNTHGLRIYLESEHGSPLTPRVGIPSGLGAECPSQPPLHGIHIADNNPFNLLRIPGSVSREASGLAEGRFPPTPPLFSPPPRHHLDPHRIERLGAEEMALATHHPSAFDRVLRLNPMAMEPPAMDFSRRLRELAGNTSSPPLSPGRPSPMQRLLQPFQPGSKPPFLATPPLPPLQSAPPPSQPPVKSKSCEFCGKTFKFQSNLVVHRRSHTGEKPYKCNLCDHACTQASKLKRHMKTHMHKSSPMTVKSDDGLSTASSPEPGTSDLVGSASSALKSVVAKFKSENDPNLIPENGDEEEEEDDEEEEEEEEEEEEELTESERVDYGFGLSLEAVVGVGDESRALPDVMQGMVLSSMQHFSEAFHQVLGEKHKRGHLAEAEGHRDTCDEDSVAGESDRIDDGTVNGRGCSPGESASGGLSKKLLLGSPSSLSPFSKRIKLEKEFDLPPAAMPNTENVYSQWLAGYAASRQLKDPFLSFGDSRQSPFASSSEHSSENGSLRFSTPPGELDGGISGRSGTGSGGSTPHISGPGPGRPSSKEGRRSDTCSSHTPIRRSTQRAQDVWQFSDGSSRALKF

SEQ ID NO: 812801 - protein, 835 aa, Homo sapiens; identical to SEQ ID NO: 812798

SEQ ID NO: 812802 - protein, 830 aa, Homo sapiens
QTRRRRCEVTARPAEPLEAILTDDEPDHGPLGAPEGDHDLLTCGQCQMNFPLGDILIFIEHKRKQCNGSLCLEKAVDKPPSPSPIEMKKASNPVEVGIQVTPEDDDCLSTSSRGICPKQEHIADKLLHWRGLSSPRSAHGALIPTPGMSAEYAPQGICKDEPSSYTCTTCKQPFTSAWFLLQHAQNTHGLRIYLESEHGSPLTPRVGIPSGLGAECPSQPPLHGIHIADNNPFNLLRIPGSVSREASGLAEGRFPPTPPLFSPPPRHHLDPHRIERLGAEEMALATHHPSAFDRVLRLNPMAMEPPAMDFSRRLRELAGNTSSPPLSPGRPSPMQRLLQPFQPGSKPPFLATPPLPPLQSAPPPSQPPVKSKSCEFCGKTFKFQSNLVVHRRSHTGEKPYKCNLCDHACTQASKLKRHMKTHMHKSSPMTVKSDDGLSTASSPEPGTSDLVGSASSALKSVVAKFKSENDPNLIPENGDEEEEEDDEEEEEEEEEEEEELTESERVDYGFGLSLEAARHHENSSRGAVVGVGDESRALPDVMQGMVLSSMQHFSEAFHQVLGEKHKRGHLAEAEGHRDTCDEDSVAGESDRIDDGTVNGRGCSPGESASGGLSKKLLLGSPSSLSPFSKRIKLEKEFDLPPAAMPNTENVYSQWLAGYAASRQLKDPFLSFGDSRQSPFASSSEHSSENGSLRFSTPPGELDGGISGRSGTGSGGSTPHISGPGPGRPSSKEGRRSDTCEYCGKVFKNCSNLTVHRRSHTGERPYKCELCNYACAQSSKLTRHMKTHGQVGKDVYKCEICKMPFSVYSTLEKHMKKWHSDRVLNNDIKTE

SEQ ID NO: 812803 - protein, 142 aa, Homo sapiens; identical to SEQ ID NO: 812797

SEQ ID NO: 812804 - protein, 102 aa, Homo sapiens
MADDVDQQQTTNTVEEPLDLIRLSLDERIYVKMRNDRELRGRLHAYDQHLNMILGDVEETVTTIEIDEETYEEIYKSTKRNIPMLFVRGDGVVLVAPPLRVG

SEQ ID NO: 812805 - protein, 171 aa, Homo sapiens
KERTNRSSTLACFAAVDDCHKFTCQHNVHHGVRRRQPITMVIWCIDLEVEEKCALIEQVAHQTIVLTYIGWTDVDQQQTTNTVEEPLDLIRLSLDERIYVKMRNDRELRGRLHAYDQHLNMILGDVEETVTTIEIDEETYEEIYKSTKRNIPMLFVRGDGVVLVAPPLRVG

SEQ ID NO: 812806 - protein, 102 aa, Homo sapiens; identical to SEQ ID NO: 812804

SEQ ID NO: 812807 - protein, 102 aa, Homo sapiens; identical to SEQ ID NO: 812804

SEQ ID NO: 812808 - protein, 102 aa, Homo sapiens; identical to SEQ ID NO: 812804

SEQ ID NO: 812809 - protein, 102 aa, Homo sapiens; identical to SEQ ID NO: 812804

SEQ ID NO: 812810 - protein, 102 aa, Homo sapiens; identical to SEQ ID NO: 812804

SEQ ID NO: 812811 - protein, 102 aa, Homo sapiens; identical to SEQ ID NO: 812804

SEQ ID NO: 812812 - protein, 102 aa, Homo sapiens; identical to SEQ ID NO: 812804

SEQ ID NO: 812813 - protein, 201 aa, Homo sapiens
MSTEAQRVDDSPSTSGGSSDGDQRESVQQEPEREQVQPKKKEGKISSKTAAKLSTSAKRIQKELAEITLDPPPNCSAGPKGDNIYEWRSTILGPPGSVYEGGVFFLDITFSPDYPFKPPKVTFRTRIYHCNINSQGVICLDILKDNWSPALTISKVLLSICSLLTDCNPADPLVGSIATQYMTNRAEHDRMARQWTKRYAT

SEQ ID NO: 812814 - protein, 132 aa, Homo sapiens
ICMSYFSAGPKGDNIYEWRSTILGPPGSVYEGGVFFLDITFSPDYPFKPPKVTFRTRIYHCNINSQGVICLDILKDNWSPALTISKVLLSICSLLTDCNPADPLVGSIATQYMTNRAEHDRMARQWTKRYAT

SEQ ID NO: 812815 - protein, 280 aa, Homo sapiens
AAPHGRRGARALAVSPGRARRHAHSRVRARTAGRRRLPEVVASLSRTQGQPQRQPRAAASGAGAGTAGGGGSGGAEGSKMSTEAQRVDDSPSTSGGSSDGDQRESVQQEPEREQVQPKKKEGKISSKTAAKLSTSAKRIQKELAEITLDPPPNCSAGPKGDNIYEWRSTILGPPGSVYEGGVFFLDITFSPDYPFKPPKVTFRTRIYHCNINSQGVICLDILKDNWSPALTISKVLLSICSLLTDCNPADPLVGSIATQYMTNRAEHDRMARQWTKRYAT

SEQ ID NO: 812816 - protein, 110 aa, Homo sapiens
FAGLTLLTTIATRSKMSTEAQRVDDSPSTSGGSSDGDQRESVQQEPEREQVLIFLFLLNLEPFCDGMLSIFPSQFFLPPFLSPTLSFISHFIPLLISVNLKDLGFFPTSS

SEQ ID NO: 812817 - protein, 225 aa, Homo sapiens
MSTEAQRVDDSPSTSGGSSDGDQRESVQQEPEREQVQPKKKEGKISSKTAAKLSTSAKRIQKELAEITLDPPPNCSTNITLKGNAHSILNWIFGFWMPTSAGPKGDNIYEWRSTILGPPGSVYEGGVFFLDITFSPDYPFKPPKVTFRTRIYHCNINSQGVICLDILKDNWSPALTISKVLLSICSLLTDCNPADPLVGSIATQYMTNRAEHDRMARQWTKRYAT

SEQ ID NO: 812818 - protein, 304 aa, Homo sapiens
AAPHGRRGARALAVSPGRARRHAHSRVRARTAGRRRLPEVVASLSRTQGQPQRQPRAAASGAGAGTAGGGGSGGAEGSKMSTEAQRVDDSPSTSGGSSDGDQRESVQQEPEREQVQPKKKEGKISSKTAAKLSTSAKRIQKELAEITLDPPPNCSTNITLKGNAHSILNWIFGFWMPTSAGPKGDNIYEWRSTILGPPGSVYEGGVFFLDITFSPDYPFKPPKVTFRTRIYHCNINSQGVICLDILKDNWSPALTISKVLLSICSLLTDCNPADPLVGSIATQYMTNRAEHDRMARQWTKRYAT

SEQ ID NO: 812819 - protein, 306 aa, Homo sapiens
MACTEANLTCVSELPVGWTQEYILWSMERSLQQIFRYLESARSRLVEQDLPESQDMISSSTTSVLVAQKTVLCCCDYKKAKHSTDHSISFSSSCNDSSLSHLPVFSEGTTWEFRSHSLPISHKKQSSVFRNQGRTLPLFQLSEPQKSKIFQNLADLSPLQPQSSFINSISEPLNICKQKRKKNDERMSKSHLTSDHEPNSVSKERPRLPRWATFKLSPSVRRELEGHMSQKVFALRQQTAPLPLRKSWAMLNYITEVQGGVAESEKPQTQLSMPIHQNTEQNINNKSSDLPSFQLHVNAGVGSGSN

SEQ ID NO: 812820 - protein, 304 aa, Homo sapiens
RNFFFFSNSPSGQKYFAFEMATFFVFLFQCKLKHFSLFLRSRLVEQDLPESQDMISSSTTSVLVAQKTVLCCCDYKKAKHSTDHSISFSSSCNDSSLSHLPVFSEGTTWEFRSHSLPISHKKQSSVFRNQGRTLPLFQLSEPQKSKIFQNLADLSPLQPQSSFINSISEPLNICKQKRKKNDERMSKSHLTSDHEPNSVSKERPRLPRWATFKLSPSVRRELEGHMSQKVFALRQQTAPLPLRKSWAMLNYITEVQGGVAESEKPQTQLSMPIHQNTEQNINNKSSDLPSFQLHVNAGVGSGSN

SEQ ID NO: 812821 - protein, 89 aa, Homo sapiens
HFCIEMGFCQITQSGLELLASGDLSASASQSAAITGMSHRDGQPLAALASSLLRLSTRSPVLGEASPGLTERQGSTARGFDCITLFHWF

SEQ ID NO: 812822 - protein, 124 aa, Homo sapiens
MVLCWLLLLVMALPPGTTGVKDCVFCELTDSMQCPGTYMHCGDDEDCFTGHGVAPGTGPVINKGCLRATSCGLEEPVSYRGVTYSLTTNCCTGRLCNRAPSSQTVGATTSLALGLGMLLPPRLL

SEQ ID NO: 812823 - protein, 172 aa, Homo sapiens
MCSTKGMWHVAPGRVHPARGQLFSCLGLTLTTGLWGVLQPKCPPCPPHISVRGGHAQANVLSQPAAGAALPRRAWEVLGMPQRFSSCLALAWPSASRINLRSVEQPRETQIWLRTAYGQEGCKSSQAKPPWALAPAAAWLWTQLEPGRKSATPHRRPLRLGKHLRKKLLQKR

SEQ ID NO: 812824 - protein, 406 aa, Homo sapiens
SACVCECDSGCGCGRGRGRRARRSPAAGGPARAPAPRARRGRVAQPSLETTPPLPVAVAMSVAGLKKQFHKASQLFSEKISGAEGTKLDDEFLDMERKIDVTNKVVAEILSKTTEYLQPNPAYRAKLGMLNTVSKIRGQVKTTGYPQTEGLLGDCMLKYGKELGEDSTFGNALIEVGESMKLMAEVKDSLDINVKQTFIDPLQLLQDKDLKEIGHHLKKLEGRRLDYDYKKKRVGKIPDEEVRQAVEKFEESKELAERSMFNFLENDVEQVSQLAVFIEAALDYHRQSTEILQELQSKLQMRISAASSVPRREYKPRPVKRSSSELNGVSTTSVVKTTGSNIPMDQPCCRGLYDFEPENQGELGFKEGDIITLTNQIDENWYEGMIHGESGFFPINYVEVIVPLPQ

SEQ ID NO: 812825 - protein, 388 aa, Homo sapiens
AGVCASVTAAVAVAVAVGGGPGGAQPRGDRPGLPLPERAVAMSVAGLKKQFHKASQLFSEKISGAEGTKLDDEFLDMERKIDVTNKVVAEILSKTTEYLQPNPAYRAKLGMLNTVSKIRGQVKTTGYPQTEGLLGDCMLKYGKELGEDSTFGNALIEVGESMKLMAEVKDSLDINVKQTFIDPLQLLQDKDLKEIGHHLKKLEGRRLDYDYKKKRVGKIPDEEVRQAVEKFEESKELAERSMFNFLENDVEQVSQLAVFIEAALDYHRQSTEILQELQSKLQMRISAASSVPRREYKPRPVKRSSSELNGVSTTSVVKTTGSNIPMDQPCCRGLYDFEPENQGELGFKEGDIITLTNQIDENWYEGMIHGESGFFPINYVEVIVPLPQ

SEQ ID NO: 812826 - protein, 399 aa, Homo sapiens
SACVCECDSGCGCGRGRGRRARRSPAAGGPARAPAPRARRGRVAQPSLETTPPLPVAVAMSVAGLKKQFHKASQLFSEKISGAEGTKLDDEFLDMERKIDVTNKVVAEILSKTTEYLQPNPAYRAKLGMLNTVSKIRGQVKTTGYPQTEGLLGDCMLKYGKELGEDSTFGNALIEVGESMKLMAEVKDSLDINVKQTFIDPLQLLQDKDLKEIGHHLKKLEGRRLDYDYKKKRVGKIPDEEVRQAVEKFEESKELAERSMFNFLENDVEQVSQLAVFIEAALDYHRQSTEILQELQSKLQMRISAASSVPRREYKPRPVKRSSSELNGVSTTSVVKTTGSNIPMDQPCCRGLYDFEPENQGELGFKEGDGTFRKIKRETKIKMCRKKIVNIYKLKDQQH

SEQ ID NO: 812827 - protein, 355 aa, Homo sapiens
MDGIFAGIICNQANRCLTWTSQQLFSEKISGAEGTKLDDEFLDMERKIDVTNKVVAEILSKTTEYLQPNPAYRAKLGMLNTVSKIRGQVKTTGYPQTEGLLGDCMLKYGKELGEDSTFGNALIEVGESMKLMAEVKDSLDINVKQTFIDPLQLLQDKDLKEIGHHLKKLEGRRLDYDYKKKRVGKIPDEEVRQAVEKFEESKELAERSMFNFLENDVEQVSQLAVFIEAALDYHRQSTEILQELQSKLQMRISAASSVPRREYKPRPVKRSSSELNGVSTTSVVKTTGSNIPMDQPCCRGLYDFEPENQGELGFKEGDIITLTNQIDENWYEGMIHGESGFFPINYVEVIVPLPQ

SEQ ID NO: 812828 - protein, 302 aa, Homo sapiens
SACVCECDSGCGCGRGRGRRARRSPAAGGPARAPAPRARRGRVAQPSLETTPPLPVAVAMSVAGLKKQFHKASQLFSEKISGAEGTKLDDEFLDMERKIDVTNKVVAEILSKTTEYLQPNPAYRAKLGMLNTVSKIRGQVKTTGYPQTEGLLGDCMLKYGKELGEDSTFGNALIEVGESMKLMAEVKDSLDINVKQTFIDPLQLLQDKDLKEIGHHLKKLEGRRLDYDYKKKRVGKIPDEEVRQAVEKFEESKELAERSMFNFLENDVEQVSQLAVFIEAALDYHRQSTEILQELQSKLQMR

SEQ ID NO: 812829 - protein, 106 aa, Homo sapiens [sequence omitted]

SEQ ID NO: 812830 - protein, 101 aa, Homo sapiens
GQPRVRGFSRLFKDTEIHSSHLGAPTQLCPAIPGSNIPMDQPCCRGLYDFEPENQGELGFKEGDIITLTNQIDENWYEGMIHGESGFFPINYVEVIVPLPQ

SEQ ID NO: 812831 - protein, 270 aa, Homo sapiens
GLPSILPVEMAAAVAGMLRGGLLPQAGRLPTLQTVRYGSKAVTRHRRVMHFQRQKLMAVTEYIPPKPAIHPSCLPSPPSPPQEEIGLIRLLRREIAAVFQDNRMIAVCQNVALSAEDKLLMRHQLRKHKILMKVFPNQVLKPFLEDSKYQNLLPLFVGHNMLLVSEEPKVKEMVRILRTVPFLPLLGGCIDDTILSRQGFINYSKLPSLPLVQGELVGGLTCLTAQTHSLLQHQPLQLTTLLDQYIREQREKDSVMSANGKPDPDTVPDS

SEQ ID NO: 812832 - protein, 270 aa, Homo sapiens; identical to SEQ ID NO: 812831

SEQ ID NO: 812833 - protein, 270 aa, Homo sapiens; identical to SEQ ID NO: 812831

SEQ ID NO: 812834 - protein, 270 aa, Homo sapiens; identical to SEQ ID NO: 812831

SEQ ID NO: 812835 - protein, 302 aa, Homo sapiens
ASVHSSGGDGCGRGGDAARGSPAPGGLECSGMISAHCNLHLPGSSDSPASASQVAGITGRLPTLQTVRYGSKAVTRHRRVMHFQRQKLMAVTEYIPPKPAIHPSCLPSPPSPPQEEIGLIRLLRREIAAVFQDNRMIAVCQNVALSAEDKLLMRHQLRKHKILMKVFPNQVLKPFLEDSKYQNLLPLFVGHNMLLVSEEPKVKEMVRILRTVPFLPLLGGCIDDTILSRQGFINYSKLPSLPLVQGELVGGLTCLTAQTHSLLQHQPLQLTTLLDQYIREQREKDSVMSANGKPDPDTVPDS

SEQ ID NO: 812836 - protein, 222 aa, Homo sapiens
MHFQRQKLMAVTEYIPPKPAIHPSCLPSPPSPPQEEIGLIRLLRREIAAVFQDNRMIAVCQNVALSAEDKLLMRHQLRKHKILMKVFPNQVLKPFLEDSKYQNLLPLFVGHNMLLVSEEPKVKEMVRILRTVPFLPLLGGCIDDTILSRQGFINYSKLPSLPLVQGELVGGLTCLTAQTHSLLQHQPLQLTTLLDQYIREQREKDSVMSANGKPDPDTVPDS

SEQ ID NO: 812837 - protein, 222 aa, Homo sapiens; identical to SEQ ID NO: 812836

SEQ ID NO: 812838 - protein, 282 aa, Homo sapiens
  misc_feature (185)..(185): Xaa can be any naturally occurring amino acid
  misc_feature (193)..(193): Xaa can be any naturally occurring amino acid
  misc_feature (201)..(201): Xaa can be any naturally occurring amino acid
  misc_feature (251)..(252): Xaa can be any naturally occurring amino acid
  misc_feature (254)..(254): Xaa can be any naturally occurring amino acid
  misc_feature (268)..(268): Xaa can be any naturally occurring amino acid
  misc_feature (272)..(273): Xaa can be any naturally occurring amino acid
  misc_feature (276)..(276): Xaa can be any naturally occurring amino acid
  misc_feature (281)..(282): Xaa can be any naturally occurring amino acid
GLPSILPVEMAAAVAGMLRGGLLPQAGRLPTLQTVRYGSKAVTRHRRVMHFQRQKLMAVTEYIPPKPAIHPSCLPSPPSPPQEEIGLIRLLRREIAAVFQDNRMIAVCQNVALSAEDKLLMRHQLRKHKILMKVFPNQVLKPFLEDSKYQNLLPLFVGHNILLLTQHPNLNHILPILTTLTFLPXLPPSIHHXILTTHPFXNYSNLPTLPLLNPHLLPPLTSLTPHTHSLLHHHPLHLTTLFHHYITHHPXXHXLISPNPNPHPHTLXHSYXXSIXTPPHXX

SEQ ID NO: 812839 - protein, 270 aa, Homo sapiens; identical to SEQ ID NO: 812831

SEQ ID NO: 812840 - protein, 254 aa, Homo sapiens [sequence omitted]

SEQ ID NO: 812841 - protein, 271 aa, Homo sapiens
MISAHCNLHLPGSSDSPASASQVAGITGRLPTLQTVRYGSKAVTRHRRVMHFQRQKLMAVTEYIPPKPAIHPSCLPSPPSPPQEEIGLIRLLRREIAAVFQDNRMIAVCQNVALSAEDKLLMRHQLRKHKILMKVFPNQVLKPFLEDSKYQNLLPLFVGHNMLLVSEEPKVKEMVRILRTVPFLPLLGGCIDDTILSRQGFINYSKLPSLPLVQGELVGGLTCLTAQTHSLLQHQPLQLTTLLDQYIREQREKDSVMSANGKPDPDTVPDS

SEQ ID NO: 812842 - protein, 271 aa, Homo sapiens; identical to SEQ ID NO: 812841

SEQ ID NO: 812843 - protein, 76 aa, Homo sapiens
MSDFENSREFGANDNMGASSITQETSLGGKEEFVATTESTTETKEPKKAKRVRRKKEAPLHDKEMQHEGMQLDFRK

SEQ ID NO: 812844 - protein, 824 aa, Homo sapiens
RVSVLAAASSALPVAPREAGVTNWPAGCVPEVRSTGEKEVAKTLHRRSRPEWCGARDPPAMLLFVLTCLLAVFPAISTKSPIFGPEEVNSVEGNSVSITCYYPPTSVNRHTRKYWCRQGARGGCITLISSEGYVSSKYAGRANLTNFPENGTFVVNIAQLSQDDSGRYKCGLGINSRGLSFDVSLEVSQGPGLLNDTKVYTVDLGRTVTINCPFKTENAQKRKSLYKQIGLYPVLVIDSSGYVNPNYTGRIRLDIQGTGQLLFSVVINQLRLSDAGQYLCQAGDDSNSNKKNADLQVLKPEPELVYEDLRGSVTFHCALGPEVANVAKFLCRQSSGENCDVVVNTLGKRAPAFEGRILLNPQDKDGSFSVVITGLRKEDAGRYLCGAHSDGQLQEGSPIQAWQLFVNEESTIPRSPTVVKGVAGGSVAVLCPYNRKESKSIKYWCLWEGAQNGRCPLLVDSEGWVKAQYEGRLSLLEEPGNGTFTVILNQLTSRDAGFYWCLTNGDTLWRTTVEIKIIEGEPNLKVPGNVTAVLGETLKVPCHFPCKFSSYEKYWCKWNNTGCQALPSQDEGPSKAFVNCDENSRLVSLTLNLVTRADEGWYWCGVKQGHFYGETAAVYVAVEERKAAGSRDVSLAKADAAPDEKVLDSGFREIENKAIQDPRLFAEEKAVADTRDQADGSRASVDSGSSEEQGGSSRALVSTLVPLGLVLAVGAVAVGVARARHRKNVDRVSIRSYRTDISMSDFENSREFGANDNMGASSITQETSLGGKEEFVATTESTTETKEPKKAKRSSKEEAEMAYKDFLLQSSTVAAEAQDGPQEA

SEQ ID NO: 812845 - protein, 824 aa, Homo sapiens; identical to SEQ ID NO: 812844

SEQ ID NO: 812846 - protein, 824 aa, Homo sapiens; identical to SEQ ID NO: 812844

SEQ ID NO: 812847 - protein, 824 aa, Homo sapiens; identical to SEQ ID NO: 812844

SEQ ID NO: 812848 - protein, 824 aa, Homo sapiens; identical to SEQ ID NO: 812844

SEQ ID NO: 812849 - protein, 824 aa, Homo sapiens; identical to SEQ ID NO: 812844

SEQ ID NO: 812850 - protein, 824 aa, Homo sapiens; identical to SEQ ID NO: 812844

SEQ ID NO: 812851 - protein, 798 aa, Homo sapiens
VWPIGLCRESLGQPCTALHRRSRPEWCGARDPPAMLLFVLTCLLAVFPAISTKSPIFGPEEVNSVEGNSVSITCYYPPTSVNRHTRKYWCRQGARGGCITLISSEGYVSSKYAGRANLTNFPENGTFVVNIAQLSQDDSGRYKCGLGINSRGLSFDVSLEVSQGPGLLNDTKVYTVDLGRTVTINCPFKTENAQKRKSLYKQIGLYPVLVIDSSGYVNPNYTGRIRLDIQGTGQLLFSVVINQLRLSDAGQYLCQAGDDSNSNKKNADLQVLKPEPELVYEDLRGSVTFHCALGPEVANVAKFLCRQSSGENCDVVVNTLGKRAPAFEGRILLNPQDKDGSFSVVITGLRKEDAGRYLCGAHSDGQLQEGSPIQAWQLFVNEESTIPRSPTVVKGVAGGSVAVLCPYNRKESKSIKYWCLWEGAQNGRCPLLVDSEGWVKAQYEGRLSLLEEPGNGTFTVILNQLTSRDAGFYWCLTNGDTLWRTTVEIKIIEGEPNLKVPGNVTAVLGETLKVPCHFPCKFSSYEKYWCKWNNTGCQALPSQDEGPSKAFVNCDENSRLVSLTLNLVTRADEGWYWCGVKQGHFYGETAAVYVAVEERKAAGSRDVSLAKADAAPDEKVLDSGFREIENKAIQDPRLFAEEKAVADTRDQADGSRASVDSGSSEEQGGSSRALVSTLVPLGLVLAVGAVAVGVARARHRKNVDRVSIRSYRTDISMSDFENSREFGANDNMGASSITQETSLGGKEEFVATTESTTETKEPKKAKRSSKEEAEMAYKDFLLQSSTVAAEAQDGPQEA

SEQ ID NO: 812852 - protein, 824 aa, Homo sapiens; identical to SEQ ID NO: 812844

SEQ ID NO: 812853 - protein, 824 aa, Homo sapiens; identical to SEQ ID NO: 812844

SEQ ID NO: 812854 - protein, 701 aa, Homo sapiens
VWPIGLCRESLGQPCTALHRRSRPEWCGARDPPAMLLFVLTCLLAVFPAISTKSPIFGPEEVNSVEGPGLLNDTKVYTVDLGRTVTINCPFKTENAQKRKSLYKQIGLYPVLVIDSSGYVNPNYTGRIRLDIQGTGQLLFSVVINQLRLSDAGQYLCQAGDDSNSNKKNADLQVLKPEPELVYEDLRGSVTFHCALGPEVANVAKFLCRQSSGENCDVVVNTLGKRAPAFEGRILLNPQDKDGSFSVVITGLRKEDAGRYLCGAHSDGQLQEGSPIQAWQLFVNEESTIPRSPTVVKGVAGGSVAVLCPYNRKESKSIKYWCLWEGAQNGRCPLLVDSEGWVKAQYEGRLSLLEEPGNGTFTVILNQLTSRDAGFYWCLTNGDTLWRTTVEIKIIEGEPNLKVPGNVTAVLGETLKVPCHFPCKFSSYEKYWCKWNNTGCQALPSQDEGPSKAFVNCDENSRLVSLTLNLVTRADEGWYWCGVKQGHFYGETAAVYVAVEERKAAGSRDVSLAKADAAPDEKVLDSGFREIENKAIQDPRLFAEEKAVADTRDQADGSRASVDSGSSEEQGGSSRALVSTLVPLGLVLAVGAVAVGVARARHRKNVDRVSIRSYRTDISMSDFENSREFGANDNMGASSITQETSLGGKEEFVATTESTTETKEPKKAKRSSKEEAEMAYKDFLLQSSTVAAEAQDGPQEA

SEQ ID NO: 812855 - protein, 654 aa, Homo sapiens
MRRWLRISCHWLPTTVHLSGPGLLNDTKVYTVDLGRTVTINCPFKTENAQKRKSLYKQIGLYPVLVIDSSGYVNPNYTGRIRLDIQGTGQLLFSVVINQLRLSDAGQYLCQAGDDSNSNKKNADLQVLKPEPELVYEDLRGSVTFHCALGPEVANVAKFLCRQSSGENCDVVVNTLGKRAPAFEGRILLNPQDKDGSFSVVITGLRKEDAGRYLCGAHSDGQLQEGSPIQAWQLFVNEESTIPRSPTVVKGVAGGSVAVLCPYNRKESKSIKYWCLWEGAQNGRCPLLVDSEGWVKAQYEGRLSLLEEPGNGTFTVILNQLTSRDAGFYWCLTNGDTLWRTTVEIKIIEGEPNLKVPGNVTAVLGETLKVPCHFPCKFSSYEKYWCKWNNTGCQALPSQDEGPSKAFVNCDENSRLVSLTLNLVTRADEGWYWCGVKQGHFYGETAAVYVAVEERKAAGSRDVSLAKADAAPDEKVLDSGFREIENKAIQDPRLFAEEKAVADTRDQADGSRASVDSGSSEEQGGSSRALVSTLVPLGLVLAVGAVAVGVARARHRKNVDRVSIRSYRTDISMSDFENSREFGANDNMGASSITQETSLGGKEEFVATTESTTETKEPKKAKRSSKEEAEMAYKDFLLQSSTVAAEAQDGPQEA

SEQ ID NO: 812856 - protein, 455 aa, Homo sapiens
MRVNFISPSWLRPREEGFSGHARLFLRGHPPIPSLSVLPESTIPRSPTVVKGVAGGSVAVLCPYNRKESKSIKYWCLWEGAQNGRCPLLVDSEGWVKAQYEGRLSLLEEPGNGTFTVILNQLTSRDAGFYWCLTNGDTLWRTTVEIKIIEGEPNLKVPGNVTAVLGETLKVPCHFPCKFSSYEKYWCKWNNTGCQALPSQDEGPSKAFVNCDENSRLVSLTLNLVTRADEGWYWCGVKQGHFYGETAAVYVAVEERKAAGSRDVSLAKADAAPDEKVLDSGFREIENKAIQDPRLFAEEKAVADTRDQADGSRASVDSGSSEEQGGSSRALVSTLVPLGLVLAVGAVAVGVARARHRKNVDRVSIRSYRTDISMSDFENSREFGANDNMGASSITQETSLGGKEEFVATTESTTETKEPKKAKRSSKEEAEMAYKDFLLQSSTVAAEAQDGPQEA

SEQ ID NO: 812857 - protein, 237 aa, Homo sapiens
YSRGSYRLLLCVDLLFWLTFCLRRPSAPAAVYVAVEERKAAGSRDVSLAKADAAPDEKVLDSGFREIENKAIQDPRLFAEEKAVADTRDQADGSRASVDSGSSEEQGGSSRALVSTLVPLGLVLAVGAVAVGVARARHRKNVDRVSIRSYRTDISMSDFENSREFGANDNMGASSITQETSLGGKEEFVATTESTTETKEPKKAKRSSKEEAEMAYKDFLLQSSTVAAEAQDGPQEA

SEQ ID NO: 812858 - protein, 134 aa, Homo sapiens
CFANTVLSGGTNMYPGIADRMQKEIPTVLRGVLVPSSVTSKPGLIVPIGDEGGMRRSHLQLLSVERTSGTEKNRGPHGSLEGRGTRVGELIAERRDVQRPSAPLSWDVNRIFPSTPSLPPVLPLFFFPSIKRCI

SEQ ID NO: 812859 - protein, 824 aa, Homo sapiens; identical to SEQ ID NO: 812844

SEQ ID NO: 812860 - protein, 824 aa, Homo sapiens; identical to SEQ ID NO: 812844

SEQ ID NO: 812861 - protein, 791 aa, Homo sapiens
RVSVLAAASSALPVAPREAGVTNWPAGCVPEVRSTGEKEVAKTLHRRSRPEWCGARDPPAMLLFVLTCLLAVFPAISTKSPIFGPEEVNSVEGNSVSITCYYPPTSVNRHTRKYWCRQGARGGCITLISSEGYVSSKYAGRANLTNFPENGTFVVNIAQLSQDDSGRYKCGLGINSRGLSFDVSLEVSQGPGLLNDTKVYTVDLGRTVTINCPFKTENAQKRKSLYKQIGLYPVLVIDSSGYVNPNYTGRIRLDIQGTGQLLFSVVINQLRLSDAGQYLCQAGDDSNSNKKNADLQVLKPEPELVYEDLRGSVTFHCALGPEVANVAKFLCRQSSGENCDVVVNTLGKRAPAFEGRILLNPQDKDGSFSVVITGLRKEDAGRYLCGAHSDGQLQEGSPIQAWQLFVNEESTIPRSPTVVKGVAGGSVAVLCPYNRKESKSIKYWCLWEGAQNGRCPLLVDSEGWVKAQYEGRLSLLEEPGNGTFTVILNQLTSRDAGFYWCLTNGDTLWRTTVEIKIIEGEPNLKVPGNVTAVLGETLKVPCHFPCKFSSYEKYWCKWNNTGCQALPSQDEGPSKAFVNCDENSRLVSLTLNLVTRADEGWYWCGVKQGHFYGETAAVYVAVEERKAAGSRDVSLAKADAAPDEKVLDSGFREIENKAIQDPRLFAEEKAVADTRDQADGSRASVDSGSSEEQGGSSRALVSTLVPLGLVLAVGAVAVGVARARHRKNVDRVSIRSYRTDISMSDFENSREFGANDNMGASSITQETSLGGKEEFVATTESTTVTVEGDPL

SEQ ID NO: 812862 - protein, 522 aa, Homo sapiens
RVSVLAAASSALPVAPREAGVTNWPAGCVPEVRSTGEKEVAKTLHRRSRPEWCGARDPPAMLLFVLTCLLAVFPAISTKSPIFGPEEVNSVEGNSVSITCYYPPTSVNRHTRKYWCRQGARGGCITLISSEGYVSSKYAGRANLTNFPENGTFVVNIAQLSQDDSGRYKCGLGINSRGLSFDVSLEVSQGPGLLNDTKVYTVDLGRTVTINCPFKTENAQKRKSLYKQIGLYPVLVIDSSGYVNPNYTGRIRLDIQGTGQLLFSVVINQLRLSDAGQYLCQAGDDSNSNKKNADLQVLKPEPELVYEDLRGSVTFHCALGPEVANVAKFLCRQSSGENCDVVVNTLGKRAPAFEGRILLNPQDKDGSFSVVITGLRKEDAGRYLCGAHSDGQLQEGSPIQAWQLFVNEESTIPRSPTVVKGVAGGSVAVLCPYNRKESKSIKYWCLWEGAQNGRCPLLVDSEGWVKAQYEGRLSLLEEPGNGTFTVILNQLTSRDAGFYWCLTNGDTLWRTTVEIKIIEGRS

SEQ ID NO: 812863 - protein, 501 aa, Homo sapiens
RVSVLAAASSALPVAPREAGVTNWPAGCVPEVRSTGEKEVAKTLHRRSRPEWCGARDPPAMLLFVLTCLLAVFPAISTKSPIFGPEEVNSVEGNSVSITCYYPPTSVNRHTRKYWCRQGARGGCITLISSEGYVSSKYAGRANLTNFPENGTFVVNIAQLSQDDSGRYKCGLGINSRGLSFDVSLEVSQGPGLLNDTKVYTVDLGRTVTINCPFKTENAQKRKSLYKQIGLYPVLVIDSSGYVNPNYTGRIRLDIQGTGQLLFSVVINQLRLSDAGQYLCQAGDDSNSNKKNADLQVLKPEPELVYEDLRGSVTFHCALGPEVANVAKFLCRQSSGENCDVVVNTLGKRAPAFEGRILLNPQDKDGSFSVVITGLRKEDAGRYLCGAHSDGQLQEGSPIQAWQLFVNEESTIPRSPTVVKGVAGGSVAVLCPYNRKESKSIKYWCLWEGAQNGRCPLLVDSEGWVKAQYEGRLSLLEELCGRGTVRAASDGQYEKLCSRPS

SEQ ID NO: 812864 - protein, 335 aa, Homo sapiens
RVSVLAAASSALPVAPREAGVTNWPAGCVPEVRSTGEKEVAKTLHRRSRPEWCGARDPPAMLLFVLTCLLAVFPAISTKSPIFGPEEVNSVEGNSVSITCYYPPTSVNRHTRKYWCRQGARGGCITLISSEGYVSSKYAGRANLTNFPENGTFVVNIAQLSQDDSGRYKCGLGINSRGLSFDVSLEVSQGPGLLNDTKVYTVDLGRTVTINCPFKTENAQKRKSLYKQIGLYPVLVIDSSGYVNQQLPTAAQVQLTQHCPLAVPQPYPLLKNLQPSTAAQAPLTQHSSLTAPQAQASLKHLHASTAAGLTTHDTVHRQLTQDLEFRKNRPRSRPP

SEQ ID NO: 812865 - protein, 109 aa, Homo sapiens
IQQDLCQLLEIQSQIDVTETLRSTSLGRQGALHLLVIIVFQHCTGEVGLSGAALGTHQQCCSSCSPACWRSSQVCLPGPNSPSSTPSACPTPGFTSLGTLKSDSSPGMS

SEQ ID NO: 812866 - protein, 1014 aa, Homo sapiens
MAESSDKLYRVEYAKSGRASCKKCSESIPKDSLRMAIMVQSPMFDGKVPHWYHFSCFWKVGHSIRHPDVEVDGFSELRWDDQQKVKKTAEAGGVTGKGQDGIGSKAEKTLGDFAAEYAKSNRSTCKGCMEKIEKGQVRLSKKMVDPEKPQLGMIDRWYHPGCFVKNREELGFRPEYSASQLKGFSLLATEDKEALKKQLPGVKSEGKRKGDEVDGVDEVAKKKSKKEKDKDSKLEKALKAQNDLIWNIKDELKKVCSTNDLKELLIFNKQQVPSGESAILDRVADGMVFGALLPCEECSGQLVFKSDAYYCTGDVTAWTKCMVKTQTPNRKEWVTPKEFREISYLKKLKVKKQDRIFPPETSASVAATPPPSTASAPAAVNSSASADKPLSNMKILTLGKLSRNKDEVKAMIEKLGGKLTGTANKASLCISTKKEVEKMNKKMEEVKEANIRVVSEDFLQDVSASTKSLQELFLAHILSPWGAEVKAEPVEVVAPRGKSGAALSKKSKGQVKEEGINKSEKRMKLTLKGGAAVDPDSGLEHSAHVLEKGGKVFSATLGLVDIVKGTNSYYKLQLLEDDKENRYWIFRSWGRVGTVIGSNKLEQMPSKEDAIEHFMKLYEEKTGNAWHSKNFTKYPKKFYPLEIDYGQDEEAVKKLTVNPGTKSKLPKPVQDLIKMIFDVESMKKAMVEYEIDLQKMPLGKLSKRQIQAAYSILSEVQQAVSQGSSDSQILDLSNRFYTLIPHDFGMKKPPLLNNADSVQAKVEMLDNLLDIEVAYSLLRGGSDDSSKDPIDVNYEKLKTDIKVVDRDSEEAEIIRKYVKNTHATTHNAYDLEVIDIFKIEREGECQRYKPFKQLHNRRLLWHGSRTTNFAGILSQGLRIAPPEAPVTGYMFGKGIYFADMVSKSANYCHTSQGDPIGLILLGEVALGNMYELKHASHISKLPKGKHSVKGLGKTTPDPSANISLDGVDVPLGTGISSGVNDTSLLYNEYIVYDIAQVNLKYLLKLKFNFKTSLW

SEQ ID NO: 812867 - protein, 1014 aa, Homo sapiens; identical to SEQ ID NO: 812866

SEQ ID NO: 812868 - protein, 1014 aa, Homo sapiens; identical to SEQ ID NO: 812866

SEQ ID NO: 812869 - protein, 1054 aa, Homo sapiens
RFSPRRAVAFFALPSASLVSHQARAHFFSLLGSGLAAQGRMAESSDKLYRVEYAKSGRASCKKCSESIPKDSLRMAIMVQSPMFDGKVPHWYHFSCFWKVGHSIRHPDVEVDGFSELRWDDQQKVKKTAEAGGVTGKGQDGIGSKAEKTLGDFAAEYAKSNRSTCKGCMEKIEKGQVRLSKKMVDPEKPQLGMIDRWYHPGCFVKNREELGFRPEYSASQLKGFSLLATEDKEALKKQLPGVKSEGKRKGDEVDGVDEVAKKKSKKEKDKDSKLEKALKAQNDLIWNIKDELKKVCSTNDLKELLIFNKQQVPSGESAILDRVADGMVFGALLPCEECSGQLVFKSDAYYCTGDVTAWTKCMVKTQTPNRKEWVTPKEFREISYLKKLKVKKQDRIFPPETSASVAATPPPSTASAPAAVNSSASADKPLSNMKILTLGKLSRNKDEVKAMIEKLGGKLTGTANKASLCISTKKEVEKMNKKMEEVKEANIRVVSEDFLQDVSASTKSLQELFLAHILSPWGAEVKAEPVEVVAPRGKSGAALSKKSKGQVKEEGINKSEKRMKLTLKGGAAVDPDSGLEHSAHVLEKGGKVFSATLGLVDIVKGTNSYYKLQLLEDDKENRYWIFRSWGRVGTVIGSNKLEQMPSKEDAIEHFMKLYEEKTGNAWHSKNFTKYPKKFYPLEIDYGQDEEAVKKLTVNPGTKSKLPKPVQDLIKMIFDVESMKKAMVEYEIDLQKMPLGKLSKRQIQAAYSILSEVQQAVSQGSSDSQILDLSNRFYTLIPHDFGMKKPPLLNNADSVQAKVEMLDNLLDIEVAYSLLRGGSDDSSKDPIDVNYEKLKTDIKVVDRDSEEAEIIRKYVKNTHATTHNAYDLEVIDIFKIEREGECQRYKPFKQLHNRRLLWHGSRTTNFAGILSQGLRIAPPEAPVTGYMFGKGIYFADMVSKSANYCHTSQGDPIGLILLGEVALGNMYELKHASHISKLPKGKHSVKGLGKTTPDPSANISLDGVDVPLGTGISSGVNDTSLLYNEYIVYDIAQVNLKYLLKLKFNFKTSLW

SEQ ID NO: 812870 - protein, 1000 aa, Homo sapiens
MAESSDKLYRVEYAKSGRASCKKCSESIPKDSLRMAIMVQSPMFDGKVPHWYHFSCFWKVGHSIRHPDVEVDGFSELRWDDQQKVKKTAEAGGVTGKGQDGIGSKAEKTLGDFAAEYAKSNRSTCKGCMEKIEKGQVRLSKKMVDPEKPQLGMIDRWYHPGCFVKNREELGFRPEYSASQLKGFSLLATEDKEALKKQLPGVKSEGKRKGDEVDGVDEVAKKKSKKEKDKDSKLEKALKAQNDLIWNIKDELKKVCSTNDLKELLIFNKQQVPSGESAILDRVADGMVFGALLPCEECSGQLVFKSDAYYCTGDVTAWTKCMVKTQTPNRKEWVTPKEFREISYLKKLKVKKQDRIFPPETSASVAATPPPSTASAPAAVNSSASADKPLSNMKILTLGKLSRNKDEVKAMIEKLGGKLTGTANKASLCISTKKEVEKMNKKMEEVKEANIRVVSEDFLQDVSASTKSLQELFLAHILSPWGAEVKAEPVEVVAPRGKSGAALSKKSKGQVKEEGINKSEKRMKLTLKGGAAVDPDSGLEHSAHVLEKGGKVFSATLGLVDIVKGTNSYYKLQLLEDDKENRYWIFRSWGRVGTVIGSNKLEQMPSKEDAIEHFMKLYEEKTGNAWHSKNFTKYPKKFYPLEIDYGQDEEAVKKLTVNPGTKSKLPKPVQDLIKMIFDVESMKKAMVEYEIDLQKMPLGKLSKRQIQAAYSILSEVQQAVSQGSSDSQILDLSNRFYTLIPHDFGMKKPPLLNNADSVQAKVEMLDNLLDIEVAYSLLRGGSDDSSKDPIDVNYEKLKTDIKYVKNTHATTHNAYDLEVIDIFKIEREGECQRYKPFKQLHNRRLLWHGSRTTNFAGILSQGLRIAPPEAPVTGYMFGKGIYFADMVSKSANYCHTSQGDPIGLILLGEVALGNMYELKHASHISKLPKGKHSVKGLGKTTPDPSANISLDGVDVPLGTGISSGVNDTSLLYNEYIVYDIAQVNLKYLLKLKFNFKTSLW

SEQ ID NO: 812871 - protein, 1014 aa, Homo sapiens; identical to SEQ ID NO: 812866

SEQ ID NO: 812872 - protein, 886 aa, Homo sapiens [sequence omitted]

SEQ ID NO: 812873 - protein, 872 aa, Homo sapiens [sequence omitted]

SEQ ID NO: 812874 - protein, 728 aa, Homo sapiens [sequence omitted]

SEQ ID NO: 812875 - protein, 961 aa, Homo sapiens
MAESSDKLYRVEYAKSGRASCKKCSESIPKDSLRMAIMVQSPMFDGKVPHWYHFSCFWKVGHSIRHPDVEVDGFSELRWDDQQKVKKTAEAGGVTGKGQDGIGSKAEKTLGDFAAEYAKSNRSTCKGCMEKIEKGQVRLSKKMVDPEKPQLGMIDRWYHPGCFVKNREELGFRPEYSASQLKGFSLLATEDKEALKKQLPGVKSEGKRKGDEVDGVDEVAKKKSKKEKDKDSKLEKALKAQNDLIWNIKDELKKVCSTNDLKELLIFNKQQVPSGESAILDRVADGMVFGALLPCEECSGQLVFKSDAYYCTGDVTAWTKCMVKTQTPNRKEWVTPKEFREISYLKKLKVKKQDRIFPPETSASVAATPPPSTASAPAAVNSSASADKPLSNMKILTLGKLSRNKDEVKAMIEKLGGKLTGTANKASLCISTKKEVEKMNKKMEEVKEANIRVVSEDFLQDVSASTKSLQELFLAHILSPWGAEVKAEPVEVVAPRGKSGAALSKKSKGQVKEEGINKSEKRMKLTLKGGAAVDPDSGLEHSAHVLEKGGKVFSATLGLVDIVKGTNSYYKLQLLEDDKENRYWIFRSWGRVGTVIGSNKLEQMPSKEDAIEHFMKLYEEKTGNAWHSKNFTKYPKKFYPLEIDYGQDEEAVKKLTVNPGTKSKLPKPVQDLIKMIFDVESMKKAMVEYEIDLQKMPLGKLSKRQIQAAYSILSEVQQAVSQGSSDSQILDLSNRFYTLIPHDFGMKKPPLLNNADSVQAKVEMLDNLLDIEVAYSLLRGGSDDSSKDPIDVNYEKLKTDIKVVDRDSEEAEIIRKYVKNTHATTHNAYDLEVIDIFKIEREGECQRYKPFKQLHNRRLLWHGSRTTNFAGILSQGLRIAPPEAPVTGYMFGKGIYFADMVSKSANYCHTSQGDPIGLILLGEVALGNMYELKHASHISKLPKGKHSVKGSSWDRDFIWCE

SEQ ID NO: 812876 - protein, 1047 aa, Homo sapiens [sequence omitted]

SEQ ID NO: 812877 - protein, 1014 aa, Homo sapiens; identical to SEQ ID NO: 812866

SEQ ID NO: 812878 - protein, 319 aa, Homo sapiens
MPLGKLSKRQIQAAYSILSEVQQAVSQGSSDSQILDLSNRFYTLIPHDFGMKKPPLLNNADSVQAKVEMLDNLLDIEVAYSLLRGGSDDSSKDPIDVNYEKLKTDIKVVDRDSEEAEIIRKYVKNTHATTHNAYDLEVIDIFKIEREGECQRYKPFKQLHNRRLLWHGSRTTNFAGILSQGLRIAPPEAPVTGYMFGKGIYFADMVSKSANYCHTSQGDPIGLILLGEVALGNMYELKHASHISKLPKGKHSVKGLGKTTPDPSANISLDGVDVPLGTGISSGVNDTSLLYNEYIVYDIAQVNLKYLLKLKFNFKTSLW

SEQ ID NO: 812879 - protein, 954 aa, Homo sapiens
MAESSDKLYRVEYAKSGRASCKKCSESIPKDSLRMAIMVQSPMFDGKVPHWYHFSCFWKVGHSIRHPDVEVDGFSELRWDDQQKVKKTAEAGGVTGKGQDGIGSKAEKTLGDFAAEYAKSNRSTCKGCMEKIEKGQVRLSKKMVDPEKPQLGMIDRWYHPGCFVKNREELGFRPEYSASQLKGFSLLATEDKEALKKQLPGVKSEGKRKGDEVDGVDEVAKKKSKKEKDKDSKLEKALKAQNDLIWNIKDELKKVCSTNDLKELLIFNKQQVPSGESAILDRVADGMVFGALLPCEECSGQLVFKSDAYYCTGDVTAWTKCMVKTQTPNRKEWVTPKEFREISYLKKLKVKKQDRIFPPETSASVAATPPPSTASAPAAVNSSASADKPLSNMKILTLGKLSRNKDEVKAMIEKLGGKLTGTANKASLCISTKKEVEKMNKKMEEVKEANIRVVSEDFLQDVSASTKSLQELFLAHILSPWGAEVKAEPVEVVAPRGKSGAALSKKSKGQVKEEGINKSEKRMKLTLKGGAAVDPDSGLEHSAHVLEKGGKVFSATLGLVDIVKGTNSYYKLQLLEDDKENRYWIFRSWGRVGTVIGSNKLEQMPSKEDAIEHFMKLYEEKTGNAWHSKNFTKYPKKFYPLEIDYGQDEEAVKKLTVNPGTKSKLPKPVQDLIKMIFDVESMKKAMVEYEIDLQKMPLGKLSKRQIQAAYSILSEVQQAVSQGSSDSQILDLSNRFYTLIPHDFGMKKPPLLNNADSVQAKVEMLDNLLDIEVAYSLLRGGSDDSSKDPIDVNYEKLKTDIKVVDRDSEEAEIIRKYVKNTHATTHNAYDLEVIDIFKIEREGECQRYKPFKQLHNRRLLWHGSRTTNFAGILSQGLRIAPPEAPVTGYMFGKGIYFADMVSKSANYCHTSQGDPIGLILLGEVALGNMYDLKQLQYQKLQAERVKWAIPDLST

SEQ ID NO: 812880 - protein, 359 aa, Homo sapiens
  misc_feature (68)..(68): Xaa can be any naturally occurring amino acid
MIFDVERVTNARLVNFDIDLLQDALLVMISAWLITRHKIIDSRRVAVPYVQADTPRIGRFVDRSVSWXLTQNRRFSNSHVISPSQIIARRTEKPPLLNNADSVQAKVEMLDNLLDIEVAYSLLRGGSDDSSKDPIDVNYEKLKTDIKVVDRDSEEAEIIRKYVKNTHATTHNAYDLEVIDIFKIEREGECQRYKPFKQLHNRRLLWHGSRTTNFAGILSQGLRIAPPEAPVTGYMFGKGIYFADMVSKSANYCHTSQGDPIGLILLGEVALGNMYELKHASHISKLPKGKHSVKGLGKTTPDPSANISLDGVDVPLGTGISSGVNDTSLLYNEYIVYDIAQVNLKYLLKLKFNFKTSLW

SEQ ID NO: 812881 - protein, 983 aa, Homo sapiens
MAESSDKLYRVEYAKSGRASCKKCSESIPKDSLRMAIMVQSPMFDGKVPHWYHFSCFWKVGHSIRHPDVEVDGFSELRWDDQQKVKKTAEAGGVTGKGQDGIGSKAEKTLGDFAAEYAKSNRSTCKGCMEKIEKGQVRLSKKMVDPEKPQLGMIDRWYHPGCFVKNREELGFRPEYSASQLKGFSLLATEDKEALKKQLPGVKSEGKRKGDEVDGVDEVAKKKSKKEKDKDSKLEKALKAQNDLIWNIKDELKKVCSTNDLKELLIFNKQQVPSGESAILDRVADGMVFGALLPCEECSGQLVFKSDAYYCTGDVTAWTKCMVKTQTPNRKEWVTPKEFREISYLKKLKVKKQDRIFPPETSASVAATPPPSTASAPAAVNSSASADKPLSNMKILTLGKLSRNKDEVKAMIEKLGGKLTGTANKASLCISTKKEVEKMNKKMEEVKEANIRVVSEDFLQDVSASTKSLQELFLAHILSPWGAEVKAEPVEVVAPRGKSGAALSKKSKGQVKEEGINKSEKRMKLTLKGGAAVDPDSGLEHSAHVLEKGGKVFSATLGLVDIVKGTNSYYKLQLLEDDKENRYWIFRSWGRVGTVIGSNKLEQMPSKEDAIEHFMKLYEEKTGNAWHSKNFTKYPKKFYPLEIDYGQDEEAVKKLTVNPGTKSKLPKPVQDLIKMIFDVESMKKAMVEYEIDLQKMPLGKLSKRQIQAAYSILSEVQQAVSQGSSDSQILDLSNRFYTLIPHDFGMKKPPLLNNADSVQAKVEMLDNLLDIEVAYSLLRGGSDDSSKDPIDVNYEKLKTDIKVVDRDSEEAEIIRKYVKNTHATTHNAYDLEVIDIFKIEREGECQRYKPFKQLHNRRLLWHGSRTTNFAGDFAAEYAKSNRSTCKGCMEKIEKGQVRLSKKMVDPEKPQLGMIDRWYHPGCFVKNREELGFRPEYSASQLKGFSLLATEDKEALKKQLPGVKSEGKRKGDEVDGVDEVAKKK

SEQ ID NO: 812882 - protein, 125 aa, Homo sapiens [sequence omitted]

SEQ ID NO: 812883 - protein, 154 aa, Homo sapiens
QLQRLQARSPVGKNGPPQLGEGEAAPAPVVSVALRYSVDMVSKSANYCHTSQGDPIGLILLGEVALGNMYELKHASHISKLPKGKHSVKGLGKTTPDPSANISLDGVDVPLGTGISSGVNDTSLLYNEYIVYDIAQVNLKYLLKLKFNFKTSLW

SEQ ID NO: 812884 - protein, 425 aa, Homo sapiens
  misc_feature (419)..(419): Xaa can be any naturally occurring amino acid
  misc_feature (424)..(424): Xaa can be any naturally occurring amino acid
MAESSDKLYRVEYAKSGRASCKKCSESIPKDSLRMAIMVQSPMFDGKVPHWYHFSCFWKVGHSIRHPDVEVDGFSELRWDDQQKVKKTAEAGGVTGKGQDGIGSKAEKTLGDFAAEYAKSNRSTCKGCMEKIEKGQVRLSKKMVDPEKPQLGMIDRWYHPGCFVKNREELGFRPEYSASQLKGFSLLATEDKEALKKQLPGVKSEGKRKGDEVDGVDEVAKKKSKKEKDKDSKLEKALKAQNDLIWNIKDELKKVCSTNDLKELLIFNKQQVPSGESAILDRVADGMVFGALLPCEECSGQLVFKSDAYYCTGDVTAWTKCMVKTQTPNRKEWVTPKEFREISYLKKLKVKKQDRIFPPETSASVAATPPPSTASAPAAVNSSASADKPLSNMKILTLGKLSRNKDEVKAMILTRGILXVPSSXS

SEQ ID NO: 812885 - protein, 128 aa, Homo sapiens [sequence omitted]

SEQ ID NO: 812886 - protein, 80 aa, Homo sapiens
HHFVHYDLTQVMVEKLLRDHFVHSDLPPLRPPGYDLKKCMVARRVHAHAECPYTPRITPGGSGMNSPEALLHQLTWPLSC

SEQ ID NO: 812887 - protein, 155 aa, Homo sapiens
MAESSDKLYRVEYAKSGRASCKKCSESIPKDSLRMAIMVQSPMFDGKVPHWYHFSCFWKVGHSIRHPDVEVDGFSELRWDDQQKVKKTAEAGGVTGVYILGQHGHSAPTLKLPGGPRLREQSRPPPACPLPHVQIKRMVPMLFQQHLLDSASSVA

SEQ ID NO: 812888 - protein, 186 aa, Homo sapiens
MVKLAAKCILAGDPAVGKTALAQIFRSDGAHFQKSYTLTTGMDLVVKTVPVPDTGDSVELFIFDSAGKELFSEMLDKLWESPNVLCLVYDVTNEESFNNCSKWLEKARSQAPGISLPGVLVGNKTDLAGRRAVDSAEARAWALGQGLECFETSVKEMENFEAPFHCLAKQFHQLYREKVEVFRALA

SEQ ID NO: 812889 - protein, 245 aa, Homo sapiens
MTFWKPEHSPACLAFCSARWEVSLFLVFLHSGLQEVRLHTESAGWCENPSYCLSKTLEFAPFPFIFSRAWEKRQSMCEDVGACISPLRQVQCELRVIPVTRSLWFFHVETFLAFLIVELFIFDSAGKELFSEMLDKLWESPNVLCLVYDVTNEESFNNCSKWLEKARSQAPGISLPGVLVGNKTDLAGRRAVDSAEARAWALGQGLECFETSVKEMENFEAPFHCLAKQFHQLYREKVEVFRALA

SEQ ID NO: 812890 - protein, 41 aa, Homo sapiens
MVKLAAKCILAVPVDKRLSRAEVCSGCCEVCRSVSWTCALP

SEQ ID NO: 812891 - protein, 186 aa, Homo sapiens; identical to SEQ ID NO: 812888

SEQ ID NO: 812892 - protein, 112 aa, Homo sapiens
MISDQTKGFLSLVTLSKYLENSSIFIYFRSTPWCLLRLTCIEFLPFYVAISQDCIVECFRIHFEIPVRALCRPQSFSIPFLTLLSTEAVFYPDTGLPRTLCSAQLAGPGRMY

SEQ ID NO: 812893 - protein, 127 aa, Homo sapiens
RSFGDVREARSQLGADSQTRPAPRRRSGLAQAQAGKMAAAGAGRLRRVASALLLRSPRLPARELSAPARLYHKKVGTKEGTRGMPTQRRPGLEGRPRGSAQLGLGAVPSHVFALTRFPLLRSEAHCN

SEQ ID NO: 812894 - protein, 80 aa, Homo sapiens
RSVLPFPSLPAIASSSLATEWVKGKTVEEALTIKNTDIAKELCLPPVKLHCSMLAEDAIKAALADYKLKQEPKKGEAEKK

SEQ ID NO: 812895 - protein, 203 aa, Homo sapiens
RSFGDVREARSQLGADSQTRPAPRRRSGLAQAQAGKMAAAGAGRLRRVASALLLRSPRLPARELSAPARLYHKKVVDHYENPRNVGSLDKTSKNVGTGLVGAPACGDVMKLQIQVDEKGKIVDARFKTFGCGSAIASSSLATEWVKGKTVEEALTIKNTDIAKELCLPPVKLHCSMLAEDAIKAALADYKLKQEPKKGEAEKK

SEQ ID NO: 812896 - protein, 127 aa, Homo sapiens; identical to SEQ ID NO: 812893

SEQ ID NO: 812897 - protein, 127 aa, Homo sapiens; identical to SEQ ID NO: 812893

SEQ ID NO: 812898 - protein, 127 aa, Homo sapiens; identical to SEQ ID NO: 812893

SEQ ID NO: 812899 - protein, 142 aa, Homo sapiens
MVLIDMSVDLSTQVVDHYENPRNVGSLDKTSKNVGTGLVGAPACGDVMKLQIQVDEKGKIVDARFKTFGCGSAIASSSLATEWVKGKTVEEALTIKNTDIAKELCLPPVKLHCSMLAEDAIKAALADYKLKQEPKKGEAEKK

SEQ ID NO: 812900 - protein, 127 aa, Homo sapiens; identical to SEQ ID NO: 812893

SEQ ID NO: 812901 - protein, 203 aa, Homo sapiens; identical to SEQ ID NO: 812895

SEQ ID NO: 812902 - protein, 127 aa, Homo sapiens; identical to SEQ ID NO: 812893

SEQ ID NO: 812903 - protein, 190 aa, Homo sapiens
RSFGDVREARSQLGADSQTRPAPRRRSGLAQAQAGKMAAAGAGRLRRVASALLLRSPRLPARELSAPARLYHKKVVDHYENPRNVGSLDKTSKNVGTGLVGAPACGDVMKLQIQVDEKGKIVDARFKTFGCGSAIASSSLATEWVKGKTVEEALTIKNTDIAKELCLPPVKLHCSKSVLFPAEEKTQLSP

SEQ ID NO: 812904 - protein, 127 aa, Homo sapiens; identical to SEQ ID NO: 812893

SEQ ID NO: 812905 - protein, 190 aa, Homo sapiens; identical to SEQ ID NO: 812903

SEQ ID NO: 812906 - protein, 127 aa, Homo sapiens; identical to SEQ ID NO: 812893

SEQ ID NO: 812907 - protein, 218 aa, Homo sapiens
RSFGDVREARSQLGADSQTRPAPRRRSGLAQAQAGKMAAAGAGRLRRVASALLLRSPRLPARELSAPARLYHKKVVDHYENPRNVGSLDKTSKNVGTGLVGAPACGDVMKLQIQVDEKGKIVDARFKTFGCGSAIASSSLATEWVKGKTVEEALTIKNTDIAKELCLPPVKLHCSMLAEDAIKAALADYKLKQEPKKHQLFPTCCAVTLDVQKPLPLH

SEQ ID NO: 812908 - protein, 190 aa, Homo sapiens
RSFGDVREARSQLGADSQTRPAPRRRSGLAQAQAGKMAAAGAGRLRRVASALLLRSPRLPARELSAPARLYHKKVVDHYENPRNVGSLDKTSKNVGTGLVGAPACGDVMKLQIQVDEKGKIVDARFKTFGCGSAIASSSLATEWVKGKTVEEALTIKNTDIAKELCLPPVKLHCSSKSLLSIPVSWDIWQ

SEQ ID NO: 812909 - protein, 82 aa, Homo sapiens
RSFGDVREARSQLGADSQTRPAPRRRSGLAQAQAGKMAAAGAGRLRRVASALLLRSPRLPARELSAPARLYHKKVSQICEVL

SEQ ID NO: 812910 - protein, 203 aa, Homo sapiens; identical to SEQ ID NO: 812895

SEQ ID NO: 812911 - protein, 415 aa, Homo sapiens [sequence omitted]

SEQ ID NO: 812912 - protein, 410 aa, Homo sapiens
MPNPKNSKGGRKNKRANSSGDEQENGAGALAAAGAAGAAFRFCSCRCGQGHLKKDTDWYQVKRMQDEKKKKSGSEKNTGRPPGEAAEEAKKCRPPNKPQKGPSHDLPRRHSMDRQNSQEKAVGAAAYGARSPGGSPGQSPPTGYSILSPAHFSGPRSSRYLGEFLKNAIHLEPHKKAMAGGHVFRNAHFDYSPAGLAVHRGGHFDTPVQFLRRLDLSELLTHIPRHKLNTFHVRMEDDAQVGQGEDLRKFILAALSASHRNVVNCALCHRALPVFEQFPLVDGTLFLSPSRHDEIEYDVPCHLQGRLMHLYAVCVDCLEGVHKIICIKCKSRWDGSWHQLGTMYTYDILAASPCCQARLNCKHCGKPVIDVRIGMQYFSEYSNVQQCPHCGNLDYHFVKPFSSFKVLEAY

SEQ ID NO: 812913 - protein, 415 aa, Homo sapiens [sequence omitted]

SEQ ID NO: 812914 - protein, 315 aa, Homo sapiens
PFPSGSGASRLRPGPAAPARLRASGGRVPAPGSRRGRGGQDGAARAVRLDGSRGNRRLAPSVLSRSRLHAGPGTAVPLGSAFADAGHLPGRERARCPTPKTAKAAAKTSAPTAAATSRKMEPGPWQRRARRERRPGGPWRRRPVAGRRRRARRAPEARRAPEARGLAPRTLRPPRGLRPRAMPKTVRRGWRGERQLPPRRGRRGGGALGGAGGAWTMRESGSAHPAPPPRRGCPFAVPTPGGGDRSAAPARCPRGGQPAPHTLRGSRLRQRCPRAQPAARAGTAPPCVPGRREEGREERAAQVEKNDPIENLGTG

SEQ ID NO: 812915 - protein, 105 aa, Homo sapiens
MPNPKNSKGGRKNKRANSSGDEQENGAGALAAAGAAGAAAGGALAAAAGCGAAAAGAPGAGGAAGAGGAGTGAANAAAAAGAAAAGDAKNGKPKGGRKGGKSRPS

SEQ ID NO: 812916 - protein, 1000 aa, Homo sapiens
MAERKPNGGSGGASTSSSGTNLLFSSSATEFSFNVPFIPVTQASASPASLLLPGEDSTDVGEEDSFLGQTSIHTSAPQTFSYFSQVSSSSDPFGNIGQSPLTTAATSVGQSGFPKPLTALPFTTGSQDVSNAFSPSISKAQPGAPPSSLMGINSYLPSQPSSLPPSYFGNQPQGIPQPGYNPYRHTPGSSRANPYIAPPQLQQCQTPGPPAHPPPSGPPVQMYQMPPGSLPPVPSSVQSPAQQQVPARPGAPSVQVPSPFLLQNQYEPVQPHWFYCKEVEYKQLWMPFSVFDSLNLEEIYNSVQPDPESVVLGTDGGRYDVYLYDRIRKAAYWEEEPAEVRRCTWFYKGDTDSRFIPYTEEFSEKLEAEYKKAVTTNQWHRRLEFPSGETIVMHNPKVIVQFQPSSVPDEWGTTQDGQTRPRVVKRGIDDNLDEIPDGEMPQVDHLVFVVHGIGPVCDLRFRSIIECVDDFRVVSLKLLRTHFKKSLDDGKVSRVEFLPVHWHSSLGGDATGVDRNIKKITLPSIGRFRHFTNETLLDILFYNSPTYCQTIVEKVGMEINHLHALFMSRNPDFKGGVSVAGHSLGSLILFDILSNQKDLNLSKCPGPLAVANGVVKQLHFQEKQMPEEPKLTLDESYDLVVENEEVLTLQETLEALSLSEYFSTFEKEKIDMESLLMCTVDDLKEMGIPLGPRKKIANFVEHKAAKLKKAASEKKAVAATSTKGQEQSAQKTKDMASLPSESNEPKRKLPVGACVSSVCVNYESFEVGAGQVSVAYNSLDFEPEIFFALGSPIAMFLTIRGVDRIDENYSLPTCKGFFNIYHPLDPVAYRLEPMIVPDLDLKAVLIPHHKGRKRLHLELKESLSRMGSDLKQGFISSLKSAWQTLNEFARAHTSSTQLQEELEKVANQIKEEEEKQVVEAEKVVESPDFSKDEDYLGKVGMLNGGRRIDYVLQEKPIESFNEYLFALQSHLCYWESEDTALLLLKEIYRTMNISPEQPQH

SEQ ID NO: 812917 - protein, 109 aa, Homo sapiens
GQERDRFPVSGVVPGTRRRVSDGGPQPWPRENLTVAAAAPPLPHRALTYFSPPRPRSSASMCPSSQSPRPPLLRPPCSYREFFISKKQVFKEKKKKLFFCNAEIASLKN

SEQ ID NO: 812918 - protein, 1000 aa, Homo sapiens; identical to SEQ ID NO: 812916

SEQ ID NO: 812919 - protein, 1000 aa, Homo sapiens; identical to SEQ ID NO: 812916

SEQ ID NO: 812920 - protein, 788 aa, Homo sapiens
MAERKPNGGSGGASTSSSGTNLLFSSSATEFSFNVPFIPVTQASASPASLLLPGEDSTDVGEEDSFLGQTSIHTSAPQTFSYFSQVSSSSDPFGNIGQSPLTTAATSVGQSGFPKPLTALPFTTGSQDVSNAFSPSISKAQPGAPPSSLMGINSYLPSQPSSLPPSYFGNQPQGIPQPGYNPYRHTPGSSRANPYIAPPQLQQCQTPGPPAHPPPSGPPVQMYQMREMPQVDHLVFVVHGIGPVCDLRFRSIIECVDDFRVVSLKLLRTHFKKSLDDGKVSRVEFLPVHWHSSLGGDATGVDRNIKKITLPSIGRFRHFTNETLLDILFYNSPTYCQTIVEKVGMEINHLHALFMSRNPDFKGGVSVAGHSLGSLILFDILSNQKDLNLSKCPGPLAVANGVVKQLHFQEKQMPEEPKLTLDESYDLVVENEEVLTLQETLEALSLSEYFSTFEKEKIDMESLLMCTVDDLKEMGIPLGPRKKIANFVEHKAAKLKKAASEKKAVAATSTKGQEQSAQKTKDMASLPSESNEPKRKLPVGACVSSVCVNYESFEVGAGQVSVAYNSLDFEPEIFFALGSPIAMFLTIRGVDRIDENYSLPTCKGFFNIYHPLDPVAYRLEPMIVPDLDLKAVLIPHHKGRKRLHLELKESLSRMGSDLKQGFISSLKSAWQTLNEFARAHTSSTQLQEELEKVANQIKEEEEKQVVEAEKVVESPDFSKDEDYLGKVGMLNGGRRIDYVLQEKPIESFNEYLFALQSHLCYWESEDTALLLLKEIYRTMNISPEQPQH

SEQ ID NO: 812921 - protein, 970 aa, Homo sapiens
MAERKPNGGSGGASTSSSGTNLLFSSSATEFSFNVPFIPVTQASASPASLLLPGEDSTDVGEEDSFLGQTSIHTSAPQTFSYFSQVSSSSDPFGNIGQSPLTTAATSVGQSGFPKPLTALPFTTGSQDVSNAFSPSISKAQPGAPPSSLMGINSYLPSQPSSLPPSYFGNQPQGIPQPGYNPYRHTPGSSRANPYIAPPQLQQCQTPGPPAHPPPSGPPVQMYQMPPGSLPPVPSSVQSPAQQQVPARPGAPSVQVPSPFLLQNQYEPVQPHWFYCKEVEYKQLWMPFSVFDSLNLEEIYNSVQPDPESVVLGTDGGRYDVYLYDRIRKAAYWEEEPAEVRRCTWFYKGDTDSRFIPYTEEFSEKLEVIVQFQPSSVPDEWGTTQDGQTRPRVVKRGIDDNLDEIPDGEMPQVDHLVFVVHGIGPVCDLRFRSIIECVDDFRVVSLKLLRTHFKKSLDDGKVSRVEFLPVHWHSSLGGDATGVDRNIKKITLPSIGRFRHFTNETLLDILFYNSPTYCQTIVEKVGMEINHLHALFMSRNPDFKGGVSVAGHSLGSLILFDILSNQKDLNLSKCPGPLAVANGVVKQLHFQEKQMPEEPKLTLDESYDLVVENEEVLTLQETLEALSLSEYFSTFEKEKIDMESLLMCTVDDLKEMGIPLGPRKKIANFVEHKAAKLKKAASEKKAVAATSTKGQEQSAQKTKDMASLPSESNEPKRKLPVGACVSSVCVNYESFEVGAGQVSVAYNSLDFEPEIFFALGSPIAMFLTIRGVDRIDENYSLPTCKGFFNIYHPLDPVAYRLEPMIVPDLDLKAVLIPHHKGRKRLHLELKESLSRMGSDLKQGFISSLKSAWQTLNEFARAHTSSTQLQEELEKVANQIKEEEEKQVVEAEKVVESPDFSKDEDYLGKVGMLNGGRRIDYVLQEKPIESFNEYLFALQSHLCYWESEDTALLLLKEIYRTMNISPEQPQH

SEQ ID NO: 812922 - protein, 982 aa, Homo sapiens
MAERKPNGGSGGASTSSSGTNLLFSSSATEFSFNVPFIPVTQASASPASLLLPGEDSTDVGEEDSFLGQTSIHTSAPQTFSYFSQVSSSSDPFGNIGQSPLTTAATSVGQSGFPKPLTALPFTTGSQDVSNAFSPSISKAQPGAPPSSLMGINSYLPSQPSSLPPSYFGNQPQGIPQPGYNPYRHTPGSSRANPYIAPPQLQQCQTPGPPAHPPPSGPPVQMYQMPPGSLPPVPSSVQSPAQQQVPARPGAPSVQVPSPFLLQNQYEPVQPHWFYCKEVEYKQLWMPFSVFDSLNLEEIYNSVQPDPESVVLGTDGGRYDVYLYDRIRKAAYWEEEPAEVRRCTWFYKGDTDSRFIPYTEEFSEKLEAEYKKAVTTNQWHRRLEFPSGETIVMHNPKVIVQFQPSSVPDEWGTTQDGQTRPRVVKRGIDDNLDEIPDGEMPQVDHLVFVVHGIGPVCDLRFRSIIECVDDFRVVSLKLLRTHFKKSLDDGKVSRVEFLPVHWHSSLGGDATGVDRNIKKITLPSIGRFRHFTNETLLDILFYNSPTYCQTIVEKVGMEINHLHALFMSRNPDFKGGVSVAGHSLGSLILFDILSNQKDLNLSKCPGPLAVANGVVKQLHFQEKQMPEEPKLTLDESYDLVVENEEVLTLQETLEALSLSEYFSTFEKEKIDMESLLMCTVDDLKEMGIPLGPRKKIANFVEHKAAKLKKAASEKKAVAATSTKSNEPKRKLPVGACVSSVCVNYESFEVGAGQVSVAYNSLDFEPEIFFALGSPIAMFLTIRGVDRIDENYSLPTCKGFFNIYHPLDPVAYRLEPMIVPDLDLKAVLIPHHKGRKRLHLELKESLSRMGSDLKQGFISSLKSAWQTLNEFARAHTSSTQLQEELEKVANQIKEEEEKQVVEAEKVVESPDFSKDEDYLGKVGMLNGGRRIDYVLQEKPIESFNEYLFALQSHLCYWESEDTALLLLKEIYRTMNISPEQPQH

SEQ ID NO: 812923 - protein, 561 aa, Homo sapiens [sequence omitted]

SEQ ID NO: 812924 - protein, 1000 aa, Homo sapiens; identical to SEQ ID NO: 812916

SEQ ID NO: 812925 - protein, 806 aa, Homo sapiens
MAERKPNGGSGGASTSSSGTNLLFSSSATEFSFNVPFIPVTQASASPASLLLPGEDSTDVGEEDSFLGQTSIHTSAPQTFSYFSQVSSSSDPFGNIGQSPLTTAATSVGQSGFPKPLTALPFTTGSQDVSNAFSPSISKAQPGAPPSSLMGINSYLPSQPSSLPPSYFGNQPQGIPQPGYNPYRHTPGSSRANPYIAPPQLQQCQTPGPPAHPPPSGPPVQMYQMPPGSLPPVPSSVQSPAQQQVPARPGAPSVQVPSPFLLQNQYEPVQPHWFYCKEVEYKQLWMPFSVFDSLNLEEIYNSVQPDPESVVLGTDGGRYDVYLYDRIRKAAYWEEEPAEVRRCTWFYKGDTDSRFIPYTEEFSEKLEAEYKKAVTTNQWHRRLEFPSGETIVMHNPKVIVQFQPSSVPDEWGTTQDGQTRPRVVKRGIDDNLDEIPDGEMPQVDHLVFVVHGIGPVCDLRFRSIIECVDDFRVVSLKLLRTHFKKSLDDGKVSRVEFLPVHWHSSLGGDATGVDRNIKKITLPSIGRFRHFTNETLLDILFYNSPTYCQTIVEKVGMEINHLHALFMSRNPDFKGGVSVAGHSLGSLILFDILSNQKDLNLSKCPGPLAVANGVVKQLHFQEKQMPEEPKLTLDESYDLVVENEEVLTLQETLEALSLSEYFSTFEKEKIDMESLLMCTVDDLKEMGIPLGPRKKIANFVEHKAAKLKKAASEKKAVAATSTKSNEPKRKLPVGACVSSVCVNYESFEVGAGQVSVAYNSLDFEPEIFFALGSPIAMFLTIRGVDRIDENYSLPTCKGFFNIYHPN

SEQ ID NO: 812926 - protein, 861 aa, Homo sapiens
MAERKPNGGSGGASTSSSGTNLLFSSSATEFSFNVPFIPVTQASASPASLLLPGEDSTDVGEEDSFLGQTSIHTSAPQTFSYFSQVSSSSDPFGNIGQSPLTTAATSVGQSGFPKPLTALPFTTGSQDVSNAFSPSISKAQPGAPPSSLMGINSYLPSQPSSLPPSYFGNQPQGIPQPGYNPYRHTPGSSRANPYIAPPQLQQCQTPGPPAHPPPSGPPVQMYQMPPGSLPPVPSSVQSPAQQQVPARPGAPSVQVPSPFLLQNQYEPVQPHWFYCKEVEYKQLWMPFSVFDSLNLEEIYNSVQPDPESVVLGTDGGRYDVYLYDRIRKAAYWEEEPAEVRRCTWFYKGDTDSRFIPYTEEFSEKLEAEYKKAVTTNQWHRRLEFPSGETIVMHNPKVIVQFQPSSVPDEWGTTQDGQTRPRVVKRGIDDNLDEIPDGEMPQVDHLVFVVHGIGPVCDLRFRSIIECVDDFRVVSLKLLRTHFKKSLDDGKVSRVEFLPVHWHSSLGGDATGVDRNIKKITLPSIGRFRHFTNETLLDILFYNSPTYCQTIVEKVGMEINHLHALFMSRNPDFKGGVSVAGHSLGSLILFDILSNQKDLNLSKCPGPLAVANGVVKQLHFQEKQMPEEPKLTLDESYDLVVENEEVLTLQETLEALSLSEYFSTFEKEKIDMESLLMCTVDDLKEMGIPLGPRKKIANFVEHKAAKLKKAASEKKAVAATSTKGQEQSAQKTKDMASLPSESNEPKRKLPVGACVSSVCVNYESFEVGAGQVSVAYNSLDFEPEIFFALGSPIAMFLTIRGVDRIDENYSLPTCKGFFNIYHPLDPVAYRLEPMIVPDLDLKAVLIPHHKGRKRLHLAGFY

SEQ ID NO: 812927 - protein, 1000 aa, Homo sapiens; identical to SEQ ID NO: 812916

SEQ ID NO: 812928 - protein, 387 aa, Homo sapiens
MAERKPNGGSGGASTSSSGTNLLFSSSATEFSFNVPFIPVTQASASPASLLLPGEDSTDVGEEDSFLGQTSIHTSAPQTFSYFSQVSSSSDPFGNIGQSPLTTAATSVGQSGFPKPLTALPFTTGSQDVSNAFSPSISKAQPGAPPSSLMGINSYLPSQPSSLPPSYFGNQPQGIPQPGYNPYRHTPGSSRANPYIAPPQLQQCQTPGPPAHPPPSGPPVQMYQMPPGSLPPVPSSVQSPAQQQVPARPGAPSVQVPSPFLLQNQYEPVQPHWFYCKEVEYKQLWMPFSVFDSLNLEEIYNSVQPDPESVVLGTDGGRYDVYLYDRIRKAAYWEEEPAEVRRCTWFYKGDTDSRFIPYTEEFSEKLEVRVLYFFMSFFKKCRSYIHW

SEQ ID NO: 812929 - protein, 493 aa, Homo sapiens
MWPQDPSRKEVLRFAVSCRILTLMLQALFNAIIPDHHAEAFSPPRLAPSGFVDQLVEGLLGGLSHWDAEHFLFIAEHGYLYEHNFAFFPGFPLALLVGTELLRPLRGLLSLRSCLLISVASLNFLFFMLAAVALHDLGCLVLHCPHQSFYAALLFCLSPANVFLAAGYSEALFALLTFSAMGQLERGRVWTSVLLFAFATGVRSNGLVSVGFLMHSQCQGFFSSLTMLNPLRQLFKLMASLFLSVFTLGLPFALFQYYAYTQFCLPGSARPIPEPLVQLAVDKGYRIAEGNEPPWCFWDVPLIYSYIQDVYWNVGFLKYYELKQVPNFLLAAPVAILVAWATWTYVTTHPWLCLTLGLQRSKNNKTLEKPDLGFLSPQVFVYVVHAAVLLLFGGLCMHVQVLTRFLGSSTPIMYWFPAHLLQDQEPLLRSLKTVPWKPLAEDSPPGQKVPRNPIMGLLYHWKTCSPVTRYILGYFLTYWLLGLLLHCNFLPWT

SEQ ID NO: 812930 - protein, 493 aa, Homo sapiens; identical to SEQ ID NO: 812929

SEQ ID NO: 812931 - protein, 33 aa, Homo sapiens
MQKPSLLLAPQLGAIGEVSGAALGVTFVWACTV

SEQ ID NO: 812932 - protein, 493 aa, Homo sapiens; identical to SEQ ID NO: 812929

SEQ ID NO: 812933 - protein, 493 aa, Homo sapiens; identical to SEQ ID NO: 812929

SEQ ID NO: 812934 - protein, 493 aa, Homo sapiens; identical to SEQ ID NO: 812929

SEQ ID NO: 812935 - protein, 469 aa, Homo sapiens
MKALFNAIIPDHHAEAFSPPRLAPSGFVDQLVEGLLGGLSHWDAEHFLFIAEHGYLYEHNFAFFPGFPLALLVGTELLRPLRGLLSLRSCLLISVASLNFLFFMLAAVALHDLGCLVLHCPHQSFYAALLFCLSPANVFLAAGYSEALFALLTFSAMGQLERGRVWTSVLLFAFATGVRSNGLVSVGFLMHSQCQGFFSSLTMLNPLRQLFKLMASLFLSVFTLGLPFALFQYYAYTQFCLPGSARPIPEPLVQLAVDKGYRIAEGNEPPWCFWDVPLIYSYIQDVYWNVGFLKYYELKQVPNFLLAAPVAILVAWATWTYVTTHPWLCLTLGLQRSKNNKTLEKPDLGFLSPQVFVYVVHAAVLLLFGGLCMHVQVLTRFLGSSTPIMYWFPAHLLQDQEPLLRSLKTVPWKPLAEDSPPGQKVPRNPIMGLLYHWKTCSPVTRYILGYFLTYWLLGLLLHCNFLPWT

SEQ ID NO: 812936 - protein, 434 aa, Homo sapiens [sequence omitted]

SEQ ID NO: 812937 - protein, 105 aa, Homo sapiens [sequence omitted]

SEQ ID NO: 812938 - protein, 487 aa, Homo sapiens
MLEHLVLLLPPTTSKTQTLDYLSPIPFWPTFPSTSSPAQHFGPRLPSPDPTLFCSLLTSWPPRFSHLTQLHPRHQRILQQQQHSQTPREPHFLLTTLLRKCQWWVSLKGCSSWLKVPQPRSLGLSSQTPDANLMTRKEKDWVIKVQMVQLQSAKPRLDDYYYQEYYQKLEKKQADEELLGRRNRVESLKLVTPYIPKAEAYESVVRIEGSLGQVAVSTCFSPRRAIDAVPHGTQEQDIEAASSQRLRVLYRIEKMFLQLLEIEEGWKYRPPPPCFSEQQSNQVEKLFQTLKTQEQNNLEEAADGFLQVLSVRKGKALVARLLPFLPQDQAVTILLAITHHLPLLVRRDVADQALQMLFKPLGKCISHLTLHELLQGLQGLTLLPPGSSERPVTVVLQNQFGISLLYALLSHGEQLVSLHSSLEEPNSDHTAWTDMVVLIAWEIAQMPTASLAEPLAFPSNLLPLFCHHVDKQLVQQLEARMEFAWIY

SEQ ID NO: 812939 - protein, 484 aa, Homo sapiens
MLGMSLASLHFLWQTLDYLSPIPFWPTFPSTSSPAQHFGPRLPSPDPTLFCSLLTSWPPRFSHLTQLHPRHQRILQQQQHSQTPREPHFLLTTLLRKCQWWVSLKGCSSWLKVPQPRSLGLSSQTPDANLMTRKEKDWVIKVQMVQLQSAKPRLDDYYYQEYYQKLEKKQADEELLGRRNRVESLKLVTPYIPKAEAYESVVRIEGSLGQVAVSTCFSPRRAIDAVPHGTQEQDIEAASSQRLRVLYRIEKMFLQLLEIEEGWKYRPPPPCFSEQQSNQVEKLFQTLKTQEQNNLEEAADGFLQVLSVRKGKALVARLLPFLPQDQAVTILLAITHHLPLLVRRDVADQALQMLFKPLGKCISHLTLHELLQGLQGLTLLPPGSSERPVTVVLQNQFGISLLYALLSHGEQLVSLHSSLEEPNSDHTAWTDMVVLIAWEIAQMPTASLAEPLAFPSNLLPLFCHHVDKQLVQQLEARMEFAWIY

SEQ ID NO: 812940 - protein, 221 aa, Homo sapiens
MFGFHKPKMYRSIEGCCICRAKSSSSRFTDSKRYEKDFQSCFGLHETRSGDICNACVLLVKRWKKLPAGSKKNWNHVVDARAGPSLKTTLKPKKVKTLSGNRIKSNQISKLQKEFKRHNSDAHSTTSSASPAQSPCYSNQSDDGSDTEMASGSNRTPVFSFLDLTYWKRQKICCGIIYKGRFGEVLIDTHLFKPCCSNKKAAAEKPEEQGPEPLPISTQEW

SEQ ID NO: 812941 - protein, 221 aa, Homo sapiens; identical to SEQ ID NO: 812940

SEQ ID NO: 812942 - protein, 100 aa, Homo sapiens
DKAESTPSRPAVATAELQETIFLDKAVEEEGALEGDWPGVHSAPRGHYCAWNGCFWKILMLTVPPQVPPQLNLLVTVTSQMTAQIQRWLLVLTEHQFFPF

SEQ ID NO: 812943 - protein, 73 aa, Homo sapiens
GKAESTPSRPAVATAELQETIFLDKAVEEEGALEGDWPGVHSAPRGHYCAWNGCFWKAQLPEWTMTPTKDPCL

SEQ ID NO: 812944 - protein, 175 aa, Homo sapiens
MFGFHKPKMYRSIEGCCICRAKSSSSRFTDSKRYEKDFQSCFGLHETRSGDICNACVLLVKRWKKLPAGSLKPKKVKTLSGNRIKSNQISKLQKEFKRHNSDAHSTTSSASPAQSPCYSNQSDDGSDTEMASGSNRTPVFSFLDLTYWKRGDDICWGIHTAMGRPLTHSGLVDIL

SEQ ID NO: 812945 - protein, 221 aa, Homo sapiens; identical to SEQ ID NO: 812940

SEQ ID NO: 812946 - protein, 335 aa, Homo sapiens
ELRQGKAMRRNKPRQRGVREARPAGGAGPGWRGARCSGAGEGGGGERRGSPPAALALAPASGPRRNFPPDARCLIYQQIHQGAFLLAGSASLSAVTGVPEGEARFTEDYCPEEKMFGFHKPKMYRSIEGCCICRAKSSSSRFTDSKRYEKDFQSCFGLHETRSGDICNACVLLVKRWKKLPAGSKKNWNHVVDARAGPSLKTTLKPKKVKTLSGNRIKSNQISKLQKEFKRHNSDAHSTTSSASPAQSPCYSNQSDDGSDTEMASGSNRTPVFSFLDLTYWKRQKICCGIIYKGRFGEVLIDTHLFKPCCSNKKAAAEKPEEQGPEPLPISTQEW

SEQ ID NO: 812947 - protein, 221 aa, Homo sapiens; identical to SEQ ID NO: 812940

SEQ ID NO: 812948 - protein, 202 aa, Homo sapiens
MFGFHKPKMYRSIEGCCICRAKSSSSRFTDSKRYEKDFQSCFGLHETRSGDICNACVLLVKRWKKLPAGSLKPKKVKTLSGNRIKSNQISKLQKEFKRHNSDAHSTTSSASPAQSPCYSNQSDDGSDTEMASGSNRTPVFSFLDLTYWKRQKICCGIIYKGRFGEVLIDTHLFKPCCSNKKAAAEKPEEQGPEPLPISTQEW

SEQ ID NO: 812949 - protein, 221 aa, Homo sapiens; identical to SEQ ID NO: 812940

SEQ ID NO: 812950 - protein, 285 aa, Homo sapiens
ELRQGKAMRRNKPRQRGVREARPAGGAGPGWRGARCSGAGEGGGGERRGSPPAALALAPASGPRRNFPPDARCLIYQQIHQGAFLLAGSASLSAVTGVPEGEARFTEDYCPEEKMFGFHKPKMYRSIEGCCICRAKSSSSRFTDSKRYEKDFQSCFGLHETRSGDICNACVLLVKRWKKLPAGSKKNWNHVVDARAGPSLKTTLKPKKVKTLSGNRIKSNQISKLQKEFKRHNSDAHSTTSSASPAQSPCYSNQSDDGSDTEMASGSNRTPVFSFLDLTYWKSPH

SEQ ID NO: 812951 - protein, 191 aa, Homo sapiens
MAMHNKAAPPQIPDTRRELAELVKRKQELAETLANLERQIYAFEGSYLEDTQMYGNIIRGWDRYLTNQKNSNSKNDRRNRKFKEAERLFSKSSVTSAAAVSALAGVQDQLIEKREPGSGTESDTSPDFHNQENEPSQEDPEDLDGSVQGVKPQKAASSTSSGSHHSSHKKRKNKNRHRIDLKLNKKPRADY

SEQ ID NO: 812952 - protein, 181 aa, Homo sapiens
MAMHNKAAPPQIPDTRRELAELVKRKQELAETLANLERQIYAFEGSYLEDTQMYGNIIRGWDRYLTNQKNSNSKNDRRNRKFKEAERLFSKSSVTSAAAVSALAGVQDQLIEKREPGSGTESDTSPDFHNQENEPSQEDPEDLDGSVQGVKPQKAASSTSSGSHHSSHKKRKNKNRHRGSN

SEQ ID NO: 812953 - protein, 191 aa, Homo sapiens; identical to SEQ ID NO: 812951

SEQ ID NO: 812954 - protein, 201 aa, Homo sapiens
MAMHNKAAPPQIPDTRRELAELVKRKQELAETLANLERQIYAFEGSYLEDTQMYGNIIRGWDRYLTNQKNSNSKNDRRNRKFKEAERLFSKSSVTSAAAVSALAGVQDQLIEKREPGSGTESDTSPDFHNQENEPSQEDPEDLDGSVQGVKPQKAASSTSSGSHHSSHKKRKNKNRHSPSGMFDYDFEIDLKLNKKPRADY

SEQ ID NO: 812955 - protein, 181 aa, Homo sapiens
MAMHNKAAPPQIPDTRRELAELVKRKQELAETLANLERQIYAFEGSYLEDTQMYGNIIRGWDRYLTNQKNSNSKNDRRNRKFKEAERLFSKSSVTSAAAVSALAGVQDQLIEKREPGSGTESDTSPDFHNQENEPSQEDPEDLDGSVQGVKPQKAASSTSSGSHHSSHKKRKNKNRHRYVY

SEQ ID NO: 812956 - protein, 191 aa, Homo sapiens
MAMHNKAAPPQIPDTRRELAELVKRKQELAETLANLERQIYAFEGSYLEDTQMYGNIIRGWDRYLTNQKNSNSKNDRRNRKFKEAERLFSKSSVTSAAAVSALAGVQDQLIEKREPGSGTESDTSPDFHNQENEPSQEDPEDLDGSVQGVKPQKAASSTSSGSHHSSHKKRKNKNRHRTIRRHISAEASRL

SEQ ID NO: 812957 - protein, 181 aa, Homo sapiens; identical to SEQ ID NO: 812955

SEQ ID NO: 812958 - protein, 149 aa, Homo sapiens
MYGNIIRGWDRYLTNQKNSNSKNDRRNRKFKEAERLFSKSSVTSAAAVSALAGVQDQLIEKREPGSGTESDTSPDFHNQENEPSQEDPEDLDGSVQGVKPQKAASSTSSGSHHSSHKKRKNKNRHSPSGMFDYDFEIDLKLNKKPRADY

SEQ ID NO: 812959 - protein, 198 aa, Homo sapiens
MAMHNKAAPPQIPDTRRELAELVKRKQELAETLANLERQIYAFEGSYLEDTQMYGNIIRGWDRYLTNQKNSNSKNDRRNRKFKEAERLFSKSSVTSAAAVSALAGVQDQLIEKREPGSGTESDTSPDFHNQENEPSQEDPEDLDGSVQGVKPQKAASSTSSGSHHSSHKKRKNKNRHRVSGRDPTPAAPMTIAVKGIA

SEQ ID NO: 812960 - protein, 211 aa, Homo sapiens
RAEFGTSGTRQFSQEKAMFSSSAKIVKPNGEKPDEFESGISQALLELEMNSDLKAQLRELNITAAKEIEVGGGRKAIIIFVPVPQLKSFQKIQVRLVRELEKKFSGKHVVFIAQRRILPKPTRKSRTKNKQKRPRSRTLTAVHDAILEDLVFPSEIVGKRIRVKLDGSRLIKVHLDKAQQNNVEHKVETFSGVYKKLTGKDVNFEFPEFQL

SEQ ID NO: 812961 - protein, 218 aa, Homo sapiens
  misc_feature (3)..(3): Xaa can be any naturally occurring amino acid
ELXEPLCCRNSARGRSFEFSQEKAMFSSSAKIVKPNGEKPDEFESGISQALLELEMNSDLKAQLRELNITAAKEIEVGGGRKAIIIFVPVPQLKSFQKIQVRLVRELEKKFSGKHVVFIAQRRILPKPTRKSRTKNKQKRPRSRTLTAVHDAILEDLVFPSEIVGKRIRVKLDGSRLIKVHLDKAQQNNVEHKVETFSGVYKKLTGKDVNFEFPEFQL

SEQ ID NO: 812962 - protein, 194 aa, Homo sapiens [sequence omitted]

SEQ ID NO: 812963 - protein, 211 aa, Homo sapiens; identical to SEQ ID NO: 812960

SEQ ID NO: 812964 - protein, 119 aa, Homo sapiens
GLGACVAPARPGGCASLLHLTNATFLPSRLAGPFQGNSQDVVTCRVQVFLVPGTSRLRGGACQGVGKRIRVKLDGSRLIKVHLDKAQQNNVEHKVETFSGVYKKLTGKDVNFEFPEFQL

SEQ ID NO: 812965 - protein, 87 aa, Homo sapiens
AAAYYYYTTINSRPRRQFDADSLAHNFLGKTNVGKRIRVKLDGSRLIKVHLDKAQQNNVEHKVETFSGVYKKLTGKDVNFEFPEFQL

SEQ ID NO: 812966 - protein, 46 aa, Homo sapiens
  misc_feature (33)..(33): Xaa can be any naturally occurring amino acid
MFSSSAKIVKPNGEKPDEFESGISQVRGFPWGXGWGEAPRPGGEAA

SEQ ID NO: 812967 - protein, 194 aa, Homo sapiens [sequence omitted]

SEQ ID NO: 812968 - protein, 236 aa, Homo sapiens
MASAGRAGPGRGVRAGGRASGACSPGRVTLTAVPSEFSQEKAMFSSSAKIVKPNGEKPDEFESGISQALLELEMNSDLKAQLRELNITAAKEIEVGGGRKAIIIFVPVPQLKSFQKIQVRLVRELEKKFSGKHVVFIAQRRILPKPTRKSRTKNKQKRPRSRTLTAVHDAILEDLVFPSEIVGKRIRVKLDGSRLIKVHLDKAQQNNVEHKVETFSGVYKKLTGKDVNFEFPEFQL

SEQ ID NO: 812969 - protein, 194 aa, Homo sapiens [sequence omitted]

SEQ ID NO: 812970 - protein, 194 aa, Homo sapiens [sequence omitted]

SEQ ID NO: 812971 - protein, 165 aa, Homo sapiens
MARNSDLKAQLRELNITAAKEIEVGGGRKAIIIFVPVPQLKSFQKIQVRLVRELEKKFSGKHVVFIAQRRILPKPTRKSRTKNKQKRPRSRTLTAVHDAILEDLVFPSEIVGKRIRVKLDGSRLIKVHLDKAQQNNVEHKVETFSGVYKKLTGKDVNFEFPEFQL

SEQ ID NO: 812972 - protein, 194 aa, Homo sapiens [sequence omitted]

SEQ ID NO: 812973 - protein, 194 aa, Homo sapiens [sequence omitted]

SEQ ID NO: 812974 - protein, 194 aa, Homo sapiens [sequence omitted]

SEQ ID NO: 812975 - protein, 194 aa, Homo sapiens [sequence omitted]

SEQ ID NO: 812976 - protein, 194 aa, Homo sapiens [sequence omitted]

SEQ ID NO: 812977 - protein, 72 aa, Homo sapiens
KTLVPRAASWDSLASYRFSVMFRFPPSSSAVSASCLRTPDFDVLSRDLGLFLSRRSASSPRRKPCSVRAPRS

SEQ ID NO: 812978 - protein, 124 aa, Homo sapiens
AAAYYYYYTARIQASNDVRGHVVFIAQRRILPKPTRKSRTKNKQKRPRSRTLTAVHDAILEDLVFPSEIVGKRIRVKLDGSRLIKVHLDKAQQNNVEHKVETFSGVYKKLTGKDVNFEFPEFQL

SEQ ID NO: 812979 - protein, 168 aa, Homo sapiens
MFSSSAKIVKPNGEKPDEFESGISQALLELEMNSDLKAQLRELNITAAKEIEVGGGRKAIIIFVPVPQLKSFQKIQVRLVRELEKKFSGKHVVFIAQRRILPKPTRKSRTKNNVGKRIRVKLDGSRLIKVHLDKAQQNNVEHKVETFSGVYKKLTGKDVNFEFPEFQL

SEQ ID NO: 812980 - protein, 132 aa, Homo sapiens
MFSSSAKIVKPNGEKPDEFESGISQALLELEMNSDLKAQLRELNITAAKEIEVGGGRKAIIIFVPVPQLKSFQKIQVRLVRELEKKFSGKHVVFIAQRRILPKPTVDYVANRGLVANRGLVANRGLVANRGL

SEQ ID NO: 812981 - protein, 112 aa, Homo sapiens
MFSSSAKIVKPNGEKPDEFESGISQALLELEMNSDLKAQLRELNITAAKEIEVGGGRKAIIIFVPVPQLKSFQKIQVRLVRELEKKFSGKHVVFIAQVSVLLLQHVSVCEFC

SEQ ID NO: 812982 - protein, 72 aa, Homo sapiens
AAAYYYYTPQIRGRVDSVGKRIRVKLDGSRLIKVHLDKAQQNNVEHKVETFSGVYKKLTGKDVNFEFPEFQL

SEQ ID NO: 812983 - protein, 315 aa, Homo sapiens
MVQQRGARAKRDGGPPPPGPGPAEEGAREPGWCKTPSGHIKRPMNAFMVWSQHERRKIMDQWPDMHNAEISKRLGRRWQLLQDSEKIPFVREAERLRLKHMADYPDYKYRPRKKSKGAPAKARPRPPGGSGGGSRLKPGPQLPGRGGRRAAGGPLGGGAAAPEDDDEDDDEELLEVRLVETPGRELWRMVPAGRAARGQAERAQGPSGEGAAAAAAASPTPSEDEEPEEEEEEAAAAEEGEEETVASGEESLGFLSRLPPGPAGLDCSALDRDPDLQPPSGTSHFEFPDYCTPEVTEMIAGDWRPSSIADLVFTY

SEQ ID NO: 812984 - protein, 315 aa, Homo sapiens; identical to SEQ ID NO: 812983

SEQ ID NO: 812985 - protein, 315 aa, Homo sapiens; identical to SEQ ID NO: 812983

SEQ ID NO: 812986 - protein, 315 aa, Homo sapiens; identical to SEQ ID NO: 812983

SEQ ID NO: 812987 - protein, 429 aa, Homo sapiens
MVQQRGARAKRDGGPPPPGPGPAEEGAREPGWCKTPSGHIKRPMNAFMVWSQHERRKIMDQWPDMHNAEISKRLGRRWQLLQDSEKIPFVREAERLRLKHMADYPDYKYRPRKKSKGAPAKARPRPPGGSGGGSRLKPGPQLPGRGGRRAAGGPLGGGAAAPEDDDEDDDEELLEVRLVETPGRELWRMVPAGRAARGQAERAQGPSGEGAAAAAAASPTPSEDEEPEEEEEEAAAAEEGEEETVASGEESLGFLSRLPPGPAGLDCSRGAHAPKPAVYIQESGIGAPRRPRLAPHLPRSLPPPGRAHPPSDPDMPLPRRHTPRQSNPHPFPDTQAPPHVAPSCTATSSQPPPIHLPSSPTDLHPSPLLHTPLLVAGGPAPSFAPESLLPRPARLLWVRGAMRPGGNARASCAPPFPGGRGAPLLSPER

SEQ ID NO: 812988 - protein, 315 aa, Homo sapiens; identical to SEQ ID NO: 812983

SEQ ID NO: 812989 - protein, 344 aa, Homo sapiens
MVQQRGARAKRDGGPPPPGPGPAEEGAREPGWCKTPSGHIKRPMNAFMVWSQHERRKIMDQWPDMHNAEISKRLGRRWQLLQDSEKIPFVREAERLRLKHMADYPDYKYRPRKKSKGAPAKARPRPPGGSGGGSRLKPGPQLPGRGGRRAAGGPLGGGAAAPEDDDEDDDEELLEVRLVETPGRELWRMVPAGRAARGQAERAQGPSGEGAAAAAAASPTPSEDEEPEEEEEEAAAAEEGEEETVASGEESLGFLSRLPPGPAGLDCSALDRDPDLQPPSGTSHFEFPTPPLPSLPVSHRRVFTLPGGSHTLIHTHKSQEQTVPESSGPLPRVSAGLCPTRSRR

SEQ ID NO: 812990 - protein, 373 aa, Homo sapiens
MVQQRGARAKRDGGPPPPGPGPAEEGAREPGWCKTPSGHIKRPMNAFMVWSQHERRKIMDQWPDMHNAEISKRLGRRWQLLQDSEKIPFVREAERLRLKHMADYPDYKYRPRKKSKGAPAKARPRPPGGSGGGSRLKPGPQLPGRGGRRAAGGPLGGGAAAPEDDDEDDDEELLEVRLVETPGRELWRMVPAGRAARGQAERAQGPSGEGAAAAAAASPTPSEDEEPEEEEEEAAAAEEGEEETVASGEESLGFLSRLPPGPAGLDCSALDRDPDLQPPSGTSHFEFPPPGWLTHSHSHTQISGTNGPRVLRTPAQGLCRSLPHAFPSLTKPPAASFKLGAPALGLSCALFFFFFFLRKTTTTKKDNEKKNVM

SEQ ID NO: 812991 - protein, 321 aa, Homo sapiens
NWRCGRHNLQRIQCRSENSKGVYCLQYDDEKIISGLRDNSIKIWDKTSLECLKVLTGHTGSVLCLQYDERVIVTGSSDSTVRVWDVNTGEVLNTLIHHNEAVLHLRFSNGLMVTCSKDRSIAVWDMASATDITLRRVLVGHRAAVNVVDFDDKYIVSASGDRTIKVWSTSTCEFVRTLNGHKRGIACLQYRDRLVVSGSSDNTIRLWDIECGACLRVLEGHEELVRCIRFDNKRIVSGAYDGKIKVWDLQAALDPRAPASTLCLRTLVEHSGRVFRLQFDEFQIISSSHDDTILIWDFLNVPPSAQNETRSPSRTYTYISR

SEQ ID NO: 812992 - protein, 71 aa, Homo sapiens
SVCSGGRTGLILGTGRHFHPVQGFLVLNYWLRGYQMPKGVRSQLSYEAGIGSRRWVDAKQPNSSSTDISHL

SEQ ID NO: 812993 - protein, 321 aa, Homo sapiens; identical to SEQ ID NO: 812991

SEQ ID NO: 812994 - protein, 444 aa, Homo sapiens
MSSTSPNLQKAIDLASKAAQEDKAGNYEEALQLYQHAVQYFLHVVKYEAQGDKAKQSIRAKCTEYLDRAEKLKEYLKNKEKKAQKPVKEGQPSPADEKGNDSDGEGESDDPEKKKLQNQLQGAIVIERPNVKWSDVAGLEGAKEALKEAVILPIKFPHLFTGKRTPWRGILLFGPPGTGKSYLAKAVATEANNSTFFSISSSDLVSKWLGESEKLVKNLFQLARENKPSIIFIDEIDSLCGSRSENESEAARRIKTEFLVQMQGVGVDNDGILVLGATNIPWVLDSAIRRRFEKRIYIPLPEPHARAAMFKLHLGTTQNSLTEADFRELGRKTDGYSGADISIIVRDALMQPVRKVQSATHFKKVRGPSRADPNHLVDDLLTPCSPGDPGAIEMTWMDVPGDKLLEPVVSMSDMLRSLSNTKPTVNEHDLLKLKKFTEDFGQEG

SEQ ID NO: 812995 - protein, 119 aa, Homo sapiens
MSSTSPNLQKAIDLASKAAQEDKAGNYEEALQLYQHAVQYFLHVVKYEAQGDKAKQSIRAKCTEYLDRAEKLKEYLKNKEKKAQKPVKEGQPSPADEKGMTVMGGESDDLATDHFRCHC

SEQ ID NO: 812996 - protein, 444 aa, Homo sapiens; identical to SEQ ID NO: 812994

SEQ ID NO: 812997 - protein, 444 aa, Homo sapiens; identical to SEQ ID NO: 812994

SEQ ID NO: 812998 - protein, 183 aa, Homo sapiens [sequence omitted]

SEQ ID NO: 812999 - protein, 136 aa, Homo sapiens [sequence omitted]

SEQ ID NO: 813000 - protein, 444 aa, Homo sapiens; identical to SEQ ID NO: 812994

SEQ ID NO: 813001 - protein, 514 aa, Homo sapiens
MALSELALVRWLQESRRSRKLILFIVFLALLLDNMLLTVVVPIIPSYLYSIKHEKNATEIQTARPVHTASISDSFQSIFSYYDNSTMVTGNATRDLTLHQTATQHMVTNASAVPSDCPSEDKDLLNENVQVGLLFASKATVQLITNPFIGLLTNRIGYPIPIFAGFCIMFVSTIMFAFSSSYAFLLIARSLQGIGSSCSSVAGMGMLASVYTDDEERGNVMGIALGGLAMGVLVGPPFGSVLYEFVGKTAPFLVLAALVLLDGAIQLFVLQPSRVQPESQKGTPLTTLLKDPYILIAAGSICFANMGIAMLEPALPIWMMETMCSRKWQLGVAFLPASISYLIGTNIFGILAHKMGRWLCALLGMIIVGVSILCIPFAKNIYGLIAPNFGVGFAIGMVDSSMMPIMGYLVDLRHVSVYGSVYAIADVAFCMGYAIGPSAGGAIAKAIGFPWLMTIIGIIDILFAPLCFFLRSPPAKEEKMAILMDHNCPIKTKMYTQNNIQSYPIGEDEESESD

SEQ ID NO: 813002 - protein, 514 aa, Homo sapiens; identical to SEQ ID NO: 813001

SEQ ID NO: 813003 - protein, 514 aa, Homo sapiens; identical to SEQ ID NO: 813001

SEQ ID NO: 813004 - protein, 514 aa, Homo sapiens; identical to SEQ ID NO: 813001

SEQ ID NO: 813005 - protein, 354 aa, Homo sapiens
MSAFDMSHDFFFCLTSEWEIQPRTKRSSLQQGFLKNQIFTGIQMQTRSYSGWKLCENCGEVFSEQFCLKTHMRAQNGGNTFEGNCYGKDSISVHKEASIGQELSKFNPCGKVFTLTPGLAVHLEILNGRQPYKCKECGKGFKYFASLDNHMGIHIGEKLCEFQECERAITTSSHLKQCVAVHTGKKSEKTKNCGKSFTNFSQLSAHAKTHKGEKSFECKECGRSFRNSSSFNVHIQIHTGIKPHKCTECGKAFTRSTHLTQHVRTHTGIKPYECKECGQAFTQYTGLAIHIRNHTGEKPYQCKECGKAFNRSSTLTQHRRIHTGEKPYECVECGKTFITSSHRSKHLKTHSGER

SEQ ID NO: 813006 - protein, 357 aa, Homo sapiens
MLENYMNLASVDFFFCLTSEWEIQPRTKRSSLQQGFLKNQIFTGIQMQTRSYSGWKLCENCGEVFSEQFCLKTHMRAQNGGNTFEGNCYGKDSISVHKEASIGQELSKFNPCGKVFTLTPGLAVHLEILNGRQPYKCKECGKGFKYFASLDNHMGIHIGEKLCEFQECERAITTSSHLKQCVAVHTGKKSEKTKNCGKSFTNFSQLSAHAKTHKGEKSFECKECGRSFRNSSSFNVHIQIHTGIKPHKCTECGKAFTRSTHLTQHVRTHTGIKPYECKECGQAFTQYTGLAIHIRNHTGEKPYQCKECGKAFNRSSTLTQHRRIHTGEKPYECVECGKTFITSSHRSKHLKTHSGER

SEQ ID NO: 813007 - protein, 357 aa, Homo sapiens; identical to SEQ ID NO: 813006

SEQ ID NO: 813008 - protein, 426 aa, Homo sapiens
MSAFDMSHGFFPREPICPFEEKTKIGTMVEDHRSNSYQDSVTFDDVAVEFTPEEWALLDTTQKYLYRDVMLENYMNLASVDFFFCLTSEWEIQPRTKRSSLQQGFLKNQIFTGIQMQTRSYSGWKLCENCGEVFSEQFCLKTHMRAQNGGNTFEGNCYGKDSISVHKEASIGQELSKFNPCGKVFTLTPGLAVHLEILNGRQPYKCKECGKGFKYFASLDNHMGIHIGEKLCEFQECERAITTSSHLKQCVAVHTGKKSEKTKNCGKSFTNFSQLSAHAKTHKGEKSFECKECGRSFRNSSSFNVHIQIHTGIKPHKCTECGKAFTRSTHLTQHVRTHTGIKPYECKECGQAFTQYTGLAIHIRNHTGEKPYQCKECGKAFNRSSTLTQHRRIHTGEKPYECVECGKTFITSSHRSKHLKTHSGER

SEQ ID NO: 813009 - protein, 357 aa, Homo sapiens; identical to SEQ ID NO: 813006

SEQ ID NO: 813010 - protein, 357 aa, Homo sapiens; identical to SEQ ID NO: 813006

SEQ ID NO: 813011 - protein, 357 aa, Homo sapiens; identical to SEQ ID NO: 813006

SEQ ID NO: 813012 - protein, 357 aa, Homo sapiens; identical to SEQ ID NO: 813006

SEQ ID NO: 813013 - protein, 357 aa, Homo sapiens; identical to SEQ ID NO: 813006

SEQ ID NO: 813014 - protein, 357 aa, Homo sapiens; identical to SEQ ID NO: 813006

SEQ ID NO: 813015 - protein, 128 aa, Homo sapiens
AAAQQRSHPAMSPGTPGPTMGRSQGSPMDPMVMKRPQLYGMGSNPHSQPQQSSPYPGGSYGPPGPQRYPIGIQGRTPGAMAGMQYPQQQVCAGPPTRCFFVIVLSLPFAVHLRLMLKRIRGHCTDFLL

SEQ ID NO: 813016 - protein, 106 aa, Homo sapiens
MAWAVTLILSLSRAVRTQEVPMALQAHSGIQLASRVGLPGPWPECSTLSSRTCSLPSSSSSETPWITVFEEVGEPVAEVPTHDLALLVEVATREAGERLLIHRELQ

SEQ ID NO: 813017 - protein, 90 aa, Homo sapiens
AAAQQRSHPAMSPGTPGPTMGRSQGSPMDPMVMKRPQLYGMGSNPHSQPQQSSPYPGGSYGPPGPQRYPIGIQGRTPGAMAGMQYPQQQF

SEQ ID NO: 813018 - protein, 1799 aa, Homo sapiens
AAAQQRSHPAMSPGTPGPTMGRSQGSPMDPMVMKRPQLYGMGSNPHSQPQQSSPYPGGSYGPPGPQRYPIGIQGRTPGAMAGMQYPQQQMPPQYGQQGVSGYCQQGQQPYYSQQPQPPHLPPQAQYLPSQSQQRYQPQQDMSQEGYGTRSQPPLAPGKPNHEDLNLIQQERPSSLPDLSGSIDDLPTGTEATLSSAVSASGSTSSQGDQSNPAQSPFSPHASPHLSSIPGGPSPSPVGSPVGSNQSRSGPISPASIPGSQMPPQPPGSQSESSSHPALSQSPMPQERGFMAGTQRNPQMAQYGPQQTGPSMSPHPSPGGQMHAGISSFQQSNSSGTYGPQMSQYGPQGNYSRPPAYSGVPSASYSGPGPGMGISANNQMHGQGPSQPCGAVPLGRMPSAGMQNRPFPGNMSSMTPSSPGMSQQGGPGMGPPMPTVNRKAQEAAAAVMQAAANSAQSRQGSFPGMNQSGLMASSSPYSQPMNNSSSLMNTQAPPYSMAPAMVNSSAASVGLADMMSPGESKLPLPLKADGKEEGTPQPESKSKDSYSSQGISQPPTPGNLPVPSPMSPSSASISSFHGDESDSISSPGWPKTPSSPKSSSSTTTGEKITKVYELGNEPERKLWVDRYLTFMEERGSPVSSLPAVGKKPLDLFRLYVCVKEIGGLAQVNKNKKWRELATNLNVGTSSSAASSLKKQYIQYLFAFECKIERGEEPPPEVFSTGDTKKQPKLQPPSPANSGSLQGPQTPQSTGSNSMAEVPGDLKPPTPASTPHGQMTPMQGGRSSTISVHDPFSDVSDSSFPKRNSMTPNAPYQQGMSMPDVMGRMPYEPNKDPFGGMRKVPGSSEPFMTQGQMPNSSMQDMYNQSPSGAMSNLGMGQRQQFPYGASYDRRHEPYGQQYPGQGPPSGQPPYGGHQPGLYPQQPNYKRHMDGMYGPPAKRHEGDMYNMQYSSQQQEMYNQYGGSYSGPDRRPIQGQYPYPYSRERMQGPGQIQTHGIPPQMMGGPLQSSSSEGPQQNMWAARNDMPYPYQNRQGPGGPTQAPPYPGMNRTDDMMVPDQRINHESQWPSHVSQRQPYMSSSASMQPITRPPQPSYQTPPSLPNHISRAPSPASFQRSLENRMSPSKSPFLPSMKMQKVMPTVPTSQVTGPPPQPPPIRREITFPPGSVEASQPVLKQRRKITSKDIVTPEAWRVMMSLKSGLLAESTWALDTINILLYDDSTVATFNLSQLSGFLELLVEYFRKCLIDIFGILMEYEVGDPSQKALDHNAARKDDSQSLADDSGKEEEDAECIDDDEEDEEDEEEDSEKTESDEKSSIALTAPDAAADPKEKPKQASKFDKLPIKIVKKNNLFVVDRSDKLGRVQEFNSGLLHWQLGGGDTTEHIQTHFESKMEIPPRRRPPPPLSSAGRKKEQEGKGDSEEQQEKSIIATIDDVLSARPGALPEDANPGPQTESSKFPFGIQQAKSHRNIKLLEDEPRSRDETPLCTIAHWQDSLAKRCICVSNIVRSLSFVPGNDAEMSKHPGLVLILGKLILLHHEHPERKRAPQTYEKEEDEDKGVACSKDEWWWDCLEVLRDNTLVTLANISGQLDLSAYTESICLPILDGLLHWMVCPSAEAQDPFPTVGPNSVLSPQRLVLETLCKLSIQDNNVDLILATPPFSRQEKFYATLVRYVGDRKNPVCREMSMALLSNLAQGDALAARAIAVQKGSIGNLISFLEDGVTMAQYQQSQHNLMHMQPPPLEPPSVDMMCRAAKALLAMARVDENRSEFLLHEGRLLDISISAVLNSLVASVICDVLFQIGQL

SEQ ID NO: 813019 - protein, 1812 aa, Homo sapiens
AAAQQRSHPAMSPGTPGPTMGRSQGSPMDPMVMKRPQLYGMGSNPHSQPQQSSPYPGGSYGPPGPQRYPIGIQGRTPGAMAGMQYPQQQDSGDATWKETFWLMPPQYGQQGVSGYCQQGQQPYYSQQPQPPHLPPQAQYLPSQSQQRYQPQQDMSQEGYGTRSQPPLAPGKPNHEDLNLIQQERPSSLPDLSGSIDDLPTGTEATLSSAVSASGSTSSQGDQSNPAQSPFSPHASPHLSSIPGGPSPSPVGSPVGSNQSRSGPISPASIPGSQMPPQPPGSQSESSSHPALSQSPMPQERGFMAGTQRNPQMAQYGPQQTGPSMSPHPSPGGQMHAGISSFQQSNSSGTYGPQMSQYGPQGNYSRPPAYSGVPSASYSGPGPGMGISANNQMHGQGPSQPCGAVPLGRMPSAGMQNRPFPGNMSSMTPSSPGMSQQGGPGMGPPMPTVNRKAQEAAAAVMQAAANSAQSRQGSFPGMNQSGLMASSSPYSQPMNNSSSLMNTQAPPYSMAPAMVNSSAASVGLADMMSPGESKLPLPLKADGKEEGTPQPESKSKDSYSSQGISQPPTPGNLPVPSPMSPSSASISSFHGDESDSISSPGWPKTPSSPKSSSSTTTGEKITKVYELGNEPERKLWVDRYLTFMEERGSPVSSLPAVGKKPLDLFRLYVCVKEIGGLAQVNKNKKWRELATNLNVGTSSSAASSLKKQYIQYLFAFECKIERGEEPPPEVFSTGDTKKQPKLQPPSPGYSGSLQGPQTPQSTGSNSMAEVPGDLKPPTPASTPHGQMTPMQGGRSSTISVHDPFSDVSDSSFPKRNSMTPNAPYQQGMSMPDVMGRMPYEPNKDPFGGMRKVPGSSEPFMTQGQMPNSSMQDMYNQSPSGAMSNLGMGQRQQFPYGASYDRRHEPYGQQYPGQGPPSGQPPYGGHQPGLYPQQPNYKRHMDGMYGPPAKRHEGDMYNMQYSSQQQEMYNQYGGSYSGPDRRPIQGQYPYPYSRERMQGPGQIQTHGIPPQMMGGPLQSSSSEGPQQNMWAARNDMPYPYQNRQGPGGPTQAPPYPGMNRTDDMMVPDQRINHESQWPSHVSQRQPYMSSSASMQPITRPPQPSYQTPPSLPNHISRAPSPASFQRSLENRMSPSKSPFLPSMKMQKVMPTVPTSQVTGPPPQPPPIRREITFPPGSVEASQPVLKQRRKITSKDIVTPEAWRVMMSLKSGLLAESTWALDTINILLYDDSTVATFNLSQLSGFLELLVEYFRKCLIDIFGILMEYEVGDPSQKALDHNAARKDDSQSLADDSGKEEEDAECIDDDEEDEEDEEEDSEKTESDEKSSIALTAPDAAADPKEKPKQASKFDKLPIKIVKKNNLFVVDRSDKLGRVQEFNSGLLHWQLGGGDTTEHIQTHFESKMEIPPRRRPPPPLSSAGRKKEQEGKGDSEEQQEKSIIATIDDVLSARPGALPEDANPGPQTESSKFPFGIQQAKSHRNIKLLEDEPRSRDETPLCTIAHWQDSLAKRCICVSNIVRSLSFVPGNDAEMSKHPGLVLILGKLILLHHEHPERKRAPQTYEKEEDEDKGVACSKDEWWWDCLEVLRDNTLVTLANISGQLDLSAYTESICLPILDGLLHWMVCPSAEAQDPFPTVGPNSVLSPQRLVLETLCKLSIQDNNVDLILATPPFSRQEKFYATLVRYVGDRKNPVCREMSMALLSNLAQGDALAARAIAVQKGSIGNLISFLEDGVTMAQYQQSQHNLMHMQPPPLEPPSVDMMCRAAKALLAMARVDENRSEFLLHEGRLLDISISAVLNSLVASVICDVLFQIGQL

SEQ ID NO: 813020 - protein, 1659 aa, Homo sapiens
MSQEGYGTRSQPPLAPGKPNHEDLNLIQQERPSSLPDLSGSIDDLPTGTEATLSSAVSASGSTSSQGDQSNPAQSPFSPHASPHLSSIPGGPSPSPVGSPVGSNQSRSGPISPASIPGSQMPPQPPGSQSESSSHPALSQSPMPQERGFMAGTQRNPQMAQYGPQQTGPSMSPHPSPGGQMHAGISSFQQSNSSGTYGPQMSQYGPQGNYSRPPAYSGVPSASYSGPGPGMGISANNQMHGQGPSQPCGAVPLGRMPSAGMQNRPFPGNMSSMTPSSPGMSQQGGPGMGPPMPTVNRKAQEAAAAVMQAAANSAQSRQGSFPGMNQSGLMASSSPYSQPMNNSSSLMNTQAPPYSMAPAMVNSSAASVGLADMMSPGESKLPLPLKADGKEEGTPQPESKSKDSYSSQGISQPPTPGNLPVPSPMSPSSASISSFHGDESDSISSPGWPKTPSSPKSSSSTTTGEKITKVYELGNEPERKLWVDRYLTFMEERGSPVSSLPAVGKKPLDLFRLYVCVKEIGGLAQVNKNKKWRELATNLNVGTSSSAASSLKKQYIQYLFAFECKIERGEEPPPEVFSTGDTKKQPKLQPPSPANSGSLQGPQTPQSTGSNSMAEVPGDLKPPTPASTPHGQMTPMQGGRSSTISVHDPFSDVSDSSFPKRNSMTPNAPYQQGMSMPDVMGRMPYEPNKDPFGGMRKVPGSSEPFMTQGQMPNSSMQDMYNQSPSGAMSNLGMGQRQQFPYGASYDRRHEPYGQQYPGQGPPSGQPPYGGHQPGLYPQQPNYKRHMDGMYGPPAKRHEGDMYNMQYSSQQQEMYNQYGGSYSGPDRRPIQGQYPYPYSRERMQGPGQIQTHGIPPQMMGGPLQSSSSEGPQQNMWAARNDMPYPYQNRQGPGGPTQAPPYPGMNRTDDMMVPDQRINHESQWPSHVSQRQPYMSSSASMQPITRPPQPSYQTPPSLPNHISRAPSPASFQRSLENRMSPSKSPFLPSMKMQKVMPTVPTSQVTGPPPQPPPIRREITFPPGSVEASQPVLKQRRKITSKDIVTPEAWRVMMSLKSGLLAESTWALDTINILLYDDSTVATFNLSQLSGFLELLVEYFRKCLIDIFGILMEYEVGDPSQKALDHNAARKDDSQSLADDSGKEEEDAECIDDDEEDEEDEEEDSEKTESDEKSSIALTAPDAAADPKEKPKQASKFDKLPIKIVKKNNLFVVDRSDKLGRVQEFNSGLLHWQLGGGDTTEHIQTHFESKMEIPPRRRPPPPLSSAGRKKEQEGKGDSEEQQEKSIIATIDDVLSARPGALPEDANPGPQTESSKFPFGIQQAKSHRNIKLLEDEPRSRDETPLCTIAHWQDSLAKRCICVSNIVRSLSFVPGNDAEMSKHPGLVLILGKLILLHHEHPERKRAPQTYEKEEDEDKGVACSKDEWWWDCLEVLRDNTLVTLANISGQLDLSAYTESICLPILDGLLHWMVCPSAEAQDPFPTVGPNSVLSPQRLVLETLCKLSIQDNNVDLILATPPFSRQEKFYATLVRYVGDRKNPVCREMSMALLSNLAQGDALAARAIAVQKGSIGNLISFLEDGVTMAQYQQSQHNLMHMQPPPLEPPSVDMMCRAAKALLAMARVDENRSEFLLHEGRLLDISISAVLNSLVASVICDVLFQIGQL

SEQ ID NO: 813021 - protein, 1842 aa, Homo sapiens
AAAQQRSHPAMSPGTPGPTMGRSQGSPMDPMVMKRPQLYGMGSNPHSQPQQSSPYPGGSYGPPGPQRYPIGIQGRTPGAMAGMQYPQQQMPPQYGQQGVSGYCQQGQQPYYSQQPQPPHLPPQAQYLPSQSQQRYQPQQDMSQEGYGTRSQPPLAPGKPNHEDLNLIQQERPSSLPDLSGSIDDLPTGTEATLSSAVSASGSTSSQGDQSNPAQSPFSPHASPHLSSIPGGPSPSPVGSPVGSNQSRSGPISPASIPGSQMPPQPPGSQSESSSHPALSQSPMPQERGFMAGTQRNPQMAQYGPQQTGPSMSPHPSPGGQMHAGISSFQQSNSSGTYGPQMSQYGPQGNYSRPPAYSGVPSASYSGPGPGMGISANNQMHGQGPSQPCGAVPLGRMPSAGMQNRPFPGNMSSMTPSSPGMSQQGGPGMGPPMPTVNRKAQEAAAAVMQAAANSAQSRPPYIRSPAYPSQSGAGGRPMFSSQHPNYGNSQAPMVHQPDQYGQGSFPGMNQSGLMASSSPYSQPMNNSSSLMNTQAPPYSMAPAMVNSSAASVGLADMMSPGESKLPLPLKADGKEEGTPQPESKSKDSYSSQGISQPPTPGNLPVPSPMSPSSASISSFHGDESDSISSPGWPKTPSSPKSSSSTTTGEKITKVYELGNEPERKLWVDRYLTFMEERGSPVSSLPAVGKKPLDLFRLYVCVKEIGGLAQVNKNKKWRELATNLNVGTSSSAASSLKKQYIQYLFAFECKIERGEEPPPEVFSTGDTKKQPKLQPPSPANSGSLQGPQTPQSTGSNSMAEVPGDLKPPTPASTPHGQMTPMQGGRSSTISVHDPFSDVSDSSFPKRNSMTPNAPYQQGMSMPDVMGRMPYEPNKDPFGGMRKVPGSSEPFMTQGQMPNSSMQDMYNQSPSGAMSNLGMGQRQQFPYGASYDRRHEPYGQQYPGQGPPSGQPPYGGHQPGLYPQQPNYKRHMDGMYGPPAKRHEGDMYNMQYSSQQQEMYNQYGGSYSGPDRRPIQGQYPYPYSRERMQGPGQIQTHGIPPQMMGGPLQSSSSEGPQQNMWAARNDMPYPYQNRQGPGGPTQAPPYPGMNRTDDMMVPDQRINHESQWPSHVSQRQPYMSSSASMQPITRPPQPSYQTPPSLPNHISRAPSPASFQRSLENRMSPSKSPFLPSMKMQKVMPTVPTSQVTGPPPQPPPIRREITFPPGSVEASQPVLKQRRKITSKDIVTPEAWRVMMSLKSGLLAESTWALDTINILLYDDSTVATFNLSQLSGFLELLVEYFRKCLIDIFGILMEYEVGDPSQKALDHNAARKDDSQSLADDSGKEEEDAECIDDDEEDEEDEEEDSEKTESDEKSSIALTAPDAAADPKEKPKQASKFDKLPIKIVKKNNLFVVDRSDKLGRVQEFNSGLLHWQLGGGDTTEHIQTHFESKMEIPPRRRPPPPLSSAGRKKEQEGKGDSEEQQEKSIIATIDDVLSARPGALPEDANPGPQTESSKFPFGIQQAKSHRNIKLLEDEPRSRDETPLCTIAHWQDSLAKRCICVSNIVRSLSFVPGNDAEMSKHPGLVLILGKLILLHHEHPERKRAPQTYEKEEDEDKGVACSKDEWWWDCLEVLRDNTLVTLANISGQLDLSAYTESICLPILDGLLHWMVCPSAEAQDPFPTVGPNSVLSPQRLVLETLCKLSIQDNNVDLILATPPFSRQEKFYATLVRYVGDRKNPVCREMSMALLSNLAQGDALAARAIAVQKGSIGNLISFLEDGVTMAQYQQSQHNLMHMQPPPLEPPSVDMMCRAAKALLAMARVDENRSEFLLHEGRLLDISISAVLNSLVASVICDVLFQIGQL

SEQ ID NO: 813022 - protein, 1842 aa, Homo sapiens; identical to SEQ ID NO: 813021

SEQ ID NO: 813023 - protein, 1842 aa, Homo sapiens; identical to SEQ ID NO: 813021

SEQ ID NO: 813024 - protein, 1842 aa, Homo sapiens; identical to SEQ ID NO: 813021

SEQ ID NO: 813025 - protein, 1437 aa, Homo sapiens
PPTPQAAAGCRVFNLPPWSVSPAPMCGGDRYTGLMLVHQNKSQEAVLLFHFRPPYIRSPAYPSQSGAGGRPMFSSQHPNYGNSQAPMVHQPDQYGQGSFPGMNQSGLMASSSPYSQPMNNSSSLMNTQAPPYSMAPAMVNSSAASVGLADMMSPGESKLPLPLKADGKEEGTPQPESKSKDSYSSQGISQPPTPGNLPVPSPMSPSSASISSFHGDESDSISSPGWPKTPSSPKSSSSTTTGEKITKVYELGNEPERKLWVDRYLTFMEERGSPVSSLPAVGKKPLDLFRLYVCVKEIGGLAQVNKNKKWRELATNLNVGTSSSAASSLKKQYIQYLFAFECKIERGEEPPPEVFSTGDTKKQPKLQPPSPANSGSLQGPQTPQSTGSNSMAEVPGDLKPPTPASTPHGQMTPMQGGRSSTISVHDPFSDVSDSSFPKRNSMTPNAPYQQGMSMPDVMGRMPYEPNKDPFGGMRKVPGSSEPFMTQGQMPNSSMQDMYNQSPSGAMSNLGMGQRQQFPYGASYDRRHEPYGQQYPGQGPPSGQPPYGGHQPGLYPQQPNYKRHMDGMYGPPAKRHEGDMYNMQYSSQQQEMYNQYGGSYSGPDRRPIQGQYPYPYSRERMQGPGQIQTHGIPPQMMGGPLQSSSSEGPQQNMWAARNDMPYPYQNRQGPGGPTQAPPYPGMNRTDDMMVPDQRINHESQWPSHVSQRQPYMSSSASMQPITRPPQPSYQTPPSLPNHISRAPSPASFQRSLENRMSPSKSPFLPSMKMQKVMPTVPTSQVTGPPPQPPPIRREITFPPGSVEASQPVLKQRRKITSKDIVTPEAWRVMMSLKSGLLAESTWALDTINILLYDDSTVATFNLSQLSGFLELLVEYFRKCLIDIFGILMEYEVGDPSQKALDHNAARKDDSQSLADDSGKEEEDAECIDDDEEDEEDEEEDSEKTESDEKSSIALTAPDAAADPKEKPKQASKFDKLPIKIVKKNNLFVVDRSDKLGRVQEFNSGLLHWQLGGGDTTEHIQTHFESKMEIPPRRRPPPPLSSAGRKKEQEGKGDSEEQQEKSIIATIDDVLSARPGALPEDANPGPQTESSKFPFGIQQAKSHRNIKLLEDEPRSRDETPLCTIAHWQDSLAKRCICVSNIVRSLSFVPGNDAEMSKHPGLVLILGKLILLHHEHPERKRAPQTYEKEEDEDKGVACSKDEWWWDCLEVLRDNTLVTLANISGQLDLSAYTESICLPILDGLLHWMVCPSAEAQDPFPTVGPNSVLSPQRLVLETLCKLSIQDNNVDLILATPPFSRQEKFYATLVRYVGDRKNPVCREMSMALLSNLAQGDALAARAIAVQKGSIGNLISFLEDGVTMAQYQQSQHNLMHMQPPPLEPPSVDMMCRAAKALLAMARVDENRSEFLLHEGRLLDISISAVLNSLVASVICDVLFQIGQL

SEQ ID NO: 813026 - protein, 1047 aa, Homo sapiens
MAEVPGDLKPPTPASTPHGQMTPMQGGRSSTISVHDPFSDVSDSSFPKRNSMTPNAPYQQGMSMPDVMGRMPYEPNKDPFGGMRKVPGSSEPFMTQGQMPNSSMQDMYNQSPSGAMSNLGMGQRQQFPYGASYDRRHEPYGQQYPGQGPPSGQPPYGGHQPGLYPQQPNYKRHMDGMYGPPAKRHEGDMYNMQYSSQQQEMYNQYGGSYSGPDRRPIQGQYPYPYSRERMQGPGQIQTHGIPPQMMGGPLQSSSSEGPQQNMWAARNDMPYPYQNRQGPGGPTQAPPYPGMNRTDDMMVPDQRINHESQWPSHVSQRQPYMSSSASMQPITRPPQPSYQTPPSLPNHISRAPSPASFQRSLENRMSPSKSPFLPSMKMQKVMPTVPTSQVTGPPPQPPPIRREITFPPGSVEASQPVLKQRRKITSKDIVTPEAWRVMMSLKSGLLAESTWALDTINILLYDDSTVATFNLSQLSGFLELLVEYFRKCLIDIFGILMEYEVGDPSQKALDHNAARKDDSQSLADDSGKEEEDAECIDDDEEDEEDEEEDSEKTESDEKSSIALTAPDAAADPKEKPKQASKFDKLPIKIVKKNNLFVVDRSDKLGRVQEFNSGLLHWQLGGGDTTEHIQTHFESKMEIPPRRRPPPPLSSAGRKKEQEGKGDSEEQQEKSIIATIDDVLSARPGALPEDANPGPQTESSKFPFGIQQAKSHRNIKLLEDEPRSRDETPLCTIAHWQDSLAKRCICVSNIVRSLSFVPGNDAEMSKHPGLVLILGKLILLHHEHPERKRAPQTYEKEEDEDKGVACSKDEWWWDCLEVLRDNTLVTLANISGQLDLSAYTESICLPILDGLLHWMVCPSAEAQDPFPTVGPNSVLSPQRLVLETLCKLSIQDNNVDLILATPPFSRQEKFYATLVRYVGDRKNPVCREMSMALLSNLAQGDALAARAIAVQKGSIGNLISFLEDGVTMAQYQQSQHNLMHMQPPPLEPPSVDMMCRAAKALLAMARVDENRSEFLLHEGRLLDISISAVLNSLVASVICDVLFQIGQL

SEQ ID NO: 813027 - protein, 1842 aa, Homo sapiens; identical to SEQ ID NO: 813021

SEQ ID NO: 813028 - protein, 954 aa, Homo sapiens [sequence omitted]

SEQ ID NO: 813029 - protein, 742 aa, Homo sapiens
AAAQQRSHPAMSPGTPGPTMGRSQGSPMDPMVMKRPQLYGMGSNPHSQPQQSSPYPGGSYGPPGPQRYPIGIQGRTPGAMAGMQYPQQQMPPQYGQQGVSGYCQQGQQPYYSQQPQPPHLPPQAQYLPSQSQQRYQPQQDMSQEGYGTRSQPPLAPGKPNHEDLNLIQQERPSSLPDLSGSIDDLPTGTEATLSSAVSASGSTSSQGDQSNPAQSPFSPHASPHLSSIPGGPSPSPVGSPVGSNQSRSGPISPASIPGSQMPPQPPGSQSESSSHPALSQSPMPQERGFMAGTQRNPQMAQYGPQQTGPSMSPHPSPGGQMHAGISSFQQSNSSGTYGPQMSQYGPQGNYSRPPAYSGVPSASYSGPGPGMGISANNQMHGQGPSQPCGAVPLGRMPSAGMQNRPFPGNMSSMTPSSPGMSQQGGPGMGPPMPTVNRKAQEAAAAVMQAAANSAQSRQGSFPGMNQSGLMASSSPYSQPMNNSSSLMNTQAPPYSMAPAMVNSSAASVGLADMMSPGESKLPLPLKADGKEEGTPQPESKSKDSYSSQGISQPPTPGNLPVPSPMSPSSASISSFHGDESDSISSPGWPKTPSSPKSSSSTTTGEKITKVYELGNEPERKLWVDRYLTFMEERGSPVSSLPAVGKKPLDLFRLYVCVKEIGGLAQVNKNKKWRELATNLNVGTSSSAASSLKKQYIQYLFAFECKIERGEEPPPEVFSTGDTKKQPKLQPPSPGSPDGAEGL

SEQ ID NO: 813030 - protein, 1542 aa, Homo sapiens
AAAQQRSHPAMSPGTPGPTMGRSQGSPMDPMVMKRPQLYGMGSNPHSQPQQSSPYPGGSYGPPGPQRYPIGIQGRTPGAMAGMQYPQQQMPPQYGQQGVSGYCQQGQQPYYSQQPQPPHLPPQAQYLPSQSQQRYQPQQDMSQEGYGTRSQPPLAPGKPNHEDLNLIQQERPSSLPDLSGSIDDLPTGTEATLSSAVSASGSTSSQGDQSNPAQSPFSPHASPHLSSIPGGPSPSPVGSPVGSNQSRSGPISPASIPGSQMPPQPPGSQSESSSHPALSQSPMPQERGFMAGTQRNPQMAQYGPQQTGPSMSPHPSPGGQMHAGISSFQQSNSSGTYGPQMSQYGPQGNYSRPPAYSGVPSASYSGPGPGMGISANNQMHGQGPSQPCGAVPLGRMPSAGMQNRPFPGNMSSMTPSSPGMSQQGGPGMGPPMPTVNRKAQEAAAAVMQAAANSAQSRPPYIRSPAYPSQSGAGGRPMFSSQHPNYGNSQAPMVHQPDQYGQGSFPGMNQSGLMASSSPYSQPMNNSSSLMNTQAPPYSMAPAMVNSSAASVGLADMMSPGESKLPLPLKADGKEEGTPQPESKSKDSYSSQGISQPPTPGNLPVPSPMSPSSASISSFHGDESDSISSPGWPKTPSSPKSSSSTTTGEKITKVYELGNEPERKLWVDRYLTFMEERGSPVSSLPAVGKKPLDLFRLYVCVKEIGGLAQVNKNKKWRELATNLNVGTSSSAASSLKKQYIQYLFAFECKIERGEEPPPEVFSTGDTKKQPKLQPPSPANSGSLQGPQTPQSTGSNSMAEVPGDLKPPTPASTPHGQMTPMQGGRSSTISVHDPFSDVSDSSFPKRNSMTPNAPYQQGMSMPDVMGRMPYEPNKDPFGGMRKVPGSSEPFMTQGQMPNSSMQDMYNQSPSGAMSNLGMGQRQQFPYGASYDRRHEPYGQQYPGQGPPSGQPPYGGHQPGLYPQQPNYKRHMDGMYGPPAKRHEGDMYNMQYSSQQQEMYNQYGGSYSGPDRRPIQGQYPYPYSRERMQGPGQIQTHGIPPQMMGGPLQSSSSEGPQQNMWAARNDMPYPYQNRQGPGGPTQAPPYPGMNRTDDMMVPDQRINHESQWPSHVSQRQPYMSSSASMQPITRPPQPSYQTPPSLPNHISRAPSPASFQRSLENRMSPSKSPFLPSMKMQKVMPTVPTSQVTGPPPQPPPIRREITFPPGSVEASQPVLKQRRKITSKDIVTPEAWRVMMSLKSGLLAESTWALDTINILLYDDSTVATFNLSQLSGFLELLVEYFRKCLIDIFGILMEYEVGDPSQKALDHNAARKDDSQSLADDSGKEEEDAECIDDDEEDEEDEEEDSEKTESDEKSSIALTAPDAAADPKEKPKQASKFDKLPIKIVKKNNLFVVDRSDKLGRVQEFNSGLLHWQLGGGDTTEHIQTHFESKMEIPPRRRPPPPLSSAGRKKEQEGKGDSEEQQEKSIIATIDDVLSARPGALPEDANPGPQTESSKFPFGIQQAKSHRNIKLLEDEPRSRDETPLCTIAHWQDSLAKRCICHL

SEQ ID NO: 813031 - protein, 634 aa, Homo sapiens
AAAQQRSHPAMSPGTPGPTMGRSQGSPMDPMVMKRPQLYGMGSNPHSQPQQSSPYPGGSYGPPGPQRYPIGIQGRTPGAMAGMQYPQQQMPPQYGQQGVSGYCQQGQQPYYSQQPQPPHLPPQAQYLPSQSQQRYQPQQDMSQEGYGTRSQPPLAPGKPNHEDLNLIQQERPSSLPDLSGSIDDLPTGTEATLSSAVSASGSTSSQGDQSNPAQSPFSPHASPHLSSIPGGPSPSPVGSPVGSNQSRSGPISPASIPGSQMPPQPPGSQSESSSHPALSQSPMPQERGFMAGTQRNPQMAQYGPQQTGPSMSPHPSPGGQMHAGISSFQQSNSSGTYGPQMSQYGPQGNYSRPPAYSGVPSASYSGPGPGMGISANNQMHGQGPSQPCGAVPLGRMPSAGMQNRPFPGNMSSMTPSSPGMSQQGGPGMGPPMPTVNRKAQEAAAAVMQAAANSAQSRPPYIRSPAYPSQSGAGGRPMFSSQHPNYGNSQAPMVHQPDQYGQGSFPGMNQSGLMASSSPYSQPMNNSSSLMNTQAPPYSMAPAMVNSSAASVGLADMMSPGESKLPLPLKADGKEEGTPQPESKSKKSSSSTTTGEKITKVYELGNEPERKLWVDRYSPKKERKNTKNKNKKKRG

SEQ ID NO: 813032 - protein, 787 aa, Homo sapiens
AAAQQRSHPAMSPGTPGPTMGRSQGSPMDPMVMKRPQLYGMGSNPHSQPQQSSPYPGGSYGPPGPQRYPIGIQGRTPGAMAGMQYPQQQMPPQYGQQGVSGYCQQGQQPYYSQQPQPPHLPPQAQYLPSQSQQRYQPQQDMSQEGYGTRSQPPLAPGKPNHEDLNLIQQERPSSLPDLSGSIDDLPTGTEATLSSAVSASGSTSSQGDQSNPAQSPFSPHASPHLSSIPGGPSPSPVGSPVGSNQSRSGPISPASIPGSQMPPQPPGSQSESSSHPALSQSPMPQERGFMAGTQRNPQMAQYGPQQTGPSMSPHPSPGGQMHAGISSFQQSNSSGTYGPQMSQYGPQGNYSRPPAYSGVPSASYSGPGPGMGISANNQMHGQGPSQPCGAVPLGRMPSAGMQNRPFPGNMSSMTPSSPGMSQQGGPGMGPPMPTVNRKAQEAAAAVMQAAANSAQSRPPYIRSPAYPSQSGAGGRPMFSSQHPNYGNSQAPMVHQPDQYGQGSFPGMNQSGLMASSSPYSQPMNNSSSLMNTQAPPYSMAPAMVNSSAASVGLADMMSPGESKLPLPLKADGKEEGTPQPESKSKDSYSSQGISQPPTPGNLPVPSPMSPSSASISSFHGDESDSISSPGWPKTPSSPKSSSSTTTGEKITKVYELGNEPERKLWVDRYLTFMEERGSPVSSLPAVGKKPLDLFRLYVCVKEIGGLAQVNKNKKWRELATNLNVGTSSSAASSLKKQYIQYLFAFECKIERGEEPPPEVFSTGDTKKQPKLQPPSPGSGTLQRPWGR

SEQ ID NO: 813033 - protein, 409 aa, Homo sapiens
AAAQQRSHPAMSPGTPGPTMGRSQGSPMDPMVMKRPQLYGMGSNPHSQPQQSSPYPGGSYGPPGPQRYPIGIQGRTPGAMAGMQYPQQQMPPQYGQQGVSGYCQQGQQPYYSQQPQPPHLPPQAQYLPSQSQQRYQPQQDMSQEGYGTRSQPPLAPGKPNHEDLNLIQQERPSSLPDLSGSIDDLPTGTEATLSSAVSASGSTSSQGDQSNPAQSPFSPHASPHLSSIPGGPSPSPVGSPVGSNQSRSGPISPASIPGSQMPPQPPGSQSESSSHPALSQSPMPQERGFMAGTQRNPQMAQYGPQQTGPSMSPHPSPGGQMHAGISSFQQSNSSGTYGPQMSQYGPQGSQMPPQPPGSQSESSSHPALSQSPMPQERGFMAGTQRNPQMAQYGPQQTGPSILTHLGPSL

SEQ ID NO: 813034 - protein, 186 aa, Homo sapiens
AAAQQRSHPAMSPGTPGPTMGRSQGSPMDPMVMKRPQLYGMGSNPHSQPQQSSPYPGGSYGPPGPQRYPIGIQGRTPGAMAGMQYPQQQMPPQYGQQGVSGYCQQGQQPYYSQQPQPPHLPPQAQYLPSQSQQRYQPQQDMSQEGYGTRSQPPLAPGKPNHEDLNLIQQERPSSLPVRHYCADLEM

SEQ ID NO: 813035 - protein, 716 aa, Homo sapiens
AAAQQRSHPAMSPGTPGPTMGRSQGSPMDPMVMKRPQLYGMGSNPHSQPQQSSPYPGGSYGPPGPQRYPIGIQGRTPGAMAGMQYPQQQMPPQYGQQGVSGYCQQGQQPYYSQQPQPPHLPPQAQYLPSQSQQRYQPQQDMSQEGYGTRSQPPLAPGKPNHEDLNLIQQERPSSLPDLSGSIDDLPTGTEATLSSAVSASGSTSSQGDQSNPAQSPFSPHASPHLSSIPGGPSPSPVGSPVGSNQSRSGPISPASIPGSQMPPQPPGSQSESSSHPALSQSPMPQERGFMAGTQRNPQMAQYGPQQTGPSMSPHPSPGGQMHAGISSFQQSNSSGTYGPQMSQYGPQGNYSRPPAYSGVPSASYSGPGPGMGISANNQMHGQGPSQPCGAVPLGRMPSAGMQNRPFPGNMSSMTPSSPGMSQQGGPGMGPPMPTVNRKAQEAAAAVMQAAANSAQSRQGSFPGMNQSGLMASSSPYSQPMNNSSSLMNTQAPPYSMAPAMVNSSAASVGLADMMSPGESKLPLPLKADGKEEGTPQPESKSKKSSSSTTTGEKITKVYELGNEPERKLWVDRYLTFMEERGSPVSSLPAVGKKPLDLFRLYVCVKEIGGLAQVNKNKKWRELATNLNVGTSSSAASSLKKQYIQYLFAFECKIERGEEPPPEVFSTGDTKKQPKLQPPSPGKWRRCSHWPRKAQAPGLGGSGKVVSQSGQQGTWDF

SEQ ID NO: 813036 - protein, 186 aa, Homo sapiens; identical to SEQ ID NO: 813034

SEQ ID NO: 813037 - protein, 108 aa, Homo sapiens [sequence omitted]

SEQ ID NO: 813038 - protein, 139 aa, Homo sapiens
METDCNPMELSSMSGFEEGSELNGFEGTDMKDMRLEAEAVVNDVLFAVNNMFVSKSLRCADDVAYINVETKERNRYCLELTEAGLKVVGYAFDQVDDHLQTPYHETVYSLLDTLSPAYREAFGNALLQRLEALKRDGQS

SEQ ID NO: 813039 - protein, 139 aa, Homo sapiens; identical to SEQ ID NO: 813038

SEQ ID NO: 813040 - protein, 139 aa, Homo sapiens; identical to SEQ ID NO: 813038

SEQ ID NO: 813041 - protein, 139 aa, Homo sapiens; identical to SEQ ID NO: 813038

SEQ ID NO: 813042 - protein, 139 aa, Homo sapiens; identical to SEQ ID NO: 813038

SEQ ID NO: 813043 - protein, 174 aa, Homo sapiens
LRGGGAEEGGEGGGGTAGRLQSPPEEGRRGRRARRMETDCNPMELSSMSGFEEGSELNGFEGTDMKDMRLEAEAVVNDVLFAVNNMFVSKSLRCADDVAYINVETKERNRYCLELTEAGLKVVGYAFDQVDDHLQTPYHETVYSLLDTLSPAYREAFGNALLQRLEALKRDGQS

SEQ ID NO: 813044 - protein, 190 aa, Homo sapiens
APRGRGGRRRGGRGRHRRSAPVASGGRKKRTPGAQLGADYHNCLVTYFTDLMETDCNPMELSSMSGFEEGSELNGFEGTDMKDMRLEAEAVVNDVLFAVNNMFVSKSLRCADDVAYINVETKERNRYCLELTEAGLKVVGYAFDQVDDHLQTPYHETVYSLLDTLSPAYREAFGNALLQRLEALKRDGQS

SEQ ID NO: 813045 - protein, 69 aa, Homo sapiens
  misc_feature (1)..(1): Xaa can be any naturally occurring amino acid
  misc_feature (3)..(3): Xaa can be any naturally occurring amino acid
XRXSCRIRHELEAGLKVVGYAFDQVDDHLQTPYHETVYSLLDTLSPAYREAFGNALLQRLEALKRDGQS

SEQ ID NO: 813046 - protein, 453 aa, Homo sapiens [sequence omitted]

SEQ ID NO: 813047 - protein, 453 aa, Homo sapiens [sequence omitted]

SEQ ID NO: 813048 - protein, 453 aa, Homo sapiens [sequence omitted]

SEQ ID NO: 813049 - protein, 464 aa, Homo sapiens
GIVPSALQASAMSKISEAVKRARAAFSSGRTRPLQFRIQQLEALQRLIQEQEQELVGALAADLHKNEWNAYYEEVVYVLEEIEYMIQKLPEWAADEPVEKTPQTQQDELYIHSEPLGVVLVIGTWNYPFNLTIQPMVGAIAAGNAVVLKPSELSENMASLLATIIPQYLDKDLYPVINGGVPETTELLKERFDHILYTGSTGVGKIIMTAAAKHLTPVTLELGGKSPCYVDKNCDLDVACRRIAWGKFMNSGQTCVAPDYILCDPSIQNQIVEKLKKSLKEFYGEDAKKSRDYGRIISARHFQRVMGLIEGQKVAYGGTGDAATRYIAPTILTDVDPQSPVMQEEIFGPVLPIVCVRSLEEAIQFINQREKPLALYMFSSNDKVIKKMIAETSSGGVAANDVIVHITLHSLPFGGVGNSGMGSYHGKKSFETFSHRRSCLVRPLMNDEGLKVRYPPSPAKMTQH

SEQ ID NO: 813050 - protein, 392 aa, Homo sapiens
MSKISEAVKRARAAFSSGRTRPLQFRIQQLEALQRLIQEQEQELVGALAADLHKNEWNAYYEEVVYVLEEIEYMIQKLPEWAADEPVEKTPQTQQDELYIHSEPLGVVLVIGTWNYPFNLTIQPMVGAIAAGNAVVLKPSELSENMASLLATIIPQYLDKDLYPVINGGVPETTELLKERFDHILYTGSTGVGKIIMTAAAKHLTPVTLELGGKSPCYVDKNCDLDVACRRIAWGKFMNSGQTCVAPDYILCDPSIQNQIVEKLKKSLKEFYGEDAKKSRDYGRIISARHFQRVMGLIEGQKVAYGGTGDAATRYIAPTILTDVDPQSPVMQEEIFGPVLPIVCVRSLEEAIQFINQREKPLALYMFSSNDKVIKKMIAETSIPSLHPFLDQ

SEQ ID NO: 813051 - protein, 396 aa, Homo sapiens [sequence omitted]

SEQ ID NO: 813052 - protein, 380 aa, Homo sapiens
MIQKLPEWAADEPVEKTPQTQQDELYIHSEPLGVVLVIGTWNYPFNLTIQPMVGAIAAGNAVVLKPSELSENMASLLATIIPQYLDKDLYPVINGGVPETTELLKERFDHILYTGSTGVGKIIMTAAAKHLTPVTLELGGKSPCYVDKNCDLDVACRRIAWGKFMNSGQTCVAPDYILCDPSIQNQIVEKLKKSLKEFYGEDAKKSRDYGRIISARHFQRVMGLIEGQKVAYGGTGDAATRYIAPTILTDVDPQSPVMQEEIFGPVLPIVCVRSLEEAIQFINQREKPLALYMFSSNDKVIKKMIAETSSGGVAANDVIVHITLHSLPFGGVGNSGMGSYHGKKSFETFSHRRSCLVRPLMNDEGLKVRYPPSPAKMTQH

SEQ ID NO: 813053 - protein, 454 aa, Homo sapiens
  misc_feature (23)..(23): Xaa can be any naturally occurring amino acid
MSKISEAVKRARAAFSSGRGGEXEQKKKKKSPALQRLIQEQEQELVGALAADLHKNEWNAYYEEVVYVLEEIEYMIQKLPEWAADEPVEKTPQTQQDELYIHSEPLGVVLVIGTWNYPFNLTIQPMVGAIAAGNAVVLKPSELSENMASLLATIIPQYLDKDLYPVINGGVPETTELLKERFDHILYTGSTGVGKIIMTAAAKHLTPVTLELGGKSPCYVDKNCDLDVACRRIAWGKFMNSGQTCVAPDYILCDPSIQNQIVEKLKKSLKEFYGEDAKKSRDYGRIISARHFQRVMGLIEGQKVAYGGTGDAATRYIAPTILTDVDPQSPVMQEEIFGPVLPIVCVRSLEEAIQFINQREKPLALYMFSSNDKVIKKMIAETSSGGVAANDVIVHITLHSLPFGGVGNSGMGSYHGKKSFETFSHRRSCLVRPLMNDEGLKVRYPPSPAKMTQH

SEQ ID NO: 813054 - protein, 409 aa, Homo sapiens
WKLTPALSLQNEWNAYYEEVVYVLEEIEYMIQKLPEWAADEPVEKTPQTQQDELYIHSEPLGVVLVIGTWNYPFNLTIQPMVGAIAAGNAVVLKPSELSENMASLLATIIPQYLDKDLYPVINGGVPETTELLKERFDHILYTGSTGVGKIIMTAAAKHLTPVTLELGGKSPCYVDKNCDLDVACRRIAWGKFMNSGQTCVAPDYILCDPSIQNQIVEKLKKSLKEFYGEDAKKSRDYGRIISARHFQRVMGLIEGQKVAYGGTGDAATRYIAPTILTDVDPQSPVMQEEIFGPVLPIVCVRSLEEAIQFINQREKPLALYMFSSNDKVIKKMIAETSSGGVAANDVIVHITLHSLPFGGVGNSGMGSYHGKKSFETFSHRRSCLVRPLMNDEGLKVRYPPSPAKMTQH

SEQ ID NO: 813055 - protein, 398 aa, Homo sapiens
VERDKIKLKRAWVFNWQRERLCQRRHEQDQRGREARPRRLQLGQIHSEPLGVVLVIGTWNYPFNLTIQPMVGAIAAGNAVVLKPSELSENMASLLATIIPQYLDKDLYPVINGGVPETTELLKERFDHILYTGSTGVGKIIMTAAAKHLTPVTLELGGKSPCYVDKNCDLDVACRRIAWGKFMNSGQTCVAPDYILCDPSIQNQIVEKLKKSLKEFYGEDAKKSRDYGRIISARHFQRVMGLIEGQKVAYGGTGDAATRYIAPTILTDVDPQSPVMQEEIFGPVLPIVCVRSLEEAIQFINQREKPLALYMFSSNDKVIKKMIAETSSGGVAANDVIVHITLHSLPFGGVGNSGMGSYHGKKSFETFSHRRSCLVRPLMNDEGLKVRYPPSPAKMTQH

SEQ ID NO: 813056 - protein, 297 aa, Homo sapiens
VPRSGGSSRAMPPLWALLALGCLRFGSAVNLQPQLASVTFATNNPTLTTVALEKPLCMFDSKEALTGTHEVYLYVLVDSAISRNASVQDSTNTPLGSTFLQTEGGRTGPYKAVAFDLIPCSDLPSLDAIGDVSKASQILNAYLVRVGANGTCLWDPNFQGLCNAPLSAATEYRFKYVLVNMSTGLVEDQTLWSDPIRTNQLTPYSTIDTWPGRRSGGMIVITSILGSLPFFLLVGFAGAIALSLVDMGSSDGETTHDSQITQEAVPKSLGASESSYTSVNRGPPLDRAEVYSSKLQD

SEQ ID NO: 813057 - protein, 98 aa, Homo sapiens
GSPGLAGFRGRVRHGCEKTTEGGSKLQQEKLCVRGRGLFRCRVSSSCTLFKSLHWRNSCHYQLPSCRREGETYIYSCQSVACRLFGFLPCNKIIAPTP

SEQ ID NO: 813058 - protein, 105 aa, Homo sapiens
NNGRKESLERVISKEFVSSDPRSLDFWKDRISPHQLRGSAWLRQLSHPWLRVRSLVCKPVPSCPRPWSPGFRRPGYMAFMPLFFDEVHLSLYYNKQKDCVYVCLI

SEQ ID NO: 813059 - protein, 474 aa, Homo sapiens
MVQQTNNAENTEALLAGESSDSGAGLELGIASSPTPGSTASTGGKADDPSWCKTPSGHIKRPMNAFMVWSQIERRKIMEQSPDMHNAEISKRLGKRWKLLKDSDKIPFIREAERLRLKHMADYPDYKYRPRKKVKSGNANSSSSAAASSKPGEKGDKVGGSGGGGHGGGGGGGSSNAGGGGGGASGGGANSKPAQKKSCGSKVAGGAGGGVSKPHAKLILAGGGGGGKAAAAAAASFAAEQAGAAALLPLGAAADHHSLYKARTPSASASASSAASASAALAAPGKHLAEKKVKRVYLFGGLGTSSSPVGGVGAGADPSDPLGLYEEEGAGCSPDAPSLSGRSSAASSPAAGRSPADHRGYASLRAASPAPSSAPSHASSSASSHSSSSSSSGSSSSDDEFEDDLLDLNPSSNFESMSLGSFSSSSALDRDLDFNFEPGSGSHFEFPDYCTPEVSEMISGDWLESSISNLVFTY

SEQ ID NO: 813060 - protein, 474 aa, Homo sapiens; identical to SEQ ID NO: 813059

SEQ ID NO: 813061 - protein, 474 aa, Homo sapiens; identical to SEQ ID NO: 813059

SEQ ID NO: 813062 - protein, 474 aa, Homo sapiens; identical to SEQ ID NO: 813059

SEQ ID NO: 813063 - protein, 474 aa, Homo sapiens; identical to SEQ ID NO: 813059

SEQ ID NO: 813064 - protein, 474 aa, Homo sapiens; identical to SEQ ID NO: 813059

SEQ ID NO: 813065 - protein, 474 aa, Homo sapiens; identical to SEQ ID NO: 813059

SEQ ID NO: 813066 - protein, 474 aa, Homo sapiens; identical to SEQ ID NO: 813059

SEQ ID NO: 813067 - protein, 474 aa, Homo sapiens; identical to SEQ ID NO: 813059

SEQ ID NO: 813068 - protein, 272 aa, Homo sapiens [sequence omitted]

SEQ ID NO: 813069 - protein, 474 aa, Homo sapiens; identical to SEQ ID NO: 813059

SEQ ID NO: 813070 - protein, 393 aa, Homo sapiens
MVQQTNNAENTEALLAGESSDSGAGLELGIASSPTPGSTASTGGKADDPSWCKTPSGHIKRPMNAFMVWSQIERRKIMEQSPDMHNAEISKRLGKRWKLLKDSDKIPFIREAERLRLKHMADYPDYKYRPRKKVKSGNANSSSSAAASSKPGEKGDKVGGSGGGGHGGGGGGGSSNAGGGGGGASGGGANSKPAQKKSCGSKVAGGAGGGVSKPHAKLILAGGGGGGKAAAAAAASFAAEQAGAAALLPLGAAADHHSLYKARTPSASASASSAASASAALAAPGKHLAEKKVKRVYLFGGLGTSSSPVGGVGAGADPSDPLGLYEEEGAGCSPDAPSLSGRSSAASSPAAGRSPADHRGYASLRAASRPTPPLPPPRAPRPPTTSSKTTCST

SEQ ID NO: 813071 - protein, 156 aa, Homo sapiens
MVQQTNNAENTEALLAGESSDSGAGLELGIASSPTPGSTASTGGKADDPSWCKTPSGHIKRPMNAFMVWSQIERRKIMEQSPDMHNAEISKRLGKRWKLLKDSDKIPFIREAERLRRPPRPARPRTRPPRPRPTPPLPPPRAPRPPTTSSKTTCST

SEQ ID NO: 813072 - protein, 126 aa, Homo sapiens
MVQQTNNAENTEALLAGESSDSGAGLELGIASSPTPGSTASTGGKADDPSWCKTPSGHIKRPMNAFMVWSQIERRKIMEQSPDMHNRPPRPARPRTRPPRPRPTPPLPPPRAPRPPTTSSKTTCST

SEQ ID NO: 813073 - protein, 419 aa, Homo sapiens
MVQQTNNAENTEALLAGESSDSGAGLELGIASSPTPGSTASTGGKADDPSWCKTPSGHIKRPMNAFMVWSQIERRKIMEQSPDMHNAEISKRLGKRWKLLKDSDKIPFIREAERLRLKHMADYPDYKYRPRKKVKSGNANSSSSAAASSKPGEKGDKVGGSGGGGHGGGGGGGSSNAGGGGGGASGGGANSKPAQKKSCGSKVAGGAGGGVSKPHAKLILAGGGGGGKAAAAAAASFAAEQAGAAALLPLGAAADHHSLYKARTPSASASASSAASASAALAAPGKHLAEKKVKRVYLFGGLGTSSSPVGGVGAGADPSDPLGLYEEEGAGCSPDAPSLSGRSSAASSPAAGRSPADHRGYASLRAASPAPSSAPSHASSSASSHSSSSSSPDYCTPEVSEMISGDWLESSISNLVFTY

SEQ ID NO: 813074 - protein, 176 aa, Homo sapiens
MVQQTNNAENTEALLAGESSDSGAGLELGIASSPTPGSTASTGGKADDPSWCKTPSGHIKRPMNAFMVWSQIERRKIMEQSPDMHNAEISKRLGKRWKLLKDSDKIPFIREAERLRLKHMADYPDYKYRPRKKVKSGNANSSSSAAASSKQGEGPGGVGEEKKKVKKRNEKDRRRV

SEQ ID NO: 813075 - protein, 474 aa, Homo sapiens; identical to SEQ ID NO: 813059

SEQ ID NO: 813076 - protein, 79 aa, Homo sapiens
AAAYYYYYYSLEFKLLTMYGDMSLGSFSSSSALDRDLDFNFEPGSGSHFEFPDYCTPEVSEMISGDWLESSISNLVFTY

SEQ ID NO: 813077 - protein, 205 aa, Homo sapiens
SSPAAGRSPADHRGYASLRAASPARRAEAMVQQTNNAENTEALLAGESSDSGAGLELGIASSPTPGSTASTGGKADDPSWCKTPSGHIKRPMNAFMVWSQIERRKIMEQSPDMHNAEISKRLGKRWKLLKDSDKIPFIREAERLRLKHMADYPDYKYRPRKKVKSGNANSSSSAAASSKQGEGPGGVGEEKKKVKKRNEKDRRRV

SEQ ID NO: 813078 - protein, 218 aa, Homo sapiens
  misc_feature (3)..(3): Xaa can be any naturally occurring amino acid
  misc_feature (8)..(8): Xaa can be any naturally occurring amino acid
  misc_feature (17)..(17): Xaa can be any naturally occurring amino acid
  misc_feature (93)..(93): Xaa can be any naturally occurring amino acid
NPXNLKGXQKTLELPTXVGRPLLRTKLNPPGLQGIGTSVEGRRPSQCDRRLGNDPRTPLEAQQRELGAGAEEDTNWKGVHGQTEMDLHVGELXGGGCLASAFFFYVKSVRRDFPDPGGVEERRLFDVVQAGRRAGGGRRGEKKSEKKKRKGQTKSLKRKGKKERKSKQGWLRPRSRRRIKERGGVLDPRSHPPPSRAGDPLCPAGGTRRRKRVDRGDL

SEQ ID NO: 813079 - protein, 181 aa, Homo sapiens
AALPGSKSWLFPSSLGKLRDESKRRLILTQISAWGMSLMTAAFPERGNTKFEVGHVSTILDELSLEVPEDIQVEEVAAWTEDTELGNVNTIKELESCTALQDREKKSEKKKRKGQTKSLKRKGKKERKSKQGWLRPRSRRRIKERGGVLDPRSHPPPSRAGDPLCPAGGTRRRKRVDRGDL

SEQ ID NO: 813080 - protein, 111 aa, Homo sapiens
RGGGGSWFRLRAQRWWWRRDRPGCNRRLSGSGWSGSGGRARREVTPQGSGGSGGSGGSRRRSGGRSSSSKTDSWRRAAAAAAGPGRVSRAEAGGESSPPPPPLPPPPPPPR

SEQ ID NO: 813081 - protein, 111 aa, Homo sapiens; identical to SEQ ID NO: 813080

SEQ ID NO: 813082 - protein, 111 aa, Homo sapiens; identical to SEQ ID NO: 813080

SEQ ID NO: 813083 - protein, 167 aa, Homo sapiens; identical to SEQ ID NO: 792639

SEQ ID NO: 813084 - protein, 178 aa, Homo sapiens
RGGGGSWFRLRAQRWWWRRDRPGCNRRLSGSGWSGSGGRARREVTPQGSGGSGGSGGSRRRSGGRSSSSKTDSWRRAAAAAAGPGRVSRAEAGGESSPQETQRRPQQQQQDVTAATATAAAAAAEVTEERGASSLPPPPDFNAQSPARQRFSLEYTLHIYGDSECEGRLLPGSAQHFR

SEQ ID NO: 813085 - protein, 167 aa, Homo sapiens; identical to SEQ ID NO: 792639

SEQ ID NO: 813086 - protein, 167 aa, Homo sapiens; identical to SEQ ID NO: 792639

SEQ ID NO: 813087 - protein, 152 aa, Homo sapiens
RGGGGSWFRLRAQRWWWRRDRPGCNRRLSGSGWSGSGGRARREVTPQGSGGSGGSGGSRRRSGGRSSSSKTDSWRRAAAAAAGPGRVSRAEAGGESSPQVTEERGASSLPPPPDFNAQSPARQRFSLEYTLHIYGDSECEGRLLPGSAQHFR

SEQ ID NO: 813088 - protein, 167 aa, Homo sapiens; identical to SEQ ID NO: 792639

SEQ ID NO: 813089 - protein, 111 aa, Homo sapiens; identical to SEQ ID NO: 813080

SEQ ID NO: 813090 - protein, 111 aa, Homo sapiens; identical to SEQ ID NO: 813080

SEQ ID NO: 813091 - protein, 111 aa, Homo sapiens; identical to SEQ ID NO: 813080

SEQ ID NO: 813092 - protein, 111 aa, Homo sapiens; identical to SEQ ID NO: 813080

SEQ ID NO: 813093 - protein, 111 aa, Homo sapiens; identical to SEQ ID NO: 813080

SEQ ID NO: 813094 - protein, 111 aa, Homo sapiens; identical to SEQ ID NO: 813080

SEQ ID NO: 813095 - protein, 111 aa, Homo sapiens; identical to SEQ ID NO: 813080

SEQ ID NO: 813096 - protein, 111 aa, Homo sapiens; identical to SEQ ID NO: 813080

SEQ ID NO: 813097 - protein, 111 aa, Homo sapiens; identical to SEQ ID NO: 813080

SEQ ID NO: 813098 - protein, 111 aa, Homo sapiens; identical to SEQ ID NO: 813080

SEQ ID NO: 813099 - protein, 68 aa, Homo sapiens
EIGAASAGIIDRRTKIHVPYLEQKKEGERSIPNSCFIWRNTDLRCDYASEIPMGIAVFSRRKCKRRLT

SEQ ID NO: 813100 - protein, 111 aa, Homo sapiens; identical to SEQ ID NO: 813080

SEQ ID NO: 813101 - protein, 111 aa, Homo sapiens; identical to SEQ ID NO: 813080

SEQ ID NO: 813102 - protein, 111 aa, Homo sapiens; identical to SEQ ID NO: 813080

SEQ ID NO: 813103 - protein, 111 aa, Homo sapiens; identical to SEQ ID NO: 813080

SEQ ID NO: 813104 - protein, 111 aa, Homo sapiens; identical to SEQ ID NO: 813080

SEQ ID NO: 813105 - protein, 111 aa, Homo sapiens; identical to SEQ ID NO: 813080

SEQ ID NO: 813106 - protein, 111 aa, Homo sapiens; identical to SEQ ID NO: 813080

SEQ ID NO: 813107 - protein, 111 aa, Homo sapiens; identical to SEQ ID NO: 813080

SEQ ID NO: 813108 - protein, 54 aa, Homo sapiens
VGNFKRVQLYFNKISQVTLGDSEAETKATSFPTGNILKNTREREVPQSTAIRPR

SEQ ID NO: 813109 - protein, 413 aa, Homo sapiens
MAEAGPQAPPPPGTPSRHEKSLGLLTTKFVSLLQEAKDGVLDLKLAADTLAVRQKRRIYDITNVLEGIGLIEKKSKNSIQWKGVGPGCNTREIADKLIELKAEIEELQQREQELDQHKVWVQQSIRNVTEDVQNSCLAYVTHEDICRCFAGDTLLAIRAPSGTSLEVPIPEGLNGQKKYQIHLKSVSGPIEVLLVNKEAWSSPPVAVPVPPPEDLLQSPSAVSTPPPLPKPALAQSQEASRPNSPQLTPTAVPGSAEVQGMAGPAAEITVSGGPGTDSKDSGELSSLPLGPTTLDTRPLQSSALLDSSSSSSSSSSSSSNSNSSSSSGPNPSTSFEPIKADPTGVLELPKELSEIFDPTRECMSSELLEELMSSEVFAPLLRLSPPPGDHDYIYNLDESEGVCDLFDVPVLNL

SEQ ID NO: 813110 - protein, 364 aa, Homo sapiens
MAEAGPQAPPPPGTPSRHEKSLGLLTTKFVSLLQEAKDGVLDLKLAADTLAVRQKRRIYDITNVLEGIGLIEKKSKNSIQWKGVGPGCNTREIADKLIELKAEIEELQQREQELDQHKVWVQQSIRNVTEDVQNSCLAYVTHEDICRCFAGDTLLAIRAPSGTSLEVPIPEGLNGQKKYQIHLKSVSGPIEVLLVNKEAWSSPPVAVPVPPPEDLLQSPSAVSTPPPLPKPALAQSQEASRPNSPQLTPTAVPGSAEVQGMAGPAAEITVSGGPGTDSKDSGELSSLPLGPTTLDTRPLQSSALLDAAKVPAKKITAASKKAPAQKVPAQKATGQKAAPAPKAQKGQKAPAQKAPAPKASGKKA

SEQ ID NO: 813111 - protein, 413 aa, Homo sapiens; identical to SEQ ID NO: 813109

SEQ ID NO: 813112 - protein, 413 aa, Homo sapiens; identical to SEQ ID NO: 813109

SEQ ID NO: 813113 - protein, 450 aa, Homo sapiens
KDESNNDPPHTHNNKENQKGQVLRPGVLAEGRRRAGAMAEAGPQAPPPPGTPSRHEKSLGLLTTKFVSLLQEAKDGVLDLKLAADTLAVRQKRRIYDITNVLEGIGLIEKKSKNSIQWKGVGPGCNTREIADKLIELKAEIEELQQREQELDQHKVWVQQSIRNVTEDVQNSCLAYVTHEDICRCFAGDTLLAIRAPSGTSLEVPIPEGLNGQKKYQIHLKSVSGPIEVLLVNKEAWSSPPVAVPVPPPEDLLQSPSAVSTPPPLPKPALAQSQEASRPNSPQLTPTAVPGSAEVQGMAGPAAEITVSGGPGTDSKDSGELSSLPLGPTTLDTRPLQSSALLDSSSSSSSSSSSSSNSNSSSSSGPNPSTSFEPIKADPTGVLELPKELSEIFDPTRECMSSELLEELMSSEVFAPLLRLSPPPGDHDYIYNLDESEGVCDLFDVPVLNL

SEQ ID NO: 813114 - protein, 420 aa, Homo sapiens
MAEAGPQAPPPPGTPSRHEKSLGLLTTKFVSLLQEAKDGVLDLKLAADTLAVRQKRRIYDITNVLEGIGLIEKKSKNSIQWKGVGPGCNTREIADKLIELKAEIEELQQREQELDQHKVWVQQSIRNVTEDVQNSCLAYVTHEDICRCFAGDTLLAIRAPSGTSLEVPIPEGLNGQKKYQIHLKSVSGPIEVLLVNKEAWSSPPVAVPVPPPEDLLQSPSAVSTPPPLPKPALAQSQEASRPNSPQLTPTAVPGSAEVQGMAGPAAEITVSGGPGTDSKDSGELSSLPLGPTTLDTRPLQSSALLDSSSSSSSSSSSSSSSSSSSSNSNSSSSSGPNPSTSFEPIKADPTGVLELPKELSEIFDPTRECMSSELLEELMSSEVFAPLLRLSPPPGDHDYIYNLDESEGVCDLFDVPVLNL

SEQ ID NO: 813115 - protein, 496 aa, Homo sapiens
KDESNNDPPHTHNNKENQKGQVLRPGVLAEGRRRAGAMAEAGPQAPPPPGTPSRHEKSLGLLTTKFVSLLQEAKDGVLDLKLAADTLAVRQKRRIYDITNVLEGIGLIEKKSKNSIQWNVSGHSGRVVESPTQKCRAWGGGAEEGRGHGTQSSQQSLSAPLPGLRGVGPGCNTREIADKLIELKAEIEELQQREQELDQHKVWVQQSIRNVTEDVQNSCLAYVTHEDICRCFAGDTLLAIRAPSGTSLEVPIPEGLNGQKKYQIHLKSVSGPIEVLLVNKEAWSSPPVAVPVPPPEDLLQSPSAVSTPPPLPKPALAQSQEASRPNSPQLTPTAVPGSAEVQGMAGPAAEITVSGGPGTDSKDSGELSSLPLGPTTLDTRPLQSSALLDSSSSSSSSSSSSSNSNSSSSSGPNPSTSFEPIKADPTGVLELPKELSEIFDPTRECMSSELLEELMSSEVFAPLLRLSPPPGDHDYIYNLDESEGVCDLFDVPVLNL

SEQ ID NO: 813116 - protein, 403 aa, Homo sapiens
MAEAGPQAPPPPGTPSRHEKSLGLLTTKFVSLLQEAKDGVLDLKLAADTLAVRQKRRIYDITNVLEGIGLIEKKSKNSIQWKGVGPGCNTREIADKLIELKAEIEELQQREQELDQHKVWVQQSIRNVTEDVQNSCLAYVTHEDICRCFAGDTLLAIRAPSGTSLEVPIPEGLNGQKKYQIHLKSVSGPIEVLLVNKEAWSSPPVAVPVPPPEDLLQSPSAVSTPPPLPKPALAQSQEASRPNSPQLTPTAVPGSAEVQGMAGPAAEITVSGGPGTDSKDSGELSSLPLGPTTLDTRPLQSSALLDSSSSSSSSSSSSSNSNSSSSSGPNPSTSFEPIKADPTGVLELPKELSEIFDPTRECMSSELLEELMSSEGTCPVWLGPRLSDLGVAWGPLPPDPYRA

SEQ ID NO: 813117 - protein, 298 aa, Homo sapiens
VIEDPGGEEGRYVTDGRQNSCLAYVTHEDICRCFAGDTLLAIRAPSGTSLEVPIPEGLNGQKKYQIHLKSVSGPIEVLLVNKEAWSSPPVAVPVPPPEDLLQSPSAVSTPPPLPKPALAQSQEASRPNSPQLTPTAVPGSAEVQGMAGPAAEITVSGGPGTDSKDSGELSSLPLGPTTLDTRPLQSSALLDSSSSSSSSSSSSSNSNSSSSSGPNPSTSFEPIKADPTGVLELPKELSEIFDPTRECMSSELLEELMSSEVFAPLLRLSPPPGDHDYIYNLDESEGVCDLFDVPVLNL

SEQ ID NO: 813118 - protein, 153 aa, Homo sapiens [sequence omitted]

SEQ ID NO: 813119 - protein, 402 aa, Homo sapiens
MAEAGPQAPPPPGTPSRHEKSLGLLTTKFVSLLQEAKDGVLDLKLAADTLAVRQKRRIYDITNVLEGIGLIEKKSKNSIQWKGVGPGCNTREIADKLIELKAEIEELQQREQELDQHKVWVQQSIRNVTEDVQNSCLAYVTHEDICRCFAGDTLLAIRAPSGTSLEVPIPEGLNGQKKYQIHLKSVSGPIEVLLVNKEAWSSPPVAVPVPPPEDLLQSPSAVSTPPPLPKPALAQSQEASRPNSPQLTPTAVPGSAEVQGMAGPAAEITVSGGPGTDSKDSGELSSLPLGPTTLDTRPLQSSALLDSSSSSSSSSSSSSNSNSSSSSGPNPSTSFEPIKADPTGVLELPKELSEIFDPTRELLLALSRAHFCWAFSPRTCRWWGRLPRRNRGLWGGVWVVQP

SEQ ID NO: 813120 - protein, 66 aa, Homo sapiens
WKVGVGVGRGWAAARGALAQGLRLVLSAVFAPLLRLSPPPGDHDYIYNLDESEGVCDLFDVPVLNL

SEQ ID NO: 813121 - protein, 103 aa, Homo sapiens
ARKWRRRAWPGLAEGRRRAGAMAEAGPQAPPPPGTPSRHEKSLGLLTTKFVSLLQEAKDGVLDLKLAADTLAVRQKRRIYDITNVLEGIGLIEKKSKNSIQWK

SEQ ID NO: 813122 - protein, 138 aa, Homo sapiens [sequence omitted]

SEQ ID NO: 813123 - protein, 705 aa, Homo sapiens
MWLLYLLVPALFCRAGGSIPIPQKLFGEVTSPLFPKPYPNNFETTTVITVPTGYRVKLVFQQFDLEPSEGCFYDYVKISADKKSLGRFCGQLGSPLGNPPGKKEFMSQGNKMLLTFHTDFSNEENGTIMFYKGFLAYYQAVDLDECASRSKSGEEDPQPQCQHLCHNYVGGYFCSCRPGYELQEDRHSCQAECSSELYTEASGYISSLEYPRSYPPDLRCNYSIRVERGLTLHLKFLEPFDIDDHQQVHCPYDQLQIYANGKNIGEFCGKQRPPDLDTSSNAVDLLFFTDESGDSRGWKLRYTTEIIKCPQPKTLDEFTIIQNLQPQYQFRDYFIATCKQGYQLIEGNQVLHSFTAVCQDDGTWHRAMPRCKIKDCGQPRNLPNGDFRYTTTMGVNTYKARIQYYCHEPYYKMQTRAGSRESEQGVYTCTAQGIWKNEQKGEKIPRCLPVCGKPVNPVEQRQRIIGGQKAKMGNFPWQVFTNIHGRGGGALLGDRWILTAAHTLYPKEHEAQSNASLDVFLGHTNVEELMKLGNHPIRRVSVHPDYRQDESYNFEGDIALLELENSVTLGPNLLPICLPDNDTFYDLGLMGYVSGFGVMEEKIAHDLRFVRLPVANPQACENWLRGKNRMDVFSQNMFCAGHPSLKQDACQGDSGGVFAVRDPNTDRWVATGIVSWGIGCSRGYGFYTKVLNYVDWIKKEMEEED

SEQ ID NO: 813124 - protein, 705 aa, Homo sapiens; identical to SEQ ID NO: 813123

SEQ ID NO: 813125 - protein, 705 aa, Homo sapiens; identical to SEQ ID NO: 813123

SEQ ID NO: 813126 - protein, 705 aa, Homo sapiens; identical to SEQ ID NO: 813123

SEQ ID NO: 813127 - protein, 705 aa, Homo sapiens; identical to SEQ ID NO: 813123

SEQ ID NO: 813128 - protein, 687 aa, Homo sapiens
MWLLYLLVPALFCRAGGSIPIPQKLFGEVTSPLFPKPYPNNFETTTVITVPTGYRVKLVFQQFDLEPSEGCFYDYVKISADKKSLGRFCGQLGSPLGNPPGKKEFMSQGNKMLLTFHTDFSNEENGTIMFYKGFLAYYQAVDLDECASRSKSGEEDPQPQCQHLCHNYVGGYFCSCRPGYELQEDRHSCQAECSSELYTEASGYISSLEYPRSYPPDLRCNYSIRVERGLTLHLKFLEPFDIDDHQQVHCPYDQLQIYANGKNIGEFCGKQRPPDLDTSSNAVDLLFFTDESGDSRGWKLRYTTEIIKCPQPKTLDEFTIIQNLQPQYQFRDYFIATCKQGYQLIEGNQVLHSFTAVCQDDGTWHRAMPRCKIKDCGQPRNLPNGDFRYTTTMGVNTYKARIQYYCHEPYYKMQTRAGSRESEQGVYTCTAQGIWKNEQKGEKIPRCLPVCGKPVNPVEQRQRIIGGHGGGALLGDRWILTAAHTLYPKEHEAQSNASLDVFLGHTNVEELMKLGNHPIRRVSVHPDYRQDESYNFEGDIALLELENSVTLGPNLLPICLPDNDTFYDLGLMGYVSGFGVMEEKIAHDLRFVRLPVANPQACENWLRGKNRMDVFSQNMFCAGHPSLKQDACQGDSGGVFAVRDPNTDRWVATGIVSWGIGCSRGYGFYTKVLNYVDWIKKEMEEED

SEQ ID NO: 813129 - protein, 386 aa, Homo sapiens
MWLLYLLVPALFCRAGGSIPIPQKLFGEVTSPLFPKPYPNNFETTTVITVPTGYRVKLVFQQFDLEPSEGCFYDYVKISADKKSLGRFCGQLGSPLGNPPGKKEFMSQGNKMLLTFHTDFSNEENGTIMFYKGFLAYYQAVDLDECASRSKSGEEDPQPQCQHLCHNYVGGYFCSCRPGYELQEDRHSCQAECSSELYTEASGYISSLEYPRSYPPDLRCNYSIRVERGLTLHLKFLEPFDIDDHQQVHCPYDQLQIYANGKNIGEFCGKQRPPDLDTSSNAVDLLFFTDESGDSRGWKLRYTTEIIKCPQPKTLDEFTIIQNLQPQYQFRDYFIATCKQGYQLIEGNQVLHSFTAVCQDDGTWHRAMPRCKITAFLVYASIRSLL

SEQ ID NO: 813130 - protein, 875 aa, Homo sapiens
MLMPWSFLPSGLLAGSSERRGPLAQDGTLCACVPHSTDGFSQTLLLNLWEPFQRPTGGNPHPPLTGPKPVLFLEGEGRDASGQGRRLERECEGSVVASGLDTALESDPMQQLHRPSSPPTPPAENMSVRFRVGREENAQWYGRLIPCHSHCPHGKSAEPPPAPDTLFCFGRWLLYLLVPALFCRAGGSIPIPQKLFGEVTSPLFPKPYPNNFETTTVITVPTGYRVKLVFQQFDLEPSEGCFYDYVKISADKKSLGRFCGQLGSPLGNPPGKKEFMSQGNKMLLTFHTDFSNEENGTIMFYKGFLAYYQAVDLDECASRSKSGEEDPQPQCQHLCHNYVGGYFCSCRPGYELQEDRHSCQAECSSELYTEASGYISSLEYPRSYPPDLRCNYSIRVERGLTLHLKFLEPFDIDDHQQVHCPYDQLQIYANGKNIGEFCGKQRPPDLDTSSNAVDLLFFTDESGDSRGWKLRYTTEIIKCPQPKTLDEFTIIQNLQPQYQFRDYFIATCKQGYQLIEGNQVLHSFTAVCQDDGTWHRAMPRCKIKDCGQPRNLPNGDFRYTTTMGVNTYKARIQYYCHEPYYKMQTRAGSRESEQGVYTCTAQGIWKNEQKGEKIPRCLPVCGKPVNPVEQRQRIIGGQKAKMGNFPWQVFTNIHGRGGGALLGDRWILTAAHTLYPKEHEAQSNASLDVFLGHTNVEELMKLGNHPIRRVSVHPDYRQDESYNFEGDIALLELENSVTLGPNLLPICLPDNDTFYDLGLMGYVSGFGVMEEKIAHDLRFVRLPVANPQACENWLRGKNRMDVFSQNMFCAGHPSLKQDACQGDSGGVFAVRDPNTDRWVATGIVSWGIGCSRGYGFYTKVLNYVDWIKKEMEEED

SEQ ID NO: 813131 - protein, 1063 aa, Homo sapiens
IDLSKSIAVGRAQDSTRALRNVSKGDGQPGGREKPGEKPGHGRQFRETGTPFSLHTPHQFHCAHAWTHTTHAPSLLLGIRGDFIHKMLMPWSFLPSGLLAGSSERRGPLAQDGTLCACVPHSTDGFSQTLLLNLWEPFQRPTGGNPHPPLTGPKPVLFLEGEGRDASGQGRRLERECEGSVVASGLDTALESDPMQQLHRPSSPPTPPAENMSVRFRVGREENAQWYGRLIPCHSHCPHGKSAEPPPAPDTLFCFGRWLLYLLVPALFCRAGGSIPIPQKLFGEVTSPLFPKPYPNNFETTTVITVPTGYRVKLVFQQFDLEPSEGCFYDYVKISADKKSLGRFCGQLGSPLGNPPGKKEFMSQGNKMLLTFHTDFSNEENGTIMFYKGFLAYYQAVDLDECASRSKSGEEDPQPQCQHLCHNYVGGYFCSCRPGYELQEDRHSCQAECSSELYTEASGYISSLEYPRSYPPDLRCNYSIRVERGLTLHLKFLEPFDIDDHQQVHCPYDQLQGTAVLPLKDPFLPFCLHLAPLVPTSSWIPWPAGAGTANITHGLGKFPHNYNWVMGIPFHLPLKTHIRQDFITTTTTLATRLLPSWPCVKTSKLKKKNPPPLQIYANGKNIGEFCGKQRPPDLDTSSNAVDLLFFTDESGDSRGWKLRYTTEIIKCPQPKTLDEFTIIQNLQPQYQFRDYFIATCKQGYQLIEGNQVLHSFTAVCQDDGTWHRAMPRCKIKDCGQPRNLPNGDFRYTTTMGVNTYKARIQYYCHEPYYKMQTRAGSRESEQGVYTCTAQGIWKNEQKGEKIPRCLPVCGKPVNPVEQRQRIIGGQKAKMGNFPWQVFTNIHGRGGGALLGDRWILTAAHTLYPKEHEAQSNASLDVFLGHTNVEELMKLGNHPIRRVSVHPDYRQDESYNFEGDIALLELENSVTLGPNLLPICLPDNDTFYDLGLMGYVSGFGVMEEKIAHDLRFVRLPVANPQACENWLRGKNRMDVFSQNMFCAGHPSLKQDACQGDSGGVFAVRDPNTDRWVATGIVSWGIGCSRGYGFYTKVLNYVDWIKKEMEEED

SEQ ID NO: 813132 - protein, 923 aa, Homo sapiens
RVERGLTLHLKFLEPFDIDDHQQVHCPYDQLQIYANGKNIGEFCGKQRPPDLDTSSNAVDLLFFTDESGDSRGWKLRYTTEIIKCPQPKTLDEFTIGGQKAKMGNFPWQVFTNIRGRGGGALLGDRWILTAAHTLYPKEHEAQSNASLDVFLGHTNVEELMKLGNHPIRRVSVHPDYRQDESYNFEGDIALLELENSVTLGPNLLPICLPDNDTFYDLGLMGYVSGFGVMEEKIAHDLRFVRLPVANHRPLFPKPYPNNFETTTVITVPTGYRVKLVFQQFDLEPSEGCFYDYVKISADKKSLGRFCGQLGSPLGNPPGKKEFMSQGNKMLLTFHTDFSNEENGTIMFYKGFLAYYQAVDLDECASRSKSGEEDPQPQCQHLCHNYVGGYFCSCRPGYELQEDRHSCQAECSSELYTEASGYISSLEYPRSYPPDLRCNYSIRVERGLTLHLKFLEPFDIDDHQQVHCPYDQLQIYANGKNIGEFCGKQRPPDLDTSSNAVDLLFFTDESGDSRGWKLRYTTEIIKCPQPKTLDEFTIIQNLQPQYQFRDYFIATCKQGYQLIEGNQVLHSFTAVCQDDGTWHRAMPRCKIKDCGQPRNLPNGDFRYTTTMGVNTYKARIQYYCHEPYYKMQTRAGSRESEQGVYTCTAQGIWKNEQKGEKIPRCLPVCGKPVNPVEQRQRIIGGQKAKMGNFPWQVFTNIHGRGGGALLGDRWILTAAHTLYPKEHEAQSNASLDVFLGHTNVEELMKLGNHPIRRVSVHPDYRQDESYNFEGDIALLELENSVTLGPNLLPICLPDNDTFYDLGLMGYVSGFGVMEEKIAHDLRFVRLPVANPQACENWLRGKNRMDVFSQNMFCAGHPSLKQDACQGDSGGVFAVRDPNTDRWVATGIVSWGIGCSRGYGFYTKVLNYVDWIKKEMEEED

SEQ ID NO: 813133 - protein, 734 aa, Homo sapiens
MWLLYLLVPALFCRAGGSIPIPQKLFGEVTSPLFPKPYPNNFETTTVITVPTGYRVKLVFQQFDLEPSEGCFYDYVKISADKKSLGRFCGQLGSPLGNPPGKKEFMSQGNKMLLTFHTDFSNEENGTIMFYKGFLAYYQAVGLWWVTSLRSEPLLRSPSRSLTLLPECLPDLDECASRSKSGEEDPQPQCQHLCHNYVGGYFCSCRPGYELQEDRHSCQAECSSELYTEASGYISSLEYPRSYPPDLRCNYSIRVERGLTLHLKFLEPFDIDDHQQVHCPYDQLQIYANGKNIGEFCGKQRPPDLDTSSNAVDLLFFTDESGDSRGWKLRYTTEIIKCPQPKTLDEFTIIQNLQPQYQFRDYFIATCKQGYQLIEGNQVLHSFTAVCQDDGTWHRAMPRCKIKDCGQPRNLPNGDFRYTTTMGVNTYKARIQYYCHEPYYKMQTRAGSRESEQGVYTCTAQGIWKNEQKGEKIPRCLPVCGKPVNPVEQRQRIIGGQKAKMGNFPWQVFTNIHGRGGGALLGDRWILTAAHTLYPKEHEAQSNASLDVFLGHTNVEELMKLGNHPIRRVSVHPDYRQDESYNFEGDIALLELENSVTLGPNLLPICLPDNDTFYDLGLMGYVSGFGVMEEKIAHDLRFVRLPVANPQACENWLRGKNRMDVFSQNMFCAGHPSLKQDACQGDSGGVFAVRDPNTDRWVATGIVSWGIGCSRGYGFYTKVLNYVDWIKKEMEEED

SEQ ID NO: 813134 - protein, 699 aa, Homo sapiens
RVERGLTLHLKFLEPFDIDDHQQVHCPYDQLQIYANGKNIGEFCGKQRPPDLDTSSNAVDLLFFTDESGDSRGWKLRYTTEIIKCPQPKTLDEFTIGGQKAKMGNFPWQVFTNIRGRGGGALLGDRWILTAAHTLYPKEHEAQSNASLDVFLGHTNVEELMKLGNHPIRRVSVHPDYRQDESYNFEGDIALLELENSVTLGPNLLPILPPDLRCNYSIRVERGLTLHLKFLEPFDIDDHQQVHCPYDQLQIYANGKNIGEFCGKQRPPDLDTSSNAVDLLFFTDESGDSRGWKLRYTTEIIKCPQPKTLDEFTIIQNLQPQYQFRDYFIATCKQGYQLIEGNQVLHSFTAVCQDDGTWHRAMPRCKIKDCGQPRNLPNGDFRYTTTMGVNTYKARIQYYCHEPYYKMQTRAGSRESEQGVYTCTAQGIWKNEQKGEKIPRCLPVCGKPVNPVEQRQRIIGGQKAKMGNFPWQVFTNIHGRGGGALLGDRWILTAAHTLYPKEHEAQSNASLDVFLGHTNVEELMKLGNHPIRRVSVHPDYRQDESYNFEGDIALLELENSVTLGPNLLPICLPDNDTFYDLGLMGYVSGFGVMEEKIAHDLRFVRLPVANPQACENWLRGKNRMDVFSQNMFCAGHPSLKQDACQGDSGGVFAVRDPNTDRWVATGIVSWGIGCSRGYGFYTKVLNYVDWIKKEMEEED

SEQ ID NO: 813135 - protein, 496 aa, Homo sapiens
  misc_feature (8)..(8): Xaa can be any naturally occurring amino acid
MSSYGTHXELWNYSIRVERGLTLHLKFLEPFDIDDHQQVHCPYDQLQIYANGKNIGEFCGKQRPPDLDTSSNAVDLLFFTDESGDSRGWKLRYTTEIIKCPQPKTLDEFTIIQNLQPQYQFRDYFIATCKQGYQLIEGNQVLHSFTAVCQDDGTWHRAMPRCKIKDCGQPRNLPNGDFRYTTTMGVNTYKARIQYYCHEPYYKMQTRAGSRESEQGVYTCTAQGIWKNEQKGEKIPRCLPVCGKPVNPVEQRQRIIGGQKAKMGNFPWQVFTNIHGRGGGALLGDRWILTAAHTLYPKEHEAQSNASLDVFLGHTNVEELMKLGNHPIRRVSVHPDYRQDESYNFEGDIALLELENSVTLGPNLLPICLPDNDTFYDLGLMGYVSGFGVMEEKIAHDLRFVRLPVANPQACENWLRGKNRMDVFSQNMFCAGHPSLKQDACQGDSGGVFAVRDPNTDRWVATGIVSWGIGCSRGYGFYTKVLNYVDWIKKEMEEED

SEQ ID NO: 813136 - protein, 233 aa, Homo sapiens
MWLLYLLVPALFCRAGGSIPIPQKLFGEVTSPLFPKPYPNNFETTTVITVPTGYRVKLVFQQFDLEPSEGCFYDYVKISADKKSLGRFCGQLGSPLGNPPGKKEFMSQGNKMLLTFHTDFSNEENGTIMFYKGFLAYYQAVDLDECASRSKSGEEDPQPQCQHLCHNYVGGYFCSCRPGYELQEDRHSCQAECSSELYTEASGYISSLEYPRSYPPDLRCNYSIRVERNLTKF

SEQ ID NO: 813137 - protein, 285 aa, Homo sapiens
MWLLYLLVPALFCRAGGSIPIPQKLFGEVTSPLFPKPYPNNFETTTVITVPTGYRVKLVFQQFDLEPSEGCFYDYVKISADKKSLGRFCGQLGSPLGNPPGKKEFMSQGNKMLLTFHTDFSNEENGTIMFYKGFLAYYQAVDLDECASRSKSGEEDPQPQCQHLCHNYVGGYFCSCRPGYELQEDRHSCQAECSSELYTEASGYISSLEYPRSYPPDLRCNYSIRVERHGHRVLGHRVQQGLWLLHQSAQLRGLDQERDGGGGLSPEFTRFESREQCGKKKTKNN

SEQ ID NO: 813138 - protein, 624 aa, Homo sapiens
TGRLYSTGSCTPPGGCTPPAVVLHRQVVLHRQVVLHRQVVLHRQVVLHRQVVFLEPFDIDDHQQVHCPYDQLQGTAVLPLKDPFLPFCLHLAPLVPTSSWIPWPAGAGTANITHGLGKFPHNYNWVMGIPFHLPLKTHIRQDFITTTTTLATRLLPSWPCVKTSKLKKKNPPPLQIYANGKNIGEFCGKQRPPDLDTSSNAVDLLFFTDESGDSRGWKLRYTTEIIKCPQPKTLDEFTIIQNLQPQYQFRDYFIATCKQGYQLIEGNQVLHSFTAVCQDDGTWHRAMPRCKIKDCGQPRNLPNGDFRYTTTMGVNTYKARIQYYCHEPYYKMQTRAGSRESEQGVYTCTAQGIWKNEQKGEKIPRCLPVCGKPVNPVEQRQRIIGGQKAKMGNFPWQVFTNIHGRGGGALLGDRWILTAAHTLYPKEHEAQSNASLDVFLGHTNVEELMKLGNHPIRRVSVHPDYRQDESYNFEGDIALLELENSVTLGPNLLPICLPDNDTFYDLGLMGYVSGFGVMEEKIAHDLRFVRLPVANPQACENWLRGKNRMDVFSQNMFCAGHPSLKQDACQGDSGGVFAVRDPNTDRWVATGIVSWGIGCSRGYGFYTKVLNYVDWIKKEMEEED

SEQ ID NO: 813139 - protein, 461 aa, Homo sapiens
MRQDTARLTMLQIYANGKNIGEFCGKQRPPDLDTSSNAVDLLFFTDESGDSRGWKLRYTTEIIKCPQPKTLDEFTIIQNLQPQYQFRDYFIATCKQGYQLIEGNQVLHSFTAVCQDDGTWHRAMPRCKIKDCGQPRNLPNGDFRYTTTMGVNTYKARIQYYCHEPYYKMQTRAGSRESEQGVYTCTAQGIWKNEQKGEKIPRCLPVCGKPVNPVEQRQRIIGGQKAKMGNFPWQVFTNIHGRGGGALLGDRWILTAAHTLYPKEHEAQSNASLDVFLGHTNVEELMKLGNHPIRRVSVHPDYRQDESYNFEGDIALLELENSVTLGPNLLPICLPDNDTFYDLGLMGYVSGFGVMEEKIAHDLRFVRLPVANPQACENWLRGKNRMDVFSQNMFCAGHPSLKQDACQGDSGGVFAVRDPNTDRWVATGIVSWGIGCSRGYGFYTKVLNYVDWIKKEMEEED

SEQ ID NO: 813140 - protein, 386 aa, Homo sapiens
RVERGLTLHLKFLEPFDIDDHQQVHCPYDQLQIYANGKNIGEFCGKQRPPDLDTSSNAVDLLFFTDESGDSRGWKLRYTTEIIKCPQPKTLDEFTIGGQKAKMGNFPWQVFTNIRGRGGGALLGDRWILTAAHTLYPKEHEAQSNASLDVFLGHTNVEELMKLGNHPIRRVSVHPDYRQDESYNFEGDIALLELENSVTLGPNLLPICLPDNDTFYDLGLMGYVSGFGVMEEKIAHDLRFVRLPVANHRPLFPKPYPNNFETTTVITVPTGYRVKLVFQQFDLEPSEGCFYDYVKISADKKSLGRFCGQLGSPLGNPPGKKEFMSQGNKMLLTFHTDFSNEENGTPRASCPGASGAAGAMASTPKCSTTWTGSRKRWRRRTEPRIH

SEQ ID NO: 813141 - protein, 212 aa, Homo sapiens
MTATEALLRVLLLLLAFGHSTYGAECFPACNPQNGFCEDDNVCRCQPGWQGPLCDQCVTSPGCLHGLCGEPGQCICTDGWDGELCDRDVRACSSAPCANNGTCVSLDDGLYECSCAPGYSGKDCQKKDGPCVINGSPCQHGGTCVDDEGRASHASCLCPPGFSGNFCEIVANSCTPNPCENDGVCTDIGGAFVRSTYDELKKVSKKSSEQQT

SEQ ID NO: 813142 - protein, 208 aa, Homo sapiens
  misc_feature (200)..(200): Xaa can be any naturally occurring amino acid
MTATEALLRVLLLLLAFGHSTYGAECFPACNPQNGFCEDDNVCRCQPGWQGPLCDQCVTSPGCLHGLCGEPGQCICTDGWDGELCDRDVRACSSAPCANNGTCVSLDDGLYECSCAPGYSGKDCQKKDGPCVINGSPCQHGGTCVDDEGRASHASCLCPPGFSGNFCEIVANSCTPTMQTRVDESGTSCVQRYATERVHXELNGTVKQ

SEQ ID NO: 813143 - protein, 205 aa, Homo sapiens
  misc_feature (178)..(178): Xaa can be any naturally occurring amino acid
  misc_feature (200)..(200): Xaa can be any naturally occurring amino acid
MTATEALLRVLLLLLAFGHSTYGAECFPACNPQNGFCEDDNVCRCQPGWQGPLCDQCVTSPGCLHGLCGEPGQCICTDGWDGELCDRDVRACSSAPCANNGTCVSLDDGLYECSCAPGYSGKDCQKKDGPCVINGSPCQHGGTCVDDEGRASHASCLCPPGFSGNFCEIVANSCTPKXNAEETNGGFCNLKIRGGETFRXARVAP

SEQ ID NO: 813144 - protein, 163 aa, Homo sapiens
MTATEALLRVLLLLLAFGHSTYGAECFPACNPQNGFCEDDNVCRCQPGWQGPLCDQCVTSTCRFTRLSRTPAASFRLSYRSLCLHYVTVFPSALDPLHICLPTRRHLPLSFSSPTILCDFLLLPTITFHALFYSSAPFHRSPSTHELPDYPSPPTLSSTPLPL

SEQ ID NO: 813145 - protein, 109 aa, Homo sapiens
  misc_feature (90)..(90): Xaa can be any naturally occurring amino acid
  misc_feature (97)..(97): Xaa can be any naturally occurring amino acid
  misc_feature (101)..(101): Xaa can be any naturally occurring amino acid
MTATEALLRVLLLLLAFGHSTYGAECFPACNPQNGFCEDDNVCRCQPGWQGPLCDQCVTSPGCLHGLCGEPGQCICTDGWDGELCDRDVXGPGSLRXPPLXAKTNGTCV

SEQ ID NO: 813146 - protein, 383 aa, Homo sapiens
MTATEALLRVLLLLLAFGHSTYGAECFPACNPQNGFCEDDNVCRCQPGWQGPLCDQCVTSPGCLHGLCGEPGQCICTDGWDGELCDRDVRACSSAPCANNGTCVSLDDGLYECSCAPGYSGKDCQKKDGPCVINGSPCQHGGTCVDDEGRASHASCLCPPGFSGNFCEIVANSCTPNPCENDGVCTDIGGDFRCRCPAGFIDKTCSRPVTNCASSPCQNGGTCLQHTQVSYECLCKPEFTGLTCVKKRALSPQQVTRLPSGYGLAYRLTPGVHELPVQQPEHRILKVSMKELNKKTPLLTEGQAICFTILGVLTSLVVLGTVGIVFLNKCETWVSNLRYNHMLRKKKNLLLQYNSGEDLAVNIIFPEKIDMTTFSKEAGDEEI

SEQ ID NO: 813147 - protein, 383 aa, Homo sapiens; identical to SEQ ID NO: 813146

SEQ ID NO: 813148 - protein, 310 aa, Homo sapiens
MTATEALLRVLLLLLAFGHSTYGAECFPACNPQNGFCEDDNVCRCQPGWQGPLCDQCVTSPGCLHGLCGEPGQCICTDGWDGELCDRDVRACSSAPCANNGTCVSLDDGLYECSCAPGYSGKDCQKKDGPCVINGSPCQHGGTCVDDEGRASHASCLCPPGFSGNFCEIVANSCTPNPCENDGVCTDIGGDFRCRCPAGFIDKTCSRPVTNCASSPCQNGGTCLQHTQGQAICFTILGVLTSLVVLGTVGIVFLNKCETWVSNLRYNHMLRKKKNLLLQYNSGEDLAVNIIFPEKIDMTTFSKEAGDEEI

SEQ ID NO: 813149 - protein, 348 aa, Homo sapiens
MTATEALLRVLLLLLAFGHSTYGAECFPACNPQNGFCEDDNVCRCQPGWQGPLCDQCVTSPGCLHGLCGEPGQCICTDGWDGELCDRDVRACSSAPCANNGTCVSLDDGLYECSCAPGYSGKDCQKKDGPCVINGSPCQHGGTCVDDEGRASHASCLCPPGFSGNFCEIVANSCTPNPCENDGVCTDIGGDFRCRCPAGFIDKTCSRPVTNCASSPCQNGGTCLQHTQVSYECLCKPEFTGLTCVKKRALSPQQVTRLPSGYGLAYRLTPGVHELPVQQPEHRILKVSMKELNKCETWVSNLRYNHMLRKKKNLLLQYNSGEDLAVNIIFPEKIDMTTFSKEAGDEEI

SEQ ID NO: 813150 - protein, 365 aa, Homo sapiens
MTATEALLRVLLLLLAFGHSTYGAECFPACNPQNGFCEDDNVCRCQPGWQGPLCDQCVTSPGCLHGLCGEPGQCICTDGWDGELCDRDVRACSSAPCANNGTCVSLDDGLYECSCAPGYSGKDCQSVDDEGRASHASCLCPPGFSGNFCEIVANSCTPNPCENDGVCTDIGGDFRCRCPAGFIDKTCSRPVTNCASSPCQNGGTCLQHTQVSYECLCKPEFTGLTCVKKRALSPQQVTRLPSGYGLAYRLTPGVHELPVQQPEHRILKVSMKELNKKTPLLTEGQAICFTILGVLTSLVVLGTVGIVFLNKCETWVSNLRYNHMLRKKKNLLLQYNSGEDLAVNIIFPEKIDMTTFSKEAGDEEI

SEQ ID NO: 813151 - protein, 345 aa, Homo sapiens
MTATEALLRVLLLLLAFGHSTYGAECFPACNPQNGFCEDDNVCRCQPGWQGPLCDQCVTSPGCLHGLCGEPGQCICTDGWDGELCDRDVRACSSAPCANNGTCVSLDDGLYECSHASCLCPPGFSGNFCEIVANSCTPNPCENDGVCTDIGGDFRCRCPAGFIDKTCSRPVTNCASSPCQNGGTCLQHTQVSYECLCKPEFTGLTCVKKRALSPQQVTRLPSGYGLAYRLTPGVHELPVQQPEHRILKVSMKELNKKTPLLTEGQAICFTILGVLTSLVVLGTVGIVFLNKCETWVSNLRYNHMLRKKKNLLLQYNSGEDLAVNIIFPEKIDMTTFSKEAGDEEI

SEQ ID NO: 813152 - protein, 282 aa, Homo sapiens
  misc_feature (192)..(192): Xaa can be any naturally occurring amino acid
  misc_feature (198)..(198): Xaa can be any naturally occurring amino acid
MTATEALLRVLLLLLAFGHSTYGAECFPACNPQNGFCEDDNVCRCQPGWQGPLCDQCVTSPGCLHGLCGEPGQCICTDGWDGELCDRDVRACSSAPCANNGTCVSLDDGLYECSHVASPQGYIVGEGTADGKHRTRTPDAVVTPVVPLLALDTSESNALTDEGMNECGRVVSSTNALIAARVVRHAWTIFKXLIYHVXESVERKAVMRVPLTAMSDASWTVTATSSILVAIQRCCADLSLLVRASPHGPASFPMPHREASRWHSPVPPGGTAKLVGPKAEPP

SEQ ID NO: 813153 - protein, 620 aa, Homo sapiens
  misc_feature (5)..(5): Xaa can be any naturally occurring amino acid
  misc_feature (8)..(8): Xaa can be any naturally occurring amino acid
  misc_feature (36)..(36): Xaa can be any naturally occurring amino acid
  misc_feature (53)..(53): Xaa can be any naturally occurring amino acid
TEVIXSLXIIIYKALDYGLKENEERELSPPLEQLIXHMANTVEADGSNDEGYXAAEEGLGDEDEKRKISAIRSYRDVMKLCAAHLPTESDAPNHYQAVCRALFAETMELHTFLTKIKSAKENLKKIQEMEKSDESSTDLEELKNADWARFWVQVMRDLRNGVKLKKVQERQYNPLPIEYQLTPYEMLMDDIRCKRYTLRKVMVNGDIPPRLKKSAHEIILDFIRSRPPLNPVSARKLKPTPPRPRSLHERILEEIKAERKLRPVSPEEIRRSRLDVTTPESTKNLVESSMVNGGLTSQTKENGLSTSQQVPAQRKKLLRAPTLAELDSSESEEETLHKSTSSSSVSPSFPEEPVLEAVSTRKKPPKFLPISSTPQPERRQPPQRRHSIEKETPTNVRQFLPPSRQSSRSLEEFCYPVECLALTVEEVMHIRQVLVKAELEKYQQYKDIYTALKKGKLCFCCRTRRFSFFTWSYTCQFCKRPVCSQCCKKMRLPSKPYSTLPIFSLGPSALQRGESSMRSEKPSTAHHRPLRSIARFSSKSKSMDKSDEELQFPKELMEDWSTMEVCVDCKKFISEIISSSRRSLVLANKRARLKRKTQSFYMSSPGPSEYCPSERTISEI

SEQ ID NO: 813154 - protein, 484 aa, Homo sapiens
  misc_feature (5)..(5): Xaa can be any naturally occurring amino acid
  misc_feature (8)..(8): Xaa can be any naturally occurring amino acid
  misc_feature (36)..(36): Xaa can be any naturally occurring amino acid
  misc_feature (53)..(53): Xaa can be any naturally occurring amino acid
TEVIXSLXIIIYKALDYGLKENEERELSPPLEQLIXHMANTVEADGSNDEGYXAAEEGLGDEDEKRKISAIRSYRDVMKLCAAHLPTESDAPNHYQAVCRALFAETMELHTFLTKIKSAKENLKKIQEMEKSDESSTDLEELKNADWARFWVQVMRDLRNGVKLKKVQERQYNPLPIEYQLTPYEMLMDDIRCKRYTLRKVMVNGDIPPRLKKSAHEIILDFIRSRPPLNPVSARKLKPTPPRPRSLHERILEEIKAERKLRPVSPEEIRRSRLGGILLPSGMPRSYCGRSDDIRQVLVKAELEKYQQYKDIYTALKKGKLCFCCRTRRFSFFTWSYTCQFCKRPVCSQCCKKMRLPSKPYSTLPIFSLGPSALQRGESSMRSEKPSTAHHRPLRSIARFSSKSKSMDKSDEELQFPKELMEDWSTMEVCVDCKKFISEIISSSRRSLVLANKRARLKRKTQSFYMSSPGPSEYCPSERTISEI

SEQ ID NO: 813155 - protein, 479 aa, Homo sapiens
NKLIWGISLITGVMRDLRNGVKLKKVQERQYNPLPIEYQLTPYEMLMDDIRCKRYTLRKVMVNGDIPPRLKKSAHEIILDFIRSRPPLNPVSARKLKPTPPRPRSLHERILEEIKAERKLRPVSPEEIRRSRLDVTTPESTKNLVESSMVNGGLTSQTKENGLSTSQQVPAQRKKLLRAPTLAELDSSESEEETLHKSTSSSSVSPSFPEEPVLEAVSTRKKPPKFLPISSTPQPERRQPPQRRHSIEKETPTNVRQFLPPSRQSSRSLEEFCYPVECLALTVEEVMHIRQVLVKAELEKYQQYKDIYTALKKGKLCFCCRTRRFSFFTWSYTCQFCKRPVCSQCCKKMRLPSKPYSTLPIFSLGPSALQRGESSMRSEKPSTAHHRPLRSIARFSSKSKSMDKSDEELQFPKELMEDWSTMEVCVDCKKFISEIISSSRRSLVLANKRARLKRKTQSFYMSSPGPSEYCPSERTISEI

SEQ ID NO: 813156 - protein, 620 aa, Homo sapiens; identical to SEQ ID NO: 813153
  misc_feature (5)..(5): Xaa can be any naturally occurring amino acid
  misc_feature (8)..(8): Xaa can be any naturally occurring amino acid
  misc_feature (36)..(36): Xaa can be any naturally occurring amino acid
  misc_feature (53)..(53): Xaa can be any naturally occurring amino acid

SEQ ID NO: 813157 - protein, 249 aa, Homo sapiens
IQTASLLSSHPFEAAMFGVAGAMYYLCERAFTSRWKSSKEEFCYPVECLALTVEEVMHIRQVLVKAELEKYQQYKDIYTALKKGKLCFCCRTRRFSFFTWSYTCQFCKRPVCSQCCKKMRLPSKPYSTLPIFSLGPSALQRGESSMRSEKPSTAHHRPLRSIARFSSKSKSMDKSDEELQFPKELMEDWSTMEVCVDCKKFISEIISSSRRSLVLANKRARLKRKTQSFYMSSPGPSEYCPSERTISEI

SEQ ID NO: 813158 - protein, 193 aa, Homo sapiens [sequence omitted]

SEQ ID NO: 813159 - protein, 620 aa, Homo sapiens; identical to SEQ ID NO: 813153
  misc_feature (5)..(5): Xaa can be any naturally occurring amino acid
  misc_feature (8)..(8): Xaa can be any naturally occurring amino acid
  misc_feature (36)..(36): Xaa can be any naturally occurring amino acid
  misc_feature (53)..(53): Xaa can be any naturally occurring amino acid

SEQ ID NO: 813160 - protein, 620 aa, Homo sapiens; identical to SEQ ID NO: 813153
  misc_feature (5)..(5): Xaa can be any naturally occurring amino acid
  misc_feature (8)..(8): Xaa can be any naturally occurring amino acid
  misc_feature (36)..(36): Xaa can be any naturally occurring amino acid
  misc_feature (53)..(53): Xaa can be any naturally occurring amino acid

SEQ ID NO: 813161 - protein, 162 aa, Homo sapiens
RAAGFAAAAMPSSPLRVAVVCSSNQNRSMEAHNILSKRGFSVRSFGTGTHVKLPGPAPDKPNVYDFKTTYDQMYNDLLRKDKELYPSGLPFKNPPCGPPWKVLRVARAQEACHPVQCTHWLLCLCESLVSIPGARRIVHGLVPVPPMAVGVVRRTDTVWGSP

SEQ ID NO: 813162 - protein, 219 aa, Homo sapiens
  misc_feature (200)..(200): Xaa can be any naturally occurring amino acid
EPRDLRPPPCRRPRCGWRWCARATRTGAWRRTTSSGSWAPPCPRALCSGDRPSLLPGSPWPAPGPLRGSRAGPRSWVGWLGWQLDGSARSPHAGGHHREGRFRDEAPAVRWSFELSEAGPGGEGSVRRSSAAQPPPPPPPLLNRRHDDGVHLEGAPEPPPGTQRPPSSVQINLELYASYVYLFMSYYFDRDDVAVKDFAXTFFTSHEERDMLRTDEVQT

SEQ ID NO: 813163 - protein, 162 aa, Homo sapiens; identical to SEQ ID NO: 813161

SEQ ID NO: 813164 - protein, 280 aa, Homo sapiens
MLSAVARGYQGWFHPCARLSVRMSSTGIDRKGVLANRVAVVTGSTSGIGFAIARRLARDGAHVVISSRKQQNVDRAMAKLQGEGLSVAGIVCHVGKAEDREQLVAKALEHCGGVDFLVCSAGVNPLVGSTLGTSEQIWDKILSVNVKSPALLLSQLLPYMENRRGAVILVSSIAAYNPVVALGVYNVSKTALLGLTRTLALELAPKDIRVNCVVPGIIKTDFSKVFHGNESLWKNFKEHHQLQRIGESEDCAGIVSFLCSPDASYVNGENIAVAGYSTRL

SEQ ID NO: 813165 - protein, 315 aa, Homo sapiens
LSCRLPDRRAAKLHSRQTGAQPGLIQQEASQTPTTMLSAVARGYQGWFHPCARLSVRMSSTGIDRKGVLANRVAVVTGSTSGIGFAIARRLARDGAHVVISSRKQQNVDRAMAKLQGEGLSVAGIVCHVGKAEDREQLVAKALEHCGGVDFLVCSAGVNPLVGSTLGTSEQIWDKILSVNVKSPALLLSQLLPYMENRRGAVILVSSIAAYNPVVALGVYNVSKTALLGLTRTLALELAPKDIRVNCVVPGIIKTDFSKVFHGNESLWKNFKEHHQLQRIGESEDCAGIVSFLCSPDASYVNGENIAVAGYSTRL

SEQ ID NO: 813166 - protein, 326 aa, Homo sapiens
MLSAVARGYQGWFHPCARLSVRMSSTGIDRKGVLANRVAVVTGSTSGIGFAIARRLARDGAHVVISSRKQQNVDRAMAKLQGEGLSVAGIVCHVGKAEDREQLVAKALEHCGGVDFLVCSAGVNPLVGSTLGTSEQIWDKILSVNVKSPALLLSQLLPYMENRRGAVILVSSIAAYNPVVALGVYNVSKTALLGLTRTLALELAPKDIRVNCVVPGIIKTDFSKVFHGNESLWKNFKEHHQLQRIGESEDCAGIVSFLCSPDASYVNGENIAVAGNTRSEDWAAAPCPSPDLRVPETRLGAVAQQNDGALAAENRYTHTRHDTMSA

SEQ ID NO: 813167 - protein, 121 aa, Homo sapiens
MENRRGAVILVSSIAAYNPVVALGVYNVSKTALLGLTRTLALELAPKDIRVNCVVPGIIKTDFSKVFHGNESLWKNFKEHHQLQRIGESEDCAGIVSFLCSPDASYVNGENIAVAGYSTRL

SEQ ID NO: 813168 - protein, 313 aa, Homo sapiens
MRRGALLAGALAAYAAYLVLGALLVARLEGPHEARLRAELETLRAQLLQRSPCVAAPALDAFVERVLAAGRLGRVVLANASGSANASDPAWDFASALFFASTLITTVGYGYTTPLTDAGKAFSIAFALLGVPTTMLLLTASAQRLSLLLTHVPLSWLSMRWGWDPRRAACWHLVALLGVVVTVCFLVPAVIFAHLEEAWSFLDAFYFCFISLSTIGLGDYVPGEAPGQPYRALYKVLVTVYLFLGLVAMVLVLQTFRHVSDLHGLTELILLPPPCPASFNADEDDRVDILGPQPESHQQLSASSHTDYASIPR

SEQ ID NO: 813169 - protein, 313 aa, Homo sapiens; identical to SEQ ID NO: 813168

SEQ ID NO: 813170 - protein, 114 aa, Homo sapiens
MLSSTRLIPGTTYKCGLLLQWWDVKGSTPCPHVPGSTGHQHNLVLCPFSHPLYTVSLWLSGILAASVFPSCCLCFSFSFMFRLCLDTGSRWRHRLKMETQAQDGHDTVNTANVR

SEQ ID NO: 813171 - protein, 313 aa, Homo sapiens; identical to SEQ ID NO: 813168

SEQ ID NO: 813172 - protein, 124 aa, Homo sapiens
ALSLGELKAHSPTLGLPKGIQPHPAGSSRTAAPPGKSEPQDDQRPFSAFTVYLFLGLVAMVLVLQTFRHVSDLHGLTELILLPPPCPASFNADEDDRVDILGPQPESHQQLSASSHTDYASIPR

SEQ ID NO: 813173 - protein, 179 aa, Homo sapiens
MLLLTASAQRLSLLLTHVPLSWLSMRWGWDPRRAACWHLVALLGVVVTVCFLVPAVIFAHLEEAWSFLDAFYFCFISLSTIGLGDYVPGEAPGQPYRALYKVLVTVYLFLGLVAMVLVLQTFRHVSDLHGLTELILLPPPCPASFNADEDDRVDILGPQPESHQQLSASSHTDYASIPR

SEQ ID NO: 813174 - protein, 126 aa, Homo sapiens
MLLLTASAQRLSLLLTHVPLSWLSMRWGWDPRRAACWHLVALLGVVVTVCFLVPAVIFAHLEEAWSFLDAFYFVGSAAHEVAATMIRLGLLPHSFTPTTTTIYKPSHGHPLMSGRSIGFRSKITYA

SEQ ID NO: 813175 - protein, 693 aa, Homo sapiens
MLEGEAPHQSCSGEAIGKMQQQGIPGGIFFHCERFDQPIGEDSLCSILEELWQDNDQLEQRQENQNNLLSHVKVLIKERGYEHKNIEKIIHVTTKLVPSIKRLHNCDTILKHTLNSHNHNRNSATKNLGKIFGNGNNFPHSPSSTKNENAKTGANSCEHDHYEKHLSHKQAPTHHQKIHPEEKLYVCTECVMGFTQKSHLFEHQRIHAGEKSRECDKSNKVFPQKPQVDVHPSVYTGEKPYLCTQCGKVFTLKSNLITHQKIHTGQKPYKCSECGKAFFQRSDLFRHLRIHTGEKPYECSECGKGFSQNSDLSIHQKTHTGEKHYECNECGKAFTRKSALRMHQRIHTGEKPYVCADCGKAFIQKSHFNTHQRIHTGEKPYECSDCGKSFTKKSQLHVHQRIHTGEKPYICTECGKVFTHRTNLTTHQKTHTGEKPYMCAECGKAFTDQSNLIKHQKTHTGEKPYKCNGCGKAFIWKSRLKIHQKSHIGERHYECKDCGKAFIQKSTLSVHQRIHTGEKPYVCPECGKAFIQKSHFIAHHRIHTGEKPYECSDCGKCFTKKSQLRVHQKIHTGEKPNICAECGKAFTDRSNLITHQKIHTREKPYECGDCGKTFTWKSRLNIHQKSHTGERHYECSKCGKAFIQKATLSMHQIIHTGKKPYACTECQKAFTDRSNLIKHQKMHSGEKRYKASD

SEQ ID NO: 813176 - protein, 693 aa, Homo sapiens; identical to SEQ ID NO: 813175

SEQ ID NO: 813177 - protein, 657 aa, Homo sapiens
MLEGEAPHQSCSEELWQDNDQLEQRQENQNNLLSHVKVLIKERGYEHKNIEKIIHVTTKLVPSIKRLHNCDTILKHTLNSHNHNRNSATKNLGKIFGNGNNFPHSPSSTKNENAKTGANSCEHDHYEKHLSHKQAPTHHQKIHPEEKLYVCTECVMGFTQKSHLFEHQRIHAGEKSRECDKSNKVFPQKPQVDVHPSVYTGEKPYLCTQCGKVFTLKSNLITHQKIHTGQKPYKCSECGKAFFQRSDLFRHLRIHTGEKPYECSECGKGFSQNSDLSIHQKTHTGEKHYECNECGKAFTRKSALRMHQRIHTGEKPYVCADCGKAFIQKSHFNTHQRIHTGEKPYECSDCGKSFTKKSQLHVHQRIHTGEKPYICTECGKVFTHRTNLTTHQKTHTGEKPYMCAECGKAFTDQSNLIKHQKTHTGEKPYKCNGCGKAFIWKSRLKIHQKSHIGERHYECKDCGKAFIQKSTLSVHQRIHTGEKPYVCPECGKAFIQKSHFIAHHRIHTGEKPYECSDCGKCFTKKSQLRVHQKIHTGEKPNICAECGKAFTDRSNLITHQKIHTREKPYECGDCGKTFTWKSRLNIHQKSHTGERHYECSKCGKAFIQKATLSMHQIIHTGKKPYACTECQKAFTDRSNLIKHQKMHSGEKRYKASD

SEQ ID NO: 813178 - protein, 821 aa, Homo sapiens
MAANGDSPPWSPALAAEGRGSSCEVRRERTPEARIHSVKRYPDLSPGPKGRSSADHAALNSIVSLQASVSFEDVTVDFSKEEWQHLDPAQRRLYWDVTLENYSHLLSVGYQIPKSEAAFKLEQGEGPWMLEGEAPHQSCSGEAIGKMQQQGIPGGIFFHCERFDQPIGEDSLCSILEELWQDNDQLEQRQENQNNLLSHVKVLIKERGYEHKNIEKIIHVTTKLVPSIKRLHNCDTILKHTLNSHNHNRNSATKNLGKIFGNGNNFPHSPSSTKNENAKTGANSCEHDHYEKHLSHKQAPTHHQKIHPEEKLYVCTECVMGFTQKSHLFEHQRIHAGEKSRECDKSNKVFPQKPQVDVHPSVYTGEKPYLCTQCGKVFTLKSNLITHQKIHTGQKPYKCSECGKAFFQRSDLFRHLRIHTGEKPYECSECGKGFSQNSDLSIHQKTHTGEKHYECNECGKAFTRKSALRMHQRIHTGEKPYVCADCGKAFIQKSHFNTHQRIHTGEKPYECSDCGKSFTKKSQLHVHQRIHTGEKPYICTECGKVFTHRTNLTTHQKTHTGEKPYMCAECGKAFTDQSNLIKHQKTHTGEKPYKCNGCGKAFIWKSRLKIHQKSHIGERHYECKDCGKAFIQKSTLSVHQRIHTGEKPYVCPECGKAFIQKSHFIAHHRIHTGEKPYECSDCGKCFTKKSQLRVHQKIHTGEKPNICAECGKAFTDRSNLITHQKIHTREKPYECGDCGKTFTWKSRLNIHQKSHTGERHYECSKCGKAFIQKATLSMHQIIHTGKKPYACTECQKAFTDRSNLIKHQKMHSGEKRYKASD

SEQ ID NO: 813179 - protein, 789 aa, Homo sapiens
MGTLPHGPRPWLQRDVAAHVSADHAALNSIVSLQASVSFEDVTVDFSKEEWQHLDPAQRRLYWDVTLENYSHLLSVGYQIPKSEAAFKLEQGEGPWMLEGEAPHQSCSGEAIGKMQQQGIPGGIFFHCERFDQPIGEDSLCSILEELWQDNDQLEQRQENQNNLLSHVKVLIKERGYEHKNIEKIIHVTTKLVPSIKRLHNCDTILKHTLNSHNHNRNSATKNLGKIFGNGNNFPHSPSSTKNENAKTGANSCEHDHYEKHLSHKQAPTHHQKIHPEEKLYVCTECVMGFTQKSHLFEHQRIHAGEKSRECDKSNKVFPQKPQVDVHPSVYTGEKPYLCTQCGKVFTLKSNLITHQKIHTGQKPYKCSECGKAFFQRSDLFRHLRIHTGEKPYECSECGKGFSQNSDLSIHQKTHTGEKHYECNECGKAFTRKSALRMHQRIHTGEKPYVCADCGKAFIQKSHFNTHQRIHTGEKPYECSDCGKSFTKKSQLHVHQRIHTGEKPYICTECGKVFTHRTNLTTHQKTHTGEKPYMCAECGKAFTDQSNLIKHQKTHTGEKPYKCNGCGKAFIWKSRLKIHQKSHIGERHYECKDCGKAFIQKSTLSVHQRIHTGEKPYVCPECGKAFIQKSHFIAHHRIHTGEKPYECSDCGKCFTKKSQLRVHQKIHTGEKPNICAECGKAFTDRSNLITHQKIHTREKPYECGDCGKTFTWKSRLNIHQKSHTGERHYECSKCGKAFIQKATLSMHQIIHTGKKPYACTECQKAFTDRSNLIKHQKMHSGEKRYKASD

SEQ ID NO: 813180 - protein, 397 aa, Homo sapiens
MVKETTYYDVLGVKPNATQEELKKAYRKLALKYHPDKNPNEGEKFKQISQAYEVLSDAKKRELYDKGGEQAIKEGGAGGGFGSPMDIFDMFFGGGGRMQRERRGKNVVHQLSVTLEDLYNGATRKLALQKNVICDKCEGRGGKKGAVECCPNCRGTGMQIRIHQIGPGMVQQIQSVCMECQGHGERISPKDRCKSCNGRKIVREKKILEVHIDKGMKDGQKITFHGEGDQEPGLEPGDIIIVLDQKDHAVFTRRGEDLFMCMDIQLVEALCGFQKPISTLDNRTIVITSHPGQIVKHGDIKCVLNEGMPIYRRPYEKGRLIIEFKVNFPENGFLSPDKLSLLEKLLPERKEVEETDEMDQVELVDFDPNQERRRHYNGEAYEDDEHHPRGGVQCQTS

SEQ ID NO: 813181 - protein, 153 aa, Homo sapiens
MVKETTYYDVLGVKPNATQEELKKAYRKLALKYHPDKNPNEGEKFKQISQAYEVLSDAKKRELYDKGGEQAIKEGGAGGGFGSPMDIFDMFFGGGGRMQRERRGKKNLVFVQLTKVSCWSEQIFEKSPILNACLHVGIMLQTDHKLPLIYGVV

SEQ ID NO: 813182 - protein, 397 aa, Homo sapiens; identical to SEQ ID NO: 813180

SEQ ID NO: 813183 - protein, 397 aa, Homo sapiens; identical to SEQ ID NO: 813180

SEQ ID NO: 813184 - protein, 397 aa, Homo sapiens; identical to SEQ ID NO: 813180

SEQ ID NO: 813185 - protein, 396 aa, Homo sapiens
MVKETTYYDVLGVKPNATQEELKKAYRKLALKYHPDKNPNEGEKFKQISQAYEVLSDAKKRELYDKGGEQAIKEGGAGGGFGSPMDIFDMFFGGGGRMQRERRGKNVVHQLSVTLEDLYNGATRKLALQKNVICDKCEGRGGKKGAVECCPNCRGTGMQIRIHQIGPGMVQQIQSVCMECQGHGERISPKDRCKSCNGRKIVREKKILEVHIDKGMKDGQKITFHGEGDQEPGLEPGDIIIVLDQKDHAVFTRGLGDPFHMVYDKLAAFIKYALDLSMLDNLTWMRGDDDGQIVKHGDIKCVLNEGMPIYRRPYEKGRLIIEFKVNFPENGFLSPDKLSLLEKLLPERKEVEETDEMDQVELVDFDPNQERRRHYNGEAYEDDEHHPRGGVQCQTS

SEQ ID NO: 813186 - protein, 397 aa, Homo sapiens; identical to SEQ ID NO: 813180

SEQ ID NO: 813187 - protein, 397 aa, Homo sapiens; identical to SEQ ID NO: 813180

SEQ ID NO: 813188 - protein, 397 aa, Homo sapiens; identical to SEQ ID NO: 813180

SEQ ID NO: 813189 - protein, 397 aa, Homo sapiens; identical to SEQ ID NO: 813180

SEQ ID NO: 813190 - protein, 240 aa, Homo sapiens
MQIRIHQIGPGMVQQIQSVCMECQGHGERISPKDRCKSCNGRKIVREKKILEVHIDKGMKDGQKITFHGEGDQEPGLEPGDIIIVLDQKDHAVFTRRGEDLFMCMDIQLVEALCGFQKPISTLDNRTIVITSHPGQIVKHGDIKCVLNEGMPIYRRPYEKGRLIIEFKVNFPENGFLSPDKLSLLEKLLPERKEVEETDEMDQVELVDFDPNQERRRHYNGEAYEDDEHHPRGGVQCQTS

SEQ ID NO: 813191 - protein, 395 aa, Homo sapiens
LKARGATRGRIETGLSRNTGVGMYSVLVIRKPRQMNGGSRNGFKQISQAYEVLSDAKKRELYDKGGEQAIKEGGAGGGFGSPMDIFDMFFGGGGRMQRERRGKNVVHQLSVTLEDLYNGATRKLALQKNVICDKCEGRGGKKGAVECCPNCRGTGMQIRIHQIGPGMVQQIQSVCMECQGHGERISPKDRCKSCNGRKIVREKKILEVHIDKGMKDGQKITFHGEGDQEPGLEPGDIIIVLDQKDHAVFTRRGEDLFMCMDIQLVEALCGFQKPISTLDNRTIVITSHPGQIVKHGDIKCVLNEGMPIYRRPYEKGRLIIEFKVNFPENGFLSPDKLSLLEKLLPERKEVEETDEMDQVELVDFDPNQERRRHYNGEAYEDDEHHPRGGVQCQTS

SEQ ID NO: 813192 - protein, 313 aa, Homo sapiens
MDIFDMFFGGGGRMQRERRGKNVVHQLSVTLEDLYNGATRKLALQKNVICDKCEGRGGKKGAVECCPNCRGTGMQIRIHQIGPGMVQQIQSVCMECQGHGERISPKDRCKSCNGRKIVREKKILEVHIDKGMKDGQKITFHGEGDQEPGLEPGDIIIVLDQKDHAVFTRRGEDLFMCMDIQLVEALCGFQKPISTLDNRTIVITSHPGQIVKHGDIKCVLNEGMPIYRRPYEKGRLIIEFKVNFPENGFLSPDKLSLLEKLLPERKEVEETDEMDQVELVDFDPNQERRRHYNGEAYEDDEHHPRGGVQCQTS

SEQ ID NO: 813193 - protein, 375 aa, Homo sapiens
GRPNIRMVLQGQFPIRTQMKERFKQISQAYEVLSDAKKRELYDKGGEQAIKEGGAGGGFGSPMDIFDMFFGGGGRMQRERRGKNVVHQLSVTLEDLYNGATRKLALQKNVICDKCEGRGGKKGAVECCPNCRGTGMQIRIHQIGPGMVQQIQSVCMECQGHGERISPKDRCKSCNGRKIVREKKILEVHIDKGMKDGQKITFHGEGDQEPGLEPGDIIIVLDQKDHAVFTRRGEDLFMCMDIQLVEALCGFQKPISTLDNRTIVITSHPGQIVKHGDIKCVLNEGMPIYRRPYEKGRLIIEFKVNFPENGFLSPDKLSLLEKLLPERKEVEETDEMDQVELVDFDPNQERRRHYNGEAYEDDEHHPRGGVQCQTS

SEQ ID NO: 813194 - protein, 379 aa, Homo sapiens
MVKETTYYDVLGVKPNATQEELKKAYRKLALKYHPDKNPNEGEKFKQISQAYEVLSDAKSGGFGSPMDIFDMFFGGGGRMQRERRGKNVVHQLSVTLEDLYNGATRKLALQKNVICDKCEGRGGKKGAVECCPNCRGTGMQIRIHQIGPGMVQQIQSVCMECQGHGERISPKDRCKSCNGRKIVREKKILEVHIDKGMKDGQKITFHGEGDQEPGLEPGDIIIVLDQKDHAVFTRRGEDLFMCMDIQLVEALCGFQKPISTLDNRTIVITSHPGQIVKHGDIKCVLNEGMPIYRRPYEKGRLIIEFKVNFPENGFLSPDKLSLLEKLLPERKEVEETDEMDQVELVDFDPNQERRRHYNGEAYEDDEHHPRGGVQCQTS

SEQ ID NO: 813195 - protein, 240 aa, Homo sapiens; identical to SEQ ID NO: 813190

SEQ ID NO: 813196 - protein, 397 aa, Homo sapiens; identical to SEQ ID NO: 813180

SEQ ID NO: 813197 - protein, 397 aa, Homo sapiens; identical to SEQ ID NO: 813180

SEQ ID NO: 813198 - protein, 202 aa, Homo sapiens
SRGPLNGVGARHRFTVQGNGMKDGQKITFHGEGDQEPGLEPGDIIIVLDQKDHAVFTRRGEDLFMCMDIQLVEALCGFQKPISTLDNRTIVITSHPGQIVKHGDIKCVLNEGMPIYRRPYEKGRLIIEFKVNFPENGFLSPDKLSLLEKLLPERKEVEETDEMDQVELVDFDPNQERRRHYNGEAYEDDEHHPRGGVQCQTS

SEQ ID NO: 813199 - protein, 331 aa, Homo sapiens
MVKETTYYDVLGVKPNATQEELKKAYRKLALKYHPDKNPNEGEKFKQISQAYEVLSDAKKRELYDKGGEQAIKEGGAGGGFGSPMDIFDMFFGGGGRMQRERRGKNVVHQLSVTLEDLYNGATRKLALQKNVICDKCEGRGGKKGAVECCPNCRGTGMQIRIHQIGPGMVQQIQSVCMECQGHGERISPKDRCKSCNGRKIVREKKILEVHIDKGMKDGQKITFHGEGDQEPGLEPGDIIIVLDQKDHAVFTRRGEDLFMCMDIQLVEALCGFQKPISTLDNRTIVITSHPGQIVKHGDIKCVLNEGMPIYRRPYEKGRLIIEFKVSCNVL

SEQ ID NO: 813200 - protein, 396 aa, Homo sapiens; identical to SEQ ID NO: 813185

SEQ ID NO: 813201 - protein, 198 aa, Homo sapiens
MKLYSLSVLYKGEAKVVLLKAAYDVSSFSFFQRSSVQEFMTFTSQLIVERSSKGTRASVKEQDYLCHVYVRNDSLAGVVIADNEYPSRVAFTLLEKVLDEFSKQVDRIDWPVGSPATIHYPALDGHLSRYQNPREADPMTKVQAELDETKIILHNTMESLLERGEKLDDLVSKSEVLGTQSKAFYKTARKQNSCCAIM

SEQ ID NO: 813202 - protein, 164 aa, Homo sapiens
MKLYSLSVLYKGEAKVVLLKAAYDVSSFSFFQRSSVQEFMTFTSQLIVERSSKGTRASVKEQDYLCHVYVRNDSLAGVVIADNEYPSRVAFTLLEKVLDEFSKQVDRIDWPVGSPATIHYPALDGHLSRYQNPREADPMTKVQAELDETKIILARKQNSCCAIM

SEQ ID NO: 813203 - protein, 107 aa, Homo sapiens
MKLYSLSVLYKGEAKVVLLKAAYDVSSFSFFQRSSVQEFMTFTSQLIVERSSKGTRASVKEQDYLCHVYVRNDSLAGVVIADNEYPSRVAFTLLEKVSFLFASPGLG

SEQ ID NO: 813204 - protein, 198 aa, Homo sapiens; identical to SEQ ID NO: 813201

SEQ ID NO: 813205 - protein, 198 aa, Homo sapiens; identical to SEQ ID NO: 813201

SEQ ID NO: 813206 - protein, 198 aa, Homo sapiens; identical to SEQ ID NO: 813201

SEQ ID NO: 813207 - protein, 191 aa, Homo sapiens
MKLYSLSVLYKGEAKVVLLKAAYDVSSFSFFQRSSVQEFMTFTSQLIVERSSKGTRASVKEQDYLCHVYVRNDSLAGVVIADNEYPSRVAFTLLEKVLDEFSKQVDRIDWPVGSPATIHYPALDGHLSRYQNPREADPMTKVQAELDETKIILHNTMESLLERGEKLDDLVSKSEVLGTQSKAFYKTKIFN

SEQ ID NO: 813208 - protein, 198 aa, Homo sapiens; identical to SEQ ID NO: 813201

SEQ ID NO: 813209 - protein, 198 aa, Homo sapiens; identical to SEQ ID NO: 813201

SEQ ID NO: 813210 - protein, 158 aa, Homo sapiens
LGYEVVRVLLRPRLEASGHRIYDYLCHVYVRNDSLAGVVIADNEYPSRVAFTLLEKVLDEFSKQVDRIDWPVGSPATIHYPALDGHLSRYQNPREADPMTKVQAELDETKIILHNTMESLLERGEKLDDLVSKSEVLGTQSKAFYKTARKQNSCCAIM

SEQ ID NO: 813211 - protein, 161 aa, Homo sapiens
MKLYSLSVLYKGEAKVVLLKAAYDVSSFSFFQRSSVQEFMTFTSQLIVERSSKGTRASVKEQDYLCHVYVRNDSLAGVVIADNEYPSRVAFTLLEKVLDEFSKQVDRIDWPVGSPATIHYPALDGHLSRYQNPREADPMTKVQAELDETKIILVLFHPLGQ

SEQ ID NO: 813212 - protein, 164 aa, Homo sapiens; identical to SEQ ID NO: 813202

SEQ ID NO: 813213 - protein, 198 aa, Homo sapiens; identical to SEQ ID NO: 813201

SEQ ID NO: 813214 - protein, 198 aa, Homo sapiens; identical to SEQ ID NO: 813201

SEQ ID NO: 813215 - protein, 198 aa, Homo sapiens; identical to SEQ ID NO: 813201

SEQ ID NO: 813216 - protein, 84 aa, Homo sapiens
KTGGAYGEDLGSGPTSLSQVCDGNRYPVHVIEGDHRTLLEGSGLESIISIIHSSLAEPRVSVREGEARAALLRECPCPRFRTNK

SEQ ID NO: 813217 - protein, 198 aa, Homo sapiens; identical to SEQ ID NO: 813201

SEQ ID NO: 813218 - protein, 198 aa, Homo sapiens; identical to SEQ ID NO: 813201

SEQ ID NO: 813219 - protein, 198 aa, Homo sapiens; identical to SEQ ID NO: 813201

SEQ ID NO: 813220 - protein, 164 aa, Homo sapiens [sequence omitted]

SEQ ID NO: 813221 - protein, 141 aa, Homo sapiens
MKLYSLSVLYKGEAKVVLLKAAYDVSSFSFFQRSSVQEFMTFTSQLIVERSSKGTRASVKEQDYLCHVYVRNDSLAGVVIADNEYPSRVAFTLLEKVLDEFSKQVDRIDWPVGSPVLLCSVVNHLARLYFSNCCLTSLCSI

SEQ ID NO: 813222 - protein, 771 aa, Homo sapiens
MEEDKLLSAVPEEGDATRDPGPEPEEEPGVRNGMASEGLNSSLCSPGHERRGTPADTEEPTKDPDVAFHGLSLGLSLTNGLALGPDLNILEDSAESRPWRAGVLAEGDNASRSLYPDAEDPQLGLDGPGEPDVRDGFSATFEKILESELLRGTQYSSLDSLDGLSLTDESDSCVSFEAPLTPLIQQRARDSPEPGAGLGIGDMAFEGDMGAAGGDGELGSPLRRSISSSRSENVLSRLSLMAMPNGFHEDGPQGPGGDEDDDEEDTDKLLNSASDPSLKDGLSDSDSELSSSEGLEPGSADPLANGCQGVSEAAHRLARRLYHLEGFQRCDVARQLGKNNEFSRLVAGEYLSFFDFSGLTLDGALRTFLKAFPLMGETQERERVLTHFSRRYCQCNPDDSTSEDGIHTLTCALMLLNTDLHGHNIGKKMSCQQFIANLDQLNDGQDFAKDLLKTLYNSIKNEKLEWAIDEDELRKSLSELVDDKFGTGTKKVTRILDGGNPFLDVPQALSATTYKHGVLTRKTHADMDGKRTPRGRRGWKKFYAVLKGTILYLQKDEYRPDKALSEGDLKNAIRVHHALATRASDYSKKSNVLKLKTADWRVFLFQAPSKEEMLSWILRINLVAAIFSAPAFPAAVSSMKKFCRPLLPSCTTRLCQEEQLRSHENKLRQLTAELAEHRCHPVERGIKSKEAEEYRLKEHYLTFEKSRYETYIHLLAMKIKVGSDDLERIEARLATLEGDDPSLRKTHSSPALSQGHVTGSKTTKDATGPDT

SEQ ID NO: 813223 - protein, 771 aa, Homo sapiens; identical to SEQ ID NO: 813222

SEQ ID NO: 813224 - protein, 477 aa, Homo sapiens
MATYTCITCRVAFRDADMQRAHYKTDWHRYNLRRKVASMAPVTAEGFQERVRAQRAVAEEESKGSATYCTVCSKKFASFNAYENHLKSRRHVELEKKAVQAVNRKVEMMNEKNLEKGLGVDSVDKDAMNAAIQQAIKAQPSMSPKKAPPAPAKEARNVVAVGTGGRGTHDRDPSEKPPRLQWFEQQAKKLAKQQEEDSEEEEEDLDGDDWEDIDSDEELECEDTEAMDDVVEQDAEEEEAEEGPPLGAIPITDCLFCSHHSSSLMKNVAHMTKDHSFFIPDIEYLSDIKGLIKYLGEKVGVGKICLWCNEKGKSFYSTEAVQAHMNDKSHCKLFTDGDAALEFADFYDFRSSYPDHKEGEDPNKAEELPSEKNLEYDDETMELILPSGARVGHRSLMRYYKQRFGLSRAVAVAKNRKAVGRVLQQYRALGWTGSTGAALMRERDMQYVQRMKSKWMLKTGMKNNATKQMHFRVQVRF

SEQ ID NO: 813225 - protein, 477 aa, Homo sapiens; identical to SEQ ID NO: 813224

SEQ ID NO: 813226 - protein, 459 aa, Homo sapiens
MATYTCITCRVAFRDADMQRAHYKTDWHRYNLRRKVASMAPVTAEGFQERVRAQRAVAEEESKGSATYCTVCSKKFASFNAYENHLKSRRHVELEKKAVQAVNRKVEMMNEAAIQQAIKAQPSMSPKKAPPAPAKEARNVVAVGTGGRGTHDRDPSEKPPRLQWFEQQAKKLAKQQEEDSEEEEEDLDGDDWEDIDSDEELECEDTEAMDDVVEQDAEEEEAEEGPPLGAIPITDCLFCSHHSSSLMKNVAHMTKDHSFFIPDIEYLSDIKGLIKYLGEKVGVGKICLWCNEKGKSFYSTEAVQAHMNDKSHCKLFTDGDAALEFADFYDFRSSYPDHKEGEDPNKAEELPSEKNLEYDDETMELILPSGARVGHRSLMRYYKQRFGLSRAVAVAKNRKAVGRVLQQYRALGWTGSTGAALMRERDMQYVQRMKSKWMLKTGMKNNATKQMHFRVQVRF

SEQ ID NO: 813227 - protein, 285 aa, Homo sapiens
MATYTCITCRVAFRDADMQRAHYKTDWHRYNLRRKVASMAPVTAEGFQERVRAQRAVAEEESKGSATYCTVCSKKFASFNAYENHLKSRRHVELEKKAVQAVNRKVEMMNEKNLEKGLGVDSVDKDAMNAAIQQAIKAQPSMSPKKAPPAPAKEARNVVAVGTGGRGTHDRDPSEKPPRLQWFEQQAKKLAKQQEEDSEEEEEDLDGDDWEDIDSDEELECEDTEAMDDVVEQDAEEEEAEEGPPLGAIPITDCLFCSHHSSSLMKNVAHMTKDHSFSSLGGGSC

SEQ ID NO: 813228 - protein, 220 aa, Homo sapiens
MATYTCINESEERKSEGKRREEKRNRREERTTRTRHNNKTETRRETHTGTDKTHQHTKTRTTTTRAKNEKKKKQKNKHKRKEKRRTRKDKEDRKRKKRREDTKENREREREAERRRKERTKTIRGKTRRERKKGERNRAKRKRRSEEETKKKKKRERTNREEGRGKKREQKKREQKEEEKKADRKEEGEKKRKQKGRRKKRKESKTREEEGEANGRRKRD

SEQ ID NO: 813229 - protein, 794 aa, Homo sapiens
MELRPWLLWVVAATGTLVLLAADAQGQKVFTNTWAVRIPGGPAVANSVARKHGFLNLGQIFGDYYHFWHRGVTKRSLSPHRPRHSRLQREPQVQWLEQQVAKRRTKRDVYQEPTDPKFPQQWYLSGVTQRDLNVKAAWAQGYTGHGIVVSILDDGIEKNHPDLAGNYDPGASFDVNDQDPDPQPRYTQMNDNRHGTRCAGEVAAVANNGVCGVGVAYNARIGGVRMLDGEVTDAVEARSLGLNPNHIHIYSASWGPEDDGKTVDGPARLAEEAFFRGVSQGRGGLGSIFVWASGNGGREHDSCNCDGYTNSIYTLSISSATQFGNVPWYSEACSSTLATTYSSGNQNEKQIVTTDLRQKCTESHTGTSASAPLAAGIIALTLEANKNLTWRDMQHLVVQTSKPAHLNANDWATNGVGRKVSHSYGYGLLDAGAMVALAQNWTTVAPQRKCIIDILTEPKDIGKRLEVRKTVTACLGEPNHITRLEHAQARLTLSYNRRGDLAIHLVSPMGTRSTLLAARPHDYSADGFNDWAFMTTHSWDEDPSGEWVLEIENTSEANNYGTLTKFTLVLYGTAPEGLPVPPESSGCKTLTSSQACVVCEEGFSLHQKSCVQHCPPGFAPQVLDTHYSTENDVETIRASVCAPCHASCATCQGPALTDCLSCPSHASLDPVEQTCSRQSQSSRESPPQQQPPRLPPEVEAGQRLRAGLLPSHLPEVVAGLSCAFIVLVFVTVFLVLQLRSGFSFRGVKVYTMDRGLISYKGLPPEAWQEECPSDSEEDEGRGERTAFIKDQSAL

SEQ ID NO: 813230 - protein, 188 aa, Homo sapiens
PVRRQGPLRHSSMPEVVIVPEDLAQVEEPMLPQQWYLSGVTQRDLNVKAAWAQGYTGHGIVVSILDDGIEKNHPDLAGNYDPGASFDVNDQDPDPQPRYTQMNDNRHGTRCAGEVAAVANNGVCGVGVAYNARIGGVRMLDGEVTDAVEARSLGLNPNHIHIYSPLLSHPPALVASPAGFVRYWVGAQ

SEQ ID NO: 813231 - protein, 794 aa, Homo sapiens; identical to SEQ ID NO: 813229

SEQ ID NO: 813232 - protein, 707 aa, Homo sapiens
PVRRQGPLRHSSMPEVVIVPEDLAQVEEPMLPQQWYLSGVTQRDLNVKAAWAQGYTGHGIVVSILDDGIEKNHPDLAGNYDPGASFDVNDQDPDPQPRYTQMNDNRHGTRCAGEVAAVANNGVCGVGVAYNARIGGVRMLDGEVTDAVEARSLGLNPNHIHIYSASWGPEDDGKTVDGPARLAEEAFFRGVSQGRGGLGSIFVWASGNGGREHDSCNCDGYTNSIYTLSISSATQFGNVPWYSEACSSTLATTYSSGNQNEKQIVTTDLRQKCTESHTGTSASAPLAAGIIALTLEANKNLTWRDMQHLVVQTSKPAHLNANDWATNGVGRKVSHSYGYGLLDAGAMVALAQNWTTVAPQRKCIIDILTEPKDIGKRLEVRKTVTACLGEPNHITRLEHAQARLTLSYNRRGDLAIHLVSPMGTRSTLLAARPHDYSADGFNDWAFMTTHSWDEDPSGEWVLEIENTSEANNYGTLTKFTLVLYGTAPEGLPVPPESSGCKTLTSSQACVVCEEGFSLHQKSCVQHCPPGFAPQVLDTHYSTENDVETIRASVCAPCHASCATCQGPALTDCLSCPSHASLDPVEQTCSRQSQSSRESPPQQQPPRLPPEVEAGQRLRAGLLPSHLPEVVAGLSCAFIVLVFVTVFLVLQLRSGFSFRGVKVYTMDRGLISYKGLPPEAWQEECPSDSEEDEGRGERTAFIKDQSAL

SEQ ID NO: 813233 - protein, 602 aa, Homo sapiens
MHGTRCAGEVAAVANNGVCGVGVAYNARIGGVRMLDGEVTDAVEARSLGLNPNHIHIYSASWGPEDDGKTVDGPARLAEEAFFRGVSQGRGGLGSIFVWASGNGGREHDSCNCDGYTNSIYTLSISSATQFGNVPWYSEACSSTLATTYSSGNQNEKQIVTTDLRQKCTESHTGTSASAPLAAGIIALTLEANKNLTWRDMQHLVVQTSKPAHLNANDWATNGVGRKVSHSYGYGLLDAGAMVALAQNWTTVAPQRKCIIDILTEPKDIGKRLEVRKTVTACLGEPNHITRLEHAQARLTLSYNRRGDLAIHLVSPMGTRSTLLAARPHDYSADGFNDWAFMTTHSWDEDPSGEWVLEIENTSEANNYGTLTKFTLVLYGTAPEGLPVPPESSGCKTLTSSQACVVCEEGFSLHQKSCVQHCPPGFAPQVLDTHYSTENDVETIRASVCAPCHASCATCQGPALTDCLSCPSHASLDPVEQTCSRQSQSSRESPPQQQPPRLPPEVEAGQRLRAGLLPSHLPEVVAGLSCAFIVLVFVTVFLVLQLRSGFSFRGVKVYTMDRGLISYKGLPPEAWQEECPSDSEEDEGRGERTAFIKDQSAL

SEQ ID NO: 813234 - protein, 794 aa, Homo sapiens; identical to SEQ ID NO: 813229

SEQ ID NO: 813235 - protein, 438 aa, Homo sapiens
MQHLVVQTSKPAHLNANDWATNGVGRKVSHSYGYGLLDAGAMVALAQNWTTVAPQRKCIIDILTEPKEGWTQAGRGPVGPESRRGCPLVPLGQADHHGALLHRDIGKRLEVRKTVTACLGEPNHITRLEHAQARLTLSYNRRGDLAIHLVSPMGTRSTLLAARPHDYSADGFNDWAFMTTHSWDEDPSGEWVLEIENTSEANNYGTLTKFTLVLYGTAPEGLPVPPESSGCKTLTSSQACVVCEEGFSLHQKSCVQHCPPGFAPQVLDTHYSTENDVETIRASVCAPCHASCATCQGPALTDCLSCPSHASLDPVEQTCSRQSQSSRESPPQQQPPRLPPEVEAGQRLRAGLLPSHLPEVVAGLSCAFIVLVFVTVFLVLQLRSGFSFRGVKVYTMDRGLISYKGLPPEAWQEECPSDSEEDEGRGERTAFIKDQSAL

SEQ ID NO: 813236 - protein, 794 aa, Homo sapiens; identical to SEQ ID NO: 813229

SEQ ID NO: 813237 - protein, 794 aa, Homo sapiens; identical to SEQ ID NO: 813229

SEQ ID NO: 813238 - protein, 794 aa, Homo sapiens; identical to SEQ ID NO: 813229

SEQ ID NO: 813239 - protein, 794 aa, Homo sapiens; identical to SEQ ID NO: 813229

SEQ ID NO: 813240 - protein, 352 aa, Homo sapiens
MELRPWLLWVVAATGTLVLLAADAQGQKVFTNTWAVRIPGGPAVANSVARKHGFLNLGQIFGDYYHFWHRGVTKRSLSPHRPRHSRLQREPQVQWLEQQVAKRRTKRDVYQEPTDPKFPQQWYLSGVTQRDLNVKAAWAQGYTGHGIVVSILDDGIEKNHPDLAGNYDPGASFDVNDQDPDPQPRYTQMNDNRHGTRCAGEVAAVANNGVCGVGVAYNARIGGVRMLDGEVTDAVEARSLGLNPNHIHIYSASWGPEDDGKTVDGPARLAEEAFFRGVSQGRGGLGSIFVWASGNGGREHDSCNCDGYTNSIYTLSISSATQFGNVPWYSEALLLPGCPGPEVWGLQHVAEE

SEQ ID NO: 813241 - protein, 647 aa, Homo sapiens
MELRPWLLWVVAATGTLVLLAADAQGQKVFTNTWAVRIPGGPAVANSVARKHGFLNLGQIFGDYYHFWHRGVTKRSLSPHRPRHSRLQREPQVQWLEQQVAKRRTKRDVYQEPTDPKFPQQWYLSGVTQRDLNVKAAWAQGYTGHGIVVSILDDGIEKNHPDLAGNYDPGASFDVNDQDPDPQPRYTQMNDNRHGTRCAGEVAAVANNGVCGVGVAYNARIGGVRMLDGEVTDAVEARSLGLNPNHIHIYSASWGPEDDGKTVDGPARLAEEAFFRGVSQGRGGLGSIFVWASGNGGREHDSCNCDGYTNSIYTLSISSATQFGNVPWYSEACSSTLATTYSSGNQNEKQIVTTDLRQKCTESHTGTSASAPLAAGIIALTLEANKNLTWRDMQHLVVQTSKPAHLNANDWATNGVGRKVSHSYGYGLLDAGAMVALAQNWTTVAPQRKCIIDILTEPKDIGKRLEVRKTVTACLGEPNHITRLEHAQARLTLSYNRRGDLAIHLVSPMGTRSTLLAARPHDYSADGFNDWAFMTTHSWDEDPSGEWVLEIENTSEANNYGTLTKFTLVLYGTAPEGLPVPPESSGCKTLTSSQACVVCEEGSSLEQKSCVQQWTSRLTDHPRVLEYGTNRQRKNERWRNPSGAQRI

SEQ ID NO: 813242 - protein, 634 aa, Homo sapiens
MELRPWLLWVVAATGTLVLLAADAQGQKVFTNTWAVRIPGGPAVANSVARKHGFLNLGQIFGDYYHFWHRGVTKRSLSPHRPRHSRLQREPQVQWLEQQVAKRRTKRDVYQEPTDPKFPQQWYLSGVTQRDLNVKAAWAQGYTGHGIVVSILDDGIEKNHPDLAGNYDPGASFDVNDQDPDPQPRYTQMNDNRHGTRCAGEVAAVANNGVCGVGVAYNARIGGVRMLDGEVTDAVEARSLGLNPNHIHIYSASWGPEDDGKTVDGPARLAEEAFFRGVSQGRGGLGSIFVWASGNGGREHDSCNCDGYTNSIYTLSISSATQFGNVPWYSEACSSTLATTYSSGNQNEKQIVTTDLRQKCTESHTGTSASAPLAAGIIALTLEANKNLTWRDMQHLVVQTSKPAHLNANDWATNGVGRKVSHSYGYGLLDAGAMVALAQNWTTVAPQRKCIIDILTEPKDIGKRLEVRKTVTACLGEPNHITRLEHAQARLTLSYNRRGDLAIHLVSPMGTRSTLLAARPHDYSADGFNDWAFMTTHSWDEDPSGEWVLEIENTSEANNYGTLTKFTLVLYGTSASAPLAAGIIALTLEANKNLTWRDMQHLVVQTSKPAHLNANDWATNGVGRKVSHSYGYGL

SEQ ID NO: 813243 - protein, 377 aa, Homo sapiens
MELRPWLLWVVAATGTLVLLAADAQGQKVFTNTWAVRIPGGPAVANSVARKHGFLNLGQIFGDYYHFWHRGVTKRSLSPHRPRHSRLQREPQVQWLEQQVAKRRTKRDVYQEPTDPKFPQQWYLSGVTQRDLNVKAAWAQGYTGHGIVVSILDDGIEKNHPDLAGNYDPGASFDVNDQDPDPQPRYTQMNDNRHGTRCAGEVAAVANNGVCGVGVAYNARIGGVRMLDGEVTDAVEARSLGLNPNHIHIYSASWGPEDDGKTVDGPARLAEEAFFRGVSQGRGGLGSIFVWASGNGGREHDSCNCDGYTNSIYTLSISSATQFGNVPWYSEACSSTLATTYSKQHHEFAEQHHEFAEQHHEFAEQHHEFAEQNHEFA

SEQ ID NO: 813244 - protein, 921 aa, Homo sapiens
MATPSAAFEALMNGVTSWDVPEDAVPCELLLIGEASFPVMVNDMGQVLIAASSYGRGRLVVVSHEDYLVEAQLTPFLLNAVGWLCSSPGAPIGVHPSLAPLAKILEGSGVDAKVEPEVKDSLGVYCIDAYNETMTEKLVKFMKCGGGLLIGGQAWDWANQGEDERVLFTFPGNLVTSVAGIYFTDNKGDTSFFKVSKKMPKIPVLVSCEDDLSDDREELLHGISELDISNSDCFPSQLLVHGALAFPLGLDSYHGCVIAAARYGRGRVVVTGHKVLFTVGKLGPFLLNAVRWLDGGRRGKIVVQTELRTLSGLLAVGGIDTSIEPNLTSDASVYCFEPVSEVGVKELQEFVAEGGGLFVGAQAWWWAFKNPGVSPLARFPGNLLLNPFGISITSQSLNPGPFRTPKAGIRTYHFRSTLAEFQVIMGRKRGNVEKGWLAKLGPDGAAFLQIPAEEIPAYMSVHRLLRKLLSRYRLPVATRENPVINDCCRGAMLSLATGLAHSGSDLSLLVPEIEDMYSSPYLRPSESPITVEVNCTNPGTRYCWMSTGLYIPGRQIIEVSLPEAAASADLKIQIGCHTDDLTRASKLFRGPLVINRCCLDKPTKSITCLWGGLLYIIVPQNSKLGSVPVTVKGAVHAPYYKLGETTLEEWKRRIQENPGPWGELATDNIILTVPTANLRTLENPEPLLRLWDEVMQAVARLGAEPFPLRLPQRIVADVQISVGWMHAGYPIMCHLESVQELINEKLIRTKGLWGPVHELGRNQQRQEWEFPPHTTEATCNLWCVYVHETVLGIPRSRANIALWPPVREKRVRIYLSKGPNVKNWNAWTALETYLQLQEAFGWEPFIRLFTEYRNQTNLPTENVDKMNLWVKMFSHQVQKNLAPFFEAWAWPIQKEVATSLAYLPEWKENIMKLYLLTQMPH

SEQ ID NO: 813245 - protein, 967 aa, Homo sapiens
SFEPAALGTSLGGEAASSWEQPPPAPSRLLLPRTRAAGNSGANKTNRAMATPSAAFEALMNGVTSWDVPEDAVPCELLLIGEASFPVMVNDMGQVLIAASSYGRGRLVVVSHEDYLVEAQLTPFLLNAVGWLCSSPGAPIGVHPSLAPLAKILEGSGVDAKVEPEVKDSLGVYCIDAYNETMTEKLVKFMKCGGGLLIGGQAWDWANQGEDERVLFTFPGNLVTSVAGIYFTDNKGDTSFFKVSKKMPKIPVLVSCEDDLSDDREELLHGISELDISNSDCFPSQLLVHGALAFPLGLDSYHGCVIAAARYGRGRVVVTGHKVLFTVGKLGPFLLNAVRWLDGGRRGKIVVQTELRTLSGLLAVGGIDTSIEPNLTSDASVYCFEPVSEVGVKELQEFVAEGGGLFVGAQAWWWAFKNPGVSPLARFPGNLLLNPFGISITSQSLNPGPFRTPKAGIRTYHFRSTLAEFQVIMGRKRGNVEKGWLAKLGPDGAAFLQIPAEEIPAYMSVHRLLRKLLSRYRLPVATRENPVINDCCRGAMLSLATGLAHSGSDLSLLVPEIEDMYSSPYLRPSESPITVEVNCTNPGTRYCWMSTGLYIPGRQIIEVSLPEAAASADLKIQIGCHTDDLTRASKLFRGPLVINRCCLDKPTKSITCLWGGLLYIIVPQNSKLGSVPVTVKGAVHAPYYKLGETTLEEWKRRIQENPGPWGELATDNIILTVPTANLRTLENPEPLLRLWDEVMQAVARLGAEPFPLRLPQRIVADVQISVGWMHAGYPIMCHLESVQELINEKLIRTKGLWGPVHELGRNQQRQEWEFPPHTTEATCNLWCVYVHETVLGIPRSRANIALWPPVREKRVRIYLSKGPNVKNWNAWTALETYLQLQEAFGWEPFIRLFTEYRNQTNLPTENVDKMNLWVKMFSHQVQKNLAPFFEAWAWPIQKEVATSLAYLPEWKENIMKLYLLTQM

SEQ ID NO: 813246 - protein, 967 aa, Homo sapiens; identical to SEQ ID NO: 813245

SEQ ID NO: 813247 - protein, 776 aa, Homo sapiens
MVQLHQDTDPQIPKGQPCTLNSSEGGARPAVPHTLFSSALDRWLHNDSFIMAVGEPLVHIRVTLLLLWFGMFLSISGHSQARPSQYFTSPEVVIPLKVISRGRGAKAPGWLSYSLRFGGQRYIVHMRVNKLLFAAHLPVFTYTEQHALLQDQPFIQDDCYYHGYVEGVPESLVALSTCSGGFLGMLQINDLVYEIKPISVSATFEHLVYKIDSDDTQFPPMRCGLTEEKIAHQMELQLSYNFTLKQSSFVGWWTHQRFVELVVVVDNIRYLFSQSNATTVQHEVFNVVNIVDSFYHPLEVDVILTGIDIWTASNPLPTSGDLDNVLEDFSIWKNYNLNNRLQHDVAHLFIKDTQGMKLGVAYVKGICQNPFNTGVDVFEDNRLVVFAITLGHELGHNLGMQHDTQWCVCELQWCIMHAYRKVTTKFSNCSYAQYWDSTISSGLCIQPPPYPGNIFRLKYCGNLVVEEGEECDCGTIRQCAKDPCCLLNCTLHPGAACAFGICCKDCKFLPSGTLCRQQVGECDLPEWCNGTSHQCPDDVYVQDGISCNVNAFCYEKTCNNHDIQCKEIFGQDARSASQSCYQEINTQGNRFGHCGIVGTTYVKCWTPDIMCGRVQCENVGVIPNLIEHSTVQQFHLNDTTCWGTDYHLGMAIPDIGEVKDGTVCGPEKICIRKKCASMVHLSQACQPKTCNMRGICNNKQHCHCNHEWAPPYCKDKGYGGSADSGPPPKNNMEGLNVMGKLRYLSLLCLLPLVAFLLFCLHVLFKKRTKSKEDEEG

SEQ ID NO: 813248 - protein, 776 aa, Homo sapiens; identical to SEQ ID NO: 813247

SEQ ID NO: 813249 - protein, 776 aa, Homo sapiens; identical to SEQ ID NO: 813247

SEQ ID NO: 813250 - protein, 610 aa, Homo sapiens
MIASQFLSALTLVLLIKESGAWSYNTSTEAMTYDEASAYCQQRYTHLVAIQNKEEIEYLNSILSYSPSYYWIGIRKVNNVWVWVGTQKPLTEEAKNWAPGEPNNRQKDEDCVEIYIKREKDVGMWNDERCSKKKLALCYTAACTNTSCSGHGECVETINNYTCKCDPGFSGLKCEQIVNCTALESPEHGSLVCSHPLGNFSYNSSCSISCDRGYLPSSMETMQCMSSGEWSAPIPACNVVECDAVTNPANGFVECFQNPGSFPWNTTCTFDCEEGFELMGAQSLQCTSSGNWDNEKPTCKAVTCRAVRQPQNGSVRCSHSPAGEFTFKSSCNFTCEEGFMLQGPAQVECTTQGQWTQQIPVCEAFQCTALSNPERGYMNCLPSASGSFRYGSSCEFSCEQGFVLKGSKRLQCGPTGEWDNEKPTCEAVRCDAVHQPPKGLVRCAHSPIGEFTYKSSCAFSCEEGFELHGSTQLECTSQGQWTEEVPSCQVVKCSSLAVPGKINMSCSGEPVFGTVCKFACPEGWTLNGSAARTCGATGHWSGLLPTCEAPTESNIPLVAGLSAAGLSLLTLAPFLLWLRKCLRKAKKFVPASSCQSLESDGSYQKPSYIL

SEQ ID NO: 813251 - protein, 121 aa, Homo sapiens [sequence omitted]

SEQ ID NO: 813252 - protein, 1669 aa, Homo sapiens [sequence omitted]

SEQ ID NO: 813253 - protein, 1669 aa, Homo sapiens [sequence omitted]

SEQ ID NO: 813254 - protein, 1669 aa, Homo sapiens [sequence omitted]

SEQ ID NO: 813255 - protein, 738 aa, Homo sapiens
MRAQDIIGHHQSEDRETSDRAHDENKKKAKIQKKPIKKKKEDDVGIERGNIETTSEDGQVFSPKKGQKKKSIEKKRKKSKGDSDISDEEAAQQSKKKRGPRTPPITTKEELVEMCNGKNGILEDSQKKEDTAFSDWSDEDVPDRTEVTEAEHTATATTPGSTPSPLSSLLPPPPPVATATATTVPATLAATTAAAATSFSTSAITISTSATPTNTTNNTFANEDSHRKCHRTRVEKVETPHVTIEDAQHRKPMDQKRSSSLGSNRSNRSHTSGRLRSPSNDSAHRSGDDQSGRKRVLHSGSRDREKTKSLEITGERKSRIDQLKRGEPSRSTSSDRQDSRSHSSRRSSPESDRQVHSRSGSFDSRDRLQERDRYEHDRERERERRDTRQREWDRDADKDWPRNRDRDRLRERERERERDKRRDLDRERERLISDSVERDRDRDRDRTFESSQIESVKRCEAKLEGEHERDLESTSRDSLALDKERMDKDLGSVQGFEDTNKSERTESLEAGDDESKLDDAHSLGSGAGEGYEPISDDELDEILAGDAEKREDQQDEEKMPDPLDVIDVDWSGLMPKHPKEPREPGAALLKFTPGAVMLRVGISKKLAGSELFAKVKETCQRLLEKPKDADNLFEHELGALNMAALLRKEERASLLSNLGPCCKALCFRRDSAIRKQLVKNEKGTIKQAYTSAPMVDNELLRLSLRLFKRKTTCHAPGHEKTEDNKLSQSSIQQELCVS

SEQ ID NO: 813256 - protein, 1129 aa, Homo sapiens
SLPPASLPPVSLPPVVPATSRPVVPSTSRPSTSLPSTSLPSPFHQSPFHQQYHDSWETRSSYPERDRYPERDNRDQARDSSFERRHGERDRRDNRERDQRPSSPIRHQGRNDELERDERREERRVDRVDDRRDERARERDRERERDRERERERERERDREREKERELERERAREREREREKERDRERDRDRDHDRERERERERDREKEREREREERERERERERERERERERERERARERDKERERQRDWEDKDKGRDDRREKREEIREDRNPRDGHDERKSKKRYRNEGSPSPRQSPKRRREHSPDSDAYNSGDDKNEKHRLLSQVVRPQESRSLSPSHLTEDRQGRWKEEDRKPERKESSRRYEEQELKEKVSSVDKQREQTEILESSRMRAQDIIGHHQSEDRETSDRAHDENKKKAKIQKKPIKKKKEDDVGIERGNIETTSEDGQVFSPKKGQKKKSIEKKRKKSKGDSDISDEEAAQQSKKKRGPRTPPITTKEELVEMCNGKNGILEDSQKKEDTAFSDWSDEDVPDRTEVTEAEHTATATTPGSTPSPLSSLLPPPPPVATATATTVPATLAATTAAAATSFSTSAITISTSATPTNTTNNTFANEDSHRKCHRTRVEKVETPHVTIEDAQHRKPMDQKRSSSLGSNRSNRSHTSGRLRSPSNDSAHRSGDDQSGRKRVLHSGSRDREKTKSLEITGERKSRIDQLKRGEPSRSTSSDRQDSRSHSSRRSSPESDRQVHSRSGSFDSRDRLQERDRYEHDRERERERRDTRQREWDRDADKDWPRNRDRDRLRERERERERDKRRDLDRERERLISDSVERDRDRDRDRTFESSQIESVKRCEAKLEGEHERDLESTSRDSLALDKERMDKDLGSVQGFEDTNKSERTESLEAGDDESKLDDAHSLGSGAGEGYEPISDDELDEILAGDAEKREDQQDEEKMPDPLDVIDVDWSGLMPKHPKEPREPGAALLKFTPGAVMLRVGISKKLAGSELFAKVKETCQRLLEKPKDADNLFEHELGALNMAALLRKEERASLLSNLGPCCKALCFRRDSAIRKQLVKNEKGTIKQAYTSAPMVDNELLRLSLRLFKRKTTCHAPGHEKTEDNKLSQSSIQQELCVS

SEQ ID NO: 813257 - protein, 1564 aa, Homo sapiens
MSKIRRKVTVENTKTISDSTSRRPSVFERLGPSTGSTAETQCRNWLKTGNCLYGNTCRFVHGPSPRGKGYSSNYRRSPERPTGDLRERMKNKRQDVDTEPQKRNTEESSSPVRKESSRGRHREKEDIKITKERTPESEEENVEWETNRDDSDNGDINYDYVHELSLEMKRQKIQRELMKLEQENMEKREEIIIKKEVSPEVVRSKLSPSPSLRKSSKSPKRKSSPKSSSASKKDRKTSAVSSPLLDQQRNSKTNQSKKKGPRTPSPPPPIPEDIALGKKYKEKYKVKDRIEEKTRDGKDRGRDFERQREKRDKPRSTSPAGQHHSPISSRHHSSSSQSGSSIQRHSPSPRRKRTPSPSYQRTLTPPLRRSASPYPSHSLSSPQRKQSPPRHRSPMREKGRHDHERTSQSHDRRHERREDTRGKRDREKDSREEREYEQDQSSSRDHRDDREPRDGRDRRDARDTRDRRELRDSRDMRDSREMRDYSRDTKESRDPRDSRSTRDAHDYRDREGRDTHRKEDTYPEESRSYGRNHLREESSRTEIRNESRNESRSEIRNDRMGRSRGRVPELPEKGSRGSRGSQIDSHSSNSNYHDSWETRSSYPERDRYPERDNRDQARDSSFERRHGERDRRDNRERDQRPSSPIRHQGRNDELERDERREERRVDRVDDRRDERARERDRERERDRERERERERERDREREKERELERERAREREREREKERDRERDRDRDHDRERERERERDREKEREREREERERERERERERERERERERERARERDKERERQRDWEDKDKGRDDRREKREEIREDRNPRDGHDERKSKKRYRNEGSPSPRQSPKRRREHSPDSDAYNSGDDKNEKHRLLSQVVRPQESRSLSPSHLTEDRQGRWKEEDRKPERKESSRRYEEQELKEKVSSVDKQREQTEILESSRMRAQDIIGHHQSEDRETSDRAHDENKKKAKIQKKPIKKKKEDDVGIERGNIETTSEDGQVFSPKKGQKKKSIEKKRKKSKGDSDISDEEAAQQSKKKRGPRTPPITTKEELVEMCNGKNGILEDSQKKEDTAFSDWSDEDVPDRTEVTEAEHTATATTPGSTPSPLSSLLPPPPPVATATATTVPATLAATTAAAATSFSTSAITISTSATPTNTTNNTFANEDSHRKCHRTRVEKVETPHVTIEDAQHRKPMDQKRSSSLGSNRSNRSHTSGRLRSPSNDSAHRSGDDQSGRKRVLHSGSRDREKTKSLEITGERKSRIDQLKRGEPSRSTSSDRQDSRSHSSRRSSPESDRQVHSRSGSFDSRDRLQERDRYEHDRERERERRDTRQREWDRDADKDWPRNRDRDRLRERERERERDKRRDLDRERERLISDSVERDRDRDRDRTFESSQIESVKRCEAKLEGEHERDLESTSRDSLALDKERMDKDLGSVQGFEDTNKSERTESLEAGDDESKLDDAHSLGSGAGEGYEPISDDELDEILAGDAEKREDQQDEEKMPDPLDVIDVDWSGLMPKHPKEPREPGAALLKFTPGAVMLRVGISKKLAGSELFAKVKETCQRLLEKPKGSFILL

SEQ ID NO: 813258 - protein, 1657 aa, Homo sapiens
MSKIRRKVTVENTKTISDSTSRRPSVFERLGPSTGSTAETQCRNWLKTGNCLYGNTCRFVHGPSPRGKGYSSNYRRSPERPTGDLRERMKNKRQDVDTEPQKRNTEESSSPVRKESSRGRHREKEDIKITKERTPESEEENVEWETNRDDSDNGDINYDYVHELSLEMKRQKIQRELMKLEQENMEKREEIIIKKEVSPEVVRSKLSPSPSLRKSSKSPKRKSSPKSSSASKKDRKTSAVSSPLLDQQRNSKTNQSKKKGPRTPSPPPPIPEDIALGKKYKEKYKVKDRIEEKTRDGKDRGRDFERQREKRDKPRSTSPAGQHHSPISSRHHSSSSQSGSSIQRHSPSPRRKRTPSPSYQRTLTPPLRRSASPYPSHSLSSPQRKQSPPRHRSPMREKGRHDHERTSQSHDRRHERREDTRGKRDREKDSREEREYEQDQSSSRDHRDDREPRDGRDRRDARDTRDRRELRDSRDMRDSREMRDYSRDTKESRDPRDSRSTRDAHDYRDREGRDTHRKEDTYPEESRSYGRNHLREESSRTEIRNESRNESRSEIRNDRMGRSRGRVPELPEKGSRGSRGSQIDSHSSNSNYHDSWETRSSYPERDRYPERDNRDQARDSSFERRHGERDRRDNRERDQRPSSPIRHQGRNDELERDERREERRVDRVDDRRDERARERDRERERDRERERERERERDREREKERELERERAREREREREKERDRERDRDRDHDRERERERERDREKEREREREERERERERERERERERERERERARERDKERERQRDWEDKDKGRDDRREKREEIREDRNPRDGHDERKSKKRYRNEGSPSPRQSPKRRREHSPDSDAYNSGDDKNEKHRLLSQVVRPQESRSLSPSHLTEDRQGRWKEEDRKPERKESSRRYEEQELKEKVSSVDKQREQTEILESSRMRAQDIIGHHQSEDRETSDRAHDENKKKAKIQKKPIKKKKEDDVGIERGNIETTSEDGQVFSPKKGQKKKSIEKKRKKSKGDSDISDEEAAQQSKKKRGPRTPPITTKEELVEMCNGKNGILEDSQKKEDTAFSDRSRAYCHRHDILVVPLLLYLLFFLLHRLWLLPLLQLCLQTLAATTAAAATSFSTSAITISTSATPTNTTNNTFANEDSHRKCHRTRVEKVETPHVTIEDAQHRKPMDQKRSSSLGSNRSNRSHTSGRLRSPSNDSAHRSGDDQSGRKRVLHSGSRDREKTKSLEITGERKSRIDQLKRGEPSRSTSSDRQDSRSHSSRRSSPESDRQVHSRSGSFDSRDRLQERDRYEHDRERERERRDTRQREWDRDADKDWPRNRDRDRLRERERERERDKRRDLDRERERLISDSVERDRDRDRDRTFESSQIESVKRCEAKLEGEHERDLESTSRDSLALDKERMDKDLGSVQGFEDTNKSERTESLEAGDDESKLDDAHSLGSGAGEGYEPISDDELDEILAGDAEKREDQQDEEKMPDPLDVIDVDWSGLMPKHPKEPREPGAALLKFTPGAVMLRVGISKKLAGSELFAKVKETCQRLLEKPKDADNLFEHELGALNMAALLRKEERASLLSNLGPCCKALCFRRDSAIRKQLVKNEKGTIKQAYTSAPMVDNELLRLSLRLFKRKTTCHAPGHEKTEDNKLSQSSIQQELCVS

SEQ ID NO: 813259 - protein, 1446 aa, Homo sapiens
MSKIRRKVTVENTKTISDSTSRRPSVFERLGPSTGSTAETQCRNWLKTGNCLYGNTCRFVHGPSPRGKGYSSNYRRSPERPTGDLRERMKNKRQDVDTEPQKRNTEESSSPVRKESSRGRHREKEDIKITKERTPESEEENVEWETNRDDSDNGDINYDYVHELSLEMKRQKIQRELMKLEQENMEKREEIIIKKEVSPEVVRSKLSPSPSLRKSSKSPKRKSSPKSSSASKKDRKTSAVSSPLLDQQRNSKTNQSKKKGPRTPSPPPPIPEDIALGKKYKEKYKVKDRIEEKTRDGKDRGRDFERQREKRDKPRSTSPAGQHHSPISSRHHSSSSQSGSSIQRHSPSPRRKRTPSPSYQRTLTPPLRRSASPYPSHSLSSPQRKQSPPRHRSPMREKGRHDHERTSQSHDRRHERREDTRGKRDREKDSREEREYEQDQSSSRDHRDDREPRDGRDRRDARDTRDRRELRDSRDMRDSREMRDYSRDTKESRDPRDSRSTRDAHDYRDREGRDTHRKEDTYPEESRSYGRNHLREESSRTEIRNESRNESRSEIRNDRMGRSRGRVPELPEKGSRGSRGSQIDSHSSNSNYHDSWETRSSYPERDRYPERDNRDQARDSSFERRHGERDRRDNRERDQRPSSPIRHQGRNDELERDERREERRVDRVDDRRDERARERDRERERDRERERERERERDRERENLESSRMRAQDIIGHHQSEDRETSDRAHDENKKKAKIQKKPIKKKKEDDVGIERGNIETTSEDGQVFSPKKGQKKKSIEKKRKKSKGDSDISDEEAAQQSKKKRGPRTPPITTKEELVEMCNGKNGILEDSQKKEDTAFSDWSDEDVPDRTEVTEAEHTATATTPGSTPSPLSSLLPPPPPVATATATTVPATLAATTAAAATSFSTSAITISTSATPTNTTNNTFANEDSHRKCHRTRVEKVETPHVTIEDAQHRKPMDQKRSSSLGSNRSNRSHTSGRLRSPSNDSAHRSGDDQSGRKRVLHSGSRDREKTKSLEITGERKSRIDQLKRGEPSRSTSSDRQDSRSHSSRRSSPESDRQVHSRSGSFDSRDRLQERDRYEHDRERERERRDTRQREWDRDADKDWPRNRDRDRLRERERERERDKRRDLDRERERLISDSVERDRDRDRDRTFESSQIESVKRCEAKLEGEHERDLESTSRDSLALDKERMDKDLGSVQGFEDTNKSERTESLEAGDDESKLDDAHSLGSGAGEGYEPISDDELDEILAGDAEKREDQQDEEKMPDPLDVIDVDWSGLMPKHPKEPREPGAALLKFTPGAVMLRVGISKKLAGSELFAKVKETCQRLLEKPKDADNLFEHELGALNMAALLRKEERASLLSNLGPCCKALCFRRDSAIRKQLVKNEKGTIKQAYTSAPMVDNELLRLSLRLFKRKTTCHAPGHEKTEDNKLSQSSIQQELCVS

SEQ ID NO: 813260 - protein, 1051 aa, Homo sapiens
MSKIRRKVTVENTKTISDSTSRRPSVFERLGPSTGSTAETQCRNWLKTGNCLYGNTCRFVHGPSPRGKGYSSNYRRSPERPTGDLRERMKNKRQDVDTEPQKRNTEESSSPVRKESSRGRHREKEDIKITKERTPESEEENVEWETNRDDSDNGDINYDYVHELSLEMKRQKIQRELMKLEQENMEKREEIIIKKEVSPEVVRSKLSPSPSLRKSSKSPKRKSSPKSSSASKKDRKTSAVSSPLLDQQRNSKTNQSKKKGPRTPSPPPPIPEDIALGKKYKEKYKVKDRIEEKTRDGKDRGRDFERQREKRDKPRSTSPAGQHHSPISSRHHSSSSQSGSSIQRHSPSPRRKRTPSPSYQRTLTPPLRRSASPYPSHSLSSPQRKQSPPRHRSPMREKGRHDHERTSQSHDRRHERREDTRGKRDREKDSREEREYEQDQSSSRDHRDDREPRDGRDRRDARDTRDRRELRDSRDMRDSREMRDYSRDTKESRDPRDSRSTRDAHDYRDREGRDTHRKEDTYPEESRSYGRNHLREESSRTEIRNESRNESRSEIRNDRMGRSRGRVPELPEKGSRGSRGSQIDSHSSNSNYHDSWETRSSYPERDRYPERDNRDQARDSSFERRHGERDRRDNRERDQRPSSPIRHQGRNDELERDERREERRVDRVHSRSGSFDSRDRLQERDRYEHDRERERERRDTRQREWDRDADKDWPRNRDRDRLRERERERERDKRRDLDRERERLISDSVERDRDRDRDRTFESSQIESVKRCEAKLEGEHERDLESTSRDSLALDKERMDKDLGSVQGFEDTNKSERTESLEAGDDESKLDDAHSLGSGAGEGYEPISDDELDEILAGDAEKREDQQDEEKMPDPLDVIDVDWSGLMPKHPKEPREPGAALLKFTPGAVMLRVGISKKLAGSELFAKVKETCQRLLEKPKDADNLFEHELGALNMAALLRKEERASLLSNLGPCCKALCFRRDSAIRKQLVKNEKGTIKQAYTSAPMVDNELLRLSLRLFKRKTTCHAPGHEKTEDNKLSQSSIQQELCVS

SEQ ID NO: 813261 - protein, 1669 aa, Homo sapiens [sequence omitted]

SEQ ID NO: 813262 - protein, 740 aa, Homo sapiens
GRYYSKFAAASHQSEDRETSDRAHDENKKKAKIQKKPIKKKKEDDVGIERGNIETTSEDGQVFSPKKGQKKKSIEKKRKKSKGDSDISDEEAAQQSKKKRGPRTPPITTKEELVEMCNGKNGILEDSQKKEDTAFSDWSDEDVPDRTEVTEAEHTATATTPGSTPSPLSSLLPPPPPVATATATTVPATLAATTAAAATSFSTSAITISTSATPTNTTNNTFANEDSHRKCHRTRVEKVETPHVTIEDAQHRKPMDQKRSSSLGSNRSNRSHTSGRLRSPSNDSAHRSGDDQSGRKRVLHSGSRDREKTKSLEITGERKSRIDQLKRGEPSRSTSSDRQDSRSHSSRRSSPESDRQVHSRSGSFDSRDRLQERDRYEHDRERERERRDTRQREWDRDADKDWPRNRDRDRLRERERERERDKRRDLDRERERLISDSVERDRDRDRDRTFESSQIESVKRCEAKLEGEHERDLESTSRDSLALDKERMDKDLGSVQGFEDTNKSERTESLEAGDDESKLDDAHSLGSGAGEGYEPISDDELDEILAGDAEKREDQQDEEKMPDPLDVIDVDWSGLMPKHPKEPREPGAALLKFTPGAVMLRVGISKKLAGSELFAKVKETCQRLLEKPKDADNLFEHELGALNMAALLRKEERASLLSNLGPCCKALCFRRDSAIRKQLVKNEKGTIKQAYTSAPMVDNELLRLSLRLFKRKTTCHAPGHEKTEDNKLSQSSIQQELCVS

SEQ ID NO: 813263 - protein, 510 aa, Homo sapiens
RKRHLHRTKTASSSADEDAQHRKPMDQKRSSSLGSNRSNRSHTSGRLRSPSNDSAHRSGDDQSGRKRVLHSGSRDREKTKSLEITGERKSRIDQLKRGEPSRSTSSDRQDSRSHSSRRSSPESDRQVHSRSGSFDSRDRLQERDRYEHDRERERERRDTRQREWDRDADKDWPRNRDRDRLRERERERERDKRRDLDRERERLISDSVERDRDRDRDRTFESSQIESVKRCEAKLEGEHERDLESTSRDSLALDKERMDKDLGSVQGFEDTNKSERTESLEAGDDESKLDDAHSLGSGAGEGYEPISDDELDEILAGDAEKREDQQDEEKMPDPLDVIDVDWSGLMPKHPKEPREPGAALLKFTPGAVMLRVGISKKLAGSELFAKVKETCQRLLEKPKDADNLFEHELGALNMAALLRKEERASLLSNLGPCCKALCFRRDSAIRKQLVKNEKGTIKQAYTSAPMVDNELLRLSLRLFKRKTTCHAPGHEKTEDNKLSQSSIQQELCVS

SEQ ID NO: 813264 - protein, 696 aa, Homo sapiens
MSKIRRKVTVENTKTISDSTSRRPSVFERLGPSTGSTAETQCRNWLKTGNCLYGNTCRFVHGPSPRGKGYSSNYRRSPERPTGDLRERMKNKRQDVDTEPQKRNTEESSSPVRKESSRGRHREKEDIKITKERTPESEEENVEWETNRDDSDNGDINYDYVHELSLEMKRQKIQRELMKLEQENMEKREEIIIKKEVSPEVVRSKLSPSPSLRKSSKSPKRKSSPKSSSASKKDRKTSAVSSPLLDQQRNSKTNQSKKKGPRTPSPPPPIPEDIALGKKYKEKYKVKDRIEEKTRDGKDRGRDFERQREKRDKPRSTSPAGQHHSPISSRHHSSSSQSGSSIQRHSPSPRRKRTPSPSYQRTLTPPLRRSASPYPSHSLSSPQRKQSPPRHRSPMREKGRHDHERTSQSHDRRHERREDTRGKRDREKDSREEREYEQDQSSSRDHRDDREPRDGRDRRDARDTRDRRELRDSRDMRDSREMRDYSRDTKESRDPRDSRSTRDAHDYRDREGRDTHRKEDTYPEESRSYGRNHLREESSRTEIRNESRNESRSEIRNDRMGRSRGRVPELPEKGSRGSRGSQIDSHSSNSNYHDSWETRSSYPERDRYPERDNRDQARDSSFERRHGERDRRDNRERDQRPSSPIRHQGRNDELERDERREERRVDRVDDRRDERARERDRERERDNPAAQEVDAA

SEQ ID NO: 813265 - protein, 486 aa, Homo sapiens
MSKIRRKVTVENTKTISDSTSRRPSVFERLGPSTGSTAETQCRNWLKTGNCLYGNTCRFVHGPSPRGKGYSSNYRRSPERPTGDLRERMKNKRQDVDTEPQKRNTEESSSPVRKESSRGRHREKEDIKITKERTPESEEENVEWETNRDDSDNGDINYDYVHELSLEMKRQKIQRELMKLEQENMEKREEIIIKKEVSPEVVRSKLSPSPSLRKSSKSPKRKSSPKSSSASKKDRKTSAVSSPLLDQQRNSKTNQSKKKGPRTPSPPPPIPEDIALGKKYKEKYKVKDRIEEKTRDGKDRGRDFERQREKRDKPRSTSPAGQHHSPISSRHHSSSSQSGSSIQRHSPSPRRKRTPSPSYQRTLTPPLRRSASPYPSHSLSSPQRKQSPPRHRSPMREKGRHDHERTSQSHDRRHERREDTRGKRDREKDSREEREYEQDQSSSRDHRDDREPRDGRDRRDARDTRDRRELRDSRRYRSGEKIQRKI

SEQ ID NO: 813266 - protein, 252 aa, Homo sapiens
MSKIRRKVTVENTKTISDSTSRRPSVFERLGPSTGSTAETQCRNWLKTGNCLYGNTCRFVHGPSPRGKGYSSNYRRSPERPTGDLRERMKNKRQDVDTEPQKRNTEESSSPVRKESSRGRHREKEDIKITKERTPESEEENVEWETNRDDSDNGDINYDYVHELSLEMKRQKIQRELMKLEQENMEKREEIIIKKEVSPEVVRSKLSPSPSLRKSSKSPKRKSSPKSSSASKKDRKTSAVSSPLLDQQRSVG

SEQ ID NO: 813267 - protein, 62 aa, Homo sapiens
MRAQDIIGHHQSEDRETSDRAHDENKKKAKIQKKPIKKKKEDDVGIERGNIETTSEDGQVFS

SEQ ID NO: 813268 - protein, 1020 aa, Homo sapiens
AAATTLNSRPRQERRVDRVDDRRDERARERDRERERDRERERERERERDREREKERELERERAREREREREKERDRERDRDRDHDRERERERERDREKEREREREERERERERERERERERERERERARERDKERERQRDWEDKDKGRDDRREKREEIREDRNPRDGHDERKSKKRYRNEGSPSPRQSPKRRREHSPDSDAYNSGDDKNEKHRLLSQVVRPQESRSLSPSHLTEDRQGRWKEEDRKPERKESSRRYEEQELKEKVSSVDKQREQTEILESSRMRAQDIIGHHQSEDRETSDRAHDENKKKAKIQKKPIKKKKEDDVGIERGNIETTSEDGQVFSPKKGQKKKSIEKKRKKSKGDSDISDEEAAQQSKKKRGPRTPPITTKEELVEMCNGKNGILEDSQKKEDTAFSDWSDEDVPDRTEVTEAEHTATATTPGSTPSPLSSLLPPPPPVATATATTVPATLAATTAAAATSFSTSAITISTSATPTNTTNNTFANEDSHRKCHRTRVEKVETPHVTIEDAQHRKPMDQKRSSSLGSNRSNRSHTSGRLRSPSNDSAHRSGDDQSGRKRVLHSGSRDREKTKSLEITGERKSRIDQLKRGEPSRSTSSDRQDSRSHSSRRSSPESDRQVHSRSGSFDSRDRLQERDRYEHDRERERERRDTRQREWDRDADKDWPRNRDRDRLRERERERERDKRRDLDRERERLISDSVERDRDRDRDRTFESSQIESVKRCEAKLEGEHERDLESTSRDSLALDKERMDKDLGSVQGFEDTNKSERTESLEAGDDESKLDDAHSLGSGAGEGYEPISDDELDEILAGDAEKREDQQDEEKMPDPLDVIDVDWSGLMPKHPKEPREPGAALLKFTPGAVMLRVGISKKLAGSELFAKVKETCQRLLEKPKDADNLFEHELGALNMAALLRKEERASLLSNLGPCCKALCFRRDSAIRKQLVKNEKGTIKQAYTSAPMVDNELLRLSLRLFKRKTTCHAPGHEKTEDNKLSQSSIQQELCVS

SEQ ID NO: 813269 - protein, 1702 aa, Homo sapiens
MSKIRRKVTVENTKTISDSTSRRPSVFERLGPSTGSTAETQCRNWLKTGNCLYGNTCRFVHGPSPRGKGYSSNYRRSPERPTGDLRERMKNKRQDVDTEPQKRNTEESSSPVRKESSRGRHREKEDIKITKERTPESEEENVEWETNRDDSDNGDINYDYVHELSLEMKRQKIQRELMKLEQENMEKREEIIIKKEVSPEVVRSKLSPSPSLRKSSKSPKRKSSPKSSSASKKDRKTSAVSSPLLDQQRNSKTNQSKKKGPRTPSPPPPIPEDIALGKKYKEKYKVKDRIEEKTRDGKDRGRDFERQREKRDKPRSTSPAGQHHSPISSRHHSSSSQSGSSIQRHSPSPRRKRTPSPSYQRTLTPPLRRSASPYPSHSLSSPQRKQSPPRHRSPMREKGRHDHERTSQSHDRRHERREDTRGKRDREKDSREEREYEQDQSSSRDHRDDREPRDGRDRRDARDTRDRRELRDSRDMRDSREMRDYSRDTKESRDPRDSRSTRDAHDYRDREGRDTHRKEDTYPEESRSYGRNHLREESSRTEIRNESRNESRSEIRNDRMGRSRGRVPELPEKGSRGSRGSQIDSHSSNSNYHDSWETRSSYPERDRYPERDNRDQARDSSFERRHGERDRRDNRERDQRPSSPIRHQGRNDELERDERREERRVDRVDDRRDERARERDRERERDRERERERERERDREREKERELERERAREREREREKERDRERDRDRDHDRERERERERDREKEREREREERERERERERERERERERERERARERDKERERQRDWEDKDKGRDDRREKREEIREDRNPRDGHDERKSKKRYRNEGSPSPRQSPKRRREHSPDSDAYNSGDDKNEKHRLLSQVVRPQESRSLSPSHLTEDRQGRWKEEDRKPERKEKKRENKKESVLGNGREKEKKREIVKGIKNETTIESGKERGNETGKKNGNEKEKRERGKGLESSRMRAQDIIGHHQSEDRETSDRAHDENKKKAKIQKKPIKKKKEDDVGIERGNIETTSEDGQVFSPKKGQKKKSIEKKRKKSKGDSDISDEEAAQQSKKKRGPRTPPITTKEELVEMCNGKNGILEDSQKKEDTAFSDWSDEDVPDRTEVTEAEHTATATTPGSTPSPLSSLLPPPPPVATATATTVPATLAATTAAAATSFSTSAITISTSATPTNTTNNTFANEDSHRKCHRTRVEKVETPHVTIEDAQHRKPMDQKRSSSLGSNRSNRSHTSGRLRSPSNDSAHRSGDDQSGRKRVLHSGSRDREKTKSLEITGERKSRIDQLKRGEPSRSTSSDRQDSRSHSSRRSSPESDRQVHSRSGSFDSRDRLQERDRYEHDRERERERRDTRQREWDRDADKDWPRNRDRDRLRERERERERDKRRDLDRERERLISDSVERDRDRDRDRTFESSQIESVKRCEAKLEGEHERDLESTSRDSLALDKERMDKDLGSVQGFEDTNKSERTESLEAGDDESKLDDAHSLGSGAGEGYEPISDDELDEILAGDAEKREDQQDEEKMPDPLDVIDVDWSGLMPKHPKEPREPGAALLKFTPGAVMLRVGISKKLAGSELFAKVKETCQRLLEKPKDADNLFEHELGALNMAALLRKEERASLLSNLGPCCKALCFRRDSAIRKQLVKNEKGTIKQAYTSAPMVDNELLRLSLRLFKRKTTCHAPGHEKTEDNKLSQSSIQQELCVS

SEQ ID NO: 813270 - protein, 1669 aa, Homo sapiens [sequence omitted]

SEQ ID NO: 813271 - protein, 565 aa, Homo sapiens
MPQASEHRLGRTREPPVNIQPRVGSKLPFAPRARSKERRNPASGPNPMLRPLPPRPGLPDERLKKLELGRGRTSGPRPRGPLRADHGVPLPGSPPPTVALPLPSRTNLARSKSVSSGDLRPMGIALGGHRGTGELGAALSRLALRPEPPTLRRSTSLRRLGGFPGPPTLFSIRTEPPASHGSFHMISARSSEPFYSDDKMAHHTLLLGSGHVGLRNLGNTCFLNAVLQCLSSTRPLRDFCLRRDFRQEVPGGGRAQELTEAFADVIGALWHPDSCEAVNPTRFRAVFQKYVPSFSGYSQQDAQEFLKLLMERLHLEINRRGRRAPPILANGPVPSPPRRGGALLEEPELSDDDRANLMWKRYLEREDSKIVDLFVGQLKSCLKCQACGYRSTTFEVFCDLSLPIPKKGFAGGKVSLRDCFNLFTKEEELESENAPVCDRCRQKTRSTKKLTVQRFPRILVLHLNRFSASRGSIKKSSVGVDFPLQRLSLGDFASDKAGSPVYQLYALCNHSGSVHYGHYTALCRCQTGWHVYNDSRVSPVSENQVASSEGYVLFYQLMQEPPRCL

SEQ ID NO: 813272 - protein, 293 aa, Homo sapiens
MKHAWDGGGSGQHAVERLKCQVGYKELADCTLTFQAHHTLLLGSGHVGLRNLGNTCFLNAVLQCLSSTRPLRDFCLRRDFRQEVPGGGRAQELTEAFADVIGALWHPDSCEAVNPTRFRAVFQKYVPSFSGYSQQDAQEFLKLLMERLHLEINRRGRRAPPILANGPVPSPPRRGGALLEEPELSDDDRANLMWKRYLEREDSKIVDLFVGQLKSCLKCQACGYRSTTFEVFCDLSLPIPKVGFQRIPGWTGQGLCDPSLPTPRVWAGTLWVSGAELKPGLIEKSWKRKFRTC

SEQ ID NO: 813273 - protein, 551 aa, Homo sapiens
MPQASEHRLGRTREPPVNIQPRVGSKLPFAPRARSKERRNPASGPNPMLRPLPPRPGLPDERLKKLELGRGRTSGPRPRGPLRADHGVPLPGSPPPTVALPLPSRTNLARSKSVSSGDLRPMGIALGGHRGTGELGAALSRLALRPEPPTLRRSTSLRRLGGFPGPPTLFSIRTEPPASHGSFHMISARSSEPFYSDDKMAHHTLLLGSGHVGLRNLGNTCFLNAVLQCLSSTRPLRDFCLRRDFRQEVPGGGRAQELTEAFADVIGALWHPDSCEAVNPTRFRAVFQKYVPSFSGYSQQDAQEFLKLLMERLHLEINRRGRRAPPILANGPVPSPPRRGGALLEEPELSDDDRANLMWKRYLEREDSKIVDLFVGQLKSCLKCQACGYRSTTFEVFCDLSLPIPKKGFAGGKVSLRDCFNLFTKEEELESENAPVCDRCRQKTRSTKKLTVQRFPRILVLHLNRFSASRGSIKKSSVGVDFPLQRLSLGDFASDKAGSVHYGHYTALCRCQTGWHVYNDSRVSPVSENQVASSEGYVLFYQLMQEPPRCL

SEQ ID NO: 813274 - protein, 565 aa, Homo sapiens; identical to SEQ ID NO: 813271

SEQ ID NO: 813275 - protein, 565 aa, Homo sapiens; identical to SEQ ID NO: 813271

SEQ ID NO: 813276 - protein, 386 aa, Homo sapiens
MPQASEHRLGRTREPPVNIQPRVGSKLPFAPRARSKERRNPASGPNPMLRPLPPRPGLPDERLKKLELGRGRTSGPRPRGPLRADHGVPLPGSPPPTVALPLPSRTNLARSKSVSSGDLRPMGIALGGHRGTGELGAALSRLALRPEPPTLRRSTSLRRLGGFPGPPTLFSIRTEPPASHGSFHMISARSSEPFYSDDKMAHHTLLLGSGHVGLRNLGNTCFLNAVLQCLSSTRPLRDFCLRRDFRQEVPGGGRAQELTEAFADVIGALWHPDSCEAVNPTRFRAVFQKYVPSFSGYSQQDAQEFLKLLMERLHLEINRRGRRAPPILANGPVPSPPRRGGALLEEPELSDDDRANLMWKRYLEREDSKIVDLFVGQLKSCLKCQA

SEQ ID NO: 813277 - protein, 458 aa, Homo sapiens
MPQASEHRLGRTREPPVNIQPRVGSKLPFAPRARSKERRNPASGPNPMLRPLPPRPGLPDERLKKLELGRGRTSGPRPRGPLRADHGVPLPGSPPPTVALPLPSRTNLARSKSVSSGDLRPMGIALGGHRGTGELGAALSRLALRPEPPTLRRSTSLRRLGGFPGPPTLFSIRTEPPASHGSFHMISARSSEPFYSDDKMAHHTLLLGSGHVGLRNLGNTCFLNAVLQCLSSTRPLRDFCLRRDFRQEVPGGGRAQELTEAFADVIGALWHPDSCEAVNPTRFRAVFQKYVPSFSGYSQQDAQEFLKLLMERLHLEINRRGRRAPPILANGPVPSPPRRGGALLEEPELSDDDRANLMWKRYLEREDSKIVDLFVGQLKSCLKCQACGYRSTTFEVFCDLSLPIPKVGFQRIPGWTGQGLCDPSLPTPRVWAGTLWVSGAELKPGLIEKSWKRKFRTC

SEQ ID NO: 813278 - protein, 639 aa, Homo sapiens
MPQASEHRLGRTREPPVNIQPRVGSKLPFAPRARSKERRNPASGPNPMLRPLPPRPGLPDERLKKLELGRGRTSGPRPRGPLRADHGVPLPGSPPPTVALPLPSRTNLARSKSVSSGDLRPMGIALGGHRGTGELGAALSRLALRPEPPTLRRSTSLRRLGGFPGPPTLFSIRTEPPASHGSFHMISARSSEPFYSDDKMAHHTLLLGSGHVGLRNLGNTCFLNAVLQCLSSTRPLRDFCLRRDFRQEVPGGGRAQELTEAFADVIGALWHPDSCEAVNPTRFRAVFQKYVPSFSGYSQQDAQEFLKLLMERLHLEINRRGRRAPPILANGPVPSPPRRGGALLEEPELSDDDRANLMWKRYLEREDSKIVDLFVGQLKSCLKCQACGYRSTTFEVFCDLSLPIPKKGFAGGKVSLRDCFNLFTKEEELESENAPVCDRCRQKTRSTKKLTVQRFPRILVLHILIFRFLLLLGYLPYILFPPCFQRIEFSLGKVCHPLFHKMLPVCREWGEDSFQDRRSSPQRPTASQMLLNQGLDLNRFSASRGSIKKSSVGVDFPLQRLSLGDFASDKAGSPVYQLYALCNHSGSVHYGHYTALCRCQTGWHVYNDSRVSPVSENQVASSEGYVLFYQLMQEPPRCL

SEQ ID NO: 813279 - protein, 386 aa, Homo sapiens; identical to SEQ ID NO: 813276

SEQ ID NO: 813280 - protein, 381 aa, Homo sapiens
MISARSSEPFYSDDKMAHHTLLLGSGHVGLRNLGNTCFLNAVLQCLSSTRPLRDFCLRRDFRQEVPGGGRAQELTEAFADVIGALWHPDSCEAVNPTRFRAVFQKYVPSFSGYSQQDAQEFLKLLMERLHLEINRRGRRAPPILANGPVPSPPRRGGALLEEPELSDDDRANLMWKRYLEREDSKIVDLFVGQLKSCLKCQACGYRSTTFEVFCDLSLPIPKKGFAGGKVSLRDCFNLFTKEEELESENAPVCDRCRQKTRSTKKLTVQRFPRILVLHLNRFSASRGSIKKSSVGVDFPLQRLSLGDFASDKAGSPVYQLYALCNHSGSVHYGHYTALCRCQTGWHVYNDSRVSPVSENQVASSEGYVLFYQLMQEPPRCL

SEQ ID NO: 813281 - protein, 381 aa, Homo sapiens; identical to SEQ ID NO: 813280

SEQ ID NO: 813282 - protein, 458 aa, Homo sapiens; identical to SEQ ID NO: 813277

SEQ ID NO: 813283 - protein, 458 aa, Homo sapiens; identical to SEQ ID NO: 813277

SEQ ID NO: 813284 - protein, 305 aa, Homo sapiens [sequence omitted]

SEQ ID NO: 813285 - protein, 357 aa, Homo sapiens
PGSKMATVIPGPLSLGEDFYREAIEHCRSYNARLCAERSLRLPFLDSQTGVAQNNCYIWMEKTHRGPGLAPGQIYTYPARCWRKKRRLNILEDPRLRPCEYKIDCEAPLKKEGGLPEGPVLEALLCAETGEKKIELKEEETIMDCQKQQLLEFPHDLEVEDLEDDIPRRKNRAKGKAYGIGGLRKRQDTASLEDRDKPYVCDKFYKELAWVPEAQRKHTAKKAPDGTVIPNGYCDFCLGGSKKTGCPEDLISCADCGRSGHPSCLQFTVNMTAAVRTYRWQCIECKSCSLCGTSENDGASWAGLTPQDQLLFCDDCDRGYHMYCLSPPMAEPPEGSWSCHLCLRHLKEKASAYITLT

SEQ ID NO: 813286 - protein, 388 aa, Homo sapiens
MATAIQNPLKSLGEDFYREAIEHCRSYNARLCAERSLRLPFLDSQTGVAQNNCYIWMEKTHRGPGLAPGQIYTYPARCWRKKRRLNILEDPRLRPCEYKIDCEAPLKKEGGLPEGPVLEALLCAETGEKKIELKEEETIMDCQKQQLLEFPHDLEVEDLEDDIPRRKNRAKGKAYGIGGLRKRQDTASLEDRDKPYVCDICGKRYKNRPGLSYHYTHTHLAEEEGEENAERHALPFHRKNNHKQFYKELAWVPEAQRKHTAKKAPDGTVIPNGYCDFCLGGSKKTGCPEDLISCADCGRSGHPSCLQFTVNMTAAVRTYRWQCIECKSCSLCGTSENDDQLLFCDDCDRGYHMYCLSPPMAEPPEGSWSCHLCLRHLKEKASAYITLT

SEQ ID NO: 813287 - protein, 391 aa, Homo sapiens
PGSKMATVIPGPLSLGEDFYREAIEHCRSYNARLCAERSLRLPFLDSQTGVAQNNCYIWMEKTHRGPGLAPGQIYTYPARCWRKKRRLNILEDPRLRPCEYKIDCEAPLKKEGGLPEGPVLEALLCAETGEKKIELKEEETIMDCQKQQLLEFPHDLEVEDLEDDIPRRKNRAKGKAYGIGGLRKRQDTASLEDRDKPYVCDICGKRYKNRPGLSYHYTHTHLAEEEGEENAERHALPFHRKNNHKQFYKELAWVPEAQRKHTAKKAPDGTVIPNGYCDFCLGGSKKTGCPEDLISCADCGRSGHPSCLQFTVNMTAAVRTYRWQCIECKSCSLCGTSENDDQLLFCDDCDRGYHMYCLSPPMAEPPEGSWSCHLCLRHLKEKASAYITLT

SEQ ID NO: 813288 - protein, 420 aa, Homo sapiens
SCFLFGIPDSTLVDLQAMGPLTLTLAQTPGRRCATAVAGAQLHLGEDFYREAIEHCRSYNARLCAERSLRLPFLDSQTGVAQNNCYIWMEKTHRGPGLAPGQIYTYPARCWRKKRRLNILEDPRLRPCEYKIDCEAPLKKEGGLPEGPVLEALLCAETGEKKIELKEEETIMDCQKQQLLEFPHDLEVEDLEDDIPRRKNRAKGKAYGIGGLRKRQDTASLEDRDKPYVCDICGKRYKNRPGLSYHYTHTHLAEEEGEENAERHALPFHRKNNHKQFYKELAWVPEAQRKHTAKKAPDGTVIPNGYCDFCLGGSKKTGCPEDLISCADCGRSGHPSCLQFTVNMTAAVRTYRWQCIECKSCSLCGTSENDDQLLFCDDCDRGYHMYCLSPPMAEPPEGSWSCHLCLRHLKEKASAYITLT

SEQ ID NO: 813289 - protein, 192 aa, Homo sapiens
GWRRQGPGGADRPSWLARSPVCGKRYKNRPGLSYHYTHTHLAEEEGEENAERHALPFHRKNNHKPKKAPDGTVIPNGYCDFCLGGSKKTGCPEDLISCADCGRSGHPSCLQFTVNMTAAVRTYRWQCIECKSCSLCGTSENDDQLLFCDDCDRGYHMYCLSPPMAEPPEGSWSCHLCLRHLKEKASAYITLT

SEQ ID NO: 813290 - protein, 323 aa, Homo sapiens
MATAIQNPLKSLGEDFYREAIEHCRSYNARLCAERSLRLPFLDSQTGVAQNNCYIWMEKTHRGPGLAPGQIYTYPARCWRKKRRLNILEDPRLRPCEYKIDCEAPLKKEGGLPEGPVLEALLCAETGEKKIELKEEETIMDCQKQQLLEFPHDLEVEDLEDDIPRRKNRAKGKAYGIGGLRKRQDTASLEDRDKPYVCDICGKRYKNRPGLSYHYTHTHLAEEEGEENAERHALPFHRKNNHKPHKQFPRIAWVLSQGTPARRARGRIPGTVILPGARKGPRTTPGRGEGPCYIRIGRTTGDSVAEGALYGLSNTYVSPLNDR

SEQ ID NO: 813291 - protein, 1068 aa, Homo sapiens
HKSVITWRVNRSGGGESGLPALGRGRVPASAIPERQFPSLGSEENLPRPSPPRLREGTMAVPRGNQGLALLLRLDCSGVIMPHCSLDLPGLKQSSHFSLQSAGTTVWLSSWAESPKKDVTGADATAEPMILEQYVVVSNYKKQENSELSLQAGEVVDVIEKNESGWWFVSTSEEQGWVPATYLEAQNGTRDDSDINTSKTGEEEKYVTVQPYTSQSKDEIGFEKGVTVEVIRKNLEGWWYIRYLGKEGWAPASYLKKAKDDLPTRKKNLAGPVEIIGNIMEISNLLNKKASGDKETPPAEGEGHEAPIAKKEISLPILCNASNGSAVGVPDRTVSRLAQGSPAVARIAPQRAQISSPNLRTRPPPRRESSLGFQLPKPPEPPSVEVEYYTIAEFQSCISDGISFRGGQKAEVIDKNSGGWWYVQIGEKEGWAPASYIDKRKKPNLSRRTSTLTRPKVPPPAPPSKPKEAEEGPTGASESQDSPRKLKYEEPEYDIPAFGFDSEPELSEEPVEDRASGERRPAQPHRPSPASSLQRARFKVGESSEDVALEEETIYENEGFRPYAEDTLSARGSSGDSDSPGSSSLSLTRKNSPKSGSPKSSSLLKLKAEKNAQAEMGKNHSSASFSSSITINTTCCSSSSSSSSSLSKTSGDLKPRSASDAGIRGTPKVRAKKDADANAGLTSCPRAKPSVRPKPFLNRAESQSQEKMDISTLRRQLRPTGQLRGGLKGSKSEDSELPPQTASEAPSEGSRRSSSDLITLPATTPPCPTKKEWEGPATSYMTCSAYQKVQDSEISFPAGVEVQVLEKQESGWWYVRFGELEGWAPSHYLVLDENEQPDPSGKELDTVPAKGRQNEGKSDSLEKIERRVQALNTVNQSKKATPPIPSKPPGGFGKTSGTPAVKMRNGVRQVAVRPQSVFVSPPPKDNNLSCALRRNESLTATDGLRGVRRNSSFSTARSAAAEAKGRLAERAASQGSDSPLLPAQRNSIPVSPVRPKPIEKSQFIHNNLKDVYVSIADYEGDEETAGFQEGVSMEVLERNPNGWWYCQILDGVKPFKGWVPSNYLEKKN

SEQ ID NO: 813292 - protein, 1018 aa, Homo sapiens
PQALVRLPPHISQCDEVFRFFEARPEDVNPPKEDYGSSKRKSGADATAEPMILEQYVVVSNYKKQENSELSLQAGEVVDVIEKNESGWWFVSTSEEQGWVPATYLEAQNGTRDDSDINTSKTGEVSKRRKAHLRRLDRRWTLGGMVNRQHSREEKYVTVQPYTSQSKDEIGFEKGVTVEVIRKNLEGWWYIRYLGKEGWAPASYLKKAKDDLPTRKKNLAGPVEIIGNIMEISNLLNKKASGDKETPPAEGEGHEAPIAKKEISLPILCNASNGSAVGVPDRTVSRLAQGSPAVARIAPQRAQISSPNLRTRPPPRRESSLGFQLPKPPEPPSVEVEYYTIAEFQSCISDGISFRGGQKAEVIDKNSGGWWYVQIGEKEGWAPASYIDKRKKPNLSRRTSTLTRPKVPPPAPPSKPKEAEEGPTGASESQDSPRKLKYEEPEYDIPAFGFDSEPELSEEPVEDRASGERRPAQPHRPSPASSLQRARFKVGESSEDVALEEETIYENEGFRPYAEDTLSARGSSGDSDSPGSSSLSLTRKNSPKSGSPKSSSLLKLKAEKNAQAEMGKNHSSASFSSSITINTTCCSSSSSSSSSLSKTSGDLKPRSASDAGIRGTPKVRAKKDADANAGLTSCPRAKPSVRPKPFLNRAESQSQEKMDISTLRRQLRPTGQLRGGLKGSKSEDSELPPQTASEAPSEGSRRSSSDLITLPATTPPCPTKKEWEGPATSYMTCSAYQKVQDSEISFPAGVEVQVLEKQESGWWYVRFGELEGWAPSHYLVLDENEQPDPSGKELDTVPAKGRQNEGKSDSLEKIERRVQALNTVNQSKKATPPIPSKPPGGFGKTSGTPAVKMRNGVRQVAVRPQSVFVSPPPKDNNLSCALRRNESLTATDGLRGVRRNSSFSTARSAAAEAKGRLAERAASQGSDSPLLPAQRNSIPVSPVRPKPIEKSQFIHNNLKDVYVSIADYEGDEETAGFQEGVSMEVLERNPNGWWYCQILDGVKPFKGWVPSNYLEKKN

SEQ ID NO: 813293 - protein, 213 aa, Homo sapiens
HRSLSMVGCFGPGGKLDWLLGCWLLATDGRTETLDATPKTSGTPAVKMRNGVRQVAVRPQSVFVSPPPKDNNLSCALRRNESLTATDGLRGVRRNSSFSTARSAAAEAKGRLAERAASQGSDSPLLPAQRNSIPVSPVRPKPIEKSQFIHNNLKDVYVSIADYEGDEETAGFQEGVSMEVLERNPNGWWYCQILDGVKPFKGWVPSNYLEKKN

SEQ ID NO: 813294 - protein, 961 aa, Homo sapiens
PQALVRLPPHISQCDEVFRFFEARPEDVNPPKEDYGSSKRKSGADATAEPMILEQYVVVSNYKKQENSELSLQAGEVVDVIEKNESGWWFVSTSEEQGWVPATYLEAQNGTRDDSDINTSKTGEVSKRRKAHLRRLDRRWTLGGMVNRQHSREEKYVTVQPYTSQSKDEIGFEKGVTVEVIRKNLEGWWYIRYLGKEGWAPASYLKKAKDDLPTRKKNLAGPVEIIGNIMEISNLLNKKASGDKETPPAEGEGHEAPIAKKEISLPILCNASNGSAVGVPDRTVSRLAQGSPAVARIAPQRAQISSPNLRTRPPPRRESSLGFQLPKPPEPPSVEVEYYTIAEFQSCISDGISFRGGQKAEVIDKNSGGWWYVQIGEKEGWAPASYIDKRKKPNLSRRTSTLTRPKVPPPAPPSKPKEAEEGPTGASESQDSPRKLKYEEPEYDIPAFGFDSEPELSEEPVEDRASGERRPAQPHRPSPASSLQRARFKVGESSEDVALEEETIYENEGFRPYAEDTLSARGSSGDSDSPGSSSLSLTRKNSPKSGSPKSSSLLKLKAEKNAQAEMGKNHSSASFSSSITINTTCCSSSSSSSSSLSKTSGDLKPRSASDAGIRGTPKVRAKKDADANAGLTSCPRAKPSVRPKPFLNRAESQSQEKMDISTLRRQLRPTGQLRGGLKGSKSEDSELPPQTASEAPSEGSRRSSSDLITLPATTPPCPTKKEWEGPATSYMTCSAYQKVQDSEISFPAGVEVQVLEKQESGWWYVRFGELEGWAPSHYLVLDENEQPDPSGKELDTVPAKGRQNEGKSDSLEKIERRVQALNTVNQSKKATPPIPSKPPGGFGKTSGTPAVKMRNGVRQVAVRPQSVFVSPPPKDNNLSCALRRNESLTATDGLRGVRRNSSFSTARSAAAEAKGRLPAAGAASSPSAPGTLRSHRLTERRASSASRRSDGRRRAVKERGR

SEQ ID NO: 813295 - protein, 379 aa, Homo sapiens
KGGRLSLRAESESHSAPHPLSGTAYQTKVPKAVTSRPAARRPPPSARHGRRVQCPLGAPGTRRKRQVLPAAAAAAAAACSPGTRPAALGSRSSVSPENQPSRAMGTRLPLVLRQLRRPPQPPGPPRRLRVPCRASSGGGGGGGGGREGLLGQRRPQDGQARSSCSPGGRTPAARDSIVREVIQNSKEVLSLLQEKNPAFKPVLAIIQAGDDNLMQEINQNLAEEAGLNITHICLPPDSSEAEIIDEILKINEDTRVHGLALQISENLFSNKVLNALKPEKDVDGVTDINLGKLVRGDAHECFVSPVAKAVIELLEKSVGVNLDGKKILVVGAHGSLEAALQCLFQRKGSMTMSIQWKTRQLQSKTESRSVTRLECRRVI

SEQ ID NO: 813296 - protein, 1082 aa, Homo sapiens
KGGRLSLRAESESHSAPHPLSGTAYQTKVPKAVTSRPAARRPPPSARHGRRVQCPLGAPGTRRKRQVLPAAAAAAAAACSPGTRPAALGSRSSVSPENQPSRAMGTRLPLVLRQLRRPPQPPGPPRRLRVPCRASSGGGGGGGGGREGLLGQRRPQDGQARSSCSPGGRTPAARDSIVREVIQNSKEVLSLLQEKNPAFKPVLAIIQAGDDNLMQEINQNLAEEAGLNITHICLPPDSSEAEIIDEILKINEDTRVHGLALQISENLFSNKVLNALKPEKDVDGVTDINLGKLVRGDAHECFVSPVAKAVIELLEKSVGVNLDGKKILVVGAHGSLEAALQCLFQRKGSMTMSIQWKTRQLQSKLHEADIVVLGSPKPEEIPLTWIQPGTTVLNCSHDFLSGKVGCGSPRIHFGGLIEEDDVILLAAALRIQNMVSSGRRWLREQQHRRWRLHCLKLQPLSPVPSDIEISRGQTPKAVDVLAKEIGLLADEIEIYGKSKAKVRLSVLERLKDQADGKYVLVAGITPTPLGEGKSTVTIGLVQALTAHLNVNSFACLRQPSQGPTFGVKGGAAGGGYAQVIPMEEFNLHLTGDIHAITAANNLLAAAIDTRILHENTQTDKALYNRLVPLVNGVREFSEIQLARLKKLGINKTDPSTLTEEEVSKFARLDIDPSTITWQRVLDTNDRFLRKITIGQGNTEKGHYRQAQFDIAVASEIMAVLALTDSLADMKARLGRMVVASDKSGQPVTADDLGVTGALTVLMKDAIKPNLMQTLEGTPVFVHAGPFANIAHGNSSVLADKIALKLVGEEGFVVTEAGFGADIGMEKFFNIKCRASGLVPNVVVLVATVRALKMHGGGPSVTAGVPLKKEYTEENIQLVADGCCNLQKQIQITQLFGVPVVVALNVFKTDTRAEIDLVCELAKRAGAFDAVPCYHWSVGGKGSVDLARAVREAASKRSRFQFLYDVQVPIVDKIRTIAQAVYGAKDIELSPEAQAKIDRYTQQGFGNLPICMAKTHLSLSHQPDKKGVPRDFILPISDVRASIGAGFIYPLVGTMSTMPGLPTRPCFYDIDLDTETEQVKGLF

SEQ ID NO: 813297 - protein, 361 aa, Homo sapiens
KGGRLSLRAESESHSAPHPLSGTAYQTKVPKAVTSRPAARRPPPSARHGRRVQCPLGAPGTRRKRQVLPAAAAAAAAACSPGTRPAALGSRSSVSPENQPSRAMGTRLPLVLRQLRRPPQPPGPPRRLRVPCRASSGGGGGGGGGREGLLGQRRPQDGQARSSCSPGGRTPAARDSIVREVIQNSKEVLSLLQEKNPAFKPVLAIIQAGDDNLMQEINQNLAEEAGLNITHICLPPDSSEAEIIDEILKINEDTRVHGLALQISENLFSNKVLNALKPEKDVDGVTDINLGKLVRGDAHECFVSPVAKAVIELLEKSVGVNLDGKKILVVGAHGSLEAALQCLFQRKGSMTMSIQWCRRVI

SEQ ID NO: 813298 - protein, 869 aa, Homo sapiens
MQEINQNLAEEAGLNITHICLPPDSSEAEIIDEILKINEDTRVHGLALQISENLFSNKVLNALKPEKDVDGVTDINLGKLVRGDAHECFVSPVAKAVIELLEKSVGVNLDGKKILVVGAHGSLEAALQCLFQRKGSMTMSIQWKTRQLQSKLHEADIVVLGSPKPEEIPLTWIQPGTTVLNCSHDFLSGKVGCGSPRIHFGGLIEEDDVILLAAALRIQNMVSSGRRWLREQQHRRWRLHCLKLQPLSPVPSDIEISRGQTPKAVDVLAKEIGLLADEIEIYGKSKAKVRLSVLERLKDQADGKYVLVAGITPTPLGEGKSTVTIGLVQALTAHLNVNSFACLRQPSQGPTFGVKGGAAGGGYAQVIPMEEFNLHLTGDIHAITAANNLLAAAIDTRILHENTQTDKALYNRLVPLVNGVREFSEIQLARLKKLGINKTDPSTLTEEEVSKFARLDIDPSTITWQRVLDTNDRFLRKITIGQGNTEKGHYRQAQFDIAVASEIMAVLALTDSLADMKARLGRMVVASDKSGQPVTADDLGVTGALTVLMKDAIKPNLMQTLEGTPVFVHAGPFANIAHGNSSVLADKIALKLVGEEGFVVTEAGFGADIGMEKFFNIKCRASGLVPNVVVLVATVRALKMHGGGPSVTAGVPLKKEYTEENIQLVADGCCNLQKQIQITQLFGVPVVVALNVFKTDTRAEIDLVCELAKRAGAFDAVPCYHWSVGGKGSVDLARAVREAASKRSRFQFLYDVQVPIVDKIRTIAQAVYGAKDIELSPEAQAKIDRYTQQGFGNLPICMAKTHLSLSHQPDKKGVPRDFILPISDVRASIGAGFIYPLVGTMSTMPGLPTRPCFYDIDLDTETEQVKGLF

SEQ ID NO: 813299 - protein, 649 aa, Homo sapiens
MVSSGRRWLREQQHRRWRLHCLKLQPLSPVPSDIEISRGQTPKAVDVLAKEIGLLADEIEIYGKSKAKVRLSVLERLKDQADGKYVLVAGITPTPLGEGKSTVTIGLVQALTAHLNVNSFACLRQPSQGPTFGVKGGAAGGGYAQVIPMEEFNLHLTGDIHAITAANNLLAAAIDTRILHENTQTDKALYNRLVPLVNGVREFSEIQLARLKKLGINKTDPSTLTEEEVSKFARLDIDPSTITWQRVLDTNDRFLRKITIGQGNTEKGHYRQAQFDIAVASEIMAVLALTDSLADMKARLGRMVVASDKSGQPVTADDLGVTGALTVLMKDAIKPNLMQTLEGTPVFVHAGPFANIAHGNSSVLADKIALKLVGEEGFVVTEAGFGADIGMEKFFNIKCRASGLVPNVVVLVATVRALKMHGGGPSVTAGVPLKKEYTEENIQLVADGCCNLQKQIQITQLFGVPVVVALNVFKTDTRAEIDLVCELAKRAGAFDAVPCYHWSVGGKGSVDLARAVREAASKRSRFQFLYDVQVPIVDKIRTIAQAVYGAKDIELSPEAQAKIDRYTQQGFGNLPICMAKTHLSLSHQPDKKGVPRDFILPISDVRASIGAGFIYPLVGTMSTMPGLPTRPCFYDIDLDTETEQVKGLF

SEQ ID NO: 813300 - protein, 639 aa, Homo sapiens
RNSKARREKHFNLGHLFAPGNGEWAIRPDFYPVQPAFIQSFHIVILGLDCAGKTTVLYRLQFNEFVNTIPTKGFNTEKIRITPTPLGEGKSTVTIGLVQALTAHLNVNSFACLRQPSQGPTFGVKGGAAGGGYAQVIPMEEFNLHLTGDIHAITAANNLLAAAIDTRILHENTQTDKALYNRLVPLVNGVREFSEIQLARLKKLGINKTDPSTLTEEEVSKFARLDIDPSTITWQRVLDTNDRFLRKITIGQGNTEKGHYRQAQFDIAVASEIMAVLALTDSLADMKARLGRMVVASDKSGQPVTADDLGVTGALTVLMKDAIKPNLMQTLEGTPVFVHAGPFANIAHGNSSVLADKIALKLVGEEGFVVTEAGFGADIGMEKFFNIKCRASGLVPNVVVLVATVRALKMHGGGPSVTAGVPLKKEYTEENIQLVADGCCNLQKQIQITQLFGVPVVVALNVFKTDTRAEIDLVCELAKRAGAFDAVPCYHWSVGGKGSVDLARAVREAASKRSRFQFLYDVQVPIVDKIRTIAQAVYGAKDIELSPEAQAKIDRYTQQGFGNLPICMAKTHLSLSHQPDKKGVPRDFILPISDVRASIGAGFIYPLVGTMSTMPGLPTRPCFYDIDLDTETEQVKGLF

SEQ ID NO: 813301 - protein, 1139 aa, Homo sapiens
KGGRLSLRAESESHSAPHPLSGTAYQTKVPKAVTSRPAARRPPPSARHGRRVQCPLGAPGTRRKRQVLPAAAAAAAAACSPGTRPAALGSRSSVSPENQPSRAMGTRLPLVLRQLRRPPQPPGPPRRLRVPCRASSGGGGGGGGGREGLLGQRRPQDGQARSSCSPGGRTPAARDSIVREVIQNSKEVLSLLQEKNPAFKPVLAIIQAGDDNLMQEINQNLAEEAGLNITHICLPPDSSEAEIIDEILKINEDTRVHGLALQISENLFSNKVLNALKPEKDVDGVTDINLGKLVRGDAHECFVSPVAKAVIELLEKSVGVNLDGKKILVVGAHGSLEAALQCLFQRKGSMTMSIQWKTRQLQSKLHEADIVVLGSPKPEEIPLTWIQPGTTVLNCSHDFLSGKVGCGSPRIHFGGLIEEDDVILLAAALRIQNMVSSGRRWLREQQHRRWRLHCLKLQPLSPVPSDIEISRGQTPKAVDVLAKEIGLLADEIEIYGKSKAKVRLSVLERLKDQADGKYVLVAGITPTPLGEGKSTVTIGLVQALTAHLNVNSFACLRQPSQGPTFGVKGGAAGGGYAQVIPMEEFNLHLTGDIHAITAANNLLAAAIDTRILHENTQTDKALYNRLVPLVNGVREFSEIQLARLKKLGINKTDPSTLTEEEVSKFARLDIDPSTITWQRVLDTNDRFLRKITIGQGNTEKGHYRQAQFDIAVASEIMAVLALTDSLADMKARLGRMVVASDKSGQPVTADDLGVTGALTVLMKDAIKPNLMQTLEGTPVFVHAGPFANIAHGNSSVLADKIALKLVGEEGFVGLFYGMKCSDDGEGMDCGTIEESGVGSSYSHCTMPRIFTYRISLQKHNLVFQDAEYLLTEAGFGADIGMEKFFNIKCRASGLVPNVVVLVATVRALKMHGGGPSVTAGVPLKKEYTEENIQLVADGCCNLQKQIQITQLFGVPVVVALNVFKTDTRAEIDLVCELAKRAGAFDAVPCYHWSVGGKGSVDLARAVREAASKRSRFQFLYDVQVPIVDKIRTIAQAVYGAKDIELSPEAQAKIDRYTQQGFGNLPICMAKTHLSLSHQPDKKGVPRDFILPISDVRASIGAGFIYPLVGTMSTMPGLPTRPCFYDIDLDTETEQVKGLF

SEQ ID NO: 813302 - protein, 1082 aa, Homo sapiens; identical to SEQ ID NO: 813296

SEQ ID NO: 813303 - protein, 1082 aa, Homo sapiens; identical to SEQ ID NO: 813296

SEQ ID NO: 813304 - protein, 969 aa, Homo sapiens
KGGRLSLRAESESHSAPHPLSGTAYQTKVPKAVTSRPAARRPPPSARHGRRVQCPLGAPGTRRKRQVLPAAAAAAAAACSPGTRPAALGSRSSVSPENQPSRAMGTRLPLVLRQLRRPPQPPGPPRRLRVPCRASSGGGGGGGGGREGLLGQRRPQDGQARSSCSPGGRTPAARDSIVREVIQNSKEVLSLLQEKNPAFKPVLAIIQAGDDNLMQEINQNLAEEAGLNITHICLPPDSSEAEIIDEILKINEDTRVHGLALQISENLFSNKVLNALKPEKDVDGVTDINLGKLVRGDAHECFVSPVAKAVIELLEKSVGVNLDGKKILVVGAHGSLEAALQCLFQRKGSMTMSIQWKTRQLQSKLHEADIVVLGSPKPEEIPLTWIQPGTTVLNCSHDFLSGKVGCGSPRIHFGGLIEEDDVILLAAALRIQNMVSSGRRWLREQQHRRWRLHCLKLQPLSPVPSDIEISRGQTPKAVDVLAKEIGLLADEIEIYGKSKAKVRLSVLERLKDQADGKYVLVAGITPTPLGEGKSTVTIGLVQALTAHLNVNSFACLRQPSQGPTFGVKGGAAGGGYAQVIPMEEFNLHLTGDIHAITAANNLLAAAIDTRILHENTQTDKALYNRLVPLVNGVREFSEIQLARLKKLGINKTDPSTLTEEEVSKFARLDIDPSTITWQRVLDTNDRFLRKITIGQGNTEKGHYRQAQFDIAVASEIMAVLALTDSLADMKARLGRMVVASDKSGQPVTADDLGVTGALTVLMKDAIKPNLMQTLEGTPVFVHAGPFANIAHGNSSVLADKIALKLVGEEGFVVTEAGFGADIGMEKFFNIKCRASGLVPNVVVLVATVRALKMHGGGPSVTAGVPLKKEYTEENIQLVADGCCNLQKQIQITQLFGVPVVVALNVFKTDTRAEIDLVCELAKRAGAFDAVPCYHWSVGGKGSVDLARAVREAASKRSRFQFLYDVQPFS

SEQ ID NO: 813305 - protein, 259 aa, Homo sapiens [sequence omitted]

SEQ ID NO: 813306 - protein, 413 aa, Homo sapiens
KGGRLSLRAESESHSAPHPLSGTAYQTKVPKAVTSRPAARRPPPSARHGRRVQCPLGAPGTRRKRQVLPAAAAAAAAACSPGTRPAALGSRSSVSPENQPSRAMGTRLPLVLRQLRRPPQPPGPPRRLRVPCRASSGGGGGGGGGREGLLGQRRPQDGQARSSCSPGGRTPAARDSIVREVIQNSKEVLSLLQEKNPAFKPVLAIIQAGDDNLMQEINQNLAEEAGLNITHICLPPDSSEAEIIDEILKINEDTRVHGLALQISENLFSNKVLNALKPEKDVDGVTDINLGKLVRGDAHECFVSPVAKAVIELLEKSVGVNLDGKKILVVGAHGSLEAALQCLFQRKGSMTMSIQWKTRQLQSKLHEADIVVLGSPKPEEIPLTWIQPGTTVLNCSHDFLSESLIIIRRMAIF

SEQ ID NO: 813307 - protein, 1163 aa, Homo sapiens
MDRNREAEMELRRGPSPTRAGRGHEVDGDKATCHTCCICGKSFPFQSSLSQHMRKHTGEKPYKCPYCDHRASQKGNLKIHIRSHRTGTLIQGHEPEAGEAPLGEMRASEGLDACASPTKSASACNRLLNGASQADGARVLNGASQADSGRVLLRSSKKGAEGSACAPGEAKAAVQCSFCKSQFERKKDLELHVHQAHKPFKCRLCSYATLREESLLSHIERDHITAQGPGSGEACVENGKPELSPGEFPCEVCGQAFSQTWFLKAHMKKHRGSFDHGCHICGRRFKEPWFLKNHMKAHGPKTGSKNRPKSELDPIATINNVVQEEVIVAGLSLYEVCAKCGNLFTNLDSLNAHNAIHRRVEASRTRAPAEEGAEGPSDTKQFFLQCLNLRPSAAGDSCPGTQAGRRVAELDPVNSYQAWQLATRGKVAEPAEYLKYGAWDEALAGDVAFDKDRREYVLVSQEKRKREQDAPAAQGPPRKRASGPGDPAPAGHLDPRSAARPNRRAAATTGQGKSSECFECGKIFRTYHQMVLHSRVHRRARRERDSDGDRAARARCGSLSEGDSASQPSSPGSACAAADSPGSGLADEAAEDSGEEGAPEPAPGGQPRRCCFSEEVTSTELSSGDQSHKMGDNASERDTGESKAGIAASVSILENSSRETSRRQEQHRFSMDLKMPAFHPKQEVPVPGDGVEFPSSTGAEGQTGHPAEKLSDLHNKEHSGGGKRALAPDLMPLDLSARSTRDDPSNKETASSLQAALVVHPCPYCSHKTYYPEVLWMHKRIWHRVSCNSVAPPWIQPNGYKSIRSNLVFLSRSGRTGPPPALGGKECQPLLLARFTRTQVPGGMPGSKSGSSPLGVVTKAASMPKNKESHSGGPCALWAPGPDGYRQTKPCHGQEPHGAATQGPLAKPRQEASSKPVPAPGGGGFSRSATPTPTVIARAGAQPSANSKPVEKFGVPPAGAGFAPTNKHSAPDSLKAKFSAQPQGPPPAKGEGGAPPLPPREPPSKAAQELRTLATCAAGSRGDAALQAQPGVAGAPPVLHSIKQEPVAEGHEKRLDILNIFKTYIPKDFATLYQGWGVSGPGLEHRGTLRTQARPGEFVCIECGKSFHQPGHLRAHMRAHSVVFESDGPRGSEVHTTSADAPKQGRDHSNTGTVQTVPLRKGT

SEQ ID NO: 813308 - protein, 1163 aa, Homo sapiens; identical to SEQ ID NO: 813307

SEQ ID NO: 813309 - protein, 1163 aa, Homo sapiens; identical to SEQ ID NO: 813307

SEQ ID NO: 813310 - protein, 1163 aa, Homo sapiens; identical to SEQ ID NO: 813307

SEQ ID NO: 813311 - protein, 1163 aa, Homo sapiens; identical to SEQ ID NO: 813307

SEQ ID NO: 813312 - protein, 1091 aa, Homo sapiens
MDRNREAEMELRRGPSPTRAGRGHEVDGDKATCHTCCICGKSFPFQSSLSQHMRKHTGEKPYKCPYCDHRASQKGNLKIHIRSHRTGTLIQGHEPEAGEAPLGEMRASEGLDACASPTKSASACNRLLNGASQADGARVLNGASQADSGRVLLRSSKKGAEGSACAPGEAKAAVQCSFCKSQFERKKDLELHVHQAHKPFKCRLCSYATLREESLLSHIERDHITAQGPGSGEACVENGKPELSPGEFPCEVCGQAFSQTWFLKAHMKKHRGSFDHGCHICGRRFKEPWFLKNHMKAHGPKTGSKNRPKSELDPIATINNVVQEEVIVAGLSLYEVCAKCGNLFTNLDSLNAHNAIHRRVEASRTRAPAEEGAEGPSDTKQFFLQCLNLRPSAAGDSCPGTQAGRRVAELDPVNSYQAWQLATRGKVAEPAEYLKYGAWDEALAGDVAFDKDRREYVLVSQEKRKREQDAPAAQGPPRKRASGPGDPAPAGHLDPRSAARPNRRAAATTGQGKSSECFECGKIFRTYHQMVLHSRVHRRARRERDSDGDRAARARCGSLSEGDSASQPSSPGSACAAADSPGSGLADEAAEDSGEEGAPEPAPGGQPRRCCFSEEVTSTELSSGDQSHKMGDNASERDTGESKAGIAASVSILENSSRETSRRQEQHRFSMDLKMPAFHPKQEVPVPGDGVEFPSSTGAEGQTGHPAEKLSDLHNKEHSGGGKRALAPDLMPLDLSARSTRDDPSNKETASSLQAALVVHPCPYCSHKTYYPEVLWMHKRIWHRVSCNSVAPPWIQPNGYKSIRSNLVFLSRSGRTGPPPALGGKECQPLLLARFTRTQVPGGMPGSKSGSSPLGVVTKAASMPKNKESHSGGPCALWAPGPDGYRQTKPCHGQEPHGAATQGPLAKPRQEASSKPVPAPGGGGFSRSATPTPTVIARAGAQPSANSKPVEKFGVPPAGAGFAPTNKHSAPDSLKAKFSAQPQGPPPAKGEGGAPPLPPREPPSKAAQELRTLATCAAGSRGDAALQAQPGVAGAPPVLHSIKQEPVAEGHEKRLDILNIFKTYIPKDFATLYQGWGVSGPGLEHRGERPF

SEQ ID NO: 813313 - protein, 90 aa, Homo sapiens
MNMKPATASALLLLLLGLAWTQGSHGWGADASSLQKRAGRADQNYNYNQHAYPTAYGGKYSVKTPAKGGVSPSSSASRVQPGLLQWVKFW

SEQ ID NO: 813314 - protein, 152 aa, Homo sapiens
TNTHNTTHTLGEYELVFNRPRHRLKSGKGSSTGSSSGNHGGSGGGNGHKPGNSETSPGMFNFDTFWKNFKSKLGFINWDAINKNQVPPPSTRALLYFSRLWEDFKQNTPFLNWKAIIEGADASSLQKRAGRADQCRVHGMAWRWQLYRSMIY

SEQ ID NO: 813315 - protein, 106 aa, Homo sapiens
SEKPRQLRTGERRLQTQREGGQGVGRRRTEEGTETQSKGGKEETLVGGRHSGERGGWAEMKFQGPLACLLLALCLGSGEAGPLQKSAADFGNILLTAAYDVYMMFP

SEQ ID NO: 813316 - protein, 273 aa, Homo sapiens
MLGITSCSDQQAKEGEGLGRLERGLESDWGSNKSVTPLGTTGSPLGPLGQRLKSCFPLQGSSTGSSSGNHGGSGGGNGHKPGCEKPGNEARGSGESGIQGFRGQGVSSNMREISKEGNRLLGGSGDNYRNSETSPGMFNFDTFWKNFKSKLGFINWDAINKNQVPPPSTRALLYFSRLWEDFKQNTPFLNWKAIIEGADASSLQKRAGRADQPGAGWQEVAAVTSKNYNYNQHAYPTAYGGKYSVKTPAKGGVSPSSSASRVQPGLLQWVKFW

SEQ ID NO: 813317 - protein, 123 aa, Homo sapiens
MFNFDTFWKNFKSKLGFINWDAINKNQVPPPSTRALLYFSRLWEDFKQNTPFLNWKAIIEGADASSLQKRAGRADQNYNYNQHAYPTAYGGKYSVKTPAKGGVSPSSSASRVQPGLLQWVKFW

SEQ ID NO: 813318 - protein, 123 aa, Homo sapiens; identical to SEQ ID NO: 813317

SEQ ID NO: 813319 - protein, 212 aa, Homo sapiens
MLGITSCSDQQAKEGEGLGRLERGLESDWGSNKSVTPLGTTGSPLGPLGQRLKSCFPLQGSSTGSSSGNHGGSGGGNGHKPGNSETSPGMFNFDTFWKNFKSKLGFINWDAINKNQVPPPSTRALLYFSRLWEDFKQNTPFLNWKAIIEGADASSLQKRAGRADQNYNYNQHAYPTAYGGKYSVKTPAKGGVSPSSSASRVQPGLLQWVKFW

SEQ ID NO: 813320 - protein, 259 aa, Homo sapiens
MLGITSCSDQQAKEGEGLGRLERGLESDWGSNKSVTPLGTTGSPLGPLGQRLKSCFPLQGSSTGSSSGNHGGSGGGNGHKPGCEKPGNEARGSGESGIQGFRGQGVSSNMREISKEGNRLLGGSGDNYRNSETSPGMFNFDTFWKNFKSKLGFINWDAINKNQVPPPSTRALLYFSRLWEDFKQNTPFLNWKAIIEGADASSLQKRAGRADQNYNYNQHAYPTAYGGKYSVKTPAKGGVSPSSSASRVQPGLLQWVKFW

SEQ ID NO: 813321 - protein, 279 aa, Homo sapiens
MLGITSCSDQQAKEGEGLGRLERGLESDWGSNKSVTPLGTTGSPLGPLGQRLKSCFPLQGSSTGSSSGNHGGSGGGNGHKPGCEKPGNEARGSGESGIQGFRGQGVSSNMREISKEGNRLLGGSGDNYRGQGSSWGSGGGDAVGGVNTVNSETSPGMFNFDTFWKNFKSKLGFINWDAINKNQVPPPSTRALLYFSRLWEDFKQNTPFLNWKAIIEGADASSLQKRAGRADQNYNYNQHAYPTAYGGKYSVKTPAKGGVSPSSSASRVQPGLLQWVKFW

SEQ ID NO: 813322 - protein, 103 aa, Homo sapiens
  misc_feature (1)..(1): Xaa can be any naturally occurring amino acid
  misc_feature (5)..(5): Xaa can be any naturally occurring amino acid
XALRXTAPRSPTPGPPSTSADSGEDFKQNTPFLNWKAIIEGADASSLQKRAGRADQNYNYNQHAYPTAYGGKYSVKTPAKGGVSPSSSASRVQPGLLQWVKFW

SEQ ID NO: 813323 - protein, 176 aa, Homo sapiens
MFNFDTFWKNFKSKLGFINWDAINKNQVPPPSTRALLYFSRLWEDFKQNTPFLNWKAIIEGADASSLQKRAGRADQGESLSSSYPAGPLVPLGLCSRDLGKSEILFHSSIQWLSQPGAGWQEVAAVTSKNYNYNQHAYPTAYGGKYSVKTPAKGGVSPSSSASRVQPGLLQWVKFW

SEQ ID NO: 813324 - protein, 179 aa, Homo sapiens
MFNFDTFWKNFKSKLGFINWDAINKNQVPPPSTRALLYFSRLWEDFKQNTPFLNWKAIIEGADASSLQKRAGRADQGESLSSSYPAGPLVPLGLCSRDLGKSEILFHSSIQWLSQPGAGWQEVAAVTSKVRHLPWTRWVTSWHFFSWSPTLTSQVTLEELAEVLRAGGGVGGGGGGHLG

SEQ ID NO: 813325 - protein, 137 aa, Homo sapiens
MFNFDTFWKNFKSKLGFINWDAINKNQVPPPSTRALLYFSRLWEDFKQNTPFLNWKAIIEGADASSLQKRAGRADQPGAGWQEVAAVTSKNYNYNQHAYPTAYGGKYSVKTPAKGGVSPSSSASRVQPGLLQWVKFW

SEQ ID NO: 813326 - protein, 123 aa, Homo sapiens; identical to SEQ ID NO: 813317

SEQ ID NO: 813327 - protein, 123 aa, Homo sapiens; identical to SEQ ID NO: 813317

SEQ ID NO: 813328 - protein, 184 aa, Homo sapiens
MREISKEGNRLLGGSGDNYRGQGSSWGSGGGDAVGGVNTVNSETSPGMFNFDTFWKNFKSKLGFINWDAINKNQVPPPSTRALLYFSRLWEDFKQNTPFLNWKAIIEGADASSLQKRAGRADQPGAGWQEVAAVTSKNYNYNQHAYPTAYGGKYSVKTPAKGGVSPSSSASRVQPGLLQWVKFW

SEQ ID NO: 813329 - protein, 123 aa, Homo sapiens; identical to SEQ ID NO: 813317

SEQ ID NO: 813330 - protein, 123 aa, Homo sapiens; identical to SEQ ID NO: 813317

SEQ ID NO: 813331 - protein, 137 aa, Homo sapiens; identical to SEQ ID NO: 813325

SEQ ID NO: 813332 - protein, 118 aa, Homo sapiens
MFNFDTFWKNFKSKLGFINWDAINKDFKQNTPFLNWKAIIEGADASSLQKRAGRADQPGAGWQEVAAVTSKNYNYNQHAYPTAYGGKYSVKTPAKGGVSPSSSASRVQPGLLQWVKFW

SEQ ID NO: 813333 - protein, 123 aa, Homo sapiens; identical to SEQ ID NO: 813317

SEQ ID NO: 813334 - protein, 123 aa, Homo sapiens; identical to SEQ ID NO: 813317

SEQ ID NO: 813335 - protein, 123 aa, Homo sapiens; identical to SEQ ID NO: 813317

SEQ ID NO: 813336 - protein, 123 aa, Homo sapiens; identical to SEQ ID NO: 813317

SEQ ID NO: 813337 - protein, 162 aa, Homo sapiens
MRIANRTRFSSPFLARGAGWTHGRGMMVVGTGTSLALSSLLSLLLFAGMQMYSRQLASTEWLTIQGGLLGSGLFVFSLTAFNNLENLVFGKGFQAKIFPEILLCLLLALFASGLIHRVCVTTCFIFSMVGLYYINKISSTLYQAAAPVLTPAKVTGKSKKRN

SEQ ID NO: 813338 - protein, 475 aa, Homo sapiens
MTPGTQSPFFLLLLLTVLTVVTGSGHASSTPGGEKETSATQRSSVPSSTEKNAVSMTSSVLSSHSPGSGSSTTQGQDVTLAPATEPASGSAATWGQDVTSVPVTRPALGSTTPPAHDVTSAPDNKPAPGSTAPPAHGVTSAPDTRPAPGSTAPPAHGVTSAPDNRPALGSTAPPVHNVTSASGSASGSASTLVHNGTSARATTTPASKSTPFSIPSHHSDTPTTLASHSTKTDASSTHHSTVPPLTSSNHSTSPQLSTGVSFFFLSFHISNLQFNSSLEDPSTDYYQELQRDISEMFLQIYKQGGFLGLSNIKFRPGSVVVQLTLAFREGTINVHDVETQFNQYKTEAASRYNLTISDVSVSDVPFPFSAQSGAGVPGWGIALLVLVCVLVALAIVYLIALAVCQCRRKNYGQLDIFPARDTYHPMSEYPTYHTHGRYVPPSSTDRSPYEKVSAGNGGSSLSYTNPAVAATSANL

SEQ ID NO: 813339 - protein, 142 aa, Homo sapiens
GQELGKRLVGTGTSLALSSLLSLLLFAGMQMYSRQLASTEWLTIQGGLLGSGLFVFSLTAFNNLENLVFGKGFQAKIFPEILLCLLLALFASGLIHRVCVTTCFIFSMVGLYYINKISSTLYQAAAPVLTPAKVTGKSKKRN

SEQ ID NO: 813340 - protein, 162 aa, Homo sapiens; identical to SEQ ID NO: 813337

SEQ ID NO: 813341 - protein, 110 aa, Homo sapiens
MRIANRTRFSSPFLARGAGWTHGRGMMVVGTGTSLALSSLLSLLLFAGMQMYSRQLASTEWLTIQGGLLGSGLFVFSLTVSSLQLEGAGHVGMCPSPSPHSSVPVAHPTP

SEQ ID NO: 813342 - protein, 192 aa, Homo sapiens
MRIANRTRFSSPFLARGAGWTHGRGMMVVGTGTSLALSSLLSLLLFAGMQMYSRQLASTEWLTIQGGLLGSGLFVFSLTAFNNLENLVFGKGFQAKIFPEILLCLLLALFASGLIHRVCVTTCFIFSMVGLYYINKISSTLYQAAAPVLTPAKIYSSAKIYSSAKIYSSAKIYSSTKIYSSTKIYSSAKITH

SEQ ID NO: 813343 - protein, 114 aa, Homo sapiens
MQMYSRQLASTEWLTIQGGLLGSGLFVFSLTAFNNLENLVFGKGFQAKIFPEILLCLLLALFASGLIHRVCVTTCFIFSMVGLYYINKISSTLYQAAAPVLTPAKVTGKSKKRN

SEQ ID NO: 813344 - protein, 123 aa, Homo sapiens
MRIANRTRFSSPFLARGAGWTHGRGMMVVGTGTSLALSSLLSLLLFAGMQMYSRQLASTEWLTIQGGLLGSGLFVFSLTAFNNLENLVFGKGFQAKIFPEILRAPWPLERPTPGGKHRSISGG

SEQ ID NO: 813345 - protein, 528 aa, Homo sapiens
RSTSQAASACLNLFCPLPTHFTTTMTPGTQSPFFLLLLLTVLTATTAPKPATVVTGSGHASSTPGGEKETSATQRSSVPSSTEKNAVSMTSSVLSSHSPGSGSSTTQGQDVTLAPATEPASGSAATWGQDVTSVPVTRPALGSTTPPAHDVTSAPDNKPAPGSTAPPAHGVTSAPDTRPAPGSTAPPAHGVTPAPDTRPAPGSTAPPAHGVTSAPDNRPALGSTAPPVHNVTSASGSASGSASTLVHNGTSARATTTPASKSTPFSIPSHHSDTPTTLASHSTKTDASSTHHSTVPPLTSSNHSTSPQLSTGVSFFFLSFHISNLQFNSSLEDPSTDYYQELQRDISEMFLQIYKQGGFLGLSNIKFRPGSVVVQLTLAFREGTINVHDVETQFNQYKTEAASRYNLTISDVSVSDVPFPFSAQSGAGVPGWGIALLVLVCVLVALAIVYLIALAVCQCRRKNYGQLDIFPARDTYHPMSEYPTYHTHGRYVPPSSTDRSPYEKVSAGNGGSSLSYTNPAVAATSANL

SEQ ID NO: 813346 - protein, 560 aa, Homo sapiens
RSRGPLIGSQGHEPRPMGREKEAAAGKEAANPGVTEAAHSPVLLVLFLWWPELIFSSCSYFSFIKTQPYDFNFFTATTAPKPATVVTGSGHASSTPGGEKETSATQRSSVPSSTEKNAVSMTSSVLSSHSPGSGSSTTQGQDVTLAPATEPASGSAATWGQDVTSVPVTRPALGSTTPPAHDVTSAPDNKPAPGSTAPPAHGVTSAPDTRPAPGSTAPPAHGVTSAPDTRPAPGSTAPPAHGVTSAPDNRPALGSTAPPVHNVTSASGSASGSASTLVHNGTSARATTTPASKSTPFSIPSHHSDTPTTLASHSTKTDASSTHHSTVPPLTSSNHSTSPQLSTGVSFFFLSFHISNLQFNSSLEDPSTDYYQELQRDISEMFLQIYKQGGFLGLSNIKFRPGSVVVQLTLAFREGTINVHDVETQFNQYKTEAASRYNLTISDVSVSDVPFPFSAQSGAGVPGWGIALLVLVCVLVALAIVYLIALAVCQCRRKNYGQLDIFPARDTYHPMSEYPTYHTHGRYVPPSSTDRSPYEKVSAGNGGSSLSYTNPAVAATSANL

SEQ ID NO: 813347 - protein, 505 aa, Homo sapiens
MPQPGTQSPFFLLLLLTVLTATTAPKPATVVTGSGHASSTPGGEKETSATQRSSVPSSTEKNAVSMTSSVLSSHSPGSGSSTTQGQDVTLAPATEPASGSAATWGQDVTSVPVTRPALGSTTPPAHDVTSAPDNKPAPGSTAPPAHGVTSAPDTRPAPGSTAPPAHGVTSAPDTRPAPGSTAPPAHGVTSAPDNRPALGSTAPPVHNVTSASGSASGSASTLVHNGTSARATTTPASKSTPFSIPSHHSDTPTTLASHSTKTDASSTHHSTVPPLTSSNHSTSPQLSTGVSFFFLSFHISNLQFNSSLEDPSTDYYQELQRDISEMFLQIYKQGGFLGLSNIKFRPGSVVVQLTLAFREGTINVHDVETQFNQYKTEAASRYNLTISDVSVSDVPFPFSAQSGAGVPGWGIALLVLVCVLVALAIVYLIALAVCQCRRKNYGQLDIFPARDTYHPMSEYPTYHTHGRYVPPSSTDRSPYEKVSAGNGGSSLSYTNPAVAATSANL

SEQ ID NO: 813348 - protein, 489 aa, Homo sapiens
RSTSQAASACLNLFCPLPTHFTTTMTPGTQSPFFLLLLLTVLTATTAPKPATVVTGSGHASSTPGGEKETSATQRSSVPSSTEKNAVSMTSSVLSSHSPGSGSSTTQGQDVTLAPATEPASGSAATWGQDVTSVPVTRPALGSTTPPAHDVTSAPDNKPAPGSTAPPAHGVTSAPDTRPAPGSTAPPAHGVTFSASGSASGSASTLVHNGTSARATTTPASKSTPFSIPSHHSDTPTTLASHSTKTDASSTHHSTVPPLTSSNHSTSPQLSTGVSFFFLSFHISNLQFNSSLEDPSTDYYQELQRDISEMFLQIYKQGGFLGLSNIKFRPGSVVVQLTLAFREGTINVHDVETQFNQYKTEAASRYNLTISDVSVSDVPFPFSAQSGAGVPGWGIALLVLVCVLVALAIVYLIALAVCQCRRKNYGQLDIFPARDTYHPMSEYPTYHTHGRYVPPSSTDRSPYEKVSAGNGGSSLSYTNPAVAATSANL

SEQ ID NO: 813349 - protein, 271 aa, Homo sapiens
IENGVLLLAGVVVALAEVPLCTRVEAEPDASSTHHSTVPPLTSSNHSTSPQLSTGVSFFFLSFHISNLQFNSSLEDPSTDYYQELQRDISEMFLQIYKQGGFLGLSNIKFRPGSVVVQLTLAFREGTINVHDVETQFNQYKTEAASRYNLTISDVSVSDVPFPFSAQSGAGVPGWGIALLVLVCVLVALAIVYLIALAVCQCRRKNYGQLDIFPARDTYHPMSEYPTYHTHGRYVPPSSTDRSPYEKVSAGNGGSSLSYTNPAVAATSANL

SEQ ID NO: 813350 - protein, 255 aa, Homo sapiens
MTPGTQSPFFLLLLLTVLTVVTGSGHASSTPGGEKETSATQRSSVPSSTEKNAFNSSLEDPSTDYYQELQRDISEMFLQIYKQGGFLGLSNIKFRPGSVVVQLTLAFREGTINVHDVETQFNQYKTEAASRYNLTISDVSVSDVPFPFSAQSGAGVPGWGIALLVLVCVLVALAIVYLIALAVCQCRRKNYGQLDIFPARDTYHPMSEYPTYHTHGRYVPPSSTDRSPYEKVSAGNGGSSLSYTNPAVAATSANL

SEQ ID NO: 813351 - protein, 273 aa, Homo sapiens
MTPGTQSPFFLLLLLTVLTVVTGSGHASSTPGGEKETSATQRSSVPSSTEKNALSTGVSFFFLSFHISNLQFNSSLEDPSTDYYQELQRDISEMFLQIYKQGGFLGLSNIKFRPGSVVVQLTLAFREGTINVHDVETQFNQYKTEAASRYNLTISDVSVSDVPFPFSAQSGAGVPGWGIALLVLVCVLVALAIVYLIALAVCQCRRKNYGQLDIFPARDTYHPMSEYPTYHTHGRYVPPSSTDRSPYEKVSAGNGGSSLSYTNPAVAATSANL

SEQ ID NO: 813352 - protein, 288 aa, Homo sapiens
RSTSQAASACLNLFCPLPTHFTTTMTPGTQSPFFLLLLLTVLTATTAPKPATVVTGSGHASSTPGGEKETSATQRSSVPSSTEKNAFNSSLEDPSTDYYQELQRDISEMFLQIYKQGGFLGLSNIKFRPGSVVVQLTLAFREGTINVHDVETQFNQYKTEAASRYNLTISDVSVSDVPFPFSAQSGAGVPGWGIALLVLVCVLVALAIVYLIALAVCQCRRKNYGQLDIFPARDTYHPMSEYPTYHTHGRYVPPSSTDRSPYEKVSAGNGGSSLSYTNPAVAATSANL

SEQ ID NO: 813353 - protein, 230 aa, Homo sapiens
MTPGTQSPFFLLLLLTVLTVVTGSGHASSTPGGEKETSATQRSSVPSSTEKNAIPAPTTTKSCRETFLKWPGSVVVQLTLAFREGTINVHDVETQFNQYKTEAASRYNLTISDVSVSDVPFPFSAQSGAGVPGWGIALLVLVCVLVALAIVYLIALAVCQCRRKNYGQLDIFPARDTYHPMSEYPTYHTHGRYVPPSSTDRSPYEKVSAGNGGSSLSYTNPAVAATSANL

SEQ ID NO: 813354 - protein, 652 aa, Homo sapiens
RSTSQAASACLNLFCPLPTHFTTTMTPGTQSPFFLLLLLTVLTATTAPKPATVVTGSGHASSTPGGEKETSATQRSSVPSSTEKNAVSMTSSVLSSHSPGSGSSTTQGQDVTLAPATEPASGSAATWGQDVTSVPVTRPALGSTTPPAHDVTSAPDNKPAPGSTAPPAHGVTSAPDTRPAPGSTAPPAHGVTFSASGSASGSASTLVHNGTSARATTTPASKSTPFSIPSHHSDTPTTLASHSTKTDASSTHHSTVPPLTSSNHSTSPQLSTGVSFFFLSFHISNLQFNSSLEDPSTDYYQELQRDISEMFLQIYKQGGFLGLSNIKFRPGSVVVQLTLAFREGTINVHDVETQFNQYKTEAASRYNLTISDVSVSDVPFPFSAQSGAGVPGWGIALLVLVCVLVALAIVYLIALAVCQCRRKNYGQLDIFPARDTYHPMSEYPTYHTHGRYVPPSSTDRSPYEKSGSRRTRYEESLRTRAVAEDAPSTHYFLPVARGRCVQALRGRKRRTRGEQVRVVGTGTSLALSSLLSLLLFAGMQMYSRQLASTEWLTIQGGLLGSGLFVFSLTAFNNLENLVFGKGFQAKIFPEILLCLLLALFASGLIHRVCVTTCFIFSMVGLYYINKISSTLYQAAAPVLTPAKVTGKSKKRN

SEQ ID NO: 813355 - protein, 489 aa, Homo sapiens; identical to SEQ ID NO: 813348

SEQ ID NO: 813356 - protein, 311 aa, Homo sapiens
RSTSQAASACLNLFCPLPTHFTTTMTPGTQSPFFLLLLLTVLTATTAPKPATVVTGSGHASSTPGGEKETSATQRSSVPSSTEKNAVSMTSSVLSSHSPGSGSSTTQGQDVTLAPATEPASGSAATWGQDVTSVPVTRPALGSTTPPAHDVTSAPDNKPAPGSTAPPAHGVTSAPDTRPAPGSTAPPAHGVTSRPQALHQAQLLLWCTTAPLPGLPQPQPARALHSQFPATTLILLPPLPAIAPRLMPVALTIARYLLSPPPITALLPSCLLGSLSFSCLFTFQTSSLIPLWKIPAPTTTKSCRETFLKCE

SEQ ID NO: 813357 - protein, 497 aa, Homo sapiens
RSTSQAASACLNLFCPLPTHFTTTMTPGTQSPFFLLLLLTVLTATTAPKPATVVTGSGHASSTPGGEKETSATQRSSVPSSTEKNAVSMTSSVLSSHSPGSGSSTTQGQDVTLAPATEPASGSAATWGQDVTSVPVTRPALGSTTPPAHDVTSAPDNKPAPGSTAPPAHGVTSAPDTRPAPGSTAPPAHGVTFSASGSASGSASTLVHNGTSARATTTPASKSTPFSIPSHHSDTPTTLASHSTKTDASSTHHSTVPPLTSSNHSTSPQLSTGVSFFFLSFHISNLQFNSSLEDPSTDYYQELQRDISEMFLQIYKQGGFLGLSNIKFRPGSVVVQLTLAFREGTINVHDVETQFNQYKTEAASRYNLTISDVSVSDVPFPFSAQSGAGVPGWGIALLVLVCVLVALAIVYLIALAVCQCRRKNYGQLDIFPARDTYHPMSEYPTYHTHGRYVPPSSTDRSPYEKVRLGPTGQGKQRVWLGKDSEGGTWKTQRAWKR

SEQ ID NO: 813358 - protein, 443 aa, Homo sapiens
RSTSQAASACLNLFCPLPTHFTTTMTPGTQSPFFLLLLLTVLTATTAPKPATVVTGSGHASSTPGGEKETSATQRSSVPSSTEKNAVSMTSSVLSSHSPGSGSSTTQGQDVTLAPATEPASGSAATWGQDVTSVPVTRPALGSTTPPAHDVTSAPDNKPAPGSTAPPAHGVTSAPDTRPAPGSTAPPAHGVTSRPQALHQAQLLLWCTTAPLPGLPQPQPARALHSQFPATTLILLPPLPAIAPRLMPVALTIARYLLSPPPITALLPSCLLGSLSFSCLFTFQTSSLIPLWKIPAPTTTKSCRETFLKCFCRFINKGVFWASPILSSVSDVPFPFSAQSGAGVPGWGIALLVLVCVLVALAIVYLIALAVCQCRRKNYGQLDIFPARDTYHPMSEYPTYHTHGRYVPPSSTDRSPYEKVSAGNGGSSLSYTNPAVAATSANL

SEQ ID NO: 813359 - protein, 411 aa, Homo sapiens
RSTSQAASACLNLFCPLPTHFTTTMTPGTQSPFFLLLLLTVLTATTAPKPATVVTGSGHASSTPGGEKETSATQRSSVPSSTEKNAVSMTSSVLSSHSPGSGSSTTQGQDVTLAPATEPASGSAATWGQDVTSVPVTRPALGSTTPPAHDVTSAPDNKPAPGSTAPPAHGVTSAPDTRPAPGSTAPPAHGVTSRPQALHQAQLLLWCTTAPLPGLPQPQPARALHSQFPATTLILLPPLPAIAPRLMPVALTIARYLLSPPPITALLPSCLLGSLSFSCLFTFQTSSLIPLWKIPAPTTTKSCRETFLKCGVPGWGIALLVLVCVLVALAIVYLIALAVCQCRRKNYGQLDIFPARDTYHPMSEYPTYHTHGRYVPPSSTDRSPYEKVSAGNGGSSLSYTNPAVAATSANL

SEQ ID NO: 813360 - protein, 475 aa, Homo sapiens
RSTSQAASACLNLFCPLPTHFTTTMTPGTQSPFFLLLLLTVLTATTAPKPATVVTGSGHASSTPGGEKETSATQRSSVPSSTEKNAVSMTSSVLSSHSPGSGSSTTQGQDVTLAPATEPASGSAATWGQDVTSVPVTRPALGSTTPPAHDVTSAPDNKPAPGSTAPPAHGVTSAPDTRPAPGSTAPPAHGVTFSASGSASGSASTLVHNGTSARATTTPASKSTPFSIPSHHSDTPTTLASHSTKTDASSTHHSTVPPLTSSNHSTSPQLSTGVSFFFLSFHISNLQFNSSLEDPSTDYYQELQRDISEMFLQIYKQGGFLGLSNIKFRPGSVVVQLTLAFREGTINVHDVETQFNQYKTEAASRYNLTISDVSVSDVPFPFSAQSGAGVPGWGIALLVLVCVLVALAIVYLIALAVCQCRRKNYGQLDIFPARDTYHPMSEYPTYHTHGRYVPPSSTDRSPYEKEWRVDRERLA

SEQ ID NO: 813361 - protein, 414 aa, Homo sapiens
RSTSQAASACLNLFCPLPTHFTTTMTPGTQSPFFLLLLLTVLTATTAPKPATVVTGSGHASSTPGGEKETSATQRSSVPSSTEKNAVSMTSSVLSSHSPGSGSSTTQGQDVTLAPATEPASGSAATWGQDVTSVPVTRPALGSTTPPAHDVTSAPDNKPAPGSTAPPAHGVTSAPDTRPAPGSTAPPAHGVTFSASGSASGSASTLVHNGTSARATTTPASKSTPFSIPSHHSDTPTTLASHSTKTDASSTHHSTVPPLTSSNHSTSPQLSTGVSFFFLSFHISNLQFNSSLEDPSTDYYQELQRDISEMFLQIYKQGGFLGLSNIKFRPGSVVVQLTLAFREGTINVHDVETQFNQYKTEAASRYNLTISDVSGCLSVPPKELRAAGHLSSPGYLPSYERVPHLPHPWALCAP

SEQ ID NO: 813362 - protein, 652 aa, Homo sapiens; identical to SEQ ID NO: 813354

SEQ ID NO: 813363 - protein, 384 aa, Homo sapiens
RSTSQAASACLNLFCPLPTHFTTTMTPGTQSPFFLLLLLTVLTATTAPKPATVVTGSGHASSTPGGEKETSATQRSSVPSSTEKNAVSMTSSVLSSHSPGSGSSTTQGQDVTLAPATEPASGSAATWGQDVTSVPVTRPALGSTTPPAHDVTSAPDNKPAPGSTAPPAHGVTSAPDTRPAPGSTAPPAHGVTFSASGSASGSASTLVHNGTSARATTTPASKSTPFSIPSHHSDTPTTLASHSTKTDASSTHHSTVPPLTSSNHSTSPQLSTGVSFFFLSFHISNLQFNSSLEDPSTDYYQELQRDISEMAVCQCRRKNYGQLDIFPARDTYHPMSEYPTYHTHGRYVPPSSTDRSPYEKVSAGNGGSSLSYTNPAVAATSANL

SEQ ID NO: 813364 - protein, 689 aa, Homo sapiens
RSTSQAASACLNLFCPLPTHFTTTMTPGTQSPFFLLLLLTVLTATTAPKPATVVTGSGHASSTPGGEKETSATQRSSVPSSTEKNAVSMTSSVLSSHSPGSGSSTTQGQDVTLAPATEPASGSAATWGQDVTSVPVTRPALGSTTPPAHDVTSAPDNKPAPGSTAPPAHGVTSAPDTRPAPGSTAPPAHGVTFSASGSASGSASTLVHNGTSARATTTPASKSTPFSIPSHHSDTPTTLASHSTKTDASSTHHSTVPPLTSSNHSTSPQLSTGVSFFFLSFHISNLQFNSSLEDPSTDYYQELQRDISEMFLQIYKQGGFLGLSNIKFRPGSVVVQLTLAFREGTINVHDVETQFNQYKTEAASRYNLTISDVSVSDVPFPFSAQSGAGVPGWGIALLVLVCVLVALAIVYLIALAVCQCRRKNYGQLDIFPARDTYHPMSEYPTYHTHGRYVPPSSTDRSPYEKSGSRRTRYEESLRTRAVAEDAPSTHYFLPVARGRCVQALRGRKRRTRGVASPRGGYGHLAGALLPPVPAALCWDADVQPSAGLHRVAHHPGRPAWFGSLRVLAHCILPAVGGGGPRRHVPFPFPTQLCPRCTPYSFNSLNQAFNNLENLVFGKGFQAKIFPEILLCLLLALFASGLIHRVCVTTCFIFSMVGLYYINKISSTLYQAAAPVLTPAKVTGKSKKRN

SEQ ID NO: 813365 - protein, 643 aa, Homo sapiens
RSTSQAASACLNLFCPLPTHFTTTMTPGTQSPFFLLLLLTVLTATTAPKPATVVTGSGHASSTPGGEKETSATQRSSVPSSTEKNAVSMTSSVLSSHSPGSGSSTTQGQDVTLAPATEPASGSAATWGQDVTSVPVTRPALGSTTPPAHDVTSAPDNKPAPGSTAPPAHGVTSAPDTRPAPGSTAPPAHGVTFSASGSASGSASTLVHNGTSARATTTPASKSTPFSIPSHHSDTPTTLASHSTKTDASSTHHSTVPPLTSSNHSTSPQLSTGVSFFFLSFHISNLQFNSSLEDPSTDYYQELQRDISEMFLQIYKQGGFLGLSNIKFRPGSVVVQLTLAFREGTINVHDVETQFNQYKTEAASRYNLTISDVSVSDVPFPFSAQSGAGVPGWGIALLVLVCVLVALAIVYLIALAVCQCRRKNYGQLDIFPARDTYHPMSEYPTYHTHGRYVPPSSTDRSPYEKSGSRRTRYEESLRTRAVAEDAPSTHYFLPVARGRCVQALRGRKRRTRGEQVRVVGTGTSLALSSLLSLLLFAGMQMYSRQLASTEWLTIQGGLLGSGLFVFSLTAFNNLENLVFGKGFQAKIFPEILLCLLLALFASGLIHRVCVTTCFIFSMVGLYYINKISSTLYQAAAGGGGSSE

SEQ ID NO: 813366 - protein, 110 aa, Homo sapiens
VVTWHNPGAGVPGWGIALLVLVCVLVALAIVYLIALAVCQCRRKNYGQLDIFPARDTYHPMSEYPTYHTHGRYVPPSSTDRSPYEKVSAGNGGSSLSYTNPAVAATSANL

SEQ ID NO: 813367 - protein, 572 aa, Homo sapiens
RSTSQAASACLNLFCPLPTHFTTTMTPGTQSPFFLLLLLTVLTATTAPKPATVVTGSGHASSTPGGEKETSATQRSSVPSSTEKNAVSMTSSVLSSHSPGSGSSTTQGQDVTLAPATEPASGSAATWGQDVTSVPVTRPALGSTTPPAHDVTSAPDNKPAPGSTAPPAHGVTSAPDTRPAPGSTAPPAHGVTFSASGSASGSASTLVHNGTSARATTTPASKSTPFSIPSHHSDTPTTLASHSTKTDASSTHHSTVPPLTSSNHSTSPQLSTGVSFFFLSFHISNLQFNSSLEDPSTDYYQELQRDISEMFLQIYKQGGFLGLSNIKFRPGSVVVQLTLAFREGTINVHDVETQFNQYKTEAASRYNLTISDVSVSDVPFPFSAQSGAGVPGWGIALLVLVCVLVALAIVYLIALAVCQCRRKNYGQLDIFPARDTYHPMSEYPTYHTHGRYVPPSSTDRSPYEKSGSRRTRYEESLRTRAVAEDAPSTHYFLPVARGRCVQALRGRKRRTRGVASPRGGYGHLAGALLPPVPAALCWDADVQPSAGLHRVAHHPGRPAWFGSLRVLAHCLQ

SEQ ID NO: 813368 - protein, 168 aa, Homo sapiens
MTPGTQSPFFLLLLLTVLTVVTGSGHASSTPGGEKETSATQRSSVPSSTEKNALSTGVSFFFLSFHISNLQFNSSLEDPSTDYYQELQRDISEMAVCQCRRKNYGQLDIFPARDTYHPMSEYPTYHTHGRYVPPSSTDRSPYEKVSAGNGGSSLSYTNPAVAATSANL

SEQ ID NO: 813369 - protein, 376 aa, Homo sapiens
RSTSQAASACLNLFCPLPTHFTTTMTPGTQSPFFLLLLLTVLTATTAPKPATVVTGSGHASSTPGGEKETSATQRSSVPSSTEKNAVSMTSSVLSSHSPGSGSSTTQGQDVTLAPATEPASGSAATWGQDVTSVPVTRPALGSTTPPAHDVTSAPDNKPAPGSTAPPAHGVTSAPDTRPAPGSTAPPAHGVTFSASGSASGSASTLVHNGTSARATTTPASKSTPFSIPSHHSDTPTTLASHSTKTDASSTHHSTVPPLTSSNHSTSPQLSTGVSFFFLSFHISNLQFNSSLEDPSTDYYQELQRDISEMFLQIYKQGGFLGLSNIKFRPGSVVVQLTLAFREGTINVHDVETQFNQYKTEAASRYNLTISDVSVL

SEQ ID NO: 813370 - protein, 341 aa, Homo sapiens
RSTSQAASACLNLFCPLPTHFTTTMTPGTQSPFFLLLLLTVLTATTAPKPATVVTGSGHASSTPGGEKETSATQRSSVPSSTEKNAVSMTSSVLSSHSPGSGSSTTQGQDVTLAPATEPASGSAATWGQDVTSVPVTRPALGSTTPPAHDVTSAPDNKPAPGSTAPPAHGVTSAPDTRPAPGSTAPPAHGVTSRPQALHQAQLLLWCTTAPLPGLPQPQPARALHSQFPATTLILLPPLPAIAPRLMPVALTIARYLLSPPPITALLPSCLLGSLSFSCLFTFQTSSLIPLWKIPAPTTTKSCRETFLKCFCRFINKGVFWASPILSSARSCGGRISDPLI

SEQ ID NO: 813371 - protein, 214 aa, Homo sapiens
RSTSQAASACLNLFCPLPTHFTTTMTPGTQSPFFLLLLLTVLTATTAPKPATVVTGSGHASSTPGGEKETSATQRSSVPSSTEKNAVSMTSSVLSSHSPGSGSSTTQGQDVTLAPATEPASGSAATWGQDVTSVPVTRPALGSTTPPAHDVTSAPDNKPAPGSTAPPAHGVTSAPDTRPAPGSTAPPAHGVTCARQAHGVTSAPDTRPAPCQME

SEQ ID NO: 813372 - protein, 450 aa, Homo sapiens
MVPLVAVVSGPRAQLFACLLRLGTQQVGPLQLHTGASHAARNHYEVLVLGGGSGGITMAARMKRKVGAENVAIVEPSERHFYQPIWTLVGAGAKQLSSSGRPTASVIPSGVEWIKARVTELNPDKNCIHTDDDEKISYRYLIIALGIQLDYEKIKGLPEGFAHPKIGSNYSVKTVEKTWKALQDFKEGNAIFTFPNTPVKCAGAPQKIMYLSEAYFRKTGKRSKANIIFNTSLGAIFGVKKYADALQEIIQERNLTVNYKKNLIEVRADKQEAVFENLDKPGETQVISYEMLHVTPPMSPPDVLKTSPVADAAGWVDVDKETLQHRRYPNVFGIGDCTNLPTSKTAAAVAAQSGILDRTISVIMKNQTPTKKYDGYTSCPLVTGYNRVILAEFDYKAEPLETFPFDQSKERLSMYLMKADLMPFLYWNMMLRGYWGGPAFLRKLFHLGMS

SEQ ID NO: 813373 - protein, 183 aa, Homo sapiens
MVPLVAVVSGPRAQLFACLLRLGTQQVGPLQLHTGASHAARNHYEVLVLGGGSGGITMAARMKRKVGAENVAIVEPSERHFYQPIWTLVGAGAKQLSSSGRPTASVIPSGVEWIKARVTELNPDKNCIHTDDDEKISYRYLIIALGIQLDYEKIKAYLKVRSSPGLRGQCHLHLPYSSGVCWA

SEQ ID NO: 813374 - protein, 82 aa, Homo sapiens
YPCPPSGRTISVIMKNQSLTKKYDGYTSCPLVTGYNRVILAEFDYKAEPLETFPFDQSKERLSMYLMKADLMPFLYWNMMLR

SEQ ID NO: 813375 - protein, 450 aa, Homo sapiens; identical to SEQ ID NO: 813372

SEQ ID NO: 813376 - protein, 450 aa, Homo sapiens; identical to SEQ ID NO: 813372

SEQ ID NO: 813377 - protein, 450 aa, Homo sapiens; identical to SEQ ID NO: 813372

SEQ ID NO: 813378 - protein, 450 aa, Homo sapiens; identical to SEQ ID NO: 813372

SEQ ID NO: 813379 - protein, 450 aa, Homo sapiens; identical to SEQ ID NO: 813372

SEQ ID NO: 813380 - protein, 450 aa, Homo sapiens; identical to SEQ ID NO: 813372

SEQ ID NO: 813381 - protein, 450 aa, Homo sapiens; identical to SEQ ID NO: 813372

SEQ ID NO: 813382 - protein, 480 aa, Homo sapiens
MVPLVAVVSGPRAQLFACLLRLGTQQVGPLQLHTGASHAARNHYEVLVLGGGSGGITMAARMKRKVGAENVAIVEPSERHFYQPIWTLVGAGAKQLSSSGRPTASVIPSGVEWIKARVTELNPDKNCIHTDDDEKISYRYLIIALGIQLDYEKIKGLPEGFAHPKIGSNYSVKTVEKTWKALQDFKEGNAIFTFPNTPVKCAGAPQKIMYLSEAYFRKTGKRSKANIIFNTSLGAIFGVKKYADALQEIIQERNLTVNYKKNLIEVRADKQEAVFENLDKPGETQVISYEMLHVTPPMSPPDVLKTSPVADAAGWVDVDKETLQHRRYPNVFGIGDCTNLPTSKTAAAVAAQSGILDRTISVIMKNQTPTKKYDGYTSCPLVTGYNRVILAEFDYKAEPLETFPFDQSKERLSMYLMKADLMPFLYWNMMLRYIFLCYFLQGLLGRTSVSAQVVSSRYELRMAQHLLILDGFWAKTAVTE

SEQ ID NO: 813383 - protein, 160 aa, Homo sapiens
YCQRCYCQVVLLSWWCCCPGDAAGWVDVDKETLQHRRYPNVFGIGDCTNLPTSKTAAAVAAQSGILDRTISVIMKNQTPTKKYDGYTSCPLVTGYNRVILAEFDYKAEPLETFPFDQSKERLSMYLMKADLMPFLYWNMMLRGYWGGPAFLRKLFHLGMS

SEQ ID NO: 813384 - protein, 233 aa, Homo sapiens
MVPLVAVVSGPRAQLFACLLRLGTQQVGPLQLHTGASHAARNHYEVLVLGGGSGGITMAARMKRKVGAENVAIVEPSERHFYQPIWTLVGAGAKQLSSSGRPTASVIPSGVEWIKARVTELNPDKNCIHTDDDEKISYRYLIIALGIQLDYEKIKGLPEGFAHPKIGSNYSVKTVEKTWKALQDFKEGNAIFTFPNTPVKCAGAPQKIMYLSEAYFRKVCFLSGDRDEQGGQC

SEQ ID NO: 813385 - protein, 552 aa, Homo sapiens
MKKNRERFCNREREFVYKFKVGSQCLELRVPLKFPVQENASHLHGRLMLLHSLPCFIEKDLKEALTQFIEEESLSDYDRDAEASLAAVKSGEVDLHQLASTWAKAYAETTLEHARPEEPSWDEDFADVYHDLIHSPASETLLNLEHNYFVSISELIGERDVELKKLRERQGIEMEKVMQELGKSLTDQDVNSLAAQHFESQQDLENKWSNELKQSTAIQKQEYQEWVIKLHQDLKNPNNSSLSEEIKVQPSQFRESVEAIGRIYEEQRKLEESFTIHLGAQLKTMHNLRLLRADMLDFCKHKRNHRSGVKLHRLQTALSLYSTSLCGLVLLVDNRINSYSGIKRDFATVCQECTDFHFPRIEEQLEVVQQVVLYARTQRRSKLKESLDSGNQNGGNDDKTKNAERNYLNVLPGEFYITRHSNLSEIHVAFHLCVDDHVKSGNITARDPAIMGLRNILKVCCTHDITTISIPLLLVHDMSEEMTIPWCLRRAELVFKCVKGFMMEMASWDGGISRTVQFLVPQSISEEMFYQLSNMLPQIFRVSSTLTLTSKH

SEQ ID NO: 813386 - protein, 419 aa, Homo sapiens
MKKNRERFCNREREFVYKFKVGSQCLELRVPLKFPVQENASHLHGRLMLLHSLPCFIEKDLKEALTQFIEEESLSDYDRDAEASLAAVKSGEVDLHQLASTWAKAYAETTLEHARPEEPSWDEDFADVYHDLIHSPASETLLNLEHNYFVSISELIGERDVELKKLRERQGIEMEKVMQELGKSLTDQDVNSLAAQHFESQQDLENKWSNELKQSTAIQKQEYQEWVIKLHQDLKNPNNSSLSEEIKVQPSQFRESVEAIGRIYEEQRKLEESFTIHLGAQLKTMHNLRLLRADMLDFCKHKRNHRSGVKLHRLQTALSLYSTSLCGLVLLVDNRINSYSGIKRDFATVCQECTDFHFPRIEEQLEVVQQVVLYARTQRRSKLKESLDSGNQNGGNDDKTKNAERNYLNVLPGTTENTS

SEQ ID NO: 813387 - protein, 552 aa, Homo sapiens; identical to SEQ ID NO: 813385

SEQ ID NO: 813388 - protein, 528 aa, Homo sapiens
AVGVEKVCRQVSWFPSAGRADSSSERTAQDFGTRRDLKEALTQFIEEESLSDYDRDAEASLAAVKSGEVDLHQLASTWAKAYAETTLEHARPEEPSWDEDFADVYHDLIHSPASETLLNLEHNYFVSISELIGERDVELKKLRERQGIEMEKVMQELGKSLTDQDVNSLAAQHFESQQDLENKWSNELKQSTAIQKQEYQEWVIKLHQDLKNPNNSSLSEEIKVQPSQFRESVEAIGRIYEEQRKLEESFTIHLGAQLKTMHNLRLLRADMLDFCKHKRNHRSGVKLHRLQTALSLYSTSLCGLVLLVDNRINSYSGIKRDFATVCQECTDFHFPRIEEQLEVVQQVVLYARTQRRSKLKESLDSGNQNGGNDDKTKNAERNYLNVLPGEFYITRHSNLSEIHVAFHLCVDDHVKSGNITARDPAIMGLRNILKVCCTHDITTISIPLLLVHDMSEEMTIPWCLRRAELVFKCVKGFMMEMASWDGGISRTVQFLVPQSISEEMFYQLSNMLPQIFRVSSTLTLTSKH

SEQ ID NO: 813389 - protein, 268 aa, Homo sapiens
MHNLRLLRADMLDFCKHKRNHRSGVKLHRLQTALSLYSTSLCGLVLLVDNRINSYSGIKRDFATVCQECTDFHFPRIEEQLEVVQQVVLYARTQRRSKLKESLDSGNQNGGNDDKTKNAERNYLNVLPGEFYITRHSNLSEIHVAFHLCVDDHVKSGNITARDPAIMGLRNILKVCCTHDITTISIPLLLVHDMSEEMTIPWCLRRAELVFKCVKGFMMEMASWDGGISRTVQFLVPQSISEEMFYQLSNMLPQIFRVSSTLTLTSKH

SEQ ID NO: 813390 - protein, 552 aa, Homo sapiens; identical to SEQ ID NO: 813385

SEQ ID NO: 813391 - protein, 244 aa, Homo sapiens [sequence omitted]

SEQ ID NO: 813392 - protein, 168 aa, Homo sapiens
  misc_feature (7)..(7): Xaa can be any naturally occurring amino acid
RYPTASXVPTSTVPAECQRTSSRHFKEPARRGRKRRLRLRVLREERDFLRGCPVISGVAELLSGERVLYPNPVLLNPPTYFLSAPHTHKHRAAKNFHPPPPSLANFLPAFPELDDPRICKTGKKGRREGGQQRQDACFSLYQSRLKARQRAQGAGPTAAWMQSAALDA

SEQ ID NO: 813393 - protein, 1444 aa, Homo sapiens
MKNKGAKQKLKRKGAASAFGCDLTEYLESSGQDVPYVLKSCAEFIETHGIVDGIYRLSGVTSNIQRLRQEFGSDQCPDLTREVYLQDIHCVGSLCKLYFRELPNPLLTYELYEKFTEAVSHCPEEGQLARIQNVIQELPPSHYRTLEYLIRHLAHIASFSSKTNMHARNLALVWAPNLLRSKEIEATGCNGDAAFLAVRVQQVVIEFILNHVDQIFNNGAPGSLENDENRPIMKSLTLPALSLPMKLVSLEEAQARSLATNHPARKERRENSLPEIVPPMGTLFHTVLELPDNKRKLSSKSKKWKSIFNLGRSGSDSKSKLSRNGSVFVRGQRLSVEKATIRPAKSMDSLCSVPVEGKETKGNFNRTVTTGGFFIPATKMHSTGTGSSCDLTKQEGEWGQEGMPPGAEGGFDVSSDRSHLQGAQARPPPEQLKVFRPVEDPESEQTAPKMLGMFYTSNDSPSKSVFTSSLFQMEPSPRNQRKALNISEPFAVSVPLRVSAVISTNSTPCRTPPKELQSLSSLEEFSFHGSESGGWPEEEKPLGAETSAASVPKKAGLEDAKAVPEAPGTVECSKGLSQEPGAHLEEKKTPESSLSSQHLNELEKRPNPEKVVEEGREAGEMESSTLQESPRARAEAVLLHEMDEDDLANALIWPEIQQELKIIESEEELSSLPPPALKTSPIQPILESSLGPFIPSEPPGSLPCGSFPAPVSTPLEVWTRDPANQSTQGASTAASREKPEPEQGLHPDLASLAPLEIVPFEKASPQATVEVGGPGNLSPPLPPAPPPPTPLEESTPVLLSKGSPEREDSSRKLRTDLYIDQLKSQDSPEISSLCQGEEATPRHSDKQNSKNAASEGKGCGFPSPTREVEIVSQEEEDVTHSVQEPSDCDEDDTVTDIAQHGLEMVEPWEEPQWVTSPLHSPTLKDAHKAQVQGLQGHQLEKRLSHRPSLRQSHSLDSKPTVKSQWTLEVPSSSSCANLETERNSDPLQPQAPRREITGWDEKALRSFREFSGLKGAEAPPNQKGPSGVQPNPAETSPISLAEGKELGTHLGHSSPQIRQGGVPGPESSKESSPSVQDSTSPGEHPAKLQLKSTECGPPKGKNRPSSLNLDPAIPIADLFWFENVASFSSPGMQVSEPGDPKVTWMTSSYCKADPWRVYSQDPQDLDIVAHALTGRRNSAPVSVSAVRTSFMVKMCQARAVPVIPPKIQYTQIPQPLPSQSSGENGVQPLERSQEGPSSTSGTTQKPAKDDSPSSLESSKEEKPKQDPGAIKSSPVDATAPCMCEGPTLSPEPGSSNLLSTQDAVVQCRKRMSETEPSGDNLLSSKLERPSGGSKPFHRSRPGRPQSLILFSPPFPIMDHLPPSSTVTDSKVLLSPIRSPTQTVSPGLLCGELAENTWVTPEGVTLRNKMTIPKNGQRLETSTSCFYQPQRRSVILDGRSGRQIE

SEQ ID NO: 813394 - protein, 1444 aa, Homo sapiens; identical to SEQ ID NO: 813393

SEQ ID NO: 813395 - protein, 504 aa, Homo sapiens
LSGSVHERVHSSLQSISNGTTVNQWTLEVPSSSSCANLETERNSDPLQPQAPRREITGWDEKALRSFREFSGLKGAEAPPNQKGPSGVQPNPAETSPISLAEGKELGTHLGHSSPQIRQGGVPGPESSKESSPSVQDSTSPGEHPAKLQLKSTECGPPKGKNRPSSLNLDPAIPIADLFWFENVASFSSPGMQVSEPGDPKVTWMTSSYCKADPWRVYSQDPQDLDIVAHALTGRRNSAPVSVSAVRTSFMVKMCQARAVPVIPPKIQYTQIPQPLPSQSSGENGVQPLERSQEGPSSTSGTTQKPAKDDSPSSLESSKEEKPKQDPGAIKSSPVDATAPCMCEGPTLSPEPGSSNLLSTQDAVVQCRKRMSETEPSGDNLLSSKLERPSGGSKPFHRSRPGRPQSLILFSPPFPIMDHLPPSSTVTDSKVLLSPIRSPTQTVSPGLLCGELAENTWVTPEGVTLRNKMTIPKNGQRLETSTSCFYQPQRRSVILDGRSGRQIE

SEQ ID NO: 813396 - protein, 1444 aa, Homo sapiens; identical to SEQ ID NO: 813393

SEQ ID NO: 813397 - protein, 1444 aa, Homo sapiens; identical to SEQ ID NO: 813393

SEQ ID NO: 813398 - protein, 1444 aa, Homo sapiens; identical to SEQ ID NO: 813393

SEQ ID NO: 813399 - protein, 1438 aa, Homo sapiens
MKNKGAKQKLKRKGAASAFGCDLTEYLESSGQDVPYVLKSCAEFIETHGIVDGIYRLSGVTSNIQRLRQEFGSDQCPDLTREVYLQDIHCVGSLCKLYFRELPNPLLTYELYEKFTEAVSHCPEEGQLARIQNVIQELPPSHYRTLEYLIRHLAHIASFSSKTNMHARNLALVWAPNLLRSKEIEATGCNGDAAFLAVRVQQVVIEFILNHVDQIFNNGAPGSLENDENRPIMKSLTLPALSLPMKLVSLEEAQARSLATNHPARKERRENSLPEIVPPMGTLFHTVLELPDNKRKLSSKSKKWKSIFNLGRSGSDSKSKLSRNGSVFVRGQRLSVEKATIRPAKSMDSLCSVPVEGKETKGNFNRTVTTGGFFIPATKMHSTGTGSSCDLTKQEGEWGQEGMPPGAEGGFDVSSDRSHLQGAQARPPPEQLKVFRPVEDPESEQTAPKMLGMFYTSNDSPSKSVFTSSLFQMEPSPRNQRKALNISEPFAVSVPLRVSAVISTNSTPCRTPPKELQSLSSLEEFSFHGSESGGWPEEEKPLGAETSAASVPKKAGLEDAKAVPEAPGTVECSKGLSQEPGAHLEEKKTPESSLSSQHLNELEKRPNPEKVVEEGREAGEMESSTLQESPRARAEAVLLHEMDEDDLANALIWPEIQQELKIIESEEELSSLPPPALKTSPIQPILESSLGPFIPSEPPGSLPCGSFPAPVSTPLEVWTRDPANQSTQGASTAASREKPEPEQGLHPDLASLAPLEIVPFEKASPQATVEVGGPGNLSPPLPPAPPPPTPLEESTPVLLSKGSPEREDSSRKLRTDLYIDQLKSQDSPEISSLCQGEEATPRHSDKQNSKNAASEGKGCGFPSPTREVEIVSQEEEDVTHSVQEPSDCDEDDTVTDIAQHGLEMVEPWEEPQWVTSPLHSPTLKDAHKAQVQGLQGHQLEKRLSHRPSLRQSHSLDSKPTVKSQWTLEVPSSSSCANLETERNSDPLQPQAPRREITGWDEKALRSFREFSGLKGAEAPPNQKGPSGVQPNPAETSPISLAEGKELGTHLGHSSPQIRQGGVPGPESSKESSPSVQDSTSPGEHPAKLQLKSTECGPPKGKNRPSSLNLDPAIPIADLFWFENVASFSSPGMQVSEPGDPKVTWMTSSYCKADPWRVYSQDPQDLDIVAHALTGRRNSAPVSVSAVRTSFMVKMCQARAVPVIPPKIQYTQIPQPLPSQSSGENGVQPLERSQEGPSSTSGTTQKPAKDDSPSSLESSKEEKPKQDPGAIKSSPVDATAPCMCEGPTLSPEPGSSNLLSTQDAVVQCRKRMSETEPSGDNLLSSKLERPSGGSKPFHRSRPGRPQSLILFSPPFPIMDHLPPSSTVTDSKVLLSPIRSPTQTVSPGLLCGELAENTWVTPEGVTLRNKMTIPKNGQCGERVCGESQCGEKCGESQCEE

SEQ ID NO: 813400 - protein, 617 aa, Homo sapiens
MDLKTAVFNAARDGKLRLLTKLLASKSKEEVSSLISEKTNGATPLLMAARYGHLDMVEFLLEQCSASIEVGGSVNFDGETIEGAPPLWAASAAGHLKVVQSLLNHGASVNNTTLTNSTPLRAACFDGHLEIVKYLVEHKADLEVSNRHGHTCLMISCYKGHKEIAQYLLEKGADVNRKSVKGNTALHDCAESGSLDIMKMLLMYCAKMEKDGYGMTPLLSASVTGHTNIVDFLTHHAQTSKTERINALELLGATFVDKKRDLLGALKYWKKAMNMRYSDRTNIISKPVPQTLIMAYDYAKEVNSAEELEGLIADPDEMRMQALLIRERILGPSHPDTSYYIRYRGAVYADSGNFKRCINLWKYALDMQQSNLDPLSPMTASSLLSFAELFSFMLQDRAKGLLGTTVTFDDLMGILCKSVLEIERAIKQTQCPADPLQLNKALSIILHLICLLEKVPCTLEQDHFKKQTIYRFLKLHPRGKNNFSPLHLAVDKNTTCVGRYPVCKFPSLQVTAILIECGADVNVRDSDDNSPLHIAALNNHPDIMNLLIKSGAHFDATNLHKQTASDLLDEKEIAKNLIQPINHTTLQCLAARVIVNHRIYYKGHIPEKLETFVSLHR

SEQ ID NO: 813401 - protein, 617 aa, Homo sapiens; identical to SEQ ID NO: 813400

SEQ ID NO: 813402 - protein, 617 aa, Homo sapiens; identical to SEQ ID NO: 813400

SEQ ID NO: 813403 - protein, 617 aa, Homo sapiens; identical to SEQ ID NO: 813400

SEQ ID NO: 813404 - protein, 550 aa, Homo sapiens
MTGDKGPQRLSGSSYGSISSPTSPTSPGPQQAPPRETYLSEKIPIPDTKPGTFSLRKLWAFTGPGFLMSIAFLDPGNIESDLQAGAVAGFKLLWVLLWATVLGLLCQRLAARLGVVTGKDLGEVCHLYYPKVPRTVLWLTIELAIVGSDMQEVIGTAIAFNLLSAGRIPLWGGVLITIVDTFFFLFLDNYGLRKLEAFFGLLITIMALTFGYEYVVARPEQGALLRGLFLPSCPGCGHPELLQAVGIVGAIIMPHNIYLHSALVKSREIDRARRADIREANMYFLIEATIALSVSFIINLFVMAVFGQAFYQKTNQAAFNICANSSLHDYAKIFPMNNATVAVDIYQGGVILGCLFGPAALYIWAIGLLAAGQSSTMTGTYAGQFVMEGFLRLRWSRFARVLLTRSCAILPTVLVAVFRDLRDLSGLNDLLNVLQSLLLPFAVLPILTFTSMPTLMQEFANGLLNKVVTSSIMVLVCAINLYFVVSYLPSLPHPAYFGLAALLAAAYLGLSTYLVWTCCLAHGATFLAHSSHHHFLYGLLEEDQKGETSG

SEQ ID NO: 813405 - protein, 483 aa, Homo sapiens
MSIAFLDPGNIESDLQAGAVAGFKLLWVLLWATVLGLLCQRLAARLGVVTGKDLGEVCHLYYPKVPRTVLWLTIELAIVGSDMQEVIGTAIAFNLLSAGRIPLWGGVLITIVDTFFFLFLDNYGLRKLEAFFGLLITIMALTFGYEYVVARPEQGALLRGLFLPSCPGCGHPELLQAVGIVGAIIMPHNIYLHSALVKSREIDRARRADIREANMYFLIEATIALSVSFIINLFVMAVFGQAFYQKTNQAAFNICANSSLHDYAKIFPMNNATVAVDIYQGGVILGCLFGPAALYIWAIGLLAAGQSSTMTGTYAGQFVMEGFLRLRWSRFARVLLTRSCAILPTVLVAVFRDLRDLSGLNDLLNVLQSLLLPFAVLPILTFTSMPTLMQEFANGLLNKVVTSSIMVLVCAINLYFVVSYLPSLPHPAYFGLAALLAAAYLGLSTYLVWTCCLAHGATFLAHSSHHHFLYGLLEEDQKGETSG

SEQ ID NO: 813406 - protein, 550 aa, Homo sapiens; identical to SEQ ID NO: 813404

SEQ ID NO: 813407 - protein, 550 aa, Homo sapiens; identical to SEQ ID NO: 813404

SEQ ID NO: 813408 - protein, 648 aa, Homo sapiens
MTGDKGPQRLSGSSYGSISSPTSPTSPGPQQAPPRETYLSEKIPIPDTKPLLWVLLWATVLGLLCQRLAARLGVVTGKDLGEVCHLYYPKVPRTVLWLTIELAIVGSDMQEVIGTAIAFNLLSAGRYHPSVPQLFRPGREQLLLLPPLTSPSQSLFYPAVPSEAGLLPCFPKCKVTCLKSHRCESCRTLGLQPQTPCCAGCQVSPLALPCLDCSMPHSHSPCPSCLGALRVLLPGGQIPVSSPEAPKELETPGPGWADPGHSGFRIPLWGGVLITIVDTFFFLFLDNYGLRKLEAFFGLLITIMALTFGYEYVVARPEQGALLRGLFLPSCPGCGHPELLQAVGIVGAIIMPHNIYLHSALVKSREIDRARRADIREANMYFLIEATIALSVSFIINLFVMAVFGQAFYQKTNQAAFNICANSSLHDYAKIFPMNNATVAVDIYQGGVILGCLFGPAALYIWAIGLLAAGQSSTMTGTYAGQFVMEGFLRLRWSRFARVLLTRSCAILPTVLVAVFRDLRDLSGLNDLLNVLQSLLLPFAVLPILTFTSMPTLMQEFANGLLNKVVTSSIMVLVCAINLYFVVSYLPSLPHPAYFGLAALLAAAYLGLSTYLVWTCCLAHGATFLAHSSHHHFLYGLLEEDQKGETSG

SEQ ID NO: 813409 - protein, 345 aa, Homo sapiens
MALTFGYEYVVARPEQGALLRGLFLPSCPGCGHPELLQAVGIVGAIIMPHNIYLHSALVKSREIDRARRADIREANMYFLIEATIALSVSFIINLFVMAVFGQAFYQKTNQAAFNICANSSLHDYAKIFPMNNATVAVDIYQGGVILGCLFGPAALYIWAIGLLAAGQSSTMTGTYAGQFVMEGFLRLRWSRFARVLLTRSCAILPTVLVAVFRDLRDLSGLNDLLNVLQSLLLPFAVLPILTFTSMPTLMQEFANGLLNKVVTSSIMVLVCAINLYFVVSYLPSLPHPAYFGLAALLAAAYLGLSTYLVWTCCLAHGATFLAHSSHHHFLYGLLEEDQKGETSG

SEQ ID NO: 813410 - protein, 575 aa, Homo sapiens
MTGDKGPQRLSGSSYGSISSPTSPTSPGPQQAPPRETYLSEKIPIPDTKPGTFSLRKLWAFTGPGFLMSIAFLDPGNIESDLQAGAVAGFKLLWVLLWATVLGLLCQRLAARLGVVTGKDLGEVCHLYYPKSESRSVAQSGVQWCDVSSLQTSTSQVPRTVLWLTIELAIVGSDMQEVIGTAIAFNLLSAGRIPLWGGVLITIVDTFFFLFLDNYGLRKLEAFFGLLITIMALTFGYEYVVARPEQGALLRGLFLPSCPGCGHPELLQAVGIVGAIIMPHNIYLHSALVKSREIDRARRADIREANMYFLIEATIALSVSFIINLFVMAVFGQAFYQKTNQAAFNICANSSLHDYAKIFPMNNATVAVDIYQGGVILGCLFGPAALYIWAIGLLAAGQSSTMTGTYAGQFVMEGFLRLRWSRFARVLLTRSCAILPTVLVAVFRDLRDLSGLNDLLNVLQSLLLPFAVLPILTFTSMPTLMQEFANGLLNKVVTSSIMVLVCAINLYFVVSYLPSLPHPAYFGLAALLAAAYLGLSTYLVWTCCLAHGATFLAHSSHHHFLYGLLEEDQKGETSG

SEQ ID NO: 813411 - protein, 553 aa, Homo sapiens
MTGDKGPQRLSGSSYGSISSPTSPTSPGPQQAPPRETYLSEKIPIPDTKPGTFSLRKLWAFTGPGFLMSIAFLDPGNIESDLQAGAVAGFKLLWVLLWATVLGLLCQRLAARLGVVTGKDLGEVCHLYYPKVPRTVLWLTIELAIVGSDMQEVIGTAIAFNLLSAGRIPLWGGVLITIVDTFFFLFLDNYGLGESWKAFVGTSLQPLLALNLGAMQYVVARPEQGALLRGLFLPSCPGCGHPELLQAVGIVGAIIMPHNIYLHSALVKSREIDRARRADIREANMYFLIEATIALSVSFIINLFVMAVFGQAFYQKTNQAAFNICANSSLHDYAKIFPMNNATVAVDIYQGGVILGCLFGPAALYIWAIGLLAAGQSSTMTGTYAGQFVMEGFLRLRWSRFARVLLTRSCAILPTVLVAVFRDLRDLSGLNDLLNVLQSLLLPFAVLPILTFTSMPTLMQEFANGLLNKVVTSSIMVLVCAINLYFVVSYLPSLPHPAYFGLAALLAAAYLGLSTYLVWTCCLAHGATFLAHSSHHHFLYGLLEEDQKGETSG

SEQ ID NO: 813412 - protein, 114 aa, Homo sapiens
MRRISSFLKGQRCEWVPQGEKRWDRSGATWASAAEGTWARGPPASSGFGTGEDGSMPAEGGDGWGTFSEERHLPDPLASWKCPRCTPYTPLLALSASPLPGSVLQVGEGGKVPN

SEQ ID NO: 813413 - protein, 114 aa, Homo sapiens; identical to SEQ ID NO: 813412

SEQ ID NO: 813414 - protein, 326 aa, Homo sapiens [sequence omitted]

SEQ ID NO: 813415 - protein, 141 aa, Homo sapiens
MQLVRSGSYGWSRGTRAAMASHVECRPLGVFECELCTLTAPYSYVGQKPPNTQSMVLLEESYVMKDPFTSDKDRFLVLGSCCSLCSRLVCVGPECSLFYSKRFCLPCVRENINAFPQEIRQDLEKRKAPSKRTPSQPGSRT

SEQ ID NO: 813416 - protein, 237 aa, Homo sapiens
DWGERAVALPCAASGCLPLAGTEFRAGVACWVPSARSRRSRSQLWGRDREAGCGPHGTVPPDLGQRWGERGQAEARGDHQHPRTLSAVPVHRRRPQEPRQGPRTPRRAEEKRDQMASHVECRPLGVFECELCTLTAPYSYVGQKPPNTQSMVLLEESYVMKDPFTSDKDRFLVLGSCCSLCSRLVCVGPECSLFYSKRFCLPCVRENINAFPQEIRQDLEKRKAPSKRTPSQPGSRT

SEQ ID NO: 813417 - protein, 190 aa, Homo sapiens
APWTRSRGTRAAPPGGKLCHEGSLHLRQGQIPGPRLVLQFVQQAGVCGPGMQFILLQEILPPLCPGEHQCFSSGNSARLGEKESSIKEDPQPARFSDVSATGARSSGGTLHRAPGPACARDAAELGAAMPGLVSGPLGAALQPRGAGVQLGAATGPGSCSKRVVQRQMPDKTQPGTRPGPPTCPSGPRPE

SEQ ID NO: 813418 - protein, 196 aa, Homo sapiens
MQLVRSGSYGWSRGTRAAMASHVECRPLGVFECELCTLTAPYSYVGQKPPNTQSMGMQFILLQEILPPLCPGEHQCFSSGNSARLGEKESSIKEDPQPARFSDVSATGARSSGGTLHRAPGPACARDAAELGAAMPGLVSGPLGAALQPRGAGVQLGAATGPGSCSKRVVQRQMPDKTQPGTRPGPPTCPSGPRPE

SEQ ID NO: 813419 - protein, 257 aa, Homo sapiens
MASHVECRPLGVFECELCTLTAPYSYVGQKPPNTQSMVLLEESYVMKDPFTSDKDRFLVLGSCCSLCSRLVCVGPMFLEGSPGEGTVLSGALVVCQVLCLGPVLLLRLHSVLPLSSGMQFILLQEILPPLCPGEHQCFSSGNSARLGEKESSIKEDPQPARFSDVSATGARSSGGTLHRAPGPACARDAAELGAAMPGLVSGPLGAALQPRGAGVQLGAATGPGSCSKRVVQRQMPDKTQPGTRPGPPTCPSGPRPE

SEQ ID NO: 813420 - protein, 175 aa, Homo sapiens
MQLVRSGSYGWSRGTRAAMASHVECRPLGVFECELCTLTAPYSYVGQKPPNTQSMVLLEESYVMKDPFTSDKDRFLVLGSCCSLCSRLVCVGPECSLFYSKRFCLPCVRENINAFPQEIRQDLEKRKAPSKRTPSQPGSRTTSSCLEKESSTETFGYPTFSLDTWPGNSWGLLGS

SEQ ID NO: 813421 - protein, 237 aa, Homo sapiens; identical to SEQ ID NO: 813416

SEQ ID NO: 813422 - protein, 346 aa, Homo sapiens
MAASGKLSTCRLPPLPTIREIIKLLRLQAAKQLSQNFLLDLRLTDKIVRKAGNLTNAYVYEVGPGPGGITRSILNADVAELLVVEKDTRFIPGLQMLSDAAPGKLRIVHGDVLTFKVEKAFSESLKRPWEDDPPNVHIIGNLPFSVSTPLIIKWLENISCRDGPFVYGRTQMTLTFQKEVAERLAANTGSKQRSRLSVMAQYLCNVRHIFTIPGQAFVPKPEVDVGVVHFTPLIQPKIEQPFKLVEKVVQNVFQFRRKYCHRGLRMLFPEAQRLESTGRLLELADIDPTLRPRQLSISHFKSLCDVYRKMCDEDPQLFAYNFREELKRRKSKNEEKEEDDAENYRL

SEQ ID NO: 813423 - protein, 288 aa, Homo sapiens
MAASGKLSTCRLPPLPTIREIIKLLRLQAAKQLSQNFLLDLRLTDKIVRKAGNLTNAYVYEVGPGPGGITRSILNADVAELLVVEKDTRFIPGLQMLSDAAPGKLRIVHGDVLTFKVEKAFSESLKRPWEDDPPNVHIIGNLPFSVSTPLIIKWLENISCRDGPFVYGRTQMTLTFQKEVAERLAANTGSKQRSRLSVMAQYLCNVRHIFTIPGQAFVPKPEVDVGVVHFTPLIQPKIEQPFKLVEKVVQNVFQFRRKYCHRGLREELKRRKSKNEEKEEDDAENYRL

SEQ ID NO: 813424 - protein, 103 aa, Homo sapiens
MAASGKLSTCRLPPLPTIREIIKLLRLQAAKQLSQNFLLDLRLTDKIVRKAGNLTNAYVYEVGPGPGGITRSILNADVAELLVVEKDTRFIPGLQVRCLKCLL

SEQ ID NO: 813425 - protein, 267 aa, Homo sapiens
MAASGKLSTCRLPPLPTIREIIKLLRLQAAKQLSQNFLLDLRLTDKIVRKAGNLTNAYVYEVGPGPGGITRSILNADVAELLVVEKDTRFIPGLQMLSDAAPGKLRIVHGDVLTFKVEKAFSESLKRPWEDDPPNVHIIGNLPFSVSTPLIIKWLENISCRDGPFVYGRTQMTLTFQKEVAERLAANTGSKQRSRLSVMAQYLCNVRHIFTIPGQAFVPKPESCLCLSGHLKLLLESSVAFQTTLMNSVQLINQCLPKISGVSIWEV

SEQ ID NO: 813426 - protein, 407 aa, Homo sapiens
MAASGKLSTCRLPPLPTIREIIKLLRLQAAKQLSQNFLLDLRLTGGWLSSAPRMSPQCPWGRGPGGLARPRGRVSRHWRATGFWSGPSTSLYQKNSGPTAQETRDNKIVRKAGNLTNAYVYEVGPGPGGITRSILNADVAELLVVEKDTRFIPGLQMLSDAAPGKLRIVHGDVLTFKVEKAFSESLKRPWEDDPPNVHIIGNLPFSVSTPLIIKWLENISCRDGPFVYGRTQMTLTFQKEVAERLAANTGSKQRSRLSVMAQYLCNVRHIFTIPGQAFVPKPEVDVGVVHFTPLIQPKIEQPFKLVEKVVQNVFQFRRKYCHRGLRMLFPEAQRLESTGRLLELADIDPTLRPRQLSISHFKSLCDVYRKMCDEDPQLFAYNFREELKRRKSKNEEKEEDDAENYRL

SEQ ID NO: 813427 - protein, 382 aa, Homo sapiens
MAASGKLSTCRLPPLPTIREIIKLLRLQAAKQLSQNFLLDLRLTDGVSLLLPKLECNGMISAHCNLRLPGSSDSLCLSLPDKIVRKAGNLTNAYVYEVGPGPGGITRSILNADVAELLVVEKDTRFIPGLQMLSDAAPGKLRIVHGDVLTFKVEKAFSESLKRPWEDDPPNVHIIGNLPFSVSTPLIIKWLENISCRDGPFVYGRTQMTLTFQKEVAERLAANTGSKQRSRLSVMAQYLCNVRHIFTIPGQAFVPKPEVDVGVVHFTPLIQPKIEQPFKLVEKVVQNVFQFRRKYCHRGLRMLFPEAQRLESTGRLLELADIDPTLRPRQLSISHFKSLCDVYRKMCDEDPQLFAYNFREELKRRKSKNEEKEEDDAENYRL

SEQ ID NO: 813428 - protein, 251 aa, Homo sapiens
MLSDAAPGKLRIVHGDVLTFKVEKAFSESLKRPWEDDPPNVHIIGNLPFSVSTPLIIKWLENISCRDGPFVYGRTQMTLTFQKEVAERLAANTGSKQRSRLSVMAQYLCNVRHIFTIPGQAFVPKPEVDVGVVHFTPLIQPKIEQPFKLVEKVVQNVFQFRRKYCHRGLRMLFPEAQRLESTGRLLELADIDPTLRPRQLSISHFKSLCDVYRKMCDEDPQLFAYNFREELKRRKSKNEEKEEDDAENYRL

SEQ ID NO: 813429 - protein, 172 aa, Homo sapiens
MLSDAAPGKLRIVHGDVLTFKVEKAFSESLKRPWEDDPPNVHIIGNLPFSVSTPLIIKWLENISCRDGPFVYGRTQMTLTFQKEVAERLAANTGSKQRSRLSVMAQYLCNVRHIFTIPGQAFVPKPESCLCLSGHLKLLLESSVAFQTTLMNSVQLINQCLPKISGVSIWEV

SEQ ID NO: 813430 - protein, 931 aa, Homo sapiens
MPPLKSPAAFHEQRRSLERARTEDYLKRKIRSRPERSELVRMHILEETSAEPSLQAKQLKLKRARLADDLNEKIAQRPGPMELVEKNILPVESSLKEAIIVGQVNYPKVADSSSFDEDSSDALSPEQPASHESQGSVPSPLEARVSEPLLSATSASPTQVVSQLPMGRDSREMLFLAEQPPLPPPPLLPPSLTNGTTIPTAKSTPTLIKQSQPKSASEKSQRSKKAKELKPKVKKLKYHQYIPPDQKQDRGAPPMDSSYAKILQQQQLFLQLQILNQQQQQHHNYQAILPAPPKSAGEALGSSGTPPVRSLSTTNSSSSSGAPGPCGLARQNSTSLTGKPGALPANLDDMKVAELKQELKLRSLPVSGTKTELIERLRAYQDQISPVPGAPKAPAATSILHKAGEVVVAFPAARLSTGPALVAAGLAPAEVVVATVASSGVVKFGSTGSTPPVSPTPSERSLLSTGDENSTPGDTFGEMVTSPLTQLTLQASPLQILVKEEGPRAGSCCLSPGGRAELEGRDKDQMLQEKDKQIEALTRMLRQKQQLVERLKLQLEQEKRAQQPAPAPAPLGTPVKQENSFSSCQLSQQPLGPAHPFNPSLAAPATNHIDPCAVAPGPPSVVVKQEALQPEPEPVPAPQLLLGPQGPSLIKGVAPPTLITDSTGTHLVLTVTNKNADSPGLSSGSPQQPSSQPGSPAPAPSAQMDLEHPLQPLFGTPTSLLKKEPPGYEEAMSQQPKQQENGSSSQQMDDLFDILIQSGEISADFKEPPSLPGKEKPSPKTVCGSPLAAQPSPSAELPQAAPPPPGSPSLPGRLEDFLESSTGLPLLTSGHDGPEPLSLIDDLHSQMLSSTAILDHPPSPMDTSELHFVPEPSSTMGLDLADGHLDSMDWLELSSGGPVLSLAPLSTTAPSLFSTDFLDGHDLQLHWDSCL

SEQ ID NO: 813431 - protein, 1839 aa, Homo sapiens
MKGKERSPVKAKRSRGGEDSTSRGERSKKLGGSGGSNGSSSGKTDSGGGSRRSLHLDKSSSRGGSREYDTGGGSSSSRLHSYSSPSTKNSSGGGESRSSSRGGGGESRSSGAASSAPGGGDGAEYKTLKISELGSQLSDEAVEDGLFHEFKRFGDVSVKISHLSGSGSGDERVAFVNFRRPEDARAAKHARGRLVLYDRPLKIEAVYVSRRRSRSPLDKDTYPPSASVVGASVGGHRHPPGGGGGQRSLSPGGAALGYRDYRLQQLALGRLPPPPPPPLPRDLERERDYPFYERVRPAYSLEPRVGAGAGAAPFREVDEISPEDDQRANRTLFLGNLDITVTESDLRRAFDRFGVITEVDIKRPSRGQTSTYGFLKFENLDMSHRAKLAMSGKIIIRNPIKIGYGKATPTTRLWVGGLGPWVPLAALAREFDRFGTIRTIDYRKGDSWAYIQYESLDAAHAAWTHMRGFPLGGPDRRLRVDFADTEHRYQQQYLQPLPLTHYELVTDAFGHRAPDPLRGARDRTPPLLYRDRDRDLYPDSDWVPPPPPVRERSTRTAATSVPAYEPLDSLDRRRDGWSLDRDRGDRDLPSSRDQPRKRRLPEESGGRHLDRSPESDRPRKRHCAPSPDRSPELSSSRDRYNSDNDRSSRLLLERPSPIRDRRGSLEKSQGDKRDRKNSASAERDRKHRTTAPTEGKSPLKKEDRSDGSAPSTSTASSKLKSPSQKQDGGTAPVASASPKLCLAWQGMLLLKNSNFPSNMHLLQGDLQVASSLLVEGSTGGKVAQLKITQRLRLDQPKLDEVTRRIKVAGPNGYAILLAVPGSSDSRSSSSSAASDTATSTQRPLRNLVSYLKQKQAAGVISLPVGGNKDKENTGVLHAFPPCEFSQQFLDSPAKALAKSEEDYLVMIIVRALKSPAAFHEQRRSLERARTEDYLKRKIRSRPERSELVRMHILEETSAEPSLQAKQLKLKRARLADDLNEKIAQRPGPMELVEKNILPVESSLKEAIIVGQVNYPKVADSSSFDEDSSDALSPEQPASHESQGSVPSPLEARVSEPLLSATSASPTQVVSQLPMGRDSREMLFLAEQPPLPPPPLLPPSLTNGTTIPTAKSTPTLIKQSQPKSASEKSQRSKKAKELKPKVKKLKYHQYIPPDQKQDRGAPPMDSSYAKILQQQQLFLQLQILNQQQQQHHNYQAILPAPPKSAGEALGSSGTPPVRSLSTTNSSSSSGAPGPCGLARQNSTSLTGKPGALPANLDDMKVAELKQELKLRSLPVSGTKTELIERLRAYQDQISPVPGAPKAPAATSILHKAGEVVVAFPAARLSTGPALVAAGLAPAEVVVATVASSGVVKFGSTGSTPPVSPTPSERSLLSTGDENSTPGDTFGEMVTSPLTQLTLQASPLQILVKEEGPRAGSCCLSPGGRAELEGRDKDQMLQEKDKQIEALTRMLRQKQQLVERLKLQLEQEKRAQQPAPAPAPLGTPVKQENSFSSCQLSQQPLGPAHPFNPSLAAPATNHIDPCAVAPGPPSVVVKQEALQPEPEPVPAPQLLLGPQGPSLIKGVAPPTLITDSTGTHLVLTVTNKNADSPGLSSGSPQQPSSQPGSPAPAPSAQMDLEHPLQPLFGTPTSLLKKEPPGYEEAMSQQPKQQENGSSSQQMDDLFDILIQSGEISADFKEPPSLPGKEKPSPKTVCGSPLAAQPSPSAELPQAAPPPPGSPSLPGRLEDFLESSTGLPLLTSGHDGPEPLSLIDDLHSQMLSSTAILDHPPSPMDTSELHFVPEPSSTMGLDLADGHLDSMDWLELSSGGPVLSLAPLSTTAPSLFSTDFLDGHDLQLHWDSCL

SEQ ID NO: 813432 - protein, 958 aa, Homo sapiens
MRREGSTVLQLKLQQRRTREELVSQGIMPPLKSPAAFHEQRRSLERARTEDYLKRKIRSRPERSELVRMHILEETSAEPSLQAKQLKLKRARLADDLNEKIAQRPGPMELVEKNILPVESSLKEAIIVGQVNYPKVADSSSFDEDSSDALSPEQPASHESQGSVPSPLEARVSEPLLSATSASPTQVVSQLPMGRDSREMLFLAEQPPLPPPPLLPPSLTNGTTIPTAKSTPTLIKQSQPKSASEKSQRSKKAKELKPKVKKLKYHQYIPPDQKQDRGAPPMDSSYAKILQQQQLFLQLQILNQQQQQHHNYQAILPAPPKSAGEALGSSGTPPVRSLSTTNSSSSSGAPGPCGLARQNSTSLTGKPGALPANLDDMKVAELKQELKLRSLPVSGTKTELIERLRAYQDQISPVPGAPKAPAATSILHKAGEVVVAFPAARLSTGPALVAAGLAPAEVVVATVASSGVVKFGSTGSTPPVSPTPSERSLLSTGDENSTPGDTFGEMVTSPLTQLTLQASPLQILVKEEGPRAGSCCLSPGGRAELEGRDKDQMLQEKDKQIEALTRMLRQKQQLVERLKLQLEQEKRAQQPAPAPAPLGTPVKQENSFSSCQLSQQPLGPAHPFNPSLAAPATNHIDPCAVAPGPPSVVVKQEALQPEPEPVPAPQLLLGPQGPSLIKGVAPPTLITDSTGTHLVLTVTNKNADSPGLSSGSPQQPSSQPGSPAPAPSAQMDLEHPLQPLFGTPTSLLKKEPPGYEEAMSQQPKQQENGSSSQQMDDLFDILIQSGEISADFKEPPSLPGKEKPSPKTVCGSPLAAQPSPSAELPQAAPPPPGSPSLPGRLEDFLESSTGLPLLTSGHDGPEPLSLIDDLHSQMLSSTAILDHPPSPMDTSELHFVPEPSSTMGLDLADGHLDSMDWLELSSGGPVLSLAPLSTTAPSLFSTDFLDGHDLQLHWDSCL

SEQ ID NO: 813433 - protein, 881 aa, Homo sapiens
MPPLKSPAAFHEQRRSLERARTEDYLKRKIRSRPERSELVRMHILEETSAEPSLQAKQLKLKRARLADDLNEKIAQRPGPMELVEKNILPVESSLKEAIIVGQVNYPKVADSSSFDEDSSDALSPEQPASHESQGSVPSPLEARVSEPLLSATSASPTQQSQPKSASEKSQRSKKAKELKPKVKKLKYHQYIPPDQKQDRGAPPMDSSYAKILQQQQLFLQLQILNQQQQQHHNYQAILPAPPKSAGEALGSSGTPPVRSLSTTNSSSSSGAPGPCGLARQNSTSLTGKPGALPANLDDMKVAELKQELKLRSLPVSGTKTELIERLRAYQDQISPVPGAPKAPAATSILHKAGEVVVAFPAARLSTGPALVAAGLAPAEVVVATVASSGVVKFGSTGSTPPVSPTPSERSLLSTGDENSTPGDTFGEMVTSPLTQLTLQASPLQILVKEEGPRAGSCCLSPGGRAELEGRDKDQMLQEKDKQIEALTRMLRQKQQLVERLKLQLEQEKRAQQPAPAPAPLGTPVKQENSFSSCQLSQQPLGPAHPFNPSLAAPATNHIDPCAVAPGPPSVVVKQEALQPEPEPVPAPQLLLGPQGPSLIKGVAPPTLITDSTGTHLVLTVTNKNADSPGLSSGSPQQPSSQPGSPAPAPSAQMDLEHPLQPLFGTPTSLLKKEPPGYEEAMSQQPKQQENGSSSQQMDDLFDILIQSGEISADFKEPPSLPGKEKPSPKTVCGSPLAAQPSPSAELPQAAPPPPGSPSLPGRLEDFLESSTGLPLLTSGHDGPEPLSLIDDLHSQMLSSTAILDHPPSPMDTSELHFVPEPSSTMGLDLADGHLDSMDWLELSSGGPVLSLAPLSTTAPSLFSTDFLDGHDLQLHWDSCL

SEQ ID NO: 813434 - protein, 904 aa, Homo sapiens
LGTIPSLGNEELVRLYILEETSAEPSLQAKQLKLKRARLADDLNEKIAQRPGPMELVEKNILPVESSLKEAIIVGQVNYPKVADSSSFDEDSSDALSPEQPASHESQGSVPSPLEARVSEPLLSATSASPTQVVSQLPMGRDSREMLFLAEQPPLPPPPLLPPSLTNGTTIPTAKSTPTLIKQSQPKSASEKSQRSKKAKELKPKVKKLKYHQYIPPDQKQDRGAPPMDSSYAKILQQQQLFLQLQILNQQQQQHHNYQAILPAPPKSAGEALGSSGTPPVRSLSTTNSSSSSGAPGPCGLARQNSTSLTGKPGALPANLDDMKVAELKQELKLRSLPVSGTKTELIERLRAYQDQISPVPGAPKAPAATSILHKAGEVVVAFPAARLSTGPALVAAGLAPAEVVVATVASSGVVKFGSTGSTPPVSPTPSERSLLSTGDENSTPGDTFGEMVTSPLTQLTLQASPLQILVKEEGPRAGSCCLSPGGRAELEGRDKDQMLQEKDKQIEALTRMLRQKQQLVERLKLQLEQEKRAQQPAPAPAPLGTPVKQENSFSSCQLSQQPLGPAHPFNPSLAAPATNHIDPCAVAPGPPSVVVKQEALQPEPEPVPAPQLLLGPQGPSLIKGVAPPTLITDSTGTHLVLTVTNKNADSPGLSSGSPQQPSSQPGSPAPAPSAQMDLEHPLQPLFGTPTSLLKKEPPGYEEAMSQQPKQQENGSSSQQMDDLFDILIQSGEISADFKEPPSLPGKEKPSPKTVCGSPLAAQPSPSAELPQAAPPPPGSPSLPGRLEDFLESSTGLPLLTSGHDGPEPLSLIDDLHSQMLSSTAILDHPPSPMDTSELHFVPEPSSTMGLDLADGHLDSMDWLELSSGGPVLSLAPLSTTAPSLFSTDFLDGHDLQLHWDSCL

SEQ ID NO: 813435 - protein, 931 aa, Homo sapiens; identical to SEQ ID NO: 813430

SEQ ID NO: 813436 - protein, 256 aa, Homo sapiens
PPGHWSSPCSPVQPSSQPGSPAPAPSAQMDLEHPLQPLFGTPTSLLKKEPPGYEEAMSQQPKQQENGSSSQQMDDLFDILIQSGEISADFKEPPSLPGKEKPSPKTVCGSPLAAQPSPSAELPQAAPPPPGSPSLPGRLEDFLESSTGLPLLTSGHDGPEPLSLIDDLHSQMLSSTAILDHPPSPMDTSELHFVPEPSSTMGLDLADGHLDSMDWLELSSGGPVLSLAPLSTTAPSLFSTDFLDGHDLQLHWDSCL

SEQ ID NO: 813437 - protein, 811 aa, Homo sapiens
MPPLKSPAAFHEQRRSLERARTEDYLKRKIRSRPERSELVRMHILEETSAEPSLQAKQLKLKRARLADDLNEKIAQRPGPMELVEKNILPVESSLKEAIIVGQVNYPKVADSSSFDEDSSDALSPEQPASHESQGSVPSPLEARVSEPLLSATSASPTQVVSQLPMGRDSREMLFLAEQPPLPPPPLLPPSLTNGTTIPTAKSTPTLIKQSQPKSASEKSQRSKKAKELKPKVKKLKYHQYIPPDQKQDRGAPPMDSSYAKILQQQQLFLQLQILNQQQQQHHNYQAILPAPPKSAGEALGSSGTPPVRSLSTTNSSSSSGAPGPCGLARQNSTSLTGKPGALPANLDDMKVAELKQELKLRSLPVSGTKTELIERLRAYQDQISPVPGAPKAPAATSILHKAGEVVVAFPAARLSTGPALVAAGLAPAEVVVATVASSGVVKFGSTGSTPPVSPTPSERSLLSTGDENSTPGDTFGEMVTSPLTQLTLQASPLQILVKEEGPRAGSCCLSPGGRAELEGRDKDQMLQEKDKQIEALTRMLRQKQQLVERLKLQLEQEKRAQQPAPAPAPLGTPVKQENSFSSCQLSQQPLGPAHPFNPSLAAPATNHIDPCAVAPGPPSVVVKQEALQPEPEPVPAPQLLLGPQGPSLIKGVAPPTLITDSTGTHLVLTVTNKNADSPGLSSGSPQQPSSQPGSPAPAPSAQMDLEHPLQPLFGTPTSLLKKEPPGYEEAMSQQPKQQENGSSSQQMDDLFDILIQSGEISADFKEPPSLPCFLAPYQCHEGRGATWPSCQELSTHSHSVPAASLQPAWP

SEQ ID NO: 813438 - protein, 112 aa, Homo sapiens
MPPLKSPAAFHEQRRSLERARTEDYLKRKIRSRPERSELVRMHILEETSAEPSLQAKQLKLKRARLADDLNEKIAQRPGPMELVEKNILPVESSLKEAIIVRRTQPPCVRGS

SEQ ID NO: 813439 - protein, 17 aa, Homo sapiens [sequence omitted]

SEQ ID NO: 813440 - protein, 164 aa, Homo sapiens
MRREGSTVLQLKLQQRRTREELVSQGIMPPLKSPAAFHEQRRSLERARTEDYLKRKIRSRPERSELVRMHILEETSAEPSLQAKQLKLKRARLADDLNEKIAQRPGPMELVEKNILPVESSLKEAIIAASVALGQEELRAQLHPAVGLRGGHLLPWGHWLHILG

SEQ ID NO: 813441 - protein, 931 aa, Homo sapiens; identical to SEQ ID NO: 813430

SEQ ID NO: 813442 - protein, 1861 aa, Homo sapiens
MKGKERSPVKAKRSRGGEDSTSRGERSKKLGGSGGSNGSSSGKTDSGGGSRRSLHLDKSSSRGGSREYDTGGGSSSSRLHSYSSPSTKNSSGGGESRSSSRGGGGESRSSGAASSAPGGGDGAEYKTLKISELGSQLSDEAVEDGLFHEFKRFGDVSVKISHLSGSGSGDERVAFVNFRRPEDARAAKHARGRLVLYDRPLKIEAVYVSRRRSRSPLDKDTYPPSASVVGASVGGHRHPPGGGGGQRSLSPGGAALGYRDYRLQQLALGRLPPPPPPPLPRDLERERDYPFYERVRPAYSLEPRVGAGAGAAPFREVDEISPEDDQRANRTLFLGNLDITVTESDLRRAFDRFGVITEVDIKRPSRGQTSTYGFLKFENLDMSHRAKLAMSGKIIIRNPIKIGYGKATPTTRLWVGGLGPWVPLAALAREFDRFGTIRTIDYRKGDSWAYIQYESLDAAHAAWTHMRGFPLGGPDRRLRVDFADTEHRYQQQYLQPLPLTHYELVTDAFGHRAPDPLRGARDRTPPLLYRDRDRDLYPDSDWVPPPPPVRERSTRTAATSVPAYEPLDSLDRRRDGWSLDRDRGDRDLPSSRDQPRKRRLPEESGGRHLDRSPESDRPRKRHCAPSPDRSPELSSSRDRYNSDNDRSSRLLLERPSPIRDRRGSLEKSQGDKRDRKNSASAERDRKHRTTAPTEGKSPLKKEDRSDGSAPSTSTASSKLKSPSQKQDGGTAPVASASPKLCLAWQGMLLLKNSNFPSNMHLLQGDLQVASSLLVEGSTGGKVAQLKITQRLRLDQPKLDEVTRRIKVAGPNGYAILLAVPGSSDSRSSSSSAASDTATSTQRPLRNLVSYLKQKQAAGVISLPVGGNKDKENTGVLHAFPPCEFSQQFLDSPAKALAKSEEDYLVMIIVRVLQLKLQQRRTREELVSQGIMPPLKSPAAFHEQRRSLERARTEDYLKRKIRSRPERSELVRMHILEETSAEPSLQAKQLKLKRARLADDLNEKIAQRPGPMELVEKNILPVESSLKEAIIVGQVNYPKVADSSSFDEDSSDALSPEQPASHESQGSVPSPLEARVSEPLLSATSASPTQVVSQLPMGRDSREMLFLAEQPPLPPPPLLPPSLTNGTTIPTAKSTPTLIKQSQPKSASEKSQRSKKAKELKPKVKKLKYHQYIPPDQKQDRGAPPMDSSYAKILQQQQLFLQLQILNQQQQQHHNYQAILPAPPKSAGEALGSSGTPPVRSLSTTNSSSSSGAPGPCGLARQNSTSLTGKPGALPANLDDMKVAELKQELKLRSLPVSGTKTELIERLRAYQDQISPVPGAPKAPAATSILHKAGEVVVAFPAARLSTGPALVAAGLAPAEVVVATVASSGVVKFGSTGSTPPVSPTPSERSLLSTGDENSTPGDTFGEMVTSPLTQLTLQASPLQILVKEEGPRAGSCCLSPGGRAELEGRDKDQMLQEKDKQIEALTRMLRQKQQLVERLKLQLEQEKRAQQPAPAPAPLGTPVKQENSFSSCQLSQQPLGPAHPFNPSLAAPATNHIDPCAVAPGPPSVVVKQEALQPEPEPVPAPQLLLGPQGPSLIKGVAPPTLITDSTGTHLVLTVTNKNADSPGLSSGSPQQPSSQPGSPAPAPSAQMDLEHPLQPLFGTPTSLLKKEPPGYEEAMSQQPKQQENGSSSQQMDDLFDILIQSGEISADFKEPPSLPGKEKPSPKTVCGSPLAAQPSPSAELPQAAPPPPGSPSLPGRLEDFLESSTGLPLLTSGHDGPEPLSLIDDLHSQMLSSTAILDHPPSPMDTSELHFVPEPSSTMGLDLADGHLDSMDWLELSSGGPVLSLAPLSTTAPSLFSTDFLDGHDLQLHWDSCL

SEQ ID NO: 813443 - protein, 1047 aa, Homo sapiens
IVSWIDITTGLKLRLGLRWGDVLSSSRSIAVTRGLDGGGAGENDDEPVLVSLSAAPSPQSEAVANELQELSLQPELTLGLHPGRNPNLPPLSERKNVLQLKLQQRRTREELVSQGIMPPLKSPAAFHEQRRSLERARTEDYLKRKIRSRPERSELVRMHILEETSAEPSLQAKQLKLKRARLADDLNEKIAQRPGPMELVEKNILPVESSLKEAIIVGQVNYPKVADSSSFDEDSSDALSPEQPASHESQGSVPSPLEARVSEPLLSATSASPTQVVSQLPMGRDSREMLFLAEQPPLPPPPLLPPSLTNGTTIPTAKSTPTLIKQSQPKSASEKSQRSKKAKELKPKVKKLKYHQYIPPDQKQDRGAPPMDSSYAKILQQQQLFLQLQILNQQQQQHHNYQAILPAPPKSAGEALGSSGTPPVRSLSTTNSSSSSGAPGPCGLARQNSTSLTGKPGALPANLDDMKVAELKQELKLRSLPVSGTKTELIERLRAYQDQISPVPGAPKAPAATSILHKAGEVVVAFPAARLSTGPALVAAGLAPAEVVVATVASSGVVKFGSTGSTPPVSPTPSERSLLSTGDENSTPGDTFGEMVTSPLTQLTLQASPLQILVKEEGPRAGSCCLSPGGRAELEGRDKDQMLQEKDKQIEALTRMLRQKQQLVERLKLQLEQEKRAQQPAPAPAPLGTPVKQENSFSSCQLSQQPLGPAHPFNPSLAAPATNHIDPCAVAPGPPSVVVKQEALQPEPEPVPAPQLLLGPQGPSLIKGVAPPTLITDSTGTHLVLTVTNKNADSPGLSSGSPQQPSSQPGSPAPAPSAQMDLEHPLQPLFGTPTSLLKKEPPGYEEAMSQQPKQQENGSSSQQMDDLFDILIQSGEISADFKEPPSLPGKEKPSPKTVCGSPLAAQPSPSAELPQAAPPPPGSPSLPGRLEDFLESSTGLPLLTSGHDGPEPLSLIDDLHSQMLSSTAILDHPPSPMDTSELHFVPEPSSTMGLDLADGHLDSMDWLELSSGGPVLSLAPLSTTAPSLFSTDFLDGHDLQLHWDSCL

SEQ ID NO: 813444 - protein, 766 aa, Homo sapiens
MGRDSREMLFLAEQPPLPPPPLLPPSLTNGTTIPTAKSTPTLIKQSQPKSASEKSQRSKKAKELKPKVKKLKYHQYIPPDQKQDRGAPPMDSSYAKILQQQQLFLQLQILNQQQQQHHNYQAILPAPPKSAGEALGSSGTPPVRSLSTTNSSSSSGAPGPCGLARQNSTSLTGKPGALPANLDDMKVAELKQELKLRSLPVSGTKTELIERLRAYQDQISPVPGAPKAPAATSILHKAGEVVVAFPAARLSTGPALVAAGLAPAEVVVATVASSGVVKFGSTGSTPPVSPTPSERSLLSTGDENSTPGDTFGEMVTSPLTQLTLQASPLQILVKEEGPRAGSCCLSPGGRAELEGRDKDQMLQEKDKQIEALTRMLRQKQQLVERLKLQLEQEKRAQQPAPAPAPLGTPVKQENSFSSCQLSQQPLGPAHPFNPSLAAPATNHIDPCAVAPGPPSVVVKQEALQPEPEPVPAPQLLLGPQGPSLIKGVAPPTLITDSTGTHLVLTVTNKNADSPGLSSGSPQQPSSQPGSPAPAPSAQMDLEHPLQPLFGTPTSLLKKEPPGYEEAMSQQPKQQENGSSSQQMDDLFDILIQSGEISADFKEPPSLPGKEKPSPKTVCGSPLAAQPSPSAELPQAAPPPPGSPSLPGRLEDFLESSTGLPLLTSGHDGPEPLSLIDDLHSQMLSSTAILDHPPSPMDTSELHFVPEPSSTMGLDLADGHLDSMDWLELSSGGPVLSLAPLSTTAPSLFSTDFLDGHDLQLHWDSCL

SEQ ID NO: 813445 - protein, 184 aa, Homo sapiens
MDDLFDILIQSGEISADFKEPPSLPGKEKPSPKTVCGSPLAAQPSPSAELPQAAPPPPGSPSLPGRLEDFLESSTGLPLLTSGHDGPEPLSLIDDLHSQMLSSTAILDHPPSPMDTSELHFVPEPSSTMGLDLADGHLDSMDWLELSSGGPVLSLAPLSTTAPSLFSTDFLDGHDLQLHWDSCL

SEQ ID NO: 813446 - protein, 319 aa, Homo sapiens
MPPLKSPAAFHEQRRSLERARTEDYLKRKIRSRPERSELVRMHILEETSAEPSLQAKQLKLKRARLADDLNEKIAQRPGPMELVEKNILPVESSLKEAIIVGQVNYPKVADSSSFDEDSSDALSPEQPASHESQGSVPSPLEARVSEPLLSATSASPTQVVSQLPMGRDSREMLFLAEQPPLPPPPLLPPSLTNGTTIPTAKSTPTLIKQSQPKSASEKSQRSKKAKELKPKVKKLKYHQYIPPDQKQDRGAPPMDSSYAKILQQQQLFLQLQILNQQQQQHHNYQAILPAPPKSAGEALGSSSLPLYRHPASYTARGL

SEQ ID NO: 813447 - protein, 84 aa, Homo sapiens
AERSRRRQCLWWPRRRERRSHLSHPLGCRWPHALRWRRLLSSVRPGWTVSLERRRGRLEPEWGEPRNPAGSRARRDRRVWLAWN

SEQ ID NO: 813448 - protein, 25 aa, Homo sapiens [sequence omitted]

SEQ ID NO: 813449 - protein, 173 aa, Homo sapiens
RGKPCAISHGQPHRVLRHCRRREPLGRVSFELFADKVPKTAENFRALSTGEKGFGYKGSCFHRIIPGFMCQGGDFTRHNGTGGKSIYGEKFEDENFILKHTGPGILSMANAGPNTNGSQFFICTAKTEWLDGKHVVFGKVKEGMNIVEAMERFGSRNGKTSKKITIADCGQLE

SEQ ID NO: 813450 - protein, 173 aa, Homo sapiens; identical to SEQ ID NO: 813449

SEQ ID NO: 813451 - protein, 92 aa, Homo sapiens
FFLEVDEVMLTLKQAFSTAAALQSAKTQIKLCEACPMHSLHKLCERIEGHRISWPWPNKSLLWHLDAFATRFGSRNGKTSKKITIADCGQLE

SEQ ID NO: 813452 - protein, 272 aa, Homo sapiens
MVLLTAVLLLLAAYAGPAQSLGSFVHCEPCDEKALSMCPPSPLGCELVKEPGCGCCMTCALAEGQSCGVYTERCAQGLRCLPRQDEEKPLHALLHGRGVCLNEKSYREQVKIERDSREHEEPTTSEMAEETYSPKIFRPKHTRISELKAEAVKKDRRKKLTQSKFVGGAENTAHPRIISAPEMRQESEQGPCRRHMEASLQELKASPRMVPRAVYLPNCDRKGFYKRKQCKPSRGRKRGICWCVDKYGMKLPGMEYVDGDFQCHTFDSSNVE

SEQ ID NO: 813453 - protein, 103 aa, Homo sapiens
PAAHGRSSRAQVRGLDFWPLVEFPEVFFLSLVNNCENTANGFPDDSDLKELGGRTACHFGDAQLGQLHLQVVQLFQQLLLFLPAKISSLDFGHCCTNRQHLYW

SEQ ID NO: 813454 - protein, 272 aa, Homo sapiens; identical to SEQ ID NO: 813452

SEQ ID NO: 813455 - protein, 272 aa, Homo sapiens; identical to SEQ ID NO: 813452

SEQ ID NO: 813456 - protein, 272 aa, Homo sapiens; identical to SEQ ID NO: 813452

SEQ ID NO: 813457 - protein, 143 aa, Homo sapiens [sequence omitted]

SEQ ID NO: 813458 - protein, 272 aa, Homo sapiens; identical to SEQ ID NO: 813452

SEQ ID NO: 813459 - protein, 272 aa, Homo sapiens; identical to SEQ ID NO: 813452

SEQ ID NO: 813460 - protein, 272 aa, Homo sapiens; identical to SEQ ID NO: 813452

SEQ ID NO: 813461 - protein, 143 aa, Homo sapiens [sequence omitted]

SEQ ID NO: 813462 - protein, 143 aa, Homo sapiens [sequence omitted]

SEQ ID NO: 813463 - protein, 143 aa, Homo sapiens [sequence omitted]

SEQ ID NO: 813464 - protein, 272 aa, Homo sapiens; identical to SEQ ID NO: 813452

SEQ ID NO: 813465 - protein, 110 aa, Homo sapiens
VPFDTVRRRMMMQSGRKGADIMYTGTVDCWRKIFRDEGGKAFFKGAWSNVLRGMGGAFVLVLYDELRKVSNFRRVLDFRSQIGRISLNWPCFGRDKTMCSAAHLQPAMRD

SEQ ID NO: 813466 - protein, 143 aa, Homo sapiens [sequence omitted]

SEQ ID NO: 813467 - protein, 130 aa, Homo sapiens [sequence omitted]

SEQ ID NO: 813468 - protein, 272 aa, Homo sapiens; identical to SEQ ID NO: 813452

SEQ ID NO: 813469 - protein, 272 aa, Homo sapiens; identical to SEQ ID NO: 813452

SEQ ID NO: 813470 - protein, 272 aa, Homo sapiens; identical to SEQ ID NO: 813452

SEQ ID NO: 813471 - protein, 272 aa, Homo sapiens; identical to SEQ ID NO: 813452

SEQ ID NO: 813472 - protein, 272 aa, Homo sapiens; identical to SEQ ID NO: 813452

SEQ ID NO: 813473 - protein, 272 aa, Homo sapiens; identical to SEQ ID NO: 813452

SEQ ID NO: 813474 - protein, 272 aa, Homo sapiens; identical to SEQ ID NO: 813452

SEQ ID NO: 813475 - protein, 38 aa, Homo sapiens
MAQGAKDTGRTGGVSPKKRRGPGFDNTHGRASGYTAPA

SEQ ID NO: 813476 - protein, 664 aa, Homo sapiens
MKTGLFFLCLLGTAAAIPTNARLLSDHSKPTAETVAPDNTAIPSLRAEAEENEKETAVSTEDDSHHKAEKSSVLKSKEESHEQSAEQGKSSSQELGLKDQEDSDGHLSVNLEYAPTEGTLDIKEDMSEPQEKKLSENTDFLAPGVSSFTDSNQQESITKREENQEQPRNYSHHQLNRSSKHSQGLRDQGNQEQDPNISNGEEEEEKEPGEVGTHNDNQERKTELPREHANSKQEEDNTQSDDILEESDQPTQVSKMQEDEFDQGNQEQEDNSNAEMEEENASNVNKHIQETEWQSQEGKTGLEAISNHKETEEKTVSEALLMEPTDDGNTTPRNHGVDDDGDDDGDDGGTDGPRHSASDDYFIPSQAFLEAERAQSIAYHLKIEEQREKVHENENIGTTEPGEHQEAKKAENSSNEEETSSEGNMRVHAVDSCMSFQCKRGHICKADQQGKPHCVCQDPVTCPPTKPLDQVCGTDNQTYASSCHLFATKCRLEGTKKGHQLQLDYFGACKSIPTCTDFEVIQFPLRMRDWLKNILMQLYEANSEHAGYLNEKQRNKVKKIYLDEKRLLAGDHPIDLLLRDFKKNYHMYVYPVHWQFSELDQHPMDRVLTHSELAPLRASLVPMEHCITRFFEECDPNKDKHITLKEWGHCFGIKEEDIDENLLF

SEQ ID NO: 813477 - protein, 664 aa, Homo sapiens; identical to SEQ ID NO: 813476

SEQ ID NO: 813478 - protein, 664 aa, Homo sapiens; identical to SEQ ID NO: 813476

SEQ ID NO: 813479 - protein, 538 aa, Homo sapiens
MKTGLFFLCLLGTAAAIPTNARLLSDHSKPTAETVAPDNTAIPSLRAEAEENEKETAVSTEDDSHHKAEKSSVLKSKEESHEQSAEQGKSSSQELGLKDQEDSDGHLSVNLEYAPTEGTLDIKEDMSEPQEKKLSENTDFLAPGVSSFTDSNQQESITKREENQEQPRNYSHHQLNRSSKHSQGLRDQGNQEQDPNISNGEEEEEKEPGEVGTHNDNQERKTELPREHANSKQEEDNTQSDDILEESDQPTQVSKMQEDEFDQGNQEQEDNSNAEMEEENASNVNKHIQETEWQSQEGKTGLEAISNHKETEEKTVSEALLMEPTDDGNTTPRNHGVDDDGDDDGDDGGTDGPRHSASDDYFIPSQAFLEAERAQSIAYHLKIEEQREKVHENENIGTTEPGEHQEAKKAENSSNEEETSSEGNMRVHAVDSCMSFQCKRGHICKADQQGKPHCVCQDPVTCPPTKPLDQVCGTDNQTYASSCHLFATKCRLEGTKKGHQLQLDYFGACKSIPTCTDFEVIQFPLRMRDWLKNILMQV

SEQ ID NO: 813480 - protein, 443 aa, Homo sapiens
MKTGLFFLCLLGTAAAIPTNARLLSDHSKPTAETVAPDNTAIPSLRAEAEENEKETAVSTEDDSHHKAEKSSVLKSKEESHEQSAEQGKSSSQELGLKDQEDSDGHLSVNLEYAPTEGTLDIKEDMSEPQEKKLSENTDFLAPGVSSFTDSNQQESITKREENQEQPRNYSHHQLNRSSKHSQGLRDQGNQEQDPNISNGEEEEEKEPGEVGTHNDNQERKTELPREHANSKQEEDNTQSDDILEESDQPTQVSKMQEDEFDQGNQEQEDNSNAEMEEENASNVNKHIQETEWQSQEGKTGLEAISNHKETEEKTVSEALLMEPTDDGNTTPRNHGVDDDGDDDGDDGGTDGPRHSASDDYFIPSQAFLEAERAQSIAYHLKIEEQRERKTKNNLEIIHIISVNRSSKHSQGLRDQGNQEQDPNISNGEEEEEKEPGEVGTHN

SEQ ID NO: 813481 - protein, 381 aa, Homo sapiens
MKTGLFFLCLLGTAAAIPTNARLLSDHSKPTAETVAPDNTAIPSLRAEAEENEKETAVSTEDDSHHKAEKSSVLKSKEESHEQSAEQGKSSSQELGLKDQEDSDGHLSVNLEYAPTEGTLDIKEDMSEPQEKKLSENTDFLAPGVSSFTDSNQQESITKREENQEQPRNYSHHQLNRSSKHSQGLRDQGNQEQDPNISNGEEEEEKEPGEVGTHNDNQERKTELPREHANSKQEEDNTQSDDILEESDQPTQVSKMQEDEFDQGNQEQEDNSNAEMEEENASNVNKHIQETEWQSQEGKTGLEAISNHKETEEKTVSEALLMEPTDDGTHNDNQERKTELPREHANSKQEEDNTQSDDILEESDQPTQVSKMQEDEFDQGN

SEQ ID NO: 813482 - protein, 664 aa, Homo sapiens; identical to SEQ ID NO: 813476

SEQ ID NO: 813483 - protein, 551 aa, Homo sapiens
MKTGLFFLCLLGTAAAIPTNARLLSDHSKPTAETVAPDNTAIPSLRAEAEENEKETAVSTEDDSHHKAEKSSVLKSKEESHEQSAEQGKSSSQELGLKDQEDSDGHLSVNLEYAPTEGTLDIKEDMSEPQEKKLSENTDFLAPGVSSFTDSNQEQEDNSNAEMEEENASNVNKHIQETEWQSQEGKTGLEAISNHKETEEKTVSEALLMEPTDDGNTTPRNHGVDDDGDDDGDDGGTDGPRHSASDDYFIPSQAFLEAERAQSIAYHLKIEEQREKVHENENIGTTEPGEHQEAKKAENSSNEEETSSEGNMRVHAVDSCMSFQCKRGHICKADQQGKPHCVCQDPVTCPPTKPLDQVCGTDNQTYASSCHLFATKCRLEGTKKGHQLQLDYFGACKSIPTCTDFEVIQFPLRMRDWLKNILMQLYEANSEHAGYLNEKQRNKVKKIYLDEKRLLAGDHPIDLLLRDFKKNYHMYVYPVHWQFSELDQHPMDRVLTHSELAPLRASLVPMEHCITRFFEECDPNKDKHITLKEWGHCFGIKEEDIDENLLF

SEQ ID NO: 813484 - protein, 677 aa, Homo sapiens
ARYPLALNLDLESMKTGLFFLCLLGTAAAIPTNARLLSDHSKPTAETVAPDNTAIPSLRAEAEENEKETAVSTEDDSHHKAEKSSVLKSKEESHEQSAEQGKSSSQELGLKDQEDSDGHLSVNLEYAPTEGTLDIKEDMSEPQEKKLSENTDFLAPGVSSFTDSNQQESITKREENQEQPRNYSHHQLNRSSKHSQGLRDQGNQEQDPNISNGEEEEEKEPGEVGTHNDNQERKTELPREHANSKQEEDNTQSDDILEESDQPTQVSKMQEDEFDQGNQEQEDNSNAEMEEENASNVNKHIQETEWQSQEGKTGLEAISNHKETEEKTVSEALLMEPTDDGNTTPRNHGVDDDGDDDGDDGGTDGPRHSASDDYFIPSQAFLEAERAQSIAYHLKIEEQREKVHENENIGTTEPGEHQEAKKAENSSNEEETSSEGNMRVHAVDSCMSFQCKRGHICKADQQGKPHCVCQDPVTCPPTKPLDQVCGTDNQTYASSCHLFATKCRLEGTKKGHQLQLDYFGACKSIPTCTDFEVIQFPLRMRDWLKNILMQLYEANSEHAGYLNEKQRNKVKKIYLDEKRLLAGDHPIDLLLRDFKKNYHMYVYPVHWQFSELDQHPMDRVLTHSELAPLRASLVPMEHCITRFFEECDPNKDKHITLKEWGHCFGIKEEDIDENLLF

SEQ ID NO: 813485 - protein, 616 aa, Homo sapiens
LGPVCSTSQQYPQKMIHHKAEKSSVLKSKEESHEQSAEQGKSSSQELGLKDQEDSDGHLSVNLEYAPTEGTLDIKEDMSEPQEKKLSENTDFLAPGVSSFTDSNQQESITKREENQEQPRNYSHHQLNRSSKHSQGLRDQGNQEQDPNISNGEEEEEKEPGEVGTHNDNQERKTELPREHANSKQEEDNTQSDDILEESDQPTQVSKMQEDEFDQGNQEQEDNSNAEMEEENASNVNKHIQETEWQSQEGKTGLEAISNHKETEEKTVSEALLMEPTDDGNTTPRNHGVDDDGDDDGDDGGTDGPRHSASDDYFIPSQAFLEAERAQSIAYHLKIEEQREKVHENENIGTTEPGEHQEAKKAENSSNEEETSSEGNMRVHAVDSCMSFQCKRGHICKADQQGKPHCVCQDPVTCPPTKPLDQVCGTDNQTYASSCHLFATKCRLEGTKKGHQLQLDYFGACKSIPTCTDFEVIQFPLRMRDWLKNILMQLYEANSEHAGYLNEKQRNKVKKIYLDEKRLLAGDHPIDLLLRDFKKNYHMYVYPVHWQFSELDQHPMDRVLTHSELAPLRASLVPMEHCITRFFEECDPNKDKHITLKEWGHCFGIKEEDIDENLLF

SEQ ID NO: 813486 - protein, 623 aa, Homo sapiens
LKIEEQREKVHENENIGTTEDDSHHKAEKSSVLKSKEESHEQSAEQGKSSSQELGLKDQEDSDGHLSVNLEYAPTEGTLDIKEDMSEPQEKKLSENTDFLAPGVSSFTDSNQQESITKREENQEQPRNYSHHQLNRSSKHSQGLRDQGNQEQDPNISNGEEEEEKEPGEVGTHNDNQERKTELPREHANSKQEEDNTQSDDILEESDQPTQVSKMQEDEFDQGNQEQEDNSNAEMEEENASNVNKHIQETEWQSQEGKTGLEAISNHKETEEKTVSEALLMEPTDDGNTTPRNHGVDDDGDDDGDDGGTDGPRHSASDDYFIPSQAFLEAERAQSIAYHLKIEEQREKVHENENIGTTEPGEHQEAKKAENSSNEEETSSEGNMRVHAVDSCMSFQCKRGHICKADQQGKPHCVCQDPVTCPPTKPLDQVCGTDNQTYASSCHLFATKCRLEGTKKGHQLQLDYFGACKSIPTCTDFEVIQFPLRMRDWLKNILMQLYEANSEHAGYLNEKQRNKVKKIYLDEKRLLAGDHPIDLLLRDFKKNYHMYVYPVHWQFSELDQHPMDRVLTHSELAPLRASLVPMEHCITRFFEECDPNKDKHITLKEWGHCFGIKEEDIDENLLF

SEQ ID NO: 813487 - protein, 376 aa, Homo sapiens
MKTGLFFLCLLGTAAAIPTNARLLSDHSKPTAETVAPDNTAIPSLRAEAEENEKETAVSTEDDSHHKAEKSSVLKSKEESHEQSAEQGKSSSQELGLKDQEDSDGHLSVNLEYAPTEGTLDIKEDMSEPQEKKLSENTDFLAPGVSSFTDSNQQESITKREENQEQPRNYSHHQLNRSSKHSVCGTDNQTYASSCHLFATKCRLEGTKKGHQLQLDYFGACKSIPTCTDFEVIQFPLRMRDWLKNILMQLYEANSEHAGYLNEKQRNKVKKIYLDEKRLLAGDHPIDLLLRDFKKNYHMYVYPVHWQFSELDQHPMDRVLTHSELAPLRASLVPMEHCITRFFEECDPNKDKHITLKEWGHCFGIKEEDIDENLLF

SEQ ID NO: 813488 - protein, 191 aa, Homo sapiens
MKTGLFFLCLLGTAAAIPTNARLLSDHSKPTAETVAPDNTAIPSLRAEAEENEKETAVSTEDDSHHKAEKSSVLKSKEESHEQSAEQGKSSSQELGLKDQEDSDGHLSVNLEYAPTEGTLDIKEDMSEPQEKKLSENTDFLAPGVSSFTDSNQQESITKREENQEQPRNYSHHQLNRSSKHSRDPQTRPSS

SEQ ID NO: 813489 - protein, 448 aa, Homo sapiens
ARMRERETIEDPRAEHAQEDNTQSDDILEESDQPTQVSKMQEDEFDQGNQEQEDNSNAEMEEENASNVNKHIQETEWQSQEGKTGLEAISNHKETEEKTVSEALLMEPTDDGNTTPRNHGVDDDGDDDGDDGGTDGPRHSASDDYFIPSQAFLEAERAQSIAYHLKIEEQREKVHENENIGTTEPGEHQEAKKAENSSNEEETSSEGNMRVHAVDSCMSFQCKRGHICKADQQGKPHCVCQDPVTCPPTKPLDQVCGTDNQTYASSCHLFATKCRLEGTKKGHQLQLDYFGACKSIPTCTDFEVIQFPLRMRDWLKNILMQLYEANSEHAGYLNEKQRNKVKKIYLDEKRLLAGDHPIDLLLRDFKKNYHMYVYPVHWQFSELDQHPMDRVLTHSELAPLRASLVPMEHCITRFFEECDPNKDKHITLKEWGHCFGIKEEDIDENLLF

SEQ ID NO: 813490 - protein, 456 aa, Homo sapiens
CGDDGDGDGDDDDGDGDYGDDGDDKKEDNTQSDDILEESDQPTQVSKMQEDEFDQGNQEQEDNSNAEMEEENASNVNKHIQETEWQSQEGKTGLEAISNHKETEEKTVSEALLMEPTDDGNTTPRNHGVDDDGDDDGDDGGTDGPRHSASDDYFIPSQAFLEAERAQSIAYHLKIEEQREKVHENENIGTTEPGEHQEAKKAENSSNEEETSSEGNMRVHAVDSCMSFQCKRGHICKADQQGKPHCVCQDPVTCPPTKPLDQVCGTDNQTYASSCHLFATKCRLEGTKKGHQLQLDYFGACKSIPTCTDFEVIQFPLRMRDWLKNILMQLYEANSEHAGYLNEKQRNKVKKIYLDEKRLLAGDHPIDLLLRDFKKNYHMYVYPVHWQFSELDQHPMDRVLTHSELAPLRASLVPMEHCITRFFEECDPNKDKHITLKEWGHCFGIKEEDIDENLLF

SEQ ID NO: 813491 - protein, 495 aa, Homo sapiens
GRLEDPREKHTAEKSSVLKSKEESHEQSAEQGKSSSQELGLKDQEDSDGHLSVNLEYAPTEGTLDIKEDMSEPQEKKLSENTDFLAPGVSSFTDSNQEQEDNSNAEMEEENASNVNKHIQETEWQSQEGKTGLEAISNHKETEEKTVSEALLMEPTDDGNTTPRNHGVDDDGDDDGDDGGTDGPRHSASDDYFIPSQAFLEAERAQSIAYHLKIEEQREKVHENENIGTTEPGEHQEAKKAENSSNEEETSSEGNMRVHAVDSCMSFQCKRGHICKADQQGKPHCVCQDPVTCPPTKPLDQVCGTDNQTYASSCHLFATKCRLEGTKKGHQLQLDYFGACKSIPTCTDFEVIQFPLRMRDWLKNILMQLYEANSEHAGYLNEKQRNKVKKIYLDEKRLLAGDHPIDLLLRDFKKNYHMYVYPVHWQFSELDQHPMDRVLTHSELAPLRASLVPMEHCITRFFEECDPNKDKHITLKEWGHCFGIKEEDIDENLLF

SEQ ID NO: 813492 - protein, 370 aa, Homo sapiens
SRGSDCICASISNHKETEEKTVSEALLMEPTDDGNTTPRNHGVDDDGDDDGDDGGTDGPRHSASDDYFIPSQAFLEAERAQSIAYHLKIEEQREKVHENENIGTTEPGEHQEAKKAENSSNEEETSSEGNMRVHAVDSCMSFQCKRGHICKADQQGKPHCVCQDPVTCPPTKPLDQVCGTDNQTYASSCHLFATKCRLEGTKKGHQLQLDYFGACKSIPTCTDFEVIQFPLRMRDWLKNILMQLYEANSEHAGYLNEKQRNKVKKIYLDEKRLLAGDHPIDLLLRDFKKNYHMYVYPVHWQFSELDQHPMDRVLTHSELAPLRASLVPMEHCITRFFEECDPNKDKHITLKEWGHCFGIKEEDIDENLLF

SEQ ID NO: 813493 - protein, 147 aa, Homo sapiens
GNQEQEDNSNAEMEEENASNVNKHIQETEWQSQEGKTGLEAISNHKETEEKTVSEALLMEPTDDGNTTPRNHGVDDDGDDDGDDGGTDGPRHSASDDYFIPSQAFLEAERAQSIAYHLKIEEQREKVHENENIGTTEPGEHQEVKLF

SEQ ID NO: 813494 - protein, 664 aa, Homo sapiens; identical to SEQ ID NO: 813476

SEQ ID NO: 813495 - protein, 460 aa, Homo sapiens
MASLLQSDRVLYLVQGEKKVRAPLSQLYFCRYCSELRSLECVSHEVDSHYCPSCLENMPSAEAKLKKNRCANCFDCPGCMHTLSTRATSISTQLPDDPAKTTMKKAYYLACGFCRWTSRDVGMADKSVASGGWQEPENPHTQRMNKLIEYYQQLAQKEKVERDRKKLARRRNYMPLAFSDKYGLGTRLQRPRAGASISTLAGLSLKEGEDQKEIKIEPAQAVDEVEPLPEDYYTRPVNLTEVTTLQQRLLQPDFQPVCASQLYPRHKHLLIKRSLRCRKCEHNLSKPEFNPTSIKFKIQLVAVNYIPEVRIMSIPNLRYMKESQVLLTLTNPVENLTHVTLFECEEGDPDDINSTAKVVVPPKELVLAGKDAAAEYDELAEPQDFQDDPDIIAFRKANKVGIFIKVTPQREEGEVTVCFKMKHDFKNLAAPIRPIEESDQGTEVIWLTQHVELSLGPLLP

SEQ ID NO: 813496 - protein, 460 aa, Homo sapiens; identical to SEQ ID NO: 813495

SEQ ID NO: 813497 - protein, 460 aa, Homo sapiens; identical to SEQ ID NO: 813495

SEQ ID NO: 813498 - protein, 403 aa, Homo sapiens
MPSAEAKLKKNRCANCFDCPGCMHTLSTRATSISTQLPDDPAKTTMKKAYYLACGFCRWTSRDVGMADKSVASGGWQEPENPHTQRMNKLIEYYQQLAQKEKVERDRKKLARRRNYMPLAFSDKYGLGTRLQRPRAGASISTLAGLSLKEGEDQKEIKIEPAQAVDEVEPLPEDYYTRPVNLTEVTTLQQRLLQPDFQPVCASQLYPRHKHLLIKRSLRCRKCEHNLSKPEFNPTSIKFKIQLVAVNYIPEVRIMSIPNLRYMKESQVLLTLTNPVENLTHVTLFECEEGDPDDINSTAKVVVPPKELVLAGKDAAAEYDELAEPQDFQDDPDIIAFRKANKVGIFIKVTPQREEGEVTVCFKMKHDFKNLAAPIRPIEESDQGTEVIWLTQHVELSLGPLLP

SEQ ID NO: 813499 - protein, 317 aa, Homo sapiens
MNKLIEYYQQLAQKEKVERDRKKLARRRNYMPLAFSDKYGLGTRLQRPRAGASISTLAGLSLKEGEDQKEIKIEPAQAVDEVEPLPEDYYTRPVNLTEVTTLQQRLLQPDFQPVCASQLYPRHKHLLIKRSLRCRKCEHNLSKPEFNPTSIKFKIQLVAVNYIPEVRIMSIPNLRYMKESQVLLTLTNPVENLTHVTLFECEEGDPDDINSTAKVVVPPKELVLAGKDAAAEYDELAEPQDFQDDPDIIAFRKANKVGIFIKVTPQREEGEVTVCFKMKHDFKNLAAPIRPIEESDQGTEVIWLTQHVELSLGPLLP

SEQ ID NO: 813500 - protein, 460 aa, Homo sapiens; identical to SEQ ID NO: 813495

SEQ ID NO: 813501 - protein, 460 aa, Homo sapiens; identical to SEQ ID NO: 813495

SEQ ID NO: 813502 - protein, 460 aa, Homo sapiens; identical to SEQ ID NO: 813495

SEQ ID NO: 813503 - protein, 460 aa, Homo sapiens; identical to SEQ ID NO: 813495

SEQ ID NO: 813504 - protein, 460 aa, Homo sapiens; identical to SEQ ID NO: 813495

SEQ ID NO: 813505 - protein, 303 aa, Homo sapiens
MASLLQSDRVLYLVQGEKKVRAPLSQLYFCRYCSELRSLECVSHEVDSHYCPSCLENMPSAEAKLKKNRCANCFDCPGCMHTLSTRATSISTQLPDDPAKTTMKKAYYLACGFCRWTSRDVGMADKSVASGGWQEPENPHTQRMNKLIEYYQQLAQKEKVERDRKKLARRRNYMPLAFSDKYGLGTRLQRPRAGASISTLAGLSLKEGEDQKEIKIEPAQAVDEVEPLPEDYYTRPVNLTEVTTLQQRLLQPDFQPVCASQLYPRHKHLLIKRSLRCRKCEHNLSKPEFNPTSIKFKIQLVAV

SEQ ID NO: 813506 - protein, 306 aa, Homo sapiens
MASLLQSDRVLYLVQGEKKVRAPLSQLYFCRYCSELRSLECVSHEVDSHYCPSCLENMPSAEAKLKKNRCANCFDCPGCMHTLSTRATSISTQLPDDPAKTTMKKAYYLACGFCRWTSRDVGMADKSVASGGWQEPENPHTQRMNKLIEYYQQLAQKEKVERDRKKLARRRNYMPLAFSDKYGLGTRLQRPRAGASISTLAGLSLKEGEDQKEIKIEPAQAVDEVEPLPEDYYTRPVNLTEVTTLQQRLLQPDFQPVCASQLYPRHKHLLILSFFKAEKLKKQNKTKQKSNFSRIHLISSVYISIS

SEQ ID NO: 813507 - protein, 106 aa, Homo sapiens
MESEITGNTGLSQLNFIQAWCLYQRWLGKGREIHLVQAVICSEFYKTYPIQTYLNSTVGLLNQCWNNFAKQTRPVRYSLMSWQVAAARVFPKMTFPAQNTSVKSTE

SEQ ID NO: 813508 - protein, 206 aa, Homo sapiens
DWLEADVPARRPPRPPGRPRRAGVRCPPATRFLPPAAAMLPAALLRRPGLGRLVRHARAYAEAAAAPAAASGPNQMSFTFASPTQVFFNGANVRQVDVPTLTGAFGILAAHVPTLQVLRPGLVVVHAEDGTTSKYFVSSGSIAVNADSSVQLLAEEAVTLDMLDLGAAKANLEKAQAELVGTADEATRAEIQIRIEANEALVKALE

SEQ ID NO: 813509 - protein, 206 aa, Homo sapiens; identical to SEQ ID NO: 813508

SEQ ID NO: 813510 - protein, 206 aa, Homo sapiens; identical to SEQ ID NO: 813508

SEQ ID NO: 813511 - protein, 463 aa, Homo sapiens
MLLKSLCKNSLRPVSGCSYPFSGLSSGSCRPVFRGRLSAPVFSRELLNRHRGHLYTFRPVCNLRLSSSELRSGSSPFTLKFLLGHCLLSSSLLFFFNLFRISVEVQIRHDLPWVFTGNGATHAQNFPSQHPPHQTHCVSSLVVAWDGNVHIAQRRICVTQRNGRKVNIRCLRERLVVSPGVSNHKKPWLPEGCLDLVSEGSRSEAASNWSGSSGSSKLQHSPLASIPGGYNTDISRVFNGNNCTSCQQKLLPGPLEIYDIDAITFPFIDVLFHLEVKIGATYVGSCCKELKDILLLHLQDIKGSGHCENFPLSYDGIQNNAVWTAAASGPNQMSFTFASPTQVFFNGANVRQVDVPTLTGAFGILAAHVPTLQVLRPGLVVVHAEDGTTSKYFVSSGSIAVNADSSVQLLAEEAVTLDMLDLGAAKANLEKAQAELVGTADEATRAEIQIRIEANEALVKALE

SEQ ID NO: 813512 - protein, 108 aa, Homo sapiens
MRGLSFRLSRSPHVPTLQVLRPGLVVVHAEDGTTSKYFVSSGSIAVNADSSVQLLAEEAVTLDMLDLGAAKANLEKAQAELVGTADEATRAEIQIRIEANEALVKALE

SEQ ID NO: 813513 - protein, 207 aa, Homo sapiens
MVSTHASRTRRGPPRPPGRPRRAGVRCPPATRFLPPAAAMLPAALLRRPGLGRLVRHARAYAEAAAAPAAASGPNQMSFTFASPTQVFFNGANVRQVDVPTLTGAFGILAAHVPTLQVLRPGLVVVHAEDGTTSKYFVSSGSIAVNADSSVQLLAEEAVTLDMLDLGAAKANLEKAQAELVGTADEATRAEIQIRIEANEALVKALE

SEQ ID NO: 813514 - protein, 206 aa, Homo sapiens; identical to SEQ ID NO: 813508

SEQ ID NO: 813515 - protein, 206 aa, Homo sapiens; identical to SEQ ID NO: 813508

SEQ ID NO: 813516 - protein, 206 aa, Homo sapiens; identical to SEQ ID NO: 813508

SEQ ID NO: 813517 - protein, 206 aa, Homo sapiens; identical to SEQ ID NO: 813508

SEQ ID NO: 813518 - protein, 282 aa, Homo sapiens
MPGGPSQLLGSRPPGEAAPAKEATRGQCRLLPGPQALPVLKALGTGPGKLLLSFELWLPPMGLSFRLSRSPQPDGPLTIPSALQSQPPRLTSASEPPLDELPPAPAPLKTRKPEKKKKKKKQPHTNKHHNTATPQKETYKKYNINTTNNISRKQIQTSVPQPRALRGKDEDTERRGHERGGEEQLCSAAAHAKKRQGQRAPNKSDEKTRREQRKQRRKVRNGHRDEAEQEKGEKKGACDEAETQPGARSDEEGARGRGQEARGRGGKDPQRRPRPTPEEESG

SEQ ID NO: 813519 - protein, 422 aa, Homo sapiens
GLARGRRPCASSSSPSRPPAPRRSPLSASYPLPAARRCHAARRAAPPPGTWPPRPPRPCLCRGRRRPGCRLWPQPDVLHLRLSHAGVLQRCQRPAGGRAHADRSLRHPGGPRAHAAGPGEGPGVGGAYPVSRGPARGWAGMPGGPSQLLGSRPPGEAAPAKEATRGQCRLLPGPQALPVLKALGTGPGKLLLSFELWLPPMGLSFRLSRSPQPDGPLTIPSALQSQPPRLTSASEPPLDELPPAPAPLKTRKPEKKKKKKKQPHTNKHHNTATPQKETYKKYNINTTNNISRKQIQTSVPQPRALRGKDEDTERRGHERGGEEQLCSAAAHAKKRQGQRAPNKSDEKTRREQRKQRRKVRNGHRDEAEQEKGEKKGACDEAETQPGARSDEEGARGRGQEARGRGGKDPQRRPRPTPEEESG

SEQ ID NO: 813520 - protein, 123 aa, Homo sapiens
DWLEADVPARRPPRPPGRPRRAGVRCPPATRFLPPAAAMLPAALLRRPGLGRLVRHARAYAEAAAAPAAASGPNQMSFTFASPTQVFFNGANVRQVDVPTLTGAFGILAAHVPTLQALVKALE

SEQ ID NO: 813521 - protein, 168 aa, Homo sapiens
PPRPPGRPRRAGVRCPPATRFLPPAAAMLPAALLRRPGLGRLVRHARAYAEAAAAPAAASGPNQMSFTFASPTQVRALRVGTLRGRRPRSPGSPPPGRDPRFRAPGPARPGSRGYSALDPRPCLCCPSPALPSSRAPPRDKRLLGALPDLPGQSLGVAGSLHSHFADQ

SEQ ID NO: 813522 - protein, 389 aa, Homo sapiens
ASPDALDSPLRTQRQLTWGVAIRAGRSWFSGPAAPAAAMSFFPELYFNVDNGYLEGLVRGLKAGVLSQADYLNLVQCETLEDLKLHLQSTDYGNFLANEASPLTVSVIDDRLKEKMVVEFRHMRNHAYEPLASFLDFITYSYMIDNVILLITGTLHQRSIAELVPKCHPLGSFEQMEAVNIAQTPAELYNAILVDTPLAAFFQDCISEQDLDEMNIEIIRNTLYKAYLESFYKFCTLLGGTTADAMCPILEFEADRRAFIITINSFGTELSKEDRAKLFPHCGRLYPEGLAQLARADDYEQVKNVADYYPEYKLLFEGAGSNPGDKTLEDRFFEHEVKLNKLAFLNQFHFGVFYAFVKLKEQECRNIVWIAECIAQRHRAKIDNYIPIF

SEQ ID NO: 813523 - protein, 389 aa, Homo sapiens; identical to SEQ ID NO: 813522

SEQ ID NO: 813524 - protein, 389 aa, Homo sapiens; identical to SEQ ID NO: 813522

SEQ ID NO: 813525 - protein, 389 aa, Homo sapiens; identical to SEQ ID NO: 813522

SEQ ID NO: 813526 - protein, 423 aa, Homo sapiens
ASPDALDSPLRTQRQLTWGVAIRAGRSWFSGPAAPAAAMSFFPELYFNVDNGYLEGLVRGLKAGVLSQADYLNLVQCETLEDLKLHLQSTDYGNFLANEASPLTVSVIDDRLKEKMVVEFRHMRNHAYEPLASFLDFITYSYMIDNVILLITGTLHQRSIAELVPKCHPLGSFEQMEAVNIAQTPAELYNAILVDTPLAAFFQDCISEQDLDEMNIEIIRNTLYKAYLESFYKFCTLLGGTTADAMCPILEFEADRRAFIITINSFGTELSKEDRAKLFPHCGRLYPEGLAQLARADDYEQVKNVADYYPEYKLLFEGAGSNPGDKTLEDRFFEHEVSLQGLLVRGRPTWWFRPDSVAMATWTPHLPVSQVKLNKLAFLNQFHFGVFYAFVKLKEQECRNIVWIAECIAQRHRAKIDNYIPIF

SEQ ID NO: 813527 - protein, 456 aa, Homo sapiens
ASPDALDSPLRTQRQLTWGVAIRAGRSWFSGPAAPAAAMSFFPELYFNVDNGYLEGLVRGLKAGVLSQADYLNLVQCETLEDLKLHLQSTDYGNFLANEASPLTVSVIDDRLKEKMVVEFRHMRNHAYEPLASFLDFITYSYMIDNVILLITGTLHQRSIAELVPKCHPLGSFEQMEAVNIAQTPAELYNAILVDTPLAAFFQDCISEQDLDEMNIEIIRNTLYKAYLESFYKFCTLLGGTTADAMCPILEFEADRRAFIITINSFGTELSKEDRAKLFPHCGRLYPEGLAQLARADDYEQVKNVADYYPVSAPAGRTAVGCVVTSTPTQNPHACASPHPPGQEYKLLFEGAGSNPGDKTLEDRFFEHEVSLQGLLSEGGQPGGLDLTLWPWPPGHHICPCPQVKLNKLAFLNQFHFGVFYAFVKLKEQECRNIVWIAECIAQRHRAKIDNYIPIF

SEQ ID NO: 813528 - protein, 351 aa, Homo sapiens
MLGLRARGLTGCGGEAELQLQGYMDCWVKVTGTIQFGGLHSGDDLKLHLQSTDYGNFLANEASPLTVSVIDDRLKEKMVVEFRHMRNHAYEPLASFLDFITYSYMIDNVILLITGTLHQRSIAELVPKCHPLGSFEQMEAVNIAQTPAELYNAILVDTPLAAFFQDCISEQDLDEMNIEIIRNTLYKAYLESFYKFCTLLGGTTADAMCPILEFEADRRAFIITINSFGTELSKEDRAKLFPHCGRLYPEGLAQLARADDYEQVKNVADYYPEYKLLFEGAGSNPGDKTLEDRFFEHEVKLNKLAFLNQFHFGVFYAFVKLKEQECRNIVWIAECIAQRHRAKIDNYIPIF

SEQ ID NO: 813529 - protein, 247 aa, Homo sapiens
MIDNVILLITGTLHQRSIAELVPKCHPLGSFEQMEAVNIAQTPAELYNAILVDTPLAAFFQDCISEQDLDEMNIEIIRNTLYKAYLESFYKFCTLLGGTTADAMCPILEFEADRRAFIITINSFGTELSKEDRAKLFPHCGRLYPEGLAQLARADDYEQVKNVADYYPEYKLLFEGAGSNPGDKTLEDRFFEHEVKLNKLAFLNQFHFGVFYAFVKLKEQECRNIVWIAECIAQRHRAKIDNYIPIF

SEQ ID NO: 813530 - protein, 319 aa, Homo sapiens
ASPDALDSPLRTQRQLTWGVAIRAGRSWFSGPAAPAAAMSFFPELYFNVDNGYLEGLVRGLKAGVLSQADYLNLVQCETLEDLKLHLQSTDYGNFLANEASPLTVSVIDDRLKEKMVVEFRHMRNHAYEPLASFLDFITYSYMIDNVILLITGTLHQRSIAELVPKCHPLGSFEQMEAVNIAQTPAELYNAILVDTPLAAFFQDCISEQDLDEMNIEIIRNTLYKAYLESFYKFCTLLGGTTADAMCPILESCPKRTVPSSFHTVGGSTLRAWRSWLGLTTMNRSRTWPITTRSTSCSSRVQVATLETRRWRTDSLSTR

SEQ ID NO: 813531 - protein, 275 aa, Homo sapiens
GRRGSTHASSRNTLYKRQLTWGVAIRAGRSWFSGPAAPAAAMSFFPELYFNVDNGYLEGLVRGLKAGVLSQADYLNLVQCETLEAAFFQDCISEQDLDEMNIEIIRNTLYKAYLESFYKFCTLLGGTTADAMCPILEFEADRRAFIITINSFGTELSKEDRAKLFPHCGRLYPEGLAQLARADDYEQVKNVADYYPEYKLLFEGAGSNPGDKTLEDRFFEHEVKLNKLAFLNQFHFGVFYAFVKLKEQECRNIVWIAECIAQRHRAKIDNYIPIF

SEQ ID NO: 813532 - protein, 180 aa, Homo sapiens
GRRGSTHASSRNTLYKAYLESFYKFCTLLGGTTADAMCPILEFEADRRAFIITINSFGTELSKEDRAKLFPHCGRLYPEGLAQLARADDYEQVKNVADYYPEYKLLFEGAGSNPGDKTLEDRFFEHEVKLNKLAFLNQFHFGVFYAFVKLKEQECRNIVWIAECIAQRHRAKIDNYIPIF

SEQ ID NO: 813533 - protein, 146 aa, Homo sapiens
MYRGARFGSTYTKIGTIQRRLAEPLRKDDTQIREAVPYCGRLYPEGLAQLARADDYEQVKNVADYYPEYKLLFEGAGSNPGDKTLEDRFFEHEVKLNKLAFLNQFHFGVFYAFVKLKEQECRNIVWIAECIAQRHRAKIDNYIPIF

SEQ ID NO: 813534 - protein, 330 aa, Homo sapiens
ASPDALDSPLRTQRQLTWGVAIRAGRSWFSGPAAPAAAMSFFPELYFNVDNGYLEGLVRGLKAGVLSQADYLNLVQCETLEDLKLHLQSTDYGNFLANEASPLTVSVIDDRLKEKMVVEFRHMRNHAYEPLASFLDFITYSYMIDNVILLITGTLHQRSIAELVPKCHPLGSFEQMEAVNIAQTPAELYNAILVDTPLAAFFQDCISEQDLDEMNIEIIRNTLYKAYLESFYKFCTLLGGTTADAMCPILEFEADRRAFIITINSFGTELSKEDRAKLFPHCGRLYPEGLALYSVVVIGHVLDLFIVVSPSQLRQALRVEPPTVWSLGVC

SEQ ID NO: 813535 - protein, 177 aa, Homo sapiens
MCPILEFEADRRAFIITINSFGTELSKEDRAKLFPHCGRLYPEGLAQLARADDYEQVKNVADYYPVSAPAGRTAVGCVVTSTPTQNPHACASPHPPGQEYKLLFEGAGSNPGDKTLEDRFFEHEVKLNKLAFLNQFHFGVFYAFVKLKEQECRNIVWIAECIAQRHRAKIDNYIPIF

SEQ ID NO: 813536 - protein, 109 aa, Homo sapiens
AYLRVLRVSSLLMSAGLRAAIMAVREFPPKCSLSSQVSTESLCSVERTALRSTEHEVKLNKLAFLNQFHFGVFYAFVKLKEQECRNIVWIAECIAQRHRAKIDNYIPIF

SEQ ID NO: 813537 - protein, 139 aa, Homo sapiens
ASPDALDSPLRTQRQLTWGVAIRAGRSWFSGPAAPAAAMSFFPELYFNVDNGYLEGLVRGLKAGVLSQADYLNLVQCETLEDLKLHLQSTDYGNFLANEASPLTVSVIDDRLKEKMVVEFRHMRNHAYEPLASFLDFIT

SEQ ID NO: 813538 - protein, 389 aa, Homo sapiens; identical to SEQ ID NO: 813522

SEQ ID NO: 813539 - protein, 392 aa, Homo sapiens
GRRGSTHASSRNTLYKRQLTWGVAIRAGRSWFSGPAAPAAAMSFFPELYFNVDNGYLEGLVRGLKAGVLSQADYLNLVQCETLEDLKLHLQSTDYGNFLANEASPLTVSVIDDRLKEKMVVEFRHMRNHAYEPLASFLDFITYSYMIDNVILLITGTLHQRSIAELVPKCHPLGSFEQMEAVNIAQTPAELYNAILVDTPLAAFFQDCISEQDLDEMNIEIIRNTLYKAYLESFYKFCTLLGGTTADAMCPILEFEADRRAFIITINSFGTELSKEDRAKLFPHCGRLYPEGLAQLARADDYEQVKNVADYYPEYKLLFEGAGSNPGDKTLEDRFFEHEVKLNKLAFLNQFHFGVFYAFVKLKEQECRNIVWIAECIAQRHRAKIDNYIPIF

SEQ ID NO: 813540 - protein, 318 aa, Homo sapiens
PGKHSGASARAANAGAWGYRDFRGGQKKGWWTTPQLVATMPVSPAGSHKQQNFGLNNATQPKKSISFFATMKATSVKGYTGANQSRMAVSKTVLIPPELKTVEKPNPNIKTTQVFDINGTDVTPRPLYHPDPLTGTAKPSKLLTSQEGSLGSEFISSYSLYQNTINPSTLGQFTRSVLGSSTVSKSSVSASESIAEDLEEPSYKRERLTSFTDLQVIRAAPEKIVTKEDLEKNIEIILTETETLRFFDLPTVMVSVESEEAEKVTQRNKNYEVLCRNRLGNDLYVERMMQTFNGAPKNKDVQCDKIIMEDKGNFYHSA

SEQ ID NO: 813541 - protein, 813 aa, Homo sapiens
PGKHSGASARAANAGAWGYRDFRGGQKKGWWTTPQLVATMPVSPAGSHKQQNFGLNNATQPKKSISFFATMKATSVKGYTGANQSRMAVSKTVLIPPELKTVEKPNPNIKTTQVFDINGTDVTPRPLYHPDPLTGTAKPSKLLTSQEGSLGSEFISSYSLYQNTINPSTLGQFTRSVLGSSTVSKSSVSASESIAEDLEEPSYKRERLTSFTDLQVIRAAPEKIVTKEDLEKNIEIILTETETLRFFDLPTVMVSVESEEAEKVTQRNKNYEVLCRNRLGNDLYVERMMQTFNGAPKNKDVQCDKIIMEDKGIMSTAWDLYDSYNAMELVSLSVKQSVVESSSKANVLPKDQDQRLPGSTTEKNSETSSLMDIENVILAKIHEDEEDHSDAILKSDKFHQDLFFMERVLMENIFQPKLAAYRQLPVLKEPEPEEPEDVLESAKHEEVEEESKKEEEEEIHAEESTIPANLERLWSFSCDLTKGLNVSSLAWNKTNPDLLAVGYGHFGFKEQKRGLACCWSIKNPMWPERIYQSPYGVTAVDFSIGAPNLLAVGYHNGTIAIYNVRSNSNVPVLDSSESPQKHLGPVWQLQWIEQDRGTTGDGKREILVSISADGRISKWVIRKGLDCYDLMRLKRTTAASNKKGGEKEKKDEALISRQAPGMCFAFHPKGPVYKVTWNPFCHDVFLSCSADWGVIIWQQENVKPSLSFYPATSVVYDVAWSPKSSYIFAAANENRVEIWDLHISTLDPLIVNTANPGIKFTTILFAKQTDCLLVGDSDGQVSVYELRNMPTVLETGRGDIMDTLLGSKSNQSA

SEQ ID NO: 813542 - protein, 638 aa, Homo sapiens
PGKHSGASARAANAGAWGYRDFRGGQKKGWWTTPQLVATMPVSPAGSHKQQNFGLNNATQPKKSISFFATMKATSVKGYTGANQSRMAVSKTVLIPPELKTVEKPNPNIKTTQVFDINGTDVTPRPLYHPDPLTGTAKPSKLLTSQEGSLGSEFISSYSLYQNTINPSTLGQFTRSVLGSSTVSKSSVSASESIAEDLEEPSYKRERLTSFTDLQVIRAAPEKIVTKEDLEKNIEIILTETETLRFFDLPTVMVSVESEEAEKVTQRNKNYEVLCRNRLGNDLYVERMMQTFNGAPKNKDVQCDKIIMEDKGIMSTAWDLYDSYNAMELVSLSVKQSVVESSSKANVLPKDQDQRLPGSTTEKKPEPEEPEDVLESAKHEEVEEESKKEEEEEIHAEESTIPANLERLWSFSCDLTKGLNVSSLAWNKTNPDLLAVGYGHFGFKEQKRGLACCWSIKNPMWPERIYQSPYGVTAVDFSIGAPNLLAVGYHNGTIAIYNVRSNSNVPVLDSSESPQKHLGPVWQLQWIEQDRGTTGDGKREILVSISADGRISKWVIRKGLDCYDLMRLKRTTAASNKKGGEKEKKDEALISRQAPGMCFAFHPKDTNIYLAGTEEGHIHKCSCSYNEQYLDTYRGSSV

SEQ ID NO: 813543 - protein, 390 aa, Homo sapiens
MSTAWDLYDSYNAMELVSLSVKQSVVESSSKANVLPKDQDQRLPGSTTEKNSETSSLMDIENVILAKIHEDEEDHSDAILKSDKFHQDLFFMERVLMENIFQPKLAAYRQLPVLKEPEPEEPEDVLESAKHEEVEEESKKEEEEEIHAEESTIPANLERLWSFSCDLTKGLNVSSLAWNKTNPDLLAVGYGHFGFKEQKRGLACCWSIKNPMWPERIYQSPYGVTAVDFSIGAPNLLAVGYHNGTIAIYNVRSNSNVPVLDSSESPQKHLGPVWQLQWIEQDRGTTGDGKREILVSISADGRISKWVIRKGLDCYDLMRLKRTTAASNKKGGEKEKKDEALISRQAPGMCFAFHPKDTNIYLAGTEEGHIHKCSCSYNEQYLDTYRGSSV

SEQ ID NO: 813544 - protein, 161 aa, Homo sapiens
YVDGETCIAIQKSHDFKGPVYKVTWNPFCHDVFLSCSADWGVIIWQQENVKPSLSFYPATSVVYDVAWSPKSSYIFAAANENRVEIWDLHISTLDPLIVNTANPGIKFTTILFAKQTDCLLVGDSDGQVSVYELRNMPTVLETGRGDIMDTLLGSKSNQSA

SEQ ID NO: 813545 - protein, 638 aa, Homo sapiens; identical to SEQ ID NO: 813542

SEQ ID NO: 813546 - protein, 543 aa, Homo sapiens
PGKHSGASARAANAGAWGYRDFRGGQKKGWWTTPQLVATMPVSPAGSHKQQNFGLNNATQPKKSISFFATMKATSVKGYTGANQSRMAVSKTVLIPPELKTVEKPNPNIKTTQVFDINGTDVTPRPLYHPDPLTGTAKPSKLLTSQEGSLGSEFISSYSLYQNTINPSTLGQFTRSVLGSSTVSKSSVSASESIAEDLEEPSYKRERLTSFTDLQVIRAAPEKIVTKEDLEKNIEIILTETETLRFFDLPTVMVSVESEEAEKVTQRNKNYEVLCRNRLGNDLYVERMMQTFNGAPKNKDVQCDKIIMEDKGIMSTAWDLYDSYNAMELVSLSVKQSVVESSSKANVLPKDQDQRLPGSTTEKNSETSSLMDIENVILAKIHEDEEDHSDAILKSDKFHQDLFFMERVLMENIFQPKLAAYRQLPVLKEPEPEEPEDVLESAKHEEVEEESKKEEEEEIHAEESTIPANLERLWSFSCDLTKGLNVSSLAWNKTNPDLLAVGYGHFGFKEQKRGLACCWSIKNPMVTQTRIRSIFIWLLTKFS

SEQ ID NO: 813547 - protein, 478 aa, Homo sapiens
PGKHSGASARAANAGAWGYRDFRGGQKKGWWTTPQLVATMPVSPAGSHKQQNFGLNNATQPKKSISFFATMKATSVKGYTGANQSRMAVSKTVLIPPELKTVEKPNPNIKTTQVFDINGTDVTPRPLYHPDPLTGTAKPSKLLTSQEGSLGSEFISSYSLYQNTINPSTLGQFTRSVLGSSTVSKSSVSASESIAEDLEEPSYKRERLTSFTDLQVIRAAPEKIVTKEDLEKNIEIILTETETLRFFDLPTVMVSVESEEAEKVTQRNKNYEVLCRNRLGNDLYVERMMQTFNGAPKNKDVQCDKIIMEDKGIMSTAWDLYDSYNAMELVSLSVKQSVVESSSKANVLPKDQDQRLPGSTTEKKPEPEEPEDVLESAKHEEVEEESKKEEEEEIHAEESTIPANLERLWSFSCDLTKGLNVSSLAWNKTNPDLLAVGYGHFGFKEQKRGLACCWSIKNPMVTQTRIRSIFIWLLTKFS

SEQ ID NO: 813548 - protein, 405 aa, Homo sapiens
PGKHSGASARAANAGAWGYRDFRGGQKKGWWTTPQLVATMPVSPAGSHKQQNFGLNNATQPKKSISFFATMKATSVKGYTGANQSRMAVSKTVLIPPELKTVEKPNPNIKTTQVFDINGTDVTPRPLYHPDPLTGTAKPSKLLTSQEGSLGSEFISSYSLYQNTINPSTLGQFTRSVLGSSTVSKSSVSASESIAEDLEEPSYKRERLTSFTDLQVIRAAPEKIVTKEDLEKNIEIILTETETLRFFDLPTVMVSVESEEAEKVTQRNKNYEVLCRNRLGNDLYVERMMQTFNGAPKNKDVQCDKIIMEDKGIMSTAWDLYDSYNAMELVSLSVKQSVVESSSKANVLPKDQDQRLPGSTTEKSLLVEAIKNCSEQSNLRLEITLGLYIRSIFSTPLRPLTYKNV

SEQ ID NO: 813549 - protein, 796 aa, Homo sapiens
MLAPLRNAPGREGATSPSPPTDATGSLGEWDVDRNVKTEGWVSKERISKLHRLRMADILSQSETLASQDLSGDFKKPALPVSPAARSKAPASSSSNPEEVQKEGPTALQDSNSGEPDIPPPQPDCGDFRSLQEEQSRPPTAVSSPGGPARAPPYQEPPWGGPATAPYSLETLKGGTILGTRSLKGTSYCLFGRLSGCDVCLEHPSVSRYHAVLQHRASGPDGECDSNGPGFYLYDLGSTHGTFLNKTRIPPRTYCRVHVGHVVRFGGSTRLFILQGPEEDREAESELTVTQLKELRKQQQILLEKKMLGEDSDEEEEMDTSERKINAGSQDDEMGCTWGMGEDAVEDDAEENPIVLEFQQEREAFYIKDPKKALQGFFDREGEELEYEFDEQGHSTWLCRVRLPVDDSTGKQLVAEAIHSGKKKEAMIQCSLEACRILDTLGLLRQEAVSRKRKAKNWEDEDFYDSDDDTFLDRTGLIEKKRLNRMKKAGKIDEKPETFESLVAKLNDAERELSEISERLKASSQVLSESPSQDSLDAFMSEMKSGSTLDGVSRKKLHLRTFELRKEQQRLKGLIKIVKPAEIPELKKTETQTTGAENKAKKLTLPLFGAMKGGSKFKLKTGTVGKLPPKRPELPPTLMRMKDEPEVEEEEEEEEEEEKEKEEHEKKKLEDGSLSRPQPEIEPEAAVQEMRPPTDLTHFKETQTHENMSQLSEEEQNKDYQDCSKTTSLCAGPSASKNEYEKSRGELKKKKTPGPGKLPPTLSSKYPEDDPDYCVWVPPEGQSGDGRTHLNDKYGY

SEQ ID NO: 813550 - protein, 79 aa, Homo sapiens
RPPPSSNSDGKRAPVHFHQHFLPNILKMTQTTVCGSHLKVKVEMAEPILMTSMAIDCFRIPKENLVDHVTWNIWDNVSN

SEQ ID NO: 813551 - protein, 389 aa, Homo sapiens
ADLEDPGHLQHHSGKKKEAMIQCSLEACRILDTLGLLRQEAVSRKRKAKNWEDEDFYDSDDDTFLDRTGLIEKKRLNRMKKAGKIDEKPETFESLVAKLNDAERELSEISERLKASSQVLSESPSQDSLDAFMSEMKSGSTLDGVSRKKLHLRTFELRKEQQRLKGLIKIVKPAEIPELKKTETQTTGAENKAKKLTLPLFGAMKGGSKFKLKTGTVGKLPPKRPELPPTLMRMKDEPEVEEEEEEEEEEEKEKEEHEKKKLEDGSLSRPQPEIEPEAAVQEMRPPTDLTHFKETQTHENMSQLSEEEQNKDYQDCSKTTSLCAGPSASKNEYEKSRGELKKKKTPGPGKLPPTLSSKYPEDDPDYCVWVPPEGQSGDGRTHLNDKYGY

SEQ ID NO: 813552 - protein, 84 aa, Homo sapiens
VRSLDRMVAPTVFVKVEEKFYFHQHFLPNILKMTQTTVCGSHLKVKVEMAEPILMTSMAIDCFRIPKENLVDHVTWNIWDNVSN

SEQ ID NO: 813553 - protein, 796 aa, Homo sapiens; identical to SEQ ID NO: 813549

SEQ ID NO: 813554 - protein, 796 aa, Homo sapiens; identical to SEQ ID NO: 813549

SEQ ID NO: 813555 - protein, 796 aa, Homo sapiens; identical to SEQ ID NO: 813549

SEQ ID NO: 813556 - protein, 796 aa, Homo sapiens; identical to SEQ ID NO: 813549

SEQ ID NO: 813557 - protein, 807 aa, Homo sapiens
MAATELRGVVGPGPAAIAALGGGGAGPPVVGGGGGRGDAGPGSGAASGTVVAAAAGGPGPGAGGVAAAGPAPAPPTGGSGGSGAGGSGSAREGWLFKWTNYIKGYQRRWFVLSNGLLSYYRSKAEMRHTCRGTINLATANITVEDSCNFIISNGGAQTYHLKASSEVERQRWVTALELAKAKAVKMLAESDESGDEESVSQTDKTELQNTLRTLSSKVEDLSTCNDLIAKHGTALQRSLSELESLKLPAESNEKIKQVNERATLFRITSNAMINACRDFLMLAQTHSKKWQKSLQYERDQRIRLEETLEQLAKQHNHLERAFRGATVLPANTPGNVGSGKDQCCSGKGDMSDEDDENEFFDAPEIITMPENLGHKRTGSNISGASSDISLDEQYKHQLEETKKEKRTRIPYKPNYSLNLWSIMKNCIGKELSKIPMPVNFNEPLSMLQRLTEDLEYHELLDRAAKCENSLEQLCYVAAFTVSSYSTTVFRTSKPFNPLLGETFELDRLEENGYRSLCEQVSHHPPAAAHHAESKNGWTLRQEIKITSKFRGKYLSIMPLGTIHCIFHATGHHYTWKKVTTTVHNIIVGKLWIDQSGEIDIVNHKTGDKCNLKFVPYSYFSRDVARKVTGEVTDPSGKVHFALLGTWDEKMECFKVQPVIGENGGDARQRGHEAEESRVMLWKRNPLPKNAENMYYFSELALTLNAWESGTAPTDSRLRPDQRLMENGRWDEANAEKQRLEEKQRLSRKKREAEAMKATEDGTPYDPYKALWFERKKDPVTKELTHIYRGEYWECKEKQDWSSCPDIF

SEQ ID NO: 813558 - protein, 807 aa, Homo sapiens; identical to SEQ ID NO: 813557

SEQ ID NO: 813559 - protein, 807 aa, Homo sapiens; identical to SEQ ID NO: 813557

SEQ ID NO: 813560 - protein, 807 aa, Homo sapiens; identical to SEQ ID NO: 813557

SEQ ID NO: 813561 - protein, 531 aa, Homo sapiens
MAATELRGVVGPGPAAIAALGGGGAGPPVVGGGGGRGDAGPGSGAASGTVVAAAAGGPGPGAGGVAAAGPAPAPPTGGSGGSGAGGSGSAREGWLFKWTNYIKGYQRRWFVLSNGLLSYYRSKAEMRHTCRGTINLATANITVEDSCNFIISNGGAQTYHLKASSEVERQRWVTALELAKAKAVKMLAESDESGDEESVSQTDKTELQNTLRTLSSKVEDLSTCNDLIAKHGTALQRSLSELESLKLPAESNEKIKQVNERATLFRITSNAMINACRDFLMLAQTHSKKWQKSLQYERDQRIRLEETLEQLAKQHNHLERAFRGATVLPANTPGNVGSGKDQCCSGKGDMSDEDDENEFFDAPEIITMPENLGHKRTGSNISGASSDISLDEQYKHQLEETKKEKRTRIPYKPNYSLNLWSIMKNCIGKELSKIPMPVNFNEPLSMLQRLTEDLEYHELLDRAAKCENSLEQLCYVAAFTVSSYSTTVFRTSKPFNPLLGETFELDRLEENGYRSLCEQVKEPQNHNAFPF

SEQ ID NO: 813562 - protein, 526 aa, Homo sapiens
MSAPALIGTEESLQYERDQRIRLEETLEQLAKQHNHLERAFRGATVLPANTPGNVGSGKDQCCSGKGDMSDEDDENEFFDAPEIITMPENLGHKRTGSNISGASSDISLDEQYKHQLEETKKEKRTRIPYKPNYSLNLWSIMKNCIGKELSKIPMPVNFNEPLSMLQRLTEDLEYHELLDRAAKCENSLEQLCYVAAFTVSSYSTTVFRTSKPFNPLLGETFELDRLEENGYRSLCEQVSHHPPAAAHHAESKNGWTLRQEIKITSKFRGKYLSIMPLGTIHCIFHATGHHYTWKKVTTTVHNIIVGKLWIDQSGEIDIVNHKTGDKCNLKFVPYSYFSRDVARKVTGEVTDPSGKVHFALLGTWDEKMECFKVQPVIGENGGDARQRGHEAEESRVMLWKRNPLPKNAENMYYFSELALTLNAWESGTAPTDSRLRPDQRLMENGRWDEANAEKQRLEEKQRLSRKKREAEAMKATEDGTPYDPYKALWFERKKDPVTKELTHIYRGEYWECKEKQDWSSCPDIF

SEQ ID NO: 813563 - protein, 182 aa, Homo sapiens
MSDEDDENEFFDAPEIITMPENLGHKRTGSNISGASSDISLDEQYKHQLEETKKEKRTRIPYKPNYSLNLWSIMKNCIGKELSKIPMPVNFNEPLSMLQRLTEDLEYHELLDRAAKCENSLEQLCYVAAFTVSSYSTTVFRTSKPFNPLLGETFELDRLEENGYRSLCEQVKEPQNHNAFPF

SEQ ID NO: 813564 - protein, 407 aa, Homo sapiens
MAATELRGVVGPGPAAIAALGGGGAGPPVVGGGGGRGDAGPGSGAMLQRLTEDLEYHELLDRAAKCENSLEQLCYVAAFTVSSYSTTVFRTSKPFNPLLGETFELDRLEENGYRSLCEQVSHHPPAAAHHAESKNGWTLRQEIKITSKFRGKYLSIMPLGTIHCIFHATGHHYTWKKVTTTVHNIIVGKLWIDQSGEIDIVNHKTGDKCNLKFVPYSYFSRDVARKVTGEVTDPSGKVHFALLGTWDEKMECFKVQPVIGENGGDARQRGHEAEESRVMLWKRNPLPKNAENMYYFSELALTLNAWESGTAPTDSRLRPDQRLMENGRWDEANAEKQRLEEKQRLSRKKREAEAMKATEDGTPYDPYKALWFERKKDPVTKELTHIYRGEYWECKEKQDWSSCPDIF

SEQ ID NO: 813565 - protein, 362 aa, Homo sapiens [sequence omitted]

SEQ ID NO: 813566 - protein, 531 aa, Homo sapiens; identical to SEQ ID NO: 813561

SEQ ID NO: 813567 - protein, 150 aa, Homo sapiens
RVRDGGRGGGGRPGPGGRGSGGGWPGPCAADWGLGRLGRWGFGLGSRGLALQMDQLYQRLPAAMVRAEQRAPELLQVTASGALSLTLPPPYLPTVPAPALPPAGTAARVAPGPFSSSVRIDSPGVGAHCHESEKPLDVHLPSPRVTHSWC

SEQ ID NO: 813568 - protein, 261 aa, Homo sapiens
AEGASVSQDGSPAGYSGGLGGRQGARAAACCPPKMEFLLGNPFSTPVGQCLEKATDGSLQSEDWTLNMEICDIINETEEGPKDAIRALKKRLNGNRNYREVMLALTVLETCVKNCGHRFHILVANRDFIDSVLVKIISPKNNPPTIVQDKVLALIQAWADAFRSSPDLTGVVHIYEELKRKGVEFPMADLDALSPIHTPQRSVPEVDPAATMPRSQSQQRTSAGSYSSPPPAPYSAPQAPALSVTGPITANSEQVLAYFGA

SEQ ID NO: 813569 - protein, 61 aa, Homo sapiens
  misc_feature (53)..(53): Xaa can be any naturally occurring amino acid
MQQRIVELISRVSNEEVTEELLHVNDDLNNVFLRYERWEPDFFFFFFLVLTKXGPMADDLP

SEQ ID NO: 813570 - protein, 137 aa, Homo sapiens [sequence omitted]

SEQ ID NO: 813571 - protein, 137 aa, Homo sapiens [sequence omitted]

SEQ ID NO: 813572 - protein, 137 aa, Homo sapiens [sequence omitted]

SEQ ID NO: 813573 - protein, 208 aa, Homo sapiens
AEGASVSQDGSPAGYSGGLGGRQGARAAACCPPKMEFLLGNPFSTPVGQCLEKATDGSLQSEDWTLNMEICDIINETEEGPKDAIRALKKRLNGNRNYREVMLALTVLETCVKNCGHRFHILVANRDFIDSVLVKIISPKNNPPTIVQDKVLALIQAWADAFRSSPDLTGVVHIYEDHQPPSQNCFCLSIPPGSPGEGDGYLFPKVCT

SEQ ID NO: 813574 - protein, 350 aa, Homo sapiens
AEGASVSQDGSPAGYSGGLGGRQGARAAACCPPKMEFLLGNPFSTPVGQCLEKATDGSLQSEDWTLNMEICDIINETEEGPKDAIRALKKRLNGNRNYREVMLALTVLETCVKNCGHRFHILVANRDFIDSVLVKIISPKNNPPTIVQDKVLALIQAWADAFRSSPDLTGVVHIYEELKRKGVEFPMADLDALSPIHTPQRSVPEVDPAATMPRSQSQQRTSAGSYSSPPPAPYSAPQAPALSVTGPITANSEQIARLRSELDVVRGNTKVMSEMLTEMVPGQEDSSDLELLQELNRTCRAMQQRIVELISRVSNEEVTEELLHVNDDLNNVFLRYERWEPDFFFFFFSP

SEQ ID NO: 813575 - protein, 300 aa, Homo sapiens
AEGASVSQDGSPAGYSGGLGGRQGARAAACCPPKMEFLLGNPFSTPVGQCLEKATDGSLQSEDWTLNMEICDIINETEEGPKDAIRALKKRLNGNRNYREVMLALTAWADAFRSSPDLTGVVHIYEELKRKGVEFPMADLDALSPIHTPQRSVPEVDPAATMPRSQSQQRTSAGSYSSPPPAPYSAPQAPALSVTGPITANSEQIARLRSELDVVRGNTKVMSEMLTEMVPGQEDSSDLELLQELNRTCRAMQQRIVELISRVSNEEVTEELLHVNDDLNNVFLRYERWEPDFFFFFFSP

SEQ ID NO: 813576 - protein, 305 aa, Homo sapiens
AEGASVSQDGSPAGYSGGLGGRQGARAAACCPPKMEFLLGNPFSTPVGQCLEKATDGSLQSEDWTLNMEICDIINETEEGPKDAIRALKKRLNGNRNYREVMLALTVLETCVKNCGHRFHILVANRDFIDSVLVKIISPKNNPPTIVQDKVLALIQSVPEVDPAATMPRSQSQQRTSAGSYSSPPPAPYSAPQAPALSVTGPITANSEQIARLRSELDVVRGNTKVMSEMLTEMVPGQEDSSDLELLQELNRTCRAMQQRIVELISRVSNEEVTEELLHVNDDLNNVFLRYERWEPDFFFFFFSP

SEQ ID NO: 813577 - protein, 79 aa, Homo sapiens
PAPTGVTLFLPSPHQVLETCVKNCGHRFHILVANRDFIDSVLVKIISPKNNPPTIVQDKVLALIQVGWTPCPICWNRVR

SEQ ID NO: 813578 - protein, 486 aa, Homo sapiens
MVAGMLGLREEKSEDQDLQGLKDKPLKFKKVKKDKKEEKEGKHEPVQPSAHHSAEPAEAGKAETSEGSGSAPAVPEASASPKQRRSIIRDRGPMYDDPTLPEGWTRKLKQRKSGRSAGKYDVYLINPQGKAFRSKVELIAYFEKVGDTSLDPNDFDFTVTGRGSPSRREQKPPKKPKSPKAPGTGRGRGRPKGSGTTRPKAATSEGVQVKRVLEKSPGKLLVKMPFQTSPGGKAEGGGATTSTQVMVIKRPGRKRKAEADPQAIPKKRGRKPGSVVAAAAAEAKKKAVKESSIRSVQETVLPIKKRKTRETVSIEVKEVVKPLLVSTLGEKSGKGLKTCKSPGRKSKESSPKGRSSSASSPPKKEHHHHHHHSESPKAPVPLLPPLPPPPPEPESSEDPTSPPEPQDLSSSVCKEEKMPRGGSLESDGCPKEPAKTQPAVATAATAAEKYKHRGEGERKDIVSSSMPRPNREEPVDSRTPVTERVS

SEQ ID NO: 813579 - protein, 404 aa, Homo sapiens
MVAGMLGLREEKSEDQDLQGLKDKPLKFKKVKKDKKEEKEGKHEPVQPSAHHSAEPAEAGKAETSEGSGSAPAVPEASASPKQRRSIIRDRGPMYDDPTLPEGWTRKLKQRKSGRSAGKYDVYLINPQGKAFRSKVELIAYFEKVGDTSLDPNDFDFTVTGRGSPSRREQKPPKKPKSPKAPGTGRGRGRPKGSGTTRPKAATSEGVQVKRVLEKSPGKLLVKMPFQTSPGGKAEGGGATTSTQVMVIKRPGRKRKAEADPQAIPKKRGRKPGSVVAAAAAEAKKKAVKESSIRSVQETVLPIKKRKTRETVSIEVKEVVKPLLVSTLGEKSGKGLKTCKSPGRKSKESSPKGRSSSASSPPKKEHHHHHNYSPKGPGNAPHRTNTYTGANKTTQTNRDTRDPS

SEQ ID NO: 813580 - protein, 245 aa, Homo sapiens
MVAGMLGLREEKSEDQDLQGLKDKPLKFKKVKKDKKEEKEGKHEPVQPSAHHSAEPAEAGKAETSEGSGSAPAVPEASASPKQRRSIIRDRGPMYDDPTLPEGWTRKLKQRKSGRSAGKYDVYLINPQGKAFRSKVELIAYFEKVGDTSLDPNDFDFTVTGRGSPSRREQKPPKKPKSPKAPGTGRGRGRPKGSGTTRPKAATSEGVQVKRVLEKSPGKLLVKMPFQTSPGGKAEGGGATTSTST

SEQ ID NO: 813581 - protein, 329 aa, Homo sapiens
MVAGMLGLREEKSEDQDLQGLKDKPLKFKKVKKDKKEEKEGKHEPVQPSAHHSAEPAEAGKAETSEGSGSAPAVPEASASPKQRRSIIRDRGPMYDDPTLPEGWTRKLKQRKSGRSAGKYDVYLINPQGKAFRSKVELIAYFEKVGDTSLDPNDFDFTVTGRGSPSRREQKPPKKPKSPKAPGTGRGRGRPKGSGTTRPKAATSEGVQVKRVLEKSPGKLLVKMPFQTSPGGKAEGGGATTSTQVMVIKRPGRKRKAEADPQAIPERRSRMCVSVREAKKRRLHRWEERSHKGDGSHQKKEPWSPKGETVTGNTRGLPGTKRGQNQENQ

SEQ ID NO: 813582 - protein, 172 aa, Homo sapiens
MLQITEWRFLARDEGESAVAEDPTWGEDEEPSACTTDSWAQGSVPVLHASTSEGLENFQGEVHSSGASPDSSAIAPALPFPTSHCPSAFPQDPGGVDRIPLGRSWMGRGSQEQMESWEPSPQLRVTSAPPPTSELFQEAGPGGPVEEADGQSRGLSSAGSLSASFQLSVEEA

SEQ ID NO: 813583 - protein, 172 aa, Homo sapiens; identical to SEQ ID NO: 813582

SEQ ID NO: 813584 - protein, 139 aa, Homo sapiens
  misc_feature (113)..(113): Xaa can be any naturally occurring amino acid
RPPPSPPRLPTPAAAPLSLSPRPPLAPSPPPSRRTRGAGNELPCDARPLRELSVTHELPTSPAAGRGLRAGKTRGRGGGKGRKVLRRVQLSASESEGSRNEENLQELPSAICXSMVPGYPLASPFPWQAWKHRFGVVLL

SEQ ID NO: 813585 - protein, 841 aa, Homo sapiens
MSVDEKPDSPMYVYESTVHCTNILLGLNDQRKKDILCDVTLIVERKEFRAHRAVLAACSEYFWQALVGQTKNDLVVSLPEEVTARGFGPLLQFAYTAKLLLSRENIREVIRCAEFLRMHNLEDSCFSFLQTQLLNSEDGLFVCRKDAACQRPHEDCENSAGEEEDEEEETMDSETAKMACPRDQMLPEPISFEAAAIPVAEKEEALLPEPDVPTDTKESSEKDALTQYPRYKKYQLACTKNVYNASSHSTSGFASTFREDNSSNSLKPGLARGQIKSEPPSEENEEESITLCLSGDEPDAKDRAGDVEMDRKQPSPAPTPTAPAGAACLERSRSVASPSCLRSLFSITKSVELSGLPSTSQQHFARSPACPFDKGITQGDLKTDYTPFTGNYGQPHVGQKEVSNFTMGSPLRGPGLEALCKQEGELDRRSVIFSSSACDQVSTSVHSYSGVSSLDKDLSEPVPKGLWVGAGQSLPSSQAYSHGGLMADHLPGRMRPNTSCPVPIKVCPRSPPLETRTRTSSSCSSYSYAEDGSGGSPCSLPLCEFSSSPCSQGARFLATEHQEPGLMGDGMYNQVRPQIKCEQSYGTNSSDESGSFSEADSESCPVQDRGQEVKLPFPVDQITDLPRNDFQMMIKMHKLTSEQLEFIHDVRRRSKNRIAAQRCRKRKLDCIQNLECEIRKLVCEKEKLLSERNQLKACMGELLDNFSCLSQEVCRDIQSPEQIQALHRYCPVLRPMDLPTASSINPAPLGAEQNIAASQCAVGENVPCCLEPGAAPPGPPWAPSNTSENCTSGRRLEGTDPGTFSERGPPLEPRSQTVTVDFCQEMTDKCTTDEQPRKDYT

SEQ ID NO: 813586 - protein, 841 aa, Homo sapiens; identical to SEQ ID NO: 813585

SEQ ID NO: 813587 - protein, 841 aa, Homo sapiens; identical to SEQ ID NO: 813585

SEQ ID NO: 813588 - protein, 841 aa, Homo sapiens; identical to SEQ ID NO: 813585

SEQ ID NO: 813589 - protein, 129 aa, Homo sapiens
RPPPSPPRLPTPAAAPLSLSPRPPLAPSPPPSRRTRGAGNELPCDARPLRELSVTHELPTSPAAGRGLRAGKTRGRGGGKGRKVLRRVQLSASESEGSRNEENLQELPRTVTCLIPCSHPCSMNKVDTH

SEQ ID NO: 813590 - protein, 129 aa, Homo sapiens; identical to SEQ ID NO: 813589

SEQ ID NO: 813591 - protein, 554 aa, Homo sapiens
RAHNCLLRPKNKSVRWGPGAGAALLRPSPAALGAGSRACSGPPAAPAQTPRPQVSAPAWGPGRAAGGSGRMERRMKAGYLDQQVPYTFSSKSPGNGSLREALIGPLGKLMDPGSLPPLDSEDLFQDLSHFQETWLAEAQVPDSDEQFVPDFHSENLAFHSPTTRIKKEPQSPRTDPALSCSRKPPLPYHHGEQCLYSSAYDPPRQIAIKSPAPGALGQSPLQPFPRAEQRNFLRSSGTSQPHPGHGYLGEHSSVFQQPLDICHSFTSQGGGREPLPAPYQHQLSEPCPPYPQQSFKQEYHDPLYEQAGQPAVDQGGVNGHRYPGAGVVIKQEQTDFAYDSDVTGCASMYLHTEGFSGPSPGDGAMGYGYEKPLRPFPDDVCVVPEKFEGDIKQEGVGAFREGPPYQRRGALQLWQFLVALLDDPTNAHFIAWTGRGMEFKLIEPEEVARLWGIQKNRPAMNYDKLSRSLRYYYEKGIMQKVAGERYVYKFVCEPEALFSLAFPDNQRPALKAEFDRPVSEEDTVPLSHLDESPAYLPELAGPAQPFGPKGGYSY

SEQ ID NO: 813592 - protein, 103 aa, Homo sapiens
RAHNCLLRPKNKSVRWGPGAGAALLRPSPAALGAGSRACSGPPAAPAQTPRPQVSAPAWGPGRAAGGSGRMERRMKAGYLDQQVPYTFSSVSAAPASTPAPPR

SEQ ID NO: 813593 - protein, 510 aa, Homo sapiens
CERSPLPHQVSAPAWGPGRAAGGSGRMERRMKAGYLDQQVPYTFSSKSPGNGSLREALIGPLGKLMDPGSLPPLDSEDLFQDLSHFQETWLAEAQVPDSDEQFVPDFHSENLAFHSPTTRIKKEPQSPRTDPALSCSRKPPLPYHHGEQCLYSSAYDPPRQIAIKSPAPGALGQSPLQPFPRAEQRNFLRSSGTSQPHPGHGYLGEHSSVFQQPLDICHSFTSQGGGREPLPAPYQHQLSEPCPPYPQQSFKQEYHDPLYEQAGQPAVDQGGVNGHRYPGAGVVIKQEQTDFAYDSDVTGCASMYLHTEGFSGPSPGDGAMGYGYEKPLRPFPDDVCVVPEKFEGDIKQEGVGAFREGPPYQRRGALQLWQFLVALLDDPTNAHFIAWTGRGMEFKLIEPEEVARLWGIQKNRPAMNYDKLSRSLRYYYEKGIMQKVAGERYVYKFVCEPEALFSLAFPDNQRPALKAEFDRPVSEEDTVPLSHLDESPAYLPELAGPAQPFGPKGGYSY

SEQ ID NO: 813594 - protein, 484 aa, Homo sapiens
MERRMKAGYLDQQVPYTFSSKSPGNGSLREALIGPLGKLMDPGSLPPLDSEDLFQDLSHFQETWLAEAQVPDSDEQFVPDFHSENLAFHSPTTRIKKEPQSPRTDPALSCSRKPPLPYHHGEQCLYSSAYDPPRQIAIKSPAPGALGQSPLQPFPRAEQRNFLRSSGTSQPHPGHGYLGEHSSVFQQPLDICHSFTSQGGGREPLPAPYQHQLSEPCPPYPQQSFKQEYHDPLYEQAGQPAVDQGGVNGHRYPGAGVVIKQEQTDFAYDSDVTGCASMYLHTEGFSGPSPGDGAMGYGYEKPLRPFPDDVCVVPEKFEGDIKQEGVGAFREGPPYQRRGALQLWQFLVALLDDPTNAHFIAWTGRGMEFKLIEPEEVARLWGIQKNRPAMNYDKLSRSLRYYYEKGIMQKVAGERYVYKFVCEPEALFSLAFPDNQRPALKAEFDRPVSEEDTVPLSHLDESPAYLPELAGPAQPFGPKGGYSY

SEQ ID NO: 813595 - protein, 496 aa, Homo sapiens
GCPAPESPEDPNLVPQTKRLRVTRGHSPRFSQKSPGNGSLREALIGPLGKLMDPGSLPPLDSEDLFQDLSHFQETWLAEAQVPDSDEQFVPDFHSENLAFHSPTTRIKKEPQSPRTDPALSCSRKPPLPYHHGEQCLYSSAYDPPRQIAIKSPAPGALGQSPLQPFPRAEQRNFLRSSGTSQPHPGHGYLGEHSSVFQQPLDICHSFTSQGGGREPLPAPYQHQLSEPCPPYPQQSFKQEYHDPLYEQAGQPAVDQGGVNGHRYPGAGVVIKQEQTDFAYDSDVTGCASMYLHTEGFSGPSPGDGAMGYGYEKPLRPFPDDVCVVPEKFEGDIKQEGVGAFREGPPYQRRGALQLWQFLVALLDDPTNAHFIAWTGRGMEFKLIEPEEVARLWGIQKNRPAMNYDKLSRSLRYYYEKGIMQKVAGERYVYKFVCEPEALFSLAFPDNQRPALKAEFDRPVSEEDTVPLSHLDESPAYLPELAGPAQPFGPKGGYSY

SEQ ID NO: 813596 - protein, 517 aa, Homo sapiens
RAHNCLLRPKNKSVRWGPGAGAALLRPSPAALGAGSRACSGPPAAPAQTPRPQKSPGNGSLREALIGPLGKLMDPGSLPPLDSEDLFQDLSHFQETWLAEAQVPDSDEQFVPDFHSENLAFHSPTTRIKKEPQSPRTDPALSCSRKPPLPYHHGEQCLYSSAYDPPRQIAIKSPAPGALGQSPLQPFPRAEQRNFLRSSGTSQPHPGHGYLGEHSSVFQQPLDICHSFTSQGGGREPLPAPYQHQLSEPCPPYPQQSFKQEYHDPLYEQAGQPAVDQGGVNGHRYPGAGVVIKQEQTDFAYDSDVTGCASMYLHTEGFSGPSPGDGAMGYGYEKPLRPFPDDVCVVPEKFEGDIKQEGVGAFREGPPYQRRGALQLWQFLVALLDDPTNAHFIAWTGRGMEFKLIEPEEVARLWGIQKNRPAMNYDKLSRSLRYYYEKGIMQKVAGERYVYKFVCEPEALFSLAFPDNQRPALKAEFDRPVSEEDTVPLSHLDESPAYLPELAGPAQPFGPKGGYSY

SEQ ID NO: 813597 - protein, 207 aa, Homo sapiens
MYLHTEGFSGPSPGDGAMGYGYEKPLRPFPDDVCVVPEKFEGDIKQEGVGAFREGPPYQRRGALQLWQFLVALLDDPTNAHFIAWTGRGMEFKLIEPEEVARLWGIQKNRPAMNYDKLSRSLRYYYEKGIMQKVAGERYVYKFVCEPEALFSLAFPDNQRPALKAEFDRPVSEEDTVPLSHLDESPAYLPELAGPAQPFGPKGGYSY

SEQ ID NO: 813598 - protein, 490 aa, Homo sapiens
GCPAPESPEDPNLVPQTKRLRVTRGHSPRFSQKSPGNGSLREALIGPLGKLMDPGSLPPLDSEDLFQDLSHFQETWLAEAQVPDSDEQFVPDFHSENLAFHSPTTRIKKEPQSPRTDPALSCSRKPPLPYHHGEQCLYSRQIAIKSPAPGALGQSPLQPFPRAEQRNFLRSSGTSQPHPGHGYLGEHSSVFQQPLDICHSFTSQGGGREPLPAPYQHQLSEPCPPYPQQSFKQEYHDPLYEQAGQPAVDQGGVNGHRYPGAGVVIKQEQTDFAYDSDVTGCASMYLHTEGFSGPSPGDGAMGYGYEKPLRPFPDDVCVVPEKFEGDIKQEGVGAFREGPPYQRRGALQLWQFLVALLDDPTNAHFIAWTGRGMEFKLIEPEEVARLWGIQKNRPAMNYDKLSRSLRYYYEKGIMQKVAGERYVYKFVCEPEALFSLAFPDNQRPALKAEFDRPVSEEDTVPLSHLDESPAYLPELAGPAQPFGPKGGYSY

SEQ ID NO: 813599 - protein, 510 aa, Homo sapiens; identical to SEQ ID NO: 813593

SEQ ID NO: 813600 - protein, 138 aa, Homo sapiens
ISGDNAREIYPYYDPWMGRGMEFKLIEPEEVARLWGIQKNRPAMNYDKLSRSLRYYYEKGIMQKVAGERYVYKFVCEPEALFSLAFPDNQRPALKAEFDRPVSEEDTVPLSHLDESPAYLPELAGPAQPFGPKGGYSY

SEQ ID NO: 813601 - protein, 510 aa, Homo sapiens; identical to SEQ ID NO: 813593

SEQ ID NO: 813602 - protein, 129 aa, Homo sapiens
MAATKRKRRGGFAVQAKKPKRNEIDAEPPAKRHATAEEVEEEERDRIPGPVCKGKWKNKERILIFSSRGINFRTRHLMQDLRMLMPHSKADTKMDRKDKLFVINEVCEMKNCNKCIYFEAKKKQDLYMW

SEQ ID NO: 813603 - protein, 313 aa, Homo sapiens
MAATKRKRRGGFAVQAKKPKRNEIDAEPPAKRHATAEEVEEEERDRIPGPVCKGKWKNKERILIFSSRGINFRTRHLMQDLRMLMPHSKADTKMDRKDKLFVINEVCEMKNCNKCIYFEAKKKQDLYMWLSNSPHGPSAKFLVQNIHTLAELKMTGNCLKGSRPLLSFDPAFDELPHYALLKELLIQIFSTPRYHPKSQPFVDHVFTFTILDNRIWFRNFQIIEEDAALVEIGPRFVLNLIKIFQGSFGGPTLYENPHYQSPNMHRRVIRSITAAKYREKQQVKDVQKLRKKEPKTLLPHDPTADVWYTVREP

SEQ ID NO: 813604 - protein, 353 aa, Homo sapiens
MAATKRKRRGGFAVQAKKPKRNEIDAEPPAKRHATAEEVEEEERDRIPGPVCKGKWKNKERILIFSSRGINFRTRHLMQDLRMLMPHSKADTKMDRKDKLFVINEVCEMKNCNKCIYFEAKKKQDLYMWLSNSPHGPSAKFLVQNIHTLAELKMTGNCLKGSRPLLSFDPAFDELPHYALLKELLIQIFSTPRYHPKSQPFVDHVFTFTILDNRIWFRNFQIIEEDAALVEIGPRFVLNLIKIFQGSFGGPTLYENPHYQSPNMHRRVIRSITAAKYREKQQVKDVQKLRKKEPKTLLPHDPTADVFVTPAEEKPIEIQWVKPEPKVDLKARKKRIYKRQRKMKQRMDSGKTK

SEQ ID NO: 813605 - protein, 353 aa, Homo sapiens; identical to SEQ ID NO: 813604

SEQ ID NO: 813606 - protein, 365 aa, Homo sapiens
RTRGSTHASGGKMAATKRKRRGGFAVQAKKPKRNEIDAEPPAKRHATAEEVEEEERDRIPGPVCKGKWKNKERILIFSSRGINFRTRHLMQDLRMLMPHSKADTKMDRKDKLFVINEVCEMKNCNKCIYFEAKKKQDLYMWLSNSPHGPSAKFLVQNIHTLAELKMTGNCLKGSRPLLSFDPAFDELPHYALLKELLIQIFSTPRYHPKSQPFVDHVFTFTILDNRIWFRNFQIIEEDAALVEIGPRFVLNLIKIFQGSFGGPTLYENPHYQSPNMHRRVIRSITAAKYREKQQVKDVQKLRKKEPKTLLPHDPTADVFVTPAEEKPIEIQWVKPEPKVDLKARKKRIYKRQRKMKQRMDSGKTK

SEQ ID NO: 813607 - protein, 234 aa, Homo sapiens
DAWVDPRVRWLSNSPHGPSAKFLVQNIHTLAELKMTGNCLKGSRPLLSFDPAFDELPHYALLKELLIQIFSTPRYHPKSQPFVDHVFTFTILDNRIWFRNFQIIEEDAALVEIGPRFVLNLIKIFQGSFGGPTLYENPHYQSPNMHRRVIRSITAAKYREKQQVKDVQKLRKKEPKTLLPHDPTADVFVTPAEEKPIEIQWVKPEPKVDLKARKKRIYKRQRKMKQRMDSGKTK

SEQ ID NO: 813608 - protein, 150 aa, Homo sapiens
GRRGFPRPPSSRSWGGCHVSLPRAWGDGRRDGDVSGGRPPRVHHCFLRNFPSAHPPVLRVPEGRSWARLRAPAPNRVPSPFQRESSRRGMPGRGPAAGGREAEKEKQRGGGARSWRQREQQIAPSQWQRQDEVAPNSLRPMTSRSLQKPH

SEQ ID NO: 813609 - protein, 322 aa, Homo sapiens
MPLYLEDDIRPDIKDDIYDPTYKDKEGPSPKVEYVWRNIILMSLLHLGALYGITLIPTCKFYTWLWGVFYYFVSALGITAGAHRLWSHRSYKARLPLRLFLIIANTMAFQNDVYEWARDHRAHHKFSETHADPHNSRRGFFFSHVGWLLVRKHPAVKEKGSTLDLSDLEAEKLVMFQRRYYKPGLLMMCFILPTLVPWYFWGETFQNSVFVATFLRYAVVLNATWLVNSAAHLFGYRPYDKNISPRENILVSLGAVGEGFHNYHHSFPYDYSASEYRWHINFTTFFIDCMAALGLAYDRKKVSKAAILARIKRTGDGNYKSG

SEQ ID NO: 813610 - protein, 341 aa, Homo sapiens
MPAHLLQDDISSSYTTTTTITAPPSRVLQNGGDKLETMPLYLEDDIRPDIKDDIYDPTYKDKEGPSPKVEYVWRNIILMSLLHLGALYGITLIPTCKFYTWLWGVFYYFVSALGITAGAHRLWSHRSYKARLPLRLFLIIANTMAFQNDVYEWARDHRAHHKFSETHADPHNSRRGFFFSHVGWLLVRKHPAVKEKGSTLDLSDLEAEKLVMFQRRYYKPGLLMMCFILPTLVPWYFWGETFHWLVNSAAHLFGYRPYDKNISPRENILVSLGAVGEGFHNYHHSFPYDYSASEYRWHINFTTFFIDCMAALGLAYDRKKVSKAAILARIKRTGDGNYKSG

SEQ ID NO: 813611 - protein, 359 aa, Homo sapiens
MPAHLLQDDISSSYTTTTTITAPPSRVLQNGGDKLETMPLYLEDDIRPDIKDDIYDPTYKDKEGPSPKVEYVWRNIILMSLLHLGALYGITLIPTCKFYTWLWGVFYYFVSALGITAGAHRLWSHRSYKARLPLRLFLIIANTMAFQNDVYEWARDHRAHHKFSETHADPHNSRRGFFFSHVGWLLVRKHPAVKEKGSTLDLSDLEAEKLVMFQRRYYKPGLLMMCFILPTLVPWYFWGETFQNSVFVATFLRYAVVLNATWLVNSAAHLFGYRPYDKNISPRENILVSLGAVGEGFHNYHHSFPYDYSASEYRWHINFTTFFIDCMAALGLAYDRKKVSKAAILARIKRTGDGNYKSG

SEQ ID NO: 813612 - protein, 102 aa, Homo sapiens
RERGLTLDWSRLVVLLSERGKNISPRENILVSLGAVGEGFHNYHHSFPYDYSASEYRWHINFTTFFIDCMAALGLAYDRKKVSKAAILARIKRTGDGNYKSG

SEQ ID NO: 813613 - protein, 89 aa, Homo sapiens
QDSPGGYVLVIKDAYPEEVGSTVHQPGGIKHHSFPYDYSASEYRWHINFTTFFIDCMAALGLAYDRKKVSKAAILARIKRTGDGNYKSG

SEQ ID NO: 813614 - protein, 359 aa, Homo sapiens; identical to SEQ ID NO: 813611

SEQ ID NO: 813615 - protein, 359 aa, Homo sapiens; identical to SEQ ID NO: 813611

SEQ ID NO: 813616 - protein, 359 aa, Homo sapiens; identical to SEQ ID NO: 813611

SEQ ID NO: 813617 - protein, 359 aa, Homo sapiens; identical to SEQ ID NO: 813611

SEQ ID NO: 813618 - protein, 359 aa, Homo sapiens; identical to SEQ ID NO: 813611

SEQ ID NO: 813619 - protein, 359 aa, Homo sapiens; identical to SEQ ID NO: 813611

SEQ ID NO: 813620 - protein, 359 aa, Homo sapiens; identical to SEQ ID NO: 813611

SEQ ID NO: 813621 - protein, 359 aa, Homo sapiens; identical to SEQ ID NO: 813611

SEQ ID NO: 813622 - protein, 359 aa, Homo sapiens; identical to SEQ ID NO: 813611

SEQ ID NO: 813623 - protein, 359 aa, Homo sapiens; identical to SEQ ID NO: 813611

SEQ ID NO: 813624 - protein, 359 aa, Homo sapiens; identical to SEQ ID NO: 813611

SEQ ID NO: 813625 - protein, 359 aa, Homo sapiens; identical to SEQ ID NO: 813611

SEQ ID NO: 813626 - protein, 335 aa, Homo sapiens
MPAHLLQDDISSSYTTTTTITAPPSRVLQNGGDKLETMPLYLEDDIRPDIKDDIYDPTYKDKEGPSPKVEYVWRNIILMSLLHLGALYGITLIPTCKFYTWLWGVFYYFVSALGITAGAHRLWSHRSYKARLPLRLFLIIANTMAFQNDVYEWARDHRAHHKFSETHADPHNSRRGFFFSHVGWLLVRKHPAVKEKGSTLDLSDLEAEKLVMFQRRYYKPGLLMMCFILPTLVPWYFWGETFQNSVFVATFLRYAVVLNATWLVNSAAHLFGYRPYDKNISPRENILVSLGAVGEGFHNYHHSFPYDYSASEYRWHINFTTFFIDCMARRTFWPR

SEQ ID NO: 813627 - protein, 216 aa, Homo sapiens
MPAHLLQDDISSSYTTTTTITAPPSRVLQNGGDKLETMPLYLEDDIRPDIKDDIYDPTYKDKEGPSPKVEYVWRNIILMSLLHLGALYGITLIPTCKFYTWLWGVFYYFVSALGITAGAHRLWSHRSYKARLPLRLFLIIANTMAFQNDVYEWARDHRAHHKFSETHADPHNSRRGFFFSHVGWLLVRKHPAVKEKGSTLDLSDLEAEKLVMFQRR

SEQ ID NO: 813628 - protein, 205 aa, Homo sapiens
MPAHLLQDDISSSYTTTTTITAPPSRVLQNGGDKLETMPLYLEDDIRPDIKDDIYDPTYKDKEGPSPKVEYVWRNIILMSLLHLGALYGITLIPTCKFYTWLWGVFYYFVSALGITAGAHRLWSHRSYKARLPLRLFLIIANTMAFQPLGNKPVFSARSVDQEHISPLLYIVVLCLCCNSGWREGGVYICCMSRWVRTLVYACVL

SEQ ID NO: 813629 - protein, 359 aa, Homo sapiens; identical to SEQ ID NO: 813611

SEQ ID NO: 813630 - protein, 160 aa, Homo sapiens
  misc_feature (157)..(157): Xaa can be any naturally occurring amino acid
MPAHLLQDDISSSYTTTTTITAPPSRVLQNGGDKLETMPLYLEDDIRPDIKDDIYDPTYKDKEGPSPKVEYVWRNIILMSLLHLGALYGITLIPTCKFYTWLWGVFYYFVSALGITAGAHRLWSHRSYKGLAPLRALFLESFAQTTKMGHFPKKMEXVLN

SEQ ID NO: 813631 - protein, 266 aa, Homo sapiens
MALRGAPAGGGVVRWSPAFPGDTGPSFEVEKFLVLKPRLPLRLFLIIANTMAFQNDVYEWARDHRAHHKFSETHADPHNSRRGFFFSHVGWLLVRKHPAVKEKGSTLDLSDLEAEKLVMFQRRYYKPGLLMMCFILPTLVPWYFWGETFQNSVFVATFLRYAVVLNATWLVNSAAHLFGYRPYDKNISPRENILVSLGAVGEGFHNYHHSFPYDYSASEYRWHINFTTFFIDCMAALGLAYDRKKVSKAAILARIKRTGDGNYKSG

SEQ ID NO: 813632 - protein, 148 aa, Homo sapiens
MFQRRYYKPGLLMMCFILPTLVPWYFWGETFQNSVFVATFLRYAVVLNATWLVNSAAHLFGYRPYDKNISPRENILVSLGAVGEGFHNYHHSFPYDYSASEYRWHINFTTFFIDCMAALGLAYDRKKVSKAAILARIKRTGDGNYKSG

SEQ ID NO: 813633 - protein, 88 aa, Homo sapiens
TGVHKSRKPQCTVTPELLAFVSGEGFHNYHHSFPYDYSASEYRWHINFTTFFIDCMAALGLAYDRKKVSKAAILARIKRTGDGNYKSG

SEQ ID NO: 813634 - protein, 359 aa, Homo sapiens; identical to SEQ ID NO: 813611

SEQ ID NO: 813635 - protein, 359 aa, Homo sapiens; identical to SEQ ID NO: 813611

SEQ ID NO: 813636 - protein, 359 aa, Homo sapiens; identical to SEQ ID NO: 813611

SEQ ID NO: 813637 - protein, 359 aa, Homo sapiens; identical to SEQ ID NO: 813611

SEQ ID NO: 813638 - protein, 359 aa, Homo sapiens; identical to SEQ ID NO: 813611

SEQ ID NO: 813639 - protein, 359 aa, Homo sapiens; identical to SEQ ID NO: 813611

SEQ ID NO: 813640 - protein, 359 aa, Homo sapiens; identical to SEQ ID NO: 813611

SEQ ID NO: 813641 - protein, 359 aa, Homo sapiens; identical to SEQ ID NO: 813611

SEQ ID NO: 813642 - protein, 359 aa, Homo sapiens; identical to SEQ ID NO: 813611

SEQ ID NO: 813643 - protein, 133 aa, Homo sapiens
LLTQGRAAANSGASCALILDSWLYPVCPFSLTRSFSSLNVFFFPWTGSLLCVYSEAVMTCCPGSSLLHTECSGSLNHCFSFESRASCHFHVASAVSPPTPLVLPCHTDGSRQGWQTLPETSLAQKASLSLPLS

SEQ ID NO: 813644 - protein, 359 aa, Homo sapiens; identical to SEQ ID NO: 813611

SEQ ID NO: 813645 - protein, 359 aa, Homo sapiens; identical to SEQ ID NO: 813611

SEQ ID NO: 813646 - protein, 359 aa, Homo sapiens; identical to SEQ ID NO: 813611

SEQ ID NO: 813647 - protein, 359 aa, Homo sapiens; identical to SEQ ID NO: 813611

SEQ ID NO: 813648 - protein, 307 aa, Homo sapiens
MPAHLLQDDISSSYTTTTTITAPPSRVLQNGGDKLETMPLYLEDDIRPDIKDDIYDPTYKDKEGPSPKVEYVWRNIILMSLLHLGALYGITLIPTCKFYTWLWGVFYYFVSALGITAGAHRLWSHRSYKARLPLRLFLIIANTMAFQNDVYEWARDHRAHHKFSETHADPHNSRRGFFFSHVGWLLVRKHPAVKEKGSTLDLSDLEAEKLVMFQRRYYKPGLLMMCFILPTLVPWYFWGETFQNSVFVATFLRYAVVLNATWLVNSAAHLFGYRPYDKNISPRENILVSLGAVGKSAVQVRLHPVVC

SEQ ID NO: 813649 - protein, 108 aa, Homo sapiens
MPAHLLQDDISSSYTTTTTITAPPSRVLQNGGDKLETMPLYLEDDIRPDIKDDIYDPTYKDKEGPSPKVEYVWRNIILMSLLHLGALYVVSDIKDDIYDPTYEDKEGP

SEQ ID NO: 813650 - protein, 380 aa, Homo sapiens
MEEGGDFDNYYGADNQSECEYTDWKSSGALIPAIYMLVFLLGTTGNGLVLWTVFRSSREKRRSADIFIASLAVADLTFVVTLPLWATYTYRDYDWPFGTFFCKLSSYLIFVNMYASVFCLTGLSFDRYLAIVRPVANARLRLRVSGAVATAVLWVLAALLAMPVMVLRTTGDLENTTKVQCYMDYSMVATVSSEWAWEVGLGVSSTTVGFVVPFTIMLTCYFFIAQTIAGHFRKERIEGLRKRRRLLSIIVVLVVTFALCWMPYHLVKTLYMLGSLLHWPCDFDLFLMNIFPYCTCISYVNSCLNPFLYAFFDPRFRQACTSMLCCGQSRCAGTSHSSSGEKSASYSSGHSQGPGPNMGKGGEQMHEKSIPYSQETLVVD

SEQ ID NO: 813651 - protein, 380 aa, Homo sapiens; identical to SEQ ID NO: 813650

SEQ ID NO: 813652 - protein, 380 aa, Homo sapiens; identical to SEQ ID NO: 813650

SEQ ID NO: 813653 - protein, 380 aa, Homo sapiens; identical to SEQ ID NO: 813650

SEQ ID NO: 813654 - protein, 380 aa, Homo sapiens; identical to SEQ ID NO: 813650

SEQ ID NO: 813655 - protein, 253 aa, Homo sapiens
KLAAAFLLGILFALVCRSPRAQPPDFAAAWSRLAATSAARRPPGSPVYGNSHESAQSRRVVISHNMDKALKEVFDYSYRDYILSWYGNLSRDEGQLYHLLLEDFWEIARQLHHRLSHVDVVKVVCNDVVRTLLTHFCDLKAANARHEEQPRPFVLHACLRNSDDEVRFLQTCSRVLVFCLLPSKDVQSLSLRIMLAEILTTKVLKPVVELLSNPDYINQMLLAQLAYREQMNEHHKRAYTYAPSYEDFIKLIN

SEQ ID NO: 813656 - protein, 166 aa, Homo sapiens
KLAAAFLLGILFALVCRSPRAQPPDFAAAWSRLAATSAARRPPGSPVYGNSHESAQSRRVVISHNMDKALKEVFDYSYRDYILSWYGNLSRDEGQLYHLLLEDFWEIARQLHHRLSHVDVVKVVCNDVVRTLLTHFCDLKAANARHEEQPRPFVLHACLRNSDDES

SEQ ID NO: 813657 - protein, 190 aa, Homo sapiens
LYCRRLFLGVPKGYFLLAKAHFEKVRVMVHNPYLAKSTGSAKLNLGKQFGISYFNNEMADVMILREYKKPPEPFYLKAANARHEEQPRPFVLHACLRNSDDEVRFLQTCSRVLVFCLLPSKDVQSLSLRIMLAEILTTKVLKPVVELLSNPDYINQMLLAQLAYREQMNEHHKRAYTYAPSYEDFIKLIN

SEQ ID NO: 813658 - protein, 346 aa, Homo sapiens
MSAKSKGNPSSSCPAEGPPAASKTKVKEQIKIIVEDLELVLGDLKDVAKELKEMKSHSVAQAESAMAQSGLTATSASQVQAILLPQPASVRHYAWVVDQIDTLTSDLQLEDEMTDSSKTDTLNSSSSGTTASSLEKIKVQANAPLIKPPAHPSAILTVLRKPNPPPPPPRLTPVKCEDPKRVVPTANPVKTNGTLLRNGGLPGGPNKIPNGDICCIPNSNLDKAPVQLLMHRPEKDRCPQAGPRERVRFNEKVQYHGYCPDCDTRYNIKNREVHLHSEPVHPPGKIPHQGPPLPPTPHLPPFPLENGGMGISHSNSFPPIRPATVPPPTAPKPQKTILRKSTTTTV

SEQ ID NO: 813659 - protein, 133 aa, Homo sapiens
MSAKSKGNPSSSCPAEGPPAASKTKVKEQIKIIVEDLELVLGDLKDVAKELKEVLLFFQTKEKENHTAPQMTLDTDRSWGVTYMFICCLVIKIISVVTTYIFKDSLLETKMSYFHTSFCGCLTFFFFFFFSLI

SEQ ID NO: 813660 - protein, 107 aa, Homo sapiens
MSAKSKGNPSSSCPAEGPPAASKTKVKEQIKIIVEDLELVLGDLKDVAKELKESPTLLPTASSPDDRARPSEVVYLNIPKHIKDTVTIWYNLVGPPLYNIRSSLLME

SEQ ID NO: 813661 - protein, 304 aa, Homo sapiens
MSAKSKGNPSSSCPAEGPPAASKTKVKEQIKIIVEDLELVLGDLKDVAKELKEVVDQIDTLTSDLQLEDEMTDSSKTDTLNSSSSGTTASSLEKIKVQANAPLIKPPAHPSAILTVLRKPNPPPPPPRLTPVKCEDPKRVVPTANPVKTNGTLLRNGGLPGGPNKIPNGDICCIPNSNLDKAPVQLLMHRPEKDRCPQAGPRERVRFNEKVQYHGYCPDCDTRYNIKNREVHLHSEPVHPPGKIPHQGPPLPPTPHLPPFPLENGGMGISHSNSFPPIRPATVPPPTAPKPQKTILRKSTTTTV

SEQ ID NO: 813662 - protein, 234 aa, Homo sapiens
MTDSSKTDTLNSSSSGTTASSLEKIKVQANAPLIKPPAHPSAILTVLRKPNPPPPPPRLTPVKCEDPKRVVPTANPVKTNGTLLRNGGLPGGPNKIPNGDICCIPNSNLDKAPVQLLMHRPEKDRCPQAGPRERVRFNEKVQYHGYCPDCDTRYNIKNREVHLHSEPVHPPGKIPHQGPPLPPTPHLPPFPLENGGMGISHSNSFPPIRPATVPPPTAPKPQKTILRKSTTTTV

SEQ ID NO: 813663 - protein, 300 aa, Homo sapiens
HEENMFEFWDWVGGRYSLWSAIGLSIALHVGFDNFEQLLSGAHWMDQHFRTTPLEKNAPVLLALLGIWYINCFGCETHAMLPYDQYLHRFAAYFQQGDMESNGKYITKSGTRVDHQTGPIVWGEPGTNGQHAFYQLIHQGTKMIPCDFLIPVQTQHPIRKGLHHKILLANFLAQTEALMRGKSTEEARKELQAAGKSPEDLERLLPHKVFEGNRPTNSIVFTKLTPFMLGALVAMYEHKIFVQGIIWDINSFDQWGVELGKQLAKKIEPELDGSAQVTSHDASTNGLINFIKQQREARVQ

SEQ ID NO: 813664 - protein, 300 aa, Homo sapiens; identical to SEQ ID NO: 813663

SEQ ID NO: 813665 - protein, 300 aa, Homo sapiens; identical to SEQ ID NO: 813663

SEQ ID NO: 813666 - protein, 300 aa, Homo sapiens; identical to SEQ ID NO: 813663

SEQ ID NO: 813667 - protein, 1016 aa, Homo sapiens
MSQGPPTGESSEPEAKVLHTKRLYRAVVEAVHRLDLILCNKTAYQEVFKPENISLRNKLRELCVKLMFLHPVDYGRKAEELLWRKVYYEVIQLIKTNKKHIHSRSTLECAYRTHLVAGIGFYQHLLLYIQSHYQLELQCCIDWTHVTDPLIGCKKPVSASGKEMDWAQMACHRCLVYLGDLSRYQNELAGVDTELLAERFYYQALSVAPQIGMPFNQLGTLAGSKYYNVEAMYCYLRCIQSEVSFEGAYGNLKRLYDKAAKMYHQLKKCETRKLSPGKKRCKDIKRLLVNFMYLQSLLQPKSSSVDSELTSLCQSVLEDFNLCLFYLPSSPNLSLASEDEEEYESGYAFLPDLLIFQMVIICLMCVHSLERAGSKQYSAAIAFTLALFSHLVNHVNIRLQAELEEGENPVPAFQSDGTDEPESKEPVEKEEEPDPEPPPVTPQVGEGRKSRKFSRLSCLRRRRHPPKVGDDSDLSEGFESDSSHDSARASEGSDSGSDKSLEGGGTAFDAETDSEMNSQESRSDLEDMEEEEGTRSPTLEPPRGRSEAPDSLNGPLGPSEASIASNLQAMSTQMFQTKRCFRLAPTFSNLLLQPTTNPHTSASHRPCVNGDVDKPSEPASEEGSESEGSESSGRSCRNERSIQEKLQVLMAEGLLPAVKVFLDWLRTNPDLIIVCAQSSQSLWNRLSVLLNLLPAAGELQESGLALCPEVQDLLEGCELPDLPSSLLLPEDMALRNLPPLRAAHRRFNFDTDRPLLSTLEESVVRICCIRSFGHFIARLQGSILQFNPEVGIFVSIAQSEQESLLQQAQAQFRMAQEEARRNRLMRDMAQLRLQLEVSQLEGSLQQPKAQSAMSPYLVPDTQALCHHLPVIRQLATSGRFIVIIPRTVIDGLDLLKKEHPGARDGIRYLEAEFKKGNRYIRCQKEVGKSFERHKLKRQDADAWTLYKILDSCKQLTLAQGAGEEDPSGMVTIITGLPLDNPSVLSGPMQAALQAAAHASVDIKNVLDFYKQWKEIG

SEQ ID NO: 813668 - protein, 1016 aa, Homo sapiens; identical to SEQ ID NO: 813667

SEQ ID NO: 813669 - protein, 970 aa, Homo sapiens
MSQGPPTGESSEPEAKVLHTKRLYRAVVEAVHRLDLILCNKTAYQEVFKPENISLRNKLRELCVKLMFLHPVDYGRKAEELLWRKVYYEVIQLIKTNKKHIHSRSTLECAYRTHLVAGIGFYQHLLLYIQSHYQLELQCCIDWTHVTDPLIGCKKPVSASGKEMDWAQMACHRCLVYLGDLSRYQNELAGVDTELLAERFYYQALSVAPQIGMPFNQLGTLAGSKYYNVEAMYCYLRCIQSEVSFEGAYGNLKRLYDKAAKMYHQLKKCETRKLSPGKKRCKDIKRLLVNFMYLQSLLQPKSSSVDSELTSLCQSVLEDFNLCLFYLPSSPNLSLASEDEEEYESGYAFLPDLLIFQMVIICLMCVHSLERADEPESKEPVEKEEEPDPEPPPVTPQVGEGRKSRKFSRLSCLRRRRHPPKVGDDSDLSEGFESDSSHDSARASEGSDSGSDKSLEGGGTAFDAETDSEMNSQESRSDLEDMEEEEGTRSPTLEPPRGRSEAPDSLNGPLGPSEASIASNLQAMSTQMFQTKRCFRLAPTFSNLLLQPTTNPHTSASHRPCVNGDVDKPSEPASEEGSESEGSESSGRSCRNERSIQEKLQVLMAEGLLPAVKVFLDWLRTNPDLIIVCAQSSQSLWNRLSVLLNLLPAAGELQESGLALCPEVQDLLEGCELPDLPSSLLLPEDMALRNLPPLRAAHRRFNFDTDRPLLSTLEESVVRICCIRSFGHFIARLQGSILQFNPEVGIFVSIAQSEQESLLQQAQAQFRMAQEEARRNRLMRDMAQLRLQLEVSQLEGSLQQPKAQSAMSPYLVPDTQALCHHLPVIRQLATSGRFIVIIPRTVIDGLDLLKKEHPGARDGIRYLEAEFKKGNRYIRCQKEVGKSFERHKLKRQDADAWTLYKILDSCKQLTLAQGAGEEDPSGMVTIITGLPLDNPSVLSGPMQAALQAAAHASVDIKNVLDFYKQWKEIG

SEQ ID NO: 813670 - protein, 853 aa, Homo sapiens
MDWAQMACHRCLVYLGDLSRYQNELAGVDTELLAERFYYQALSVAPQIGMPFNQLGTLAGSKYYNVEAMYCYLRCIQSEVSFEGAYGNLKRLYDKAAKMYHQLKKCETRKLSPGKKRCKDIKRLLVNFMYLQSLLQPKSSSVDSELTSLCQSVLEDFNLCLFYLPSSPNLSLASEDEEEYESGYAFLPDLLIFQMVIICLMCVHSLERAGSKQYSAAIAFTLALFSHLVNHVNIRLQAELEEGENPVPAFQSDGTDEPESKEPVEKEEEPDPEPPPVTPQVGEGRKSRKFSRLSCLRRRRHPPKVGDDSDLSEGFESDSSHDSARASEGSDSGSDKSLEGGGTAFDAETDSEMNSQESRSDLEDMEEEEGTRSPTLEPPRGRSEAPDSLNGPLGPSEASIASNLQAMSTQMFQTKRCFRLAPTFSNLLLQPTTNPHTSASHRPCVNGDVDKPSEPASEEGSESEGSESSGRSCRNERSIQEKLQVLMAEGLLPAVKVFLDWLRTNPDLIIVCAQSSQSLWNRLSVLLNLLPAAGELQESGLALCPEVQDLLEGCELPDLPSSLLLPEDMALRNLPPLRAAHRRFNFDTDRPLLSTLEESVVRICCIRSFGHFIARLQGSILQFNPEVGIFVSIAQSEQESLLQQAQAQFRMAQEEARRNRLMRDMAQLRLQLEVSQLEGSLQQPKAQSAMSPYLVPDTQALCHHLPVIRQLATSGRFIVIIPRTVIDGLDLLKKEHPGARDGIRYLEAEFKKGNRYIRCQKEVGKSFERHKLKRQDADAWTLYKILDSCKQLTLAQGAGEEDPSGMVTIITGLPLDNPSVLSGPMQAALQAAAHASVDIKNVLDFYKQWKEIG

SEQ ID NO: 813671 - protein, 910 aa, Homo sapiens
MISRIWPPLVAGIGFYQHLLLYIQSHYQLELQCCIDWTHVTDPLIGCKKPVSASGKEMDWAQMACHRCLVYLGDLSRYQNELAGVDTELLAERFYYQALSVAPQIGMPFNQLGTLAGSKYYNVEAMYCYLRCIQSEVSFEGAYGNLKRLYDKAAKMYHQLKKCETRKLSPGKKRCKDIKRLLVNFMYLQSLLQPKSSSVDSELTSLCQSVLEDFNLCLFYLPSSPNLSLASEDEEEYESGYAFLPDLLIFQMVIICLMCVHSLERAGSKQYSAAIAFTLALFSHLVNHVNIRLQAELEEGENPVPAFQSDGTDEPESKEPVEKEEEPDPEPPPVTPQVGEGRKSRKFSRLSCLRRRRHPPKVGDDSDLSEGFESDSSHDSARASEGSDSGSDKSLEGGGTAFDAETDSEMNSQESRSDLEDMEEEEGTRSPTLEPPRGRSEAPDSLNGPLGPSEASIASNLQAMSTQMFQTKRCFRLAPTFSNLLLQPTTNPHTSASHRPCVNGDVDKPSEPASEEGSESEGSESSGRSCRNERSIQEKLQVLMAEGLLPAVKVFLDWLRTNPDLIIVCAQSSQSLWNRLSVLLNLLPAAGELQESGLALCPEVQDLLEGCELPDLPSSLLLPEDMALRNLPPLRAAHRRFNFDTDRPLLSTLEESVVRICCIRSFGHFIARLQGSILQFNPEVGIFVSIAQSEQESLLQQAQAQFRMAQEEARRNRLMRDMAQLRLQLEVSQLEGSLQQPKAQSAMSPYLVPDTQALCHHLPVIRQLATSGRFIVIIPRTVIDGLDLLKKEHPGARDGIRYLEAEFKKGNRYIRCQKEVGKSFERHKLKRQDADAWTLYKILDSCKQLTLAQGAGEEDPSGMVTIITGLPLDNPSVLSGPMQAALQAAAHASVDIKNVLDFYKQWKEIG

SEQ ID NO: 813672 - protein, 804 aa, Homo sapiens
MPFNQLGTLAGSKYYNVEAMYCYLRCIQSEVSFEGAYGNLKRLYDKAAKMYHQLKKCETRKLSPGKKRCKDIKRLLVNFMYLQSLLQPKSSSVDSELTSLCQSVLEDFNLCLFYLPSSPNLSLASEDEEEYESGYAFLPDLLIFQMVIICLMCVHSLERAGSKQYSAAIAFTLALFSHLVNHVNIRLQAELEEGENPVPAFQSDGTDEPESKEPVEKEEEPDPEPPPVTPQVGEGRKSRKFSRLSCLRRRRHPPKVGDDSDLSEGFESDSSHDSARASEGSDSGSDKSLEGGGTAFDAETDSEMNSQESRSDLEDMEEEEGTRSPTLEPPRGRSEAPDSLNGPLGPSEASIASNLQAMSTQMFQTKRCFRLAPTFSNLLLQPTTNPHTSASHRPCVNGDVDKPSEPASEEGSESEGSESSGRSCRNERSIQEKLQVLMAEGLLPAVKVFLDWLRTNPDLIIVCAQSSQSLWNRLSVLLNLLPAAGELQESGLALCPEVQDLLEGCELPDLPSSLLLPEDMALRNLPPLRAAHRRFNFDTDRPLLSTLEESVVRICCIRSFGHFIARLQGSILQFNPEVGIFVSIAQSEQESLLQQAQAQFRMAQEEARRNRLMRDMAQLRLQLEVSQLEGSLQQPKAQSAMSPYLVPDTQALCHHLPVIRQLATSGRFIVIIPRTVIDGLDLLKKEHPGARDGIRYLEAEFKKGNRYIRCQKEVGKSFERHKLKRQDADAWTLYKILDSCKQLTLAQGAGEEDPSGMVTIITGLPLDNPSVLSGPMQAALQAAAHASVDIKNVLDFYKQWKEIG

SEQ ID NO: 813673 - protein, 853 aa, Homo sapiens
VDIPQIHQTSVTCHLWDLSRYQNELAGVDTELLAERFYYQALSVAPQIGMPFNQLGTLAGSKYYNVEAMYCYLRCIQSEVSFEGAYGNLKRLYDKAAKMYHQLKKCETRKLSPGKKRCKDIKRLLVNFMYLQSLLQPKSSSVDSELTSLCQSVLEDFNLCLFYLPSSPNLSLASEDEEEYESGYAFLPDLLIFQMVIICLMCVHSLERAGSKQYSAAIAFTLALFSHLVNHVNIRLQAELEEGENPVPAFQSDGTDEPESKEPVEKEEEPDPEPPPVTPQVGEGRKSRKFSRLSCLRRRRHPPKVGDDSDLSEGFESDSSHDSARASEGSDSGSDKSLEGGGTAFDAETDSEMNSQESRSDLEDMEEEEGTRSPTLEPPRGRSEAPDSLNGPLGPSEASIASNLQAMSTQMFQTKRCFRLAPTFSNLLLQPTTNPHTSASHRPCVNGDVDKPSEPASEEGSESEGSESSGRSCRNERSIQEKLQVLMAEGLLPAVKVFLDWLRTNPDLIIVCAQSSQSLWNRLSVLLNLLPAAGELQESGLALCPEVQDLLEGCELPDLPSSLLLPEDMALRNLPPLRAAHRRFNFDTDRPLLSTLEESVVRICCIRSFGHFIARLQGSILQFNPEVGIFVSIAQSEQESLLQQAQAQFRMAQEEARRNRLMRDMAQLRLQLEVSQLEGSLQQPKAQSAMSPYLVPDTQALCHHLPVIRQLATSGRFIVIIPRTVIDGLDLLKKEHPGARDGIRYLEAEFKKGNRYIRCQKEVGKSFERHKLKRQDADAWTLYKILDSCKQLTLAQGAGEEDPSGMVTIITGLPLDNPSVLSGPMQAALQAAAHASVDIKNVLDFYKQWKEIG

SEQ ID NO: 813674 - protein, 661 aa, Homo sapiens
LREQSWTGPPSRIRPLGGSKQYSAAIAFTLALFSHLVNHVNIRLQAELEEGENPVPAFQSDGTDEPESKEPVEKEEEPDPEPPPVTPQVGEGRKSRKFSRLSCLRRRRHPPKVGDDSDLSEGFESDSSHDSARASEGSDSGSDKSLEGGGTAFDAETDSEMNSQESRSDLEDMEEEEGTRSPTLEPPRGRSEAPDSLNGPLGPSEASIASNLQAMSTQMFQTKRCFRLAPTFSNLLLQPTTNPHTSASHRPCVNGDVDKPSEPASEEGSESEGSESSGRSCRNERSIQEKLQVLMAEGLLPAVKVFLDWLRTNPDLIIVCAQSSQSLWNRLSVLLNLLPAAGELQESGLALCPEVQDLLEGCELPDLPSSLLLPEDMALRNLPPLRAAHRRFNFDTDRPLLSTLEESVVRICCIRSFGHFIARLQGSILQFNPEVGIFVSIAQSEQESLLQQAQAQFRMAQEEARRNRLMRDMAQLRLQLEVSQLEGSLQQPKAQSAMSPYLVPDTQALCHHLPVIRQLATSGRFIVIIPRTVIDGLDLLKKEHPGARDGIRYLEAEFKKGNRYIRCQKEVGKSFERHKLKRQDADAWTLYKILDSCKQLTLAQGAGEEDPSGMVTIITGLPLDNPSVLSGPMQAALQAAAHASVDIKNVLDFYKQWKEIG

SEQ ID NO: 813675 - protein, 1016 aa, Homo sapiens; identical to SEQ ID NO: 813667

SEQ ID NO: 813676 - protein, 189 aa, Homo sapiens
MAQLRLQLEVSQLEGSLQQPKAQSAMSPYLVPDTQALCHHLPVIRQLATSGRFIVIIPRTVIDGLDLLKKEHPGARDGIRYLEAEFKKGNRYIRCQKEVGKSFERHKLKRQDADAWTLYKILDSCKQLTLAQGAGEEDPSGMVTIITGLPLDNPSVLSGPMQAALQAAAHASVDIKNVLDFYKQWKEIG

SEQ ID NO: 813677 - protein, 1016 aa, Homo sapiens; identical to SEQ ID NO: 813667

SEQ ID NO: 813678 - protein, 120 aa, Homo sapiens
MYEAGWLSAQGYLEAEFKKGNRYIRCQKEVGKSFERHKLKRQDADAWTLYKILDSCKQLTLAQGAGEEDPSGMVTIITGLPLDNPSVLSGPMQAALQAAAHASVDIKNVLDFYKQWKEIG

SEQ ID NO: 813679 - protein, 1016 aa, Homo sapiens; identical to SEQ ID NO: 813667

SEQ ID NO: 813680 - protein, 1016 aa, Homo sapiens; identical to SEQ ID NO: 813667

SEQ ID NO: 813681 - protein, 943 aa, Homo sapiens [sequence omitted]

SEQ ID NO: 813682 - protein, 92 aa, Homo sapiens
SVPAQQPRARSTAPVGLVGTGQNGMPGREERGCSLRPPPPFLSKGGLKTRGRHSVGSRKERLLEAAQSEAPVPPFAFRRTEDLKGLAFGVLR

SEQ ID NO: 813683 - protein, 733 aa, Homo sapiens
MSQGPPTGESSEPEAKVLHTKRLYRAVVEAVHRLDLILCNKTAYQEVFKPENISLRNKLRELCVKLMFLHPVDYGRKAEELLWRKVYYEVIQLIKTNKKHIHSRSTLECAYRTHLVAGIGFYQHLLLYIQSHYQLELQCCIDWTHVTDPLIGCKKPVSASGKEMDWAQMACHRCLVYLGDLSRYQNELAGVDTELLAERFYYQALSVAPQIGMPFNQLGTLAGSKYYNVEAMYCYLRCIQSEVSFEGAYGNLKRLYDKAAKMYHQLKKCETRKLSPGKKRCKDIKRLLVNFMYLQSLLQPKSSSVDSELTSLCQSVLEDFNLCLFYLPSSPNLSLASEDEEEYESGYAFLPDLLIFQMVIICLMCVHSLERAGSKQYSAAIAFTLALFSHLVNHVNIRLQAELEEGENPVPAFQSDGTDEPESKEPVEKEEEPDPEPPPVTPQVGEGRKSRKFSRLSCLRRRRHPPKVGDDSDLSEGFESDSSHDSARASEGSDSGSDKSLEGGGTAFDAETDSEMNSQESRSDLEDMEEEEGTRSPTLEPPRGRSEAPDSLNGPLGPSEASIASNLQAMSTQMFQTKRCFRLAPTFSNLLLQPTTNPHTSASHRPCVNGDVDKPSEPASEEGSESEGSESSGRSCRNERSIQEKLQVLMAEGLLPAVKVFLDWLRTNPDLIIVCAQAWPCVLRSKIFLKVVNCLTSPLAFCSQRTWLFVTCPRSELPTDALTLTRIGPCSAP

SEQ ID NO: 813684 - protein, 120 aa, Homo sapiens; identical to SEQ ID NO: 813678

SEQ ID NO: 813685 - protein, 538 aa, Homo sapiens
MSQGPPTGESSEPEAKVLHTKRLYRAVVEAVHRLDLILCNKTAYQEVFKPENISLRNKLRELCVKLMFLHPVDYGRKAEELLWRKVYYEVIQLIKTNKKHIHSRSTLECAYRTHLVAGIGFYQHLLLYIQSHYQLELQCCIDWTHVTDPLIGCKKPVSASGKEMDWAQMACHRCLVYLGDLSRYQNELAGVDTELLAERFYYQALSVAPQIGMPFNQLGTLAGSKYYNVEAMYCYLRCIQSEVSFEGAYGNLKRLYDKAAKMYHQLKKCETRKLSPGKKRCKDIKRLLVNFMYLQSLLQPKSSSVDSELTSLCQSVLEDFNLCLFYLPSSPNLSLASEDEEEYESGYAFLPDLLIFQMVIICLMCVHSLERAGSKQYSAAIAFTLALFSHLVNHVNIRLQAELEEGENPVPAFQSDGTDEPESKEPVEKEEEPDPEPPPVTPQVGEGRKSRKFSRLSCLRRRRHPPKVGDDSDLSEGFESDSSHDSARASEGSDSGSDKSLEGGGTAFDAETDSEMNSQESRSDLEDMEDSWLPASLL

SEQ ID NO: 813686 - protein, 238 aa, Homo sapiens
MSQGPPTGESSEPEAKVLHTKRLYRAVVEAVHRLDLILCNKTAYQEVFKPENISLRNKLRELCVKLMFLHPVDYGRKAEELLWRKVYYEVIQLIKTNKKHIHSRSTLECAYRTHLVAGIGFYQHLLLYIQSHYQLELQCCIDWTHVTDPLIGCKKPVSASGKEMDWAQMACHRCLVYLGDLSRYQNELAGVDTELLAERFYYQALSVAPQIGMPFNQLGTLAGSKYYNVEAMYCYLRW

SEQ ID NO: 813687 - protein, 636 aa, Homo sapiens
VAGVPPAAAETPCAFAFSAPGPGPAPPPPLPAFPEAPGSEPACCPLAFRVDPFTDYGSSLTVTLPPELQAHQPFQVILRYTSTDAPAIWWLDPELTYGCAKPFVFTQGHSVCNRSFFPCFDTPAVKCTYSAVVKAPSGVQVLMSATRSAYMEEEGVFHFHMEHPVPAYLVALVAGDLKPADIGPRSRVWAEPCLLPTATSKLSGAVEQWLSAAERLYGPYMWGRYDIVFLPPSFPIVAMENPCLTFIISSILESDEFLVIDVIHEVAHSWFGNAVTNATWEEMWLSEGLATYAQRRITTETYGAAFTCLETAFRLDALHRQMKLLGEDSPVSKLQVKLEPGVNPSHLMNLFTYEKGYCFVYYLSQLCGDPQRFDDFLRAYVEKYKFTSVVAQDLLDSFLSFFPELKEQSVDCRAGLEFERWLNATGPPLAEPDLSQGSSLTRPVEALFQLWTAEPLDQAAASASAIDISKWRTFQTALFLDRLLDGSPLPQEVVMSLSKCYSSLLDSMNAEIRIRWLQIVVRNDYYPDLHRVRRFLESQMSRMYTIPLYEDLCTGALKSFALEVFYQTQGRLHPNLRRAIQQILSQGLGSSTEPASEPSTELGKAEADTDSDAQALLLGDEAPSSAISLRDVNVSA

SEQ ID NO: 813688 - protein, 582 aa, Homo sapiens
SSSPHHPLTTPHSQTTARCEAGLAAVTRSTPRSIWWLDPELTYGCAKPFVFTQGHSVCNRSFFPCFDTPAVKCTYSAVVKAPSGVQVLMSATRSAYMEEEGVFHFHMEHPVPAYLVALVAGDLKPADIGPRSRVWAEPCLLPTATSKLSGAVEQWLSAAERLYGPYMWGRYDIVFLPPSFPIVAMENPCLTFIISSILESDEFLVIDVIHEVAHSWFGNAVTNATWEEMWLSEGLATYAQRRITTETYGAAFTCLETAFRLDALHRQMKLLGEDSPVSKLQVKLEPGVNPSHLMNLFTYEKGYCFVYYLSQLCGDPQRFDDFLRAYVEKYKFTSVVAQDLLDSFLSFFPELKEQSVDCRAGLEFERWLNATGPPLAEPDLSQGSSLTRPVEALFQLWTAEPLDQAAASASAIDISKWRTFQTALFLDRLLDGSPLPQEVVMSLSKCYSSLLDSMNAEIRIRWLQIVVRNDYYPDLHRVRRFLESQMSRMYTIPLYEDLCTGALKSFALEVFYQTQGRLHPNLRRAIQQILSQGLGSSTEPASEPSTELGKAEADTDSDAQALLLGDEAPSSAISLRDVNVSA

SEQ ID NO: 813689 - protein, 756 aa, Homo sapiens
VAGVPPAAAETPCAFAFSAPGPGPAPPPPLPAFPEAPGSEPACCPLAFRVDPFTDYGSSLTVTLPPELQAHQPFQVILRYTSTDAPAIWWLDPELTYGCAKPFVFTQGHSVCNRSFFPCFDTPAVKCTYSAVVKAPSGVQVLMSATRSAYMEEEGVFHFHMEHPVPAYLVALVAGDLKPADIGPRSRVWAEPCLLPTATSKLSGAVEQWLSAAERLYGPYMWGRYDIVFLPPSFPIVAMENPCLTFIISSILESDEFLVIDVIHEVAHSWFGNAVTNATWEEMWLSEGLATYAQRRITTETYGAAFTCLETAFRLDALHRQMKLLGEDSPVSKLQVKLEPGVNPSHLMNLFTYEKGYCFVYYLSQLCGDPQRFDDFLRVSSPLPGTALLPSAPSPSPAHRAACSCGSWGGTGRGLGAWLGPSLPFFVGSAWVATSPSATLFAPLAGPACQVLAPQCPLAAPVPSTYLGARPAVPCRPLVGLPVPHPSRPAEAPPPATQAYVEKYKFTSVVAQDLLDSFLSFFPELKEQSVDCRAGLEFERWLNATGPPLAEPDLSQGSSLTRPVEALFQLWTAEPLDQAAASASAIDISKWRTFQTALFLDRLLDGSPLPQEVVMSLSKCYSSLLDSMNAEIRIRWLQIVVRNDYYPDLHRVRRFLESQMSRMYTIPLYEDLCTGALKSFALEVFYQTQGRLHPNLRRAIQQILSQGLGSSTEPASEPSTELGKAEADTDSDAQALLLGDEAPSSAISLRDVNVSA

SEQ ID NO: 813690 - protein, 366 aa, Homo sapiens
GSEQQSQWCVSPQSSPRPCRCTPRASVHIWTCEGQWRLALAAPRSLTTAPPYSTGHWWFRTPAQVGVHLAGVNPSHLMNLFTYEKGYCFVYYLSQLCGDPQRFDDFLRAYVEKYKFTSVVAQDLLDSFLSFFPELKEQSVDCRAGLEFERWLNATGPPLAEPDLSQGSSLTRPVEALFQLWTAEPLDQAAASASAIDISKWRTFQTALFLDRLLDGSPLPQEVVMSLSKCYSSLLDSMNAEIRIRWLQIVVRNDYYPDLHRVRRFLESQMSRMYTIPLYEDLCTGALKSFALEVFYQTQGRLHPNLRRAIQQILSQGLGSSTEPASEPSTELGKAEADTDSDAQALLLGDEAPSSAISLRDVNVSA

SEQ ID NO: 813691 - protein, 636 aa, Homo sapiens; identical to SEQ ID NO: 813687

SEQ ID NO: 813692 - protein, 625 aa, Homo sapiens
VAGVPPAAAETPCAFAFSAPGPGPAPPPPLPAFPEAPGSEPACCPLAFRVDPFTDYGSSLTVTLPPELQAHQPFQVILRYTSTDAPAIWWLDPELTYGCAKPFVFTQGHSVCNRSFFPCFDTPAVKCTYSAVVKAPSGVQVLMSATRSAYMEEEGVFHFHMEHPVPAYLVALVAGDLKPADIGPRSRVWAEPCLLPTATSKLSGAVEQWLSAAERLYGPYMWGRYDIVFLPPSFPIVAMENPCLTFIISSILESDEFLVIDVIHEVAHSWFGNAVTNATWEEMWLSEGLATYAQRRITTETYGAAFTCLETAFRLDALHRQMKLLGEDSPVSKLQVKLEPGVNPSHLMNLFTYEKGYCFVYYLSQLCGDPQRFDDFLRAYVEKYKFTSVVAQDLLDSFLSFFPELKEQSVDCRAGPPLAEPDLSQGSSLTRPVEALFQLWTAEPLDQAAASASAIDISKWRTFQTALFLDRLLDGSPLPQEVVMSLSKCYSSLLDSMNAEIRIRWLQIVVRNDYYPDLHRVRRFLESQMSRMYTIPLYEDLCTGALKSFALEVFYQTQGRLHPNLRRAIQQILSQGLGSSTEPASEPSTELGKAEADTDSDAQALLLGDEAPSSAISLRDVNVSA

SEQ ID NO: 813693 - protein, 655 aa, Homo sapiens
VAGVPPAAAETPCAFAFSAPGPGPAPPPPLPAFPEAPGSEPACCPLAFRVDPFTDYGSSLTVTLPPELQAHQPFQVILRYTSTDAPAIWWLDPELTYGCAKPFVFTQGHSVCNRSFFPCFDTPAVKCTYSAVVKAPSGVQVLMSATRSAYMEEEGVFHFHMEHPVPAYLVALVAGDLKPADIGPRSRVWAEPCLLPTATSKLSGAVEQWLSAAERLYGPYMWGRYDIVFLPPSFPIVAMENPCLTFIISSILESDEFLVIDVIHEVAHSWFGNAVTNATWEEMWLSEGLATYAQRRITTETYGAAFTCLETAFRLDALHRQMKLLGEDSPVSKLQVKLEPGVNPSHLMNLFTYEKGYCFVYYLSQLCGDPQRFDDFLRAYVEKYKFTSVVAQDLLDSFLSFFPELKEQSVDCRAGLEFERWLNATGPPLAEPDLSQGSSLTRPVEALFQLWTAEPLDQAAASASAIDISKWRTFQTALFLDRLLDGSPLPQEVVMSLSKCYSSLLDSMNAEIRIRWLQIVVRNDYYPDLHRVRRFLESQMSRMYTIPLYEDLCTGALKSFALEVFYQTQGDTGRGWLSLGRALWPQATLAPQNRESQDPGRVWGQDSLSLVASWGGRHRGKAIPQGKWEVVLVLSPGPPCWERRPEPGASSLGLL

SEQ ID NO: 813694 - protein, 437 aa, Homo sapiens
VAGVPPAAAETPCAFAFSAPGPGPAPPPPLPAFPEAPGSEPACCPLAFRVDPFTDYGSSLTVTLPPELQAHQPFQVILRYTSTDAPAIWWLDPELTYGCAKPFVFTQGHSVCNRSFFPCFDTPAVKCTYSAVVKAPSGVQVLMSATRSAYMEEEGVFHFHMEHPVPAYLVALVAGDLKPADIGPRSRVWAEPCLLPTATSKLSGAVEQWLSAAERLYGPYMWGRYDIVFLPPSFPIVAMENPCLTFIISSILESDEFLVIDVIHEVAHSWFGNAVTNATWEEMWLSEGLATYAQRRITTETYGAAFTCLETAFRLDALHRQMKLLGEDSPVSKLQVKLEPGVNPSHLMNLFTYEKGYCFVYYLSQLCGDPQRFDDFLRAYVEKYKFTSVVAQDLLDSFLSFFPELKEQSVDCRAGEADPQPCSQGAVGMMAGGASAA

SEQ ID NO: 813695 - protein, 444 aa, Homo sapiens
VAGVPPAAAETPCAFAFSAPGPGPAPPPPLPAFPEAPGSEPACCPLAFRVDPFTDYGSSLTVTLPPELQAHQPFQVILRYTSTDAPAIWWLDPELTYGCAKPFVFTQGHSVCNRSFFPCFDTPAVKCTYSAVVKAPSGVQVLMSATRSAYMEEEGVFHFHMEHPVPAYLVALVAGDLKPADIGPRSRVWAEPCLLPTATSKLSGAVEQWLSAAERLYGPYMWGRYDIVFLPPSFPIVAMENPCLTFIISSILESDEFLVIDVIHEVAHSWFGNAVTNATWEEMWLSEGLATYAQRRITTETYGAAFTCLETAFRLDALHRQMKLLGEDSPVSKLQVKLEPGVNPSHLMNLFTYEKGYCFVYYLSQLCGDPQRFDDFLRAYVEKYKFTSVVAQDLLDSFLSFFPELKEQSVDCRAGWNSSAGSMPRAGSGWIPETGPAQPAAGVD

SEQ ID NO: 813696 - protein, 124 aa, Homo sapiens
MLPAVGSADEEEDPAEEDCPELVPMETTQSEEEEKSGLGAKIPVTIITGYLGAGKTTLLNYILTEQHSKRVAVILNEFGEGSALEKSLAVSQGGELYEEWLELRNGCLCCSVKVRNVFTVYMVY

SEQ ID NO: 813697 - protein, 179 aa, Homo sapiens
RGVNFFPHKKKKKRFFFGEIVDLSNVLDLHAFDSLSGISLQKKLQHVPGTQPHLDQSIVTITFEVPGNAKEEHLNMFIQNLLWEKNVRNKDNHCMEVIRLKGLVSIKDKSQQVIVQGVHELYDLEETPVSWKDDTERTNRLVLLGRNLDKDILKQLFIATVTETEKQWTTHFKEDQVCT

SEQ ID NO: 813698 - protein, 32 aa, Homo sapiens
MNKFLVQNNVFQTCRSGLSRIAHWCNTNKITG

SEQ ID NO: 813699 - protein, 395 aa, Homo sapiens
MLPAVGSADEEEDPAEEDCPELVPMETTQSEEEEKSGLGAKIPVTIITGYLGAGKTTLLNYILTEQHSKRVAVILNEFGEGSALEKSLAVSQGGELYEEWLELRNGCLCCSVKDNGLRAIENLMQKKGKFDYILLETTGLADPGAVASMFWVDAELGSDIYLDGIITIVDSKYGLKHLAEEKPDGLINEATRQVALADAILINKTDLVPEEDVKKLRATIRSINGLGQILETQRSRVDLSNVLDLHAFDSLSGISLQKKLQHVPGTQPHLDQSIVTITFEVPGNAKEEHLNMFIQNLLWEKNVRNKDNHCMEVIRLKGLVSIKDKSQQVIVQGVHELYDLEETPVSWKDDTERTNRLVLLGRNLDKDILKQLFIATVTETEKQWTTHFKEDQVCT

SEQ ID NO: 813700 - protein, 320 aa, Homo sapiens
MLPAVGSADEEEDPAEEDCPELVPMETTQSEEEEKSGLGAKIPVTIITGYLGAGKTTLLNYILTEQHSKRVAVILNEFGEGSALEKSLAVSQGGELYEEWLELRNGCLCCSVKDNGLRAIENLMQKKGKFDYILLETTGLADPGAVASMFWVDAELGSDIYLDGIITIVDSKYGLKHLAEEKPDGLINEATRQVALADAILINKTDLVPEEDVKKLRATIRSINGLGQILETQRSRVDLSNVLDLHAFDSLSGISLQKKLQHVPGTQPHLDQSIVTITFEVPGNAKEEHLNMFIQNLLWEKNVRNKDNHCMEVIRLKAEI

SEQ ID NO: 813701 - protein, 395 aa, Homo sapiens; identical to SEQ ID NO: 813699

SEQ ID NO: 813702 - protein, 395 aa, Homo sapiens; identical to SEQ ID NO: 813699

SEQ ID NO: 813703 - protein, 372 aa, Homo sapiens
MLPAVGSADEEEDPAEEDCPELVPMETTQSEEEEKSGLGAKIPVTIITGYLGAGKTTLLNYILTEQHSKRVAVILNEFGEGSALEKSLAVSQGGELYEEWLELRNGCLCCSVKDNGLRAIENLMQKKGKFDYILLETTGLADPGAVASMFWVDAELGSDIYLDGIITIVDSKYGLKHLAEEKPDGLINEATRQVALADAILINKTDLVPEEDVKKLRATIRSINGLGQILETQRSRVDLSNVLDLHAFDSLSGISLQKKLQHVPGTQPHLDQSIVTITFEVPGNAKEEHLNMFIQNLLWEKNVRNKDNHCMEVIRLKGLVSIKDKSQQVIVQGVHELYDLEETPVSWKDDTERTNRLVLLGKSERIHSFKTK

SEQ ID NO: 813704 - protein, 182 aa, Homo sapiens
MLPAVGSADEEEDPAEEDCPELVPMETTQSEEEEKSGLGAKIPVTIITGYLGAGKTTLLNYILTEQHSKRVAVILNEFGEGSALEKSLAVSQGGELYEEWLELRNGCLCCSVKDNGLRAIENLMQKKGKFDYILLETTGLADPGAVASMFWVDAELGSDIYLDGIITIVDSKYGLKAKNWTT

SEQ ID NO: 813705 - protein, 359 aa, Homo sapiens
MYFKRAARAFPVLLTGAGKTTLLNYILTEQHSKRVAVILNEFGEGSALEKSLAVSQGGELYEEWLELRNGCLCCSVKDNGLRAIENLMQKKGKFDYILLETTGLADPGAVASMFWVDAELGSDIYLDGIITIVDSKYGLKHLAEEKPDGLINEATRQVALADAILINKTDLVPEEDVKKLRATIRSINGLGQILETQRSRVDLSNVLDLHAFDSLSGISLQKKLQHVPGTQPHLDQSIVTITFEVPGNAKEEHLNMFIQNLLWEKNVRNKDNHCMEVIRLKGLVSIKDKSQQVIVQGVHELYDLEETPVSWKDDTERTNRLVLLGRNLDKDILKQLFIATVTETEKQWTTHFKEDQVCT

SEQ ID NO: 813706 - protein, 146 aa, Homo sapiens
MYFKRAARAFPVLLTGAGKTTLLNYILTEQHSKRVAVILNEFGEGSALEKSLAVSQGGELYEEWLELRNGCLCCSVKDNGLRAIENLMQKKGKFDYILLETTGLADPGAVASMFWVDAELGSDIYLDGIITIVDSKYGLKAKNWTT

SEQ ID NO: 813707 - protein, 390 aa, Homo sapiens
MLPAVGSADEEEDPAEEDCPELVPMETTQSEEEEKSGLGAKIPVTIITGYLGAGKTTLLNYILTEQHSKRVAVILNEFGEGSALEKSLAVSQGGELYEEWLELRNGCLCCSVKTMALRAELRIVDYYDCVETTVVADPGAVASMFWVDAELGSDIYLDGIITIVDSKYGLKHLAEEKPDGLINEATRQVALADAILINKTDLVPEEDVKKLRATIRSINGLGQILETQRSRVDLSNVLDLHAFDSLSGISLQKKLQHVPGTQPHLDQSIVTITFEVPGNAKEEHLNMFIQNLLWEKNVRNKDNHCMEVIRLKGLVSIKDKSQQVIVQGVHELYDLEETPVSWKDDTERTNRLVLLGRNLDKDILKQLFIATVTETEKQWTTHFKEDQVCT

SEQ ID NO: 813708 - protein, 172 aa, Homo sapiens
LQEFGTRETQRSRVDLSNVLDLHAFDSLSGISLQKKLQHVPGTQPHLDQSIVTITFEVPGNAKEEHLNMFIQNLLWEKNVRNKDNHCMEVIRLKGLVSIKDKSQQVIVQGVHELYDLEETPVSWKDDTERTNRLVLLGRNLDKDILKQLFIATVTETEKQWTTHFKEDQVCT

SEQ ID NO: 813709 - protein, 275 aa, Homo sapiens
MLPAVGSADEEEDPAEEDCPELVPMETTQSEEEEKSGLGAKIPVTIITGYLGAGKTTLLNYILTEQHSKRVAVILNEFGEGSALEKSLAVSQGGELYEEWLELRNGCLCCSVKDNGLRAIENLMQKKGKFDYILLETTGLADPGAVASMFWVDAELGSDIYLDGIITIVDSKYGLKHLAEEKPDGLINEATRQVALADGSSLYHRRDRGRIPIAIITTWYRVIRHTEDMREVVCVKRLRPIVSNRWNSDECLRAVLKLMSECWAHNSSLQTHSFD

SEQ ID NO: 813710 - protein, 113 aa, Homo sapiens
MLPAVGSADEEEDPAEEDCPELVPMETTQSEEEEKSGLGAKIPVTIITGYLGAGKTTLLNYILTEQHSKRVAVILNEFGEGSALEKSLAVSQGGELYEEWLELRNGCLCCSVN

SEQ ID NO: 813711 - protein, 111 aa, Homo sapiens
MLPAVGSADEEEDPAEEDCPELVPMETTQSEEEEKSGLGAKIPVTIITGYLGAGKTTLLNYILTEQHSKRVAVILNEFGEEHRWTNPEPSYMDACFIMSGSILGTVASDVH

SEQ ID NO: 813712 - protein, 318 aa, Homo sapiens
MSLLLYYALPALGSYAMLSIFFLRRPHLLHTPRAPTFRIRLGAHRGGSGELLENTMEAMENSMAQRSDLLELDCQLTRDRVVVVSHDENLCRQSGLNRDVGSLDFEDLPLYKEKLEVYFSPGHFAHGSDRRMVRLEDLFQRFPRTPMSVEIKGKNEELIREIAGLVRRYDRNEITIWASEKSSVMKKCKAANPEMPLSFTISRGFWVLLSYYLGLLPFIPIPEKFFFCFLPNIINRTYFPFSCSCLNQLLAVVSKWLIMRKSLIRHLEERGVQVVFWCLNEESDFEAAFSVGATGVITDYPTALRHYLDNHGPAARTS

SEQ ID NO: 813713 - protein, 256 aa, Homo sapiens
MAQRSDLLELDCQLTRDRVVVVSHDENLCRQSGLNRDVGSLDFEDLPLYKEKLEVYFSPGHFAHGSDRRMVRLEDLFQRFPRTPMSVEIKGKNEELIREIAGLVRRYDRNEITIWASEKSSVMKKCKAANPEMPLSFTISRGFWVLLSYYLGLLPFIPIPEKFFFCFLPNIINRTYFPFSCSCLNQLLAVVSKWLIMRKSLIRHLEERGVQVVFWCLNEESDFEAAFSVGATGVITDYPTALRHYLDNHGPAARTS

SEQ ID NO: 813714 - protein, 171 aa, Homo sapiens
MSLLLYYALPALGSYAMLSIFFLRRPHLLHTPRAPTFRIRLGAHRGGSGELLENTMEAMENSMAQRSDLLELDCQLTRDRVVVVSHDENLCRQSGLNRDVGSLDFEDLPLYKEKLEVYFSPGHFATDQSVRMLTCERTDPNTFSRNLSCSSQILDYYLGTLQNSRSVRSLG

SEQ ID NO: 813715 - protein, 145 aa, Homo sapiens
IPELPETGTLGKVRAQQHQREIELGPPEVPRPRGEGGWGGEGFLAAPIPEKFFFCFLPNIINRTYFPFSCSCLNQLLAVVSKWLIMRKSLIRHLEERGVQVVFWCLNEESDFEAAFSVGATGVITDYPTALRHYLDNHGPAARTS

SEQ ID NO: 813716 - protein, 256 aa, Homo sapiens; identical to SEQ ID NO: 813713

SEQ ID NO: 813717 - protein, 349 aa, Homo sapiens
MSLLLYYALPALGSYAMLSIFFLRRPHLLHTPRAPTFRIRLGAHRGGSGELLENTMEAMENSMAQRSDLLELDCQLTRDRVVVVSHDENLCRQSGLNRDVGSLDFEDLPLYKEKLEVYFSPGHFAHGSDRRMVRLEDLFQRFPRTPMSVEIKGKNEELIREIAGLVRRYDRNEITIWASEKSSVMKKCKAANPEMPLSFTISRGFWVLLSYYLGLLPFIPIPEKFFFCFLPNIINRTYFPFSCSCLNQLLAVVSKWLIMRKSLIRHLEERGVQVEAVTTTSTAHRPGSRVPVPLCCQLAASLGQVVFWCLNEESDFEAAFSVGATGVITDYPTALRHYLDNHGPAARTS

SEQ ID NO: 813718 - protein, 256 aa, Homo sapiens
MSLLLYYALPALGSYAMLSIFFLRRPHLLHTPRAPTFRIRLGAHRGGSGELLENTMEAMENSMAQRSDLLELDCQLTRDRVVVVSHDENLCRQSGLNRDVGSLDFEDLPLYKEKLEVYFSPGHFAHGSDRRMVRLEDLFQRFPRTPMSVEIKGKNEELIREIAGLVRRYDRNEITIWASEKSSVMKKCKAANPEMPLSFTISRGFWVLLSYYLGLLPFIPIPEKFFFCFLPNIINRTYFPFSCSCLNQLLAVVSKW

SEQ ID NO: 813719 - protein, 279 aa, Homo sapiens [sequence omitted]

SEQ ID NO: 813720 - protein, 124 aa, Homo sapiens
MPLSFTISRGFWVLLSYYLGLLPFIPIPEKFFFCFLPNIINRTYFPFSCSCLNQLLAVVSKWLIMRKSLIRHLEERGVQVVFWCLNEESDFEAAFSVGATGVITDYPTALRHYLDNHGPAARTS

SEQ ID NO: 813721 - protein, 102 aa, Homo sapiens
VAPMTAGCLQKHLPKIRDRSTSGGKMKVNGAPREDARPVPQGSCQSELHRALERLAASQSRTHEDLQFIPIPNCDQPEQYSQTPVSTKKKKKKIGNCSGSCL

SEQ ID NO: 813722 - protein, 200 aa, Homo sapiens
KALALTSFLHFLFLFLSFSLDSQSLFLLSLALLFFLICLSTSSFTSHALEFVFSSVSSAHRAFLSPPYSVFLFQLLCFSPSLSVAVSLCLCHCWSFPVTLGISLSVFLYLCLCFSFHLRPCFALLCLCLSLSLFLVLEASIVAVRMLGLQPQASCPGTQTLHFLNPLQLVSRGEQDAGKTGRRWTPGVWASGLSALPAPG

SEQ ID NO: 813723 - protein, 336 aa, Homo sapiens
MKIDIHSHILPKEWPDLKKRFGYGGWVQLQHHSKGEAKLLKDGKVFRVVRENCWDPEVRIREMDQKGVTVQALSTVPVMFSYWAKPEDTLNLCQLLNNDLASTVVSYPRRFVGLGTLPMQAPELAVKEMERCVKELGFPGVQIGTHVNEWDLNAQELFPVYAAAERLKCSLFVHPWDMQMDGRMAKYWLPWLVGMPAETTIAICSMIMGGVFEKFPKLKVCFAHGGGAFPFTVGRISHGFSMRPDLCAQDNPMNPKKYLGSFYTDALVHDPLSLKLLTDVIGKDKVILGTDYPFPLGELEPGKLIESMEEFDEETKNKLKAGNALAFLGLERKQFE

SEQ ID NO: 813724 - protein, 278 aa, Homo sapiens
MGKSSEWCERIAGIQKFVLEKWTKKAKPEDTLNLCQLLNNDLASTVVSYPRRFVGLGTLPMQAPELAVKEMERCVKELGFPGVQIGTHVNEWDLNAQELFPVYAAAERLKCSLFVHPWDMQMDGRMAKYWLPWLVGMPAETTIAICSMIMGGVFEKFPKLKVCFAHGGGAFPFTVGRISHGFSMRPDLCAQDNPMNPKKYLGSFYTDALVHDPLSLKLLTDVIGKDKVILGTDYPFPLGELEPGKLIESMEEFDEETKNKLKAGNALAFLGLERKQFE

SEQ ID NO: 813725 - protein, 336 aa, Homo sapiens; identical to SEQ ID NO: 813723

SEQ ID NO: 813726 - protein, 162 aa, Homo sapiens
MGKSSEWCERIAGIQKFVLEKWTKKAKPEDTLNLCQLLNNDLASTVVSYPRRFVGLGTLPMQAPELAVKEMERCVKELGFPGVQIGTHVNEWDLNAQELFPVYAAAERLKCSLFVHPWDMQMDGRMAKYWLPWLVGLCLCGVWNRGPTLGFFQSSMETYYVK

SEQ ID NO: 813727 - protein, 103 aa, Homo sapiens
GRGGSGCGELQQRRRRRRRQRQRQQQQRHVQHRRGGKDAAPLPDVRRRRGRIHQQVRGEVRGNRQERDQSLRAPLTPALPPRPNLRQVAQKLAGKVGRDSESA

SEQ ID NO: 813728 - protein, 125 aa, Homo sapiens
GRGGSGCGELQQRRRRRRRQRQRQQQQRHVQHRRGGKDAAPLPDVRRRRGRIHQQALGDISLGCALFRGLGVFFPVGKGVLAACAQVGGAAPQPRGPGHQDAAARGSDLPGGLVDTPGPHREEMS

SEQ ID NO: 813729 - protein, 223 aa, Homo sapiens
FTSSADDIRGIQSLYGDPKENQRLPNPDNSEPALCDPNLSFDAVTTVGNKIFFFKDRFFWLKVSERPKTSVNLISSLWPTLPSGIEAAYEIEARNQVFLFKDDKYWLISNLRPEPNYPKSIHSFGFPNFVKKIDAAVFNPRFYRTYFFVDNQYWRYDERRQMMDPGYPKLITKNFQGIGPKIDAVFYSKNKYYYFFQGSNQFEYDFLLQRITKTLKSNSWFGC

SEQ ID NO: 813730 - protein, 109 aa, Homo sapiens
MAFPKKKLQGLVAATITPMTENGEINFSVIGQYVDYLVKEQGVKNIFVNGTTGEGLSLSVSERRQVAEEWVTKGKDKSNHHKLGTIRTTQSRRSSFRRQLKAWHSGSHL

SEQ ID NO: 813731 - protein, 320 aa, Homo sapiens
MAFPKKKLQGLVAATITPMTENGEINFSVIGQYVDYLVKEQGVKNIFVNGTTGEGLSLSVSERRQVAEEWVTKGKDKLDQVIIHVGALSLKESQELAQHAAEIGADGIAVIAPFFLKPWTKDILINFLKEVAAAAPALPFYYYHIPALTGVKIRAEELLDGILDKIPTFQGLKFSDTDLLDFGQCVDQNRQQQFAFLFGVDEQLLSALVMGATGAVGSTYNYLGKKTNQMLEAFEQKDFSLALNYQFCIQRFINFVVKLGFGVSQTKAIMTLVSGIPMGPPRLPLQKASREFTDSAEAKLKSLDFLSFTDLKDGNLEAGS

SEQ ID NO: 813732 - protein, 320 aa, Homo sapiens; identical to SEQ ID NO: 813731

SEQ ID NO: 813733 - protein, 320 aa, Homo sapiens; identical to SEQ ID NO: 813731

SEQ ID NO: 813734 - protein, 320 aa, Homo sapiens; identical to SEQ ID NO: 813731

SEQ ID NO: 813735 - protein, 230 aa, Homo sapiens
MAFPKKKLQGLVAATITPMTENGEINFSVIGQYVDYLVKEQGVKNIFVNGTTGEGLSLSVSERRQVAEEWVTKGKDKLDQVIIHVGALSLKESQELAQHAAEIGADGIAVIAPFFLKPWTKDILINFLKEVAAAAPALPFYYYHIPALTGVKIRAEELLDGILDKIPTFQGLKFSDTDLLDFGQCVDQNRQQQFAFLFGVDEQLLSALVMGATGAVGSFVSRDLSTLLSN

SEQ ID NO: 813736 - protein, 329 aa, Homo sapiens [sequence omitted]

SEQ ID NO: 813737 - protein, 305 aa, Homo sapiens
AGGKMSRAPGILASWRRAPSLSVQKGSQTARHTCHPEVPLGNCFLPVYKASPLTVTRLWAERLDQVIIHVGALSLKESQELAQHAAEIGADGIAVIAPFFLKPWTKDILINFLKEVAAAAPALPFYYYHIPALTGVKIRAEELLDGILDKIPTFQGLKFSDTDLLDFGQCVDQNRQQQFAFLFGVDEQLLSALVMGATGAVGSTYNYLGKKTNQMLEAFEQKDFSLALNYQFCIQRFINFVVKLGFGVSQTKAIMTLVSGIPMGPPRLPLQKASREFTDSAEAKLKSLDFLSFTDLKDGNLEAGS

SEQ ID NO: 813738 - protein, 284 aa, Homo sapiens
MAFPKKKLQGLVAATITPMTENGEINFSVIGQYVDYLVKEQGVKNIFVNGTTGEGLSLSVSERRQVAEEWVTKGKDKLDQVIIHVGALSLKESQELAQHAAEIGADGIAVIAPFFLKPWTKDILINFLKEVAAAAPALPFYYYHIPALTGVKIRAEELLDGILDKIPTFQGLKFSDTDLLDFGQCVDQNRQQQFAFLFGVDEQLLSALVMGATGAVGSTYNYLGKKTNQMLEAFEQKDFSLALNYQFCIQRFINFVVKLENSKLKVSKNQRTLPLGTTNFPFLH

SEQ ID NO: 813739 - protein, 122 aa, Homo sapiens
ISGIRRKELCEGAIGISVLAVEETEILKASPAAPSHTARKRNQLFSNWSVCGLSCERTGSEEHFCEWHNRRRPVPERLRASPGCRGVGDKREGQAGSGDNSRRSTELEGVTGTGPTCSRNRS

SEQ ID NO: 813740 - protein, 284 aa, Homo sapiens; identical to SEQ ID NO: 813738

SEQ ID NO: 813741 - protein, 315 aa, Homo sapiens
MAFPKKKLQGLVAATITPMTENGEINFSVIGQYVDYLVKEQGVKNIFVNGTTGEGLSLSVSERRQVAEEWVTKGKDKLDQVIIHVGALSLKESQELAQHAAEIGADGIAVIAPFFLKPWTKDILINFLKEVAAAAPALPFYYYHIPALTGVKIRAEELLDGILDKIPTFQGLKFSDTDLLDFGQCVDQNRQQQFAFLFGVDEQLLSALVMGATGAVGSTYNYLGKKTNQMLEAFEQKDFSLALNYQFCIQRFINFVVKLGKCHPSSALSAAGDCKENGIPSLSLRVQQEHFLMVCCKQSSVSLINPRGQPYKTVK

SEQ ID NO: 813742 - protein, 381 aa, Homo sapiens
DAWVRTRGSGRVGRPTRRGLQGSFVEVAKSWSLQRAVGAVAASSRVRTLRRGAEEREGARGSRSESRARTQPGPTALPSCPGRAPAMEHQLLCCEVETIRRAYPDANLLNDRVLRAMLKAEETCAPSVSYFKCVQKEVLPSMRKIVATWMLEVCEEQKCEEEVFPLAMNYLDRFLSLEPVKKSRLQLLGATCMFVASKMKETIPLTAEKLCIYTDNSIRPEELLQMELLLVNKLKWNLAAMTPHDFIEHFLSKMPEAEENKQIIRKHAQTFVALCATDVKFISNPPSMVAAGSVVAAVQGLNLRSPNNFLSYYRLTRFLSRVIKCDPDCLRACQEQIEALLESSLRQAQQNMDPKAAEEEEEEEEEVDLACTPTDVRDVDI

SEQ ID NO: 813743 - protein, 381 aa, Homo sapiens; identical to SEQ ID NO: 813742

SEQ ID NO: 813744 - protein, 381 aa, Homo sapiens; identical to SEQ ID NO: 813742

SEQ ID NO: 813745 - protein, 381 aa, Homo sapiens; identical to SEQ ID NO: 813742

SEQ ID NO: 813746 - protein, 381 aa, Homo sapiens; identical to SEQ ID NO: 813742

SEQ ID NO: 813747 - protein, 348 aa, Homo sapiens
DAWVRTRGSGRVGRPTRRGLQGSFVEVAKSWSLQRAVGAVAASSRVRTLRRGAEEHQLLCCEVETIRRAYPDANLLNDRVLRAMLKAEETCAPSVSYFKCVQKEVLPSMRKIVATWMLEVCEEQKCEEEVFPLAMNYLDRFLSLEPVKKSRLQLLGATCMFVASKMKETIPLTAEKLCIYTDNSIRPEELLQMELLLVNKLKWNLAAMTPHDFIEHFLSKMPEAEENKQIIRKHAQTFVALCATDVKFISNPPSMVAAGSVVAAVQGLNLRSPNNFLSYYRLTRFLSRVIKCDPDCLRACQEQIEALLESSLRQAQQNMDPKAAEEEEEEEEEVDLACTPTDVRDVDI

SEQ ID NO: 813748 - protein, 381 aa, Homo sapiens; identical to SEQ ID NO: 813742

SEQ ID NO: 813749 - protein, 316 aa, Homo sapiens
GCREPAGGAQGRGMGSFGGTPLGKGGPLFKQRVPGRPERAAWAGEHGELQGRVAPKTPGLDPRLQGYRLGGPSPSEPGAWEHIFRPSVCEEQKCEEEVFPLAMNYLDRFLSLEPVKKSRLQLLGATCMFVASKMKETIPLTAEKLCIYTDNSIRPEELLQMELLLVNKLKWNLAAMTPHDFIEHFLSKMPEAEENKQIIRKHAQTFVALCATDVKFISNPPSMVAAGSVVAAVQGLNLRSPNNFLSYYRLTRFLSRVIKCDPDCLRACQEQIEALLESSLRQAQQNMDPKAAEEEEEEEEEVDLACTPTDVRDVDI

SEQ ID NO: 813750 - protein, 365 aa, Homo sapiens
DAWVRTRGSGRVGRPTRRGLQGSFVEVAKSWSLQRAVGAVAASSRVRTLRRGAEEREGARGSRSESRARTQPGPTALPSCPGRAPAMEHQLLCCEVETIRRAYPDANLLNDRVLRAMLKAEETCAPSVSYFKCVQKEVLPSMRKIVATWMLEVCEEQKCEEEVFPLAMNYLDRFLSLEPVKKSRLQLLGATCMFVASKMKETIPLTAEKLCIYTDNSIRPEELLQMELLLVNKLKWNLAAMTPHDFIEHFLSKMPEAEENKQIIRKHAQTFVALCATDVKFISNPPSMVAAGSVVAAVQGLNLRSPNNFLSYYRLTRFLSRVIKCDPDCLRACQEQIEALLESSLRQGGRHRHPQRGRSRPQVLH

SEQ ID NO: 813751 - protein, 311 aa, Homo sapiens
DAWVRTRGSGRVGRPTRRGLQGSFVEVAKSWSLQRAVGAVAASSRVRTLRRGAEEREGARGSRSESRARTQPGPTALPSCPGRAPAMEHQLLCCEVETIRRAYPDANLLNDRVLRAMLKAEETCAPSVSYFKCVQKEVLPSMRKIVATWMLEVCEEQKCEEEVFPLAMNYLDRFLSLEPVKKSRLQLLGATCMFVASKMKETIPLTAEKLCIYTDNSIRPEELLQMELLLVNKLKWNLAAMTPHDFIEHFLSKMPEAEENKQIIRKHAQTFVALCATDVKFISNPPSMVAAGSVVAAVQGLNLRSPNNFLS

SEQ ID NO: 813752 - protein, 381 aa, Homo sapiens; identical to SEQ ID NO: 813742

SEQ ID NO: 813753 - protein, 381 aa, Homo sapiens; identical to SEQ ID NO: 813742

SEQ ID NO: 813754 - protein, 381 aa, Homo sapiens; identical to SEQ ID NO: 813742

SEQ ID NO: 813755 - protein, 311 aa, Homo sapiens
DAWVRTRGSGRVGRPTRRGLQGSFVEVAKSWSLQRAVGAVAASSRVRTLRRGAEEREGARGSRSESRARTQPGPTALPSCPGRAPAMEHQLLCCEVETIRRAYPDANLLNDRVLRAMLKAEETCAPSVSYFKCVQKEVLPSMRKIVATWMLEVCEEQKCEEEVFPLAMNYLDRFLSLEPVKKSRLQLLGATCMFVASKMKETIPLTAEKLCIYTDNSIRPEELLQMELLLVNKLKWNLAAMTPHDFIEHFLSKMPEAEENKQIIREEQKCEEEVFPLAMNYLDRFLSLEPVKKGGRHRHPQRGRSRPQVLH

SEQ ID NO: 813756 - protein, 154 aa, Homo sapiens
DAWVRTRGSGRVGRPTRRGLQGSFVEVAKSWSLQRAVGAVAASSRVRTLRRGAEEREGARGSRSESRARTQPGPTALPSCPGRAPAMEHQLLCCEVETIRRAYPDANLLNDRVLRAMLKAEETCAPSVSYFKCVQKEEEVDLACTPTDVRDVDI

SEQ ID NO: 813757 - protein, 380 aa, Homo sapiens
DAWVRTRGSGRVGRPTRRGLQGSFVEVAKSWSLQRAVGAVAASSRVRTLRRGAEEREGARGSRSESRARTQPGPTALPSCPGRAPAMEHQLLCCEVETIRRAYPDANLLNDRVLRAMLKAEETCAPSVSYFKCVQKEVLPSMRKIVATWMLEVCEEQKCEEEVFPLAMNYLDRFLSLEPVKKSRLQLLGATCMFVASKMKETIPLTAEKLCIYTDNSIRPEELLQMELLLVNKLKWNLAAMTPHDFIEHFLSKMPEAEENKQIIRKHAQTFVALCATDVKFISNPPSMVAAGSVVAAVQGLNLRSPNNFLSYYRLTRFLSRVIKCDPCGPLWWQWRWGVWEAACQSRRKRFAFSHCQDDKFLSFSLKKLKFRNPLVPTGV

SEQ ID NO: 813758 - protein, 381 aa, Homo sapiens; identical to SEQ ID NO: 813742

SEQ ID NO: 813759 - protein, 381 aa, Homo sapiens; identical to SEQ ID NO: 813742

SEQ ID NO: 813760 - protein, 381 aa, Homo sapiens; identical to SEQ ID NO: 813742

SEQ ID NO: 813761 - protein, 381 aa, Homo sapiens; identical to SEQ ID NO: 813742

SEQ ID NO: 813762 - protein, 381 aa, Homo sapiens; identical to SEQ ID NO: 813742

SEQ ID NO: 813763 - protein, 381 aa, Homo sapiens; identical to SEQ ID NO: 813742

SEQ ID NO: 813764 - protein, 155 aa, Homo sapiens
MELLLVNKLKWNLAAMTPHDFIEHFLSKMPEAEENKQIIRKHAQTFVALCATDVKFISNPPSMVAAGSVVAAVQGLNLRSPNNFLSYYRLTRFLSRVIKCDPCGPLWWQWRWGVWEAACQSRRKRFAFSHCQDDKFLSFSLKKLKFRNPLVPTGV

SEQ ID NO: 813765 - protein, 381 aa, Homo sapiens; identical to SEQ ID NO: 813742

SEQ ID NO: 813766 - protein, 381 aa, Homo sapiens; identical to SEQ ID NO: 813742

SEQ ID NO: 813767 - protein, 323 aa, Homo sapiens
MARGPGLAPPPLRLPLLLLVLAAVTGHTAAQDNCTCPTNKMTVCSPDGPGGRCQCRALGSGMAVDCSTLTSKCLLLKARMSAPKNARTLVRPSEHALVDNDGLYDPDCDPEGRFKARQCNQTSVCWCVNSVGVRRTDKGDLSLRCDELVRTHHILIDLRHRPTAGAFNHSDLDAELRRLFRERYRLHPKFVAAVHYEQPTIQIELRQNTSQKAAGDVDIGDAAYYFERDIKGESLFQGRGGLDLRVRGEPLQVERTLIYYLDEIPPKFSMKRLTAGLIAVIVVVVVALVAGMAVLVITNRRKSGKYKKVEIKELGELRKEPSL

SEQ ID NO: 813768 - protein, 381 aa, Homo sapiens; identical to SEQ ID NO: 813742

SEQ ID NO: 813769 - protein, 93 aa, Homo sapiens
DAWVRTRGSGRVGRPTRRRRCEEEAPEGKGRCPHRGQAAAPFSYCAATVDFQARFGNIHIASVYLFHIVCCYWRISFLFYNVIYCHVLVLVFS

SEQ ID NO: 813770 - protein, 160 aa, Homo sapiens
DAWVRTRGSGRVGRPTRRGLQGSFVEVAKSWSLQRAVGAVAASSRVRTLRRGAEEREGARGSRSESRARTQPGPTALPSCPGRAPAMEHQLLCCEVETIRRAYPDANLLNDRVLRAMLKAEETCAPSVSYFKCVQKEVLPSMRKIVATWMLEVRGFGRLS

SEQ ID NO: 813771 - protein, 159 aa, Homo sapiens
DAWVRTRGSGRVGRPTRRGLQGSFVEVAKSWSLQRAVGAVAASSRVRTLRRGAEEREGARGSRSESRARTQPGPTAPALAGSSCARRPSRAQAHPAPPLQNTAHAYLNHPGCGVCLNHAGALRDALSVVMGQGHKSWMLCVSRGQRLVASARGTAESVL

SEQ ID NO: 813772 - protein, 206 aa, Homo sapiens
DAWVRTRGSGRVGRPTRRGLQGSFVEVAKSWSLQRAVGAVAASSRVRTLRRGAEEREGARGSRSESRARTQPGPTALPSCPGRAPAMEHQLLCCEVETIRRAYPDANLLNDRVLRAMLKAEETCAPSVSYFKCVQKEVLPSMRKIVATWMLEVPSGEASARGTPMGPRVRAGRLGALCVPRLRPSPAAPQRPGAANSGGRGHRFDF

SEQ ID NO: 813773 - protein, 430 aa, Homo sapiens
MRQRQSHYCSVLFLSVNYLGGTFPGDICSEENQIVSSYASKVCFEIEEDYKNRQFLGPEGNVDVELIDKSTNRYSVWFPTAGWYLWSATGLGFLVRDEVTVTIAFGSWSQHLALDLQHHEQWLVGGPLFDVTAEPEEAVAEIHLPHFISLQGEVDVSWFLVAHFKNEGMVLEHPARVEPFYAVLESPSFSLMGILLRIASGTRLSIPITSNTLIYYHPHPEDIKFHLYLVPSDALLTKAIDDEEDRFHGVRLQTSPPMEPLNFGSSYIVSNSANLKVMPKELKLSYRSPGEIQHFSKFYAGQMKEPIQLEITEKRHGTLVWDTEVKPVDLQLVAASAPPPFSGAAFVKENHRQLQARMGDLKGVLDDLQDNEVLTENEKELVEQEKTRQSKNEALLSMVEKKGDLALDVLFRSISERDPYLVSYLRQQNL

SEQ ID NO: 813774 - protein, 430 aa, Homo sapiens; identical to SEQ ID NO: 813773

SEQ ID NO: 813775 - protein, 455 aa, Homo sapiens
MIRYTGSYPVFLRPFVTSHIFSKKMMRQRQSHYCSVLFLSVNYLGGTFPGDICSEENQIVSSYASKVCFEIEEDYKNRQFLGPEGNVDVELIDKSTNRYSVWFPTAGWYLWSATGLGFLVRDEVTVTIAFGSWSQHLALDLQHHEQWLVGGPLFDVTAEPEEAVAEIHLPHFISLQGEVDVSWFLVAHFKNEGMVLEHPARVEPFYAVLESPSFSLMGILLRIASGTRLSIPITSNTLIYYHPHPEDIKFHLYLVPSDALLTKAIDDEEDRFHGVRLQTSPPMEPLNFGSSYIVSNSANLKVMPKELKLSYRSPGEIQHFSKFYAGQMKEPIQLEITEKRHGTLVWDTEVKPVDLQLVAASAPPPFSGAAFVKENHRQLQARMGDLKGVLDDLQDNEVLTENEKELVEQEKTRQSKNEALLSMVEKKGDLALDVLFRSISERDPYLVSYLRQQNL

SEQ ID NO: 813776 - protein, 455 aa, Homo sapiens; identical to SEQ ID NO: 813775

SEQ ID NO: 813777 - protein, 455 aa, Homo sapiens; identical to SEQ ID NO: 813775

SEQ ID NO: 813778 - protein, 430 aa, Homo sapiens; identical to SEQ ID NO: 813773

SEQ ID NO: 813779 - protein, 430 aa, Homo sapiens; identical to SEQ ID NO: 813773

SEQ ID NO: 813780 - protein, 426 aa, Homo sapiens
MGIPTSSVSEEQESSEGQDSGDICSEENQIVSSYASKVCFEIEEDYKNRQFLGPEGNVDVELIDKSTNRYSVWFPTAGWYLWSATGLGFLVRDEVTVTIAFGSWSQHLALDLQHHEQWLVGGPLFDVTAEPEEAVAEIHLPHFISLQGEVDVSWFLVAHFKNEGMVLEHPARVEPFYAVLESPSFSLMGILLRIASGTRLSIPITSNTLIYYHPHPEDIKFHLYLVPSDALLTKAIDDEEDRFHGVRLQTSPPMEPLNFGSSYIVSNSANLKVMPKELKLSYRSPGEIQHFSKFYAGQMKEPIQLEITEKRHGTLVWDTEVKPVDLQLVAASAPPPFSGAAFVKENHRQLQARMGDLKGVLDDLQDNEVLTENEKELVEQEKTRQSKNEALLSMVEKKGDLALDVLFRSISERDPYLVSYLRQQNL

SEQ ID NO: 813781 - protein, 281 aa, Homo sapiens
MGIPTSSVSEEQESSEGQDSGDICSEENQIVSSYASKVCFEIEEDYKNRQFLGPEGNVDVELIDKSTNRYSVWFPTAGWYLWSATGLGFLVRDEVTVTIAFGSWSQHLALDLQHHEQWLVGGPLFDVTAEPEEAVAEIHLPHFISLQGEVDVSWFLVAHFKNEGMVLEHPARVEPFYAVLESPSFSLMGILLRIASGTRLSIPITSNTLIYYHPHPEDIKFHLYLVPSDALLTKAIDDEEDRFHGVRLQTSPPMEPLNFGSSYIVSNSANLKVMPKWISSL

SEQ ID NO: 813782 - protein, 536 aa, Homo sapiens
MEKKECPEKSSSSEEELPRRDSGSSRNIDASKLIRLQGSRKLLVDNSIRELQYTKTGIFFQAEACVTNDTVYRELPCVSETLCDISHFFQEDDETEAEPLLFRAVPECQLSGGDIPSVSEEQESSEGQDSGDICSEENQIVSSYASKVCFEIEEDYKNRQFLGPEGNVDVELIDKSTNRYSVWFPTAGWYLWSATGLGFLVRDEVTVTIAFGSWSQHLALDLQHHEQWLVGGPLFDVTAEPEEAVAEIHLPHFISLQGEVDVSWFLVAHFKNEGMVLEHPARVEPFYAVLESPSFSLMGILLRIASGTRLSIPITSNTLIYYHPHPEDIKFHLYLVPSDALLTKAIDDEEDRFHGVRLQTSPPMEPLNFGSSYIVSNSANLKVMPKELKLSYRSPGEIQHFSKFYAGQMKEPIQLEITEKRHGTLVWDTEVKPVDLQLVAASAPPPFSGAAFVKENHRQLQARMGDLKGVLDDLQDNEVLTENEKELVEQEKTRQSKNEALLSMVEKKGDLALDVLFRSISERDPYLVSYLRQQNL

SEQ ID NO: 813783 - protein, 486 aa, Homo sapiens
MEKKECPEKSSSSEEELPRRVYRELPCVSETLCDISHFFQEDDETEAEPLLFRAVPECQLSGGDIPSVSEEQESSEGQDSGDICSEENQIVSSYASKVCFEIEEDYKNRQFLGPEGNVDVELIDKSTNRYSVWFPTAGWYLWSATGLGFLVRDEVTVTIAFGSWSQHLALDLQHHEQWLVGGPLFDVTAEPEEAVAEIHLPHFISLQGEVDVSWFLVAHFKNEGMVLEHPARVEPFYAVLESPSFSLMGILLRIASGTRLSIPITSNTLIYYHPHPEDIKFHLYLVPSDALLTKAIDDEEDRFHGVRLQTSPPMEPLNFGSSYIVSNSANLKVMPKELKLSYRSPGEIQHFSKFYAGQMKEPIQLEITEKRHGTLVWDTEVKPVDLQLVAASAPPPFSGAAFVKENHRQLQARMGDLKGVLDDLQDNEVLTENEKELVEQEKTRQSKNEALLSMVEKKGDLALDVLFRSISERDPYLVSYLRQQNL

SEQ ID NO: 813784 - protein, 448 aa, Homo sapiens
  misc_feature (38)..(38): Xaa can be any naturally occurring amino acid
QSAVIILLDLDTLVRSSIPFPEIQYSCRKIFLRSKDGXSLSPATLLIQIRIQRSWGPTSLALGFSECQSTSPAEPSPPLESGGGSTSPTANRGLVLSTVGWYLWSATGLGFLVRDEVTVTIAFGSWSQHLALDLQHHEQWLVGGPLFDVTAEPEEAVAEIHLPHFISLQGEVDVSWFLVAHFKNEGMVLEHPARVEPFYAVLESPSFSLMGILLRIASGTRLSIPITSNTLIYYHPHPEDIKFHLYLVPSDALLTKAIDDEEDRFHGVRLQTSPPMEPLNFGSSYIVSNSANLKVMPKELKLSYRSPGEIQHFSKFYAGQMKEPIQLEITEKRHGTLVWDTEVKPVDLQLVAASAPPPFSGAAFVKENHRQLQARMGDLKGVLDDLQDNEVLTENEKELVEQEKTRQSKNEALLSMVEKKGDLALDVLFRSISERDPYLVSYLRQQNL

SEQ ID NO: 813785 - protein, 132 aa, Homo sapiens
MEKKECPEKSSSSEEELPRRVYRELPCVSETLCDISHFFQEDDETEAEPLLFRAVPECQLSGGDIPSVSEEQESSEGQDSGDICSEENQIVSSYASKVCFEIEEDYKNRQFLGPEGNVDVELIDKSTNRYRR

SEQ ID NO: 813786 - protein, 128 aa, Homo sapiens [sequence omitted]

SEQ ID NO: 813787 - protein, 365 aa, Homo sapiens
MGIPTSSVSEEQESSEGQDSGDICSEENQIVSSYASKVCFEIEEDYKNRQFLGPEGNVDVELIDKSTNRYSVWFPTAGWYLWSATGLGFLVRDEVTVTIAFGSWSQHLALDLQHHEQWLVGGPLFDVTAEPEEAVAEIHLPHFISLQGEVDVSWFLVAHFKNEGMVLEHPARVEPFYAVLESPSFSLMGILLRIASGTRLSIPITSNTLIYYHPHPEDIKFHLYLVPSDALLTKAIDDEEDRFHGVRLQTSPPMEPLNFGSSYIVSNSANLKVMPKELKLSYRSPGEIQHFSKFYAGQMKEPIQLEITEKRHGTLVWDTEVKPVDLQLVAASAPPPFSGVRMWPGCCPILPRTGCTCLCLNPWLP

SEQ ID NO: 813788 - protein, 365 aa, Homo sapiens; identical to SEQ ID NO: 813787

SEQ ID NO: 813789 - protein, 71 aa, Homo sapiens
KEVENQRNRPKGILPFGPSYPKVTTCCFSGALTSDQEEQNTEQPGSVQATSLRSSFLHPGAPETHMRRRAV

SEQ ID NO: 813790 - protein, 117 aa, Homo sapiens [sequence omitted]

SEQ ID NO: 813791 - protein, 281 aa, Homo sapiens; identical to SEQ ID NO: 813781

SEQ ID NO: 813792 - protein, 74 aa, Homo sapiens
KEVENQRNRPKGILPFGPSYPKVTTCCFSGALTSDQEEQNTEQPGSVQATSLRSSFLHPGAPETHMGKKDTVKT

SEQ ID NO: 813793 - protein, 151 aa, Homo sapiens [sequence omitted]

SEQ ID NO: 813794 - protein, 71 aa, Homo sapiens; identical to SEQ ID NO: 813789

SEQ ID NO: 813795 - protein, 1007 aa, Homo sapiens
MFPNPEPPPETVSINKAINTQEVAVKEKHARTCILGTHHEKGAQTFWSVVNRLPLSSNAVLCWKFCHVFHKLLRDGHPNVLKDSLRYRNELSDMSRMWGHLSEGYGQLCSIYLKLLRTKMEYHTKNPRFPGNLQMSDRQLDEAGESDVNNFFQLTVEMFDYLECELNLFQTVFNSLDMSRSVSVTAAGQCRLAPLIQVILDCSHLYDYTVKLLFKLHSCLPADTLQGHRDRFMEQFTKLKDLFYRSSNLQYFKRLIQIPQLPENPPNFLRASALSEHISPVVVIPAEASSPDSEPVLEKDDLMDMDASQQNLFDNKFDDIFGSSFSSDPFNFNSQNGVNKDEKDHLIERLYREISGLKAQLENMKTESQRVVLQLKGHVSELEADLAEQQHLRQQAADDCEFLRAELDELRRQREDTEKAQRSLSEIERKAQANEQRYSKLKEKYSELVQNHADLLRKNAEVTKQVSMARQAQVDLEREKKELEDSLERISDQGQRKTQEQLEVLESLKQELATSQRELQVLQGSLETSAQSEANWAAEFAELEKERDSLVSGAAHREEELSALRKELQDTQLKLASTEESMCQLAKDQRKMLLVGSRKAAEQVIQDALNQLEEPPLISCAGSADHLLSTVTSISSCIEQLEKSWSQYLACPEDISGLLHSITLLAHLTSDAIAHGATTCLRAPPEPADSLTEACKQYGRETLAYLASLEEEGSLENADSTAMRNCLSKIKAIGEELLPRGLDIKQEELGDLVDKEMAATSAAIETATARIEEMLSKSRAGDTGVKLEVNERILGCCTSLMQAIQVLIVASKDLQREIVESGRGTASPKEFYAKNSRWTEGLISASKAVGWGATVMVDAADLVVQGRGKFEELMVCSHEIAASTAQLVAASKVKADKDSPNLAQLQQASRGVNQATAGVVASTISGKSQIEETDNMDFSSMTLTQIKRQEMDSQVRVLELENELQKERQKLGELRKKHYELAGVAEGWEEGTEASPPTLQEVVTEKE

SEQ ID NO: 813796 - protein, 1007 aa, Homo sapiens; identical to SEQ ID NO: 813795

SEQ ID NO: 813797 - protein, 1007 aa, Homo sapiens; identical to SEQ ID NO: 813795

SEQ ID NO: 813798 - protein, 1007 aa, Homo sapiens; identical to SEQ ID NO: 813795

SEQ ID NO: 813799 - protein, 705 aa, Homo sapiens
MDMDASQQNLFDNKFDDIFGSSFSSDPFNFNSQNGVNKDEKDHLIERLYREISGLKAQLENMKTESQRVVLQLKGHVSELEADLAEQQHLRQQAADDCEFLRAELDELRRQREDTEKAQRSLSEIERKAQANEQRYSKLKEKYSELVQNHADLLRKNAEVTKQVSMARQAQVDLEREKKELEDSLERISDQGQRKTQEQLEVLESLKQELATSQRELQVLQGSLETSAQSEANWAAEFAELEKERDSLVSGAAHREEELSALRKELQDTQLKLASTEESMCQLAKDQRKMLLVGSRKAAEQVIQDALNQLEEPPLISCAGSADHLLSTVTSISSCIEQLEKSWSQYLACPEDISGLLHSITLLAHLTSDAIAHGATTCLRAPPEPADSLTEACKQYGRETLAYLASLEEEGSLENADSTAMRNCLSKIKAIGEELLPRGLDIKQEELGDLVDKEMAATSAAIETATARIEEMLSKSRAGDTGVKLEVNERILGCCTSLMQAIQVLIVASKDLQREIVESGRGTASPKEFYAKNSRWTEGLISASKAVGWGATVMVDAADLVVQGRGKFEELMVCSHEIAASTAQLVAASKVKADKDSPNLAQLQQASRGVNQATAGVVASTISGKSQIEETDNMDFSSMTLTQIKRQEMDSQVRVLELENELQKERQKLGELRKKHYELAGVAEGWEEGTEASPPTLQEVVTEKE

SEQ ID NO: 813800 - protein, 667 aa, Homo sapiens
MFPNPEPPPETVSINKAINTQEVAVKEKHARTCILGTHHEKGAQTFWSVVNRLPLSSNAVLCWKFCHVFHKLLRDGHPNVLKDSLRYRNELSDMSRMWGHLSEGYGQLCSIYLKLLRTKMEYHTKNPRFPGNLQMSDRQLDEAGESDVNNFFQLTVEMFDYLECELNLFQTVFNSLDMSRSVSVTAAGQCRLAPLIQVILDCSHLYDYTVKLLFKLHSCLPADTLQGHRDRFMEQFTKLKDLFYRSSNLQYFKRLIQIPQLPENPPNFLRASALSEHISPVVVIPAEASSPDSEPVLEKDDLMDMDASQQNLFDNKFDDIFGSSFSSDPFNFNSQNGVNKDEKDHLIERLYREISGLKAQLENMKTESQRVVLQLKGHVSELEADLAEQQHLRQQAADDCEFLRAELDELRRQREDTEKAQRSLSEIERKAQANEQRYSKLKEKYSELVQNHADLLRKNAEVTKQVSMARQAQVDLEREKKELEDSLERISDQGQRKTQEQLEVLESLKQELATSQRELQVLQGSLETSAQSEANWAAEFAELEKERDSLVSGAAHREEELSALRKELQDTQLKLASTEESMCQLAKDQRKMLLVGSRKAAEQVIQDALNQLEEPPLISCAGSADHLLSTVTSISSCIEQLEKSWSSGPAGLWNGEVHGESELSGCV

SEQ ID NO: 813801 - protein, 414 aa, Homo sapiens
MFPNPEPPPETVSINKAINTQEVAVKEKHARTCILGTHHEKGAQTFWSVVNRLPLSSNAVLCWKFCHVFHKLLRDGHPNVLKDSLRYRNELSDMSRMWGHLSEGYGQLCSIYLKLLRTKMEYHTKNPRFPGNLQMSDRQLDEAGESDVNNFFQLTVEMFDYLECELNLFQTVFNSLDMSRSVSVTAAGQCRLAPLIQVILDCSHLYDYTVKLLFKLHSCLPADTLQGHRDRFMEQFTKLKDLFYRSSNLQYFKRLIQIPQLPENPPNFLRASALSEHISPVVVIPAEASSPDSEPVLEKDDLMDMDASQQNLFDNKFDDIFGSSFSSDPFNFNSQNGVNKDEKDHLIERLYREISGLKAQLENMKTEVLNQTSRLEIQLLENSLSTYKLEKQLLQQTNEILKIHEKNRWSIYYS

SEQ ID NO: 813802 - protein, 103 aa, Homo sapiens
MNAFMSALQHKLSLSFRNRGISTYTARSGNRKRIEPNQHPICQCKSLLPISCVLFPQPQAKSLESQGQPHHCHYPVPRTCMTLPKTPSIATPFLFGPMVISVL

SEQ ID NO: 813803 - protein, 303 aa, Homo sapiens
MSSARFDSSDRSAWYMGPVSRQEAQTRLQGQRHGMFLVRDSSTCPGDYVLSVSENSRVSHYIINSLPNRRFKIGDQEFDHLPALLEFYKIHYLDTTTLIEPAPRYPSPPMGSVSAPNLPTAEDNLEYVRTLYDFPGNDAEDLPFKKGEILVIIEKPEEQWWSARNKDGRVGMIPVPYVEKLVRSSPHGKHGNRNSNSYGIPEPAHAYAQPQTTTPLPAVSGSPGAAITPLPSTQNGPVFAKAIQKRVPCAYDKTALALEVGDIVKVTRMNINGQWEGEVNGRKGLFPFTHVKIFDPQNPDENE

SEQ ID NO: 813804 - protein, 303 aa, Homo sapiens; identical to SEQ ID NO: 813803

SEQ ID NO: 813805 - protein, 303 aa, Homo sapiens; identical to SEQ ID NO: 813803

SEQ ID NO: 813806 - protein, 303 aa, Homo sapiens; identical to SEQ ID NO: 813803

SEQ ID NO: 813807 - protein, 146 aa, Homo sapiens
PLLRNCVWLFGLLTCVLPDMVAASFSSRPVRDVCPLSRRARILRRFWPSFSTWLDTFELQQLTQSARSLAILESKVSFQPCLLTNTPTHLVWRTSESDIPRVYLWFGFIINQLVTSAHENGIQGCQEIQSSKQGELEFCTPDVCQN

SEQ ID NO: 813808 - protein, 303 aa, Homo sapiens; identical to SEQ ID NO: 813803

SEQ ID NO: 813809 - protein, 303 aa, Homo sapiens; identical to SEQ ID NO: 813803

SEQ ID NO: 813810 - protein, 292 aa, Homo sapiens [sequence omitted]

SEQ ID NO: 813811 - protein, 173 aa, Homo sapiens
MAACIAAGHWAAMGLGRSFQAARTLLPPPASIACRVHAGPVRQQSTGPSEPGAFQPPPKPVIVDKHRPVEPERRFLSPEFIPRRGRTDPLKFQIERKDMLERRKVLHIPEFYVGSILRVTTADPYASGKISQFLGICIQRSGRGLGATFILRNVIEGQGPVYIHNPERWLPGP

SEQ ID NO: 813812 - protein, 292 aa, Homo sapiens [sequence omitted]

SEQ ID NO: 813813 - protein, 194 aa, Homo sapiens
MLERRKVLHIPEFYVGSILRVTTADPYASGKISQFLGICIQRSGRGLGATFILRNVIEGQGVEICFELYNPRVQEIQVVKLEKRLDDSLLYLRDALPEYSTFDVNMKPVVQEPNQKVPVNELKVKMKPKPWSKRWERPNFNIKGIRFDLCLTEQQMKEAQKWNQPWLEFDMMREYDTSKIEAAIWKEIEASKRS

SEQ ID NO: 813814 - protein, 274 aa, Homo sapiens
MAACIAAGHWAAMGLGRSFQAARTLLPPPASIACRVHAGPVRQQSTGPSEPGAFQPPPKPVIVDKHRPVEPERRFLSPEFIPRRGRTDPLKFQIERKDMLERRKVLHIPEFYVGSILRVTTADPYAIGATFILRNVIEGQGVEICFELYNPRVQEIQVVKLEKRLDDSLLYLRDALPEYSTFDVNMKPVVQEPNQKVPVNELKVKMKPKPWSKRWERPNFNIKGIRFDLCLTEQQMKEAQKWNQPWLEFDMMREYDTSKIEAAIWKEIEASKRS

SEQ ID NO: 813815 - protein, 185 aa, Homo sapiens
ARQFQDAGSREELQSCLGPQPRLAGAPVSAALLPARGTNMAQKRPACTLKPECVQQLLVCSQEAKKSAYCPYSHFPVGAALLTQEGRIFKGCNIENACYPLGICAERTAIQKAVSEGYKDFRAIAIASDMQDDFISPCGACRQVMREFGTNWPVYMTKPDGTYIVMTVQELLPSSFGPEDLQKTQ

SEQ ID NO: 813816 - protein, 203 aa, Homo sapiens
MGGSSPRPCILKAAYLRACGLAAGTHPGEELQSCLGPQPRLAGAPVSAALLPARGTNMAQKRPACTLKPECVQQLLVCSQEAKKSAYCPYSHFPVGAALLTQEGRIFKGCNIENACYPLGICAERTAIQKAVSEGYKDFRAIAIASDMQDDFISPCGACRQVMREFGTNWPVYMTKPDGTYIVMTVQELLPSSFGPEDLQKTQ

SEQ ID NO: 813817 - protein, 203 aa, Homo sapiens; identical to SEQ ID NO: 813816

SEQ ID NO: 813818 - protein, 243 aa, Homo sapiens
MGGSSPRPCILKAAYLRACGLAAGTHPGEELQSCLGPQPRLAGAPVSAALLPARGTNMAQKRPACTLKPECVQQLLVCSQEAKKSAYCPYSHFPVGAALLTQEGRIFKGRVSLLPMLEVQWREPSSLQSQTPEFKLSSCLSLPSSWDYRCNIENACYPLGICAERTAIQKAVSEGYKDFRAIAIASDMQDDFISPCGACRQVMREFGTNWPVYMTKPDGTYIVMTVQELLPSSFGPEDLQKTQ

SEQ ID NO: 813819 - protein, 107 aa, Homo sapiens
ARQFQDAGSREELQSCLGPQPRLAGAPVSAALLPARGTNMAQKRPACTLKPECVQQLLVCSQEAKKSAYCPYSHFPVGAALLTQEGRIFKEGRLRRVQGFQGNCYRQ

SEQ ID NO: 813820 - protein, 81 aa, Homo sapiens
  misc_feature (13)..(13): Xaa can be any naturally occurring amino acid
EAPRSAEAPRSQXAPRRVQGFQGNDMQDDFISPCGACRQVMREFGTNWPVYMTKPDGTYIVMTVQELLPSSFGPEDLQKTQ

SEQ ID NO: 813821 - protein, 136 aa, Homo sapiens
ARQFQDAGSREELQSCLGPQPRLAGAPVSAALLPARGTNMAQKRPACTLKPECVQQLLVCSQEAKKSAYCPYSHFPVGAALLTQEGRIFKGCNIENACYPLGICAERTAIQKAVSEGYKDFRAIAIASLAPTGPCT

SEQ ID NO: 813822 - protein, 71 aa, Homo sapiens
IPSKQGPAWQAPHWTIPQAFPLVQWAGDPILFNEVWISGPWEPPHSWICSLLGASWLLPSSFGPEDLQKTQ

SEQ ID NO: 813823 - protein, 109 aa, Homo sapiens
LGETNLSLILCFPDMQDDFISPCGACRQVMREVSSFSCCLECKYLPCRRLWEPRQVAGMAGMAGVETQLLSCLLGWLTSKASLRLHESLEIIPSFNKYLPSECLLCARP

SEQ ID NO: 813824 - protein, 260 aa, Homo sapiens
LRLVRGWVLANPAAAAAAVAAAAAVTEDREPQHEELPGLDSQWRQIENGESGRERPLRAGESWFLVEKHWYKQWEAYVQGGDQDSSTFPGCINNATLFQDEINWRLKEGLVEGEDYVLLPAAAWHYLVSWYGLEHGQPPIERKVIELPNIQKVEVYPVELLLVRHNDLGKSHTVQFSHTDSIGLVLRTARERFLVEPQEDTRLWAKNSEGSLDRLYDTHITVLDAALETGQLIIMETRKKRWHLAQRTAACHEQQHVGRG

SEQ ID NO: 813825 - protein, 673 aa, Homo sapiens
MNNNMSEEDEDFKGQPGICGLTNLGNTCFMNSALQCLSNVPQLTEYFLNNCYLEELNFRNPLGMKGEIAEAYADLVKQAWSGHHRSIVPHVFKNKVGHFASQFLGYQQHDSQELLSFLLDGLHEDLNRVKKKEYVELCDAAGRPDQEVAQEAWQNHKRRNDSVIVDTFHGLFKSTLVCPDCGNVSVTFDPFCYLSVPLPISHKRVLEVFFIPMDPRRKPEQHRLVVPKKGKISDLCVALSKHTGISPERMMVADVFSHRFYKLYQLEEPLSSILDRDDIFVYEVSGRIEAIEGSREDIVVPVYLRERTPARDYNNSYYGLMLFGHPLLVSVPRDRFTWEGLYNVLMYRLSRYVTKPNSDDEDDGDEKEDDEEDKDDVPGPSTGGSLRDPEPEQAGPSSGVTNRCPFLLDNCLGTSQWPPRRRRKQLFTLQTVNSNGTSDRTTSPEEVHAQPYIAIDWEPEMKKRYYDEVEAEGYVKHDCVGYVMKKAPVRLQECIELFTTVETLEKENPWYCPSCKQHQLATKKLDLWMLPEILIIHLKRFSYTKFSREKLDTLVEFPIRDLDFSEFVIQPQNESNPELYKYDLIAVSNHYGGMRDGHYTTFACNKDSGQWHYFDDNSVSPVNENQIESKAAYVLFYQRQDVARRLLSPAGSSGAPASPACSSPPSSEFMDVN

SEQ ID NO: 813826 - protein, 673 aa, Homo sapiens; identical to SEQ ID NO: 813825

SEQ ID NO: 813827 - protein, 673 aa, Homo sapiens; identical to SEQ ID NO: 813825

SEQ ID NO: 813828 - protein, 673 aa, Homo sapiens; identical to SEQ ID NO: 813825

SEQ ID NO: 813829 - protein, 717 aa, Homo sapiens
MNNNMSEEDEDFKGQPGICGLTNLGNTCFMNSALQCLSNVPQLTEYFLNNCYLEELNFRNPLGMKGEIAEAYADLVKQAWSGHHRSIVPHVFKNKVGHFASQFLGYQQHDSQELLSFLLDGLHEDLNRVKKKEYVELCDAAGRPDQEVAQEAWQNHKRRNDSVIVDTFHGLFKSTLVCPDCGNVSVTFDPFCYLSVPLPISHKRVLEVFFIPMDPRRKPEQVWGSGGLEEMMMDTESLISCHSSRLLALTHHKPFWSFVDTVFPLHRLVVPKKGKISDLCVALSKHTGISPERMMVADVFSHRFYKLYQLEEPLSSILDRDDIFVYEVSGRIEAIEGSREDIVVPVYLRERTPARDYNNSYYGLMLFGHPLLVSVPRDRFTWEGLYNVLMYRLSRYVTKPNSDDEDDGDEKEDDEEDKDDVPGPSTGGSLRDPEPEQAGPSSGVTNRCPFLLDNCLGTSQWPPRRRRKQLFTLQTVNSNGTSDRTTSPEEVHAQPYIAIDWEPEMKKRYYDEVEAEGYVKHDCVGYVMKKAPVRLQECIELFTTVETLEKENPWYCPSCKQHQLATKKLDLWMLPEILIIHLKRFSYTKFSREKLDTLVEFPIRDLDFSEFVIQPQNESNPELYKYDLIAVSNHYGGMRDGHYTTFACNKDSGQWHYFDDNSVSPVNENQIESKAAYVLFYQRQDVARRLLSPAGSSGAPASPACSSPPSSEFMDVN

SEQ ID NO: 813830 - protein, 673 aa, Homo sapiens; identical to SEQ ID NO: 813825

SEQ ID NO: 813831 - protein, 623 aa, Homo sapiens
MNNNMSEEDEDFKGQPGICGLTNLGNTCFMNSALQCLSNVPQLTEYFLNNCYLEELNFRNPLGMKGEIAEAYADLVKQAWSGHHRSIVPHVFKNKVGHFASQFLGYQQHDSQELLSFLLDGLHEDLNRVKKKEYVELCDAAGRPDQEVAQEAWQNHKRRNDSVIVDTFHGLFKSTLVCPDCGNVSVTFDPFCYLSVPLPISHKRVLEVFFIPMDPRRKPEQHRLVVPKKGKISDLCVALSKHTGISPERMMVADVFSHRFYKLYQLEEPLSSILDRDDIFVYEVSGRIEAIEGSREDIVVPVYLRERTPARDYNNSYYGLMLFGHPLLVSVPRDRFTWEGLYNVLMYRLSRYVTKPNSDDEDDGDEKEDDEEDKDDVPGPSTGGSLRDPEPEQAGPSSGVTNRCPFLLDNCLGTSQWPPRRRRKQLFTLQTVNSNGTSDRTTSPEEVHAQPYIAIDWEPEMKKRYYDEVEAEGYVKHDCVGYVMKKAPVRLQECIELFTTVETLEKENPWYCPSCKQHQLATKKLDLWMLPEILIIHLKRFSYTKFSREKLDTLVEFPIRDLDFSEFVIQPQNESNPELYKYDLIAVSNHYGGMRDGHCMCQAVGGACPGGSGQGGDQDLPSE

SEQ ID NO: 813832 - protein, 700 aa, Homo sapiens
MNNNMSEEDEDFKGQPGICGLTNLGNTCFMNSALQCLSNVPQLTEYFLNNCYLEELNFRNPLGMKGEIAEAYADLVKQAWSGHHRSIVPHVFKNKVGHFASQFLGYQQHDSQELLSFLLDGLHEDLNRVKKKEYVELCDAAGRPDQEVAQEAWQNHKRRNDSVIVDTFHGLFKSTLVCPDCGNVSVTFDPFCYLSVPLPISHKRVLEVFFIPMDPRRKPEQHRLVVPKKGKISDLCVALSKHTGISPERMMVADVFSHRFYKLYQLEEPLSSILDRDDIFVYEVSGRIEAIEGSREDIVVPVYLRERTPARDYNNSYYGLMLFGHPLLVSVPRDRFTWEGLYNVLMYRLSRYVTKPNSDDEDDGDEKEDDEEDKDDVPGPSTGGSLRDPEPEQAGPSSGVTNRCPFLLDNCLGTSQWPPRRRRKQLFTLQTVNSNGTSDRTTSPEEVHAQPYIAIDWEPEMKKRYYDEVEAEGYVKHDCVGYVMKKAPVRLQECIELFTTVETLEKENPWYCPSCKQHQLATKKLDLWMLPEILIIHLKRFSYTKFSREKLDTLVEFPIRSGARERMAGGRQGKEGVSSINPLPTHRDLDFSEFVIQPQNESNPELYKYDLIAVSNHYGGMRDGHYTTFACNKDSGQWHYFDDNSVSPVNENQIESKAAYVLFYQRQDVARRLLSPAGSSGAPASPACSSPPSSEFMDVN

SEQ ID NO: 813833 - protein, 580 aa, Homo sapiens
MNNNMSEEDEDFKGQPGICGLTNLGNTCFMNSALQCLSNVPQLTEYFLNNCYLEELNFRNPLGMKGEIAEAYADLVKQAWSGHHRSIVPHVFKNKVGHFASQFLGYQQHDSQELLSFLLDGLHEDLNRVKKKEYVELCDAAGRPDQEVAQEAWQNHKRRNDSVIVDTFHGLFKSTLVCPDCGNVSVTFDPFCYLSVPLPISHKRVLEVFFIPMDPRRKPEQHRLVVPKKGKISDLCVALSKHTGISPERMMVADVFSHRFYKLYQLEEPLSSILDRDDIFVYEVSGRIEAIEGSREDIVVPVYLRERTPARDYNNSYYGLMLFGHPLLVSVPRDRFTWEGLYNVLMYRLSRYVTKPNSDDEDDGDEKEDDEEDKDDVPGPSTGGSLRDPEPEQAGPSSGVTNRCPFLLDNCLGTSQWPPRRRRKQLFTLQTVNSNGTSDRTTSPEEVHAQPYIAIDWEPEMKKRYYDEVEAEGYVKHDCVGYVMKKAPVRLQECIELFTTVETLEKENPWYCPSCKQHQLATKKLDLWMLPEILIIHLKRFSYTKFSREKLDTLVEFPIRSGARERMAGGRQGKEGVYQY

SEQ ID NO: 813834 - protein, 666 aa, Homo sapiens
MNNNMSEEDEDFKGQPGICGLTNLGNTCFMNSALQCLSNVPQLTEYFLNNCYLEELNFRNPLGMKGEIAEAYADLVKQAWSGHHRSIVPHVFKNKVGHFASQFLGYQQHDSQELLSFLLDGLHEDLNRVKKKEYVELCDAAGRPDQEVAQEAWQNHKRRNDSVIVDTFHGLFKSTLVCPDCGNVSVTFDPFCYLSVPLPISHKRVLEVFFIPMDPRRKPEQHRLVVPKKGKISDLCVALSKHTGISPERMMVADVFSHRFYKLYQLEEPLSSILDRDDIFVYEVSGRIEAIEGSREDIVVPVYLRERTPARDYNNSYYGLMLFGHPLLVSVPRDRFTWEGLYNVLMYRLSRYVTKPNSDDEDDGDEKEDDEEDKDDVPGPSTGGSLRDPEPEQAGPSSGVTNRCPFLLDNCLGTSQWPPRRRRKQLFTLQTVNSNGTSDRTTSPEEVHAQPYIAIDWEPEMKKRYYDEVEAEGYVKHDCVGYVMKKAPVRLQECIELFTTVETLEKENPWYCPSCKQHQLATKKLDLWMLPEILIIHLKRFSYTKFSREKLDTLVEFPIRDLDFSEFVIQPQNESNPELYKYDLIAVSNHYGGMRDGHYTTFACNKDSGQWHYFDDNSVSPVNENQIESKAAYVLFYQRQDVARRLLSPAGSSGAPASPACSSPLT

SEQ ID NO: 813835 - protein, 510 aa, Homo sapiens
MNNNMSEEDEDFKGQPGICGLTNLGNTCFMNSALQCLSNVPQLTEYFLNNCYLEELNFRNPLGMKGEIAEAYADLVKQAWSGHHRSIVPHVFKNKVGHFASQFLGYQQHDSQELLSFLLDGLHEDLNRVKKKEYVELCDAAGRPDQEVAQEAWQNHKRRNDSVIVDTFHGLFKSTLVCPDCGNVSVTFDPFCYLSVPLPISHKRVLEVFFIPMDPRRKPEQHRLVVPKKGKISDLCVALSKHTGISPERMMVADVFSHRFYKLYQLEEPLSSILDRDDIFVYEVSGRIEAIEGSREDIVVPVYLRERTPARDYNNSYYGLMLFGHPLLVSVPRDRFTWEGLYNVLMYRLSRYVTKPNSDDEDDGDEKEDDEEDKDDVPGPSTGGSLRDPEPEQAGPSSGVTNRCPFLLDNCLGTSQWPPRRRRKQLFTLQTVNSNGTSDRTTSPEEVHAQPYIAIDWEPEMKKRYYDEVEAEGYVKHDCVGYVMKKAPVRLQECIELFTTVETLEKENPW

SEQ ID NO: 813836 - protein, 457 aa, Homo sapiens
MNNNMSEEDEDFKGQPGICGLTNLGNTCFMNSALQCLSNVPQLTEYFLNNCYLEELNFRNPLGMKGEIAEAYADLVKQAWSGHHRSIVPHVFKNKVGHFASQFLGYQQHDSQELLSFLLDGLHEDLNRVKKKEYVELCDAAGRPDQEVAQEAWQNHKRRNDSVIVDTFHGLFKSTLVCPDCGNVSVTFDPFCYLSVPLPISHKRVLEVFFIPMDPRRKPEQHRLVVPKKGKISDLCVALSKHTGISPERMMVADVFSHRFYKLYQLEEPLSSILDRDDIFVYEVSGRIEAIEGSREDIVVPVYLRERTPARDYNNSYYGLMLFGHPLLVSVPRDRFTWEGLYNVLMYRLSRYVTKPNSDDEDDGDEKEDDEEDKDDVPGPSTGGSLRDPEPEQAGPSSGVTNRCPFLLDNCLGTSQWPPRRRRKQLFTLQTVNSNGTSDRTTSPEEVHASSEFMDVN

SEQ ID NO: 813837 - protein, 673 aa, Homo sapiens; identical to SEQ ID NO: 813825

SEQ ID NO: 813838 - protein, 673 aa, Homo sapiens; identical to SEQ ID NO: 813825

SEQ ID NO: 813839 - protein, 673 aa, Homo sapiens; identical to SEQ ID NO: 813825

SEQ ID NO: 813840 - protein, 673 aa, Homo sapiens; identical to SEQ ID NO: 813825

SEQ ID NO: 813841 - protein, 673 aa, Homo sapiens; identical to SEQ ID NO: 813825

SEQ ID NO: 813842 - protein, 673 aa, Homo sapiens; identical to SEQ ID NO: 813825

SEQ ID NO: 813843 - protein, 305 aa, Homo sapiens
  misc_feature (293)..(295): Xaa can be any naturally occurring amino acid
  misc_feature (300)..(301): Xaa can be any naturally occurring amino acid
  misc_feature (305)..(305): Xaa can be any naturally occurring amino acid
MNNNMSEEDEDFKGQPGICGLTNLGNTCFMNSALQCLSNVPQLTEYFLNNCYLEELNFRNPLGMKGEIAEAYADLVKQAWSGHHRSIVPHVFKNKVGHFASQFLGYQQHDSQELLSFLLDGLHEDLNRVKKKEYVELCDAAGRPDQEVAQEAWQNHKRRNDSVIVDTFHGLFKSTLVCPDCGNVSVTFDPFCYLSVPLPISHKRVLEVFFIPMDPRRKPEQHRLVVPKKGKISDLCVALSKHTGISPERMMVADVFSHRFYKLYQLEEPLSSILDRDDIFVYEVSARIEAIEXXXEINLXXTKEX

SEQ ID NO: 813844 - protein, 673 aa, Homo sapiens; identical to SEQ ID NO: 813825

SEQ ID NO: 813845 - protein, 244 aa, Homo sapiens
MNNNMSEEDEDFKGQPGICGLTNLGNTCFMNSALQCLSNVPQLTEYFLNNCYLEELNFRNPLGMKGEIAEAYADLVKQAWSGHHRSIVPHVFKNKVGHFASQFLGYQQHDSQELLSFLLDGLHEDLNRVKKKEYVELCDAAGRPDQEVAQEAWQNHKRRNDSVIVDTFHGLFKSTLVCPDCGNVSVTFDPFCYLSVPLPISHKRVLEVFFIPMDPRRKPEQTGLVQKGTRLLWPGNTAPKEGGL

SEQ ID NO: 813846 - protein, 595 aa, Homo sapiens
VGPMIVHAHCATCVKNKVGHFASQFLGYQQHDSQELLSFLLDGLHEDLNRVKKKEYVELCDAAGRPDQEVAQEAWQNHKRRNDSVIVDTFHGLFKSTLVCPDCGNVSVTFDPFCYLSVPLPISHKRVLEVFFIPMDPRRKPEQHRLVVPKKGKISDLCVALSKHTGISPERMMVADVFSHRFYKLYQLEEPLSSILDRDDIFVYEVSGRIEAIEGSREDIVVPVYLRERTPARDYNNSYYGLMLFGHPLLVSVPRDRFTWEGLYNVLMYRLSRYVTKPNSDDEDDGDEKEDDEEDKDDVPGPSTGGSLRDPEPEQAGPSSGVTNRCPFLLDNCLGTSQWPPRRRRKQLFTLQTVNSNGTSDRTTSPEEVHAQPYIAIDWEPEMKKRYYDEVEAEGYVKHDCVGYVMKKAPVRLQECIELFTTVETLEKENPWYCPSCKQHQLATKKLDLWMLPEILIIHLKRFSYTKFSREKLDTLVEFPIRDLDFSEFVIQPQNESNPELYKYDLIAVSNHYGGMRDGHYTTFACNKDSGQWHYFDDNSVSPVNENQIESKAAYVLFYQRQDVARRLLSPAGSSGAPASPACSSPPSSEFMDVN

SEQ ID NO: 813847 - protein, 609 aa, Homo sapiens
DSTLGTPDPLRLLALLTPSLSDDPAHLLQNKVGHFASQFLGYQQHDSQELLSFLLDGLHEDLNRVKKKEYVELCDAAGRPDQEVAQEAWQNHKRRNDSVIVDTFHGLFKSTLVCPDCGNVSVTFDPFCYLSVPLPISHKRVLEVFFIPMDPRRKPEQHRLVVPKKGKISDLCVALSKHTGISPERMMVADVFSHRFYKLYQLEEPLSSILDRDDIFVYEVSGRIEAIEGSREDIVVPVYLRERTPARDYNNSYYGLMLFGHPLLVSVPRDRFTWEGLYNVLMYRLSRYVTKPNSDDEDDGDEKEDDEEDKDDVPGPSTGGSLRDPEPEQAGPSSGVTNRCPFLLDNCLGTSQWPPRRRRKQLFTLQTVNSNGTSDRTTSPEEVHAQPYIAIDWEPEMKKRYYDEVEAEGYVKHDCVGYVMKKAPVRLQECIELFTTVETLEKENPWYCPSCKQHQLATKKLDLWMLPEILIIHLKRFSYTKFSREKLDTLVEFPIRDLDFSEFVIQPQNESNPELYKYDLIAVSNHYGGMRDGHYTTFACNKDSGQWHYFDDNSVSPVNENQIESKAAYVLFYQRQDVARRLLSPAGSSGAPASPACSSPPSSEFMDVN

SEQ ID NO: 813848 - protein, 547 aa, Homo sapiens
TATFLGNAGLSFVCGENRGQEVAQEAWQNHKRRNDSVIVDTFHGLFKSTLVCPDCGNVSVTFDPFCYLSVPLPISHKRVLEVFFIPMDPRRKPEQHRLVVPKKGKISDLCVALSKHTGISPERMMVADVFSHRFYKLYQLEEPLSSILDRDDIFVYEVSGRIEAIEGSREDIVVPVYLRERTPARDYNNSYYGLMLFGHPLLVSVPRDRFTWEGLYNVLMYRLSRYVTKPNSDDEDDGDEKEDDEEDKDDVPGPSTGGSLRDPEPEQAGPSSGVTNRCPFLLDNCLGTSQWPPRRRRKQLFTLQTVNSNGTSDRTTSPEEVHAQPYIAIDWEPEMKKRYYDEVEAEGYVKHDCVGYVMKKAPVRLQECIELFTTVETLEKENPWYCPSCKQHQLATKKLDLWMLPEILIIHLKRFSYTKFSREKLDTLVEFPIRDLDFSEFVIQPQNESNPELYKYDLIAVSNHYGGMRDGHYTTFACNKDSGQWHYFDDNSVSPVNENQIESKAAYVLFYQRQDVARRLLSPAGSSGAPASPACSSPPSSEFMDVN

SEQ ID NO: 813849 - protein, 409 aa, Homo sapiens
MCCSQQLLGITWSAGMVYEVSGRIEAIEGSREDIVVPVYLRERTPARDYNNSYYGLMLFGHPLLVSVPRDRFTWEGLYNVLMYRLSRYVTKPNSDDEDDGDEKEDDEEDKDDVPGPSTGGSLRDPEPEQAGPSSGVTNRCPFLLDNCLGTSQWPPRRRRKQLFTLQTVNSNGTSDRTTSPEEVHAQPYIAIDWEPEMKKRYYDEVEAEGYVKHDCVGYVMKKAPVRLQECIELFTTVETLEKENPWYCPSCKQHQLATKKLDLWMLPEILIIHLKRFSYTKFSREKLDTLVEFPIRDLDFSEFVIQPQNESNPELYKYDLIAVSNHYGGMRDGHYTTFACNKDSGQWHYFDDNSVSPVNENQIESKAAYVLFYQRQDVARRLLSPAGSSGAPASPACSSPPSSEFMDVN

SEQ ID NO: 813850 - protein, 416 aa, Homo sapiens
GTRAAQRLLYLIELIEAVTEDIFVYEVSGRIEAIEGSREDIVVPVYLRERTPARDYNNSYYGLMLFGHPLLVSVPRDRFTWEGLYNVLMYRLSRYVTKPNSDDEDDGDEKEDDEEDKDDVPGPSTGGSLRDPEPEQAGPSSGVTNRCPFLLDNCLGTSQWPPRRRRKQLFTLQTVNSNGTSDRTTSPEEVHAQPYIAIDWEPEMKKRYYDEVEAEGYVKHDCVGYVMKKAPVRLQECIELFTTVETLEKENPWYCPSCKQHQLATKKLDLWMLPEILIIHLKRFSYTKFSREKLDTLVEFPIRDLDFSEFVIQPQNESNPELYKYDLIAVSNHYGGMRDGHYTTFACNKDSGQWHYFDDNSVSPVNENQIESKAAYVLFYQRQDVARRLLSPAGSSGAPASPACSSPPSSEFMDVN

SEQ ID NO: 813851 - protein, 420 aa, Homo sapiens
IVPEFVVLCRNFSSSCRNSSSCRNSSSCYEVSGRIEAIEGSREDIVVPVYLRERTPARDYNNSYYGLMLFGHPLLVSVPRDRFTWEGLYNVLMYRLSRYVTKPNSDDEDDGDEKEDDEEDKDDVPGPSTGGSLRDPEPEQAGPSSGVTNRCPFLLDNCLGTSQWPPRRRRKQLFTLQTVNSNGTSDRTTSPEEVHAQPYIAIDWEPEMKKRYYDEVEAEGYVKHDCVGYVMKKAPVRLQECIELFTTVETLEKENPWYCPSCKQHQLATKKLDLWMLPEILIIHLKRFSYTKFSREKLDTLVEFPIRDLDFSEFVIQPQNESNPELYKYDLIAVSNHYGGMRDGHYTTFACNKDSGQWHYFDDNSVSPVNENQIESKAAYVLFYQRQDVARRLLSPAGSSGAPASPACSSPPSSEFMDVN

SEQ ID NO: 813852 - protein, 311 aa, Homo sapiens
MPPVLEDDEEDKDDVPGPSTGGSLRDPEPEQAGPSSGVTNRCPFLLDNCLGTSQWPPRRRRKQLFTLQTVNSNGTSDRTTSPEEVHAQPYIAIDWEPEMKKRYYDEVEAEGYVKHDCVGYVMKKAPVRLQECIELFTTVETLEKENPWYCPSCKQHQLATKKLDLWMLPEILIIHLKRFSYTKFSREKLDTLVEFPIRDLDFSEFVIQPQNESNPELYKYDLIAVSNHYGGMRDGHYTTFACNKDSGQWHYFDDNSVSPVNENQIESKAAYVLFYQRQDVARRLLSPAGSSGAPASPACSSPPSSEFMDVN

SEQ ID NO: 813853 - protein, 271 aa, Homo sapiens
  misc_feature (20)..(20): Xaa can be any naturally occurring amino acid
  misc_feature (22)..(22): Xaa can be any naturally occurring amino acid
NTAAGSVPKLNVKTGVAERXGXLGIYITFRYSNFKFAVTTSPEEVHAQPYIAIDWEPEMKKRYYDEVEAEGYVKHDCVGYVMKKAPVRLQECIELFTTVETLEKENPWYCPSCKQHQLATKKLDLWMLPEILIIHLKRFSYTKFSREKLDTLVEFPIRDLDFSEFVIQPQNESNPELYKYDLIAVSNHYGGMRDGHYTTFACNKDSGQWHYFDDNSVSPVNENQIESKAAYVLFYQRQDVARRLLSPAGSSGAPASPACSSPPSSEFMDVN

SEQ ID NO: 813854 - protein, 230 aa, Homo sapiens
LWQDPGLSINIHELSSWVKKRYYDEVEAEGYVKHDCVGYVMKKAPVRLQECIELFTTVETLEKENPWYCPSCKQHQLATKKLDLWMLPEILIIHLKRFSYTKFSREKLDTLVEFPIRDLDFSEFVIQPQNESNPELYKYDLIAVSNHYGGMRDGHYTTFACNKDSGQWHYFDDNSVSPVNENQIESKAAYVLFYQRQDVARRLLSPAGSSGAPASPACSSPPSSEFMDVN

SEQ ID NO: 813855 - protein, 238 aa, Homo sapiens
MAARQFRDWTDCALQAVEEGGRGRARWLTPVIPALWEAEAGRSRGQEMETILANTVKPCIELFTTVETLEKENPWYCPSCKQHQLATKKLDLWMLPEILIIHLKRFSYTKFSREKLDTLVEFPIRDLDFSEFVIQPQNESNPELYKYDLIAVSNHYGGMRDGHYTTFACNKDSGQWHYFDDNSVSPVNENQIESKAAYVLFYQRQDVARRLLSPAGSSGAPASPACSSPPSSEFMDVN

SEQ ID NO: 813856 - protein, 191 aa, Homo sapiens
NPEVAVEGRLPISHSCVGCRRERTAMATVAANPAAAAAAVAAAAAVTEDREPQHEELPGLDSQWRQIENGESGRERPLRAGESWFLVEKHWYKQWEAYVQGGDQDSSTFPGCINNATLFQDEINWRLKEGLVEGEDYVLLPAAAWHYLVSWYGLEHGQPPIERKVIELPNIQKVEVYCPSLSSAQSVLRGW

SEQ ID NO: 813857 - protein, 160 aa, Homo sapiens [sequence omitted]

SEQ ID NO: 813858 - protein, 165 aa, Homo sapiens
YGLSSTTPSVSLSMRIRSSPRQPMSSSTNARTWRDACCPRPAHLAPQPPLPAAPHPALSSWMLIESPGSCHRKKKKKALSAISLLVSAPLLLFVLGAPARHCRLSRGYCSPVPLHRSLPGKNRSCLLLAVRAPPVFALPAVTLPSSLYLWSCPSLSSAQSVLRGW

SEQ ID NO: 813859 - protein, 268 aa, Homo sapiens
NPEVAVEGRLPISHSCVGCRRERTAMATVAANPAAAAAAVAAAAAVTEDREPQHEELPGLDSQWRQIENGESGRERPLRAGESWFLVEKHWYKQWEAYVQGGDQDSSTFPGCINNATLFQGTRPLPPSHPSPGVLVPSVPTDDHKPILCARSLVGWPESFVSFLCGFFLCHLHPRPTDEINWRLKEGLVEGEDYVLLPAAAWHYLVSWYGLEHGQPPIERKVIELPNIQKVEVYPVELLLVRHNDLGKSHTVQFSHTDSIGESKGHAM

SEQ ID NO: 813860 - protein, 206 aa, Homo sapiens
MLQQDSNDDTEDVSLFDAEEETTNRPRKAKIRHPVASFFHLFFRVSAIIVYLLCELLSSSFITCMVTIILLLSCDFWAVKNVTGRLMVGLRWWNHIDEDGKSHWVFESRKESSQENKTVSEAESRIFWLGLIACPVLWVIFAFSALFSFRVKWLAVVIMGVVLQGANLYGYIRCKVRSRKHLTSMATSYFGKQFLRQTLEMIRLPE

SEQ ID NO: 813861 - protein, 276 aa, Homo sapiens
MLQQDSNDDTEDVSLFDAEEETTNRPRKAKIRHPVASFFHLFFRVSAIIVYLLCELLSSSFITCMVTIILLLSCDFWAVKNVTGRLMVGLRWWNHIDEDGKSHWVFESRKESSQENKTVSEAESRIFWLGLIACPVLWVIFAFSALFSFRVKWLRRSRHIAQTGLKVLGSRDPPASAFQSAGITGVSRCPGHPSRKFHQVDINSFTRITDRALYWKPAPRLSSPPLRAAPGNCQQMAPARLFLSLRLWAWRGGGESPNSRGTGEPGPKFHLASGMH

SEQ ID NO: 813862 - protein, 367 aa, Homo sapiens
MLQQDSNDDTEDVSLFDAEEETTNRPRKAKIRHPVASFFHLFFRVSAIIVYLLCELLSSSFITCMVTIILLLSCDFWAVKNVTGRLMVGLRWWNHIDEDGKSHWVFESRKESSQENKTVSEAESRIFWLGLIACPVLWVIFAFSALFSFRVKWLRRSRHIAQTGLKVLGSRDPPASAFQSAGITGVSRCPGHPSRKFHQESEPVMFKKSVNIKKKMDARRMKKEEGLTENTGLPRKLLEKHDPWPAYVTYTSQTVKRLIEKSKTRELECMRALEERPWASRQNKPSSVIQPKRRKSSKSSGKAVFRDTLSESTLSMWGAYSVLAMAPTMIPEPTHLHADSRDCPTENYNKIIFARKPMMRMLPTVRY

SEQ ID NO: 813863 - protein, 182 aa, Homo sapiens
MLQQDSNDDTEDVSLFDAEEETTNRPRKAKIRHPVASFFHLFFRVSAIIVYLLCELLSSSFITCMVTIILLLSCDFWAVKNVTGRLMVGLRWWNHIDEDGKSHWVFESRKESSQENKTVSEAESRIFWLGLIACPVLWVIFAFSALFSFRVKWLEPSEMSCTRNFKREFSAGRRGRQDIRTS

SEQ ID NO: 813864 - protein, 152 aa, Homo sapiens
MDARRMKKEEGLTENTGLPRKLLEKHDPWPAYVTYTSQTVKRLIEKSKTRELECMRALEERPWASRQNKPSSVIQPKRRKSSKSSGKAVFRDTLSESTLSMWGAYSVLAMAPTMIPEPTHLHADSRDCPTENYNKIIFARKPMMRMLPTVRY

SEQ ID NO: 813865 - protein, 152 aa, Homo sapiens; identical to SEQ ID NO: 813864

SEQ ID NO: 813866 - protein, 152 aa, Homo sapiens; identical to SEQ ID NO: 813864

SEQ ID NO: 813867 - protein, 165 aa, Homo sapiens
VHRDSYSRSRVSPGMQLGIKNEEGLTENTGLPRKLLEKHDPWPAYVTYTSQTVKRLIEKSKTRELECMRALEERPWASRQNKPSSVIQPKRRKSSKSSGKAVFRDTLSESTLSMWGAYSVLAMAPTMIPEPTHLHADSRDCPTENYNKIIFARKPMMRMLPTVRY

SEQ ID NO: 813868 - protein, 170 aa, Homo sapiens
MLQQDSNDDTEDVSLFDAEEETTNRPRKAKIRHPVASFFHLFFRVSAIIVYLLCELLSSSFITCMVTIILLLSCDFWAVKNVTGRLMVGLRWWNHIDEDGKSHWVFESRKESSQENKTVSEAESRIFWLGLIACPVLWVIFAFSALFSFRVKWLVTVFGDRTFKDMIKIK

SEQ ID NO: 813869 - protein, 118 aa, Homo sapiens
MLQQDSNDDTEDVSLFDAEEETTNRPRKAKIRHPVASFFHLFFRVSAIIVYLLCELLSSSFITCMVTIILLLSCDFWAVKNVTGRLMVGLRWWNHIDEDGKSHWVFESRKLLPVQYCG

SEQ ID NO: 813870 - protein, 1414 aa, Homo sapiens
MDSAPCVRTSSLLLTAPAFGLHVRGGRVTAEGGPQVCFSIPSSCCMPSTVSESNVVRRAGGIRPTCLRWDMLLLHPGFALSIILESAEFNQTFLSTTRSLSLQGPSDTSAPAEGKPGSTVGFWSLRCLITTDSKSLGPTSEPPGPSTAWSHPEGGRCGTEAEPLRVPTGAVGTPTALKQNPLSIPETAARGPAQADQRALLTTTLAEKGGHGARRPSLCLPRWHFLNSLFTVSQCPTVIEKPGACPLHPFCYAPRFMVLLPLMGATRDGCFLGKTNVCELSHLCHSPTSRAHNWPAGPCTSDCLPRLSPWPRGDSLVGARWPTCLWCCHLSWVCLRPSACWKCPPSHPCALSSREGPAAPFRGRSVPLFLSAFPFPALLGLLWGNEYPWFCPVRESCVPAHKGRTSCRSCGKLLFPRRCPPPEACPLPALQVVFLRPGVNNRDIPGNFPFTKCIILDEGYATSWSSKNRFLPSGLKSWCGPQKQQCVSLGRLQSPSQADAPGGTPWGPPEGPTDVTWVTGVLEDGMAYVTHFVLEPEVMGVLEDGMACVTRFVFVFGCIGVSVLSVSSSHVLNTVGSSLGRRPLSLAAGKPCAAPPSAWAPSLGAGHLGQPGAMVSLQLRPSGPLGSDRPSPHHRALAASGKWGRTLCAWGCCLFTTHDQTPSRTELLSTLQKPTESFVHELSLVCFPVTFVTKQRPLSPRLEQFLQDTVARAAPCCQARWLAGLGPAHVKGTGSCDHTEPRASRSRAWKPDPLVLGLVPRSLQSKTLGCVRDDMGARLGVGPFYRVGWLSEGVEVGDPRGLALGLDNASPSWAGGSLSEPRHTLGLSARRALVTHRRPGWDLCQFQEPSSMKVVLSPERKPRRTPGRRPGLADVCSLCGWTEGALMTHIAAPFHHPSSPEQSLPRDSTCVPSMPQQPVEQGSPLLRQLLLPLPPFSFPAPSPCPSWPVALGSHGVAYWGSCSLGHFLSPGPTGPPPARAPTALAVAGGFPMTRVAQLGEDAVLGTAPGTASCLPDHVSLLQGPQSPWARGHVSHGCRPCQRHIPAPLLLDGVLVVVSMVDPHPTARGDVGQRKGSLDGSLNDHSVRSGVIPVSAQGRAGEYTDPNSWADTSFLPCTGRIGLRTVTLCTAPVGWQCHCLLGPLQDWAGADSPCGPLAQSPALPDSSLYWGYICVSEGLWQSCKILFFKNFSPDLYLLDCRRRARESGGSPLAFVICEVNEGLSPKSTSQPMTIVLFSFANLSSSVFSKVECAHRGPSQARSVSAGYLVIIAASSRLMLMVTGTVASGSRASRRREAGPAAHCKGIFHLILVCPTCGGRADVWSLGRLGAGRCAGEEAPVAKQSLRFISPAALCLVCLVNSHREKRLEVQDRCTAPVIEVMTGFDNFSPLRQVRYTSNSKFNDLIGKHTSWHDVR

SEQ ID NO: 813871 - protein, 1369 aa, Homo sapiens
MPSTVSESNVVRRAGGIRPTCLRWDMLLLHPGFALSIILESAEFNQTFLSTTRSLSLQGPSDTSAPAEGKPGSTVGFWSLRCLITTDSKSLGPTSEPPGPSTAWSHPEGGRCGTEAEPLRVPTGAVGTPTALKQNPLSIPETAARGPAQADQRALLTTTLAEKGGHGARRPSLCLPRWHFLNSLFTVSQCPTVIEKPGACPLHPFCYAPRFMVLLPLMGATRDGCFLGKTNVCELSHLCHSPTSRAHNWPAGPCTSDCLPRLSPWPRGDSLVGARWPTCLWCCHLSWVCLRPSACWKCPPSHPCALSSREGPAAPFRGRSVPLFLSAFPFPALLGLLWGNEYPWFCPVRESCVPAHKGRTSCRSCGKLLFPRRCPPPEACPLPALQVVFLRPGVNNRDIPGNFPFTKCIILDEGYATSWSSKNRFLPSGLKSWCGPQKQQCVSLGRLQSPSQADAPGGTPWGPPEGPTDVTWVTGVLEDGMAYVTHFVLEPEVMGVLEDGMACVTRFVFVFGCIGVSVLSVSSSHVLNTVGSSLGRRPLSLAAGKPCAAPPSAWAPSLGAGHLGQPGAMVSLQLRPSGPLGSDRPSPHHRALAASGKWGRTLCAWGCCLFTTHDQTPSRTELLSTLQKPTESFVHELSLVCFPVTFVTKQRPLSPRLEQFLQDTVARAAPCCQARWLAGLGPAHVKGTGSCDHTEPRASRSRAWKPDPLVLGLVPRSLQSKTLGCVRDDMGARLGVGPFYRVGWLSEGVEVGDPRGLALGLDNASPSWAGGSLSEPRHTLGLSARRALVTHRRPGWDLCQFQEPSSMKVVLSPERKPRRTPGRRPGLADVCSLCGWTEGALMTHIAAPFHHPSSPEQSLPRDSTCVPSMPQQPVEQGSPLLRQLLLPLPPFSFPAPSPCPSWPVALGSHGVAYWGSCSLGHFLSPGPTGPPPARAPTALAVAGGFPMTRVAQLGEDAVLGTAPGTASCLPDHVSLLQGPQSPWARGHVSHGCRPCQRHIPAPLLLDGVLVVVSMVDPHPTARGDVGQRKGSLDGSLNDHSVRSGVIPVSAQGRAGEYTDPNSWADTSFLPCTGRIGLRTVTLCTAPVGWQCHCLLGPLQDWAGADSPCGPLAQSPALPDSSLYWGYICVSEGLWQSCKILFFKNFSPDLYLLDCRRRARESGGSPLAFVICEVNEGLSPKSTSQPMTIVLFSFANLSSSVFSKVECAHRGPSQARSVSAGYLVIIAASSRLMLMVTGTVASGSRASRRREAGPAAHCKGIFHLILVCPTCGGRADVWSLGRLGAGRCAGEEAPVAKQSLRFISPAALCLVCLVNSHREKRLEVQDRCTAPVIEVMTGFDNFSPLRQVRYTSNSKFNDLIGKHTSWHDVR

SEQ ID NO: 813872 - protein, 1398 aa, Homo sapiens
MVRGGRVTAEGGPQVCFSIPSSCCMPSTVSESNVVRRAGGIRPTCLRWDMLLLHPGFALSIILESAEFNQTFLSTTRSLSLQGPSDTSAPAEGKPGSTVGFWSLRCLITTDSKSLGPTSEPPGPSTAWSHPEGGRCGTEAEPLRVPTGAVGTPTALKQNPLSIPETAARGPAQADQRALLTTTLAEKGGHGARRPSLCLPRWHFLNSLFTVSQCPTVIEKPGACPLHPFCYAPRFMVLLPLMGATRDGCFLGKTNVCELSHLCHSPTSRAHNWPAGPCTSDCLPRLSPWPRGDSLVGARWPTCLWCCHLSWVCLRPSACWKCPPSHPCALSSREGPAAPFRGRSVPLFLSAFPFPALLGLLWGNEYPWFCPVRESCVPAHKGRTSCRSCGKLLFPRRCPPPEACPLPALQVVFLRPGVNNRDIPGNFPFTKCIILDEGYATSWSSKNRFLPSGLKSWCGPQKQQCVSLGRLQSPSQADAPGGTPWGPPEGPTDVTWVTGVLEDGMAYVTHFVLEPEVMGVLEDGMACVTRFVFVFGCIGVSVLSVSSSHVLNTVGSSLGRRPLSLAAGKPCAAPPSAWAPSLGAGHLGQPGAMVSLQLRPSGPLGSDRPSPHHRALAASGKWGRTLCAWGCCLFTTHDQTPSRTELLSTLQKPTESFVHELSLVCFPVTFVTKQRPLSPRLEQFLQDTVARAAPCCQARWLAGLGPAHVKGTGSCDHTEPRASRSRAWKPDPLVLGLVPRSLQSKTLGCVRDDMGARLGVGPFYRVGWLSEGVEVGDPRGLALGLDNASPSWAGGSLSEPRHTLGLSARRALVTHRRPGWDLCQFQEPSSMKVVLSPERKPRRTPGRRPGLADVCSLCGWTEGALMTHIAAPFHTPSSPEQSLPRDSTCVPSMPQQPVEQGSPLLRQLLLPLPPFSFPAPSPCPSWPVALGSHGVAYWGSCSLGHFLSPGPTGPPPARAPTALAVAGGFPMTPCGPAGEDAVLGTAPGTASCLPDHVSLLQGPQSPWARGHVSHGCRPCQRHIPAPLLLDGVLVVVSMVDPHPTARGDVGQRKGSLDGSLNDHSVRSGVIPCQPKGGPGSTLIPTAGLTPPFSPAREDWPEDRHPVHSPSRVAVPLSPWAVAGLGGCRLPLRAPCSIPGPPRLLPLLGVICVSEGLWQSCKILFFKNFSPDLYLLDCRRRARESGGSPLAFVICEVNEGLSPKSTSQPMTIVLFSFANLSSSVFSKVECAHRGPSQARSVSAGYLVIIAASSRLMLMVTGTVASGSRASRRREAGPAAHCKGIFHLILVCPTCGGRADVWSLGRLGAGRCAGEEAPVAKQSLRFISPAALCLVCLVNSHREKRLEVQDRCTAPVIKVMTGFDNLSPQTSKIPSNSKFNDLIGKHTAGMMSGDFCKKCL

SEQ ID NO: 813873 - protein, 1463 aa, Homo sapiens
MTDFTILNGASLMDAVHHFQIYNCFHPKIGHPLNFGVLNKILRCLDSAPCVRTSSLLLTAPAFGLHVRGGRVTAEGGPQVCFSIPSSCCMPSTVSESNVVRRAGGIRPTCLRWDMLLLHPGFALSIILESAEFNQTFLSTTRSLSLQGPSDTSAPAEGKPGSTVGFWSLRCLITTDSKSLGPTSEPPGPSTAWSHPEGGRCGTEAEPLRVPTGAVGTTHSPKQNPLSIPETAARGPAQADQRALLTTTLAGRVATGPVSQPVPAQMAFSQLTVYCLSVSNCDEKPGACPLHPFCYAPRFMVLLPLMGATRDGCFLGKTNVCELSHLCHSPTSRAHNWPAGPCTSDCLPRLSPWPRGDSLVGARWPTCLWCCHLSWVCLRPSACWKCPPSHPCALSSREGPAAPFRGRSVPLFLSAFPFPALLGLLWGNEYPWFCPVRESCVPAHKGRTSCRSCGKLLFPRRCPPPEACPLPALQVVFLRPGVNNRDIPGNFPFTKCIILDEGYATSWSSKNRFLPSGLKSWCGPQKQQCVSLGRLQSPSQADAPGGTPWGPPEGPTDVTWVTGVLEDGMAYVTHFVLEPEVMGVLEDGMACVTRFVFVFGCIGVSVLSVSSSHVLNTVGSSLGRRPLSLAAGKPCAAPPSAWAPSLGAGHLGQPGAMVSLQLRPSGPLGSDRPSPHHRALAASGKWGRTLCAWGCCLFTTHDQTPSRTELLSTLQKPTESFVHELSLVCFPVTFVTKQRPLSPRLEQFLQDTVARAAPCCQARWLAGLGPAHVKGTGSCDHTEPRASRSRAWKPDPLVLGLVPRSLQSKTLGCVRDDMGARLGVGPFYRVGWLSEGVEVGDPRGLALGLDNASPSWAGGSLSEPRHTLGLSARRALVTHRRPGWDLCQFQEPSSMKVVLSPERKPRRTPGRRPGLADVCSLCGWTEGALMTHIAAPFHHPSSPEQSLPRDSTCVPSMPQQPVEQGSPLLRQLLLPLPPFSFPAPSPCPSWPVALGSHGVAYWGSCSLGHFLSPGPTGPPPARAPTALAVAGGFPMTRVAQLGEDAVLGTAPGTASCLPDHVSLLQGPQSPWARGHVSHGCRPCQRHIPAPLLLDGVLVVVSMVDPHPTARGDVGQRKGSLDGSLNDHSVRSGVIPVSAQGRAGEYTDPNSWADTSFLPCTGRIGLRTVTLCTAPVGWQCHCLLGPLQDWAGADSPCGPLAQSPALPDSSLYWGYICVSEGLWQSCKILFFKNFSPDLYLLDCRRRARESGGSPLAFVICEVNEGLSPKSTSQPMTIVLFSFANLSSSVFSKVECAHRGPSQARSVSAGYLVIIAASSRLMLMVTGTVASGSRASRRREAGPAAHCKGIFHLILVCPTCGGRADVWSLGRLGAGRCAGEEAPVAKQSLRFISPAALCLVCLVNSHREKRLEVQDRCTAPVIEVMTGFDNLSPQTSKIPSNSKFNDLIGKHTAGMMSGDFCKKCL

SEQ ID NO: 813874 - protein, 1222 aa, Homo sapiens
MGAPDHHPGGKGGHGARRPSLCLPRWHFLNSLFTVSQCPTVIEKPGACPLHPFCYAPRFMVLLPLMGATRDGCFLGKTNVCELSHLCHSPTSRAHNWPAGPCTSDCLPRLSPWPRGDSLVGARWPTCLWCCHLSWVCLRPSACWKCPPSHPCALSSREGPAAPFRGRSVPLFLSAFPFPALLGLLWGNEYPWFCPVRESCVPAHKGRTSCRSCGKLLFPRRCPPPEACPLPALQVVFLRPGVNNRDIPGNFPFTKCIILDEGYATSWSSKNRFLPSGLKSWCGPQKQQCVSLGRLQSPSQADAPGGTPWGPPEGPTDVTWVTGVLEDGMAYVTHFVLEPEVMGVLEDGMACVTRFVFVFGCIGVSVLSVSSSHVLNTVGSSLGRRPLSLAAGKPCAAPPSAWAPSLGAGHLGQPGAMVSLQLRPSGPLGSDRPSPHHRALAASGKWGRTLCAWGCCLFTTHDQTPSRTELLSTLQKPTESFVHELSLVCFPVTFVTKQRPLSPRLEQFLQDTVARAAPCCQARWLAGLGPAHVKGTGSCDHTEPRASRSRAWKPDPLVLGLVPRSLQSKTLGCVRDDMGARLGVGPFYRVGWLSEGVEVGDPRGLALGLDIASPSWAGGSLSEPRHTLGLSARRALVTHRRPGWDLCQFQEPSSMKVVLSPERKPRRTPGRRPGLADVCSLCGWTEGALMTHIAAPFHHPSSPEQSLPRDSTCVPSMPQQPVEQGSPLLRQLLLPLPPFSFPAPSPCPSWPVALGSHGVAYWGSCSLGHFLSPGPTGPPPARAPTALAVAGGFPMTRVAQLGEDAVLGTAPGTASCLPDHVSLLQGPQSPWARGHVSHGCRPCQRHIPAPLLLDGVLVVVSMVDPHPTARGDVGQRKGSLDGSLNDHSVRSGVIPCQPKGGPGSTLIPTAGLTPPFSPAREDWPEDRHPVHSPSRVAVPLSPWAVAGLGGCRLPLRAPCSIPGPPRLLPLLGVICVSEGLWQSCKILFFKNFSPDLYLLDCRRRARESGGSPLAFVICEVNEGLSPKSTSQPMTIVLFSFANLSSSVFSKVECAHRGPSQARSVSAGYLVIIAASSRLMLMVTGTVASGSRASRRREAGPAAHCKGIFHLILVCPTCGGRADVGSLGRLGAGRCAGEEAPVAKQSLRFISPAALCLVCLVNSHREKRLEVQDRCTAPVIEVMTGFDNLVPSTSKIPSNSKFNDLIGKHTAGMMSGDFCKKCL

SEQ ID NO: 813875 - protein, 1272 aa, Homo sapiens
MVQVRPGPTLREAGVEQKPSLSVSPPGPWAPPQPEAEPSEHSRDRCSGACPGRPTGAPDHHPGGKGGHGARRPSLCLPRWHFLNSLFTVSQCPTVIEKPGACPLHPFCYAPRFMVLLPLMGATRDGCFLGKTNVCELSHLCHSPTSRAHNWPAGPCTSDCLPRLSPWPRGDSLVGARWPTCLWCCHLSWVCLRPSACWKCPPSHPCALSSREGPAAPFRGRSVPLFLSAFPFPALLGLLWGNEYPWFCPVRESCVPAHKGRTSCRSCGKLLFPRRCPPPEACPLPALQVVFLRPGVNNRDIPGNFPFTKCIILDEGYATSWSSKNRFLPSGLKSWCGPQKQQCVSLGRLQYPSQADAPGGTPWGPPEGPTDVTWVTGVLEDGMAYVTHFVLEPEVMGVLEDGMACVTRFVFVFGCIGVSVLSVSSSHVLNTVGSSLGRRPLSLAAGKPCAAPPSAWAPSLGAGHLGQPGAMVSLQLRPSGPLGSDRPSPHHRALAASGKWGRTLCAWGCCLFTTHDQTPSRTELLSTLQKPTESFVHELSLVCFPVTFVTKQRPLSPRLEQFLQDTVARAAPCCQARWLAGLGPAHVKGTGSCDHTEPRASRSRAWKPDPLVLGLVPRSLQSYDVGGVSVMIWGPGWEYGLSSRVGWLSEGVEVGDPRGLALGLDNASPSWAGGSLSEPRHTLGLSARRALVTHRRPGWDLCQFQEPSSMKVVLSPERKPRRTPGRRPGLADVCSLCGWTEGALMTHIAAPFHHPSSPEQSLPRDSTCVPSMPQQPVEQGSPLLRQLLLPLPPFSFPAPSPCPSWPVALGSHGVAYWGSCSLGHFLSPGPTGPPPARAPTALAVAGGFPMTRVAQLGEDAVLGTAPGTASCLPDHVSLLQGPQSPWARGHVSHGCRPCQRHIPAPLLLDGVLVVVSMVDPHPTARGDVGQRKGSLDGSLNDHSVRSGVISLSAQGRAGEYTDPNSWADTSFLPCTGRIGLRTVTLCTAPVGWQCHCLLGPLQDWAGADSPCGPLAQSPALPDSSLYWGYICVSEGLWQSCKILFFKNFSPDLYLLDCRRRARESGGSPLAFVICEVNEGLSPKSTSQPMTIVLFSVCNLSSSVFSKVECAHRGPSQARSVSAGYLVIIAASSRLMLMVTGTVASGSRASRRREAGPAAHCKGIFHLILVCPTCGGRADVWSLGRLGAGRCAGEEAPVAKQSLRFISPAALCLVCLVNSHREKRLEVQDRCTAPVIEVMTGFDNFSPLRQVRYTSNSKFNDLIGKHTSWHDVR

SEQ ID NO: 813876 - protein, 227 aa, Homo sapiens
MESSKKMDSPGALQTNPPLKLHTDRSAGTPVFVPEQGGYKEKFVKTVEDKYKCEKCHLVLCSPKQTECGHRFCESCMAALLSSSSPKCTACQESIVKDKVFKDNCCKREILALQIYCRNESRGCAEQLTLGHLLVHLKNDCHFEELPCVRPDCKEKVLRKDLRDHVEKACKYREATCSHCKSQVPMIALQVRVLPFHRPSTQFLYDTFHRPSAQFVDNPFHRPSLNS

SEQ ID NO: 813877 - protein, 170 aa, Homo sapiens
MPVPASWPHPPGPFLLLTLLLGLTEVAGEEELQMIQPEKLLLVTVGKTATLHCTVTSLLPVGPVLWFRGVGPGRELIYNQKEGHFPRVTTVSDLTKRNNMDFSIRISSITPADVGTYYCVKFRKGSPENVEFKSGPGTEMALGGPASSLTALLLIAVLLGPIYVPWKQKT

SEQ ID NO: 813878 - protein, 354 aa, Homo sapiens
MIQPEKLLLVTVGKTATLHCTVTSLLPVGPVLWFRGVGPGRELIYNQKEGHFPRVTTVSDLTKRNNMDFSIRISSITPADVGTYYCVKFRKGSPENVEFKSGPGTEMALGAKPSAPVVLGPAARTTPEHTVSFTCESHGFSPRDITLKWFKNGNELSDFQTNVDPTGQSVAYSIRSTARVVLDPWDVRSQVICEVAHVTLQGDPLRGTANLSEAIRVPPTLEVTQQPMRAGNQVNVTCQVRKFYPQSLQLTWLENGNVCQRETASTLTENKDGTYNWTSWFLVNISDQRDDVVLTCQVKHDGQLAVSKRLALEVTVHQKDQSSDATPGPASSLTALLLIAVLLGPIYVPWKQKT

SEQ ID NO: 813879 - protein, 250 aa, Homo sapiens
MALRAGLVLGFHTLMTLLSPQEAGATKADHMGSYGPAFYQSYGASGQFTHEFDEEQLFSVDLKKSEAVWRLPEFGDFARFDPQGGLAGIAAIKAHLDILVERSNRSRAINVPPRVTVLPKSRVELGQPNILICIVDNIFPPVINITWLRNGQTVTEGVAQTSFYSQPDHLFRKFHYLPFVPSAEDVYDCQVEHWGLDAPLLRHWELQVPIPPPDAMETLVCALGLAIGLVGFLVGTVLIIMGTYVSSVPR

SEQ ID NO: 813880 - protein, 250 aa, Homo sapiens; identical to SEQ ID NO: 813879

SEQ ID NO: 813881 - protein, 250 aa, Homo sapiens; identical to SEQ ID NO: 813879

SEQ ID NO: 813882 - protein, 323 aa, Homo sapiens
LLLYLRLVPVLTTRTETDLIKAPECNGPQSRAGPGVPHPDDPPEPAGGRGHQGASPVSEQDSVPTQNPGRGPGSGTQQSHIVDETDTFFSLSLTLNSPNTADHMGSYGPAFYQSYGASGQFTHEFDEEQLFSVDLKKSEAVWRLPEFGDFARFDPQGGLAGIAAIKAHLDILVERSNRSRAINVPPRVTVLPKSRVELGQPNILICIVDNIFPPVINITWLRNGQTVTEGVAQTSFYSQPDHLFRKFHYLPFVPSAEDVYDCQVEHWGLDAPLLRHWELQVPIPPPDAMETLVCALGLAIGLVGFLVGTVLIIMGTYVSSVPR

SEQ ID NO: 813883 - protein, 418 aa, Homo sapiens
LLLYLRLVPVLTTRTETDLIKAPECNGPQSRAGPGVPHPDDPPEPAGGRGHQGASPVSEQDSVPTQNPGRGPGSGTQQSHIVDETDTFFSLSLTLNSPNTADHMGSYGPAFYQSYGASGQFTHEFDEEQLFSVDLKKSEAVWRLPEFGDFARFDPQGGLAGIAAIKAHLDILVERSNRSRAINGGSRSSQTPLAPLSLRNDTSHPDSAQGPVKYRSSWRPHSLPSLLSLCFPPLLPQWIPQSIPCPQMATKGERPLIPVLVRPWGEGMSLWTQGPFLLVPPRVTVLPKSRVELGQPNILICIVDNIFPPVINITWLRNGQTVTEGVAQTSFYSQPDHLFRKFHYLPFVPSAEDVYDCQVEHWGLDAPLLRHWELQVPIPPPDAMETLVCALGLAIGLVGFLVGTVLIIMGTYVSSVPR

SEQ ID NO: 813884 - protein, 282 aa, Homo sapiens
MALRAGLVLGFHTLMTLLSPQEAGATKADHMGSYGPAFYQSYGASGQFTHEFDEEQLFSVDLKKSEAVWRLPEFGDFARFDPQGGLAGIAAIKAHLDILVERSNRSRAINVPPRVTVLPKSRVELGQPNILICIVDNIFPPVINITWLRNGQTVTEGVAQTSFYSQPDHLFRKFHYLPFVPSAEDVYDCQVEHWGLDAPLLRHWGTEPPPHAPSWPQVSFTLESFHITTDSFLSLLELQVPIPPPDAMETLVCALGLAIGLVGFLVGTVLIIMGTYVSSVPR

SEQ ID NO: 813885 - protein, 74 aa, Homo sapiens
TWMELVPARLSFLTGLDDSDAAILDLGCGLVTGTQCPQVMILLREMTCGRHPADPHGFVTAPACSVPFKCIPLC

SEQ ID NO: 813886 - protein, 187 aa, Homo sapiens
LLLYLRLVPVLTTRTETDLIKAPECNGPQSRAGPGVPHPDDPPEPAGGRGHQGASPVSEQDSVPTQNPGRGPGSGTQQSHIVDETDTFFSLSLTLNSPNTADHMGSYGPAFYQSYGASGQFTHEFDEEQLFSVDLKKSEAVWRLPEFGDFARFDPQGGLAGIAAIKAHLDILVERSNRSRAINALCS

SEQ ID NO: 813887 - protein, 172 aa, Homo sapiens [sequence omitted]

SEQ ID NO: 813888 - protein, 177 aa, Homo sapiens
NSRPRRRRRQKGGGEVEMRQEVEGRGRGSHELIITDKRCGVCGGSLSCIVYLCISLNFSRIKKLKKYTWPGPTRDSPNASLQPGRAKFAFSHASHTPLHSQLGELQTGKPQALLASANPLSRSMGPPDHHLTTLILISLYTPFPGLLSSGCFSLTLTLQLDHGGLGNRCLPRCWRYR

SEQ ID NO: 813889 - protein, 576 aa, Homo sapiens
FATTGQWEVTTERDGKKETAQTVGQDVDTQKKRRQRTGRKIRVTMGKKVAIIGAGVSGLASIRSCLEEGLEPTCFEKSNDIGGLWKFSDHAEEGRASIYKSVFSNSSKEMMCFPDFPFPDDFPNFMHNSKIQEYIIAFAKEKNLLKYIQFKTFVSSVNKHPDFATTGQWDVTTERDGKKESAVFDAVMVCSGHHVYPNLPKESFPGLNHFKGKCFHSRDYKEPGVFNGKRVLVVGLGNSGCDIATELSRTAEQVMISSRSGSWVMSRVWDNGYPWDMLLVTRFGTFLKNNLPTAISDWLYVKQMNARFKHENYGLMPLNGVLRKEPVFNDELPASILCGIVSVKPNVKEFTETSAIFEDGTIFEGIDCVIFATGYSFAYPFLDESIIKSRNNEIILFKGVFPPLLEKSTIAVIGFVQSLGAAIPTVDLQSRWAAQVIKGTCTLPSMEDMMNDINEKMEKKRKWFGKSETIQTDYIVYMDELSSFIGAKPNIPWLFLTDPKLAMEVYFGPCSPYQFRLVGPGQWPGARNAILTQWDRSLKPMQTRVVGRLQKPCFFFHWLKLFAIPILLIAVFLVLT

SEQ ID NO: 813890 - protein, 154 aa, Homo sapiens
VIYNVLRKKKRTREKLRTCTLPSMEDMMNDINEKMEKKRKWFGKSETIQTDYIVYMDELSSFIGAKPNIPWLFLTDPKLAMEVYFGPCSPYQFRLVGPGQWPGARNAILTQWDRSLKPMQTRVVGRLQKPCFFFHWLKLFAIPILLIAVFLVLT

SEQ ID NO: 813891 - protein, 546 aa, Homo sapiens
LEHFLFQTAQTVGQDVDTQKKRRQRTGRKIRVTMGKKVAIIGAGVSGLASIRSCLEEGLEPTCFEKSNDIGGLWKFSDHAEEGRASIYKSVFSNSSKEMMCFPDFPFPDDFPNFMHNSKIQEYIIAFAKDPDFATTGQWDVTTERDGKKESAVFDAVMVCSGHHVYPNLPKESFPGLNHFKGKCFHSRDYKEPGVFNGKRVLVVGLGNSGCDIATELSRTAEQVMISSRSGSWVMSRVWDNGYPWDMLLVTRFGTFLKNNLPTAISDWLYVKQMNARFKHENYGLMPLNGVLRKEPVFNDELPASILCGIVSVKPNVKEFTETSAIFEDGTIFEGIDCVIFATGYSFAYPFLDESIIKSRNNEIILFKGVFPPLLEKSTIAVIGFVQSLGAAIPTVDLQSRWAAQVIKGTCTLPSMEDMMNDINEKMEKKRKWFGKSETIQTDYIVYMDELSSFIGAKPNIPWLFLTDPKLAMEVYFGPCSPYQFRLVGPGQWPGARNAILTQWDRSLKPMQTRVVGRLQKPCFFFHWLKLFAIPILLIAVFLVLT

SEQ ID NO: 813892 - protein, 528 aa, Homo sapiens
LEHFLFQTAQTVGQDVDTQKKRRQRTGRKIRVTMGKKVAIIGAGVSGLASIRSCLEEGLEPTCFEKSNDIGGLWKFSDHAEEGRASIYKSVFSNSSKEMMCFPDFPFPDDFPNFMHNSKIQEYIIAFAKDPDFATTGQWDVTTERDGKKESAVFDAVMVCSGHHVYPNLPKESFPGLNHFKGKCFHSRDYKEPGVFNGKRVLVVGLGNSGCDIATELSRTAEQVMISSRSGSWVMSRVWDNGYPWDMLLVTRFGTFLKNNLPTAISDWLYVKQMNARFKHENYGLMPLNGVLRKEPVFNDELPASILCGIVSVKPNVKEFTETSAIFEDGTIFEGIDCVIFATGYSFAYPFLDESIIEKSTIAVIGFVQSLGAAIPTVDLQSRWAAQVIKGTCTLPSMEDMMNDINEKMEKKRKWFGKSETIQTDYIVYMDELSSFIGAKPNIPWLFLTDPKLAMEVYFGPCSPYQFRLVGPGQWPGARNAILTQWDRSLKPMQTRVVGRLQKPCFFFHWLKLFAIPILLIAVFLVLT

SEQ ID NO: 813893 - protein, 552 aa, Homo sapiens
LEHFLFQTAQTVGQDVDTQKKRRQRTGRKIRVTMGKKVAIIGAGVSGLASIRSCLEEGLEPTCFEKSNDIGGLWKFSDHAEEGRASIYKSVFSNSSKEMMCFPDFPFPDDFPNFMHNSKIQEYIIAFAKEKNLLKYIQFKTFVSSVNKHPDFATTGQWDVTTERDGKKESAVFDAVMVCSGHHVYPNLPKELSRDYKEPGVFNGKRVLVVGLGNSGCDIATELSRTAEQVMISSRSGSWVMSRVWDNGYPWDMLLVTRFGTFLKNNLPTAISDWLYVKQMNARFKHENYGLMPLNGVLRKEPVFNDELPASILCGIVSVKPNVKEFTETSAIFEDGTIFEGIDCVIFATGYSFAYPFLDESIIKSRNNEIILFKGVFPPLLEKSTIAVIGFVQSLGAAIPTVDLQSRWAAQVIKGTCTLPSMEDMMNDINEKMEKKRKWFGKSETIQTDYIVYMDELSSFIGAKPNIPWLFLTDPKLAMEVYFGPCSPYQFRLVGPGQWPGARNAILTQWDRSLKPMQTRVVGRLQKPCFFFHWLKLFAIPILLIAVFLVLT

SEQ ID NO: 813894 - protein, 512 aa, Homo sapiens
MPASTRSQKRQGMDSLLEPLKMNMDHAEEGRASIYKSVFSNSSKEMMCFPDFPFPDDFPNFMHNSKIQEYIIAFAKEKNLLKYIQFKTFVSSVNKHPDFATTGQWDVTTERDGKKESAVFDAVMVCSGHHVYPNLPKESFPGLNHFKGKCFHSRDYKEPGVFNGKRVLVVGLGNSGCDIATELSRTAEQVMISSRSGSWVMSRVWDNGYPWDMLLVTRFGTFLKNNLPTAISDWLYVKQMNARFKHENYGLMPLNGVLRKEPVFNDELPASILCGIVSVKPNVKEFTETSAIFEDGTIFEGIDCVIFATGYSFAYPFLDESIIKSRNNEIILFKGVFPPLLEKSTIAVIGFVQSLGAAIPTVDLQSRWAAQVIKGTCTLPSMEDMMNDINEKMEKKRKWFGKSETIQTDYIVYMDELSSFIGAKPNIPWLFLTDPKLAMEVYFGPCSPYQFRLVGPGQWPGARNAILTQWDRSLKPMQTRVVGRLQKPCFFFHWLKLFAIPILLIAVFLVLT

SEQ ID NO: 813895 - protein, 547 aa, Homo sapiens
GRRHTEEKKTKNGVTMGKKVAIIGAGVSGLASIRSCLEEGLEPTCFEKSNDIGGLWKFSDHAEEGRASIYKSVFSNSSKEMMCFPDFPFPDDFPNFMHNSKIQEYIIAFAKEKNLLKYIQFKTFVSSVNKHPDFATTGQWDVTTERDGKKESAVFDAVMVCSGHHVYPNLPKESFPGLNHFKGKCFHSRDYKEPGVFNGKRVLVVGLGNSGCDIATELSRTAEQVMISSRSGSWVMSRVWDNGYPWDMLLVTRFGTFLKNNLPTAISDWLYVKQMNARFKHENYGLMPLNGVLRKEPVFNDELPASILCGIVSVKPNVKEFTETSAIFEDGTIFEGIDCVIFATGYSFAYPFLDESIIKSRNNEIILFKGVFPPLLEKSTIAVIGFVQSLGAAIPTVDLQSRWAAQVIKGTCTLPSMEDMMNDINEKMEKKRKWFGKSETIQTDYIVYMDELSSFIGAKPNIPWLFLTDPKLAMEVYFGPCSPYQFRLVGPGQWPGARNAILTQWDRSLKPMQTRVVGRLQKPCFFFHWLKLFAIPILLIAVFLVLT

SEQ ID NO: 813896 - protein, 512 aa, Homo sapiens; identical to SEQ ID NO: 813894

SEQ ID NO: 813897 - protein, 513 aa, Homo sapiens
FATTGQWEVTTERDGKKETAQTVGQDVDTQKKRRQRTGRKIRVTMGKKVAIIGAGVSGLASIRSCLEEGLEPTCFEKSNDIGGLWKFSTFVSSVNKHPDFATTGQWDVTTERDGKKESAVFDAVMVCSGHHVYPNLPKESFPGLNHFKGKCFHSRDYKEPGVFNGKRVLVVGLGNSGCDIATELSRTAEQVMISSRSGSWVMSRVWDNGYPWDMLLVTRFGTFLKNNLPTAISDWLYVKQMNARFKHENYGLMPLNGVLRKEPVFNDELPASILCGIVSVKPNVKEFTETSAIFEDGTIFEGIDCVIFATGYSFAYPFLDESIIKSRNNEIILFKGVFPPLLEKSTIAVIGFVQSLGAAIPTVDLQSRWAAQVIKGTCTLPSMEDMMNDINEKMEKKRKWFGKSETIQTDYIVYMDELSSFIGAKPNIPWLFLTDPKLAMEVYFGPCSPYQFRLVGPGQWPGARNAILTQWDRSLKPMQTRVVGRLQKPCFFFHWLKLFAIPILLIAVFLVLT

SEQ ID NO: 813898 - protein, 139 aa, Homo sapiens
MGTCTLPSMEDMMNDINEKMEKKRKWFGKSETIQTDYIVYMDELSSFIGAKPNIPWLFLTDPKLAMEVYFGPCSPYQFRLVGPGQWPGARNAILTQWDRSLKPMQTRVVGRLQKPCFFFHWLKLFAIPILLIAVFLVLT

SEQ ID NO: 813899 - protein, 546 aa, Homo sapiens; identical to SEQ ID NO: 813891

SEQ ID NO: 813900 - protein, 111 aa, Homo sapiens
MEDMMNDINEKMEKKRKCFIGAKPNIPWLFLTDPKLAMEVYFGPCSPYQFRLVGPGQWPGARNAILTQWDRSLKPMQTRVVGRLQKPCFFFHWLKLFAIPILLIAVFLVLT

SEQ ID NO: 813901 - protein, 757 aa, Homo sapiens
MVPDTACVLLLTLAALGASGQGQSPLGSDLGPQMLRELQETNAALQDVRELLRQQVREITFLKNTVMECDACGMQQSVRTGLPSVRPLLHCAPGFCFPGVACIQTESGARCGPCPAGFTGNGSHCTDVNECNAHPCFPRVRCINTSPGFRCEACPPGYSGPTHQGVGLAFAKANKQVCTDINECETGQHNCVPNSVCINTRGSFQCGPCQPGFVGDQASGCQRRAQRFCPDGSPSECHEHADCVLERDGSRSCVCAVGWAGNGILCGRDTDLDGFPDEKLRCPERQCRKDNCVTVPNSGQEDVDRDGIGDACDPDADGDGVPNEKDNCPLVRNPDQRNTDEDKWGDACDNCRSQKNDDQKDTDQDGRGDACDDDIDGDRIRNQADNCPRVPNSDQKDSDGDGIGDACDNCPQKSNPDQADVDHDFVGDACDSDQDQDGDGHQDSRDNCPTVPNSAQEDSDHDGQGDACDDDDDNDGVPDSRDNCRLVPNPGQEDADRDGVGDVCQDDFDADKVVDKIDVCPENAEVTLTDFRAFQTVVLDPEGDAQIDPNWVVLNQGREIVQTMNSDPGLAVGYTAFNGVDFEGTFHVNTVTDDDYAGFIFGYQDSSSFYVVMWKQMEQTYWQANPFRAVAEPGIQLKAVKSSTGPGEQLRNALWHTGDTESQVRLLWKDPRNVGWKDKKSYRWFLQHRPQVGYIRVRFYEGPELVADSNVVLDTTMRGGRLGVFCFSQENIIWANLRYRCNDTIPEDYETHQLRQA

SEQ ID NO: 813902 - protein, 158 aa, Homo sapiens
MLRELQETNAALQDVRELLRQQVKGDHWFLNKHGDGELVNSVRNLHAEQISTPGITPEVDGPVSKCAGPRSIRAFHQERMDTMQIPRKRQRTETAARNEEHHHGHQTGSKENQEQTRRIRNRANQNRYKRNVGKQDKKHSEIRTARNHEWHSKQPRNH

SEQ ID NO: 813903 - protein, 802 aa, Homo sapiens
MGHPPLEFSDCYLDSPDFRERLKCYEQELERTNKFIKDVIKDGNALISAMRNYSSAVQKFSQTLQSFQFDFIGDTLTDDEINIAESFKEFAELLNEVENERMMMVHNASDLLIKPLENFRKEQIGFTKERKKKFEKDGERFYSLLDRHLHLSSKKKESQLQEADLQVDKERHNFFESSLDYVYQIQEVQESKKFNIVEPVLAFLHSLFISNSLTVELTQDFLPYKQQLQLSLQNTRNHFSSTREEMEELKKRMKEAPQTCKLPGQPTIEGYLYTQEKWALGISWVKYYCQYEKETKTLTMTPMEQKPGAKQGPLDLTLKYCVRRKTESIDKRFCFDIETNERPGTITLQALSEANRRLWMEAMDGKEPIYHSPITKQQEMELNEVGFKFVRKCINIIETKGIKTEGLYRTVGSNIQVQKLLNAFFDPKCPGDVDFHNSDWDIKTITSSLKFYLRNLSEPVMTYRLHKELVSAAKSDNLDYRLGAIHSLVYKLPEKNREMLELLIRHLVNVCEHSKENLMTPSNMGVIFGPTLMRAQEDTVAAMMNIKFQNIVVEILIEHFGKIYLGPPEESAAPPVPPPRVTARRHKPITISKRLLRERTVFYTSSLDESEDEIQHQTPNGTITSSIEPPKPPQHPKLPIQRSGETDPGRKSPSRPILDGKLEPCPEVDVGKLVSRLQDGGTKITPKATNGPMPGSGPTKTPSFHIKRPAPRPLAHHKEGDADSFSKVRPPGEKPTIIRPPVRPPDPPCRAATPQKPEPKPDIVAGNAGEITSSVVASRTRFFETASRKTGSSQGRLPGDES

SEQ ID NO: 813904 - protein, 304 aa, Homo sapiens
MLELLIRHLVNVCEHSKENLMTPSNMGVIFGPTLMRAQEDTVAAMMNIKFQNIVVEILIEHFGKIYLGPPEESAAPPVPPPRVTARRHKPITISKRLLRERTVFYTSSLDESEDEIQHQTPNGTITSSIEPPKPPQHPKLPIQRSGETDPGRKSPSRPILDGKLEPCPEVDVGKLVSRLQDGGTKITPKATNGPMPGSGPTKTPSFHIKRPAPRPLAHHKEGDADSFSKVRPPGEKPTIIRPPVRPPDPPCRAATPQKPEPKPDIVAGNAGEITSSVVASRTRFFETASRKTGSSQGRLPGDES

SEQ ID NO: 813905 - protein, 304 aa, Homo sapiens; identical to SEQ ID NO: 813904

SEQ ID NO: 813906 - protein, 304 aa, Homo sapiens; identical to SEQ ID NO: 813904

SEQ ID NO: 813907 - protein, 169 aa, Homo sapiens
MRSKGRARKLATNNECVYGNYPEIPLEEMPDADGVASTPSLNIQEPCSPATSSEAFTPKEGSPYKAPIYIPDDIPIPAEFELRESNMPGAGLGIWTKRKIEVGEKFGPYVGEQRSNLKDPSYGWEVHLPRSRRVSVHSWLYLGKRSSDVGIAFSQADVYMPGLQCAFLS

SEQ ID NO: 813908 - protein, 1395 aa, Homo sapiens
MRIPVDASTSRRFTPPSTALSPGKMSEALPLGAPDAGAALAGKLRSGDRSMVEVLADHPGELVRTDSPNFLCSVLPTHWRCNKTLPIAFKVVALGDVPDGTLVTVMAGNDENYSAELRNATAAMKNQVARFNDLRFVGRSGRGKSFTLTITVFTNPPQVATYHRAIKITVDGPREPRNNECVYGNYPEIPLEEMPDADGVASTPSLNIQEPCSPATSSEAFTPKEGSPYKAPIYIPDDIPIPAEFELRESNMPGAGLGIWTKRKIEVGEKFGPYVGEQRSNLKDPSYGWEILDEFYNVKFCIDASQPDVGSWLKYIRFAGCYDQHNLVACQINDQIFYRVVADIAPGEELLLFMKSEDYPHETMAPDIHEERQYRCEDCDQLFESKAELADHQKFPCSTPHSAFSMVEEDFQQKLESENDLQEIHTIQECKECDQVFPDLQSLEKHMLSHTEEREYKCDQCPKAFNWKSNLIRHQMSHDSGKHYECENCAKVFTDPSNLQRHIRSQHVGARAHACPECGKTFATSSGLKQHKHIHSSVKPFICEVCHKSYTQFSNLCRHKRMHADCRTQIKCKDCGQMFSTTSSLNKHRRFCEGKNHFAAGGFFGQGISLPGTPAMDKTSMVNMSHANPGLADYFGANRHPAGLTFPTAPGFSFSFPGLFPSGLYHRPPLIPASSPVKGLSSTEQTNKSQSPLMTHPQILPATQDILKALSKHPSVGDNKPVELQPERSSEERPFEKISDQSESSDLDDVSTPSGSDLETTSGSDLESDIESDKEKFKENGKMFKDKVSPLQNLASINNKKEYSNHSIFSPSLEEQTAVSGAVNDSIKAIASIAEKYFGSTGLVGLQDKKVGALPYPSMFPLPFFPAFSQSMYPFPDRDLRSLPLKMEPQSPGEVKKLQKGSSESPFDLTTKRKDEKPLTPVPSKPPVTPATSQDQPLDLSMGSRSRASGTKLTEPRKNHVFGGKKGSNVESRPASDGSLQHARPTPFFMDPIYRVEKRKLTDPLEALKEKYLRPSPGFLFHPQMSAIENMAEKLESFSALKPEASELLQSVPSMFNFRAPPNALPENLLRKGKERYTCRYCGKIFPRSANLTRHLRTHTGEQPYRCKYCDRSFSISSNLQRHVRNIHNKEKPFKCHLCDRCFGQQTNLDRHLKKHENGNMSGTATSSPHSELESTGAILDDKEDAYFTEIRNFIGNSNHGSQSPRNVEERMNGSHFKDEKALVTSQNSDLLDDEEVEDEVLLDEEDEDNDITGKTGKEPVTSNLHEGNPEDDYEETSALEMSCKTSPVRYKEEEYKSGLSALDHIRHFTDSLKMRKMEDNQYSEAELSSFSTSHVPEELKQPLHRKSKSQAYAMMLSLSDKESLHSTSHSSSNVWHSMARAAAESSAIQSISHV

SEQ ID NO: 813909 - protein, 1115 aa, Homo sapiens
MILDEFYNVKFCIDASQPDVGSWLKYIRFAGCYDQHNLVACQINDQIFYRVVADIAPGEELLLFMKSEDYPHETMAPDIHEERQYRCEDCDQLFESKAELADHQKFPCSTPHSAFSMVEEDFQQKLESENDLQEIHTIQECKECDQVFPDLQSLEKHMLSHTEEREYKCDQCPKAFNWKSNLIRHQMSHDSGKHYECENCAKVFTDPSNLQRHIRSQHVGARAHACPECGKTFATSSGLKQHKHIHSSVKPFICEVCHKSYTQFSNLCRHKRMHADCRTQIKCKDCGQMFSTTSSLNKHRRFCEGKNHFAAGGFFGQGISLPGTPAMDKTSMVNMSHANPGLADYFGANRHPAGLTFPTAPGFSFSFPGLFPSGLYHRPPLIPASSPVKGLSSTEQTNKSQSPLMTHPQILPATQDILKALSKHPSVGDNKPVELQPERSSEERPFEKISDQSESSDLDDVSTPSGSDLETTSGSDLESDIESDKEKFKENGKMFKDKVSPLQNLASINNKKEYSNHSIFSPSLEEQTAVSGAVNDSIKAIASIAEKYFGSTGLVGLQDKKVGALPYPSMFPLPFFPAFSQSMYPFPDRDLRSLPLKMEPQSPGEVKKLQKGSSESPFDLTTKRKDEKPLTPVPSKPPVTPATSQDQPLDLSMGSRSRASGTKLTEPRKNHVFGGKKGSNVESRPASDGSLQHARPTPFFMDPIYRVEKRKLTDPLEALKEKYLRPSPGFLFHPQFQLPDQRTWMSAIENMAEKLESFSALKPEASELLQSVPSMFNFRAPPNALPENLLRKGKERYTCRYCGKIFPRSANLTRHLRTHTGEQPYRCKYCDRSFSISSNLQRHVRNIHNKEKPFKCHLCDRCFGQQTNLDRHLKKHENGNMSGTATSSPHSELESTGAILDDKEDAYFTEIRNFIGNSNHGSQSPRNVEERMNGSHFKDEKALVTSQNSDLLDDEEVEDEVLLDEEDEDNDITGKTGKEPVTSNLHEGNPEDDYEETSALEMSCKTSPVRYKEEEYKSGLSALDHIRHFTDSLKMRKMEDNQYSEAELSSFSTSHVPEELKQPLHRKSKSQAYAMMLSLSDKESLHSTSHSSSNVWHSMARAAAESSAIQSISHV

SEQ ID NO: 813910 - protein, 1115 aa, Homo sapiens; identical to SEQ ID NO: 813909

SEQ ID NO: 813911 - protein, 791 aa, Homo sapiens
MILDEFYNVKFCIDASQPDVGSWLKYIRFAGCYDQHNLVACQINDQIFYRVVADIAPGEELLLFMKSEDYPHETMAPDIHEERQYRCEDCDQLFESKAELADHQKFPCSTPHSAFSMVEEDFQQKLESENDLQEIHTIQECKECDQVFPDLQSLEKHMLSHTEEREYKCDQCPKAFNWKSNLIRHQMSHDSGKHYECENCAKVFTDPSNLQRHIRSQHVGARAHACPECGKTFATSSGLKQHKHIHSSVKPFISFSQSMYPFPDRDLRSLPLKMEPQSPGEVKKLQKGSSESPFDLTTKRKDEKPLTPVPSKPPVTPATSQDQPLDLSMGSRSRASGTKLTEPRKNHVFGGKKGSNVESRPASDGSLQHARPTPFFMDPIYRVEKRKLTDPLEALKEKYLRPSPGFLFHPQFQLPDQRTWMSAIENMAEKLESFSALKPEASELLQSVPSMFNFRAPPNALPENLLRKGKERYTCRYCGKIFPRSANLTRHLRTHTGEQPYRCKYCDRSFSISSNLQRHVRNIHNKEKPFKCHLCDRCFGQQTNLDRHLKKHENGNMSGTATSSPHSELESTGAILDDKEDAYFTEIRNFIGNSNHGSQSPRNVEERMNGSHFKDEKALVTSQNSDLLDDEEVEDEVLLDEEDEDNDITGKTGKEPVTSNLHEGNPEDDYEETSALEMSCKTSPVRYKEEEYKSGLSALDHIRHFTDSLKMRKMEDNQYSEAELSSFSTSHVPEELKQPLHRKSKSQAYAMMLSLSDKESLHSTSHSSSNVWHSMARAAAESSAIQSISHV

SEQ ID NO: 813912 - protein, 1115 aa, Homo sapiens; identical to SEQ ID NO: 813909

SEQ ID NO: 813913 - protein, 1115 aa, Homo sapiens; identical to SEQ ID NO: 813909

SEQ ID NO: 813914 - protein, 1239 aa, Homo sapiens
MRSKGRARKLATNNECVYGNYPEIPLEEMPDADGVASTPSLNIQEPCSPATSSEAFTPKEGSPYKAPIYIPDDIPIPAEFELRESNMPGAGLGIWTKRKIEVGEKFGPYVGEQRSNLKDPSYGWEILDEFYNVKFCIDASQPDVGSWLKYIRFAGCYDQHNLVACQINDQIFYRVVADIAPGEELLLFMKSEDYPHETMAPDIHEERQYRCEDCDQLFESKAELADHQKFPCSTPHSAFSMVEEDFQQKLESENDLQEIHTIQECKECDQVFPDLQSLEKHMLSHTEEREYKCDQCPKAFNWKSNLIRHQMSHDSGKHYECENCAKVFTDPSNLQRHIRSQHVGARAHACPECGKTFATSSGLKQHKHIHSSVKPFICEVCHKSYTQFSNLCRHKRMHADCRTQIKCKDCGQMFSTTSSLNKHRRFCEGKNHFAAGGFFGQGISLPGTPAMDKTSMVNMSHANPGLADYFGANRHPAGLTFPTAPGFSFSFPGLFPSGLYHRPPLIPASSPVKGLSSTEQTNKSQSPLMTHPQILPATQDILKALSKHPSVGDNKPVELQPERSSEERPFEKISDQSESSDLDDVSTPSGSDLETTSGSDLESDIESDKEKFKENGKMFKDKVSPLQNLASINNKKEYSNHSIFSPSLEEQTAVSGAVNDSIKAIASIAEKYFGSTGLVGLQDKKVGALPYPSMFPLPFFPAFSQSMYPFPDRDLRSLPLKMEPQSPGEVKKLQKGSSESPFDLTTKRKDEKPLTPVPSKPPVTPATSQDQPLDLSMGSRSRASGTKLTEPRKNHVFGGKKGSNVESRPASDGSLQHARPTPFFMDPIYRVEKRKLTDPLEALKEKYLRPSPGFLFHPQFQLPDQRTWMSAIENMAEKLESFSALKPEASELLQSVPSMFNFRAPPNALPENLLRKGKERYTCRYCGKIFPRSANLTRHLRTHTGEQPYRCKYCDRSFSISSNLQRHVRNIHNKEKPFKCHLCDRCFGQQTNLDRHLKKHENGNMSGTATSSPHSELESTGAILDDKEDAYFTEIRNFIGNSNHGSQSPRNVEERMNGSHFKDEKALVTSQNSDLLDDEEVEDEVLLDEEDEDNDITGKTGKEPVTSNLHEGNPEDDYEETSALEMSCKTSPVRYKEEEYKSGLSALDHIRHFTDSLKMRKMEDNQYSEAELSSFSTSHVPEELKQPLHRKSKSQAYAMMLSLSDKESLHSTSHSSSNVWHSMARAAAESSAIQSISHV

SEQ ID NO: 813915 - protein, 310 aa, Homo sapiens
YYQLMCGLCGNYNGDPKDDFRCKYCDRSFSISSNLQRHVRNIHNKEKPFKCHLCDRCFGQQTNLDRHLKKHENGNMSGTATSSPHSELESTGAILDDKEDAYFTEIRNFIGNSNHGSQSPRNVEERMNGSHFKDEKALVTSQNSDLLDDEEVEDEVLLDEEDEDNDITGKTGKEPVTSNLHEGNPEDDYEETSALEMSCKTSPVRYKEEEYKSGLSALDHIRHFTDSLKMRKMEDNQYSEAELSSFSTSHVPEELKQPLHRKSKSQAYAMMLSLSDKESLHSTSHSSSNVWHSMARAAAESSAIQSISHV

SEQ ID NO: 813916 - protein, 1067 aa, Homo sapiens
MILDEFYNVKFCIDASQPDVGSWLKYIRFAGCYDQHNLVACQINDQIFYRVVADIAPGEELLLFMKSEDYPHETMAPDIHEERQYRCEDCDQLFESKAELADHQKFPCSTPHSAFSMVEEDFQQKLESENDLQEIHTIQECKECDQVFPDLQSLEKHMLSHTEEREYKCDQCPKAFNWKSNLIRHQMSHDSGKHYECENCAKVFTDPSNLQRHIRSQHVGARAHACPECGKTFATSSGLKQHKHIHSSVKPFICEVCHKSYTQFSNLCRHKRMHADCRTQIKCKDCGQMFSTTSSLNKHRRFCEGKNHFAAGGFFGQGISLPGTPAMDKTSMVNMSHANPGLADYFGANRHPAGLTFPTAPGFSFSFPGLFPSGLYHRPPLIPASSPVKGLSSTEQTNKSQSPLMTHPQILPATQDILKALSKHPSVGDNKPVELQPERSSEERPFEKISDQSESSDLDDVSTPSGSDLETTSGSDLESDIESDKEKFKENGKMFKDKVSPLQNLASINNKKEYSNHSIFSPSLEEQTAVSGAVNDSIKAIASIAEKYFGSTGLVGLQDKKVGALPYPSMFPLPFFPAFSQSMYPFPDRDLRSLPLKMEPQSPGEVKKLQKGSSESPFDLTTKRKDEKPLTPVPSKPPVTPATSQDQPLDLSMGSRSRASGTKLTEPRKNHVFGGKKGSNVESRPASDGSLQHARPTPFFMDPIYRVEKRKLTDPLEALKEKYLRPSPGFLFHPQMSAIENMAEKLESFSALKPEASELLQSVPSMFNFRAPPNALPENLLRKGKERYTCRYCGKIFPRSANLTRHLRTHTGEQPYRCKYCDRSFSISSNLQRHVRNIHNKEKPFKCHLCDRCFGQQTNLDRHLKKHENGNMSGTATSSPHSELESTGAILDDKEDAYFTEIRNFIGNSNHGSQSPRNVEERMNGSHFKDEKALVTSQNSDLLDDEEVEDEVLLDEEDEDNDITGKTGKEPVTSNLHEGNPEDDYEETSALEMSCKTSPVRYKEEEYKSGLSALDHIRHFTDSLKMRKMEDNQYSEAELSSFSTSHVPEELKQPLHRKSKSQVQIFP

SEQ ID NO: 813917 - protein, 305 aa, Homo sapiens
MRIPVDASTSRRFTPPSTALSPGKMSEALPLGAPDAGAALAGKLRSGDRSMVEVLADHPGELVRTDSPNFLCSVLPTHWRCNKTLPIAFKVVALGDVPDGTLVTVMAGNDENYSAELRNATAAMKNQVARFNDLRFVGRSGRGKSFTLTITVFTNPPQVATYHRAIKITVDGPREPRNNECVYGNYPEIPLEEMPDADGVASTPSLNIQEPCSPATSSEAFTPKEGSPYKAPIYIPDDIPIPAEFELRESNMPGAGLGIWTKRKIEVGEKFGPYVGEQRSNLKDPSYGWEVRMYFELTHLYIAAV

SEQ ID NO: 813918 - protein, 1050 aa, Homo sapiens
MLCWGYWSLGQPGISTNLQGIVAEPQVCGFISDRSVKEVACGGNHSVFLLEDGEVYTCGLNTKGQLGHEREGNKPEQIGALADQHIIHVACGESHSLALSDRGQLFSWGAGSDGQLGLMTTEDSVAVPRLIQKLNQQTILQVSCGNWHCLALAADGQFFTWGKNSHGQLGLGKEFPSQASPQRVRSLEGIPLAQVAAGGAHSFALSLSGAVFGWGMNNAGQLGLSDEKDRESPCHVKLLRTQKVVYISCGEEHTAVLTKSGGVFTFGAGSCGQLGHDSMNDEVNPRRVLELMGSEVTQIACGRQHTLAFVPSSGLIYAFGCGARGQLGTGHTCNVKCPSPVKGYWAAHSGQLSARADRFKYHIVKQIFSGGDQTFVLCSKYENYSPAVDFRTMNQAHYTSLINDETIAVWRQKLSEHNNANTINGVVQILSSAACWNGSFLEKKIDEHFKTSPKIPGIDLNSTRVLFEKLMNSQHSMILEQILNSFESCLIPQLSSSPPDVEAMRIYLILPEFPLLQDSKYYITLTIPLAMAILRLDTNPSKVLDNWWSQVCPKYFMKLVNLYKGAVLYLLRGRKTFLIPVLFNNYITAALKLLEKLYKVNLKVKHVEYDTFYIPEISNLVDIQEDYLMWFLHQAGMKARPSIIQDTVTLCSYPFIFDAQAKTKMLQTDAELQMQVAVNGANLQNVFMLLTLEPLLARSPFLVLHVRRNNLVGDALRELSIHSDIDLKKPLKVIFDGEEAVDAGGVTKEFFLLLLKELLNPIYGMFTYYQDSNLLWFSDTCFVEHNWFHLIGITCGLAIYNSTVVDLHFPLALYKKLLNVKPGLEDLKELSPTEGRSLQELLDYPGEDVEETFCLNFTICRESYGVIEQKKLIPGGDNVTVCKDNRQEFVDAYVNYVFQISVHEWYTAFSSGFLKVCGGKVLELFQPSELRAMMVGNSNYNWEELEETAIYKGDYSATHPTVKLFWETFHEFPLEKKKKFLLFLTGSDRIPIYGMASLQIVIQSTASGEEYLPVAHTCYNLLDLPKYSSKEILSARLTQALDNYEGFSLA

SEQ ID NO: 813919 - protein, 1037 aa, Homo sapiens
MLCWGYWSLGQPGISTNLQGIVAEPQVCGFISDRSVKEVACGGNHSVFLLEDGEVYTCGLNTKGQLGHEREGNKPEQIGALADQHIIHVACGESHSLALSDRGQLFSWGAGSDGQLGLMTTEDSVAVPRLIQKLNQQTILQVSCGNWHCLALAADGQFFTWGKNSHGQLGLGKEFPSQASPQRVRSLEGIPLAQVAAGGAHSFALSLSGAVFGWGMNNAGQLGLSDEKDRESPCHVKLLRTQKVVYISCGEEHTAVLTKSGGVFTFGAGSCGQLGHDSMNDEVNPRRVLELMGSEVTQIACGRQHTLAFVPSSGLIYAFGCGARGQLGTGHTCNVKCPSPVKGYWAAHSGQLSARADRFKYHIVKQIFSGGDQTFVLCSKYENYSPAVDFRTMNQAHYTSLINDETIAVWRQKLSEHNNANTINGVVQILSSAACWNGSFLEKKIDEHFKTSPKIPGIDLNSTRVLFEKLMNSQHSMILEQILNSFESCLIPQLSSSPPDVEAMRIYLILPEFPLLQDSKYYITLTIPLAMAILRLDTNPSKVLDNWWSQVCPKYFMKLVNLYKGAVLYLLRGRKTFLIPVLFNNYITAALKLLEKLYKVNLKVKHVEYDTFYIPEISNLVDIQEDYLMWFLHQAGMKARPSIIQDTVTLCSYPFIFDAQAKMAVNGANLQNVFMLLTLEPLLARSPFLVLHVRRNNLVGDALRELSIHSDIDLKKPLKVIFDGEEAVDAGGVTKEFFLLLLKELLNPIYGMFTYYQDSNLLWFSDTCFVEHNWFHLIGITCGLAIYNSTVVDLHFPLALYKKLLNVKPGLEDLKELSPTEGRSLQELLDYPGEDVEETFCLNFTICRESYGVIEQKKLIPGGDNVTVCKDNRQEFVDAYVNYVFQISVHEWYTAFSSGFLKVCGGKVLELFQPSELRAMMVGNSNYNWEELEETAIYKGDYSATHPTVKLFWETFHEFPLEKKKKFLLFLTGSDRIPIYGMASLQIVIQSTASGEEYLPVAHTCYNLLDLPKYSSKEILSARLTQALDNYEGFSLA

SEQ ID NO: 813920 - protein, 822 aa, Homo sapiens
MNNAGQLGLSDEKDRESPCHVKLLRTQKVVYISCGEEHTAVLTKSGGVFTFGAGSCGQLGHDSMNDEVNPRRVLELMGSEVTQIACGRQHTLAFVPSSGLIYAFGCGARGQLGTGHTCNVKCPSPVKGYWAAHSGQLSARADRFKYHIVKQIFSGGDQTFVLCSKYENYSPAVDFRTMNQAHYTSLINDETIAVWRQKLSEHNNANTINGVVQILSSAACWNGSFLEKKIDEHFKTSPKIPGIDLNSTRVLFEKLMNSQHSMILEQILNSFESCLIPQLSSSPPDVEAMRIYLILPEFPLLQDSKYYITLTIPLAMAILRLDTNPSKVLDNWWSQVCPKYFMKLVNLYKGAVLYLLRGRKTFLIPVLFNNYITAALKLLEKLYKVNLKVKHVEYDTFYIPEISNLVDIQEDYLMWFLHQAGMKARPSIIQDTVTLCSYPFIFDAQAKMAVNGANLQNVFMLLTLEPLLARSPFLVLHVRRNNLVGDALRELSIHSDIDLKKPLKVIFDGEEAVDAGGVTKEFFLLLLKELLNPIYGMFTYYQDSNLLWFSDTCFVEHNWFHLIGITCGLAIYNSTVVDLHFPLALYKKLLNVKPGLEDLKELSPTEGRSLQELLDYPGEDVEETFCLNFTICRESYGVIEQKKLIPGGDNVTVCKDNRQEFVDAYVNYVFQISVHEWYTAFSSGFLKVCGGKVLELFQPSELRAMMVGNSNYNWEELEETAIYKGDYSATHPTVKLFWETFHEFPLEKKKKFLLFLTGSDRIPIYGMASLQIVIQSTASGEEYLPVAHTCYNLLDLPKYSSKEILSARLTQALDNYEGFSLA

SEQ ID NO: 813921 - protein, 1037 aa, Homo sapiens; identical to SEQ ID NO: 813919

SEQ ID NO: 813922 - protein, 665 aa, Homo sapiens
FFLLLHLILQNYSPAVDFRTMNQAHYTSLINDETIAVWRQKLSEHNNANTINGVVQILSSAACWNGSFLEKKIDEHFKTSPKIPGIDLNSTRVLFEKLMNSQHSMILEQILNSFESCLIPQLSSSPPDVEAMRIYLILPEFPLLQDSKYYITLTIPLAMAILRLDTNPSKVLDNWWSQVCPKYFMKLVNLYKGAVLYLLRGRKTFLIPVLFNNYITAALKLLEKLYKVNLKVKHVEYDTFYIPEISNLVDIQEDYLMWFLHQAGMKARPSIIQDTVTLCSYPFIFDAQAKMAVNGANLQNVFMLLTLEPLLARSPFLVLHVRRNNLVGDALRELSIHSDIDLKKPLKVIFDGEEAVDAGGVTKEFFLLLLKELLNPIYGMFTYYQDSNLLWFSDTCFVEHNWFHLIGITCGLAIYNSTVVDLHFPLALYKKLLNVKPGLEDLKELSPTEGRSLQELLDYPGEDVEETFCLNFTICRESYGVIEQKKLIPGGDNVTVCKDNRQEFVDAYVNYVFQISVHEWYTAFSSGFLKVCGGKVLELFQPSELRAMMVGNSNYNWEELEETAIYKGDYSATHPTVKLFWETFHEFPLEKKKKFLLFLTGSDRIPIYGMASLQIVIQSTASGEEYLPVAHTCYNLLDLPKYSSKEILSARLTQALDNYEGFSLA

SEQ ID NO: 813923 - protein, 1037 aa, Homo sapiens; identical to SEQ ID NO: 813919

SEQ ID NO: 813924 - protein, 1037 aa, Homo sapiens; identical to SEQ ID NO: 813919

SEQ ID NO: 813925 - protein, 839 aa, Homo sapiens
MLCWGYWSLGQPGISTNLQGIVAEPQVCGFISDRSVKEVACGGNHSVFLLEDGEVYTCGLNTKGQLGHEREGNKPEQIGALADQHIIHVACGESHSLALSDRGQLFSWGAGSDGQLGLMTTEDSVAVPRLIQKLNQQTILQVSCGNWHCLALAADGQFFTWGKNSHGQLGLGKEFPSQASPQRVRSLEGIPLAQVAAGGAHSFALSLSGAVFGWGMNNAGQLGLSDEKDRESPCHVKLLRTQKVVYISCGEEHTAVLTKSGGVFTFGAGSCGQLGHDSMNDEVNPRRVLELMGSEVTQIACGRQHTLAFVPSSGLIYAFGCGARGQLGTGHTCNVKCPSPVKGYWAAHSGQLSARADRFKYHIVKQIFSGGDQTFVLCSKYENYSPAVDFRTMNQAHYTSLINDETIAVWRQKLSEHNNANTINGVVQILSSAACWNGSFLEKKIDEHFKTSPKIPGIDLNSTRVLFEKLMNSQHSMILEQILNSFESCLIPQLSSSPPDVEAMRIYLILPEFPLLQDSKYYITLTIPLAMAILRLDTNPSKVLDNWWSQVCPKYFMKLVNLYKGAVLYLLRGRKTFLIPVLFNNYITAALKLLEKLYKVNLKVKHVEYDTFYIPEISNLVDIQEDYLMWFLHQAGMKARPSIIQDTVTLCSYPFIFDAQAKMAVNGANLQNVFMLLTLEPLLARSPFLVLHVRRNNLVGDALRELSIHSDIDLKKPLKVIFDGEEAVDAGGVTKEFFLLLLKELLNPIYGMFTYYQDSNLLWFSDTCFVEHNWFHLIGITCGLAIYNSTVVDLHFPLALYKKLLNVKPGLEDLKELSPTEGSPSSLPLFSPFRTLCPP

SEQ ID NO: 813926 - protein, 443 aa, Homo sapiens
MLCWGYWSLGQPGISTNLQGIVAEPQVCGFISDRSVKEVACGGNHSVFLLEDGEVYTCGLNTKGQLGHEREGNKPEQIGALADQHIIHVACGESHSLALSDRGQLFSWGAGSDGQLGLMTTEDSVAVPRLIQKLNQQTILQVSCGNWHCLALAADGQFFTWGKNSHGQLGLGKEFPSQASPQRVRSLEGIPLAQVAAGGAHSFALSLSGAVFGWGMNNAGQLGLSDEKDRESPCHVKLLRTQKVVYISCGEEHTAVLTKSGGVFTFGAGSCGQLGHDSMNDEVNPRRVLELMGSEVTQIACGRQHTLAFVPSSGLIYAFGCGARGQLGTGHTCNVKCPSPVKGYWAAHSGQLSARADRFKYHIVKQIFSGGDQTFVLCSKYENYSPAVDFRTMNQAHYTSLINDETIAVWRQKLSEHNNANTIKYVAACLHFFFHKVCYNFLA

SEQ ID NO: 813927 - protein, 411 aa, Homo sapiens
QRAGGSGRNSVVLRARLPAAGEPRAWRGNSSLLRCFGLREPKGGGETKEKQTLRSGTVRGLRSCVRALARAGSVLAREAEAGGGGGPARSDSVDGSQGRRRREAEEAAAAMEVKRLKVTELRSELQRRGLDSRGLKVDLAQRLQEALDAEMLEDEAGGGGAGPGGACKAEPRPVAASGGGPGGDEEEDEEEEEEDEEALLEDEDEEPPPAQALGQAAQPPPEPPEAAAMEAAAEPDASEKPAEATAGSGGVNGGEEQGLGKREEDEPEERSGAVTRRRDPRCRVTRPPRNREMTRIVKSQNLRLPLFYPETAHTCAHACTHTFSILKECFLGAIFILFYFLILGGGNKGIRPRKMYSFSFSLATWRIHIPCVLNPRKRKRSNQPCGRSMVSGVYFKTAGKETGPILYIVAT

SEQ ID NO: 813928 - protein, 78 aa, Homo sapiens
GYRREEQGDDQDSEKSKPAGSDGERRGVKRQRDEKDEHGRAYYEFREEAYHSRSKSPLPPEEEAKDEEEDQTLVNLDT

SEQ ID NO: 813929 - protein, 444 aa, Homo sapiens [sequence omitted]

SEQ ID NO: 813930 - protein, 859 aa, Homo sapiens
RGREEAGGTPSSSARACPRLGNQGPGGETAPCCVVLGSVSRKGEGRRRRSKHCAAGPCAASAPACVRSLARAQCWRVRRRRAAAAAPARSDSVDGSQGRRRREAEEAAAAMEVKRLKVTELRSELQRRGLDSRGLKVDLAQRLQEALDAEMLEDEAGGGGAGPGGACKAEPRPVAASGGGPGGDEEEDEEEEEEDEEALLEDEDEEPPPAQALGQAAQPPPEPPEAAAMEAAAEPDASEKPAEATAGSGGVNGGEEQGLGKREEDEPEELERSGDETPGSEVPGDKAAEEQGDDQDSEKSKPAGSDGERRGVKRQRDEKDEHGRAYYEFREEAYHSRSKSPLPPEEEAKDEEEDQTLVNLDTYTSDLHFQVSKDRYGGQPLFSEKFPTLWSGARSTYGVTKGKVCFEAKVTQNLPMKEGCTEVSLLRVGWSVDFSRPQLGEDEFSYGFDGRGLKAENGQFEEFGQTFGENDVIGCFANFETEEVELSFSKNGEDLGVAFWISKDSLADRALLPHVLCKNCVVELNFGQKEEPFFPPPEEFVFIHAVPVEERVRTAVPPKTIEECEVILMVGLPGSGKTQWALKYAKENPEKRYNVLGAETVLNQMRMKGLEEPEMDPKSRDLLVQQASQCLSKLVQIASRTKRNFILDQCNVYNSGQRRKLLLFKTFSRKVVVVVPNEEDWKKRLELRKEVEGDDVPESIMLEMKANFSLPEKCDYMDEVTYGELEKEEAQPIVTKYKEEARKLLPPSEKRTNRRNNRNKRNRQNRSRGQGYVGGQRRGYDNRAYGQQYWGQPGNRGGYRNFYDRYRGDYDRFYGRDYEYNRYRDYYRQYNRDWQSYYYHHPQDRDRYYRNYYGYQGYR

SEQ ID NO: 813931 - protein, 444 aa, Homo sapiens [sequence omitted]

SEQ ID NO: 813932 - protein, 657 aa, Homo sapiens
RREMLCRHPLSLIDAESIQKLPDQPSHHTQKRPFPSGEKLPDQPFTHHSQEGPFPPGEKLPDRPLIPQPRGAFLTWRETSRPSPLTTARRGLSHRKKKMIRIIFFFRRGVKRQRDEKDEHGRAYYEFREEAYHSRSKSPLPPEEEAKDEEEDQTLVNLDTYTSDLHFQVSKDRYGGQPLFSEKFPTLWSGARSTYGVTKGKVCFEAKVTQNLPMKEGCTEVSLLRVGWSVDFSRPQLGEDEFSYGFDGRGLKAENGQFEEFGQTFGENDVIGCFANFETEEVELSFSKNGEDLGVAFWISKDSLADRALLPHVLCKNCVVELNFGQKEEPFFPPPEEFVFIHAVPVEERVRTAVPPKTIEECEVILMVGLPGSGKTQWALKYAKENPEKRYNVLGAETVLNQMRMKGLEEPEMDPKSRDLLVQQASQCLSKLVQIASRTKRNFILDQCNVYNSGQRRKLLLFKTFSRKVVVVVPNEEDWKKRLELRKEVEGDDVPESIMLEMKANFSLPEKCDYMDEVTYGELEKEEAQPIVTKYKEEARKLLPPSEKRTNRRNNRNKRNRQNRSRGQGYVGGQRRGYDNRAYGQQYWGQPGNRGGYRNFYDRYRGDYDRFYGRDYEYNRYRDYYRQYNRDWQSYYYHHPQDRDRYYRNYYGYQGYR

SEQ ID NO: 813933 - protein, 518 aa, Homo sapiens
MLCWRLTSIGHWSKLIASFFTDTSDLHFQVSKDRYGGQPLFSEKFPTLWSGARSTYGVTKGKVCFEAKVTQNLPMKEGCTEVSLLRVGWSVDFSRPQLGEDEFSYGFDGRGLKAENGQFEEFGQTFGENDVIGCFANFETEEVELSFSKNGEDLGVAFWISKDSLADRALLPHVLCKNCVVELNFGQKEEPFFPPPEEFVFIHAVPVEERVRTAVPPKTIEECEVILMVGLPGSGKTQWALKYAKENPEKRYNVLGAETVLNQMRMKGLEEPEMDPKSRDLLVQQASQCLSKLVQIASRTKRNFILDQCNVYNSGQRRKLLLFKTFSRKVVVVVPNEEDWKKRLELRKEVEGDDVPESIMLEMKANFSLPEKCDYMDEVTYGELEKEEAQPIVTKYKEEARKLLPPSEKRTNRRNNRNKRNRQNRSRGQGYVGGQRRGYDNRAYGQQYWGQPGNRGGYRNFYDRYRGDYDRFYGRDYEYNRYRDYYRQYNRDWQSYYYHHPQDRDRYYRNYYGYQGYR

SEQ ID NO: 813934 - protein, 245 aa, Homo sapiens
LARGRTCGCRQSKQQVYCCWCCCKVAIRIGRERRKCNVYNSGQRRKLLLFKTFSRKVVVVVPNEEDWKKRLELRKEVEGDDVPESIMLEMKANFSLPEKCDYMDEVTYGELEKEEAQPIVTKYKEEARKLLPPSEKRTNRRNNRNKRNRQNRSRGQGYVGGQRRGYDNRAYGQQYWGQPGNRGGYRNFYDRYRGDYDRFYGRDYEYNRYRDYYRQYNRDWQSYYYHHPQDRDRYYRNYYGYQGYR

SEQ ID NO: 813935 - protein, 108 aa, Homo sapiens
  misc_feature (2)..(2): Xaa can be any naturally occurring amino acid
  misc_feature (18)..(18): Xaa can be any naturally occurring amino acid
SXLSAQSIRALTEAPITXGIRVGGQRRGYDNRAYGQQYWGQPGNRGGYRNFYDRYRGDYDRFYGRDYEYNRYRDYYRQYNRDWQSYYYHHPQDRDRYYRNYYGYQGYR

SEQ ID NO: 813936 - protein, 311 aa, Homo sapiens
QRAGGSGRNSVVLRARLPAAGEPRAWRGNSSLLRCFGLREPKGGGETKEKQTLRSGTVRGLRSCVRALARAGSVLAREAEAGGGGGPARSDSVDGSQGRRRREAEEAAAAMEVKRLKVTELRSELQRRGLDSRGLKVDLAQRLQEALDAEMLEDEAGGGGAGPGGACKAEPRPVAASGGGPGGDEEEDEEEEEEDEEALLEDEDEEPPPAQALGQAAQPPPEPPEAAAMEAAAEPDASEKPAEATAGSGGVNGGEEQGLGKREEDEPEERSGAVTRRRDPRCRVTRPPRNREMTRIVKSQNQQAQMVSGGG

SEQ ID NO: 813937 - protein, 48 aa, Homo sapiens
MDEVTYGELEKEEAQPIVTKYKEEARKLLPPSEKRTNRRNNRNKRNRQ

SEQ ID NO: 813938 - protein, 695 aa, Homo sapiens
MASKVTDAIVWYQKKIGAYDQQIWEKSVEQREIKGLRNKPKKTAHVKPDLIDVDLVRGSAFAKAKPESPWTSLTRKGIVRVVFFPFFFRWWLQVTSKVIFFWLLVLYLLQVAAIVLFCSTSSPHSIPLTEVIGPIWLMLLLGTVHCQIVSTRTPKPPLSTGGKRRRKLRKAAHLEVHREGDGSSTTDNTQEGAVQNHGTSTSHSVGTVFRDLWHAAFFLSGSKKAKNSIDKSTETDNGYVSLDGKKTVKSGEDGIQNHEPQCETIRPEETAWNTGTLRNGPSKDTQRTITNVSDEVSSEEGPETGYSLRRHVDRTSEGVLRNRKSHHYKKHYPNEDAPKSGTSCSSRCSSSRQDSESARPESETEDVLWEDLLHCAECHSSCTSETDVENHQINPCVKKEYRDDPFHQSHLPWLHSSHPGLEKISAIVWEGNDCKKADMSVLEISGMIMNRVNSHIPGIGYQIFGNAVSLILGLTPFVFRLSQATDLEQLTAHSASELYVIAFGSNEDVIVLSMVIISFVVRVSLVWIFFFLLCVAERTYKQRLLFAKLFGHLTSARRARKSEVPHFRLKKVQNIKMWLSLRSYLKRRGPQRSVDVIVSSAFLLTISVVFICCAQINLYLKMEKKPNKKEELTLVNNVLKLATKLLKELDSPFRLYGLTMNPLLYNITQVVILSAVSGVISDLLGFNLKLWKIKS

SEQ ID NO: 813939 - protein, 677 aa, Homo sapiens
MASKVTDAIVWYQKKIGAYDQQIWEKSVEQREIKGLRNKPKKTAHVKPDLIDVDLVRGSAFAKAKPESPWTSLTRKGIVRVVFFPFFFRWWLQVTSKVIFFWLLVLYLLQVAAIVLFCSTSSPHSIPLTEVIGPIWLMLLLGTVHCQIVSTRTPKPPLSTGGKRRRKLRKAAHLEVHREGDGSSTTDNTQEGAVQNHGTSTSHSVGTVFRDLWHAAFFLSGSKKAKNSIDKSTETDNGYVSLDGKKTVKSGEDGIQNHEPQCETIRPEETAWNTGTLRNGPSKDTQRTITNVSDEVSSEEGPETGYSLRRHVDRTSEGVLRNRKSHHYKKHYPNEDAPKSGTSCSSRCSSSRQDSESARPESETEDVLWEDLLHCAECHSSCTSETDVENHQINPCVKKEYRDDPFHQSHLPWLHSSHPGLEKISAIVWEGNDCKKADMSVLEISGMIMNRVNSHIPGIGYQIFGNAVSLILGLTPFVFRLSQATDLEQLTAHSASELYVIAFGSNEDVIVLSMVIISFVVRVSLVWIFFFLLCVAERTYKQRLLFAKLFGHLTSARRARKSEVPHFRLKKVQNIKMWLSLRSYLKRRGPQRSVDVIVSSAFLLTISVVFICCAQLLHVHEIFLDCHYNWELVIWCISLTLFLLRFVTLGSETSKKYSNTSILLTEHKPLLENGEKT

SEQ ID NO: 813940 - protein, 633 aa, Homo sapiens
MASKVTDAIVWYQKKIGAYDQQIWEKSVEQREIKGLRNKPKKTAHVKPDLIDVDLVRGSAFAKAKPESPWTSLTRKGIVRVVFFPFFFRWWLQVTSKVIFFWLLVLYLLQVAAIVLFCSTSSPHSIPLTEVIGPIWLMLLLGTVHCQIVSTRTPKPPLSTGGKRRRKLRKAAHLEVHREGDGSSTTDNTQEGAVQNHGTSTSHSVGTVFRDLWHAAFFLSGSKKAKNSIDKSTETDNGYVSLDGKKTVKSGEDGIQNHEPQCETIRPEETAWNTGTLRNGPSKDTQRTITNVSDEVSSEEGPETGYSLRRHVDRTSEGVLRNRKSHHYKKHYPNEDAPKSGTSCSSRCSSSRQDSESARPESETEDVLWEDLLHCAECHSSCTSETDVENHQINPCVKKEYRDDPFHQSHLPWLHSSHPGLEKISAIVWEGNDCKKADMSVLEISGMIMNRVNSHIPGIGYQIFGNAVSLILGLTPFVFRLSQATDLEQLTAHSASELYVIAFGSNEDVIVLSMVIISFVVRVSLVWIFFFLLCVAERTYKQRRGPQRSVDVIVSSAFLLTISVVFICCAQLLHVHEIFLDCHYNWELVIWCISLTLFLLRFVTLGSETSKKYSNTSILLTEHKPLLENGEKT

SEQ ID NO: 813941 - protein, 677 aa, Homo sapiens; identical to SEQ ID NO: 813939

SEQ ID NO: 813942 - protein, 540 aa, Homo sapiens
MLLLGTVHCQIVSTRTPKPPLSTGGKRRRKLRKAAHLEVHREGDGSSTTDNTQEGAVQNHGTSTSHSVGTVFRDLWHAAFFLSGSKKAKNSIDKSTETDNGYVSLDGKKTVKSGEDGIQNHEPQCETIRPEETAWNTGTLRNGPSKDTQRTITNVSDEVSSEEGPETGYSLRRHVDRTSEGVLRNRKSHHYKKHYPNEDAPKSGTSCSSRCSSSRQDSESARPESETEDVLWEDLLHCAECHSSCTSETDVENHQINPCVKKEYRDDPFHQSHLPWLHSSHPGLEKISAIVWEGNDCKKADMSVLEISGMIMNRVNSHIPGIGYQIFGNAVSLILGLTPFVFRLSQATDLEQLTAHSASELYVIAFGSNEDVIVLSMVIISFVVRVSLVWIFFFLLCVAERTYKQRLLFAKLFGHLTSARRARKSEVPHFRLKKVQNIKMWLSLRSYLKRRGPQRSVDVIVSSAFLLTISVVFICCAQLLHVHEIFLDCHYNWELVIWCISLTLFLLRFVTLGSETSKKYSNTSILLTEHKPLLENGEKT

SEQ ID NO: 813943 - protein, 677 aa, Homo sapiens; identical to SEQ ID NO: 813939

SEQ ID NO: 813944 - protein, 546 aa, Homo sapiens
MASKVTDAIVWYQKKIGAYDQQIWEKSVEQREIKGLRNKPKKTAHVKPDLIDVDLVRGSAFAKAKPESPWTSLTRKGIVRVVFFPFFFRWWLQVTSKVIFFWLLVLYLLQVAAIVLFCSTSSPHSIPLTEVIGPIWLMLLLGTVHCQIVSTRTPKPPLSTGGKRRRKLRKAAHLEVHREGDGSSTTDNTQEGAVQNHGTSTSHSVGTVFRDLWHAAFFLSGSKKAKNSIDKSTETDNGYVSLDGKKTVKSGEDGIQNHEPQCETIRPEETAWNTGTLRNGPSKDTQRTITNVSDEVSSEEGPETGYSLRRHVDRTSEGVLRNRKSHHYKKHYPNEDAPKSGTSCSSRCSSSRQDSESARPESETEDVLWEDLLHCAECHSSCTSETDVENHQINPCVKKEYRDDPFHQSHLPWLHSSHPGLEKISAIVWEGNDCKKADMSVLEISGMIMNRVNSHIPGIGYQIFGNAVSLILGLTPFVFRLSQATDLEQLTAHSASELYVIAFGSNEDVIVLSMVIISFVVRVSLVWIFFFLLCVAERTYKQVGIM

SEQ ID NO: 813945 - protein, 454 aa, Homo sapiens
MASKVTDAIVWYQKKIGAYDQQIWEKSVEQREIKGLRNKPKKTAHVKPDLIDVDLVRGSAFAKAKPESPWTSLTRKGIVRVVFFPFFFRWWLQVTSKVIFFWLLVLYLLQVAAIVLFCSTSSPHSIPLTEVIGPIWLMLLLGTVHCQIVSTRTPKPPLSTGGKRRRKLRKAAHLEVHREGDGSSTTDNTQEGAVQNHGTSTSHSVGTVFRDLWHAAFFLSGSKKAKNSIDKSTETDNGYVSLDGKKTVKSGEDGIQNHEPQCETIRPEETAWNTGTLRNGPSKDTQRTITNVSDEVSSEEGPETGYSLRRHVDRTSEGVLRNRKSHHYKKHYPNEDAPKSGTSCSSRCSSSRQDSESARPESETEDVLWEDLLHCAECHSSCTSETDVENHQINPCVKKEYRDDPFHQSHLPWLHSSHPGLEKISAIVWEGNDCKKADMSVLEISGMIMNRVSF

SEQ ID NO: 813946 - protein, 352 aa, Homo sapiens
MASKVTDAIVWYQKKIGAYDQQIWEKSVEQREIKGLRNKPKKTAHVKPDLIDVDLVRGSAFAKAKPESPWTSLTRKGIVRVVFFPFFFRWWLQVTSKVIFFWLLVLYLLQVAAIVLFCSTSSPHSIPLTEVIGPIWLMLLLGTVHCQIVSTRTPKPPLSTGGKRRRKLRKAAHLEVHREGDGSSTTDNTQEGAVQNHGTSTSHSVGTVFRDLWHAAFFLSGSKKAKNSIDKSTETDNGYVSLDGKKTVKSGEDGIQNHEPQCETIRPEETAWNTGTLRNGPSKDTQRTITNVSDEVSSEEGPETGYSLRRHVDRTSEGVLRNRKSHHYKKHYPNEVYTLSLSVYIRIYFICY

SEQ ID NO: 813947 - protein, 205 aa, Homo sapiens
MSIMSYNGGAVMAMKGKNCVAIAADRRFGIQAQMVTTDFQKIFPMGDRLYIGLAGLATDVQTVAQRLKFRLNLYELKEGRQIKPYTLMSMVANLLYEKRFGPYYTEPVIAGLDPKTFKPFICSLDLIGCPMVTDDFVVSGTCAEQMYGMCESLWEPNMDPDHLFETISQAMLNAVDRDAVSGMGVIVHIIEKDKITTRTLKARMD

SEQ ID NO: 813948 - protein, 66 aa, Homo sapiens
IYLSLILIRDYYFLRKRLHDPDHLFETISQAMLNAVDRDAVSGMGVIVHIIEKDKITTRTLKARMD

SEQ ID NO: 813949 - protein, 66 aa, Homo sapiens
VGGEVCYYASSKKTFRTTTDPDHLFETISQAMLNAVDRDAVSGMGVIVHIIEKDKITTRTLKARMD

SEQ ID NO: 813950 - protein, 156 aa, Homo sapiens
  misc_feature (15)..(15): Xaa can be any naturally occurring amino acid
MAVKRGASVAMLLAXCGASPHTGTVRVSTLTSVTAHHWIGGGTTSLYEKRFGPYYTEPVIAGLDPKTFKPFICSLDLIGCPMVTDDFVVSGTCAEQMYGMCESLWEPNMDPDHLFETISQAMLNAVDRDAVSGMGVIVHIIEKDKITTRTLKARMD

SEQ ID NO: 813951 - protein, 98 aa, Homo sapiens
CYLHKQNATSTDRRFGIQAQMVTTDFQKIFPMGDRLYIGLAGLATDVQTVAQRLKFRLNLYELKEGRQIKPYTLMSMVANLLYEKRIRITCLWSTISP

SEQ ID NO: 813952 - protein, 205 aa, Homo sapiens; identical to SEQ ID NO: 813947

SEQ ID NO: 813953 - protein, 205 aa, Homo sapiens; identical to SEQ ID NO: 813947

SEQ ID NO: 813954 - protein, 205 aa, Homo sapiens; identical to SEQ ID NO: 813947

SEQ ID NO: 813955 - protein, 205 aa, Homo sapiens; identical to SEQ ID NO: 813947

SEQ ID NO: 813956 - protein, 112 aa, Homo sapiens
MSIMSYNGGAVMAMKGKNCVAIAADRRFGIQAQMVTTDFQKIFPMGDRLYIGLAGLATDVQTVAQRLKFRLNLYELKEGRQIKPYTLMSMVANLLYEKRIRITCLKPSPKPC

SEQ ID NO: 813957 - protein, 123 aa, Homo sapiens
SREWLSVVRANLLYEKRFGPYYTEPVIAGLDPKTFKPFICSLDLIGCPMVTDDFVVSGTCAEQMYGMCESLWEPNMDPDHLFETISQAMLNAVDRDAVSGMGVIVHIIEKDKITTRTLKARMD

SEQ ID NO: 813958 - protein, 158 aa, Homo sapiens
MSHGKGTDMLPEIAAAVGFLSSLLRTRGCVSEQRLKVFSGALQEALTEHYKHHWFPEKPSKGSGYRCIRINHKMDPIISRVASQIGLSQPQLHQLLPSELTLWVDPYEVSYRIGEDGSICVLYEEAPLAASCGLLTCKNQVLLGRSSPSKNYVMAVSS

SEQ ID NO: 813959 - protein, 158 aa, Homo sapiens; identical to SEQ ID NO: 813958

SEQ ID NO: 813960 - protein, 158 aa, Homo sapiens; identical to SEQ ID NO: 813958

SEQ ID NO: 813961 - protein, 158 aa, Homo sapiens; identical to SEQ ID NO: 813958

SEQ ID NO: 813962 - protein, 158 aa, Homo sapiens; identical to SEQ ID NO: 813958

SEQ ID NO: 813963 - protein, 158 aa, Homo sapiens; identical to SEQ ID NO: 813958

SEQ ID NO: 813964 - protein, 164 aa, Homo sapiens
GGVHRGKIEQFRNPGKGTVVGWRKVESYTGKKLPSFNFSVTLMRGPQKTSSFPNRITLRRTGLGHLARMATLLLLPLSEESSPHFLYPQVLLPTASPLSWISKLLNFDSKVLFTKHSPYPFLPALPPFQLSTFCIAFPDLLPVFIALKFTLGPQTQELIFWFVG

SEQ ID NO: 813965 - protein, 138 aa, Homo sapiens
  misc_feature (6)..(6): Xaa can be any naturally occurring amino acid
  misc_feature (12)..(12): Xaa can be any naturally occurring amino acid
  misc_feature (20)..(20): Xaa can be any naturally occurring amino acid
ITPKLXATHTHXAALAKQRXCAEFPSILTPITSSSLLLWVARMATLLLLPLSEESSPHFLYPQVLLPTASPLSWISKLLNFDSKVLFTKHSPYPFLPALPPFQLSTFCIAFPDLLPVFIALKFTLGPQTQELIFWFVG

SEQ ID NO: 813966 - protein, 91 aa, Homo sapiens
DSRSPDVARQSRLARQSTSPTASPLSWISKLLNFDSKVLFTKHSPYPFLPALPPFQLSTFCIAFPDLLPVFIALKFTLGPQTQELIFWFVG

SEQ ID NO: 813967 - protein, 158 aa, Homo sapiens; identical to SEQ ID NO: 813958

SEQ ID NO: 813968 - protein, 158 aa, Homo sapiens; identical to SEQ ID NO: 813958

SEQ ID NO: 813969 - protein, 396 aa, Homo sapiens
MWIPVVGLPRRLRLSALAGAGRFCILGSEAATRKHLPARNHCGLSDSSPQLWPEPDFRNPPRKASKASLDFKRYVTDRRLAETLAQIYLGKPSRPPHLLLECNPGPGILTQALLEAGAKVVALESDKTFIPHLESLGKNLDGKLRVIHCDFFKLDPRSGGVIKPPAMSSRGLFKNLGIEAVPWTADIPLKVVGMFPSRGEKRALWKLAYDLYSCTSIYKFGRIEVNMFIGEKEFQKLMADPGNPDLYHVLSVIWQLACEIKVLHMEPWSSFDIYTRKGPLENPKRRELLDQLQQKLYLIQMIPRQNLFTKNLTPMNYNIFFHLLKHCFGRRSATVIDHLRSLTPLDARDILMQIGKQEDEKVVNMHPQDFKTLFETIERSKDCAYKWLYDETLEDR

SEQ ID NO: 813970 - protein, 396 aa, Homo sapiens; identical to SEQ ID NO: 813969

SEQ ID NO: 813971 - protein, 422 aa, Homo sapiens
MWIPVVGLPRRLRLSALAGAGRFCILGSEAATRKHLPARNHCGLSDSSPQLWPEPDFRNPPRKASKASLDFKRYVTDRRLAETLAQIYLGKPSRPPHLLLECNPGPGILTQALLEAGAKVVALESDKTFIPHLEGLTPIAQAGVQCCSHSSLQSQLPRLQSLGKNLDGKLRVIHCDFFKLDPRSGGVIKPPAMSSRGLFKNLGIEAVPWTADIPLKVVGMFPSRGEKRALWKLAYDLYSCTSIYKFGRIEVNMFIGEKEFQKLMADPGNPDLYHVLSVIWQLACEIKVLHMEPWSSFDIYTRKGPLENPKRRELLDQLQQKLYLIQMIPRQNLFTKNLTPMNYNIFFHLLKHCFGRRSATVIDHLRSLTPLDARDILMQIGKQEDEKVVNMHPQDFKTLFETIERSKDCAYKWLYDETLEDR

SEQ ID NO: 813972 - protein, 203 aa, Homo sapiens
MFPSRGEKRALWKLAYDLYSCTSIYKFGRIEVNMFIGEKEFQKLMADPGNPDLYHVLSVIWQLACEIKVLHMEPWSSFDIYTRKGPLENPKRRELLDQLQQKLYLIQMIPRQNLFTKNLTPMNYNIFFHLLKHCFGRRSATVIDHLRSLTPLDARDILMQIGKQEDEKVVNMHPQDFKTLFETIERSKDCAYKWLYDETLEDR

SEQ ID NO: 813973 - protein, 295 aa, Homo sapiens
MWIPVVGLPRRLRLSALAGAGRFCILGSEAATRKHLPARNHCGLSDSSPQLWPEPDFRNPPRKASKASLDFKRYVTDRRLAETLAQIYLGKPSRPPHLLLECNPGPGILTQALLEAGAKVVALESDKTFIPHLEKLMADPGNPDLYHVLSVIWQLACEIKVLHMEPWSSFDIYTRKGPLENPKRRELLDQLQQKLYLIQMIPRQNLFTKNLTPMNYNIFFHLLKHCFGRRSATVIDHLRSLTPLDARDILMQIGKQEDEKVVNMHPQDFKTLFETIERSKDCAYKWLYDETLEDR

SEQ ID NO: 813974 - protein, 396 aa, Homo sapiens; identical to SEQ ID NO: 813969

SEQ ID NO: 813975 - protein, 238 aa, Homo sapiens
MWIPVVGLPRRLRLSALAGAGRFCILGSEAATRKHLPARNHCGLSDSSPQLWPEPDFRNPPRKASKASLDFKRYVTDRRLAETLAQIYLGKPSRPPHLLLECNPGPGILTQALLEAGAKVVALESDKTFIPHLESLGKNLDGKLRVIHCDFFKLDPRSGGVIKPPAMSSRGLFKNLGIEAVPWTADIPLKVVGMFPSRGEKRALWKLAYDLYSCTSIYKFGRIEVNMFIGEKEFQVCY

SEQ ID NO: 813976 - protein, 186 aa, Homo sapiens
MVRPKKVCFSESSLPTGDRTRRSYYLNEIQSFAGAEKDARVVGEIAFQLDRRILAYVFPGVTRLYGFTVANIPEKIEQTSTKSLDGSVDERKLRELTQRYLALSARLEKLGYSRDVHPAFSEFLINTYGILKQRPDLRANPLHSSPAALRKLVIDVVPPKFLGDSLLLLNCLCELSKEDGKPLFAW

SEQ ID NO: 813977 - protein, 444 aa, Homo sapiens
MREIVHIQAGQCGNQIGAKFWEVISDEHGIDPTGTYHGDSDLQLDRISVYYNEATGGKYVPRAILVDLEPGTMDSVRSGPFGQIFRPDNFVFGQSGAGNNWAKGHYTEGAELVDSVLDVVRKEAESCDCLQGFQLTHSLGGGTGSGMGTLLISKIREEYPDRIMNTFSVVPSPKVSDTVVEPYNATLSVHQLVENTDETYCIDNEALYDICFRTLKLTTPTYGDLNHLVSATMSGVTTCLRFPGQLNADLRKLAVNMVPFPRLHFFMPGFAPLTSRGSQQYRALTVPELTQQVFDAKNMMAACDPRHGRYLTVAAVFRGRMSMKEVDEQMLNVQNKNSSYFVEWIPNNVKTAVCDIPPRGLKMAVTFIGNSTAIQELFKRISEQFTAMFRRKAFLHWYTGEGMDEMEFTEAESNMNDLVSEYQQYQDATAEEEEDFGEEAEEEA

SEQ ID NO: 813978 - protein, 127 aa, Homo sapiens
MSPSEGPEPPTPIHALRPQTSTKSLDGSVDERKLRELTQRYLALSARLEKLGYSRDVHPAFSEFLINTYGILKQRPDLRANPLHSSPAALRKLVIDVVPPKFLGDSLLLLNCLCELSKEDGKPLFAW

SEQ ID NO: 813979 - protein, 111 aa, Homo sapiens
MGWGRPQLRAGRSSAVRNNWCLRHGRSWSEGWTCTAGPFSSGSEVSRWPPAQPSGPPSAPKHVGAIVGLPQAGLPTLGWSPPQDWSPPPGWSPPQGWSPPPGWSPHQAGLL

SEQ ID NO: 813980 - protein, 212 aa, Homo sapiens [sequence omitted]

SEQ ID NO: 813981 - protein, 185 aa, Homo sapiens
MVLFKRDRREDTQQGHHSMNGRCTDHFLFVLSSLLSPAAILVRLVPARERCPQVKGYSGTWEKAPGRFPCGPAQHGSRVGTLLCRQRSLYSSGFLKALPCLCQACAASHPTAAWERPATLPVHTSLSTHSLSTHSLSTTAAGPSAYGHPIQAAAPPLFGMVICVFSLGAYVCGLGTSAGMHLGPS

SEQ ID NO: 813982 - protein, 136 aa, Homo sapiens
MSLSPGSPWFVRVPRDQSPWTLLGDLEALKKETIVLKEGSEYRVKIHFKVNRDIVSGLKYVQHTYRTGVKVDKATFMVGSYGPRPEEYEFLTPVEEAPKGMLARGTYHNKSFFTDDDKQDHLSWEWNLSIKKEWTE

SEQ ID NO: 813983 - protein, 136 aa, Homo sapiens; identical to SEQ ID NO: 813982

SEQ ID NO: 813984 - protein, 108 aa, Homo sapiens
MTEKAPEPHVEEDDDDELDSKLNYKPPPQKSLKELQEMDKDDESLIKYKKTLLGDGPVVTDPKAPNVVVTRLTLVCESAPGPITMDLTGDLEALIKGNRDIASALKYV

SEQ ID NO: 813985 - protein, 105 aa, Homo sapiens
MTEKAPEPHVEEDDDDELDSKLNYKPPPQKSLKELQEMDKDDESLIKYKKTLLGDGPVVTDPKAPNVVVTRLTLVCESAPGPITMDLTGRSGSPQKGNHCVKGRF

SEQ ID NO: 813986 - protein, 136 aa, Homo sapiens; identical to SEQ ID NO: 813982

SEQ ID NO: 813987 - protein, 136 aa, Homo sapiens; identical to SEQ ID NO: 813982

SEQ ID NO: 813988 - protein, 136 aa, Homo sapiens; identical to SEQ ID NO: 813982

SEQ ID NO: 813989 - protein, 136 aa, Homo sapiens; identical to SEQ ID NO: 813982

SEQ ID NO: 813990 - protein, 136 aa, Homo sapiens; identical to SEQ ID NO: 813982

SEQ ID NO: 813991 - protein, 136 aa, Homo sapiens; identical to SEQ ID NO: 813982

SEQ ID NO: 813992 - protein, 136 aa, Homo sapiens; identical to SEQ ID NO: 813982

SEQ ID NO: 813993 - protein, 136 aa, Homo sapiens; identical to SEQ ID NO: 813982

SEQ ID NO: 813994 - protein, 105 aa, Homo sapiens; identical to SEQ ID NO: 813985

SEQ ID NO: 813995 - protein, 105 aa, Homo sapiens; identical to SEQ ID NO: 813985

SEQ ID NO: 813996 - protein, 136 aa, Homo sapiens; identical to SEQ ID NO: 813982

SEQ ID NO: 813997 - protein, 105 aa, Homo sapiens; identical to SEQ ID NO: 813985

SEQ ID NO: 813998 - protein, 136 aa, Homo sapiens; identical to SEQ ID NO: 813982

SEQ ID NO: 813999 - protein, 136 aa, Homo sapiens; identical to SEQ ID NO: 813982

SEQ ID NO: 814000 - protein, 136 aa, Homo sapiens; identical to SEQ ID NO: 813982

SEQ ID NO: 814001 - protein, 136 aa, Homo sapiens; identical to SEQ ID NO: 813982

SEQ ID NO: 814002 - protein, 105 aa, Homo sapiens; identical to SEQ ID NO: 813985

SEQ ID NO: 814003 - protein, 136 aa, Homo sapiens; identical to SEQ ID NO: 813982

SEQ ID NO: 814004 - protein, 136 aa, Homo sapiens; identical to SEQ ID NO: 813982

SEQ ID NO: 814005 - protein, 105 aa, Homo sapiens; identical to SEQ ID NO: 813985

SEQ ID NO: 814006 - protein, 126 aa, Homo sapiens
MDLGLRSMSSSLQLRRLPRACWREARTTTSPSSPTMTSKTTSAGSGTCRLRRSGQNECIHPFPHPCHLERILSGVFSTLSLLPVHSWVPLQHCPHFLIDASFPTLSLNVVPRTRGLKPGFHPTCSL

SEQ ID NO: 814007 - protein, 105 aa, Homo sapiens; identical to SEQ ID NO: 813985

SEQ ID NO: 814008 - protein, 89 aa, Homo sapiens
IEGNNLIEEKHTLQTGESGLQPTVDKATFMVGSYGPRPEEYEFLTPVEEAPKGMLARGTYHNKSFFTDDDKQDHLSWEWNLSIKKEWTE

SEQ ID NO: 814009 - protein, 105 aa, Homo sapiens; identical to SEQ ID NO: 813985

SEQ ID NO: 814010 - protein, 105 aa, Homo sapiens; identical to SEQ ID NO: 813985

SEQ ID NO: 814011 - protein, 66 aa, Homo sapiens
ESKQCQSPNSARVQTVPESKQCQQSKQCQSPNSPHFLIDASFPTLSLNVVPRTRGLKPGFHPTCSL

SEQ ID NO: 814012 - protein, 112 aa, Homo sapiens
MTEKAPEPHVEEDDDDELDSKLNYKPPPQKSLKELQEMDKDDESLIKYKKTLLGDGPVVTDPKAPNVVVTRLTLVCESAPGPITMDLTGDLGPQAMVDPFVAFALGHPDDVD

SEQ ID NO: 814013 - protein, 105 aa, Homo sapiens; identical to SEQ ID NO: 813985

SEQ ID NO: 814014 - protein, 770 aa, Homo sapiens
ALWMCIVLNPHCKLEQKASWLKQLKKWNSVDVCPWEDGNHGSELPNLTNALPQGANANQDSSNRPHRTVFTRAIEACDLHWQDSHLQHIISSDLYTNYCYHDDTENSLFDSRGWPLWHEHVPTACARVDALRSHGYPREALRLAIAIVNTLRRQQQKQLEMFRTQKKELPHKNITSITNLEGWVGHPLDPVGTLFSSLMEACRIDDENLSGFSDFTENMGQCKSLEYQHLPAHKFLEEGESYLTLAVEVALIGLGQQRIMPDGLYTQEKVCRNEEQLISKLQEIELDDTLVKIFRKQAVFLLEAGPYSGLGEIIHRESVPMHTFAKYLFTSLLPHDAELAYKIALRAMRLLVLESTAPSGDLTRPHHIASVVPNRYPRWFTLSHIESQQCELASTMLTAAKGDVRRLETVLESIQKNIHSSSHIFKLAQDAFKIATLMDSLPDITLLKVSLELGLQVMRMTLSTLNWRRREMVRWLVTCATEVGVYALDSIMQTWFTLFTPTEATSIVATTVMSNSTIVRLHLDCHQQEKLASSARTLALQCAMKDPQNCALSALTLCEKDHIAFETAYQIVLDAATTGMSYTQLFTIARYMEHRGYPMRAYKLATLAMTHLNLSYNQDTHPAINDVLWACALSHSLGKNELAAIIPLVVKSVKCATVLSDILRRCTLTTPGMVGLHGRRNSGKLMSLDKAPLRQLLDATIGAYINTTHSRLTHISPRHYSEFIEFLSKARETFLMAHDGHIQFTQFIDNLKQIYKGKKKLMMLVRERFG

SEQ ID NO: 814015 - protein, 770 aa, Homo sapiens; identical to SEQ ID NO: 814014

SEQ ID NO: 814016 - protein, 770 aa, Homo sapiens; identical to SEQ ID NO: 814014

SEQ ID NO: 814017 - protein, 770 aa, Homo sapiens
RAAAASPLRMSRKGPRAEVCADCSAPDPGWASISRGVLVCDECCSVHRSLGRHISIVKHLRHSAWPPTLLQMVHTLASNGANSIWEHSLLDPAQVQSGRRKANPQDKVHPIKSEFIRAKYQMLAFVHKLPCRDDDGVTAKDLSKQLHSSVRTGNLETCLRLLSLGAQANFFHPEKGTTPLHVAAKAGQTLQAELLVVYGADPGSPDVNGRTPIDYARQAGHHELAERLVECQYELTDRLAFYLCGRKPDHKNGHYIIPQMADSLDLSELAKAAKKKLQALSNRLFEELAMDVYDEVDRRENDAVWLATQNHSTLVTERSAVPFLPVNPEYSATRNQGRQKLARFNAREFATLIIDILSEAKRRQQGKSLSSPTDNLELSLRSQSDLDDQHDYDSVASDEDTDQEPLRSTGATRSNRARSMDSSDLSDGAVTLQEYLELKKALATSEAKVQQLMKVNSSLSDELRRLQREIHKLQAENLQLRQPPGPVPTPPLPSERAEHTPMAPGGSTHRRDRQAFSMYEPGSALKPFGGPPGDELTTRLQPFHSTELEDDAIYSVHVPAGLYRIRKGVSASAVPFTPSSPLLSCSQEGSRHTSKLSRHGSGADSDYENTQSGDPLLGLEGKRFLELGKEEDFHPELESLDGDLDPGLPSTEDVILKTEQVTKNIQELLRAAQEFKHDSFVPCSEKIHLAVTEMASLFPKRPALEPVRSSLRLLNASAYRLQSECRKTVPPEPGAPVDFQLLTQQVIQCAYDIAKAAKQLVTITTREKKQ

SEQ ID NO: 814018 - protein, 206 aa, Homo sapiens
SGEEGVKGTAEADTTFPLLSCSQEGSRHTSKLSRHGSGADSDYENTQSGDPLLGLEGKRFLELGKEEDFHPELESLDGDLDPGLPSTEDVILKTEQVTKNIQELLRAAQEFKHDSFVPCSEKIHLAVTEMASLFPKRPALEPVRSSLRLLNASAYRLQSECRKTVPPEPGAPVDFQLLTQQVIQCAYDIAKAAKQLVTITTREKKQ

SEQ ID NO: 814019 - protein, 63 aa, Homo sapiens
MSTKNTVNQDNRWRKKAQHWAQMNGYQYAVGSETTGAATRGKRMEEQLAKRLRKRRNEDNNED

SEQ ID NO: 814020 - protein, 511 aa, Homo sapiens [sequence omitted]

SEQ ID NO: 814021 - protein, 779 aa, Homo sapiens
RAAAASPLRMSRKGPRAEVCADCSAPDPGWASISRGVLVCDECCSVHRSLGRHISIVKHLRHSAWPPTLLQMVHTLASNGANSIWEHSLLDPAQVQSGRRKANPQDKVHPIKSEFIRAKYQMLAFVHKLPCRDDDGVTAKDLSKQLHSSVRTGNLETCLRLLSLGAQANFFHPEKGTTPLHVAAKAGQTLQAELLVVYGADPGSPDVNGRTPIDYARQAGHHELAERLVECQYELTDRLAFYLCGRKPDHKNGHYIIPQMADRSRQKCMSQSLDLSELAKAAKKKLQALSNRLFEELAMDVYDEVDRRENDAVWLATQNHSTLVTERSAVPFLPVNPEYSATRNQGRQKLARFNAREFATLIIDILSEAKRRQQGKSLSSPTDNLELSLRSQSDLDDQHDYDSVASDEDTDQEPLRSTGATRSNRARSMDSSDLSDGAVTLQEYLELKKALATSEAKVQQLMKVNSSLSDELRRLQREIHKLQAENLQLRQPPGPVPTPPLPSERAEHTPMAPGGSTHRRDRQAFSMYEPGSALKPFGGPPGDELTTRLQPFHSTELEDDAIYSVHVPAGLYRIRKGVSASAVPFTPSSPLLSCSQEGSRHTSKLSRHGSGADSDYENTQSGDPLLGLEGKRFLELGKEEDFHPELESLDGDLDPGLPSTEDVILKTEQVTKNIQELLRAAQEFKHDSFVPCSEKIHLAVTEMASLFPKRPALEPVRSSLRLLNASAYRLQSECRKTVPPEPGAPVDFQLLTQQVIQCAYDIAKAAKQLVTITTREKKQ

SEQ ID NO: 814022 - protein, 754 aa, Homo sapiens
RAAAASPLRMSRKGPRAEVCADCSAPDPGWASISRGVLVCDECCSVHRSLGRHISIVKHLRHSAWPPTLLQMVHTLASNGANSIWEHSLLDPAQVQSGRRKANPQDKVHPIKSEFIRAKYQMLAFVHKLPCRDDDGVTAKDLSKQLHSSVRTGNLETCLRLLSLGAQANFFHPEKGTTPLHVAAKAGQTLQAELLVVYGADPGSPDVNGRTPIDYARQAGHHELAERLVECQYELTDRLAFYLCGRKPDHKNGHYIIPQMADSLDLSELAKAAKKKLQALSNRLFEELAMDVYDEVDRRENDAVWLATQNHSTLVTERSAVPFLPVNPEYSATRNQGRQKLARFNAREFATLIIDILNNLELSLRSQSDLDDQHDYDSVASDEDTDQEPLRSTGATRSNRARSMDSSDLSDGAVTLQEYLELKKALATSEAKVQQLMKVNSSLSDELRRLQREIHKLQAENLQLRQPPGPVPTPPLPSERAEHTPMAPGGSTHRRDRQAFSMYEPGSALKPFGGPPGDELTTRLQPFHSTELEDDAIYSVHVPAGLYRIRKGVSASAVPFTPSSPLLSCSQEGSRHTSKLSRHGSGADSDYENTQSGDPLLGLEGKRFLELGKEEDFHPELESLDGDLDPGLPSTEDVILKTEQVTKNIQELLRAAQEFKHDSFVPCSEKIHLAVTEMASLFPKRPALEPVRSSLRLLNASAYRLQSECRKTVPPEPGAPVDFQLLTQQVIQCAYDIAKAAKQLVTITTREKKQ

SEQ ID NO: 814023 - protein, 592 aa, Homo sapiens
MASTLVETKSEKRRKQKSTKRCCQCLSGVGPWLLPGVMKGRACSMQYGSRETFSHIFLTPAHPHPNLGVMEIFQQGSPPLLRYPGGEFGTRAKAAKKKLQALSNRLFEELAMDVYDEVDRRENDAVWLATQNHSTLVTERSAVPFLPVNPEYSATRNQGRQKLARFNAREFATLIIDILSEAKRRQQGKSLSSPTDNLELSLRSQSDLDDQHDYDSVASDEDTDQEPLRSTGATRSNRARSMDSSDLSDGAVTLQEYLELKKALATSEAKVQQLMKVNSSLSDELRRLQREIHKLQAENLQLRQPPGPVPTPPLPSERAEHTPMAPGGSTHRRDRQAFSMYEPGSALKPFGGPPGDELTTRLQPFHSTELEDDAIYSVHVPAGLYRIRKGVSASAVPFTPSSPLLSCSQEGSRHTSKLSRHGSGADSDYENTQSGDPLLGLEGKRFLELGKEEDFHPELESLDGDLDPGLPSTEDVILKTEQVTKNIQELLRAAQEFKHDSFVPCSEKIHLAVTEMASLFPKRPALEPVRSSLRLLNASAYRLQSECRKTVPPEPGAPVDFQLLTQQVIQCAYDIAKAAKQLVTITTREKKQ

SEQ ID NO: 814024 - protein, 488 aa, Homo sapiens
MASTLVETKSEKRRKQKSTKRCCQCLSGVGPWLLPGVMKGRACSMQYGSRETFSHIFLTPAHPHPNLGVMEIFQQGSPPLLRYPGGEFGTRDNLELSLRSQSDLDDQHDYDSVASDEDTDQEPLRSTGATRSNRARSMDSSDLSDGAVTLQEYLELKKALATSEAKVQQLMKVNSSLSDELRRLQREIHKLQAENLQLRQPPGPVPTPPLPSERAEHTPMAPGGSTHRRDRQAFSMYEPGSALKPFGGPPGDELTTRLQPFHSTELEDDAIYSVHVPAGLYRIRKGVSASAVPFTPSSPLLSCSQEGSRHTSKLSRHGSGADSDYENTQSGDPLLGLEGKRFLELGKEEDFHPELESLDGDLDPGLPSTEDVILKTEQVTKNIQELLRAAQEFKHDSFVPCSEKIHLAVTEMASLFPKRPALEPVRSSLRLLNASAYRLQSECRKTVPPEPGAPVDFQLLTQQVIQCAYDIAKAAKQLVTITTREKKQ

SEQ ID NO: 814025 - protein, 797 aa, Homo sapiens
RAAAASPLRMSRKGPRAEVCADCSAPDPGWASISRGVLVCDECCSVHRSLGRHISIVKHLRHSAWPPTLLQMVHTLASNGANSIWEHSLLDPAQVQSGRRKANPQDKVHPIKSEFIRAKYQMLAFVHKLPCRDDDGVTAKDLSKQLHSSVRTGNLETCLRLLSLGAQANFFHPEKGTTPLHVAAKAGQTLQAELLVVYGADPGSPDVNGRTPIDYARQAGHHELAERLVECQYELTDRLAFYLCGRKPDHKNGHYIIPQMADSLDLSELAKAAKKKLQALSNRLFEELAMDVYDEVDRRENDAVWLATQNHSTLVTERSAVPFLPVNPEYSATRNQGRQKLARFNAREFATLIIDILSEAKRRQQGKSLSSPTDNLELSLRSQSDLDDQHDYDSVASDEDTDQEPLRSTGATRSNRARSMDSSDLSDGAVTLQEYLELKKALATSEAKVQQLMKVNSSLSDELRRLQREIHKLQAENLQLRQPPGPVPTPPLPSERAEHTPMAPGGSTHRRDRQAFSMYEPGSALKPFGGPPGDELTTRLQPFHSTELEDDAIYSVHVPAGLYRIRKGVSASAVPFTPSSPLLSCSQEGSRHTSKLSRHGSGADSDYENTQSGDPLLGLEGKRFLELGKEEDFHPELESLDGDLDPGLPSTEDVILKTEQVTKNIQELLRAAQEFKHDRDVILKTEQVTKNIQELLRAAQEFKHDSFVPCSEKIHLAVTEMASLFPKRPALEPVRSSLRLLNASAYRLQSECRKTVPPEPGAPVDFQLLTQQVIQCAYDIAKAAKQLVTITTREKKQ

SEQ ID NO: 814026 - protein, 852 aa, Homo sapiens
RAAAASPLRMSRKGPRAEVCADCSAPDPGWASISRGVLVCDECCSVHRSLGRHISIVKHLRHSAWPPTLLQMVHTLASNGANSIWEHSLLDPAQVQSGRRKANPQDKVHPIKSEFIRAKYQMLAFVHKLPCRDDDGVTAKDLSKQLHSSVRTGNLETCLRLLSLGAQANFFHPEKGTTPLHVAAKAGQTLQAELLVVYGADPGSPDVNGRTPIDYARQAGHHELAERLVECQYELTDRLAFYLCGRKPDHKNGHYIIPQMADSLDLSELAKAAKKKLQALSNRLFEELAMDVYDEVDRRENDAVWLATQNHSTLVTERSAVPFLPVNPEYSATRNQGRQKLARFNAREFATLIIDILSEAKRRQQGKSLSSPTDNLELSLRSQSDLDDQHDYDSVASDEDTDQEPLRSTGATRSNRARSMDSSDLSDGAVTLQEYLELKKALATSEAKVQQLMKVNSSLSDELRRLQREIHKLQAENLQLRQPPGPVPTPPLPSERAEHTPMAPGGSTHRRDRQAFSMYEPGSALKPFGGPPGDELTTRLQPFHSTELEDDAIYSVHVPAGLYRIRKGVSASAVPFTPSSPLLSCSQEGSRHTSKLSRHGSGADSDYENTQSGDPLLGLEGKRFLELGKEEDFHPELESLDGDLDPGLPSTEDVILKTEQVTKNIQELLRAAQEFKHDRDVILKTEQVTKNIQELLRAAQEFKHDSFVPCSEKIHLAVTEMASLFPKVQGPKRGPGVGGPRAGAGVENPICIATWVETQTNWALISAGGLKSKVQPHSCPLQRPALEPVRSSLRLLNASAYRLQSECRKTVPPEPGAPVDFQLLTQQVIQCAYDIAKAAKQLVTITTREKKQ

SEQ ID NO: 814027 - protein, 206 aa, Homo sapiens; identical to SEQ ID NO: 814018

SEQ ID NO: 814028 - protein, 138 aa, Homo sapiens
  misc_feature (6)..(6): Xaa can be any naturally occurring amino acid
LDPGLXCSVFKMTSSVLEAQDVILKTEQVTKNIQELLRAAQEFKHDSFVPCSEKIHLAVTEMASLFPKRPALEPVRSSLRLLNASAYRLQSECRKTVPPEPGAPVDFQLLTQQVIQCAYDIAKAAKQLVTITTREKKQ

SEQ ID NO: 814029 - protein, 770 aa, Homo sapiens; identical to SEQ ID NO: 814017

SEQ ID NO: 814030 - protein, 770 aa, Homo sapiens; identical to SEQ ID NO: 814017

SEQ ID NO: 814031 - protein, 770 aa, Homo sapiens; identical to SEQ ID NO: 814017

SEQ ID NO: 814032 - protein, 770 aa, Homo sapiens; identical to SEQ ID NO: 814017

SEQ ID NO: 814033 - protein, 770 aa, Homo sapiens; identical to SEQ ID NO: 814017

SEQ ID NO: 814034 - protein, 770 aa, Homo sapiens; identical to SEQ ID NO: 814017

SEQ ID NO: 814035 - protein, 770 aa, Homo sapiens; identical to SEQ ID NO: 814017

SEQ ID NO: 814036 - protein, 184 aa, Homo sapiens
EVWARLRFNPRWRRRRRPWQGRMETLKDKTLQELEELQNDSEAIDQLALESPEVQDLQLEREMALATNRSLAERNLEFQGPLEISRSNLSDRYQELRKLVERCQEQKAKLEKFSSALQPGTLLDLLQVEGMKIEEESEVRGRGDTPLPWTGCQSLQQGPLEGEADVCKAWNKGAFVDGRGEGHL

SEQ ID NO: 814037 - protein, 377 aa, Homo sapiens
EVWARLRFNPRWRRRRRPWQGRMETLKDKTLQELEELQNDSEAIDQLALESPEVQDLQLEREMALATNRSLAERNLEFQGPLEISRSNLSDRYQELRKLVERCQEQKAKLEKFSSALQPGTLLDLLQVEGMKIEEESEAMAEKFLEGEVPLETFLENFSSMRMLSHLRRVRVEKLQEVVRKPRASQELAGDAPPARPPAPVRPVPQGTPPVVEEQPQPPSAMPPYPLPYSPSPSLPVGPTAHGALPPAPFPVVSQPSFYSGPLGPTYPAAQLGPRGAAGYSWSPQRSMPPRPGYPGTPMGASGPGYPLRGGRAPSPGYPQQSPYPATGGKPPYPIQPQLPSFPGQPQPSVPLQPPYPPGPAPPYGFPPPPGPAWPGY

SEQ ID NO: 814038 - protein, 377 aa, Homo sapiens; identical to SEQ ID NO: 814037

SEQ ID NO: 814039 - protein, 95 aa, Homo sapiens
GRERVCVARCRGNSEAREAGRPTGSRGEHARHWGAGRCKGVTSGRGRAWRTPEVWARLRFNPRWRRRRRPWQVSGDWGGSRLCRRRAGQRTTVGA

SEQ ID NO: 814040 - protein, 452 aa, Homo sapiens
MELALRRSPVPRWLLLLPLLLGLNAGAVIDWPTEEGKEVWDYVTVRKDAYMFWWLYYATNSCKNFSELPLVMWLQGGPGGSSTGFGNFEEIGPLDSDLKPRKTTWLQAASLLFVDNPVGTGFSYVNGSGAYAKDLAMVASDMMVLLKTFFSCHKEFQTVPFYIFSESYGGKMAAGIGLELYKAIQRGTIKCNFAGVALGDSWISPVDSVLSWGPYLYSMSLLEDKGLAEVSKVAEQVLNAVNKGLYREATELWGKAEMIIEQNTDGVNFYNILTKSTPTSTMESSLEFTQSHLVCLCQRHVRHLQRDALSQLMNGPIRKKLKIIPEDQSWGGQATNVFVNMEEDFMKPVISIVDELLEAGINVTVYNGQLDLIVDTMGQEAWVRKLKWPELPKFSQLKWKALYSDPKSLETSAFVKSYKNLAFYWILKAGHMVPSDQGDMALKMMRLVTQQE

SEQ ID NO: 814041 - protein, 452 aa, Homo sapiens; identical to SEQ ID NO: 814040

SEQ ID NO: 814042 - protein, 434 aa, Homo sapiens
MELALRRSPVPRWLLLLPLLLGLNAGAVIDWPTEEGKEVWDYVTVRKDAYMFWWLYYATNSCKNFSELPLVMWLQGGPGGSSTGFGNFEEIGPLDSDLKPRKTTWLQAASLLFVDNPVGTGFSYVNGSGAYAKDLAMVASDMMVLLKTFFSCHKEFQTVPFYIFSESYGGKMAAGIGLELYKAIQRGTIKCNFAGVALGDSWISPVDSVLSWGPYLYSMSLLEDKGLAEVSKVAEQVLNAVNKGLYREATELWGKAEMIIEQNTDGVNFYNILTKSTPTSTMESSLEFTQSHLVCLCQRHVRHLQRDALSQLMNGPIRKKLKMEEDFMKPVISIVDELLEAGINVTVYNGQLDLIVDTMGQEAWVRKLKWPELPKFSQLKWKALYSDPKSLETSAFVKSYKNLAFYWILKAGHMVPSDQGDMALKMMRLVTQQE

SEQ ID NO: 814043 - protein, 414 aa, Homo sapiens
MELALRRSPVPRWLLLLPLLLGLNAGAVIDWPTEEGKEVWDYVTVRKDAYMFWWLYYATNSCKNFSELPLVMWLQGGPGGSSTGFGNFEEIGPLDSDLKPRKTTWLQAASLLFVDNPVGTGFSYVNGSGAYAKDLAMVASDMMVLLKTFFSCHKEFQTVPFYIFSESYGGKMAAGIGLELYKAIQRGTIKCNFAGVALGDSWISPVDSVLSWGPYLYSMSLLEDKGLAEVSKVAEQVLNAVNKGLYREATELWGKAEMIIEQNTDGVNFYNILTKSTPTSTMESSLEFTQSHLGQATNVFVNMEEDFMKPVISIVDELLEAGINVTVYNGQLDLIVDTMGQEAWVRKLKWPELPKFSQLKWKALYSDPKSLETSAFVKSYKNLAFYWILKAGHMVPSDQGDMALKMMRLVTQQE

SEQ ID NO: 814044 - protein, 316 aa, Homo sapiens [sequence omitted]

SEQ ID NO: 814045 - protein, 360 aa, Homo sapiens
MELALRRSPVPRWLLLLPLLLGLNAGAVIDWPTEEGKEVWDYVTVRKDAYMFWWLYYATNSCKNFSELPLVMWLQGGPGGSSTGFGNFEEIGPLDSDLKPRKTTWLQAASLLFVDNPVGTGFSYVNGSGAYAKDLAMVASDMMVLLKTFFSCHKEFQTVPFYIFSESYGGKMAAGIGLELYKAIQRGTIKCNFAGVALGDSWISPVDSVLSWGPYLYSMSLLEDKGLAEVSKVAEQVLNAVNKGLYREATELWGKAEMIIEQNTDGVNFYNILTKSTPTSTMESSLEFTQSHLVCLCQRHVRHLQRDALSQLMNGPIRKKLKIIPEDQSWGGQATNVFVNMEEDFMKPVISIVDEAGWGD

SEQ ID NO: 814046 - protein, 472 aa, Homo sapiens
MELALRRSPVPRWLLLLPLLLGLNAGAVIDWPTEEGKEVWDYVTVRKDAYMFWWLYYATNSCKNFSELPLVMWLQGGPGGSSTGFGNFEEIGPLDSDLKPRKTTWLQAASLLFVDNPVGTGFSYVNGSGAYAKDLAMVASDMMVLLKTFFSCHKEFQTVPFYIFSESYGGKMAAGIGLELYKAIQRGTIKCNFAGVALGDSWISPVDSVLSWGPYLYSMQYQIDVPKLSGSFCSWFAFQSLLEDKGLAEVSKVAEQVLNAVNKGLYREATELWGKAEMIIEQNTDGVNFYNILTKSTPTSTMESSLEFTQSHLVCLCQRHVRHLQRDALSQLMNGPIRKKLKIIPEDQSWGGQATNVFVNMEEDFMKPVISIVDELLEAGINVTVYNGQLDLIVDTMGQEAWVRKLKWPELPKFSQLKWKALYSDPKSLETSAFVKSYKNLAFYWILKAGHMVPSDQGDMALKMMRLVTQQE

SEQ ID NO: 814047 - protein, 295 aa, Homo sapiens
MELALRRSPVPRWLLLLPLLLGLNAGAVIDWPTEEGKEVWDYVTVRKDAYMFWWLYYATNSCKNFSELPLVMWLQGGPGGSSTGFGNFEEIGPLDSDLKPRKTTWLQAASLLFVDNPVGTGFSYVNGSGAYAKDLAMVASDMMVLLKTFFSCHKEFQTVPFYIFSESYGGKMAAGIGLELYKAIQRGTIKCNFAGVALGDSWISPVDSVLSWGPYLYSMSLLEDKGLAEVSKVAEQVLNAVNKGLYREATELWGKAEMIIEQNTDGVNFYNILTKSTPTSTMESSLEFTQSHLGE

SEQ ID NO: 814048 - protein, 323 aa, Homo sapiens
MELALRRSPVPRWLLLLPLLLGLNAGAVIDWPTEEGKEVWDYVTVRKDAYMFWWLYYATNSCKNFSELPLVMWLQGGPGGSSTGFGNFEEIGPLDSDLKPRKTTWLQAASLLFVDNPVGTGFSYVNGSGAYAKDLAMVASDMMVLLKTFFSCHKEFQTVPFYIFSESYGGKMAAGIGLELYKAIQRGTIKCNFAGVALGDSWISPVDSVLSWGPYLYSMSLLEDKGLAEVSKVAEQVLNAVNKGLYREATELWGKAEMIIEQNTDGVNFYNILTKSTPTSTMESSLEFTQSHLAESETLPLAVQHPQQLGKDVLMARRGGSHL

SEQ ID NO: 814049 - protein, 176 aa, Homo sapiens
SSWPYFQPFDSLSTSLVFCLCQRHVRHLQRDALSQLMNGPIRKKLKIIPEDQSWGGQATNVFVNMEEDFMKPVISIVDELLEAGINVTVYNGQLDLIVDTMGQEAWVRKLKWPELPKFSQLKWKALYSDPKSLETSAFVKSYKNLAFYWILKAGHMVPSDQGDMALKMMRLVTQQE
